United States Patent Application Publication US 2025/0333808 A1 - sequence listing, part 3

SEQ ID NO: 27241 - DNA, 80 bp, synthetic construct
  misc_feature 1..80: note = Synthetic: >NC_001608.3-cand-17160-17239
  source 1..80: mol_type = other DNA
tcagaatcaagttcaaatgttaatcaatacctacaaacgtgatttacatgcttgttttgatagcaatcaattctgtcggt

SEQ ID NO: 27242 - DNA, 80 bp, synthetic construct
  misc_feature 1..80: note = Synthetic: >NC_001608.3-cand-17330-17409
  source 1..80: mol_type = other DNA
aaggaagtggtgctcggttacttttgaagtggaaggaaacggattatttattcttcaacactttggctacggattcacaa

SEQ ID NO: 27243 - DNA, 80 bp, synthetic construct
  misc_feature 1..80: note = Synthetic: >NC_001608.3-cand-17340-17419
  source 1..80: mol_type = other DNA
tgctcggttacttttgaagtggaaggaaacggattatttattcttcaacactttggctacggattcacaacaagaagccg

SEQ ID NO: 27244 - DNA, 80 bp, synthetic construct
  misc_feature 1..80: note = Synthetic: >NC_001608.3-cand-17420-17499
  source 1..80: mol_type = other DNA
agattttgagtggccgggtaataccgagaatgttgtataacatagacagattaagtgctttgcttgaatcaaggagacta

SEQ ID NO: 27245 - DNA, 80 bp, synthetic construct
  misc_feature 1..80: note = Synthetic: >NC_001608.3-cand-17500-17579
  source 1..80: mol_type = other DNA
atattgaacaacctaactatccaaattacagatattacaaatccattatggctagattctgtaatacaatatttacctga

SEQ ID NO: 27246 - DNA, 80 bp, synthetic construct
  misc_feature 1..80: note = Synthetic: >NC_001608.3-cand-17580-17659
  source 1..80: mol_type = other DNA
agatagtgacattcttacaatggacgcagagaccaccaaggatgaaacaagggaacagctttataaaactattgtgaata

SEQ ID NO: 27247 - DNA, 80 bp, synthetic construct
  misc_feature 1..80: note = Synthetic: >NC_001608.3-cand-17660-17739
  source 1..80: mol_type = other DNA
tttggacacgtacttctcctaatatcccaaaaattagcatcatcaaggtatttttattagactatgaagggactttattc

SEQ ID NO: 27248 - DNA, 80 bp, synthetic construct
  misc_feature 1..80: note = Synthetic: >NC_001608.3-cand-17740-17819
  source 1..80: mol_type = other DNA
ttaatgaagaatgctattcagtattatgggcaagttcaactcaagaaaccatatagctcaaatgcaaaaaactcagaatg

SEQ ID NO: 27249 - DNA, 80 bp, synthetic construct
  misc_feature 1..80: note = Synthetic: >NC_001608.3-cand-17820-17899
  source 1..80: mol_type = other DNA
gtacttgtgttgcggtaaacgaagaattcaacggctccaaattgatttctcagaccaggtgggaatttttctgatttgta

SEQ ID NO: 27250 - DNA, 80 bp, synthetic construct
  misc_feature 1..80: note = Synthetic: >NC_001608.3-cand-17900-17979
  source 1..80: mol_type = other DNA
aagcaatgtcacgccaaagacaagcaattccttactggttaaaacatatagaaaagaattatcctgcttcattacacgag

SEQ ID NO: 27251 - DNA, 80 bp, synthetic construct
  misc_feature 1..80: note = Synthetic: >NC_001608.3-cand-17980-18059
  source 1..80: mol_type = other DNA
tttttcctaactttgggtttcccttctttagagtcatctttctgccatcgttatactattccattcagtgaaggaaaggc

SEQ ID NO: 27252 - DNA, 80 bp, synthetic construct
  misc_feature 1..80: note = Synthetic: >NC_001608.3-cand-18060-18139
  source 1..80: mol_type = other DNA
tctttttcacaaggtccagtcttatgttcgtcaaggcaaacaacatttacattctcttatgttggattatgaaaacaatt

SEQ ID NO: 27253 - DNA, 80 bp, synthetic construct
  misc_feature 1..80: note = Synthetic: >NC_001608.3-cand-18100-18179
  source 1..80: mol_type = other DNA
caacatttacattctcttatgttggattatgaaaacaattcacctctactagacttgagaaatcactttatttgctcatt

SEQ ID NO: 27254 - DNA, 80 bp, synthetic construct
  misc_feature 1..80: note = Synthetic: >NC_001608.3-cand-18220-18299
  source 1..80: mol_type = other DNA
ttaaatctagtcatcaaggcagtagaaaaaggtaaaaattggtcacaacttgttgagatccttcctaatatgcattcagt

SEQ ID NO: 27255 - DNA, 80 bp, synthetic construct
  misc_feature 1..80: note = Synthetic: >NC_001608.3-cand-18300-18379
  source 1..80: mol_type = other DNA
atgcatagtgcacgtggatcatgagtgttctggatgcgagaaacggttattacttaaattggattttatcagaaatacaa

SEQ ID NO: 27256 - DNA, 80 bp, synthetic construct
  misc_feature 1..80: note = Synthetic: >NC_001608.3-cand-18380-18459
  source 1..80: mol_type = other DNA
agatcgcagaacaaaaattacttaacagagtaatcgggtatatcctattctttccattcggtctgtttaaatctggatca

SEQ ID NO: 27257 - DNA, 80 bp, synthetic construct
  misc_feature 1..80: note = Synthetic: >NC_001608.3-cand-18460-18539
  source 1..80: mol_type = other DNA
ttaagggcataatttcaacagagagaacttcatttaattcacaaaaacaatctatttaagagtgagggttacattgtcta

SEQ ID NO: 27258 - DNA, 80 bp, synthetic construct
  misc_feature 1..80: note = Synthetic: >NC_001608.3-cand-18540-18619
  source 1..80: mol_type = other DNA
agatattgtatgagaagtaataaaataaataagaaaacgaaaagactattagacagcttattttatacaagataatctta

SEQ ID NO: 27259 - DNA, 80 bp, synthetic construct
  misc_feature 1..80: note = Synthetic: >NC_001608.3-cand-18620-18699
  source 1..80: mol_type = other DNA
tatcgctttaggcctcacacaagtgagaaaattacgcgcacagattaactagtgattagtgtttggtcacaccagaggta

SEQ ID NO: 27260 - DNA, 80 bp, synthetic construct
  misc_feature 1..80: note = Synthetic: >NC_001608.3-cand-18700-18779
  source 1..80: mol_type = other DNA
actttttaacgttaattactcagatgttattgctcataattagcattaatattggcacattgggtgaatccttgagcttt

SEQ ID NO: 27261 - DNA, 80 bp, synthetic construct
  misc_feature 1..80: note = Synthetic: >NC_001608.3-cand-18780-18859
  source 1..80: mol_type = other DNA
atccctaatatggtgtaagaaattaaggaaatactgagatacactagttgaattgaattatgacataccatatatcataa

SEQ ID NO: 27262 - DNA, 80 bp, synthetic construct
  misc_feature 1..80: note = Synthetic: >NC_001608.3-cand-18860-18939
  source 1..80: mol_type = other DNA
atataaaaaagtgtctgctgtaatctacaagcacctcttttaaatacattaggaaaagaattaagttaccgttgagatca

SEQ ID NO: 27263 - DNA, 80 bp, synthetic construct
  misc_feature 1..80: note = Synthetic: >NC_001608.3-cand-18940-19019
  source 1..80: mol_type = other DNA
aaaaaaccacgtcatgttttctctgatgacaagtgataaaacttcgtagttaaatttctagaatgtcgatgtgaatgtaa

SEQ ID NO: 27264 - DNA, 80 bp, synthetic construct
  misc_feature 1..80: note = Synthetic: >NC_001608.3-cand-19020-19099
  source 1..80: mol_type = other DNA
attaagaaaaaccaatatataaaattaaaaaattaaaaagctttgatataagtaacacaaaacattcttcatcttttttg

SEQ ID NO: 27265 - DNA, 80 bp, synthetic construct
  misc_feature 1..80: note = Synthetic: >NC_002549.1-cand-20-99
  source 1..80: mol_type = other DNA
tttttaggatcttttgtgtgcgaataactatgaggaagattaataattttcctctcattgaaatttatatcggaatttaa

SEQ ID NO: 27266 - DNA, 80 bp, synthetic construct
  misc_feature 1..80: note = Synthetic: >NC_002549.1-cand-100-179
  source 1..80: mol_type = other DNA
attgaaattgttactgtaatcacacctggtttgtttcagagccacatcacaaagatagagaacaacctaggtctccgaag

SEQ ID NO: 27267 - DNA, 80 bp, synthetic construct
  misc_feature 1..80: note = Synthetic: >NC_002549.1-cand-180-259
  source 1..80: mol_type = other DNA
ggagcaagggcatcagtgtgctcagttgaaaatcccttgtcaacacctaggtcttatcacatcacaagttccacctcaga

SEQ ID NO: 27268 - DNA, 80 bp, synthetic construct
  misc_feature 1..80: note = Synthetic: >NC_002549.1-cand-260-339
  source 1..80: mol_type = other DNA
ctctgcagggtgatccaacaaccttaatagaaacattattgttaaaggacagcattagttcacagtcaaacaagcaagat

SEQ ID NO: 27269 - DNA, 80 bp, synthetic construct
  misc_feature 1..80: note = Synthetic: >NC_002549.1-cand-330-409
  source 1..80: mol_type = other DNA
caagcaagattgagaattaaccttggttttgaacttgaacacttaggggattgaagattcaacaaccctaaagcttgggg

SEQ ID NO: 27270 - DNA, 80 bp, synthetic construct
  misc_feature 1..80: note = Synthetic: >NC_002549.1-cand-420-499
  source 1..80: mol_type = other DNA
gaaatagttaaaagacaaattgctcggaatcacaaaattccgagtatggattctcgtcctcagaaaatctggatggcgcc

SEQ ID NO: 27271 - DNA, 80 bp, synthetic construct
  misc_feature 1..80: note = Synthetic: >NC_002549.1-cand-480-559
  source 1..80: mol_type = other DNA
cagaaaatctggatggcgccgagtctcactgaatctgacatggattaccacaagatcttgacagcaggtctgtccgttca

SEQ ID NO: 27272 - DNA, 80 bp, synthetic construct
  misc_feature 1..80: note = Synthetic: >NC_002549.1-cand-580-659
  source 1..80: mol_type = other DNA
gagtcatcccagtgtatcaagtaaacaatcttgaagaaatttgccaacttatcatacaggcctttgaagcaggtgttgat

SEQ ID NO: 27273 - DNA, 80 bp, synthetic construct
  misc_feature 1..80: note = Synthetic: >NC_002549.1-cand-660-739
  source 1..80: mol_type = other DNA
tttcaagagagtgcggacagtttccttctcatgctttgtcttcatcatgcgtaccagggagattacaaacttttcttgga

SEQ ID NO: 27274 - DNA, 80 bp, synthetic construct
  misc_feature 1..80: note = Synthetic: >NC_002549.1-cand-740-819
  source 1..80: mol_type = other DNA
aagtggcgcagtcaagtatttggaagggcacgggttccgttttgaagtcaagaagcgtgatggagtgaagcgccttgagg

SEQ ID NO: 27275 - DNA, 80 bp, synthetic construct
  misc_feature 1..80: note = Synthetic: >NC_002549.1-cand-820-899
  source 1..80: mol_type = other DNA
aattgctgccagcagtatctagtggaaaaaacattaagagaacacttgctgccatgccggaagaggagacaactgaagct

SEQ ID NO: 27276 - DNA, 80 bp, synthetic construct
  misc_feature 1..80: note = Synthetic: >NC_002549.1-cand-900-979
  source 1..80: mol_type = other DNA
aatgccggtcagtttctctcctttgcaagtctattccttccgaaattggtagtaggagaaaaggcttgccttgagaaggt

SEQ ID NO: 27277 - DNA, 80 bp, synthetic construct
  misc_feature 1..80: note = Synthetic: >NC_002549.1-cand-980-1059
  source 1..80: mol_type = other DNA
tcaaaggcaaattcaagtacatgcagagcaaggactgatacaatatccaacagcttggcaatcagtaggacacatgatgg

SEQ ID NO: 27278 - DNA, 80 bp, synthetic construct
  misc_feature 1..80: note = Synthetic: >NC_002549.1-cand-1060-1139
  source 1..80: mol_type = other DNA
tgattttccgtttgatgcgaacaaattttctgatcaaatttctcctaatacaccaagggatgcacatggttgccgggcat

SEQ ID NO: 27279 - DNA, 80 bp, synthetic construct
  misc_feature 1..80: note = Synthetic: >NC_002549.1-cand-1140-1219
  source 1..80: mol_type = other DNA
gatgccaacgatgctgtgatttcaaattcagtggctcaagctcgtttttcaggcttattgattgtcaaaacagtacttga

SEQ ID NO: 27280 - DNA, 80 bp, synthetic construct
  misc_feature 1..80: note = Synthetic: >NC_002549.1-cand-1220-1299
  source 1..80: mol_type = other DNA
tcatatcctacaaaagacagaacgaggagttcgtctccatcctcttgcaaggaccgccaaggtaaaaaatgaggtgaact

SEQ ID NO: 27281 - DNA, 80 bp, synthetic construct
  misc_feature 1..80: note = Synthetic: >NC_002549.1-cand-1300-1379
  source 1..80: mol_type = other DNA
cctttaaggctgcactcagctccctggccaagcatggagagtatgctcctttcgcccgacttttgaacctttctggagta

SEQ ID NO: 27282 - DNA, 80 bp, synthetic construct
  misc_feature 1..80: note = Synthetic: >NC_002549.1-cand-1380-1459
  source 1..80: mol_type = other DNA
aataatcttgagcatggtcttttccctcaactatcggcaattgcactcggagtcgccacagcacacgggagtaccctcgc

SEQ ID NO: 27283 - DNA, 80 bp, synthetic construct
  misc_feature 1..80: note = Synthetic: >NC_002549.1-cand-1460-1539
  source 1..80: mol_type = other DNA
aggagtaaatgttggagaacagtatcaacaactcagagaggctgccactgaggctgagaagcaactccaacaatatgcag

SEQ ID NO: 27284 - DNA, 80 bp, synthetic construct
  misc_feature 1..80: note = Synthetic: >NC_002549.1-cand-1540-1619
  source 1..80: mol_type = other DNA
agtctcgcgaacttgaccatcttggacttgatgatcaggaaaagaaaattcttatgaacttccatcagaaaaagaacgaa

SEQ ID NO: 27285 - DNA, 80 bp, synthetic construct
  misc_feature 1..80: note = Synthetic: >NC_002549.1-cand-1620-1699
  source 1..80: mol_type = other DNA
atcagcttccagcaaacaaacgctatggtaactctaagaaaagagcgcctggccaagctgacagaagctatcactgctgc

SEQ ID NO: 27286 - DNA, 80 bp, synthetic construct
  misc_feature 1..80: note = Synthetic: >NC_002549.1-cand-1710-1789
  source 1..80: mol_type = other DNA
aaaacaagtggacattacgatgatgatgacgacattccctttccaggacccatcaatgatgacgacaatcctggccatca

SEQ ID NO: 27287 - DNA, 80 bp, synthetic construct
  misc_feature 1..80: note = Synthetic: >NC_002549.1-cand-1790-1869
  source 1..80: mol_type = other DNA
agatgatgatccgactgactcacaggatacgaccattcccgatgtggtggttgatcccgatgatggaagctacggcgaat

SEQ ID NO: 27288 - DNA, 80 bp, synthetic construct
  misc_feature 1..80: note = Synthetic: >NC_002549.1-cand-1870-1949
  source 1..80: mol_type = other DNA
accagagttactcggaaaacggcatgaatgcaccagatgacttggtcctattcgatctagacgaggacgacgaggacact

SEQ ID NO: 27289 - DNA, 80 bp, synthetic construct
  misc_feature 1..80: note = Synthetic: >NC_002549.1-cand-1960-2039
  source 1..80: mol_type = other DNA
ctaatagatcgaccaagggtggacaacagaagaacagtcaaaagggccagcatatagagggcagacagacacaatccagg

SEQ ID NO: 27290 - DNA, 80 bp, synthetic construct
  misc_feature 1..80: note = Synthetic: >NC_002549.1-cand-2040-2119
  source 1..80: mol_type = other DNA
ccaattcaaaatgtcccaggccctcacagaacaatccaccacgccagtgcgccactcacggacaatgacagaagaaatga

SEQ ID NO: 27291 - DNA, 80 bp, synthetic construct
  misc_feature 1..80: note = Synthetic: >NC_002549.1-cand-2120-2199
  source 1..80: mol_type = other DNA
accctccggctcaaccagccctcgcatgctgacaccaattaacgaagaggcagacccactggacgatgccgacgacgaga

SEQ ID NO: 27292 - DNA, 80 bp, synthetic construct
  misc_feature 1..80: note = Synthetic: >NC_002549.1-cand-2200-2279
  source 1..80: mol_type = other DNA
cgtctagccttccgcccttggagtcagatgatgaagagcaggacagggacggaacttccaaccgcacacccactgtcgcc

SEQ ID NO: 27293 - DNA, 80 bp, synthetic construct
  misc_feature 1..80: note = Synthetic: >NC_002549.1-cand-2280-2359
  source 1..80: mol_type = other DNA
ccaccggctcccgtatacagagatcactctgaaaagaaagaactcccgcaagacgagcaacaagatcaggaccacactca

SEQ ID NO: 27294 - DNA, 80 bp, synthetic construct
  misc_feature 1..80: note = Synthetic: >NC_002549.1-cand-2360-2439
  source 1..80: mol_type = other DNA
agaggccaggaaccaggacagtgacaacacccagtcagaacactcttttgaggagatgtatcgccacattctaagatcac

SEQ ID NO: 27295 - DNA, 80 bp, synthetic construct
  misc_feature 1..80: note = Synthetic: >NC_002549.1-cand-2450-2529
  source 1..80: mol_type = other DNA
tgatgctgttttgtattatcatatgatgaaggatgagcctgtagttttcagtaccagtgatggcaaagagtacacgtatc

SEQ ID NO: 27296 - DNA, 80 bp, synthetic construct
  misc_feature 1..80: note = Synthetic: >NC_002549.1-cand-2520-2599
  source 1..80: mol_type = other DNA
tacacgtatccagactcccttgaagaggaatatccaccatggctcactgaaaaagaggctatgaatgaagagaatagatt

SEQ ID NO: 27297 - DNA, 80 bp, synthetic construct
  misc_feature 1..80: note = Synthetic: >NC_002549.1-cand-2600-2679
  source 1..80: mol_type = other DNA
tgttacattggatggtcaacaattttattggccggtgatgaatcacaagaataaattcatggcaatcctgcaacatcatc

SEQ ID NO: 27298 - DNA, 80 bp, synthetic construct
  misc_feature 1..80: note = Synthetic: >NC_002549.1-cand-2680-2759
  source 1..80: mol_type = other DNA
agtgaatgagcatggaacaatgggatgattcaaccgacaaatagctaacattaagtagtcaaggaacgaaaacaggaaga

SEQ ID NO: 27299 - DNA, 80 bp, synthetic construct
  misc_feature 1..80: note = Synthetic: >NC_002549.1-cand-2760-2839
  source 1..80: mol_type = other DNA
atttttgatgtctaaggtgtgaattattatcacaataaaagtgattcttatttttgaatttaaagctagcttattattac

SEQ ID NO: 27300 - DNA, 80 bp, synthetic construct
  misc_feature 1..80: note = Synthetic: >NC_002549.1-cand-2840-2919
  source 1..80: mol_type = other DNA
tagccgtttttcaaagttcaatttgagtcttaatgcaaataggcgttaagccacagttatagccataattgtaactcaat

SEQ ID NO: 27301 - DNA, 80 bp, synthetic construct
  misc_feature 1..80: note = Synthetic: >NC_002549.1-cand-2920-2999
  source 1..80: mol_type = other DNA
attctaactagcgatttatctaaattaaattacattatgcttttataacttacctactagcctgcccaacatttacacga

SEQ ID NO: 27302 - DNA, 80 bp, synthetic construct
  misc_feature 1..80: note = Synthetic: >NC_002549.1-cand-3000-3079
  source 1..80: mol_type = other DNA
tcgttttataattaagaaaaaactaatgatgaagattaaaaccttcatcatccttacgtcaattgaattctctagcactc

SEQ ID NO: 27303 - DNA, 80 bp, synthetic construct
  misc_feature 1..80: note = Synthetic: >NC_002549.1-cand-3060-3139
  source 1..80: mol_type = other DNA
aattgaattctctagcactcgaagcttattgtcttcaatgtaaaagaaaagctggtctaacaagatgacaactagaacaa

SEQ ID NO: 27304 - DNA, 80 bp, synthetic construct
  misc_feature 1..80: note = Synthetic: >NC_002549.1-cand-3160-3239
  source 1..80: mol_type = other DNA
gccacgactcaaaacgacagaatgccaggccctgagctttcgggctggatctctgagcagctaatgaccggaagaattcc

SEQ ID NO: 27305 - DNA, 80 bp, synthetic construct
  misc_feature 1..80: note = Synthetic: >NC_002549.1-cand-3240-3319
  source 1..80: mol_type = other DNA
tgtaagcgacatcttctgtgatattgagaacaatccaggattatgctacgcatcccaaatgcaacaaacgaagccaaacc

SEQ ID NO: 27306 - DNA, 80 bp, synthetic construct
  misc_feature 1..80: note = Synthetic: >NC_002549.1-cand-3320-3399
  source 1..80: mol_type = other DNA
cgaagacgcgcaacagtcaaacccaaacggacccaatttgcaatcatagttttgaggaggtagtacaaacattggcttca

SEQ ID NO: 27307 - DNA, 80 bp, synthetic construct
  misc_feature 1..80: note = Synthetic: >NC_002549.1-cand-3380-3459
  source 1..80: mol_type = other DNA
tagtacaaacattggcttcattggctactgttgtgcaacaacaaaccatcgcatcagaatcattagaacaacgcattacg

SEQ ID NO: 27308 - DNA, 80 bp, synthetic construct
  misc_feature 1..80: note = Synthetic: >NC_002549.1-cand-3460-3539
  source 1..80: mol_type = other DNA
agtcttgagaatggtctaaagccagtttatgatatggcaaaaacaatctcctcattgaacagggtttgtgctgagatggt

SEQ ID NO: 27309 - DNA, 80 bp, synthetic construct
  misc_feature 1..80: note = Synthetic: >NC_002549.1-cand-3540-3619
  source 1..80: mol_type = other DNA
tgcaaaatatgatcttctggtgatgacaaccggtcgggcaacagcaaccgctgcggcaactgaggcttattgggccgaac

SEQ ID NO: 27310 - DNA, 80 bp, synthetic construct
  misc_feature 1..80: note = Synthetic: >NC_002549.1-cand-3590-3669
  source 1..80: mol_type = other DNA
ctgcggcaactgaggcttattgggccgaacatggtcaaccaccacctggaccatcactttatgaagaaagtgcgattcgg

SEQ ID NO: 27311 - DNA, 80 bp, synthetic construct
  misc_feature 1..80: note = Synthetic: >NC_002549.1-cand-3700-3779
  source 1..80: mol_type = other DNA
cctcaaagtgttagggaggcattcaacaatctaaacagtaccacttcactaactgaggaaaattttgggaaacctgacat

SEQ ID NO: 27312 - DNA, 80 bp, synthetic construct
  misc_feature 1..80: note = Synthetic: >NC_002549.1-cand-3780-3859
  source 1..80: mol_type = other DNA
ttcggcaaaggatttgagaaacattatgtatgatcacttgcctggttttggaactgctttccaccaattagtacaagtga

SEQ ID NO: 27313 - DNA, 80 bp, synthetic construct
  misc_feature 1..80: note = Synthetic: >NC_002549.1-cand-3860-3939
  source 1..80: mol_type = other DNA
tttgtaaattgggaaaagatagcaactcattggacatcattcatgctgagttccaggccagcctggctgaaggagactct

SEQ ID NO: 27314 - DNA, 80 bp, synthetic construct
  misc_feature 1..80: note = Synthetic: >NC_002549.1-cand-3940-4019
  source 1..80: mol_type = other DNA
cctcaatgtgccctaattcaaattacaaaaagagttccaatcttccaagatgctgctccacctgtcatccacatccgctc

SEQ ID NO: 27315 - DNA, 80 bp, synthetic construct
  misc_feature 1..80: note = Synthetic: >NC_002549.1-cand-4020-4099
  source 1..80: mol_type = other DNA
tcgaggtgacattccccgagcttgccagaaaagcttgcgtccagtcccaccatcgcccaagattgatcgaggttgggtat

SEQ ID NO: 27316 - DNA, 80 bp, synthetic construct
  misc_feature 1..80: note = Synthetic: >NC_002549.1-cand-4100-4179
  source 1..80: mol_type = other DNA
gtgtttttcagcttcaagatggtaaaacacttggactcaaaatttgagccaatctcccttccctccgaaagaggcgaata

SEQ ID NO: 27317 - DNA, 80 bp, synthetic construct
  misc_feature 1..80: note = Synthetic: >NC_002549.1-cand-4180-4259
  source 1..80: mol_type = other DNA
atagcagaggcttcaactgctgaactatagggtacgttacattaatgatacacttgtgagtatcagccctggataatata

SEQ ID NO: 27318 - DNA, 80 bp, synthetic construct
  misc_feature 1..80: note = Synthetic: >NC_002549.1-cand-4260-4339
  source 1..80: mol_type = other DNA
agtcaattaaacgaccaagataaaattgttcatatctcgctagcagcttaaaatataaatgtaataggagctatatctct

SEQ ID NO: 27319 - DNA, 80 bp, synthetic construct
  misc_feature 1..80: note = Synthetic: >NC_002549.1-cand-4340-4419
  source 1..80: mol_type = other DNA
gacagtattataatcaattgttattaagtaacccaaaccaaaagtgatgaagattaagaaaaacctacctcggctgagag

SEQ ID NO: 27320 - DNA, 80 bp, synthetic construct
  misc_feature 1..80: note = Synthetic: >NC_002549.1-cand-4420-4499
  source 1..80: mol_type = other DNA
agtgttttttcattaaccttcatcttgtaaacgttgagcaaaattgttaaaaatatgaggcgggttatattgcctactgc

SEQ ID NO: 27321 - DNA, 80 bp, synthetic construct
  misc_feature 1..80: note = Synthetic: >NC_002549.1-cand-4500-4579
  source 1..80: mol_type = other DNA
tcctcctgaatatatggaggccatataccctgtcaggtcaaattcaacaattgctagaggtggcaacagcaatacaggct

SEQ ID NO: 27322 - DNA, 80 bp, synthetic construct
  misc_feature 1..80: note = Synthetic: >NC_002549.1-cand-4610-4689
  source 1..80: mol_type = other DNA
ctccatcgaatccactcaggccaattgccgatgacaccatcgaccatgccagccacacaccaggcagtgtgtcatcagca

SEQ ID NO: 27323 - DNA, 80 bp, synthetic construct
  misc_feature 1..80: note = Synthetic: >NC_002549.1-cand-4660-4739
  source 1..80: mol_type = other DNA
agccacacaccaggcagtgtgtcatcagcattcatccttgaagctatggtgaatgtcatatcgggccccaaagtgctaat

SEQ ID NO: 27324 - DNA, 80 bp, synthetic construct
  misc_feature 1..80: note = Synthetic: >NC_002549.1-cand-4740-4819
  source 1..80: mol_type = other DNA
gaagcaaattccaatttggcttcctctaggtgtcgctgatcaaaagacctacagctttgactcaactacggccgccatca

SEQ ID NO: 27325 - DNA, 80 bp, synthetic construct
  misc_feature 1..80: note = Synthetic: >NC_002549.1-cand-4820-4899
  source 1..80: mol_type = other DNA
tgcttgcttcatacactatcacccatttcggcaaggcaaccaatccacttgtcagagtcaatcggctgggtcctggaatc

SEQ ID NO: 27326 - DNA, 80 bp, synthetic construct
  misc_feature 1..80: note = Synthetic: >NC_002549.1-cand-4900-4979
  source 1..80: mol_type = other DNA
ccggatcatcccctcaggctcctgcgaattggaaaccaggctttcctccaggagttcgttcttccgccagtccaactacc

SEQ ID NO: 27327 - DNA, 80 bp, synthetic construct
  misc_feature 1..80: note = Synthetic: >NC_002549.1-cand-4980-5059
  source 1..80: mol_type = other DNA
ccagtatttcacctttgatttgacagcactcaaactgatcacccaaccactgcctgctgcaacatggaccgatgacactc

SEQ ID NO: 27328 - DNA, 80 bp, synthetic construct
  misc_feature 1..80: note = Synthetic: >NC_002549.1-cand-5060-5139
  source 1..80: mol_type = other DNA
caacaggatcaaatggagcgttgcgtccaggaatttcatttcatccaaaacttcgccccattcttttacccaacaaaagt

SEQ ID NO: 27329 - DNA, 80 bp, synthetic construct
  misc_feature 1..80: note = Synthetic: >NC_002549.1-cand-5150-5229
  source 1..80: mol_type = other DNA
ggaacagtgccgatctaacatctccggagaaaatccaagcaataatgacttcactccaggactttaagatcgttccaatt

SEQ ID NO: 27330 - DNA, 80 bp, synthetic construct
  misc_feature 1..80: note = Synthetic: >NC_002549.1-cand-5220-5299
  source 1..80: mol_type = other DNA
cgttccaattgatccaaccaaaaatatcatgggaatcgaagtgccagaaactctggtccacaagctgaccggtaagaagg

SEQ ID NO: 27331 - DNA, 80 bp, synthetic construct
  misc_feature 1..80: note = Synthetic: >NC_002549.1-cand-5300-5379
  source 1..80: mol_type = other DNA
tgacttctaaaaatggacaaccaatcatccctgttcttttgccaaagtacattgggttggacccggtggctccaggagac

SEQ ID NO: 27332 - DNA, 80 bp, synthetic construct
  misc_feature 1..80: note = Synthetic: >NC_002549.1-cand-5380-5459
  source 1..80: mol_type = other DNA
ctcaccatggtaatcacacaggattgtgacacgtgtcattctcctgcaagtcttccagctgtgattgagaagtaattgca

SEQ ID NO: 27333 - DNA, 80 bp, synthetic construct
  misc_feature 1..80: note = Synthetic: >NC_002549.1-cand-5460-5539
  source 1..80: mol_type = other DNA
ataattgactcagatccagttttatagaatcttctcagggatagtgataacatctatttagtaatccgtccattagagga

SEQ ID NO: 27334 - DNA, 80 bp, synthetic construct
  misc_feature 1..80: note = Synthetic: >NC_002549.1-cand-5530-5609
  source 1..80: mol_type = other DNA
cattagaggagacacttttaattgatcaatatactaaaggtgctttacaccattgtcttttttctctcctaaatgtagaa

SEQ ID NO: 27335 - DNA, 80 bp, synthetic construct
  misc_feature 1..80: note = Synthetic: >NC_002549.1-cand-5610-5689
  source 1..80: mol_type = other DNA
cttaacaaaagactcataatatacttgtttttaaaggattgattgatgaaagatcataactaataacattacaaataatc

SEQ ID NO: 27336 - DNA, 80 bp, synthetic construct
  misc_feature 1..80: note = Synthetic: >NC_002549.1-cand-5690-5769
  source 1..80: mol_type = other DNA
ctactataatcaatacggtgattcaaatgttaatctttctcattgcacatactttttgcccttatcctcaaattgcctgc

SEQ ID NO: 27337 - DNA, 80 bp, synthetic construct
  misc_feature 1..80: note = Synthetic: >NC_002549.1-cand-5770-5849
  source 1..80: mol_type = other DNA
atgcttacatctgaggatagccagtgtgacttggattggaaatgtggagaaaaaatcgggacccatttctaggttgttca

SEQ ID NO: 27338 - DNA, 80 bp, synthetic construct
  misc_feature 1..80: note = Synthetic: >NC_002549.1-cand-5850-5929
  source 1..80: mol_type = other DNA
caatccaagtacagacattgcccttctaattaagaaaaaatcggcgatgaagattaagccgacagtgagcgtaatcttca

SEQ ID NO: 27339 - DNA, 80 bp, synthetic construct
  misc_feature 1..80: note = Synthetic: >NC_002549.1-cand-5950-6029
  source 1..80: mol_type = other DNA
ttccagagtaggggtcgtcaggtccttttcaatcgtgtaaccaaaataaactccactagaaggatattgtggggcaacaa

SEQ ID NO: 27340 - DNA, 80 bp, synthetic construct
  misc_feature 1..80: note = Synthetic: >NC_002549.1-cand-6030-6109
  source 1..80: mol_type = other DNA
cacaatgggcgttacaggaatattgcagttacctcgtgatcgattcaagaggacatcattctttctttgggtaattatcc

SEQ ID NO: 27341 - DNA, 80 bp, synthetic construct
  misc_feature 1..80: note = Synthetic: >NC_002549.1-cand-6090-6169
  source 1..80: mol_type = other DNA
ctttctttgggtaattatccttttccaaagaacattttccatcccacttggagtcatccacaatagcacattacaggtta

SEQ ID NO: 27342 - DNA, 80 bp, synthetic construct
  misc_feature 1..80: note = Synthetic: >NC_002549.1-cand-6170-6249
  source 1..80: mol_type = other DNA
gtgatgtcgacaaactagtttgtcgtgacaaactgtcatccacaaatcaattgagatcagttggactgaatctcgaaggg

SEQ ID NO: 27343 - DNA, 80 bp, synthetic construct
  misc_feature 1..80: note = Synthetic: >NC_002549.1-cand-6210-6289
  source 1..80: mol_type = other DNA
cacaaatcaattgagatcagttggactgaatctcgaagggaatggagtggcaactgacgtgccatctgcaactaaaagat

SEQ ID NO: 27344 - DNA, 80 bp, synthetic construct
  misc_feature 1..80: note = Synthetic: >NC_002549.1-cand-6320-6399
  source 1..80: mol_type = other DNA
tggtcaattatgaagctggtgaatgggctgaaaactgctacaatcttgaaatcaaaaaacctgacgggagtgagtgtcta

SEQ ID NO: 27345 - DNA, 80 bp, synthetic construct
  misc_feature 1..80: note = Synthetic: >NC_002549.1-cand-6430-6509
  source 1..80: mol_type = other DNA
ccccggtgccggtatgtgcacaaagtatcaggaacgggaccgtgtgccggagactttgccttccataaagagggtgcttt

SEQ ID NO: 27346 - DNA, 80 bp, synthetic construct
  misc_feature 1..80: note = Synthetic: >NC_002549.1-cand-6480-6559
  source 1..80: mol_type = other DNA
agactttgccttccataaagagggtgctttcttcctgtatgatcgacttgcttccacagttatctaccgaggaacgactt

SEQ ID NO: 27347 - DNA, 80 bp, synthetic construct
  misc_feature 1..80: note = Synthetic: >NC_002549.1-cand-6560-6639
  source 1..80: mol_type = other DNA
tcgctgaaggtgtcgttgcatttctgatactgccccaagctaagaaggacttcttcagctcacaccccttgagagagccg

SEQ ID NO: 27348 - DNA, 80 bp, synthetic construct
  misc_feature 1..80: note = Synthetic: >NC_002549.1-cand-6640-6719
  source 1..80: mol_type = other DNA
gtcaatgcaacggaggacccgtctagtggctactattctaccacaattagatatcaggctaccggttttggaaccaatga

SEQ ID NO: 27349 - DNA, 80 bp, synthetic construct
  misc_feature 1..80: note = Synthetic: >NC_002549.1-cand-6710-6789
  source 1..80: mol_type = other DNA
gaaccaatgagacagagtacttgttcgaggttgacaatttgacctacgtccaacttgaatcaagattcacaccacagttt

SEQ ID NO: 27350 - DNA, 80 bp, synthetic construct
  misc_feature 1..80: note = Synthetic: >NC_002549.1-cand-6790-6869
  source 1..80: mol_type = other DNA
ctgctccagctgaatgagacaatatatacaagtgggaaaaggagcaataccacgggaaaactaatttggaaggtcaaccc

SEQ ID NO: 27351 - DNA, 80 bp, synthetic construct
  misc_feature 1..80: note = Synthetic: >NC_002549.1-cand-6890-6969
  source 1..80: mol_type = other DNA
gggagtgggccttctgggaaactaaaaaaacctcactagaaaaattcgcagtgaagagttgtctttcacagttgtatcaa

SEQ ID NO: 27352 - DNA, 80 bp, synthetic construct
  misc_feature 1..80: note = Synthetic: >NC_002549.1-cand-6950-7029
  source 1..80: mol_type = other DNA
gtctttcacagttgtatcaaacggagccaaaaacatcagtggtcagagtccggcgcgaacttcttccgacccagggacca

SEQ ID NO: 27353 - DNA, 80 bp, synthetic construct
  misc_feature 1..80: note = Synthetic: >NC_002549.1-cand-7030-7109
  source 1..80: mol_type = other DNA
acacaacaactgaagaccacaaaatcatggcttcagaaaattcctctgcaatggttcaagtgcacagtcaaggaagggaa

SEQ ID NO: 27354 - DNA, 80 bp, synthetic construct
  misc_feature 1..80: note = Synthetic: >NC_002549.1-cand-7110-7189
  source 1..80: mol_type = other DNA
gctgcagtgtcgcatctaacaacccttgccacaatctccacgagtccccaatccctcacaaccaaaccaggtccggacaa

SEQ ID NO: 27355 - DNA, 80 bp, synthetic construct
  misc_feature 1..80: note = Synthetic: >NC_002549.1-cand-7190-7269
  source 1..80: mol_type = other DNA
cagcacccataatacacccgtgtataaacttgacatctctgaggcaactcaagttgaacaacatcaccgcagaacagaca

SEQ ID NO: 27356 - DNA, 80 bp, synthetic construct
  misc_feature 1..80: note = Synthetic: >NC_002549.1-cand-7270-7349
  source 1..80: mol_type = other DNA
acgacagcacagcctccgacactccctctgccacgaccgcagccggacccccaaaagcagagaacaccaacacgagcaag

SEQ ID NO: 27357 - DNA, 80 bp, synthetic construct
  misc_feature 1..80: note = Synthetic: >NC_002549.1-cand-7350-7429
  source 1..80: mol_type = other DNA
agcactgacttcctggaccccgccaccacaacaagtccccaaaaccacagcgagaccgctggcaacaacaacactcatca

SEQ ID NO: 27358 - DNA, 80 bp, synthetic construct
  misc_feature 1..80: note = Synthetic: >NC_002549.1-cand-7430-7509
  source 1..80: mol_type = other DNA
ccaagataccggagaagagagtgccagcagcgggaagctaggcttaattaccaatactattgctggagtcgcaggactga

SEQ ID NO: 27359 - DNA, 80 bp, synthetic construct
  misc_feature 1..80: note = Synthetic: >NC_002549.1-cand-7510-7589
  source 1..80: mol_type = other DNA
tcacaggcgggagaagaactcgaagagaagcaattgtcaatgctcaacccaaatgcaaccctaatttacattactggact

SEQ ID NO: 27360 - DNA, 80 bp, synthetic construct
  misc_feature 1..80: note = Synthetic: >NC_002549.1-cand-7590-7669
  source 1..80: mol_type = other DNA
actcaggatgaaggtgctgcaatcggactggcctggataccatatttcgggccagcagccgagggaatttacatagaggg

SEQ ID NO: 27361 - DNA, 80 bp, synthetic construct
  misc_feature 1..80: note = Synthetic: >NC_002549.1-cand-7670-7749
  source 1..80: mol_type = other DNA
gctaatgcacaatcaagatggtttaatctgtgggttgagacagctggccaacgagacgactcaagctcttcaactgttcc

SEQ ID NO: 27362 - DNA, 80 bp, synthetic construct
  misc_feature 1..80: note = Synthetic: >NC_002549.1-cand-7740-7819
  source 1..80: mol_type = other DNA
caactgttcctgagagccacaactgagctacgcaccttttcaatcctcaaccgtaaggcaattgatttcttgctgcagcg

SEQ ID NO: 27363 - DNA, 80 bp, synthetic construct
  misc_feature 1..80: note = Synthetic: >NC_002549.1-cand-7830-7909
  source 1..80: mol_type = other DNA
acatgccacattctgggaccggactgctgtatcgaaccacatgattggaccaagaacataacagacaaaattgatcagat

SEQ ID NO: 27364 - DNA, 80 bp, synthetic construct
  misc_feature 1..80: note = Synthetic: >NC_002549.1-cand-7950-8029
  source 1..80: mol_type = other DNA
gacaatgacaattggtggacaggatggagacaatggataccggcaggtattggagttacaggcgttataattgcagttat

SEQ ID NO: 27365 - DNA, 80 bp, synthetic construct
  misc_feature 1..80: note = Synthetic: >NC_002549.1-cand-7990-8069
  source 1..80: mol_type = other DNA
cggcaggtattggagttacaggcgttataattgcagttatcgctttattctgtatatgcaaatttgtcttttagtttttc

SEQ ID NO: 27366 - DNA, 80 bp, synthetic construct
  misc_feature 1..80: note = Synthetic: >NC_002549.1-cand-8070-8149
  source 1..80: mol_type = other DNA
ttcagattgcttcatggaaaagctcagcctcaaatcaatgaaaccaggatttaattatatggattacttgaatctaagat

SEQ ID NO: 27367 - DNA, 80 bp, synthetic construct
  misc_feature 1..80: note = Synthetic: >NC_002549.1-cand-8150-8229
  source 1..80: mol_type = other DNA
tacttgacaaatgataatataatacactggagctttaaacatagccaatgtgattctaactcctttaaactcacagttaa

SEQ ID NO: 27368 - DNA, 80 bp, synthetic construct
  misc_feature 1..80: note = Synthetic: >NC_002549.1-cand-8230-8309
  source 1..80: mol_type = other DNA
tcataaacaaggtttgacatcaatctagttatctctttgagaatgataaacttgatgaagattaagaaaaaggtaatctt

SEQ ID NO: 27369 - DNA, 80 bp, synthetic construct
  misc_feature 1..80: note = Synthetic: >NC_002549.1-cand-8310-8389
  source 1..80: mol_type = other DNA
tcgattatctttaatcttcatccttgattctacaatcatgacagttgtctttagtgacaagggaaagaagcctttttatt

SEQ ID NO: 27370 - DNA, 80 bp, synthetic construct
  misc_feature 1..80: note = Synthetic: >NC_002549.1-cand-8390-8469
  source 1..80: mol_type = other DNA
aagttgtaataatcagatctgcgaaccggtagagtttagttgcaacctaacacacataaagcattggtcaaaaagtcaat

SEQ ID NO: 27371 - DNA, 80 bp, synthetic construct
  misc_feature 1..80: note = Synthetic: >NC_002549.1-cand-8470-8549
  source 1..80: mol_type = other DNA
agaaatttaaacagtgagtggagacaacttttaaatggaagcttcatatgagagaggacgcccacgagctgccagacagc

SEQ ID NO: 27372 - DNA, 80 bp, synthetic construct
  misc_feature 1..80: note = Synthetic: >NC_002549.1-cand-8550-8629
  source 1..80: mol_type = other DNA
attcaagggatggacacgaccaccatgttcgagcacgatcatcatccagagagaattatcgaggtgagtaccgtcaatca

SEQ ID NO: 27373 - DNA, 80 bp, synthetic construct
  misc_feature 1..80: note = Synthetic: >NC_002549.1-cand-8630-8709
  source 1..80: mol_type = other DNA
aggagcgcctcacaagtgcgcgttcctactgtatttcataagaagagagttgaaccattaacagttcctccagcacctaa

SEQ ID NO: 27374 - DNA, 80 bp, synthetic construct
  misc_feature 1..80: note = Synthetic: >NC_002549.1-cand-8710-8789
  source 1..80: mol_type = other DNA
agacatatgtccgaccttgaaaaaaggatttttgtgtgacagtagtttttgcaaaaaagatcaccagttggagagtttaa

SEQ ID NO: 27375 - DNA, 80 bp, synthetic construct
  misc_feature 1..80: note = Synthetic: >NC_002549.1-cand-8790-8869
  source 1..80: mol_type = other DNA
ctgatagggaattactcctactaatcgcccgtaagacttgtggatcagtagaacaacaattaaatataactgcacccaag

SEQ ID NO: 27376 - DNA, 80 bp, synthetic construct
  misc_feature 1..80: note = Synthetic: >NC_002549.1-cand-8870-8949
  source 1..80: mol_type = other DNA
gactcgcgcttagcaaatccaacggctgatgatttccagcaagaggaaggtccaaaaattaccttgttgacactgatcaa

SEQ ID NO: 27377 - DNA, 80 bp, synthetic construct
  misc_feature 1..80: note = Synthetic: >NC_002549.1-cand-8950-9029
  source 1..80: mol_type = other DNA
gacggcagaacactgggcgagacaagacatcagaaccatagaggattcaaaattaagagcattgttgactctatgtgctg

SEQ ID NO: 27378 - DNA, 80 bp, synthetic construct
  misc_feature 1..80: note = Synthetic: >NC_002549.1-cand-9010-9089
  source 1..80: mol_type = other DNA
attgttgactctatgtgctgtgatgacgaggaaattctcaaaatcccagctgagtcttttatgtgagacacacctaaggc

SEQ ID NO: 27379 - DNA, 80 bp, synthetic construct
  misc_feature 1..80: note = Synthetic: >NC_002549.1-cand-9110-9189
  source 1..80: mol_type = other DNA
caggcagaacccgttctcgaagtatatcaacgattacacagtgataaaggaggcagttttgaagctgcactatggcaaca

SEQ ID NO: 27380 - DNA, 80 bp, synthetic construct
  misc_feature 1..80: note = Synthetic: >NC_002549.1-cand-9190-9269
  source 1..80: mol_type = other DNA
atgggaccgacaatccctaattatgtttatcactgcattcttgaatattgctctccagttaccgtgtgaaagttctgctg

SEQ ID NO: 27381 - DNA, 80 bp, synthetic construct
  misc_feature 1..80: note = Synthetic: >NC_002549.1-cand-9250-9329
  source 1..80: mol_type = other DNA
accgtgtgaaagttctgctgtcgttgtttcagggttaagaacattggttcctcaatcagataatgaggaagcttcaacca

SEQ ID NO: 27382 - DNA, 80 bp, synthetic construct
  misc_feature 1..80: note = Synthetic: >NC_002549.1-cand-9350-9429
  source 1..80: mol_type = other DNA
tctgatgagggtaccccttaataaggctgactaaaacactatataaccttctacttgatcacaatactccgtatacctat

SEQ ID NO: 27383 - DNA, 80 bp, synthetic construct
  misc_feature 1..80: note = Synthetic: >NC_002549.1-cand-9430-9509
  source 1..80: mol_type = other DNA
catcatatatttaatcaagacgatatcctttaaaacttattcagtactataatcactctcgtttcaaattaataagatgt

SEQ ID NO: 27384 - DNA, 80 bp, synthetic construct
  misc_feature 1..80: note = Synthetic: >NC_002549.1-cand-9510-9589
  source 1..80: mol_type = other DNA
gcatgattgccctaatatatgaagaggtatgatacaaccctaacagtgatcaaagaaaatcataatctcgtatcgctcgt

SEQ ID NO: 27385 - DNA, 80 bp, synthetic construct
  misc_feature 1..80: note = Synthetic: >NC_002549.1-cand-9590-9669
  source 1..80: mol_type = other DNA
aatataacctgccaagcatacctcttgcacaaagtgattcttgtacacaaataatgttttactctacaggaggtagcaac

SEQ ID NO: 27386 - DNA, 80 bp, synthetic construct
  misc_feature 1..80: note = Synthetic: >NC_002549.1-cand-9670-9749
  source 1..80: mol_type = other DNA
gatccatcccatcaaaaaataagtatttcatgacttactaatgatctcttaaaatattaagaaaaactgacggaacataa

SEQ ID NO: 27387 - DNA, 80 bp, synthetic construct
  misc_feature 1..80: note = Synthetic: >NC_002549.1-cand-9750-9829
  source 1..80: mol_type = other DNA
attctttatgcttcaagctgtggaggaggtgtttggtattggctattgttatattacaatcaataacaagcttgtaaaaa

SEQ ID NO: 27388 - DNA, 80 bp, synthetic construct
  misc_feature 1..80: note = Synthetic: >NC_002549.1-cand-9830-9909
  source 1..80: mol_type = other DNA
tattgttcttgtttcaagaggtagattgtgaccggaaatgctaaactaatgatgaagattaatgcggaggtctgataaga

SEQ ID NO: 27389 - DNA, 80 bp, synthetic construct
  misc_feature 1..80: note = Synthetic: >NC_002549.1-cand-9920-9999
  source 1..80: mol_type = other DNA
ttattcagattaggccccaagaggcattcttcatctccttttagcaaagtactatttcagggtagtccaattagtggcac

SEQ ID NO: 27390 - DNA, 80 bp, synthetic construct
  misc_feature 1..80: note = Synthetic: >NC_002549.1-cand-10010-10089
  source 1..80: mol_type = other DNA
tgtatatcagtcgcccctgagatacgccacaaaagtgtctctaagctaaattggtctgtacacatcccatacattgtatt

SEQ ID NO: 27391 - DNA, 80 bp, synthetic construct
  misc_feature 1..80: note = Synthetic: >NC_002549.1-cand-10100-10179
  source 1..80: mol_type = other DNA
atatctaattgaacttagccgtttaaaatttagtgcataaatctgggctaacaccaccaggtcaactccattggctgaaa

SEQ ID NO: 27392 - DNA, 80 bp, synthetic construct
  misc_feature 1..80: note = Synthetic: >NC_002549.1-cand-10170-10249
  source 1..80: mol_type = other DNA
ttggctgaaaagaagcttacctacaacgaacatcactttgagcgccctcacaattaaaaaataggaacgtcgttccaaca

SEQ ID NO: 27393 - DNA, 80 bp, synthetic construct
  misc_feature 1..80: note = Synthetic: >NC_002549.1-cand-10250-10329
  source 1..80: mol_type = other DNA
atcgagcgcaaggtttcaaggttgaactgagagtgtctagacaacaaaatattgatactccagacaccaagcaagacctg

SEQ ID NO: 27394 - DNA, 80 bp, synthetic construct
  misc_feature 1..80: note = Synthetic: >NC_002549.1-cand-10320-10399
  source 1..80: mol_type = other DNA
gcaagacctgagaaaaaaccatggctaaagctacgggacgatacaatctaatatcgcccaaaaaggacctggagaaaggg

SEQ ID NO: 27395 - DNA, 80 bp, synthetic construct
  misc_feature 1..80: note = Synthetic: >NC_002549.1-cand-10390-10469
  source 1..80: mol_type = other DNA
ggagaaaggggttgtcttaagcgacctctgtaacttcttagttagccaaactattcaggggtggaaggtttattgggctg

SEQ ID NO: 27396 - DNA, 80 bp, synthetic construct
  misc_feature 1..80: note = Synthetic: >NC_002549.1-cand-10490-10569
  source 1..80: mol_type = other DNA
cacaaaggaatggccctattgcatagactgaaaactaatgactttgcccctgcatggtcaatgacaaggaatctctttcc

SEQ ID NO: 27397 - DNA, 80 bp, synthetic construct
  misc_feature 1..80: note = Synthetic: >NC_002549.1-cand-10570-10649
  source 1..80: mol_type = other DNA
tcatttatttcaaaatccgaattccacaattgaatcaccgctgtgggcattgagagtcatccttgcagcagggatacagg

SEQ ID NO: 27398 - DNA, 80 bp, synthetic construct
  misc_feature 1..80: note = Synthetic: >NC_002549.1-cand-10650-10729
  source 1..80: mol_type = other DNA
accagctgattgaccagtctttgattgaacccttagcaggagcccttggtctgatctctgattggctgctaacaaccaac

SEQ ID NO: 27399 - DNA, 80 bp, synthetic construct
  misc_feature 1..80: note = Synthetic: >NC_002549.1-cand-10730-10809
  source 1..80: mol_type = other DNA
actaaccatttcaacatgcgaacacaacgtgtcaaggaacaattgagcctaaaaatgctgtcgttgattcgatccaatat

SEQ ID NO: 27400 - DNA, 80 bp, synthetic construct
  misc_feature 1..80: note = Synthetic: >NC_002549.1-cand-10810-10889
  source 1..80: mol_type = other DNA
tctcaagtttattaacaaattggatgctctacatgtcgtgaactacaacggattgttgagcagtattgaaattggaactc

SEQ ID NO: 27401 - DNA, 80 bp, synthetic construct
  misc_feature 1..80: note = Synthetic: >NC_002549.1-cand-10890-10969
  source 1..80: mol_type = other DNA
aaaatcatacaatcatcataactcgaactaacatgggttttctggtggagctccaagaacccgacaaatcggcaatgaac

SEQ ID NO: 27402 - DNA, 80 bp, synthetic construct
  misc_feature 1..80: note = Synthetic: >NC_002549.1-cand-11000-11079
  source 1..80: mol_type = other DNA
ctccttcatgagtccacactgaaagcatttacacaaggatcctcgacacgaatgcaaagtttgattcttgaatttaatag

SEQ ID NO: 27403 - DNA, 80 bp, synthetic construct
  misc_feature 1..80: note = Synthetic: >NC_002549.1-cand-11080-11159
  source 1..80: mol_type = other DNA
ctctcttgctatctaactaaggtagaatacttcatattgagctaactcatatatgctgactcaatagttatcttgacatc

SEQ ID NO: 27404 - DNA, 80 bp, synthetic construct
  misc_feature 1..80: note = Synthetic: >NC_002549.1-cand-11160-11239
  source 1..80: mol_type = other DNA
tctgctttcataatcagatatataagcataataaataaatactcatatttcttgataatttgtttaaccacagataaatc

SEQ ID NO: 27405 - DNA, 80 bp, synthetic construct
  misc_feature 1..80: note = Synthetic: >NC_002549.1-cand-11240-11319
  source 1..80: mol_type = other DNA
ctcactgtaagccagcttccaagttgacacccttacaaaaaccaggactcagaatccctcaaacaagagattccaagaca

SEQ ID NO: 27406 - DNA, 80 bp, synthetic construct
  misc_feature 1..80: note = Synthetic: >NC_002549.1-cand-11320-11399
  source 1..80: mol_type = other DNA
acatcatagaattgctttattatatgaataagcattttatcaccagaaatcctatatactaaatggttaattgtaactga

SEQ ID NO: 27407 - DNA, 80 bp, synthetic construct
  misc_feature 1..80: note = Synthetic: >NC_002549.1-cand-11400-11479
  source 1..80: mol_type = other DNA
acccgcaggtcacatgtgttaggtttcacagattctatatattactaactctatactcgtaattaacattagataagtag

SEQ ID NO: 27408 - DNA, 80 bp, synthetic construct
  misc_feature 1..80: note = Synthetic: >NC_002549.1-cand-11490-11569
  source 1..80: mol_type = other DNA
aagcctgaggaagattaagaaaaactgcttattgggtctttccgtgttttagatgaagcagttgaaattcttcctcttga

SEQ ID NO: 27409 - DNA, 80 bp, synthetic construct
  misc_feature 1..80: note = Synthetic: >NC_002549.1-cand-11570-11649
  source 1..80: mol_type = other DNA
tattaaatggctacacaacatacccaatacccagacgctaggttatcatcaccaattgtattggaccaatgtgacctagt

SEQ ID NO: 27410 - DNA, 80 bp, synthetic construct
  misc_feature 1..80: note = Synthetic: >NC_002549.1-cand-11650-11729
  source 1..80: mol_type = other DNA
cactagagcttgcgggttatattcatcatactcccttaatccgcaactacgcaactgtaaactcccgaaacatatctacc

SEQ ID NO: 27411 - DNA, 80 bp, synthetic construct
  misc_feature 1..80: note = Synthetic: >NC_002549.1-cand-11730-11809
  source 1..80: mol_type = other DNA
gtttgaaatacgatgtaactgttaccaagttcttgagtgatgtaccagtggcgacattgcccatagatttcatagtccca

SEQ ID NO: 27412 - DNA, 80 bp, synthetic construct
  misc_feature 1..80: note = Synthetic: >NC_002549.1-cand-11810-11889
  source 1..80: mol_type = other DNA
gttcttctcaaggcactgtcaggcaatggattctgtcctgttgagccgcggtgccaacagttcttagatgaaatcattaa

SEQ ID NO: 27413 - DNA, 80 bp, synthetic construct
  misc_feature 1..80: note = Synthetic: >NC_002549.1-cand-11890-11969
  source 1..80: mol_type = other DNA
gtacacaatgcaagatgctctcttcttgaaatattatctcaaaaatgtgggtgctcaagaagactgtgttgatgaacact

SEQ ID NO: 27414 - DNA, 80 bp, synthetic construct
  misc_feature 1..80: note = Synthetic: >NC_002549.1-cand-11970-12049
  source 1..80: mol_type = other DNA
ttcaagagaaaatcttatcttcaattcagggcaatgaatttttacatcaaatgtttttctggtatgatctggctatttta

SEQ ID NO: 27415 - DNA, 80 bp, synthetic construct
  misc_feature 1..80: note = Synthetic: >NC_002549.1-cand-11980-12059
  source 1..80: mol_type = other DNA
aatcttatcttcaattcagggcaatgaatttttacatcaaatgtttttctggtatgatctggctattttaactcgaaggg

SEQ ID NO: 27416 - DNA, 80 bp, synthetic construct
  misc_feature 1..80: note = Synthetic: >NC_002549.1-cand-12140-12219
  source 1..80: mol_type = other DNA
gttttttggaagatcccaatttcaatgttaccactgaacacacaaggaatcccccatgctgctatggactggtatcaggc

SEQ ID NO: 27417 - DNA, 80 bp, synthetic construct
  misc_feature 1..80: note = Synthetic: >NC_002549.1-cand-12210-12289
  source 1..80: mol_type = other DNA
ggtatcaggcatcagtattcaaagaagcggttcaagggcatacacacattgtttctgtttctactgccgacgtcttgata

SEQ ID NO: 27418 - DNA, 80 bp, synthetic construct
  misc_feature 1..80: note = Synthetic: >NC_002549.1-cand-12290-12369
  source 1..80: mol_type = other DNA
atgtgcaaagatttaattacatgtcgattcaacacaactctaatctcaaaaatagcagagattgaggatccagtttgttc

SEQ ID NO: 27419 - DNA, 80 bp, synthetic construct
  misc_feature 1..80: note = Synthetic: >NC_002549.1-cand-12370-12449
  source 1..80: mol_type = other DNA
tgattatcccaattttaagattgtgtctatgctttaccagagcggagattacttactctccatattagggtctgatgggt

SEQ ID NO: 27420 - DNA, 80 bp, synthetic construct
  misc_feature 1..80: note = Synthetic: >NC_002549.1-cand-12450-12529
  source 1..80: mol_type = other DNA
ataaaattattaagttcctcgaaccattgtgcttggccaaaattcaattatgctcaaagtacactgagaggaagggccga

SEQ ID NO: 27421 - DNA, 80 bp, synthetic construct
  misc_feature 1..80: note = Synthetic: >NC_002549.1-cand-12530-12609
  source 1..80: mol_type = other DNA
ttcttaacacaaatgcatttagctgtaaatcacaccctagaagaaattacagaaatgcgtgcactaaagccttcacaggc

SEQ ID NO: 27422 - DNA, 80 bp, synthetic construct
  misc_feature 1..80: note = Synthetic: >NC_002549.1-cand-12610-12689
  source 1..80: mol_type = other DNA
tcaaaagatccgtgaattccatagaacattgataaggctggagatgacgccacaacaactttgtgagctattttccattc

SEQ ID NO: 27423 - DNA, 80 bp, synthetic construct
  misc_feature 1..80: note = Synthetic: >NC_002549.1-cand-12710-12789
  source 1..80: mol_type = other DNA
gtgctacatagtgaaacagcaatccaaaaagttaaaaaacatgctacggtgctaaaagcattacgccctatagtgatttt

SEQ ID NO: 27424 - DNA, 80 bp, synthetic construct
  misc_feature 1..80: note = Synthetic: >NC_002549.1-cand-12770-12849
  source 1..80: mol_type = other DNA
ttacgccctatagtgattttcgagacatactgtgtttttaaatatagtattgccaaacattattttgatagtcaaggatc

SEQ ID NO: 27425 - DNA, 80 bp, synthetic construct
  misc_feature 1..80: note = Synthetic: >NC_002549.1-cand-12850-12929
  source 1..80: mol_type = other DNA
ttggtacagtgttacttcagataggaatctaacaccgggtcttaattcttatatcaaaagaaatcaattccctccgttgc

SEQ ID NO: 27426 - DNA, 80 bp, synthetic construct
  misc_feature 1..80: note = Synthetic: >NC_002549.1-cand-12930-13009
  source 1..80: mol_type = other DNA
caatgattaaagaactactatgggaattttaccaccttgaccaccctccacttttctcaaccaaaattattagtgactta

SEQ ID NO: 27427 - DNA, 80 bp, synthetic construct
  misc_feature 1..80: note = Synthetic: >NC_002549.1-cand-13010-13089
  source 1..80: mol_type = other DNA
agtatttttataaaagacagagctaccgcagtagaaaggacatgctgggatgcagtattcgagcctaatgttctaggata

SEQ ID NO: 27428 - DNA, 80 bp, synthetic construct
  misc_feature 1..80: note = Synthetic: >NC_002549.1-cand-13090-13169
  source 1..80: mol_type = other DNA
taatccacctcacaaatttagtactaaacgtgtaccggaacaatttttagagcaagaaaacttttctattgagaatgttc

SEQ ID NO: 27429 - DNA, 80 bp, synthetic construct
  misc_feature 1..80: note = Synthetic: >NC_002549.1-cand-13170-13249
  source 1..80: mol_type = other DNA
tttcctacgcacaaaaactcgagtatctactaccacaatatcggaacttttctttctcattgaaagagaaagagttgaat

SEQ ID NO: 27430 - DNA, 80 bp, synthetic construct
  misc_feature 1..80: note = Synthetic: >NC_002549.1-cand-13250-13329
  source 1..80: mol_type = other DNA
gtaggtagaaccttcggaaaattgccttatccgactcgcaatgttcaaacactttgtgaagctctgttagctgatggtct

SEQ ID NO: 27431 - DNA, 80 bp, synthetic construct
  misc_feature 1..80: note = Synthetic: >NC_002549.1-cand-13330-13409
  source 1..80: mol_type = other DNA
tgctaaagcatttcctagcaatatgatggtagttacggaacgtgagcaaaaagaaagcttattgcatcaagcatcatggc

SEQ ID NO: 27432 - DNA, 80 bp, synthetic construct
  misc_feature 1..80: note = Synthetic: >NC_002549.1-cand-13410-13489
  source 1..80: mol_type = other DNA
accacacaagtgatgattttggtgaacatgccacagttagagggagtagctttgtaactgatttagagaaatacaatctt

SEQ ID NO: 27433 - DNA, 80 bp, synthetic construct
  misc_feature 1..80: note = Synthetic: >NC_002549.1-cand-13490-13569
  source 1..80: mol_type = other DNA
gcatttagatatgagtttacagcaccttttatagaatattgcaaccgttgctatggtgttaagaatgtttttaattggat

SEQ ID NO: 27434 - DNA, 80 bp, synthetic construct
  misc_feature 1..80: note = Synthetic: >NC_002549.1-cand-13570-13649
  source 1..80: mol_type = other DNA
gcattatacaatcccacagtgttatatgcatgtcagtgattattataatccaccacataacctcacactggagaatcgag

SEQ ID NO: 27435 - DNA, 80 bp, synthetic construct
  misc_feature 1..80: note = Synthetic: >NC_002549.1-cand-13690-13769
  source 1..80: mol_type = other DNA
gggagggattgaaggactgcaacaaaaactctggacaagtatttcatgtgctcaaatttctttagttgaaattaagactg

SEQ ID NO: 27436 - DNA, 80 bp, synthetic construct
  misc_feature 1..80: note = Synthetic: >NC_002549.1-cand-13730-13809
  source 1..80: mol_type = other DNA
atttcatgtgctcaaatttctttagttgaaattaagactggttttaagttacgctcagctgtgatgggtgacaatcagtg

SEQ ID NO: 27437 - DNA, 80 bp, synthetic construct
  misc_feature 1..80: note = Synthetic: >NC_002549.1-cand-13810-13889
  source 1..80: mol_type = other DNA
cattactgttttatcagtcttccccttagagactgacgcagacgagcaggaacagagcgccgaagacaatgcagcgaggg

SEQ ID NO: 27438 - DNA, 80 bp, synthetic construct
  misc_feature 1..80: note = Synthetic: >NC_002549.1-cand-13890-13969
  source 1..80: mol_type = other DNA
tggccgccagcctagcaaaagttacaagtgcctgtggaatctttttaaaacctgatgaaacatttgtacattcaggtttt

SEQ ID NO: 27439 - DNA, 80 bp, synthetic construct
  misc_feature 1..80: note = Synthetic: >NC_002549.1-cand-14010-14089
  source 1..80: mol_type = other DNA
tgcctcagtcccttaaaacggctacaagaatggcaccattgtctgatgcaatttttgatgatcttcaagggaccctggct

SEQ ID NO: 27440 - DNA, 80 bp, synthetic construct
  misc_feature 1..80: note = Synthetic: >NC_002549.1-cand-14050-14129
  source 1..80: mol_type = other DNA
gtctgatgcaatttttgatgatcttcaagggaccctggctagtataggcactgcttttgagcgatccatctctgagacac

SEQ ID NO: 27441 - DNA, 80 bp, synthetic construct
  misc_feature 1..80: note = Synthetic: >NC_002549.1-cand-14130-14209
  source 1..80: mol_type = other DNA
gacatatctttccttgcaggataaccgcagctttccatacgtttttttcggtgagaatcttgcaatatcatcatctcggg

SEQ ID NO: 27442 - DNA, 80 bp, synthetic construct
  misc_feature 1..80: note = Synthetic: >NC_002549.1-cand-14210-14289
  source 1..80: mol_type = other DNA
ttcaataaaggttttgaccttggacagttaacactcggcaaacctctggatttcggaacaatatcattggcactagcggt

SEQ ID NO: 27443 - DNA, 80 bp, synthetic construct
  misc_feature 1..80: note = Synthetic: >NC_002549.1-cand-14290-14369
  source 1..80: mol_type = other DNA
accgcaggtgcttggagggttatccttcttgaatcctgagaaatgtttctaccggaatctaggagatccagttacctcag

SEQ ID NO: 27444 - DNA, 80 bp, synthetic construct
  misc_feature 1..80: note = Synthetic: >NC_002549.1-cand-14370-14449
  source 1..80: mol_type = other DNA
gcttattccagttaaaaacttatctccgaatgattgagatggatgatttattcttacctttaattgcgaagaaccctggg

SEQ ID NO: 27445 - DNA, 80 bp, synthetic construct
  misc_feature 1..80: note = Synthetic: >NC_002549.1-cand-14450-14529
  source 1..80: mol_type = other DNA
aactgcactgccattgactttgtgctaaatcctagcggattaaatgtccctgggtcgcaagacttaacttcatttctgcg

SEQ ID NO: 27446 - DNA, 80 bp, synthetic construct
  misc_feature 1..80: note = Synthetic: >NC_002549.1-cand-14530-14609
  source 1..80: mol_type = other DNA
ccagattgtacgcaggaccatcaccctaagtgcgaaaaacaaacttattaataccttatttcatgcgtcagctgacttcg

SEQ ID NO: 27447 - DNA, 80 bp, synthetic construct
  misc_feature 1..80: note = Synthetic: >NC_002549.1-cand-14610-14689
  source 1..80: mol_type = other DNA
aagacgaaatggtttgtaaatggctattatcatcaactcctgttatgagtcgttttgcggccgatatcttttcacgcacg

SEQ ID NO: 27448 - DNA, 80 bp, synthetic construct
  misc_feature 1..80: note = Synthetic: >NC_002549.1-cand-14690-14769
  source 1..80: mol_type = other DNA
ccgagcgggaagcgattgcaaattctaggatacctggaaggaacacgcacattattagcctctaagatcatcaacaataa

SEQ ID NO: 27449 - DNA, 80 bp, synthetic construct
  misc_feature 1..80: note = Synthetic: >NC_002549.1-cand-14770-14849
  source 1..80: mol_type = other DNA
tacagagacaccggttttggacagactgaggaaaataacattgcaaaggtggagcctatggtttagttatcttgatcatt

SEQ ID NO: 27450 - DNA, 80 bp, synthetic construct
  misc_feature 1..80: note = Synthetic: >NC_002549.1-cand-14850-14929
  source 1..80: mol_type = other DNA
gtgataatatcctggcggaggctttaacccaaataacttgcacagttgatttagcacagattctgagggaatattcatgg

SEQ ID NO: 27451 - DNA, 80 bp, synthetic construct
  misc_feature 1..80: note = Synthetic: >NC_002549.1-cand-14930-15009
  source 1..80: mol_type = other DNA
gctcatattttagagggaagacctcttattggagccacactcccatgtatgattgagcaattcaaagtgttttggctgaa

SEQ ID NO: 27452 - DNA, 80 bp, synthetic construct
  misc_feature 1..80: note = Synthetic: >NC_002549.1-cand-14990-15069
  source 1..80: mol_type = other DNA
ttcaaagtgttttggctgaaaccctacgaacaatgtccgcagtgttcaaatgcaaagcaaccaggtgggaaaccattcgt

SEQ ID NO: 27453 - DNA, 80 bp, synthetic construct
  misc_feature 1..80: note = Synthetic: >NC_002549.1-cand-15060-15139
  source 1..80: mol_type = other DNA
aaccattcgtgtcagtggcagtcaagaaacatattgttagtgcatggccgaacgcatcccgaataagctggactatcggg

SEQ ID NO: 27454 - DNA, 80 bp, synthetic construct
  misc_feature 1..80: note = Synthetic: >NC_002549.1-cand-15150-15229
  source 1..80: mol_type = other DNA
catacattggatcaaggacagaagataagataggacaacctgctattaaaccaaaatgtccttccgcagccttaagagag

SEQ ID NO: 27455 - DNA, 80 bp, synthetic construct
  misc_feature 1..80: note = Synthetic: >NC_002549.1-cand-15230-15309
  source 1..80: mol_type = other DNA
gccattgaattggcgtcccgtttaacatgggtaactcaaggcagttcgaacagtgacttgctaataaaaccatttttgga

SEQ ID NO: 27456 - DNA, 80 bp, synthetic construct
  misc_feature 1..80: note = Synthetic: >NC_002549.1-cand-15310-15389
  source 1..80: mol_type = other DNA
agcacgagtaaatttaagtgttcaagaaatacttcaaatgaccccttcacattactcaggaaatattgttcacaggtaca

SEQ ID NO: 27457 - DNA, 80 bp, synthetic construct
  misc_feature 1..80: note = Synthetic: >NC_002549.1-cand-15390-15469
  source 1..80: mol_type = other DNA
acgatcaatacagtcctcattctttcatggccaatcgtatgagtaattcagcaacgcgattgattgtttctacaaacact

SEQ ID NO: 27458 - DNA, 80 bp, synthetic construct
  misc_feature 1..80: note = Synthetic: >NC_002549.1-cand-15470-15549
  source 1..80: mol_type = other DNA
ttaggtgagttttcaggaggtggccagtctgcacgcgacagcaatattattttccagaatgttataaattatgcagttgc

SEQ ID NO: 27459 - DNA, 80 bp, synthetic construct
  misc_feature 1..80: note = Synthetic: >NC_002549.1-cand-15550-15629
  source 1..80: mol_type = other DNA
actgttcgatattaaatttagaaacactgaggctacagatatccaatataatcgtgctcaccttcatctaactaagtgtt

SEQ ID NO: 27460 - DNA, 80 bp, synthetic construct
  misc_feature 1..80: note = Synthetic: >NC_002549.1-cand-15630-15709
  source 1..80: mol_type = other DNA
gcacccgggaagtaccagctcagtatttaacatacacatctacattggatttagatttaacaagataccgagaaaacgaa

SEQ ID NO: 27461 - DNA, 80 bp, synthetic construct
  misc_feature 1..80: note = Synthetic: >NC_002549.1-cand-15710-15789
  source 1..80: mol_type = other DNA
ttgatttatgacagtaatcctctaaaaggaggactcaattgcaatatctcattcgataatccatttttccaaggtaaacg

SEQ ID NO: 27462 - DNA, 80 bp, synthetic construct
  misc_feature 1..80: note = Synthetic: >NC_002549.1-cand-15790-15869
  source 1..80: mol_type = other DNA
gctgaacattatagaagatgatcttattcgactgcctcacttatctggatgggagctagccaagaccatcatgcaatcaa

SEQ ID NO: 27463 - DNA, 80 bp, synthetic construct
  misc_feature 1..80: note = Synthetic: >NC_002549.1-cand-15870-15949
  source 1..80: mol_type = other DNA
ttatttcagatagcaacaattcatctacagacccaattagcagtggagaaacaagatcattcactacccatttcttaact

SEQ ID NO: 27464 - DNA, 80 bp, synthetic construct
  misc_feature 1..80: note = Synthetic: >NC_002549.1-cand-15990-16069
  source 1..80: mol_type = other DNA
taagttattatcttggcaatacaattcttcggactaagaaattaacacttgacaattttttatattacttaactactcaa

SEQ ID NO: 27465 - DNA, 80 bp, synthetic construct
  misc_feature 1..80: note = Synthetic: >NC_002549.1-cand-16030-16109
  source 1..80: mol_type = other DNA
attaacacttgacaattttttatattacttaactactcaaattcataatctaccacatcgctcattgcgaatacttaagc

SEQ ID NO: 27466 - DNA, 80 bp, synthetic construct
  misc_feature 1..80: note = Synthetic: >NC_002549.1-cand-16110-16189
  source 1..80: mol_type = other DNA
caacattcaaacatgcaagcgttatgtcacggttaatgagtattgatcctcatttttctatttacataggcggtgctgca

SEQ ID NO: 27467 - DNA, 80 bp, synthetic construct
  misc_feature 1..80: note = Synthetic: >NC_002549.1-cand-16190-16269
  source 1..80: mol_type = other DNA
ggtgacagaggactctcagatgcggccaggttatttttgagaacgtccatttcatcttttcttacatttgtaaaagaatg

SEQ ID NO: 27468 - DNA, 80 bp, synthetic construct
  misc_feature 1..80: note = Synthetic: >NC_002549.1-cand-16270-16349
  source 1..80: mol_type = other DNA
gataattaatcgcggaacaattgtccctttatggatagtatatccgctagagggtcaaaacccaacacctgtgaataatt

SEQ ID NO: 27469 - DNA, 80 bp, synthetic construct
  misc_feature 1..80: note = Synthetic: >NC_002549.1-cand-16350-16429
  source 1..80: mol_type = other DNA
ttctctatcagatcgtagaactgctggtgcatgattcatcaagacaacaggcttttaaaactaccataagtgatcatgta

SEQ ID NO: 27470 - DNA, 80 bp, synthetic construct
  misc_feature 1..80: note = Synthetic: >NC_002549.1-cand-16430-16509
  source 1..80: mol_type = other DNA
catcctcacgacaatcttgtttacacatgtaagagtacagccagcaatttcttccatgcatcattggcgtactggaggag

SEQ ID NO: 27471 - DNA, 80 bp, synthetic construct
  misc_feature 1..80: note = Synthetic: >NC_002549.1-cand-16510-16589
  source 1..80: mol_type = other DNA
cagacacagaaacagcaaccgaaaatacttggcaagagactcttcaactggatcaagcacaaacaacagtgatggtcata

SEQ ID NO: 27472 - DNA, 80 bp, synthetic construct
  misc_feature 1..80: note = Synthetic: >NC_002549.1-cand-16590-16669
  source 1..80: mol_type = other DNA
ttgagagaagtcaagaacaaaccaccagagatccacatgatggcactgaacggaatctagtcctacaaatgagccatgaa

SEQ ID NO: 27473 - DNA, 80 bp, synthetic construct
  misc_feature 1..80: note = Synthetic: >NC_002549.1-cand-16670-16749
  source 1..80: mol_type = other DNA
ataaaaagaacgacaattccacaagaaaacacgcaccagggtccgtcgttccagtcctttctaagtgactctgcttgtgg

SEQ ID NO: 27474 - DNA, 80 bp, synthetic construct
  misc_feature 1..80: note = Synthetic: >NC_002549.1-cand-16750-16829
  source 1..80: mol_type = other DNA
tacagcaaatccaaaactaaatttcgatcgatcgagacacaatgtgaaatttcaggatcataactcggcatccaagaggg

SEQ ID NO: 27475 - DNA, 80 bp, synthetic construct
  misc_feature 1..80: note = Synthetic: >NC_002549.1-cand-16830-16909
  source 1..80: mol_type = other DNA
aaggtcatcaaataatctcacaccgtctagtcctacctttctttacattatctcaagggacacgccaattaacgtcatcc

SEQ ID NO: 27476 - DNA, 80 bp, synthetic construct
  misc_feature 1..80: note = Synthetic: >NC_002549.1-cand-16910-16989
  source 1..80: mol_type = other DNA
aatgagtcacaaacccaagacgagatatcaaagtacttacggcaattgagatccgtcattgataccacagtttattgtag

SEQ ID NO: 27477 - DNA, 80 bp, synthetic construct
  misc_feature 1..80: note = Synthetic: >NC_002549.1-cand-16990-17069
  source 1..80: mol_type = other DNA
atttaccggtatagtctcgtccatgcattacaaacttgatgaggtcctttgggaaatagagagtttcaagtcggctgtga

SEQ ID NO: 27478 - DNA, 80 bp, synthetic construct
  misc_feature 1..80: note = Synthetic: >NC_002549.1-cand-17070-17149
  source 1..80: mol_type = other DNA
cgctagcagagggagaaggtgctggtgccttactattgattcagaaataccaagttaagaccttatttttcaacacgcta

SEQ ID NO: 27479 - DNA, 80 bp, synthetic construct
  misc_feature 1..80: note = Synthetic: >NC_002549.1-cand-17150-17229
  source 1..80: mol_type = other DNA
gctactgagtccagtatagagtcagaaatagtatcaggaatgactactcctaggatgcttctacctgttatgtcaaaatt

SEQ ID NO: 27480 - DNA, 80 bp, synthetic construct
  misc_feature 1..80: note = Synthetic: >NC_002549.1-cand-17230-17309
  source 1..80: mol_type = other DNA
ccataatgaccaaattgagattattcttaacaactcagcaagccaaataacagacataacaaatcctacttggtttaaag

SEQ ID NO: 27481 - DNA, 80 bp, synthetic construct
  misc_feature 1..80: note = Synthetic: >NC_002549.1-cand-17310-17389
  source 1..80: mol_type = other DNA
accaaagagcaaggctacctaagcaagtcgaggttataaccatggatgcagagacaacagagaatataaacagatcgaaa

SEQ ID NO: 27482 - DNA, 80 bp, synthetic construct
  misc_feature 1..80: note = Synthetic: >NC_002549.1-cand-17390-17469
  source 1..80: mol_type = other DNA
ttgtacgaagctgtatataaattgatcttacaccatattgatcctagcgtattgaaagcagtggtccttaaagtctttct

SEQ ID NO: 27483 - DNA, 80 bp, synthetic construct
  misc_feature 1..80: note = Synthetic: >NC_002549.1-cand-17470-17549
  source 1..80: mol_type = other DNA
aagtgatactgagggtatgttatggctaaatgataatttagccccgttttttgccactggttatttaattaagccaataa

SEQ ID NO: 27484 - DNA, 80 bp, synthetic construct
  misc_feature 1..80: note = Synthetic: >NC_002549.1-cand-17550-17629
  source 1..80: mol_type = other DNA
cgtcaagtgctagatctagtgagtggtatctttgtctgacgaacttcttatcaactacacgtaagatgccacaccaaaac

SEQ ID NO: 27485 - DNA, 80 bp, synthetic construct
  misc_feature 1..80: note = Synthetic: >NC_002549.1-cand-17630-17709
  source 1..80: mol_type = other DNA
catctcagttgtaaacaggtaatacttacggcattgcaactgcaaattcaacgaagcccatactggctaagtcatttaac

SEQ ID NO: 27486 - DNA, 80 bp, synthetic construct
  misc_feature 1..80: note = Synthetic: >NC_002549.1-cand-17710-17789
  source 1..80: mol_type = other DNA
tcagtatgctgactgtgagttacatttaagttatatccgccttggttttccatcattagagaaagtactataccacaggt

SEQ ID NO: 27487 - DNA, 80 bp, synthetic construct
  misc_feature 1..80: note = Synthetic: >NC_002549.1-cand-17790-17869
  source 1..80: mol_type = other DNA
ataacctcgtcgattcaaaaagaggtccactagtctctatcactcagcacttagcacatcttagagcagagattcgagaa

SEQ ID NO: 27488 - DNA, 80 bp, synthetic construct
  misc_feature 1..80: note = Synthetic: >NC_002549.1-cand-17870-17949
  source 1..80: mol_type = other DNA
ttaactaatgattataatcaacagcgacaaagtcggactcaaacatatcactttattcgtactgcaaaaggacgaatcac

SEQ ID NO: 27489 - DNA, 80 bp, synthetic construct
  misc_feature 1..80: note = Synthetic: >NC_002549.1-cand-17940-18019
  source 1..80: mol_type = other DNA
gacgaatcacaaaactagtcaatgattatttaaaattctttcttattgtgcaagcattaaaacataatgggacatggcaa

SEQ ID NO: 27490 - DNA, 80 bp, synthetic construct
  misc_feature 1..80: note = Synthetic: >NC_002549.1-cand-18020-18099
  source 1..80: mol_type = other DNA
gctgagtttaagaaattaccagagttgattagtgtgtgcaataggttctaccatattagagattgcaattgtgaagaacg

SEQ ID NO: 27491 - DNA, 80 bp, synthetic construct
  misc_feature 1..80: note = Synthetic: >NC_002549.1-cand-18100-18179
  source 1..80: mol_type = other DNA
tttcttagttcaaaccttatatttacatagaatgcaggattctgaagttaagcttatcgaaaggctgacagggcttctga

SEQ ID NO: 27492 - DNA, 80 bp, synthetic construct
  misc_feature 1..80: note = Synthetic: >NC_002549.1-cand-18180-18259
  source 1..80: mol_type = other DNA
gtttatttccggatggtctctacaggtttgattgaattaccgtgcatagtatcctgatacttgcaaaggttggttattaa

SEQ ID NO: 27493 - DNA, 80 bp, synthetic construct
  misc_feature 1..80: note = Synthetic: >NC_002549.1-cand-18260-18339
  source 1..80: mol_type = other DNA
catacagattataaaaaactcataaattgctctcatacatcatattgatctaatctcaataaacaactatttaaataacg

SEQ ID NO: 27494 - DNA, 80 bp, synthetic construct
  misc_feature 1..80: note = Synthetic: >NC_002549.1-cand-18340-18419
  source 1..80: mol_type = other DNA
aaaggagtccctatattatatactatatttagcctctctccctgcgtgataatcaaaaaattcacaatgcagcatgtgtg

SEQ ID NO: 27495 - DNA, 80 bp, synthetic construct
  misc_feature 1..80: note = Synthetic: >NC_002549.1-cand-18420-18499
  source 1..80: mol_type = other DNA
acatattactgccgcaatgaatttaacgcaacataataaactctgcactctttataattaagctttaacgaaaggtctgg

SEQ ID NO: 27496 - DNA, 80 bp, synthetic construct
  misc_feature 1..80: note = Synthetic: >NC_002549.1-cand-18500-18579
  source 1..80: mol_type = other DNA
gctcatattgttattgatataataatgttgtatcaatatcctgtcagatggaatagtgttttggttgataacacaacttc

SEQ ID NO: 27497 - DNA, 80 bp, synthetic construct
  misc_feature 1..80: note = Synthetic: >NC_002549.1-cand-18580-18659
  source 1..80: mol_type = other DNA
ttaaaacaaaattgatctttaagattaagttttttataattatcattactttaatttgtcgttttaaaaacggtgatagc

SEQ ID NO: 27498 - DNA, 80 bp, synthetic construct
  misc_feature 1..80: note = Synthetic: >NC_002549.1-cand-18660-18739
  source 1..80: mol_type = other DNA
cttaatctttgtgtaaaataagagattaggtgtaataaccttaacatttttgtctagtaagctactatttcatacagaat

SEQ ID NO: 27499 - DNA, 80 bp, synthetic construct
  misc_feature 1..80: note = Synthetic: >NC_002549.1-cand-18740-18819
  source 1..80: mol_type = other DNA
gataaaattaaaagaaaaggcaggactgtaaaatcagaaataccttctttacaatatagcagactagataataatcttcg

SEQ ID NO: 27500 - DNA, 80 bp, synthetic construct
  misc_feature 1..80: note = Synthetic: >NC_002549.1-cand-18820-18899
  source 1..80: mol_type = other DNA
tgttaatgataattaagacattgaccacgctcatcagaaggctcgccagaataaacgttgcaaaaaggattcctggaaaa

SEQ ID NO: 27501 - DNA, 80 bp, synthetic construct
  misc_feature 1..80: note = Synthetic: >NC_004718.3-cand-0-79
  source 1..80: mol_type = other DNA
taggtttttacctacccaggaaaagccaaccaacctcgatctcttgtagatctgttctctaaacgaactttaaaatctgt

SEQ ID NO: 27502 - DNA, 80 bp, synthetic construct
  misc_feature 1..80: note = Synthetic: >NC_004718.3-cand-60-139
  source 1..80: mol_type = other DNA
aaacgaactttaaaatctgtgtagctgtcgctcggctgcatgcctagtgcacctacgcagtataaacaataataaatttt

SEQ ID NO: 27503 - DNA, 80 bp, synthetic construct
  misc_feature 1..80: note = Synthetic: >NC_004718.3-cand-130-209
  source 1..80: mol_type = other DNA
aataaattttactgtcgttgacaagaaacgagtaactcgtccctcttctgcagactgcttacggtttcgtccgtgttgca

SEQ ID NO: 27504 - DNA, 80 bp, synthetic construct
  misc_feature 1..80: note = Synthetic: >NC_004718.3-cand-210-289
  source 1..80: mol_type = other DNA
gtcgatcatcagcatacctaggtttcgtccgggtgtgaccgaaaggtaagatggagagccttgttcttggtgtcaacgag

SEQ ID NO: 27505 - DNA, 80 bp, synthetic construct
  misc_feature 1..80: note = Synthetic: >NC_004718.3-cand-270-349
  source 1..80: mol_type = other DNA
ttgttcttggtgtcaacgagaaaacacacgtccaactcagtttgcctgtccttcaggttagagacgtgctagtgcgtggc

SEQ ID NO: 27506 - DNA, 80 bp, synthetic construct
  misc_feature 1..80: note = Synthetic: >NC_004718.3-cand-370-449
  source 1..80: mol_type = other DNA
ggccctatcggaggcacgtgaacacctcaaaaatggcacttgtggtctagtagagctggaaaaaggcgtactgccccagc

SEQ ID NO: 27507 - DNA, 80 bp, synthetic construct
  misc_feature 1..80: note = Synthetic: >NC_004718.3-cand-450-529
  source 1..80: mol_type = other DNA
ttgaacagccctatgtgttcattaaacgttctgatgccttaagcaccaatcacggccacaaggtcgttgagctggttgca

SEQ ID NO: 27508 - DNA, 80 bp, synthetic construct
  misc_feature 1..80: note = Synthetic: >NC_004718.3-cand-530-609
  source 1..80: mol_type = other DNA
gaaatggacggcattcagtacggtcgtagcggtataacactgggagtactcgtgccacatgtgggcgaaaccccaattgc

SEQ ID NO: 27509 - DNA, 80 bp, synthetic construct
  misc_feature 1..80: note = Synthetic: >NC_004718.3-cand-610-689
  source 1..80: mol_type = other DNA
ataccgcaatgttcttcttcgtaagaacggtaataagggagccggtggtcatagctatggcatcgatctaaagtcttatg

SEQ ID NO: 27510 - DNA, 80 bp, synthetic construct
  misc_feature 1..80: note = Synthetic: >NC_004718.3-cand-690-769
  source 1..80: mol_type = other DNA
acttaggtgacgagcttggcactgatcccattgaagattatgaacaaaactggaacactaagcatggcagtggtgcactc

SEQ ID NO: 27511 - DNA, 80 bp, synthetic construct
  misc_feature 1..80: note = Synthetic: >NC_004718.3-cand-770-849
  source 1..80: mol_type = other DNA
cgtgaactcactcgtgagctcaatggaggtgcagtcactcgctatgtcgacaacaatttctgtggcccagatgggtaccc

SEQ ID NO: 27512 - DNA, 80 bp, synthetic construct
  misc_feature 1..80: note = Synthetic: >NC_004718.3-cand-850-929
  source 1..80: mol_type = other DNA
tcttgattgcatcaaagattttctcgcacgcgcgggcaagtcaatgtgcactctttccgaacaacttgattacatcgagt

SEQ ID NO: 27513 - DNA, 80 bp, synthetic construct
  misc_feature 1..80: note = Synthetic: >NC_004718.3-cand-930-1009
  source 1..80: mol_type = other DNA
cgaagagaggtgtctactgctgccgtgaccatgagcatgaaattgcctggttcactgagcgctctgataagagctacgag

SEQ ID NO: 27514 - DNA, 80 bp, synthetic construct
  misc_feature 1..80: note = Synthetic: >NC_004718.3-cand-980-1059
  source 1..80: mol_type = other DNA
ttcactgagcgctctgataagagctacgagcaccagacacccttcgaaattaagagtgccaagaaatttgacactttcaa

SEQ ID NO: 27515 - DNA, 80 bp, synthetic construct
  misc_feature 1..80: note = Synthetic: >NC_004718.3-cand-1070-1149
  source 1..80: mol_type = other DNA
ccaaagtttgtgtttcctcttaactcaaaagtcaaagtcattcaaccacgtgttgaaaagaaaaagactgagggtttcat

SEQ ID NO: 27516 - DNA, 80 bp, synthetic construct
  misc_feature 1..80: note = Synthetic: >NC_004718.3-cand-1170-1249
  source 1..80: mol_type = other DNA
accctgttgcatctccacaggagtgtaacaatatgcacttgtctaccttgatgaaatgtaatcattgcgatgaagtttca

SEQ ID NO: 27517 - DNA, 80 bp, synthetic construct
  misc_feature 1..80: note = Synthetic: >NC_004718.3-cand-1250-1329
  source 1..80: mol_type = other DNA
tggcagacgtgcgactttctgaaagccacttgtgaacattgtggcactgaaaatttagttattgaaggacctactacatg

SEQ ID NO: 27518 - DNA, 80 bp, synthetic construct
  misc_feature 1..80: note = Synthetic: >NC_004718.3-cand-1330-1409
  source 1..80: mol_type = other DNA
tgggtacctacctactaatgctgtagtgaaaatgccatgtcctgcctgtcaagacccagagattggacctgagcatagtg

SEQ ID NO: 27519 - DNA, 80 bp, synthetic construct
  misc_feature 1..80: note = Synthetic: >NC_004718.3-cand-1410-1489
  source 1..80: mol_type = other DNA
ttgcagattatcacaaccactcaaacattgaaactcgactccgcaagggaggtaggactagatgttttggaggctgtgtg

SEQ ID NO: 27520 - DNA, 80 bp, synthetic construct
  misc_feature 1..80: note = Synthetic: >NC_004718.3-cand-1490-1569
  source 1..80: mol_type = other DNA
tttgcctatgttggctgctataataagcgtgcctactgggttcctcgtgctagtgctgatattggctcaggccatactgg

SEQ ID NO: 27521 - DNA, 80 bp, synthetic construct
  misc_feature 1..80: note = Synthetic: >NC_004718.3-cand-1570-1649
  source 1..80: mol_type = other DNA
cattactggtgacaatgtggagaccttgaatgaggatctccttgagatactgagtcgtgaacgtgttaacattaacattg

SEQ ID NO: 27522 - DNA, 80 bp, synthetic construct
  misc_feature 1..80: note = Synthetic: >NC_004718.3-cand-1650-1729
  source 1..80: mol_type = other DNA
ttggcgattttcatttgaatgaagaggttgccatcattttggcatctttctctgcttctacaagtgcctttattgacact

SEQ ID NO: 27523 - DNA, 80 bp, synthetic construct
  misc_feature 1..80: note = Synthetic: >NC_004718.3-cand-1730-1809
  source 1..80: mol_type = other DNA
ataaagagtcttgattacaagtctttcaaaaccattgttgagtcctgcggtaactataaagttaccaagggaaagcccgt

SEQ ID NO: 27524 - DNA, 80 bp, synthetic construct
  misc_feature 1..80: note = Synthetic: >NC_004718.3-cand-1810-1889
  source 1..80: mol_type = other DNA
aaaaggtgcttggaacattggacaacagagatcagttttaacaccactgtgtggttttccctcacaggctgctggtgtta

SEQ ID NO: 27525 - DNA, 80 bp, synthetic construct
  misc_feature 1..80: note = Synthetic: >NC_004718.3-cand-1890-1969
  source 1..80: mol_type = other DNA
tcagatcaatttttgcgcgcacacttgatgcagcaaaccactcaattcctgatttgcaaagagcagctgtcaccatactt

SEQ ID NO: 27526 - DNA, 80 bp, synthetic construct
  misc_feature 1..80: note = Synthetic: >NC_004718.3-cand-1970-2049
  source 1..80: mol_type = other DNA
gatggtatttctgaacagtcattacgtcttgtcgacgccatggtttatacttcagacctgctcaccaacagtgtcattat

SEQ ID NO: 27527 - DNA, 80 bp, synthetic construct
  misc_feature 1..80: note = Synthetic: >NC_004718.3-cand-2050-2129
  source 1..80: mol_type = other DNA
tatggcatatgtaactggtggtcttgtacaacagacttctcagtggttgtctaatcttttgggcactactgttgaaaaac

SEQ ID NO: 27528 - DNA, 80 bp, synthetic construct
  misc_feature 1..80: note = Synthetic: >NC_004718.3-cand-2130-2209
  source 1..80: mol_type = other DNA
tcaggcctatctttgaatggattgaggcgaaacttagtgcaggagttgaatttctcaaggatgcttgggagattctcaaa

SEQ ID NO: 27529 - DNA, 80 bp, synthetic construct
  misc_feature 1..80: note = Synthetic: >NC_004718.3-cand-2210-2289
  source 1..80: mol_type = other DNA
tttctcattacaggtgtttttgacatcgtcaagggtcaaatacaggttgcttcagataacatcaaggattgtgtaaaatg

SEQ ID NO: 27530 - DNA, 80 bp, synthetic construct
  misc_feature 1..80: note = Synthetic: >NC_004718.3-cand-2290-2369
  source 1..80: mol_type = other DNA
cttcattgatgttgttaacaaggcactcgaaatgtgcattgatcaagtcactatcgctggcgcaaagttgcgatcactca

SEQ ID NO: 27531 - DNA, 80 bp, synthetic construct
  misc_feature 1..80: note = Synthetic: >NC_004718.3-cand-2370-2449
  source 1..80: mol_type = other DNA
acttaggtgaagtcttcatcgctcaaagcaagggactttaccgtcagtgtatacgtggcaaggagcagctgcaactactc

SEQ ID NO: 27532 - DNA, 80 bp, synthetic construct
  misc_feature 1..80: note = Synthetic: >NC_004718.3-cand-2450-2529
  source 1..80: mol_type = other DNA
atgcctcttaaggcaccaaaagaagtaacctttcttgaaggtgattcacatgacacagtacttacctctgaggaggttgt

SEQ ID NO: 27533 - DNA, 80 bp, synthetic construct
  misc_feature 1..80: note = Synthetic: >NC_004718.3-cand-2530-2609
  source 1..80: mol_type = other DNA
tctcaagaacggtgaactcgaagcactcgagacgcccgttgatagcttcacaaatggagctatcgttggcacaccagtct

SEQ ID NO: 27534 - DNA, 80 bp, synthetic construct
  misc_feature 1..80: note = Synthetic: >NC_004718.3-cand-2610-2689
  source 1..80: mol_type = other DNA
gtgtaaatggcctcatgctcttagagattaaggacaaagaacaatactgcgcattgtctcctggtttactggctacaaac

SEQ ID NO: 27535 - DNA, 80 bp, synthetic construct
  misc_feature 1..80: note = Synthetic: >NC_004718.3-cand-2710-2789
  source 1..80: mol_type = other DNA
gggtgcaccaattaaaggtgtaacctttggagaagatactgtttgggaagttcaaggttacaagaatgtgagaatcacat

SEQ ID NO: 27536 - DNA, 80 bp, synthetic construct
  misc_feature 1..80: note = Synthetic: >NC_004718.3-cand-2770-2849
  source 1..80: mol_type = other DNA
caagaatgtgagaatcacatttgagcttgatgaacgtgttgacaaagtgcttaatgaaaagtgctctgtctacactgttg

SEQ ID NO: 27537 - DNA, 80 bp, synthetic construct
  misc_feature 1..80: note = Synthetic: >NC_004718.3-cand-2850-2929
  source 1..80: mol_type = other DNA
aatccggtaccgaagttactgagtttgcatgtgttgtagcagaggctgttgtgaagactttacaaccagtttctgatctc

SEQ ID NO: 27538 - DNA, 80 bp, synthetic construct
  misc_feature 1..80: note = Synthetic: >NC_004718.3-cand-2930-3009
  source 1..80: mol_type = other DNA
cttaccaacatgggtattgatcttgatgagtggagtgtagctacattctacttatttgatgatgctggtgaagaaaactt

SEQ ID NO: 27539 - DNA, 80 bp, synthetic construct
  misc_feature 1..80: note = Synthetic: >NC_004718.3-cand-3010-3089
  source 1..80: mol_type = other DNA
ttcatcacgtatgtattgttccttttaccctccagatgaggaagaagaggacgatgcagagtgtgaggaagaagaaattg

SEQ ID NO: 27540 - DNA, 80 bp, synthetic construct
  misc_feature 1..80: note = Synthetic: >NC_004718.3-cand-3090-3169
  source 1..80: mol_type = other DNA
atgaaacctgtgaacatgagtacggtacagaggatgattatcaaggtctccctctggaatttggtgcctcagctgaaaca

SEQ ID NO: 27541 - DNA, 80 bp, synthetic construct
  misc_feature 1..80: note = Synthetic: >NC_004718.3-cand-3170-3249
  source 1..80: mol_type = other DNA
gttcgagttgaggaagaagaagaggaagactggctggatgatactactgagcaatcagagattgagccagaaccagaacc

SEQ ID NO: 27542 - DNA, 80 bp, synthetic construct
  misc_feature 1..80: note = Synthetic: >NC_004718.3-cand-3250-3329
  source 1..80: mol_type = other DNA
tacacctgaagaaccagttaatcagtttactggttatttaaaacttactgacaatgttgccattaaatgtgttgacatcg

SEQ ID NO: 27543 - DNA, 80 bp, synthetic construct
  misc_feature 1..80: note = Synthetic: >NC_004718.3-cand-3330-3409
  source 1..80: mol_type = other DNA
ttaaggaggcacaaagtgctaatcctatggtgattgtaaatgctgctaacatacacctgaaacatggtggtggtgtagca

SEQ ID NO: 27544 - DNA, 80 bp, synthetic construct
  misc_feature 1..80: note = Synthetic: >NC_004718.3-cand-3410-3489
  source 1..80: mol_type = other DNA
ggtgcactcaacaaggcaaccaatggtgccatgcaaaaggagagtgatgattacattaagctaaatggccctcttacagt

SEQ ID NO: 27545 - DNA, 80 bp, synthetic construct
  misc_feature 1..80: note = Synthetic: >NC_004718.3-cand-3490-3569
  source 1..80: mol_type = other DNA
aggagggtcttgtttgctttctggacataatcttgctaagaagtgtctgcatgttgttggacctaacctaaatgcaggtg

SEQ ID NO: 27546 - DNA, 80 bp, synthetic construct
  misc_feature 1..80: note = Synthetic: >NC_004718.3-cand-3570-3649
  source 1..80: mol_type = other DNA
aggacatccagcttcttaaggcagcatatgaaaatttcaattcacaggacatcttacttgcaccattgttgtcagcaggc

SEQ ID NO: 27547 - DNA, 80 bp, synthetic construct
  misc_feature 1..80: note = Synthetic: >NC_004718.3-cand-3650-3729
  source 1..80: mol_type = other DNA
atatttggtgctaaaccacttcagtctttacaagtgtgcgtgcagacggttcgtacacaggtttatattgcagtcaatga

SEQ ID NO: 27548 - DNA, 80 bp, synthetic construct
  misc_feature 1..80: note = Synthetic: >NC_004718.3-cand-3730-3809
  source 1..80: mol_type = other DNA
caaagctctttatgagcaggttgtcatggattatcttgataacctgaagcctagagtggaagcacctaaacaagaggagc

SEQ ID NO: 27549 - DNA, 80 bp, synthetic construct
  misc_feature 1..80: note = Synthetic: >NC_004718.3-cand-3810-3889
  source 1..80: mol_type = other DNA
caccaaacacagaagattccaaaactgaggagaaatctgtcgtacagaagcctgtcgatgtgaagccaaaaattaaggcc

SEQ ID NO: 27550 - DNA, 80 bp, synthetic construct
  misc_feature 1..80: note = Synthetic: >NC_004718.3-cand-3890-3969
  source 1..80: mol_type = other DNA
tgcattgatgaggttaccacaacactggaagaaactaagtttcttaccaataagttactcttgtttgctgatatcaatgg

SEQ ID NO: 27551 - DNA, 80 bp, synthetic construct
  misc_feature 1..80: note = Synthetic: >NC_004718.3-cand-3970-4049
  source 1..80: mol_type = other DNA
taagctttaccatgattctcagaacatgcttagaggtgaagatatgtctttccttgagaaggatgcaccttacatggtag

SEQ ID NO: 27552 - DNA, 80 bp, synthetic construct
  misc_feature 1..80: note = Synthetic: >NC_004718.3-cand-4050-4129
  source 1..80: mol_type = other DNA
gtgatgttatcactagtggtgatatcacttgtgttgtaataccctccaaaaaggctggtggcactactgagatgctctca

SEQ ID NO: 27553 - DNA, 80 bp, synthetic construct
  misc_feature 1..80: note = Synthetic: >NC_004718.3-cand-4130-4209
  source 1..80: mol_type = other DNA
agagctttgaagaaagtgccagttgatgagtatataaccacgtaccctggacaaggatgtgctggttatacacttgagga

SEQ ID NO: 27554 - DNA, 80 bp, synthetic construct
  misc_feature 1..80: note = Synthetic: >NC_004718.3-cand-4210-4289
  source 1..80: mol_type = other DNA
agctaagactgctcttaagaaatgcaaatctgcattttatgtactaccttcagaagcacctaatgctaaggaagagattc

SEQ ID NO: 27555 - DNA, 80 bp, synthetic construct
  misc_feature 1..80: note = Synthetic: >NC_004718.3-cand-4290-4369
  source 1..80: mol_type = other DNA
taggaactgtatcctggaatttgagagaaatgcttgctcatgctgaagagacaagaaaattaatgcctatatgcatggat

SEQ ID NO: 27556 - DNA, 80 bp, synthetic construct
  misc_feature 1..80: note = Synthetic: >NC_004718.3-cand-4370-4449
  source 1..80: mol_type = other DNA
gttagagccataatggcaaccatccaacgtaagtataaaggaattaaaattcaagagggcatcgttgactatggtgtccg

SEQ ID NO: 27557 - DNA, 80 bp, synthetic construct
  misc_feature 1..80: note = Synthetic: >NC_004718.3-cand-4450-4529
  source 1..80: mol_type = other DNA
attcttcttttatactagtaaagagcctgtagcttctattattacgaagctgaactctctaaatgagccgcttgtcacaa

SEQ ID NO: 27558 - DNA, 80 bp, synthetic construct
  misc_feature 1..80: note = Synthetic: >NC_004718.3-cand-4530-4609
  source 1..80: mol_type = other DNA
tgccaattggttatgtgacacatggttttaatcttgaagaggctgcgcgctgtatgcgttctcttaaagctcctgccgta

SEQ ID NO: 27559 - DNA, 80 bp, synthetic construct
  misc_feature 1..80: note = Synthetic: >NC_004718.3-cand-4610-4689
  source 1..80: mol_type = other DNA
gtgtcagtatcatcaccagatgctgttactacatataatggatacctcacttcgtcatcaaagacatctgaggagcactt

SEQ ID NO: 27560 - DNA, 80 bp, synthetic construct
  misc_feature 1..80: note = Synthetic: >NC_004718.3-cand-4690-4769
  source 1..80: mol_type = other DNA
tgtagaaacagtttctttggctggctcttacagagattggtcctattcaggacagcgtacagagttaggtgttgaatttc

SEQ ID NO: 27561 - DNA, 80 bp, synthetic construct
  misc_feature 1..80: note = Synthetic: >NC_004718.3-cand-4770-4849
  source 1..80: mol_type = other DNA
ttaagcgtggtgacaaaattgtgtaccacactctggagagccccgtcgagtttcatcttgacggtgaggttctttcactt

SEQ ID NO: 27562 - DNA, 80 bp, synthetic construct
  misc_feature 1..80: note = Synthetic: >NC_004718.3-cand-4850-4929
  source 1..80: mol_type = other DNA
gacaaactaaagagtctcttatccctgcgggaggttaagactataaaagtgttcacaactgtggacaacactaatctcca

SEQ ID NO: 27563 - DNA, 80 bp, synthetic construct
  misc_feature 1..80: note = Synthetic: >NC_004718.3-cand-4930-5009
  source 1..80: mol_type = other DNA
cacacagcttgtggatatgtctatgacatatggacagcagtttggtccaacatacttggatggtgctgatgttacaaaaa

SEQ ID NO: 27564 - DNA, 80 bp, synthetic construct
  misc_feature 1..80: note = Synthetic: >NC_004718.3-cand-5010-5089
  source 1..80: mol_type = other DNA
ttaaacctcatgtaaatcatgagggtaagactttctttgtactacctagtgatgacacactacgtagtgaagctttcgag

SEQ ID NO: 27565 - DNA, 80 bp, synthetic construct
  misc_feature 1..80: note = Synthetic: >NC_004718.3-cand-5090-5169
  source 1..80: mol_type = other DNA
tactaccatactcttgatgagagttttcttggtaggtacatgtctgctttaaaccacacaaagaaatggaaatttcctca

SEQ ID NO: 27566 - DNA, 80 bp, synthetic construct
  misc_feature 1..80: note = Synthetic: >NC_004718.3-cand-5170-5249
  source 1..80: mol_type = other DNA
agttggtggtttaacttcaattaaatgggctgataacaattgttatttgtctagtgttttattagcacttcaacagcttg

SEQ ID NO: 27567 - DNA, 80 bp, synthetic construct
  misc_feature 1..80: note = Synthetic: >NC_004718.3-cand-5250-5329
  source 1..80: mol_type = other DNA
aagtcaaattcaatgcaccagcacttcaagaggcttattatagagcccgtgctggtgatgctgctaacttttgtgcactc

SEQ ID NO: 27568 - DNA, 80 bp, synthetic construct
  misc_feature 1..80: note = Synthetic: >NC_004718.3-cand-5330-5409
  source 1..80: mol_type = other DNA
atactcgcttacagtaataaaactgttggcgagcttggtgatgtcagagaaactatgacccatcttctacagcatgctaa

SEQ ID NO: 27569 - DNA, 80 bp, synthetic construct
  misc_feature 1..80: note = Synthetic: >NC_004718.3-cand-5410-5489
  source 1..80: mol_type = other DNA
tttggaatctgcaaagcgagttcttaatgtggtgtgtaaacattgtggtcagaaaactactaccttaacgggtgtagaag

SEQ ID NO: 27570 - DNA, 80 bp, synthetic construct
  misc_feature 1..80: note = Synthetic: >NC_004718.3-cand-5490-5569
  source 1..80: mol_type = other DNA
ctgtgatgtatatgggtactctatcttatgataatcttaagacaggtgtttccattccatgtgtgtgtggtcgtgatgct

SEQ ID NO: 27571 - DNA, 80 bp, synthetic construct
  misc_feature 1..80: note = Synthetic: >NC_004718.3-cand-5570-5649
  source 1..80: mol_type = other DNA
acacaatatctagtacaacaagagtcttcttttgttatgatgtctgcaccacctgctgagtataaattacagcaaggtac

SEQ ID NO: 27572 - DNA, 80 bp, synthetic construct
  misc_feature 1..80: note = Synthetic: >NC_004718.3-cand-5650-5729
  source 1..80: mol_type = other DNA
attcttatgtgcgaatgagtacactggtaactatcagtgtggtcattacactcatataactgctaaggagaccctctatc

SEQ ID NO: 27573 - DNA, 80 bp, synthetic construct
  misc_feature 1..80: note = Synthetic: >NC_004718.3-cand-5730-5809
  source 1..80: mol_type = other DNA
gtattgacggagctcaccttacaaagatgtcagagtacaaaggaccagtgactgatgttttctacaaggaaacatcttac

SEQ ID NO: 27574 - DNA, 80 bp, synthetic construct
  misc_feature 1..80: note = Synthetic: >NC_004718.3-cand-5810-5889
  source 1..80: mol_type = other DNA
actacaaccatcaagcctgtgtcgtataaactcgatggagttacttacacagagattgaaccaaaattggatgggtatta

SEQ ID NO: 27575 - DNA, 80 bp, synthetic construct
  misc_feature 1..80: note = Synthetic: >NC_004718.3-cand-5890-5969
  source 1..80: mol_type = other DNA
taaaaaggataatgcttactatacagagcagcctatagaccttgtaccaactcaaccattaccaaatgcgagttttgata

SEQ ID NO: 27576 - DNA, 80 bp, synthetic construct
  misc_feature 1..80: note = Synthetic: >NC_004718.3-cand-5970-6049
  source 1..80: mol_type = other DNA
atttcaaactcacatgttctaacacaaaatttgctgatgatttaaatcaaatgacaggcttcacaaagccagcttcacga

SEQ ID NO: 27577 - DNA, 80 bp, synthetic construct
  misc_feature 1..80: note = Synthetic: >NC_004718.3-cand-6050-6129
  source 1..80: mol_type = other DNA
gagctatctgtcacattcttcccagacttgaatggcgatgtagtggctattgactatagacactattcagcgagtttcaa

SEQ ID NO: 27578 - DNA, 80 bp, synthetic construct
  misc_feature 1..80: note = Synthetic: >NC_004718.3-cand-6130-6209
  source 1..80: mol_type = other DNA
gaaaggtgctaaattactgcataagccaattgtttggcacattaaccaggctacaaccaagacaacgttcaaaccaaaca

SEQ ID NO: 27579 - DNA, 80 bp, synthetic construct
  misc_feature 1..80: note = Synthetic: >NC_004718.3-cand-6210-6289
  source 1..80: mol_type = other DNA
cttggtgtttacgttgtctttggagtacaaagccagtagatacttcaaattcatttgaagttctggcagtagaagacaca

SEQ ID NO: 27580 - DNA, 80 bp, synthetic construct
  misc_feature 1..80: note = Synthetic: >NC_004718.3-cand-6290-6369
  source 1..80: mol_type = other DNA
caaggaatggacaatcttgcttgtgaaagtcaacaacccacctctgaagaagtagtggaaaatcctaccatacagaagga

SEQ ID NO: 27581 - DNA, 80 bp, synthetic construct
  misc_feature 1..80: note = Synthetic: >NC_004718.3-cand-6370-6449
  source 1..80: mol_type = other DNA
agtcatagagtgtgacgtgaaaactaccgaagttgtaggcaatgtcatacttaaaccatcagatgaaggtgttaaagtaa

SEQ ID NO: 27582 - DNA, 80 bp, synthetic construct
  misc_feature 1..80: note = Synthetic: >NC_004718.3-cand-6450-6529
  source 1..80: mol_type = other DNA
cacaagagttaggtcatgaggatcttatggctgcttatgtggaaaacacaagcattaccattaagaaacctaatgagctt

SEQ ID NO: 27583 - DNA, 80 bp, synthetic construct
  misc_feature 1..80: note = Synthetic: >NC_004718.3-cand-6530-6609
  source 1..80: mol_type = other DNA
tcactagccttaggtttaaaaacaattgccactcatggtattgctgcaattaatagtgttccttggagtaaaattttggc

SEQ ID NO: 27584 - DNA, 80 bp, synthetic construct
  misc_feature 1..80: note = Synthetic: >NC_004718.3-cand-6610-6689
  source 1..80: mol_type = other DNA
ttatgtcaaaccattcttaggacaagcagcaattacaacatcaaattgcgctaagagattagcacaacgtgtgtttaaca

SEQ ID NO: 27585 - DNA, 80 bp, synthetic construct
  misc_feature 1..80: note = Synthetic: >NC_004718.3-cand-6720-6799
  source 1..80: mol_type = other DNA
tccaattgtgtacttttactaaaagtaccaattctagaattagagcttcactacctacaactattgctaaaaatagtgtt

SEQ ID NO: 27586 - DNA, 80 bp, synthetic construct
  misc_feature 1..80: note = Synthetic: >NC_004718.3-cand-6800-6879
  source 1..80: mol_type = other DNA
aagagtgttgctaaattatgtttggatgccggcattaattatgtgaagtcacccaaattttctaaattgttcacaatcgc

SEQ ID NO: 27587 - DNA, 80 bp, synthetic construct
  misc_feature 1..80: note = Synthetic: >NC_004718.3-cand-6880-6959
  source 1..80: mol_type = other DNA
tatgtggctattgttgttaagtatttgcttaggttctctaatctgtgtaactgctgcttttggtgtactcttatctaatt

SEQ ID NO: 27588 - DNA, 80 bp, synthetic construct
  misc_feature 1..80: note = Synthetic: >NC_004718.3-cand-6960-7039
  source 1..80: mol_type = other DNA
ttggtgctccttcttattgtaatggcgttagagaattgtatcttaattcgtctaacgttactactatggatttctgtgaa

SEQ ID NO: 27589 - DNA, 80 bp, synthetic construct
  misc_feature 1..80: note = Synthetic: >NC_004718.3-cand-7040-7119
  source 1..80: mol_type = other DNA
ggttcttttccttgcagcatttgtttaagtggattagactcccttgattcttatccagctcttgaaaccattcaggtgac

SEQ ID NO: 27590 - DNA, 80 bp, synthetic construct
  misc_feature 1..80: note = Synthetic: >NC_004718.3-cand-7120-7199
  source 1..80: mol_type = other DNA
gatttcatcgtacaagctagacttgacaattttaggtctggccgctgagtgggttttggcatatatgttgttcacaaaat

SEQ ID NO: 27591 - DNA, 80 bp, synthetic construct
  misc_feature 1..80: note = Synthetic: >NC_004718.3-cand-7200-7279
  source 1..80: mol_type = other DNA
tcttttatttattaggtctttcagctataatgcaggtgttctttggctattttgctagtcatttcatcagcaattcttgg

SEQ ID NO: 27592 - DNA, 80 bp, synthetic construct
  misc_feature 1..80: note = Synthetic: >NC_004718.3-cand-7280-7359
  source 1..80: mol_type = other DNA
ctcatgtggtttatcattagtattgtacaaatggcacccgtttctgcaatggttaggatgtacatcttctttgcttcttt

SEQ ID NO: 27593 - DNA, 80 bp, synthetic construct
  misc_feature 1..80: note = Synthetic: >NC_004718.3-cand-7360-7439
  source 1..80: mol_type = other DNA
ctactacatatggaagagctatgttcatatcatggatggttgcacctcttcgacttgcatgatgtgctataagcgcaatc

SEQ ID NO: 27594 - DNA, 80 bp, synthetic construct
  misc_feature 1..80: note = Synthetic: >NC_004718.3-cand-7450-7529
  source 1..80: mol_type = other DNA
cgttgagtgtacaactattgttaatggcatgaagagatctttctatgtctatgcaaatggaggccgtggcttctgcaaga

SEQ ID NO: 27595 - DNA, 80 bp, synthetic construct
  misc_feature 1..80: note = Synthetic: >NC_004718.3-cand-7530-7609
  source 1..80: mol_type = other DNA
ctcacaattggaattgtctcaattgtgacacattttgcactggtagtacattcattagtgatgaagttgctcgtgatttg

SEQ ID NO: 27596 - DNA, 80 bp, synthetic construct
  misc_feature 1..80: note = Synthetic: >NC_004718.3-cand-7610-7689
  source 1..80: mol_type = other DNA
tcactccagtttaaaagaccaatcaaccctactgaccagtcatcgtatattgttgatagtgttgctgtgaaaaatggcgc

SEQ ID NO: 27597 - DNA, 80 bp, synthetic construct
  misc_feature 1..80: note = Synthetic: >NC_004718.3-cand-7690-7769
  source 1..80: mol_type = other DNA
gcttcacctctactttgacaaggctggtcaaaagacctatgagagacatccgctctcccattttgtcaatttagacaatt

SEQ ID NO: 27598 - DNA, 80 bp, synthetic construct
  misc_feature 1..80: note = Synthetic: >NC_004718.3-cand-7770-7849
  source 1..80: mol_type = other DNA
tgagagctaacaacactaaaggttcactgcctattaatgtcatagtttttgatggcaagtccaaatgcgacgagtctgct

SEQ ID NO: 27599 - DNA, 80 bp, synthetic construct
  misc_feature 1..80: note = Synthetic: >NC_004718.3-cand-7850-7929
  source 1..80: mol_type = other DNA
tctaagtctgcttctgtgtactacagtcagctgatgtgccaacctattctgttgcttgaccaagctcttgtatcagacgt

SEQ ID NO: 27600 - DNA, 80 bp, synthetic construct
  misc_feature 1..80: note = Synthetic: >NC_004718.3-cand-7930-8009
  source 1..80: mol_type = other DNA
tggagatagtactgaagtttccgttaagatgtttgatgcttatgtcgacaccttttcagcaacttttagtgttcctatgg

SEQ ID NO: 27601 - DNA, 80 bp, synthetic construct
  misc_feature 1..80: note = Synthetic: >NC_004718.3-cand-8010-8089
  source 1..80: mol_type = other DNA
aaaaacttaaggcacttgttgctacagctcacagcgagttagcaaagggtgtagctttagatggtgtcctttctacattc

SEQ ID NO: 27602 - DNA, 80 bp, synthetic construct
  misc_feature 1..80: note = Synthetic: >NC_004718.3-cand-8090-8169
  source 1..80: mol_type = other DNA
gtgtcagctgcccgacaaggtgttgttgataccgatgttgacacaaaggatgttattgaatgtctcaaactttcacatca

SEQ ID NO: 27603 - DNA, 80 bp, synthetic construct
  misc_feature 1..80: note = Synthetic: >NC_004718.3-cand-8170-8249
  source 1..80: mol_type = other DNA
ctctgacttagaagtgacaggtgacagttgtaacaatttcatgctcacctataataaggttgaaaacatgacgcccagag

SEQ ID NO: 27604 - DNA, 80 bp, synthetic construct
  misc_feature 1..80: note = Synthetic: >NC_004718.3-cand-8250-8329
  source 1..80: mol_type = other DNA
atcttggcgcatgtattgactgtaatgcaaggcatatcaatgcccaagtagcaaaaagtcacaatgtttcactcatctgg

SEQ ID NO: 27605 - DNA, 80 bp, synthetic construct
  misc_feature 1..80: note = Synthetic: >NC_004718.3-cand-8330-8409
  source 1..80: mol_type = other DNA
aatgtaaaagactacatgtctttatctgaacagctgcgtaaacaaattcgtagtgctgccaagaagaacaacataccttt

SEQ ID NO: 27606 - DNA, 80 bp, synthetic construct
  misc_feature 1..80: note = Synthetic: >NC_004718.3-cand-8410-8489
  source 1..80: mol_type = other DNA
tagactaacttgtgctacaactagacaggttgtcaatgtcataactactaaaatctcactcaagggtggtaagattgtta

SEQ ID NO: 27607 - DNA, 80 bp, synthetic construct
  misc_feature 1..80: note = Synthetic: >NC_004718.3-cand-8490-8569
  source 1..80: mol_type = other DNA
gtacttgttttaaacttatgcttaaggccacattattgtgcgttcttgctgcattggtttgttatatcgttatgccagta

SEQ ID NO: 27608 - DNA, 80 bp, synthetic construct
  misc_feature 1..80: note = Synthetic: >NC_004718.3-cand-8570-8649
  source 1..80: mol_type = other DNA
catacattgtcaatccatgatggttacacaaatgaaatcattggttacaaagccattcaggatggtgtcactcgtgacat

SEQ ID NO: 27609 - DNA, 80 bp, synthetic construct
  misc_feature 1..80: note = Synthetic: >NC_004718.3-cand-8650-8729
  source 1..80: mol_type = other DNA
catttctactgatgattgttttgcaaataaacatgctggttttgacgcatggtttagccagcgtggtggttcatacaaaa

SEQ ID NO: 27610 - DNA, 80 bp, synthetic construct
  misc_feature 1..80: note = Synthetic: >NC_004718.3-cand-8720-8799
  source 1..80: mol_type = other DNA
tcatacaaaaatgacaaaagctgccctgtagtagctgctatcattacaagagagattggtttcatagtgcctggcttacc

SEQ ID NO: 27611 - DNA, 80 bp, synthetic construct
  misc_feature 1..80: note = Synthetic: >NC_004718.3-cand-8800-8879
  source 1..80: mol_type = other DNA
gggtactgtgctgagagcaatcaatggtgacttcttgcattttctacctcgtgtttttagtgctgttggcaacatttgct

SEQ ID NO: 27612 - DNA, 80 bp, synthetic construct
  misc_feature 1..80: note = Synthetic: >NC_004718.3-cand-8880-8959
  source 1..80: mol_type = other DNA
acacaccttccaaactcattgagtatagtgattttgctacctctgcttgcgttcttgctgctgagtgtacaatttttaag

SEQ ID NO: 27613 - DNA, 80 bp, synthetic construct
  misc_feature 1..80: note = Synthetic: >NC_004718.3-cand-8960-9039
  source 1..80: mol_type = other DNA
gatgctatgggcaaacctgtgccatattgttatgacactaatttgctagagggttctatttcttatagtgagcttcgtcc

SEQ ID NO: 27614 - DNA, 80 bp, synthetic construct
  misc_feature 1..80: note = Synthetic: >NC_004718.3-cand-9040-9119
  source 1..80: mol_type = other DNA
agacactcgttatgtgcttatggatggttccatcatacagtttcctaacacttacctggagggttctgttagagtagtaa

SEQ ID NO: 27615 - DNA, 80 bp, synthetic construct
  misc_feature 1..80: note = Synthetic: >NC_004718.3-cand-9120-9199
  source 1..80: mol_type = other DNA
caacttttgatgctgagtactgtagacatggtacatgcgaaaggtcagaagtaggtatttgcctatctaccagtggtaga

SEQ ID NO: 27616 - DNA, 80 bp, synthetic construct
  misc_feature 1..80: note = Synthetic: >NC_004718.3-cand-9200-9279
  source 1..80: mol_type = other DNA
tgggttcttaataatgagcattacagagctctatcaggagttttctgtggtgttgatgcgatgaatctcatagctaacat

SEQ ID NO: 27617 - DNA, 80 bp, synthetic construct
  misc_feature 1..80: note = Synthetic: >NC_004718.3-cand-9280-9359
  source 1..80: mol_type = other DNA
ctttactcctcttgtgcaacctgtgggtgctttagatgtgtctgcttcagtagtggctggtggtattattgccatattgg

SEQ ID NO: 27618 - DNA, 80 bp, synthetic construct
  misc_feature 1..80: note = Synthetic: >NC_004718.3-cand-9360-9439
  source 1..80: mol_type = other DNA
tgacttgtgctgcctactactttatgaaattcagacgtgtttttggtgagtacaaccatgttgttgctgctaatgcactt

SEQ ID NO: 27619 - DNA, 80 bp, synthetic construct
  misc_feature 1..80: note = Synthetic: >NC_004718.3-cand-9440-9519
  source 1..80: mol_type = other DNA
ttgtttttgatgtctttcactatactctgtctggtaccagcttacagctttctgccgggagtctactcagtcttttactt

SEQ ID NO: 27620 - DNA, 80 bp, synthetic construct
  misc_feature 1..80: note = Synthetic: >NC_004718.3-cand-9520-9599
  source 1..80: mol_type = other DNA
gtacttgacattctatttcaccaatgatgtttcattcttggctcaccttcaatggtttgccatgttttctcctattgtgc

SEQ ID NO: 27621 - DNA, 80 bp, synthetic construct
  misc_feature 1..80: note = Synthetic: >NC_004718.3-cand-9590-9669
  source 1..80: mol_type = other DNA
cctattgtgcctttttggataacagcaatctatgtattctgtatttctctgaagcactgccattggttctttaacaacta

SEQ ID NO: 27622 - DNA, 80 bp, synthetic construct
  misc_feature 1..80: note = Synthetic: >NC_004718.3-cand-9670-9749
  source 1..80: mol_type = other DNA
tcttaggaaaagagtcatgtttaatggagttacatttagtaccttcgaggaggctgctttgtgtacctttttgctcaaca

SEQ ID NO: 27623 - DNA, 80 bp, synthetic construct
  misc_feature 1..80: note = Synthetic: >NC_004718.3-cand-9750-9829
  source 1..80: mol_type = other DNA
aggaaatgtacctaaaattgcgtagcgagacactgttgccacttacacagtataacaggtatcttgctctatataacaag

SEQ ID NO: 27624 - DNA, 80 bp, synthetic construct
  misc_feature 1..80: note = Synthetic: >NC_004718.3-cand-9830-9909
  source 1..80: mol_type = other DNA
tacaagtatttcagtggagccttagatactaccagctatcgtgaagcagcttgctgccacttagcaaaggctctaaatga

SEQ ID NO: 27625 - DNA, 80 bp, synthetic construct
  misc_feature 1..80: note = Synthetic: >NC_004718.3-cand-9910-9989
  source 1..80: mol_type = other DNA
ctttagcaactcaggtgctgatgttctctaccaaccaccacagacatcaatcacttctgctgttctgcagagtggtttta

SEQ ID NO: 27626 - DNA, 80 bp, synthetic construct
  misc_feature 1..80: note = Synthetic: >NC_004718.3-cand-9990-10069
  source 1..80: mol_type = other DNA
ggaaaatggcattcccgtcaggcaaagttgaagggtgcatggtacaagtaacctgtggaactacaactcttaatggattg

SEQ ID NO: 27627 - DNA, 80 bp, synthetic construct
  misc_feature 1..80: note = Synthetic: >NC_004718.3-cand-10070-10149
  source 1..80: mol_type = other DNA
tggttggatgacacagtatactgtccaagacatgtcatttgcacagcagaagacatgcttaatcctaactatgaagatct

SEQ ID NO: 27628 - DNA, 80 bp, synthetic construct
  misc_feature 1..80: note = Synthetic: >NC_004718.3-cand-10150-10229
  source 1..80: mol_type = other DNA
gctcattcgcaaatccaaccatagctttcttgttcaggctggcaatgttcaacttcgtgttattggccattctatgcaaa

SEQ ID NO: 27629 - DNA, 80 bp, synthetic construct
  misc_feature 1..80: note = Synthetic: >NC_004718.3-cand-10230-10309
  source 1..80: mol_type = other DNA
attgtctgcttaggcttaaagttgatacttctaaccctaagacacccaagtataaatttgtccgtatccaacctggtcaa

SEQ ID NO: 27630 - DNA, 80 bp, synthetic construct
  misc_feature 1..80: note = Synthetic: >NC_004718.3-cand-10310-10389
  source 1..80: mol_type = other DNA
acattttcagttctagcatgctacaatggttcaccatctggtgtttatcagtgtgccatgagacctaatcataccattaa

SEQ ID NO: 27631 - DNA, 80 bp, synthetic construct
  misc_feature 1..80: note = Synthetic: >NC_004718.3-cand-10390-10469
  source 1..80: mol_type = other DNA
aggttctttccttaatggatcatgtggtagtgttggttttaacattgattatgattgcgtgtctttctgctatatgcatc

SEQ ID NO: 27632 - DNA, 80 bp, synthetic construct
  misc_feature 1..80: note = Synthetic: >NC_004718.3-cand-10470-10549
  source 1..80: mol_type = other DNA
atatggagcttccaacaggagtacacgctggtactgacttagaaggtaaattctatggtccatttgttgacagacaaact

SEQ ID NO: 27633 - DNA, 80 bp, synthetic construct
  misc_feature 1..80: note = Synthetic: >NC_004718.3-cand-10550-10629
  source 1..80: mol_type = other DNA
gcacaggctgcaggtacagacacaaccataacattaaatgttttggcatggctgtatgctgctgttatcaatggtgatag

SEQ ID NO: 27634 - DNA, 80 bp, synthetic construct
  misc_feature 1..80: note = Synthetic: >NC_004718.3-cand-10630-10709
  source 1..80: mol_type = other DNA
gtggtttcttaatagattcaccactactttgaatgactttaaccttgtggcaatgaagtacaactatgaacctttgacac

SEQ ID NO: 27635 - DNA, 80 bp, synthetic construct
  misc_feature 1..80: note = Synthetic: >NC_004718.3-cand-10710-10789
  source 1..80: mol_type = other DNA
aagatcatgttgacatattgggacctctttctgctcaaacaggaattgccgtcttagatatgtgtgctgctttgaaagag

SEQ ID NO: 27636 - DNA, 80 bp, synthetic construct
  misc_feature 1..80: note = Synthetic: >NC_004718.3-cand-10790-10869
  source 1..80: mol_type = other DNA
ctgctgcagaatggtatgaatggtcgtactatccttggtagcactattttagaagatgagtttacaccatttgatgttgt

SEQ ID NO: 27637 - DNA, 80 bp, synthetic construct
  misc_feature 1..80: note = Synthetic: >NC_004718.3-cand-10870-10949
  source 1..80: mol_type = other DNA
tagacaatgctctggtgttaccttccaaggtaagttcaagaaaattgttaagggcactcatcattggatgcttttaactt

SEQ ID NO: 27638 - DNA, 80 bp, synthetic construct
  misc_feature 1..80: note = Synthetic: >NC_004718.3-cand-10950-11029
  source 1..80: mol_type = other DNA
tcttgacatcactattgattcttgttcaaagtacacagtggtcactgtttttctttgtttacgagaatgctttcttgcca

SEQ ID NO: 27639 - DNA, 80 bp, synthetic construct
  misc_feature 1..80: note = Synthetic: >NC_004718.3-cand-11030-11109
  source 1..80: mol_type = other DNA
tttactcttggtattatggcaattgctgcatgtgctatgctgcttgttaagcataagcacgcattcttgtgcttgtttct

SEQ ID NO: 27640 - DNA, 80 bp, synthetic construct
  misc_feature 1..80: note = Synthetic: >NC_004718.3-cand-11110-11189
  source 1..80: mol_type = other DNA
gttaccttctcttgcaacagttgcttactttaatatggtctacatgcctgctagctgggtgatgcgtatcatgacatggc

SEQ ID NO: 27641 - DNA, 80 bp, synthetic construct
  misc_feature 1..80: note = Synthetic: >NC_004718.3-cand-11190-11269
  source 1..80: mol_type = other DNA
ttgaattggctgacactagcttgtctggttataggcttaaggattgtgttatgtatgcttcagctttagttttgcttatt

SEQ ID NO: 27642 - DNA, 80 bp, synthetic construct
  misc_feature 1..80: note = Synthetic: >NC_004718.3-cand-11270-11349
  source 1..80: mol_type = other DNA
ctcatgacagctcgcactgtttatgatgatgctgctagacgtgtttggacactgatgaatgtcattacacttgtttacaa

SEQ ID NO: 27643 - DNA, 80 bp, synthetic construct
  misc_feature 1..80: note = Synthetic: >NC_004718.3-cand-11350-11429
  source 1..80: mol_type = other DNA
agtctactatggtaatgctttagatcaagctatttccatgtgggccttagttatttctgtaacctctaactattctggtg

SEQ ID NO: 27644 - DNA, 80 bp, synthetic construct
  misc_feature 1..80: note = Synthetic: >NC_004718.3-cand-11430-11509
  source 1..80: mol_type = other DNA
tcgttacgactatcatgtttttagctagagctatagtgtttgtgtgtgttgagtattacccattgttatttattactggc

SEQ ID NO: 27645 - DNA, 80 bp, synthetic construct
  misc_feature 1..80: note = Synthetic: >NC_004718.3-cand-11510-11589
  source 1..80: mol_type = other DNA
aacaccttacagtgtatcatgcttgtttattgtttcttaggctattgttgctgctgctactttggccttttctgtttact

SEQ ID NO: 27646 - DNA, 80 bp, synthetic construct
  misc_feature 1..80: note = Synthetic: >NC_004718.3-cand-11590-11669
  source 1..80: mol_type = other DNA
caaccgttacttcaggcttactcttggtgtttatgactacttggtctctacacaagaatttaggtatatgaactcccagg

SEQ ID NO: 27647 - DNA, 80 bp, synthetic construct
  misc_feature 1..80: note = Synthetic: >NC_004718.3-cand-11670-11749
  source 1..80: mol_type = other DNA
ggcttttgcctcctaagagtagtattgatgctttcaagcttaacattaagttgttgggtattggaggtaaaccatgtatc

SEQ ID NO: 27648 - DNA, 80 bp, synthetic construct
  misc_feature 1..80: note = Synthetic: >NC_004718.3-cand-11750-11829
  source 1..80: mol_type = other DNA
aaggttgctactgtacagtctaaaatgtctgacgtaaagtgcacatctgtggtactgctctcggttcttcaacaacttag

SEQ ID NO: 27649 - DNA, 80 bp, synthetic construct
  misc_feature 1..80: note = Synthetic: >NC_004718.3-cand-11830-11909
  source 1..80: mol_type = other DNA
agtagagtcatcttctaaattgtgggcacaatgtgtacaactccacaatgatattcttcttgcaaaagacacaactgaag

SEQ ID NO: 27650 - DNA, 80 bp, synthetic construct
  misc_feature 1..80: note = Synthetic: >NC_004718.3-cand-11910-11989
  source 1..80: mol_type = other DNA
ctttcgagaagatggtttctcttttgtctgttttgctatccatgcagggtgctgtagacattaataggttgtgcgaggaa

SEQ ID NO: 27651 - DNA, 80 bp, synthetic construct
  misc_feature 1..80: note = Synthetic: >NC_004718.3-cand-11990-12069
  source 1..80: mol_type = other DNA
atgctcgataaccgtgctactcttcaggctattgcttcagaatttagttctttaccatcatatgccgcttatgccactgc

SEQ ID NO: 27652 - DNA, 80 bp, synthetic construct
  misc_feature 1..80: note = Synthetic: >NC_004718.3-cand-12070-12149
  source 1..80: mol_type = other DNA
ccaggaggcctatgagcaggctgtagctaatggtgattctgaagtcgttctcaaaaagttaaagaaatctttgaatgtgg

SEQ ID NO: 27653 - DNA, 80 bp, synthetic construct
  misc_feature 1..80: note = Synthetic: >NC_004718.3-cand-12150-12229
  source 1..80: mol_type = other DNA
ctaaatctgagtttgaccgtgatgctgccatgcaacgcaagttggaaaagatggcagatcaggctatgacccaaatgtac

SEQ ID NO: 27654 - DNA, 80 bp, synthetic construct
  misc_feature 1..80: note = Synthetic: >NC_004718.3-cand-12230-12309
  source 1..80: mol_type = other DNA
aaacaggcaagatctgaggacaagagggcaaaagtaactagtgctatgcaaacaatgctcttcactatgcttaggaagct

SEQ ID NO: 27655 - DNA, 80 bp, synthetic construct
  misc_feature 1..80: note = Synthetic: >NC_004718.3-cand-12310-12389
  source 1..80: mol_type = other DNA
tgataatgatgcacttaacaacattatcaacaatgcgcgtgatggttgtgttccactcaacatcataccattgactacag

SEQ ID NO: 27656 - DNA, 80 bp, synthetic construct
  misc_feature 1..80: note = Synthetic: >NC_004718.3-cand-12390-12469
  source 1..80: mol_type = other DNA
cagccaaactcatggttgttgtccctgattatggtacctacaagaacacttgtgatggtaacacctttacatatgcatct

SEQ ID NO: 27657 - DNA, 80 bp, synthetic construct
  misc_feature 1..80: note = Synthetic: >NC_004718.3-cand-12470-12549
  source 1..80: mol_type = other DNA
gcactctgggaaatccagcaagttgttgatgcggatagcaagattgttcaacttagtgaaattaacatggacaattcacc

SEQ ID NO: 27658 - DNA, 80 bp, synthetic construct
  misc_feature 1..80: note = Synthetic: >NC_004718.3-cand-12550-12629
  source 1..80: mol_type = other DNA
aaatttggcttggcctcttattgttacagctctaagagccaactcagctgttaaactacagaataatgaactgagtccag

SEQ ID NO: 27659 - DNA, 80 bp, synthetic construct
  misc_feature 1..80: note = Synthetic: >NC_004718.3-cand-12630-12709
  source 1..80: mol_type = other DNA
tagcactacgacagatgtcctgtgcggctggtaccacacaaacagcttgtactgatgacaatgcacttgcctactataac

SEQ ID NO: 27660 - DNA, 80 bp, synthetic construct
  misc_feature 1..80: note = Synthetic: >NC_004718.3-cand-12710-12789
  source 1..80: mol_type = other DNA
aattcgaagggaggtaggtttgtgctggcattactatcagaccaccaagatctcaaatgggctagattccctaagagtga

SEQ ID NO: 27661 - DNA, 80 bp, synthetic construct
  misc_feature 1..80: note = Synthetic: >NC_004718.3-cand-12790-12869
  source 1..80: mol_type = other DNA
tggtacaggtacaatttacacagaactggaaccaccttgtaggtttgttacagacacaccaaaagggcctaaagtgaaat

SEQ ID NO: 27662 - DNA, 80 bp, synthetic construct
  misc_feature 1..80: note = Synthetic: >NC_004718.3-cand-12870-12949
  source 1..80: mol_type = other DNA
acttgtacttcatcaaaggcttaaacaacctaaatagaggtatggtgctgggcagtttagctgctacagtacgtcttcag

SEQ ID NO: 27663 - DNA, 80 bp, synthetic construct
  misc_feature 1..80: note = Synthetic: >NC_004718.3-cand-12950-13029
  source 1..80: mol_type = other DNA
gctggaaatgctacagaagtacctgccaattcaactgtgctttccttctgtgcttttgcagtagaccctgctaaagcata

SEQ ID NO: 27664 - DNA, 80 bp, synthetic construct
  misc_feature 1..80: note = Synthetic: >NC_004718.3-cand-13030-13109
  source 1..80: mol_type = other DNA
taaggattacctagcaagtggaggacaaccaatcaccaactgtgtgaagatgttgtgtacacacactggtacaggacagg

SEQ ID NO: 27665 - DNA, 80 bp, synthetic construct
  misc_feature 1..80: note = Synthetic: >NC_004718.3-cand-13110-13189
  source 1..80: mol_type = other DNA
caattactgtaacaccagaagctaacatggaccaagagtcctttggtggtgcttcatgttgtctgtattgtagatgccac

SEQ ID NO: 27666 - DNA, 80 bp, synthetic construct
  misc_feature 1..80: note = Synthetic: >NC_004718.3-cand-13190-13269
  source 1..80: mol_type = other DNA
attgaccatccaaatcctaaaggattctgtgacttgaaaggtaagtacgtccaaatacctaccacttgtgctaatgaccc

SEQ ID NO: 27667 - DNA, 80 bp, synthetic construct
  misc_feature 1..80: note = Synthetic: >NC_004718.3-cand-13270-13349
  source 1..80: mol_type = other DNA
agtgggttttacacttagaaacacagtctgtaccgtctgcggaatgtggaaaggttatggctgtagttgtgaccaactcc

SEQ ID NO: 27668 - DNA, 80 bp, synthetic construct
  misc_feature 1..80: note = Synthetic: >NC_004718.3-cand-13350-13429
  source 1..80: mol_type = other DNA
gcgaacccttgatgcagtctgcggatgcatcaacgtttttaaacgggtttgcggtgtaagtgcagcccgtcttacaccgt

SEQ ID NO: 27669 - DNA, 80 bp, synthetic construct
  misc_feature 1..80: note = Synthetic: >NC_004718.3-cand-13430-13509
  source 1..80: mol_type = other DNA
gcggcacaggcactagtactgatgtcgtctacagggcttttgatatttacaacgaaaaagttgctggttttgcaaagttc

SEQ ID NO: 27670 - DNA, 80 bp, synthetic construct
  misc_feature 1..80: note = Synthetic: >NC_004718.3-cand-13510-13589
  source 1..80: mol_type = other DNA
ctaaaaactaattgctgtcgcttccaggagaaggatgaggaaggcaatttattagactcttactttgtagttaagaggca

SEQ ID NO: 27671 - DNA, 80 bp, synthetic construct
  misc_feature 1..80: note = Synthetic: >NC_004718.3-cand-13590-13669
  source 1..80: mol_type = other DNA
tactatgtctaactaccaacatgaagagactatttataacttggttaaagattgtccagcggttgctgtccatgactttt

SEQ ID NO: 27672 - DNA, 80 bp, synthetic construct
  misc_feature 1..80: note = Synthetic: >NC_004718.3-cand-13670-13749
  source 1..80: mol_type = other DNA
tcaagtttagagtagatggtgacatggtaccacatatatcacgtcagcgtctaactaaatacacaatggctgatttagtc

SEQ ID NO: 27673 - DNA, 80 bp, synthetic construct
  misc_feature 1..80: note = Synthetic: >NC_004718.3-cand-13750-13829
  source 1..80: mol_type = other DNA
tatgctctacgtcattttgatgagggtaattgtgatacattaaaagaaatactcgtcacatacaattgctgtgatgatga

SEQ ID NO: 27674 - DNA, 80 bp, synthetic construct
  misc_feature 1..80: note = Synthetic: >NC_004718.3-cand-13830-13909
  source 1..80: mol_type = other DNA
ttatttcaataagaaggattggtatgacttcgtagagaatcctgacatcttacgcgtatatgctaacttaggtgagcgtg

SEQ ID NO: 27675 - DNA, 80 bp, synthetic construct
  misc_feature 1..80: note = Synthetic: >NC_004718.3-cand-13910-13989
  source 1..80: mol_type = other DNA
tacgccaatcattattaaagactgtacaattctgcgatgctatgcgtgatgcaggcattgtaggcgtactgacattagat

SEQ ID NO: 27676 - DNA, 80 bp, synthetic construct
  misc_feature 1..80: note = Synthetic: >NC_004718.3-cand-13950-14029
  source 1..80: mol_type = other DNA
tatgcgtgatgcaggcattgtaggcgtactgacattagataatcaggatcttaatgggaactggtacgatttcggtgatt

SEQ ID NO: 27677 - DNA, 80 bp, synthetic construct
  misc_feature 1..80: note = Synthetic: >NC_004718.3-cand-14030-14109
  source 1..80: mol_type = other DNA
tcgtacaagtagcaccaggctgcggagttcctattgtggattcatattactcattgctgatgcccatcctcactttgact

SEQ ID NO: 27678 - DNA, 80 bp, synthetic construct
  misc_feature 1..80: note = Synthetic: >NC_004718.3-cand-14110-14189
  source 1..80: mol_type = other DNA
agggcattggctgctgagtcccatatggatgctgatctcgcaaaaccacttattaagtgggatttgctgaaatatgattt

SEQ ID NO: 27679 - DNA, 80 bp, synthetic construct
  misc_feature 1..80: note = Synthetic: >NC_004718.3-cand-14190-14269
  source 1..80: mol_type = other DNA
tacggaagagagactttgtctcttcgaccgttattttaaatattgggaccagacataccatcccaattgtattaactgtt

SEQ ID NO: 27680 - DNA, 80 bp, synthetic construct
  misc_feature 1..80: note = Synthetic: >NC_004718.3-cand-14270-14349
  source 1..80: mol_type = other DNA
tggatgataggtgtatccttcattgtgcaaactttaatgtgttattttctactgtgtttccacctacaagttttggacca

SEQ ID NO: 27681 - DNA, 80 bp, synthetic construct
  misc_feature 1..80: note = Synthetic: >NC_004718.3-cand-14350-14429
  source 1..80: mol_type = other DNA
ctagtaagaaaaatatttgtagatggtgttccttttgttgtttcaactggataccattttcgtgagttaggagtcgtaca

SEQ ID NO: 27682 - DNA, 80 bp, synthetic construct
  misc_feature 1..80: note = Synthetic: >NC_004718.3-cand-14430-14509
  source 1..80: mol_type = other DNA
taatcaggatgtaaacttacatagctcgcgtctcagtttcaaggaacttttagtgtatgctgctgatccagctatgcatg

SEQ ID NO: 27683 - DNA, 80 bp, synthetic construct
  misc_feature 1..80: note = Synthetic: >NC_004718.3-cand-14510-14589
  source 1..80: mol_type = other DNA
cagcttctggcaatttattgctagataaacgcactacatgcttttcagtagctgcactaacaaacaatgttgcttttcaa

SEQ ID NO: 27684 - DNA, 80 bp, synthetic construct
  misc_feature 1..80: note = Synthetic: >NC_004718.3-cand-14590-14669
  source 1..80: mol_type = other DNA
actgtcaaacccggtaattttaataaagacttttatgactttgctgtgtctaaaggtttctttaaggaaggaagttctgt

SEQ ID NO: 27685 - DNA, 80 bp, synthetic construct
  misc_feature 1..80: note = Synthetic: >NC_004718.3-cand-14670-14749
  source 1..80: mol_type = other DNA
tgaactaaaacacttcttctttgctcaggatggcaacgctgctatcagtgattatgactattatcgttataatctgccaa

SEQ ID NO: 27686 - DNA, 80 bp, synthetic construct
  misc_feature 1..80: note = Synthetic: >NC_004718.3-cand-14750-14829
  source 1..80: mol_type = other DNA
caatgtgtgatatcagacaactcctattcgtagttgaagttgttgataaatactttgattgttacgatggtggctgtatt

SEQ ID NO: 27687 - DNA, 80 bp, synthetic construct
  misc_feature 1..80: note = Synthetic: >NC_004718.3-cand-14810-14889
  source 1..80: mol_type = other DNA
gttacgatggtggctgtattaatgccaaccaagtaatcgttaacaatctggataaatcagctggtttcccatttaataaa

SEQ ID NO: 27688 - DNA, 80 bp, synthetic construct
  misc_feature 1..80: note = Synthetic: >NC_004718.3-cand-14910-14989
  source 1..80: mol_type = other DNA
ttatgactcaatgagttatgaggatcaagatgcacttttcgcgtatactaagcgtaatgtcatccctactataactcaaa

SEQ ID NO: 27689 - DNA, 80 bp, synthetic construct
  misc_feature 1..80: note = Synthetic: >NC_004718.3-cand-14990-15069
  source 1..80: mol_type = other DNA
tgaatcttaagtatgccattagtgcaaagaatagagctcgcaccgtagctggtgtctctatctgtagtactatgacaaat

SEQ ID NO: 27690 - DNA, 80 bp, synthetic construct
  misc_feature 1..80: note = Synthetic: >NC_004718.3-cand-15070-15149
  source 1..80: mol_type = other DNA
agacagtttcatcagaaattattgaagtcaatagccgccactagaggagctactgtggtaattggaacaagcaagtttta

SEQ ID NO: 27691 - DNA, 80 bp, synthetic construct
  misc_feature 1..80: note = Synthetic: >NC_004718.3-cand-15150-15229
  source 1..80: mol_type = other DNA
cggtggctggcataatatgttaaaaactgtttacagtgatgtagaaactccacaccttatgggttgggattatccaaaat

SEQ ID NO: 27692 - DNA, 80 bp, synthetic construct
  misc_feature 1..80: note = Synthetic: >NC_004718.3-cand-15230-15309
  source 1..80: mol_type = other DNA
gtgacagagccatgcctaacatgcttaggataatggcctctcttgttcttgctcgcaaacataacacttgctgtaactta

SEQ ID NO: 27693 - DNA, 80 bp, synthetic construct
  misc_feature 1..80: note = Synthetic: >NC_004718.3-cand-15310-15389
  source 1..80: mol_type = other DNA
tcacaccgtttctacaggttagctaacgagtgtgcgcaagtattaagtgagatggtcatgtgtggcggctcactatatgt

SEQ ID NO: 27694 - DNA, 80 bp, synthetic construct
  misc_feature 1..80: note = Synthetic: >NC_004718.3-cand-15390-15469
  source 1..80: mol_type = other DNA
taaaccaggtggaacatcatccggtgatgctacaactgcttatgctaatagtgtctttaacatttgtcaagctgttacag

SEQ ID NO: 27695 - DNA, 80 bp, synthetic construct
  misc_feature 1..80: note = Synthetic: >NC_004718.3-cand-15470-15549
  source 1..80: mol_type = other DNA
ccaatgtaaatgcacttctttcaactgatggtaataagatagctgacaagtatgtccgcaatctacaacacaggctctat

SEQ ID NO: 27696 - DNA, 80 bp, synthetic construct
  misc_feature 1..80: note = Synthetic: >NC_004718.3-cand-15550-15629
  source 1..80: mol_type = other DNA
gagtgtctctatagaaatagggatgttgatcatgaattcgtggatgagttttacgcttacctgcgtaaacatttctccat

SEQ ID NO: 27697 - DNA, 80 bp, synthetic construct
  misc_feature 1..80: note = Synthetic: >NC_004718.3-cand-15630-15709
  source 1..80: mol_type = other DNA
gatgattctttctgatgatgccgttgtgtgctataacagtaactatgcggctcaaggtttagtagctagcattaagaact

SEQ ID NO: 27698 - DNA, 80 bp, synthetic construct
  misc_feature 1..80: note = Synthetic: >NC_004718.3-cand-15710-15789
  source 1..80: mol_type = other DNA
ttaaggcagttctttattatcaaaataatgtgttcatgtctgaggcaaaatgttggactgagactgaccttactaaagga

SEQ ID NO: 27699 - DNA, 80 bp, synthetic construct
  misc_feature 1..80: note = Synthetic: >NC_004718.3-cand-15790-15869
  source 1..80: mol_type = other DNA
cctcacgaattttgctcacagcatacaatgctagttaaacaaggagatgattacgtgtacctgccttacccagatccatc

SEQ ID NO: 27700 - DNA, 80 bp, synthetic construct
  misc_feature 1..80: note = Synthetic: >NC_004718.3-cand-15870-15949
  source 1..80: mol_type = other DNA
aagaatattaggcgcaggctgttttgtcgatgatattgtcaaaacagatggtacacttatgattgaaaggttcgtgtcac

SEQ ID NO: 27701 - DNA, 80 bp, synthetic construct
  misc_feature 1..80: note = Synthetic: >NC_004718.3-cand-15950-16029
  source 1..80: mol_type = other DNA
tggctattgatgcttacccacttacaaaacatcctaatcaggagtatgctgatgtctttcacttgtatttacaatacatt

SEQ ID NO: 27702 - DNA, 80 bp, synthetic construct
  misc_feature 1..80: note = Synthetic: >NC_004718.3-cand-16030-16109
  source 1..80: mol_type = other DNA
agaaagttacatgatgagcttactggccacatgttggacatgtattccgtaatgctaactaatgataacacctcacggta

SEQ ID NO: 27703 - DNA, 80 bp, synthetic construct
  misc_feature 1..80: note = Synthetic: >NC_004718.3-cand-16110-16189
  source 1..80: mol_type = other DNA
ctgggaacctgagttttatgaggctatgtacacaccacatacagtcttgcaggctgtaggtgcttgtgtattgtgcaatt

SEQ ID NO: 27704 - DNA, 80 bp, synthetic construct
  misc_feature 1..80: note = Synthetic: >NC_004718.3-cand-16190-16269
  source 1..80: mol_type = other DNA
cacagacttcacttcgttgcggtgcctgtattaggagaccattcctatgttgcaagtgctgctatgaccatgtcatttca

SEQ ID NO: 27705 - DNA, 80 bp, synthetic construct
  misc_feature 1..80: note = Synthetic: >NC_004718.3-cand-16270-16349
  source 1..80: mol_type = other DNA
acatcacacaaattagtgttgtctgttaatccctatgtttgcaatgccccaggttgtgatgtcactgatgtgacacaact

SEQ ID NO: 27706 - DNA, 80 bp, synthetic construct
  misc_feature 1..80: note = Synthetic: >NC_004718.3-cand-16350-16429
  source 1..80: mol_type = other DNA
gtatctaggaggtatgagctattattgcaagtcacataagcctcccattagttttccattatgtgctaatggtcaggttt

SEQ ID NO: 27707 - DNA, 80 bp, synthetic construct
  misc_feature 1..80: note = Synthetic: >NC_004718.3-cand-16420-16499
  source 1..80: mol_type = other DNA
ggtcaggtttttggtttatacaaaaacacatgtgtaggcagtgacaatgtcactgacttcaatgcgatagcaacatgtga

SEQ ID NO: 27708 - DNA, 80 bp, synthetic construct
  misc_feature 1..80: note = Synthetic: >NC_004718.3-cand-16500-16579
  source 1..80: mol_type = other DNA
ttggactaatgctggcgattacatacttgccaacacttgtactgagagactcaagcttttcgcagcagaaacgctcaaag

SEQ ID NO: 27709 - DNA, 80 bp, synthetic construct
  misc_feature 1..80: note = Synthetic: >NC_004718.3-cand-16580-16659
  source 1..80: mol_type = other DNA
ccactgaggaaacatttaagctgtcatatggtattgccactgtacgcgaagtactctctgacagagaattgcatctttca

SEQ ID NO: 27710 - DNA, 80 bp, synthetic construct
  misc_feature 1..80: note = Synthetic: >NC_004718.3-cand-16660-16739
  source 1..80: mol_type = other DNA
tgggaggttggaaaacctagaccaccattgaacagaaactatgtctttactggttaccgtgtaactaaaaatagtaaagt

SEQ ID NO: 27711 - DNA, 80 bp, synthetic construct
  misc_feature 1..80: note = Synthetic: >NC_004718.3-cand-16740-16819
  source 1..80: mol_type = other DNA
acagattggagagtacacctttgaaaaaggtgactatggtgatgctgttgtgtacagaggtactacgacatacaagttga

SEQ ID NO: 27712 - DNA, 80 bp, synthetic construct
  misc_feature 1..80: note = Synthetic: >NC_004718.3-cand-16820-16899
  source 1..80: mol_type = other DNA
atgttggtgattactttgtgttgacatctcacactgtaatgccacttagtgcacctactctagtgccacaagagcactat

SEQ ID NO: 27713 - DNA, 80 bp, synthetic construct
  misc_feature 1..80: note = Synthetic: >NC_004718.3-cand-16900-16979
  source 1..80: mol_type = other DNA
gtgagaattactggcttgtacccaacactcaacatctcagatgagttttctagcaatgttgcaaattatcaaaaggtcgg

SEQ ID NO: 27714 - DNA, 80 bp, synthetic construct
  misc_feature 1..80: note = Synthetic: >NC_004718.3-cand-16980-17059
  source 1..80: mol_type = other DNA
catgcaaaagtactctacactccaaggaccacctggtactggtaagagtcattttgccatcggacttgctctctattacc

SEQ ID NO: 27715 - DNA, 80 bp, synthetic construct
  misc_feature 1..80: note = Synthetic: >NC_004718.3-cand-17060-17139
  source 1..80: mol_type = other DNA
catctgctcgcatagtgtatacggcatgctctcatgcagctgttgatgccctatgtgaaaaggcattaaaatatttgccc

SEQ ID NO: 27716 - DNA, 80 bp, synthetic construct
  misc_feature 1..80: note = Synthetic: >NC_004718.3-cand-17140-17219
  source 1..80: mol_type = other DNA
atagataaatgtagtagaatcatacctgcgcgtgcgcgcgtagagtgttttgataaattcaaagtgaattcaacactaga

SEQ ID NO: 27717 - DNA, 80 bp, synthetic construct
  misc_feature 1..80: note = Synthetic: >NC_004718.3-cand-17220-17299
  source 1..80: mol_type = other DNA
acagtatgttttctgcactgtaaatgcattgccagaaacaactgctgacattgtagtctttgatgaaatctctatggcta

SEQ ID NO: 27718 - DNA, 80 bp, synthetic construct
  misc_feature 1..80: note = Synthetic: >NC_004718.3-cand-17300-17379
  source 1..80: mol_type = other DNA
ctaattatgacttgagtgttgtcaatgctagacttcgtgcaaaacactacgtctatattggcgatcctgctcaattacca

SEQ ID NO: 27719 - DNA, 80 bp, synthetic construct
  misc_feature 1..80: note = Synthetic: >NC_004718.3-cand-17380-17459
  source 1..80: mol_type = other DNA
gccccccgcacattgctgactaaaggcacactagaaccagaatattttaattcagtgtgcagacttatgaaaacaatagg

SEQ ID NO: 27720 - DNA, 80 bp, synthetic construct
  misc_feature 1..80: note = Synthetic: >NC_004718.3-cand-17460-17539
  source 1..80: mol_type = other DNA
tccagacatgttccttggaacttgtcgccgttgtcctgctgaaattgttgacactgtgagtgctttagtttatgacaata

SEQ ID NO: 27721 - DNA, 80 bp, synthetic construct
  misc_feature 1..80: note = Synthetic: >NC_004718.3-cand-17540-17619
  source 1..80: mol_type = other DNA
agctaaaagcacacaaggataagtcagctcaatgcttcaaaatgttctacaaaggtgttattacacatgatgtttcatct

SEQ ID NO: 27722 - DNA, 80 bp, synthetic construct
  misc_feature 1..80: note = Synthetic: >NC_004718.3-cand-17620-17699
  source 1..80: mol_type = other DNA
gcaatcaacagacctcaaataggcgttgtaagagaatttcttacacgcaatcctgcttggagaaaagctgtttttatctc

SEQ ID NO: 27723 - DNA, 80 bp, synthetic construct
  misc_feature 1..80: note = Synthetic: >NC_004718.3-cand-17700-17779
  source 1..80: mol_type = other DNA
accttataattcacagaacgctgtagcttcaaaaatcttaggattgcctacgcagactgttgattcatcacagggttctg

SEQ ID NO: 27724 - DNA, 80 bp, synthetic construct
  misc_feature 1..80: note = Synthetic: >NC_004718.3-cand-17780-17859
  source 1..80: mol_type = other DNA
aatatgactatgtcatattcacacaaactactgaaacagcacactcttgtaatgtcaaccgcttcaatgtggctatcaca

SEQ ID NO: 27725 - DNA, 80 bp, synthetic construct
  misc_feature 1..80: note = Synthetic: >NC_004718.3-cand-17860-17939
  source 1..80: mol_type = other DNA
agggcaaaaattggcattttgtgcataatgtctgatagagatctttatgacaaactgcaatttacaagtctagaaatacc

SEQ ID NO: 27726 - DNA, 80 bp, synthetic construct
  misc_feature 1..80: note = Synthetic: >NC_004718.3-cand-17940-18019
  source 1..80: mol_type = other DNA
acgtcgcaatgtggctacattacaagcagaaaatgtaactggactttttaaggactgtagtaagatcattactggtcttc

SEQ ID NO: 27727 - DNA, 80 bp, synthetic construct
  misc_feature 1..80: note = Synthetic: >NC_004718.3-cand-18020-18099
  source 1..80: mol_type = other DNA
atcctacacaggcacctacacacctcagcgttgatataaagttcaagactgaaggattatgtgttgacataccaggcata

SEQ ID NO: 27728 - DNA, 80 bp, synthetic construct
  misc_feature 1..80: note = Synthetic: >NC_004718.3-cand-18100-18179
  source 1..80: mol_type = other DNA
ccaaaggacatgacctaccgtagactcatctctatgatgggtttcaaaatgaattaccaagtcaatggttaccctaatat

SEQ ID NO: 27729 - DNA, 80 bp, synthetic construct
  misc_feature 1..80: note = Synthetic: >NC_004718.3-cand-18180-18259
  source 1..80: mol_type = other DNA
gtttatcacccgcgaagaagctattcgtcacgttcgtgcgtggattggctttgatgtagagggctgtcatgcaactagag

SEQ ID NO: 27730 - DNA, 80 bp, synthetic construct
  misc_feature 1..80: note = Synthetic: >NC_004718.3-cand-18260-18339
  source 1..80: mol_type = other DNA
atgctgtgggtactaacctacctctccagctaggattttctacaggtgttaacttagtagctgtaccgactggttatgtt

SEQ ID NO: 27731 - DNA, 80 bp, synthetic construct
  misc_feature 1..80: note = Synthetic: >NC_004718.3-cand-18340-18419
  source 1..80: mol_type = other DNA
gacactgaaaataacacagaattcaccagagttaatgcaaaacctccaccaggtgaccagtttaaacatcttataccact

SEQ ID NO: 27732 - DNA, 80 bp, synthetic construct
  misc_feature 1..80: note = Synthetic: >NC_004718.3-cand-18420-18499
  source 1..80: mol_type = other DNA
catgtataaaggcttgccctggaatgtagtgcgtattaagatagtacaaatgctcagtgatacactgaaaggattgtcag

SEQ ID NO: 27733 - DNA, 80 bp, synthetic construct
  misc_feature 1..80: note = Synthetic: >NC_004718.3-cand-18500-18579
  source 1..80: mol_type = other DNA
acagagtcgtgttcgtcctttgggcgcatggctttgagcttacatcaatgaagtactttgtcaagattggacctgaaaga

SEQ ID NO: 27734 - DNA, 80 bp, synthetic construct
  misc_feature 1..80: note = Synthetic: >NC_004718.3-cand-18590-18669
  source 1..80: mol_type = other DNA
tgtgtgacaaacgtgcaacttgcttttctacttcatcagatacttatgcctgctggaatcattctgtgggttttgactat

SEQ ID NO: 27735 - DNA, 80 bp, synthetic construct
  misc_feature 1..80: note = Synthetic: >NC_004718.3-cand-18710-18789
  source 1..80: mol_type = other DNA
ttacgggtaaccttcagagtaaccatgaccaacattgccaggtacatggaaatgcacatgtggctagttgtgatgctatc

SEQ ID NO: 27736 - DNA, 80 bp, synthetic construct
  misc_feature 1..80: note = Synthetic: >NC_004718.3-cand-18750-18829
  source 1..80: mol_type = other DNA
ggtacatggaaatgcacatgtggctagttgtgatgctatcatgactagatgtttagcagtccatgagtgctttgttaagc

SEQ ID NO: 27737 - DNA, 80 bp, synthetic construct
  misc_feature 1..80: note = Synthetic: >NC_004718.3-cand-18830-18909
  source 1..80: mol_type = other DNA
gcgttgattggtctgttgaataccctattataggagatgaactgagggttaattctgcttgcagaaaagtacaacacatg

SEQ ID NO: 27738 - DNA, 80 bp, synthetic construct
  misc_feature 1..80: note = Synthetic: >NC_004718.3-cand-18910-18989
  source 1..80: mol_type = other DNA
gttgtgaagtctgcattgcttgctgataagtttccagttcttcatgacattggaaatccaaaggctatcaagtgtgtgcc

SEQ ID NO: 27739 - DNA, 80 bp, synthetic construct
  misc_feature 1..80: note = Synthetic: >NC_004718.3-cand-18990-19069
  source 1..80: mol_type = other DNA
tcaggctgaagtagaatggaagttctacgatgctcagccatgtagtgacaaagcttacaaaatagaggaactcttctatt

SEQ ID NO: 27740 - DNA, 80 bp, synthetic construct
  misc_feature 1..80: note = Synthetic: >NC_004718.3-cand-19070-19149
  source 1..80: mol_type = other DNA
cttatgctacacatcacgataaattcactgatggtgtttgtttgttttggaattgtaacgttgatcgttacccagccaat

SEQ ID NO: 27741 - DNA, 80 bp, synthetic construct
  misc_feature 1..80: note = Synthetic: >NC_004718.3-cand-19150-19229
  source 1..80: mol_type = other DNA
gcaattgtgtgtaggtttgacacaagagtcttgtcaaacttgaacttaccaggctgtgatggtggtagtttgtatgtgaa

SEQ ID NO: 27742 - DNA, 80 bp, synthetic construct
  misc_feature 1..80: note = Synthetic: >NC_004718.3-cand-19230-19309
  source 1..80: mol_type = other DNA
taagcatgcattccacactccagctttcgataaaagtgcatttactaatttaaagcaattgcctttcttttactattctg

SEQ ID NO: 27743 - DNA, 80 bp, synthetic construct
  misc_feature 1..80: note = Synthetic: >NC_004718.3-cand-19310-19389
  source 1..80: mol_type = other DNA
atagtccttgtgagtctcatggcaaacaagtagtgtcggatattgattatgttccactcaaatctgctacgtgtattaca

SEQ ID NO: 27744 - DNA, 80 bp, synthetic construct
  misc_feature 1..80: note = Synthetic: >NC_004718.3-cand-19390-19469
  source 1..80: mol_type = other DNA
cgatgcaatttaggtggtgctgtttgcagacaccatgcaaatgagtaccgacagtacttggatgcatataatatgatgat

SEQ ID NO: 27745 - DNA, 80 bp, synthetic construct
  misc_feature 1..80: note = Synthetic: >NC_004718.3-cand-19470-19549
  source 1..80: mol_type = other DNA
ttctgctggatttagcctatggatttacaaacaatttgatacttataacctgtggaatacatttaccaggttacagagtt

SEQ ID NO: 27746 - DNA, 80 bp, synthetic construct
  misc_feature 1..80: note = Synthetic: >NC_004718.3-cand-19550-19629
  source 1..80: mol_type = other DNA
tagaaaatgtggcttataatgttgttaataaaggacactttgatggacacgccggcgaagcacctgtttccatcattaat

SEQ ID NO: 27747 - DNA, 80 bp, synthetic construct
  misc_feature 1..80: note = Synthetic: >NC_004718.3-cand-19630-19709
  source 1..80: mol_type = other DNA
aatgctgtttacacaaaggtagatggtattgatgtggagatctttgaaaataagacaacacttcctgttaatgttgcatt

SEQ ID NO: 27748 - DNA, 80 bp, synthetic construct
  misc_feature 1..80: note = Synthetic: >NC_004718.3-cand-19710-19789
  source 1..80: mol_type = other DNA
tgagctttgggctaagcgtaacattaaaccagtgccagagattaagatactcaataatttgggtgttgatatcgctgcta

SEQ ID NO: 27749 - DNA, 80 bp, synthetic construct
  misc_feature 1..80: note = Synthetic: >NC_004718.3-cand-19790-19869
  source 1..80: mol_type = other DNA
atactgtaatctgggactacaaaagagaagccccagcacatgtatctacaataggtgtctgcacaatgactgacattgcc

SEQ ID NO: 27750 - DNA, 80 bp, synthetic construct
  misc_feature 1..80: note = Synthetic: >NC_004718.3-cand-19870-19949
  source 1..80: mol_type = other DNA
aagaaacctactgagagtgcttgttcttcacttactgtcttgtttgatggtagagtggaaggacaggtagacctttttag

SEQ ID NO: 27751 - DNA, 80 bp, synthetic construct
  misc_feature 1..80: note = Synthetic: >NC_004718.3-cand-19950-20029
  source 1..80: mol_type = other DNA
aaacgcccgtaatggtgttttaataacagaaggttcagtcaaaggtctaacaccttcaaagggaccagcacaagctagcg

SEQ ID NO: 27752 - DNA, 80 bp, synthetic construct
  misc_feature 1..80: note = Synthetic: >NC_004718.3-cand-20030-20109
  source 1..80: mol_type = other DNA
tcaatggagtcacattaattggagaatcagtaaaaacacagtttaactactttaagaaagtagacggcattattcaacag

SEQ ID NO: 27753 - DNA, 80 bp, synthetic construct
  misc_feature 1..80: note = Synthetic: >NC_004718.3-cand-20110-20189
  source 1..80: mol_type = other DNA
ttgcctgaaacctactttactcagagcagagacttagaggattttaagcccagatcacaaatggaaactgactttctcga

SEQ ID NO: 27754 - DNA, 80 bp, synthetic construct
  misc_feature 1..80: note = Synthetic: >NC_004718.3-cand-20190-20269
  source 1..80: mol_type = other DNA
gctcgctatggatgaattcatacagcgatataagctcgagggctatgccttcgaacacatcgtttatggagatttcagtc

SEQ ID NO: 27755 - DNA, 80 bp, synthetic construct
  misc_feature 1..80: note = Synthetic: >NC_004718.3-cand-20270-20349
  source 1..80: mol_type = other DNA
atggacaacttggcggtcttcatttaatgataggcttagccaagcgctcacaagattcaccacttaaattagaggatttt

SEQ ID NO: 27756 - DNA, 80 bp, synthetic construct
  misc_feature 1..80: note = Synthetic: >NC_004718.3-cand-20350-20429
  source 1..80: mol_type = other DNA
atccctatggacagcacagtgaaaaattacttcataacagatgcgcaaacaggttcatcaaaatgtgtgtgttctgtgat

SEQ ID NO: 27757 - DNA, 80 bp, synthetic construct
  misc_feature 1..80: note = Synthetic: >NC_004718.3-cand-20440-20519
  source 1..80: mol_type = other DNA
cttgatgactttgtcgagataataaagtcacaagatttgtcagtgatttcaaaagtggtcaaggttacaattgactatgc

SEQ ID NO: 27758 - DNA, 80 bp, synthetic construct
  misc_feature 1..80: note = Synthetic: >NC_004718.3-cand-20520-20599
  source 1..80: mol_type = other DNA
tgaaatttcattcatgctttggtgtaaggatggacatgttgaaaccttctacccaaaactacaagcaagtcaagcgtggc

SEQ ID NO: 27759 - DNA, 80 bp, synthetic construct
  misc_feature 1..80: note = Synthetic: >NC_004718.3-cand-20600-20679
  source 1..80: mol_type = other DNA
aaccaggtgttgcgatgcctaacttgtacaagatgcaaagaatgcttcttgaaaagtgtgaccttcagaattatggtgaa

SEQ ID NO: 27760 - DNA, 80 bp, synthetic construct
  misc_feature 1..80: note = Synthetic: >NC_004718.3-cand-20690-20769
  source 1..80: mol_type = other DNA
taccaaaaggaataatgatgaatgtcgcaaagtatactcaactgtgtcaatacttaaatacacttactttagctgtaccc

SEQ ID NO: 27761 - DNA, 80 bp, synthetic construct
  misc_feature 1..80: note = Synthetic: >NC_004718.3-cand-20770-20849
  source 1..80: mol_type = other DNA
tacaacatgagagttattcactttggtgctggctctgataaaggagttgcaccaggtacagctgtgctcagacaatggtt

SEQ ID NO: 27762 - DNA, 80 bp, synthetic construct
  misc_feature 1..80: note = Synthetic: >NC_004718.3-cand-20850-20929
  source 1..80: mol_type = other DNA
gccaactggcacactacttgtcgattcagatcttaatgacttcgtctccgacgcagattctactttaattggagactgtg

SEQ ID NO: 27763 - DNA, 80 bp, synthetic construct
  misc_feature 1..80: note = Synthetic: >NC_004718.3-cand-20930-21009
  source 1..80: mol_type = other DNA
caacagtacatacggctaataaatgggaccttattattagcgatatgtatgaccctaggaccaaacatgtgacaaaagag

SEQ ID NO: 27764 - DNA, 80 bp, synthetic construct
  misc_feature 1..80: note = Synthetic: >NC_004718.3-cand-21010-21089
  source 1..80: mol_type = other DNA
aatgactctaaagaagggtttttcacttatctgtgtggatttataaagcaaaaactagccctgggtggttctatagctgt

SEQ ID NO: 27765 - DNA, 80 bp, synthetic construct
  misc_feature 1..80: note = Synthetic: >NC_004718.3-cand-21090-21169
  source 1..80: mol_type = other DNA
aaagataacagagcattcttggaatgctgacctttacaagcttatgggccatttctcatggtggacagcttttgttacaa

SEQ ID NO: 27766 - DNA, 80 bp, synthetic construct
  misc_feature 1..80: note = Synthetic: >NC_004718.3-cand-21210-21289
  source 1..80: mol_type = other DNA
taactatcttggcaagccgaaggaacaaattgatggctataccatgcatgctaactacattttctggaggaacacaaatc

SEQ ID NO: 27767 - DNA, 80 bp, synthetic construct
  misc_feature 1..80: note = Synthetic: >NC_004718.3-cand-21250-21329
  source 1..80: mol_type = other DNA
accatgcatgctaactacattttctggaggaacacaaatcctatccagttgtcttcctattcactctttgacatgagcaa

SEQ ID NO: 27768 - DNA, 80 bp, synthetic construct
  misc_feature 1..80: note = Synthetic: >NC_004718.3-cand-21330-21409
  source 1..80: mol_type = other DNA
atttcctcttaaattaagaggaactgctgtaatgtctcttaaggagaatcaaatcaatgatatgatttattctcttctgg

SEQ ID NO: 27769 - DNA, 80 bp, synthetic construct
  misc_feature 1..80: note = Synthetic: >NC_004718.3-cand-21410-21489
  source 1..80: mol_type = other DNA
aaaaaggtaggcttatcattagagaaaacaacagagttgtggtttcaagtgatattcttgttaacaactaaacgaacatg

SEQ ID NO: 27770 - DNA, 80 bp, synthetic construct
  misc_feature 1..80: note = Synthetic: >NC_004718.3-cand-21490-21569
  source 1..80: mol_type = other DNA
tttattttcttattatttcttactctcactagtggtagtgaccttgaccggtgcaccacttttgatgatgttcaagctcc

SEQ ID NO: 27771 - DNA, 80 bp, synthetic construct
  misc_feature 1..80: note = Synthetic: >NC_004718.3-cand-21610-21689
  source 1..80: mol_type = other DNA
tatcctgatgaaatttttagatcagacactctttatttaactcaggatttatttcttccattttattctaatgttacagg

SEQ ID NO: 27772 - DNA, 80 bp, synthetic construct
  misc_feature 1..80: note = Synthetic: >NC_004718.3-cand-21650-21729
  source 1..80: mol_type = other DNA
ctcaggatttatttcttccattttattctaatgttacagggtttcatactattaatcatacgtttggcaaccctgtcata

SEQ ID NO: 27773 - DNA, 80 bp, synthetic construct
  misc_feature 1..80: note = Synthetic: >NC_004718.3-cand-21730-21809
  source 1..80: mol_type = other DNA
ccttttaaggatggtatttattttgctgccacagagaaatcaaatgttgtccgtggttgggtttttggttctaccatgaa

SEQ ID NO: 27774 - DNA, 80 bp, synthetic construct
  misc_feature 1..80: note = Synthetic: >NC_004718.3-cand-21810-21889
  source 1..80: mol_type = other DNA
caacaagtcacagtcggtgattattattaacaattctactaatgttgttatacgagcatgtaactttgaattgtgtgaca

SEQ ID NO: 27775 - DNA, 80 bp, synthetic construct
  misc_feature 1..80: note = Synthetic: >NC_004718.3-cand-21890-21969
  source 1..80: mol_type = other DNA
accctttctttgctgtttctaaacccatgggtacacagacacatactatgatattcgataatgcatttaattgcactttc

SEQ ID NO: 27776 - DNA, 80 bp, synthetic construct
  misc_feature 1..80: note = Synthetic: >NC_004718.3-cand-21970-22049
  source 1..80: mol_type = other DNA
gagtacatatctgatgccttttcgcttgatgtttcagaaaagtcaggtaattttaaacacttacgagagtttgtgtttaa

SEQ ID NO: 27777 - DNA, 80 bp, synthetic construct
  misc_feature 1..80: note = Synthetic: >NC_004718.3-cand-22060-22139
  source 1..80: mol_type = other DNA
gggtttctctatgtttataagggctatcaacctatagatgtagttcgtgatctaccttctggttttaacactttgaaacc

SEQ ID NO: 27778 - DNA, 80 bp, synthetic construct
  misc_feature 1..80: note = Synthetic: >NC_004718.3-cand-22140-22219
  source 1..80: mol_type = other DNA
tatttttaagttgcctcttggtattaacattacaaattttagagccattcttacagccttttcacctgctcaagacattt

SEQ ID NO: 27779 - DNA, 80 bp, synthetic construct
  misc_feature 1..80: note = Synthetic: >NC_004718.3-cand-22230-22309
  source 1..80: mol_type = other DNA
agctgcagcctattttgttggctatttaaagccaactacatttatgctcaagtatgatgaaaatggtacaatcacagatg

SEQ ID NO: 27780 - DNA, 80 bp, synthetic construct
  misc_feature 1..80: note = Synthetic: >NC_004718.3-cand-22310-22389
  source 1..80: mol_type = other DNA
ctgttgattgttctcaaaatccacttgctgaactcaaatgctctgttaagagctttgagattgacaaaggaatttaccag

SEQ ID NO: 27781 - DNA, 80 bp, synthetic construct
  misc_feature 1..80: note = Synthetic: >NC_004718.3-cand-22390-22469
  source 1..80: mol_type = other DNA
acctctaatttcagggttgttccctcaggagatgttgtgagattccctaatattacaaacttgtgtccttttggagaggt

SEQ ID NO: 27782 - DNA, 80 bp, synthetic construct
  misc_feature 1..80: note = Synthetic: >NC_004718.3-cand-22470-22549
  source 1..80: mol_type = other DNA
ttttaatgctactaaattcccttctgtctatgcatgggagagaaaaaaaatttctaattgtgttgctgattactctgtgc

SEQ ID NO: 27783 - DNA, 80 bp, synthetic construct
  misc_feature 1..80: note = Synthetic: >NC_004718.3-cand-22550-22629
  source 1..80: mol_type = other DNA
tctacaactcaacatttttttcaacctttaagtgctatggcgtttctgccactaagttgaatgatctttgcttctccaat

SEQ ID NO: 27784 - DNA, 80 bp, synthetic construct
  misc_feature 1..80: note = Synthetic: >NC_004718.3-cand-22630-22709
  source 1..80: mol_type = other DNA
gtctatgcagattcttttgtagtcaagggagatgatgtaagacaaatagcgccaggacaaactggtgttattgctgatta

SEQ ID NO: 27785 - DNA, 80 bp, synthetic construct
  misc_feature 1..80: note = Synthetic: >NC_004718.3-cand-22710-22789
  source 1..80: mol_type = other DNA
taattataaattgccagatgatttcatgggttgtgtccttgcttggaatactaggaacattgatgctacttcaactggta

SEQ ID NO: 27786 - DNA, 80 bp, synthetic construct
  misc_feature 1..80: note = Synthetic: >NC_004718.3-cand-22790-22869
  source 1..80: mol_type = other DNA
attataattataaatataggtatcttagacatggcaagcttaggccctttgagagagacatatctaatgtgcctttctcc

SEQ ID NO: 27787 - DNA, 80 bp, synthetic construct
  misc_feature 1..80: note = Synthetic: >NC_004718.3-cand-22870-22949
  source 1..80: mol_type = other DNA
cctgatggcaaaccttgcaccccacctgctcttaattgttattggccattaaatgattatggtttttacaccactactgg

SEQ ID NO: 27788 - DNA, 80 bp, synthetic construct
  misc_feature 1..80: note = Synthetic: >NC_004718.3-cand-22950-23029
  source 1..80: mol_type = other DNA
cattggctaccaaccttacagagttgtagtactttcttttgaacttttaaatgcaccggccacggtttgtggaccaaaat

SEQ ID NO: 27789 - DNA, 80 bp, synthetic construct
  misc_feature 1..80: note = Synthetic: >NC_004718.3-cand-23030-23109
  source 1..80: mol_type = other DNA
tatccactgaccttattaagaaccagtgtgtcaattttaattttaatggactcactggtactggtgtgttaactccttct

SEQ ID NO: 27790 - DNA, 80 bp, synthetic construct
  misc_feature 1..80: note = Synthetic: >NC_004718.3-cand-23110-23189
  source 1..80: mol_type = other DNA
tcaaagagatttcaaccatttcaacaatttggccgtgatgtttctgatttcactgattccgttcgagatcctaaaacatc

SEQ ID NO: 27791 - DNA, 80 bp, synthetic construct
  misc_feature 1..80: note = Synthetic: >NC_004718.3-cand-23230-23309
  source 1..80: mol_type = other DNA
agtgtaattacacctggaacaaatgcttcatctgaagttgctgttctatatcaagatgttaactgcactgatgtttctac

SEQ ID NO: 27792 - DNA, 80 bp, synthetic construct
  misc_feature 1..80: note = Synthetic: >NC_004718.3-cand-23270-23349
  source 1..80: mol_type = other DNA
ctgttctatatcaagatgttaactgcactgatgtttctacagcaattcatgcagatcaactcacaccagcttggcgcata

SEQ ID NO: 27793 - DNA, 80 bp, synthetic construct
  misc_feature 1..80: note = Synthetic: >NC_004718.3-cand-23350-23429
  source 1..80: mol_type = other DNA
tattctactggaaacaatgtattccagactcaagcaggctgtcttataggagctgagcatgtcgacacttcttatgagtg

SEQ ID NO: 27794 - DNA, 80 bp, synthetic construct
  misc_feature 1..80: note = Synthetic: >NC_004718.3-cand-23430-23509
  source 1..80: mol_type = other DNA
cgacattcctattggagctggcatttgtgctagttaccatacagtttctttattacgtagtactagccaaaaatctattg

SEQ ID NO: 27795 - DNA, 80 bp, synthetic construct
  misc_feature 1..80: note = Synthetic: >NC_004718.3-cand-23510-23589
  source 1..80: mol_type = other DNA
tggcttatactatgtctttaggtgctgatagttcaattgcttactctaataacaccattgctatacctactaacttttca

SEQ ID NO: 27796 - DNA, 80 bp, synthetic construct
  misc_feature 1..80: note = Synthetic: >NC_004718.3-cand-23590-23669
  source 1..80: mol_type = other DNA
attagcattactacagaagtaatgcctgtttctatggctaaaacctccgtagattgtaatatgtacatctgcggagattc

SEQ ID NO: 27797 - DNA, 80 bp, synthetic construct
  misc_feature 1..80: note = Synthetic: >NC_004718.3-cand-23670-23749
  source 1..80: mol_type = other DNA
tactgaatgtgctaatttgcttctccaatatggtagcttttgcacacaactaaatcgtgcactctcaggtattgctgctg

SEQ ID NO: 27798 - DNA, 80 bp, synthetic construct
  misc_feature 1..80: note = Synthetic: >NC_004718.3-cand-23750-23829
  source 1..80: mol_type = other DNA
aacaggatcgcaacacacgtgaagtgttcgctcaagtcaaacaaatgtacaaaaccccaactttgaaatattttggtggt

SEQ ID NO: 27799 - DNA, 80 bp, synthetic construct
  misc_feature 1..80: note = Synthetic: >NC_004718.3-cand-23840-23919
  source 1..80: mol_type = other DNA
cacaaatattacctgaccctctaaagccaactaagaggtcttttattgaggacttgctctttaataaggtgacactcgct

SEQ ID NO: 27800 - DNA, 80 bp, synthetic construct
  misc_feature 1..80: note = Synthetic: >NC_004718.3-cand-23920-23999
  source 1..80: mol_type = other DNA
gatgctggcttcatgaagcaatatggcgaatgcctaggtgatattaatgctagagatctcatttgtgcgcagaagttcaa

SEQ ID NO: 27801 - DNA, 80 bp, synthetic construct
  misc_feature 1..80: note = Synthetic: >NC_004718.3-cand-24000-24079
  source 1..80: mol_type = other DNA
tggacttacagtgttgccacctctgctcactgatgatatgattgctgcctacactgctgctctagttagtggtactgcca

SEQ ID NO: 27802 - DNA, 80 bp, synthetic construct
  misc_feature 1..80: note = Synthetic: >NC_004718.3-cand-24080-24159
  source 1..80: mol_type = other DNA
ctgctggatggacatttggtgctggcgctgctcttcaaataccttttgctatgcaaatggcatataggttcaatggcatt

SEQ ID NO: 27803 - DNA, 80 bp, synthetic construct
  misc_feature 1..80: note = Synthetic: >NC_004718.3-cand-24160-24239
  source 1..80: mol_type = other DNA
ggagttacccaaaatgttctctatgagaaccaaaaacaaatcgccaaccaatttaacaaggcgattagtcaaattcaaga

SEQ ID NO: 27804 - DNA, 80 bp, synthetic construct
  misc_feature 1..80: note = Synthetic: >NC_004718.3-cand-24240-24319
  source 1..80: mol_type = other DNA
atcacttacaacaacatcaactgcattgggcaagctgcaagacgttgttaaccagaatgctcaagcattaaacacacttg

SEQ ID NO: 27805 - DNA, 80 bp, synthetic construct
  misc_feature 1..80: note = Synthetic: >NC_004718.3-cand-24320-24399
  source 1..80: mol_type = other DNA
ttaaacaacttagctctaattttggtgcaatttcaagtgtgctaaatgatatcctttcgcgacttgataaagtcgaggcg

SEQ ID NO: 27806 - DNA, 80 bp, synthetic construct
  misc_feature 1..80: note = Synthetic: >NC_004718.3-cand-24400-24479
  source 1..80: mol_type = other DNA
gaggtacaaattgacaggttaattacaggcagacttcaaagccttcaaacctatgtaacacaacaactaatcagggctgc

SEQ ID NO: 27807 - DNA, 80 bp, synthetic construct
  misc_feature 1..80: note = Synthetic: >NC_004718.3-cand-24480-24559
  source 1..80: mol_type = other DNA
tgaaatcagggcttctgctaatcttgctgctactaaaatgtctgagtgtgttcttggacaatcaaaaagagttgactttt

SEQ ID NO: 27808 - DNA, 80 bp, synthetic construct
  misc_feature 1..80: note = Synthetic: >NC_004718.3-cand-24560-24639
  source 1..80: mol_type = other DNA
gtggaaagggctaccaccttatgtccttcccacaagcagccccgcatggtgttgtcttcctacatgtcacgtatgtgcca

SEQ ID NO: 27809 - DNA, 80 bp, synthetic construct
  misc_feature 1..80: note = Synthetic: >NC_004718.3-cand-24640-24719
  source 1..80: mol_type = other DNA
tcccaggagaggaacttcaccacagcgccagcaatttgtcatgaaggcaaagcatacttccctcgtgaaggtgtttttgt

SEQ ID NO: 27810 - DNA, 80 bp, synthetic construct
  misc_feature 1..80: note = Synthetic: >NC_004718.3-cand-24720-24799
  source 1..80: mol_type = other DNA
gtttaatggcacttcttggtttattacacagaggaacttcttttctccacaaataattactacagacaatacatttgtct

SEQ ID NO: 27811 - DNA, 80 bp, synthetic construct
  misc_feature 1..80: note = Synthetic: >NC_004718.3-cand-24800-24879
  source 1..80: mol_type = other DNA
caggaaattgtgatgtcgttattggcatcattaacaacacagtttatgatcctctgcaacctgagcttgactcattcaaa

SEQ ID NO: 27812 - DNA, 80 bp, synthetic construct
  misc_feature 1..80: note = Synthetic: >NC_004718.3-cand-24880-24959
  source 1..80: mol_type = other DNA
gaagagctggacaagtacttcaaaaatcatacatcaccagatgttgatcttggcgacatttcaggcattaacgcttctgt

SEQ ID NO: 27813 - DNA, 80 bp, synthetic construct
  misc_feature 1..80: note = Synthetic: >NC_004718.3-cand-24960-25039
  source 1..80: mol_type = other DNA
cgtcaacattcaaaaagaaattgaccgcctcaatgaggtcgctaaaaatttaaatgaatcactcattgaccttcaagaat

SEQ ID NO: 27814 - DNA, 80 bp, synthetic construct
  misc_feature 1..80: note = Synthetic: >NC_004718.3-cand-25040-25119
  source 1..80: mol_type = other DNA
tgggaaaatatgagcaatatattaaatggccttggtatgtttggctcggcttcattgctggactaattgccatcgtcatg

SEQ ID NO: 27815 - DNA, 80 bp, synthetic construct
  misc_feature 1..80: note = Synthetic: >NC_004718.3-cand-25120-25199
  source 1..80: mol_type = other DNA
gttacaatcttgctttgttgcatgactagttgttgcagttgcctcaagggtgcatgctcttgtggttcttgctgcaagtt

SEQ ID NO: 27816 - DNA, 80 bp, synthetic construct
  misc_feature 1..80: note = Synthetic: >NC_004718.3-cand-25200-25279
  source 1..80: mol_type = other DNA
tgatgaggatgactctgagccagttctcaagggtgtcaaattacattacacataaacgaacttatggatttgtttatgag

SEQ ID NO: 27817 - DNA, 80 bp, synthetic construct
  misc_feature 1..80: note = Synthetic: >NC_004718.3-cand-25290-25369
  source 1..80: mol_type = other DNA
cttagatcaattactgcacagccagtaaaaattgacaatgcttctcctgcaagtactgttcatgctacagcaacgatacc

SEQ ID NO: 27818 - DNA, 80 bp, synthetic construct
  misc_feature 1..80: note = Synthetic: >NC_004718.3-cand-25380-25459
  source 1..80: mol_type = other DNA
tcactccctttcggatggcttgttattggcgttgcatttcttgctgtttttcagagcgctaccaaaataattgcgctcaa

SEQ ID NO: 27819 - DNA, 80 bp, synthetic construct
  misc_feature 1..80: note = Synthetic: >NC_004718.3-cand-25460-25539
  source 1..80: mol_type = other DNA
taaaagatggcagctagccctttataagggcttccagttcatttgcaatttactgctgctatttgttaccatctattcac

SEQ ID NO: 27820 - DNA, 80 bp, synthetic construct
  misc_feature 1..80: note = Synthetic: >NC_004718.3-cand-25540-25619
  source 1..80: mol_type = other DNA
atcttttgcttgtcgctgcaggtatggaggcgcaatttttgtacctctatgccttgatatattttctacaatgcatcaac

SEQ ID NO: 27821 - DNA, 80 bp, synthetic construct
  misc_feature 1..80: note = Synthetic: >NC_004718.3-cand-25620-25699
  source 1..80: mol_type = other DNA
gcatgtagaattattatgagatgttggctttgttggaagtgcaaatccaagaacccattactttatgatgccaactactt

SEQ ID NO: 27822 - DNA, 80 bp, synthetic construct
  misc_feature 1..80: note = Synthetic: >NC_004718.3-cand-25700-25779
  source 1..80: mol_type = other DNA
tgtttgctggcacacacataactatgactactgtataccatataacagtgtcacagatacaattgtcgttactgaaggtg

SEQ ID NO: 27823 - DNA, 80 bp, synthetic construct
  misc_feature 1..80: note = Synthetic: >NC_004718.3-cand-25780-25859
  source 1..80: mol_type = other DNA
acggcatttcaacaccaaaactcaaagaagactaccaaattggtggttattctgaggataggcactcaggtgttaaagac

SEQ ID NO: 27824 - DNA, 80 bp, synthetic construct
  misc_feature 1..80: note = Synthetic: >NC_004718.3-cand-25860-25939
  source 1..80: mol_type = other DNA
tatgtcgttgtacatggctatttcaccgaagtttactaccagcttgagtctacacaaattactacagacactggtattga

SEQ ID NO: 27825 - DNA, 80 bp, synthetic construct
  misc_feature 1..80: note = Synthetic: >NC_004718.3-cand-25940-26019
  source 1..80: mol_type = other DNA
aaatgctacattcttcatctttaacaagcttgttaaagacccaccgaatgtgcaaatacacacaatcgacggctcttcag

SEQ ID NO: 27826 - DNA, 80 bp, synthetic construct
  misc_feature 1..80: note = Synthetic: >NC_004718.3-cand-26020-26099
  source 1..80: mol_type = other DNA
gagttgctaatccagcaatggatccaatttatgatgagccgacgacgactactagcgtgcctttgtaagcacaagaaagt

SEQ ID NO: 27827 - DNA, 80 bp, synthetic construct
  misc_feature 1..80: note = Synthetic: >NC_004718.3-cand-26100-26179
  source 1..80: mol_type = other DNA
gagtacgaacttatgtactcattcgtttcggaagaaacaggtacgttaatagttaatagcgtacttctttttcttgcttt

SEQ ID NO: 27828 - DNA, 80 bp, synthetic construct
  misc_feature 1..80: note = Synthetic: >NC_004718.3-cand-26180-26259
  source 1..80: mol_type = other DNA
cgtggtattcttgctagtcacactagccatccttactgcgcttcgattgtgtgcgtactgctgcaatattgttaacgtga

SEQ ID NO: 27829 - DNA, 80 bp, synthetic construct
  misc_feature 1..80: note = Synthetic: >NC_004718.3-cand-26260-26339
  source 1..80: mol_type = other DNA
gtttagtaaaaccaacggtttacgtctactcgcgtgttaaaaatctgaactcttctgaaggagttcctgatcttctggtc

SEQ ID NO: 27830 - DNA, 80 bp, synthetic construct
  misc_feature 1..80: note = Synthetic: >NC_004718.3-cand-26340-26419
  source 1..80: mol_type = other DNA
taaacgaactaactattattattattctgtttggaactttaacattgcttatcatggcagacaacggtactattaccgtt

SEQ ID NO: 27831 - DNA, 80 bp, synthetic construct
  misc_feature 1..80: note = Synthetic: >NC_004718.3-cand-26420-26499
  source 1..80: mol_type = other DNA
gaggagcttaaacaactcctggaacaatggaacctagtaataggtttcctattcctagcctggattatgttactacaatt

SEQ ID NO: 27832 - DNA, 80 bp, synthetic construct
  misc_feature 1..80: note = Synthetic: >NC_004718.3-cand-26500-26579
  source 1..80: mol_type = other DNA
tgcctattctaatcggaacaggtttttgtacataataaagcttgttttcctctggctcttgtggccagtaacacttgctt

SEQ ID NO: 27833 - DNA, 80 bp, synthetic construct
  misc_feature 1..80: note = Synthetic: >NC_004718.3-cand-26580-26659
  source 1..80: mol_type = other DNA
gttttgtgcttgctgctgtctacagaattaattgggtgactggcgggattgcgattgcaatggcttgtattgtaggcttg

SEQ ID NO: 27834 - DNA, 80 bp, synthetic construct
  misc_feature 1..80: note = Synthetic: >NC_004718.3-cand-26660-26739
  source 1..80: mol_type = other DNA
atgtggcttagctacttcgttgcttccttcaggctgtttgctcgtacccgctcaatgtggtcattcaacccagaaacaaa

SEQ ID NO: 27835 - DNA, 80 bp, synthetic construct
  misc_feature 1..80: note = Synthetic: >NC_004718.3-cand-26770-26849
  source 1..80: mol_type = other DNA
aattgtgaccagaccgctcatggaaagtgaacttgtcattggtgctgtgatcattcgtggtcacttgcgaatggccggac

SEQ ID NO: 27836 - DNA, 80 bp, synthetic construct
  misc_feature 1..80: note = Synthetic: >NC_004718.3-cand-26820-26899
  source 1..80: mol_type = other DNA
tcattcgtggtcacttgcgaatggccggacactccctagggcgctgtgacattaaggacctgccaaaagagatcactgtg

SEQ ID NO: 27837 - DNA, 80 bp, synthetic construct
  misc_feature 1..80: note = Synthetic: >NC_004718.3-cand-26900-26979
  source 1..80: mol_type = other DNA
gctacatcacgaacgctttcttattacaaattaggagcgtcgcagcgtgtaggcactgattcaggttttgctgcatacaa

SEQ ID NO: 27838 - DNA, 80 bp, synthetic construct
  misc_feature 1..80: note = Synthetic: >NC_004718.3-cand-26980-27059
  source 1..80: mol_type = other DNA
ccgctaccgtattggaaactataaattaaatacagaccacgccggtagcaacgacaatattgctttgctagtacagtaag

SEQ ID NO: 27839 - DNA, 80 bp, synthetic construct
  misc_feature 1..80: note = Synthetic: >NC_004718.3-cand-27060-27139
  source 1..80: mol_type = other DNA
tgacaacagatgtttcatcttgttgacttccaggttacaatagcagagatattgattatcattatgaggactttcaggat

SEQ ID NO: 27840 - DNA, 80 bp, synthetic construct
  misc_feature 1..80: note = Synthetic: >NC_004718.3-cand-27140-27219
  source 1..80: mol_type = other DNA
tgctatttggaatcttgacgttataataagttcaatagtgagacaattatttaagcctctaactaagaagaattattcgg

SEQ ID NO: 27841 - DNA, 80 bp, synthetic construct
  misc_feature 1..80: note = Synthetic: >NC_004718.3-cand-27220-27299
  source 1..80: mol_type = other DNA
agttagatgatgaagaacctatggagttagattatccataaaacgaacatgaaaattattctcttcctgacattgattgt

SEQ ID NO: 27842 - DNA, 80 bp, synthetic construct
  misc_feature 1..80: note = Synthetic: >NC_004718.3-cand-27300-27379
  source 1..80: mol_type = other DNA
atttacatcttgcgagctatatcactatcaggagtgtgttagaggtacgactgtactactaaaagaaccttgcccatcag

SEQ ID NO: 27843 - DNA, 80 bp, synthetic construct
  misc_feature 1..80: note = Synthetic: >NC_004718.3-cand-27380-27459
  source 1..80: mol_type = other DNA
gaacatacgagggcaattcaccatttcaccctcttgctgacaataaatttgcactaacttgcactagcacacactttgct

SEQ ID NO: 27844 - DNA, 80 bp, synthetic construct
  misc_feature 1..80: note = Synthetic: >NC_004718.3-cand-27460-27539
  source 1..80: mol_type = other DNA
tttgcttgtgctgacggtactcgacatacctatcagctgcgtgcaagatcagtttcaccaaaacttttcatcagacaaga

SEQ ID NO: 27845 - DNA, 80 bp, synthetic construct
  misc_feature 1..80: note = Synthetic: >NC_004718.3-cand-27540-27619
  source 1..80: mol_type = other DNA
ggaggttcaacaagagctctactcgccactttttctcattgttgctgctctagtatttttaatactttgcttcaccatta

SEQ ID NO: 27846 - DNA, 80 bp, synthetic construct
  misc_feature 1..80: note = Synthetic: >NC_004718.3-cand-27620-27699
  source 1..80: mol_type = other DNA
agagaaagacagaatgaatgagctcactttaattgacttctatttgtgctttttagcctttctgctattccttgttttaa

SEQ ID NO: 27847 - DNA, 80 bp, synthetic construct
  misc_feature 1..80: note = Synthetic: >NC_004718.3-cand-27700-27779
  source 1..80: mol_type = other DNA
taatgcttattatattttggttttcactcgaaatccaggatctagaagaaccttgtaccaaagtctaaacgaacatgaaa

SEQ ID NO: 27848 - DNA, 80 bp, synthetic construct
  misc_feature 1..80: note = Synthetic: >NC_004718.3-cand-27780-27859
  source 1..80: mol_type = other DNA
cttctcattgttttgacttgtatttctctatgcagttgcatatgcactgtagtacagcgctgtgcatctaataaacctca

SEQ ID NO: 27849 - DNA, 80 bp, synthetic construct
  misc_feature 1..80: note = Synthetic: >NC_004718.3-cand-27900-27979
  source 1..80: mol_type = other DNA
tacttatagcactgcttggctttgtgctctaggaaaggttttaccttttcatagatggcacactatggttcaaacatgca

SEQ ID NO: 27850 - DNA, 80 bp, synthetic construct
  misc_feature 1..80: note = Synthetic: >NC_004718.3-cand-27940-28019
  source 1..80: mol_type = other DNA
ttaccttttcatagatggcacactatggttcaaacatgcacacctaatgttactatcaactgtcaagatccagctggtgg

SEQ ID NO: 27851 - DNA, 80 bp, synthetic construct
  misc_feature 1..80: note = Synthetic: >NC_004718.3-cand-28020-28099
  source 1..80: mol_type = other DNA
tgcgcttatagctaggtgttggtaccttcatgaaggtcaccaaactgctgcatttagagacgtacttgttgttttaaata

SEQ ID NO: 27852 - DNA, 80 bp, synthetic construct
  misc_feature 1..80: note = Synthetic: >NC_004718.3-cand-28100-28179
  source 1..80: mol_type = other DNA
aacgaacaaattaaaatgtctgataatggaccccaatcaaaccaacgtagtgccccccgcattacatttggtggacccac

SEQ ID NO: 27853 - DNA, 80 bp, synthetic construct
  misc_feature 1..80: note = Synthetic: >NC_004718.3-cand-28140-28219
  source 1..80: mol_type = other DNA
accaacgtagtgccccccgcattacatttggtggacccacagattcaactgacaataaccagaatggaggacgcaatggg

SEQ ID NO: 27854 - DNA, 80 bp, synthetic construct
  misc_feature 1..80: note = Synthetic: >NC_004718.3-cand-28260-28339
  source 1..80: mol_type = other DNA
atactgcgtcttggttcacagctctcactcagcatggcaaggaggaacttagattccctcgaggccagggcgttccaatc

SEQ ID NO: 27855 - DNA, 80 bp, synthetic construct
  misc_feature 1..80: note = Synthetic: >NC_004718.3-cand-28340-28419
  source 1..80: mol_type = other DNA
aacaccaatagtggtccagatgaccaaattggctactaccgaagagctacccgacgagttcgtggtggtgacggcaaaat

SEQ ID NO: 27856 - DNA, 80 bp, synthetic construct
  misc_feature 1..80: note = Synthetic: >NC_004718.3-cand-28420-28499
  source 1..80: mol_type = other DNA
gaaagagctcagccccagatggtacttctattacctaggaactggcccagaagcttcacttccctacggcgctaacaaag

SEQ ID NO: 27857 - DNA, 80 bp, synthetic construct
  misc_feature 1..80: note = Synthetic: >NC_004718.3-cand-28500-28579
  source 1..80: mol_type = other DNA
aaggcatcgtatgggttgcaactgagggagccttgaatacacccaaagaccacattggcacccgcaatcctaataacaat

SEQ ID NO: 27858 - DNA, 80 bp, synthetic construct
  misc_feature 1..80: note = Synthetic: >NC_004718.3-cand-28580-28659
  source 1..80: mol_type = other DNA
gctgccaccgtgctacaacttcctcaaggaacaacattgccaaaaggcttctacgcagagggaagcagaggcggcagtca

SEQ ID NO: 27859 - DNA, 80 bp, synthetic construct
  misc_feature 1..80: note = Synthetic: >NC_004718.3-cand-28640-28719
  source 1..80: mol_type = other DNA
ggaagcagaggcggcagtcaagcctcttctcgctcctcatcacgtagtcgcggtaattcaagaaattcaactcctggcag

SEQ ID NO: 27860 - DNA, 80 bp, synthetic construct
  misc_feature 1..80: note = Synthetic: >NC_004718.3-cand-28740-28819
  source 1..80: mol_type = other DNA
ctcgaatggctagcggaggtggtgaaactgccctcgcgctattgctgctagacagattgaaccagcttgagagcaaagtt

SEQ ID NO: 27861 - DNA, 80 bp, synthetic construct
  misc_feature 1..80: note = Synthetic: >NC_004718.3-cand-28820-28899
  source 1..80: mol_type = other DNA
tctggtaaaggccaacaacaacaaggccaaactgtcactaagaaatctgctgctgaggcatctaaaaagcctcgccaaaa

SEQ ID NO: 27862 - DNA, 80 bp, synthetic construct
  misc_feature 1..80: note = Synthetic: >NC_004718.3-cand-28890-28969
  source 1..80: mol_type = other DNA
ctcgccaaaaacgtactgccacaaaacagtacaacgtcactcaagcatttgggagacgtggtccagaacaaacccaagga

SEQ ID NO: 27863 - DNA, 80 bp, synthetic construct
  misc_feature 1..80: note = Synthetic: >NC_004718.3-cand-28980-29059
  source 1..80: mol_type = other DNA
accaagacctaatcagacaaggaactgattacaaacattggccgcaaattgcacaatttgctccaagtgcctctgcattc

SEQ ID NO: 27864 - DNA, 80 bp, synthetic construct
  misc_feature 1..80: note = Synthetic: >NC_004718.3-cand-29060-29139
  source 1..80: mol_type = other DNA
tttggaatgtcacgcattggcatggaagtcacaccttcgggaacatggctgacttatcatggagccattaaattggatga

SEQ ID NO: 27865 - DNA, 80 bp, synthetic construct
  misc_feature 1..80: note = Synthetic: >NC_004718.3-cand-29140-29219
  source 1..80: mol_type = other DNA
caaagatccacaattcaaagacaacgtcatactgctgaacaagcacattgacgcatacaaaacattcccaccaacagagc

SEQ ID NO: 27866 - DNA, 80 bp, synthetic construct
  misc_feature 1..80: note = Synthetic: >NC_004718.3-cand-29220-29299
  source 1..80: mol_type = other DNA
ctaaaaaggacaaaaagaaaaagactgatgaagctcagcctttgccgcagagacaaaagaagcagcccactgtgactctt

SEQ ID NO: 27867 - DNA, 80 bp, synthetic construct
  misc_feature 1..80: note = Synthetic: >NC_004718.3-cand-29290-29369
  source 1..80: mol_type = other DNA
tgtgactcttcttcctgcggctgacatggatgatttctccagacaacttcaaaattccatgagtggagcttctgctgatt

SEQ ID NO: 27868 - DNA, 80 bp, synthetic construct
  misc_feature 1..80: note = Synthetic: >NC_004718.3-cand-29370-29449
  source 1..80: mol_type = other DNA
caactcaggcataaacactcatgatgaccacacaaggcagatgggctatgtaaacgttttcgcaattccgtttacgatac

SEQ ID NO: 27869 - DNA, 80 bp, synthetic construct
  misc_feature 1..80: note = Synthetic: >NC_004718.3-cand-29450-29529
  source 1..80: mol_type = other DNA
atagtctactcttgtgcagaatgaattctcgtaactaaacagcacaagtaggtttagttaactttaatctcacatagcaa

SEQ ID NO: 27870 - DNA, 80 bp, synthetic construct
  misc_feature 1..80: note = Synthetic: >NC_004718.3-cand-29530-29609
  source 1..80: mol_type = other DNA
tctttaatcaatgtgtaacattagggaggacttgaaagagccaccacattttcatcgaggccacgcggagtacgatcgag

SEQ ID NO: 27871 - DNA, 80 bp, synthetic construct
  misc_feature 1..80: note = Synthetic: >NC_004718.3-cand-29610-29689
  source 1..80: mol_type = other DNA
ggtacagtgaataatgctagggagagctgcctatatggaagagccctaatgtgtaaaattaattttagtagtgctatccc

SEQ ID NO: 27872 - DNA, 80 bp, synthetic construct
  misc_feature 1..80: note = Synthetic: >NC_043073.1-cand-0-79
  source 1..80: mol_type = other DNA
agtagactccgcaagaagaagcaagacaaaaaaagactgagagcaatatgggcaggttatacctgattgtgcttggggtc

SEQ ID NO: 27873 - DNA, 80 bp, synthetic construct
  misc_feature 1..80: note = Synthetic: >NC_043073.1-cand-80-159
  source 1..80: mol_type = other DNA
ctgattactgctacagctggtttcccgcggagtgtgcatgaattaaaaattgaatgcccgcatactgtcgtattagggca

SEQ ID NO: 27874 - DNA, 80 bp, synthetic construct
  misc_feature 1..80: note = Synthetic: >NC_043073.1-cand-160-239
  source 1..80: mol_type = other DNA
aggatatgtcacaggttctgttgagcttggctttattgctcttgatcaagtaacagatttaaagattgagagctcctgta

SEQ ID NO: 27875 - DNA, 80 bp, synthetic construct
  misc_feature 1..80: note = Synthetic: >NC_043073.1-cand-240-319
  source 1..80: mol_type = other DNA
gctttgatcatcatgcagcacctacaacaacacagaacttcacacagctcaaatgggcaaaaacagcaagcacaactgac

SEQ ID NO: 27876 - DNA, 80 bp, synthetic construct
  misc_feature 1..80: note = Synthetic: >NC_043073.1-cand-320-399
  source 1..80: mol_type = other DNA
accacaaatgcagccgagactacatttgaaagcaagtccacggaagtgcacttaaaaggagtatgtacaattcccagcaa

SEQ ID NO: 27877 - DNA, 80 bp, synthetic construct
  misc_feature 1..80: note = Synthetic: >NC_043073.1-cand-400-479
  source 1..80: mol_type = other DNA
tgtgctcgacggaccatctcgccctgtaacagggagaaaaacagttgtctgttatgatttagcatgcaatcaaactcatt

SEQ ID NO: 27878 - DNA, 80 bp, synthetic construct
  misc_feature 1..80: note = Synthetic: >NC_043073.1-cand-490-569
  source 1..80: mol_type = other DNA
tgttcatttgctagcaccaatacaaacatgcatgtctgttcggagctgtatgataagcttattggcaagtaggattcagg

SEQ ID NO: 27879 - DNA, 80 bp, synthetic construct
  misc_feature 1..80: note = Synthetic: >NC_043073.1-cand-570-649
  source 1..80: mol_type = other DNA
tggtctatgagaagacatactgtgttacaggacaacttatagaaggcttgtgttttaaccctgtccctaaccttgcactg

SEQ ID NO: 27880 - DNA, 80 bp, synthetic construct
  misc_feature 1..80: note = Synthetic: >NC_043073.1-cand-660-739
  source 1..80: mol_type = other DNA
ggcacacatatgacacatttacattgccaattacatgctttctggtggccaaaaagggtgcaaacctgaaaattgctgtt

SEQ ID NO: 27881 - DNA, 80 bp, synthetic construct
  misc_feature 1..80: note = Synthetic: >NC_043073.1-cand-740-819
  source 1..80: mol_type = other DNA
gagctagagaaactgacaacaaagactggttgtgcagaaaatgcacttcaggcttactatatatgctttataggacagca

SEQ ID NO: 27882 - DNA, 80 bp, synthetic construct
  misc_feature 1..80: note = Synthetic: >NC_043073.1-cand-820-899
  source 1..80: mol_type = other DNA
ctctgagccattaactgtcccgatgctcgaggactatagatcagctgaaattttcacaagaataatgatgaatccaaaag

SEQ ID NO: 27883 - DNA, 80 bp, synthetic construct
  misc_feature 1..80: note = Synthetic: >NC_043073.1-cand-900-979
  source 1..80: mol_type = other DNA
gtgaagatcatgatatggaacagtcttcccaaggtgctttgcgaattgttgggcctataaaaggtaaagtgccacccact

SEQ ID NO: 27884 - DNA, 80 bp, synthetic construct
  misc_feature 1..80: note = Synthetic: >NC_043073.1-cand-1010-1089
  source 1..80: mol_type = other DNA
tttgcaggtttgcctatgtatagttctttttcgagccttgtaaggaaagcagaacctgaatatctattttcacctggtat

SEQ ID NO: 27885 - DNA, 80 bp, synthetic construct
  misc_feature 1..80: note = Synthetic: >NC_043073.1-cand-1060-1139
  source 1..80: mol_type = other DNA
agaacctgaatatctattttcacctggtatcattgcagaatctaatcatagcagctgcgataagaaaacattacccttaa

SEQ ID NO: 27886 - DNA, 80 bp, synthetic construct
  misc_feature 1..80: note = Synthetic: >NC_043073.1-cand-1150-1229
  source 1..80: mol_type = other DNA
tttcttatcaatgtctggtgaaattgaaagaattactggctgtaatgtcttttgtacacttgctggcccaggtgcaagtt

SEQ ID NO: 27887 - DNA, 80 bp, synthetic construct
  misc_feature 1..80: note = Synthetic: >NC_043073.1-cand-1220-1299
  source 1..80: mol_type = other DNA
ggtgcaagttgtgaggcttactctgaaaatggaatattcaatattagttctcccacatgcttagtcaataaagtccaaaa

SEQ ID NO: 27888 - DNA, 80 bp, synthetic construct
  misc_feature 1..80: note = Synthetic: >NC_043073.1-cand-1310-1389
  source 1..80: mol_type = other DNA
tcagaacagagaatcaactttatctcccaaagaatagatcaagatgtgattgtctattgtaatggacaaaagaaggtcat

SEQ ID NO: 27889 - DNA, 80 bp, synthetic construct
  misc_feature 1..80: note = Synthetic: >NC_043073.1-cand-1400-1479
  source 1..80: mol_type = other DNA
acactagttataggccaatgtatttatacatttacaagtatcttttcactgatccctagtgttgcacattccttggctgt

SEQ ID NO: 27890 - DNA, 80 bp, synthetic construct
  misc_feature 1..80: note = Synthetic: >NC_043073.1-cand-1480-1559
  source 1..80: mol_type = other DNA
cgagctctgtgtaccagggatccatggatgggctacaattgcattagtaatcacattttgctttggctggttacttattc

SEQ ID NO: 27891 - DNA, 80 bp, synthetic construct
  misc_feature 1..80: note = Synthetic: >NC_043073.1-cand-1560-1639
  source 1..80: mol_type = other DNA
ctaccacaaccatggttgtgttgaaatgcctgaggctgctaacttactcgtgctctcactattctactgaatcaaagttc

SEQ ID NO: 27892 - DNA, 80 bp, synthetic construct
  misc_feature 1..80: note = Synthetic: >NC_043073.1-cand-1640-1719
  source 1..80: mol_type = other DNA
aaagtcattctagaaaaggtgaaggttgaataccagaagacaatgggttcaatggtatgtgacatttgtcatcatgaatg

SEQ ID NO: 27893 - DNA, 80 bp, synthetic construct
  misc_feature 1..80: note = Synthetic: >NC_043073.1-cand-1720-1799
  source 1..80: mol_type = other DNA
tgaaacagcaaaagaacttgaaagccataaaaaaagttgtgctgatgggcagtgcccatactgtatgactattaccgagg

SEQ ID NO: 27894 - DNA, 80 bp, synthetic construct
  misc_feature 1..80: note = Synthetic: >NC_043073.1-cand-1800-1879
  source 1..80: mol_type = other DNA
caactgagagtgctttacaggcccattatgctgtatgtaaattaacagggcgctttcatgaggctttaaaaaaatcatta

SEQ ID NO: 27895 - DNA, 80 bp, synthetic construct
  misc_feature 1..80: note = Synthetic: >NC_043073.1-cand-1900-1979
  source 1..80: mol_type = other DNA
gggttgttatagaacacttggtgttttccgttataagagtcgttgctatgtgggcttagtatggatgtgtttgttgactc

SEQ ID NO: 27896 - DNA, 80 bp, synthetic construct
  misc_feature 1..80: note = Synthetic: >NC_043073.1-cand-1960-2039
  source 1..80: mol_type = other DNA
atggatgtgtttgttgactcttgagttgatcgtttgggctgctagtgcagatacacccttacttgaacctggctggtcag

SEQ ID NO: 27897 - DNA, 80 bp, synthetic construct
  misc_feature 1..80: note = Synthetic: >NC_043073.1-cand-2060-2139
  source 1..80: mol_type = other DNA
gatattccgatgaagacagacctagagttagattttgctatcccatcatcttcatcatatagttatagaaggcgattagt

SEQ ID NO: 27898 - DNA, 80 bp, synthetic construct
  misc_feature 1..80: note = Synthetic: >NC_043073.1-cand-2120-2199
  source 1..80: mol_type = other DNA
agttatagaaggcgattagtaaaccctgctaattcagatgagactgttccatttcactttcagcttgaacgacaagtaat

SEQ ID NO: 27899 - DNA, 80 bp, synthetic construct
  misc_feature 1..80: note = Synthetic: >NC_043073.1-cand-2200-2279
  source 1..80: mol_type = other DNA
ccatgcagaaatacaatcgctaggacattggatggatgccacatttaatataatttctgcatttcactgctatggtgagt

SEQ ID NO: 27900 - DNA, 80 bp, synthetic construct
  misc_feature 1..80: note = Synthetic: >NC_043073.1-cand-2280-2359
  source 1..80: mol_type = other DNA
gcaagaaatactcttacccttggcaaacagcaaaatgtttttttgagaaggactaccagtatgaaacaagttggagctgt

SEQ ID NO: 27901 - DNA, 80 bp, synthetic construct
  misc_feature 1..80: note = Synthetic: >NC_043073.1-cand-2380-2459
  source 1..80: mol_type = other DNA
ggtaggtactggttgtactgcatgtggcatatatctggataaattgaagtctgttgggaaagcatataaagtaattacct

SEQ ID NO: 27902 - DNA, 80 bp, synthetic construct
  misc_feature 1..80: note = Synthetic: >NC_043073.1-cand-2440-2519
  source 1..80: mol_type = other DNA
agcatataaagtaattaccttgaaatatgcaagaaaagtttgcattcaattaggtacggaacaaacatgtaagaatatcg

SEQ ID NO: 27903 - DNA, 80 bp, synthetic construct
  misc_feature 1..80: note = Synthetic: >NC_043073.1-cand-2520-2599
  source 1..80: mol_type = other DNA
atgttaatgactgtcttgtaacttcatcaatcaaagtttgtatgattggcacaatctcaaagtttcaaccaggagacact

SEQ ID NO: 27904 - DNA, 80 bp, synthetic construct
  misc_feature 1..80: note = Synthetic: >NC_043073.1-cand-2600-2679
  source 1..80: mol_type = other DNA
ttactatttttgggtccacttgaagaaggtggcctagtcctcaaacaatggtgtacaacaacatgttcatttggtgatcc

SEQ ID NO: 27905 - DNA, 80 bp, synthetic construct
  misc_feature 1..80: note = Synthetic: >NC_043073.1-cand-2680-2759
  source 1..80: mol_type = other DNA
aggtgatattatgtctacaacttcaggaatgcgttgccctgaacatacaggctcctttaggaagatctgtgggtttgcaa

SEQ ID NO: 27906 - DNA, 80 bp, synthetic construct
  misc_feature 1..80: note = Synthetic: >NC_043073.1-cand-2760-2839
  source 1..80: mol_type = other DNA
caacacctgtttgtgagtatcaagggaatacagtctctggttttaaaagattgatggctacaaaggactcgtttcagtca

SEQ ID NO: 27907 - DNA, 80 bp, synthetic construct
  misc_feature 1..80: note = Synthetic: >NC_043073.1-cand-2840-2919
  source 1..80: mol_type = other DNA
tttaatgtatctgaagtacacattacaacaaccaagctagaatggagtgatcctgatagtaacatcaaagatcatataaa

SEQ ID NO: 27908 - DNA, 80 bp, synthetic construct
  misc_feature 1..80: note = Synthetic: >NC_043073.1-cand-2930-3009
  source 1..80: mol_type = other DNA
aaccgagatgtatcatttcaagacttaagtgacaatccgtgcaaagtggacctttcaacacaggcaattgatggtgcatg

SEQ ID NO: 27909 - DNA, 80 bp, synthetic construct
  misc_feature 1..80: note = Synthetic: >NC_043073.1-cand-3010-3089
  source 1..80: mol_type = other DNA
gggctctggtgtaggttttacattgacatgtatagtgggattaacagaatgctctagtttcatgacctctattaaggtat

SEQ ID NO: 27910 - DNA, 80 bp, synthetic construct
  misc_feature 1..80: note = Synthetic: >NC_043073.1-cand-3090-3169
  source 1..80: mol_type = other DNA
gtgacatggctatgtgttatggagcctcagtagtaaacctagttagaggctccaatacagttaaaattgttggaaaaggt

SEQ ID NO: 27911 - DNA, 80 bp, synthetic construct
  misc_feature 1..80: note = Synthetic: >NC_043073.1-cand-3170-3249
  source 1..80: mol_type = other DNA
ggtcattctggttcgacatttagatgctgtcatgataaggactgtacaagtaatggtctgcttgcatctgcaccacatct

SEQ ID NO: 27912 - DNA, 80 bp, synthetic construct
  misc_feature 1..80: note = Synthetic: >NC_043073.1-cand-3250-3329
  source 1..80: mol_type = other DNA
tgaacgggttacaggattcaatcagatagattctgacaaggtttatgatgatggagctccaccgtgttctataaaatgct

SEQ ID NO: 27913 - DNA, 80 bp, synthetic construct
  misc_feature 1..80: note = Synthetic: >NC_043073.1-cand-3360-3439
  source 1..80: mol_type = other DNA
ggatattaaatggaaattgggtagttgttgcagtccttgttatcatattactaatctctatctttctattcagcttcttc

SEQ ID NO: 27914 - DNA, 80 bp, synthetic construct
  misc_feature 1..80: note = Synthetic: >NC_043073.1-cand-3410-3489
  source 1..80: mol_type = other DNA
ctaatctctatctttctattcagcttcttctgccccataagatctcacaaaaagcaactttaaatagcctctaaccaccc

SEQ ID NO: 27915 - DNA, 80 bp, synthetic construct
  misc_feature 1..80: note = Synthetic: >NC_043073.1-cand-3490-3569
  source 1..80: mol_type = other DNA
ttaataacaatgactataaagcactaacaatttgctaaaatattgccaagataacagctaaccactttaatctgtatgac

SEQ ID NO: 27916 - DNA, 80 bp, synthetic construct
  misc_feature 1..80: note = Synthetic: >NC_043073.1-cand-3570-3649
  source 1..80: mol_type = other DNA
aatgaataacatcactaaaaaaaactaagaatttaataacatataatagatttgcctcaaaccagggcttttgttcctgc

SEQ ID NO: 27917 - DNA, 80 bp, synthetic construct
  misc_feature 1..80: note = Synthetic: >NC_043075.1-cand-10-89
  source 1..80: mol_type = other DNA
ttgagaagctactactaaagaagctgtaatgagcaacctcaaagaagttcaggacaatattacaacccacgaacagcagc

SEQ ID NO: 27918 - DNA, 80 bp, synthetic construct
  misc_feature 1..80: note = Synthetic: >NC_043075.1-cand-100-179
  source 1..80: mol_type = other DNA
tagacaaaagctgaaagatgcagaaaggacggttgaggtggacccggatgacgttaacaagagcacactacagaacagac

SEQ ID NO: 27919 - DNA, 80 bp, synthetic construct
  misc_feature 1..80: note = Synthetic: >NC_043075.1-cand-220-299
  source 1..80: mol_type = other DNA
caagagacaacttgcagatcttgttgcagctcagaaattggctacaaaatctgttgatccaacagggattgaacctgatg

SEQ ID NO: 27920 - DNA, 80 bp, synthetic construct
  misc_feature 1..80: note = Synthetic: >NC_043075.1-cand-280-359
  source 1..80: mol_type = other DNA
aacagggattgaacctgatgaccatctgaaagaaaagtcctcacttaggtatggcaatgtgcttgacgtcaattcaattg

SEQ ID NO: 27921 - DNA, 80 bp, synthetic construct
  misc_feature 1..80: note = Synthetic: >NC_043075.1-cand-350-429
  source 1..80: mol_type = other DNA
aattcaattgaccttgaggaaccaagtgggcagactgctgactggaaagcaatcgggacttatattcttagttttgtcct

SEQ ID NO: 27922 - DNA, 80 bp, synthetic construct
  misc_feature 1..80: note = Synthetic: >NC_043075.1-cand-430-509
  source 1..80: mol_type = other DNA
tccaattgtgttgaaggccctctatatgttgtcaacacgaggaaggcagacagttaaggaaaataaagggacaagaatca

SEQ ID NO: 27923 - DNA, 80 bp, synthetic construct
  misc_feature 1..80: note = Synthetic: >NC_043075.1-cand-510-589
  source 1..80: mol_type = other DNA
gattcaaggatgattcttcttatgaagatgttaatggtattcggaagcccaaacacttgtatgtgtccttgcctacagca

SEQ ID NO: 27924 - DNA, 80 bp, synthetic construct
  misc_feature 1..80: note = Synthetic: >NC_043075.1-cand-590-669
  source 1..80: mol_type = other DNA
cagtcaacaatgaaggcagatgagatcacaccaggtcgattccgtactattgtatgtgggttattccctgcacagattaa

SEQ ID NO: 27925 - DNA, 80 bp, synthetic construct
  misc_feature 1..80: note = Synthetic: >NC_043075.1-cand-670-749
  source 1..80: mol_type = other DNA
agcacggaatattataagccctgtcatgggagtgattgggttttcattctttgtgaaggattgggttgataaaattgagg

SEQ ID NO: 27926 - DNA, 80 bp, synthetic construct
  misc_feature 1..80: note = Synthetic: >NC_043075.1-cand-740-819
  source 1..80: mol_type = other DNA
aaaattgaggactttttaagggctgaatgtccattcctaccaaaaccaagggcacaagcagagtcattcctgtcgacaaa

SEQ ID NO: 27927 - DNA, 80 bp, synthetic construct
  misc_feature 1..80: note = Synthetic: >NC_043075.1-cand-820-899
  source 1..80: mol_type = other DNA
tggtgcttactttatgaatagacagacacaggttgaagagtcaaaggtgcaggacattttagacctaattgacactgctg

SEQ ID NO: 27928 - DNA, 80 bp, synthetic construct
  misc_feature 1..80: note = Synthetic: >NC_043075.1-cand-910-989
  source 1..80: mol_type = other DNA
tgcaacattatttgataatattgctagccctcaatctgcatggatatttgcctgtgcaccggaccgatgtccaccgacag

SEQ ID NO: 27929 - DNA, 80 bp, synthetic construct
  misc_feature 1..80: note = Synthetic: >NC_043075.1-cand-980-1059
  source 1..80: mol_type = other DNA
ccaccgacagcattgtatgttgctggtgtgcctgaattaggagcattcttttcaatactccaagatatgaggaatacaat

SEQ ID NO: 27930 - DNA, 80 bp, synthetic construct
  misc_feature 1..80: note = Synthetic: >NC_043075.1-cand-1070-1149
  source 1..80: mol_type = other DNA
aagtctgtaggaactgctgaagaaaaactgaaaaagaaatctgccttctaccagtcttacttacgcagaacacagtcaat

SEQ ID NO: 27931 - DNA, 80 bp, synthetic construct
  misc_feature 1..80: note = Synthetic: >NC_043075.1-cand-1150-1229
  source 1..80: mol_type = other DNA
ggggattcaactggaccagaaaatcattatattgtatatgattaactggggaaaagaggctgtcaaccactttcatctcg

SEQ ID NO: 27932 - DNA, 80 bp, synthetic construct
  misc_feature 1..80: note = Synthetic: >NC_043075.1-cand-1250-1329
  source 1..80: mol_type = other DNA
ttgcggcagctagcacaagccttagtagacactaaggttaaagagatttcaaatcaagagcctttaaagatatgagtgct

SEQ ID NO: 27933 - DNA, 80 bp, synthetic construct
  misc_feature 1..80: note = Synthetic: >NC_043075.1-cand-1330-1409
  source 1..80: mol_type = other DNA
taatctaacatggagtggctctgttataactgaatgttatttcgggttggtgccaattattaatcatctcaggttctttc

SEQ ID NO: 27934 - DNA, 80 bp, synthetic construct
  misc_feature 1..80: note = Synthetic: >NC_043075.1-cand-1420-1499
  source 1..80: mol_type = other DNA
cgggtgggttagatagagaatgtataatcctttactgtgacgggtggttcaatagggcatttatgggtcatattatttag

SEQ ID NO: 27935 - DNA, 80 bp, synthetic construct
  misc_feature 1..80: note = Synthetic: >NC_043075.1-cand-1510-1589
  source 1..80: mol_type = other DNA
attaagattaggattaaggttaagattaaactttaggttaaggttataattgctagtatgttaatgataagttagattag

SEQ ID NO: 27936 - DNA, 80 bp, synthetic construct
  misc_feature 1..80: note = Synthetic: >NC_043075.1-cand-1590-1669
  source 1..80: mol_type = other DNA
acataactatagtttaaaatagctcaagtagtattagtataattagtatagttattaaatggtaatttagtctatagacc

SEQ ID NO: 27937 - DNA, 80 bp, synthetic construct
  misc_feature 1..80: note = Synthetic: >NC_043075.1-cand-1680-1759
  source 1..80: mol_type = other DNA
ttgaaatctatatagttagtttgtgttaaataggttgtagttatgtttagttaatgttagaattatacatactattaatg

SEQ ID NO: 27938 - DNA, 80 bp, synthetic construct
  misc_feature 1..80: note = Synthetic: >NC_043075.1-cand-1760-1839
  source 1..80: mol_type = other DNA
tgatttatactgtcggatacactggagctactatagtagaacttgctttactaactactgatccttacaaattgatgtaa

SEQ ID NO: 27939 - DNA, 80 bp, synthetic construct
  misc_feature 1..80: note = Synthetic: >NC_043075.1-cand-1850-1929
  source 1..80: mol_type = other DNA
atgcttaagctttagctactaattatatactaacaacaacatctacctcatcctaaaccctcaaccctaacctacctctt

SEQ ID NO: 27940 - DNA, 80 bp, synthetic construct
  misc_feature 1..80: note = Synthetic: >NC_043075.1-cand-1890-1969
  source 1..80: mol_type = other DNA
atctacctcatcctaaaccctcaaccctaacctacctcttacattctacctcagagtttatgtttcttgattgcttttca

SEQ ID NO: 27941 - DNA, 80 bp, synthetic construct
  misc_feature 1..80: note = Synthetic: >NC_045512.2-cand-10-89
  source 1..80: mol_type = other DNA
ccttcccaggtaacaaaccaaccaactttcgatctcttgtagatctgttctctaaacgaactttaaaatctgtgtggctg

SEQ ID NO: 27942 - DNA, 80 bp, synthetic construct
  misc_feature 1..80: note = Synthetic: >NC_045512.2-cand-90-169
  source 1..80: mol_type = other DNA
tcactcggctgcatgcttagtgcactcacgcagtataattaataactaattactgtcgttgacaggacacgagtaactcg

SEQ ID NO: 27943 - DNA, 80 bp, synthetic construct
  misc_feature 1..80: note = Synthetic: >NC_045512.2-cand-170-249
  source 1..80: mol_type = other DNA
tctatcttctgcaggctgcttacggtttcgtccgtgttgcagccgatcatcagcacatctaggtttcgtccgggtgtgac

SEQ ID NO: 27944 - DNA, 80 bp, synthetic construct
  misc_feature 1..80: note = Synthetic: >NC_045512.2-cand-250-329
  source 1..80: mol_type = other DNA
cgaaaggtaagatggagagccttgtccctggtttcaacgagaaaacacacgtccaactcagtttgcctgttttacaggtt

SEQ ID NO: 27945 - DNA, 80 bp, synthetic construct
  misc_feature 1..80: note = Synthetic: >NC_045512.2-cand-370-449
  source 1..80: mol_type = other DNA
aggtcttatcagaggcacgtcaacatcttaaagatggcacttgtggcttagtagaagttgaaaaaggcgttttgcctcaa

SEQ ID NO: 27946 - DNA, 80 bp, synthetic construct
  misc_feature 1..80: note = Synthetic: >NC_045512.2-cand-450-529
  source 1..80: mol_type = other DNA
cttgaacagccctatgtgttcatcaaacgttcggatgctcgaactgcacctcatggtcatgttatggttgagctggtagc

SEQ ID NO: 27947 - DNA, 80 bp, synthetic construct
  misc_feature 1..80: note = Synthetic: >NC_045512.2-cand-530-609
  source 1..80: mol_type = other DNA
agaactcgaaggcattcagtacggtcgtagtggtgagacacttggtgtccttgtccctcatgtgggcgaaataccagtgg

SEQ ID NO: 27948 - DNA, 80 bp, synthetic construct
  misc_feature 1..80: note = Synthetic: >NC_045512.2-cand-610-689
  source 1..80: mol_type = other DNA
cttaccgcaaggttcttcttcgtaagaacggtaataaaggagctggtggccatagttacggcgccgatctaaagtcattt

SEQ ID NO: 27949 - DNA, 80 bp, synthetic construct
  misc_feature 1..80: note = Synthetic: >NC_045512.2-cand-690-769
  source 1..80: mol_type = other DNA
gacttaggcgacgagcttggcactgatccttatgaagattttcaagaaaactggaacactaaacatagcagtggtgttac

SEQ ID NO: 27950 - DNA, 80 bp, synthetic construct
  misc_feature 1..80: note = Synthetic: >NC_045512.2-cand-800-879
  source 1..80: mol_type = other DNA
ggcatacactcgctatgtcgataacaacttctgtggccctgatggctaccctcttgagtgcattaaagaccttctagcac

SEQ ID NO: 27951 - DNA, 80 bp, synthetic construct
  misc_feature 1..80: note = Synthetic: >NC_045512.2-cand-850-929
  source 1..80: mol_type = other DNA
ctcttgagtgcattaaagaccttctagcacgtgctggtaaagcttcatgcactttgtccgaacaactggactttattgac

SEQ ID NO: 27952 - DNA, 80 bp, synthetic construct
  misc_feature 1..80: note = Synthetic: >NC_045512.2-cand-940-1019
  source 1..80: mol_type = other DNA
gtgtatactgctgccgtgaacatgagcatgaaattgcttggtacacggaacgttctgaaaagagctatgaattgcagaca

SEQ ID NO: 27953 - DNA, 80 bp, synthetic construct
  misc_feature 1..80: note = Synthetic: >NC_045512.2-cand-980-1059
  source 1..80: mol_type = other DNA
gtacacggaacgttctgaaaagagctatgaattgcagacaccttttgaaattaaattggcaaagaaatttgacaccttca

SEQ ID NO: 27954 - DNA, 80 bp, synthetic construct
  misc_feature 1..80: note = Synthetic: >NC_045512.2-cand-1090-1169
  source 1..80: mol_type = other DNA
taaattccataatcaagactattcaaccaagggttgaaaagaaaaagcttgatggctttatgggtagaattcgatctgtc

SEQ ID NO: 27955 - DNA, 80 bp, synthetic construct
  misc_feature 1..80: note = Synthetic: >NC_045512.2-cand-1170-1249
  source 1..80: mol_type = other DNA
tatccagttgcgtcaccaaatgaatgcaaccaaatgtgcctttcaactctcatgaagtgtgatcattgtggtgaaacttc

SEQ ID NO: 27956 - DNA, 80 bp, synthetic construct
  misc_feature 1..80: note = Synthetic: >NC_045512.2-cand-1250-1329
  source 1..80: mol_type = other DNA
atggcagacgggcgattttgttaaagccacttgcgaattttgtggcactgagaatttgactaaagaaggtgccactactt

SEQ ID NO: 27957 - DNA, 80 bp, synthetic construct
  misc_feature 1..80: note = Synthetic: >NC_045512.2-cand-1330-1409
  source 1..80: mol_type = other DNA
gtggttacttaccccaaaatgctgttgttaaaatttattgtccagcatgtcacaattcagaagtaggacctgagcatagt

SEQ ID NO: 27958 - DNA, 80 bp, synthetic construct
  misc_feature 1..80: note = Synthetic: >NC_045512.2-cand-1410-1489
  source 1..80: mol_type = other DNA
cttgccgaataccataatgaatctggcttgaaaaccattcttcgtaagggtggtcgcactattgcctttggaggctgtgt

SEQ ID NO: 27959 - DNA, 80 bp, synthetic construct
  misc_feature 1..80: note = Synthetic: >NC_045512.2-cand-1490-1569
  source 1..80: mol_type = other DNA
gttctcttatgttggttgccataacaagtgtgcctattgggttccacgtgctagcgctaacataggttgtaaccatacag

SEQ ID NO: 27960 - DNA, 80 bp, synthetic construct
  misc_feature 1..80: note = Synthetic: >NC_045512.2-cand-1570-1649
  source 1..80: mol_type = other DNA
gtgttgttggagaaggttccgaaggtcttaatgacaaccttcttgaaatactccaaaaagagaaagtcaacatcaatatt

SEQ ID NO: 27961 - DNA, 80 bp, synthetic construct
  misc_feature 1..80: note = Synthetic: >NC_045512.2-cand-1650-1729
  source 1..80: mol_type = other DNA
gttggtgactttaaacttaatgaagagatcgccattattttggcatctttttctgcttccacaagtgcttttgtggaaac

SEQ ID NO: 27962 - DNA, 80 bp, synthetic construct
  misc_feature 1..80: note = Synthetic: >NC_045512.2-cand-1730-1809
  source 1..80: mol_type = other DNA
tgtgaaaggtttggattataaagcattcaaacaaattgttgaatcctgtggtaattttaaagttacaaaaggaaaagcta

SEQ ID NO: 27963 - DNA, 80 bp, synthetic construct
  misc_feature 1..80: note = Synthetic: >NC_045512.2-cand-1810-1889
  source 1..80: mol_type = other DNA
aaaaaggtgcctggaatattggtgaacagaaatcaatactgagtcctctttatgcatttgcatcagaggctgctcgtgtt

SEQ ID NO: 27964 - DNA, 80 bp, synthetic construct
  misc_feature 1..80: note = Synthetic: >NC_045512.2-cand-1890-1969
  source 1..80: mol_type = other DNA
gtacgatcaattttctcccgcactcttgaaactgctcaaaattctgtgcgtgttttacagaaggccgctataacaatact

SEQ ID NO: 27965 - DNA, 80 bp, synthetic construct
  misc_feature 1..80: note = Synthetic: >NC_045512.2-cand-1970-2049
  source 1..80: mol_type = other DNA
agatggaatttcacagtattcactgagactcattgatgctatgatgttcacatctgatttggctactaacaatctagttg

SEQ ID NO: 27966 - DNA, 80 bp, synthetic construct
  misc_feature 1..80: note = Synthetic: >NC_045512.2-cand-2050-2129
  source 1..80: mol_type = other DNA
taatggcctacattacaggtggtgttgttcagttgacttcgcagtggctaactaacatctttggcactgtttatgaaaaa

SEQ ID NO: 27967 - DNA, 80 bp, synthetic construct
  misc_feature 1..80: note = Synthetic: >NC_045512.2-cand-2130-2209
  source 1..80: mol_type = other DNA
ctcaaacccgtccttgattggcttgaagagaagtttaaggaaggtgtagagtttcttagagacggttgggaaattgttaa

SEQ ID NO: 27968 - DNA, 80 bp, synthetic construct
  misc_feature 1..80: note = Synthetic: >NC_045512.2-cand-2210-2289
  source 1..80: mol_type = other DNA
atttatctcaacctgtgcttgtgaaattgtcggtggacaaattgtcacctgtgcaaaggaaattaaggagagtgttcaga

SEQ ID NO: 27969 - DNA, 80 bp, synthetic construct
  misc_feature 1..80: note = Synthetic: >NC_045512.2-cand-2290-2369
  source 1..80: mol_type = other DNA
cattctttaagcttgtaaataaatttttggctttgtgtgctgactctatcattattggtggagctaaacttaaagccttg

SEQ ID NO: 27970 - DNA, 80 bp, synthetic construct
  misc_feature 1..80: note = Synthetic: >NC_045512.2-cand-2370-2449
  source 1..80: mol_type = other DNA
aatttaggtgaaacatttgtcacgcactcaaagggattgtacagaaagtgtgttaaatccagagaagaaactggcctact

SEQ ID NO: 27971 - DNA, 80 bp, synthetic construct
  misc_feature 1..80: note = Synthetic: >NC_045512.2-cand-2450-2529
  source 1..80: mol_type = other DNA
catgcctctaaaagccccaaaagaaattatcttcttagagggagaaacacttcccacagaagtgttaacagaggaagttg

SEQ ID NO: 27972 - DNA, 80 bp, synthetic construct
  misc_feature 1..80: note = Synthetic: >NC_045512.2-cand-2530-2609
  source 1..80: mol_type = other DNA
tcttgaaaactggtgatttacaaccattagaacaacctactagtgaagctgttgaagctccattggttggtacaccagtt

SEQ ID NO: 27973 - DNA, 80 bp, synthetic construct
  misc_feature 1..80: note = Synthetic: >NC_045512.2-cand-2610-2689
  source 1..80: mol_type = other DNA
tgtattaacgggcttatgttgctcgaaatcaaagacacagaaaagtactgtgcccttgcacctaatatgatggtaacaaa

SEQ ID NO: 27974 - DNA, 80 bp, synthetic construct
  misc_feature 1..80: note = Synthetic: >NC_045512.2-cand-2690-2769
  source 1..80: mol_type = other DNA
caataccttcacactcaaaggcggtgcaccaacaaaggttacttttggtgatgacactgtgatagaagtgcaaggttaca

SEQ ID NO: 27975 - DNA, 80 bp, synthetic construct
  misc_feature 1..80: note = Synthetic: >NC_045512.2-cand-2770-2849
  source 1..80: mol_type = other DNA
agagtgtgaatatcacttttgaacttgatgaaaggattgataaagtacttaatgagaagtgctctgcctatacagttgaa

SEQ ID NO: 27976 - DNA, 80 bp, synthetic construct
  misc_feature 1..80: note = Synthetic: >NC_045512.2-cand-2850-2929
  source 1..80: mol_type = other DNA
ctcggtacagaagtaaatgagttcgcctgtgttgtggcagatgctgtcataaaaactttgcaaccagtatctgaattact

SEQ ID NO: 27977 - DNA, 80 bp, synthetic construct
  misc_feature 1..80: note = Synthetic: >NC_045512.2-cand-2930-3009
  source 1..80: mol_type = other DNA
tacaccactgggcattgatttagatgagtggagtatggctacatactacttatttgatgagtctggtgagtttaaattgg

SEQ ID NO: 27978 - DNA, 80 bp, synthetic construct
  misc_feature 1..80: note = Synthetic: >NC_045512.2-cand-3010-3089
  source 1..80: mol_type = other DNA
cttcacatatgtattgttctttctaccctccagatgaggatgaagaagaaggtgattgtgaagaagaagagtttgagcca

SEQ ID NO: 27979 - DNA, 80 bp, synthetic construct
  misc_feature 1..80: note = Synthetic: >NC_045512.2-cand-3090-3169
  source 1..80: mol_type = other DNA
tcaactcaatatgagtatggtactgaagatgattaccaaggtaaacctttggaatttggtgccacttctgctgctcttca

SEQ ID NO: 27980 - DNA, 80 bp, synthetic construct
  misc_feature 1..80: note = Synthetic: >NC_045512.2-cand-3170-3249
  source 1..80: mol_type = other DNA
acctgaagaagagcaagaagaagattggttagatgatgatagtcaacaaactgttggtcaacaagacggcagtgaggaca

SEQ ID NO: 27981 - DNA, 80 bp, synthetic construct
  misc_feature 1..80: note = Synthetic: >NC_045512.2-cand-3250-3329
  source 1..80: mol_type = other DNA
atcagacaactactattcaaacaattgttgaggttcaacctcaattagagatggaacttacaccagttgttcagactatt

SEQ ID NO: 27982 - DNA, 80 bp, synthetic construct
  misc_feature 1..80: note = Synthetic: >NC_045512.2-cand-3330-3409
  source 1..80: mol_type = other DNA
gaagtgaatagttttagtggttatttaaaacttactgacaatgtatacattaaaaatgcagacattgtggaagaagctaa

SEQ ID NO: 27983 - DNA, 80 bp, synthetic construct
  misc_feature 1..80: note = Synthetic: >NC_045512.2-cand-3410-3489
  source 1..80: mol_type = other DNA
aaaggtaaaaccaacagtggttgttaatgcagccaatgtttaccttaaacatggaggaggtgttgcaggagccttaaata

SEQ ID NO: 27984 - DNA, 80 bp, synthetic construct
  misc_feature 1..80: note = Synthetic: >NC_045512.2-cand-3490-3569
  source 1..80: mol_type = other DNA
aggctactaacaatgccatgcaagttgaatctgatgattacatagctactaatggaccacttaaagtgggtggtagttgt

SEQ ID NO: 27985 - DNA, 80 bp, synthetic construct
  misc_feature 1..80: note = Synthetic: >NC_045512.2-cand-3570-3649
  source 1..80: mol_type = other DNA
gttttaagcggacacaatcttgctaaacactgtcttcatgttgtcggcccaaatgttaacaaaggtgaagacattcaact

SEQ ID NO: 27986 - DNA, 80 bp, synthetic construct
  misc_feature 1..80: note = Synthetic: >NC_045512.2-cand-3650-3729
  source 1..80: mol_type = other DNA
tcttaagagtgcttatgaaaattttaatcagcacgaagttctacttgcaccattattatcagctggtatttttggtgctg

SEQ ID NO: 27987 - DNA, 80 bp, synthetic construct
  misc_feature 1..80: note = Synthetic: >NC_045512.2-cand-3720-3799
  source 1..80: mol_type = other DNA
tttggtgctgaccctatacattctttaagagtttgtgtagatactgttcgcacaaatgtctacttagctgtctttgataa

SEQ ID NO: 27988 - DNA, 80 bp, synthetic construct
  misc_feature 1..80: note = Synthetic: >NC_045512.2-cand-3800-3879
  source 1..80: mol_type = other DNA
aaatctctatgacaaacttgtttcaagctttttggaaatgaagagtgaaaagcaagttgaacaaaagatcgctgagattc

SEQ ID NO: 27989 - DNA, 80 bp, synthetic construct
  misc_feature 1..80: note = Synthetic: >NC_045512.2-cand-3870-3949
  source 1..80: mol_type = other DNA
gctgagattcctaaagaggaagttaagccatttataactgaaagtaaaccttcagttgaacagagaaaacaagatgataa

SEQ ID NO: 27990 - DNA, 80 bp, synthetic construct
  misc_feature 1..80: note = Synthetic: >NC_045512.2-cand-3950-4029
  source 1..80: mol_type = other DNA
gaaaatcaaagcttgtgttgaagaagttacaacaactctggaagaaactaagttcctcacagaaaacttgttactttata

SEQ ID NO: 27991 - DNA, 80 bp, synthetic construct
  misc_feature 1..80: note = Synthetic: >NC_045512.2-cand-4030-4109
  source 1..80: mol_type = other DNA
ttgacattaatggcaatcttcatccagattctgccactcttgttagtgacattgacatcactttcttaaagaaagatgct

SEQ ID NO: 27992 - DNA, 80 bp, synthetic construct
  misc_feature 1..80: note = Synthetic: >NC_045512.2-cand-4110-4189
  source 1..80: mol_type = other DNA
ccatatatagtgggtgatgttgttcaagagggtgttttaactgctgtggttatacctactaaaaaggctggtggcactac

SEQ ID NO: 27993 - DNA, 80 bp, synthetic construct
  misc_feature 1..80: note = Synthetic: >NC_045512.2-cand-4190-4269
  source 1..80: mol_type = other DNA
tgaaatgctagcgaaagctttgagaaaagtgccaacagacaattatataaccacttacccgggtcagggtttaaatggtt

SEQ ID NO: 27994 - DNA, 80 bp, synthetic construct
  misc_feature 1..80: note = Synthetic: >NC_045512.2-cand-4270-4349
  source 1..80: mol_type = other DNA
acactgtagaggaggcaaagacagtgcttaaaaagtgtaaaagtgccttttacattctaccatctattatctctaatgag

SEQ ID NO: 27995 - DNA, 80 bp, synthetic construct
  misc_feature 1..80: note = Synthetic: >NC_045512.2-cand-4350-4429
  source 1..80: mol_type = other DNA
aagcaagaaattcttggaactgtttcttggaatttgcgagaaatgcttgcacatgcagaagaaacacgcaaattaatgcc

SEQ ID NO: 27996 - DNA, 80 bp, synthetic construct
  misc_feature 1..80: note = Synthetic: >NC_045512.2-cand-4430-4509
  source 1..80: mol_type = other DNA
tgtctgtgtggaaactaaagccatagtttcaactatacagcgtaaatataagggtattaaaatacaagagggtgtggttg

SEQ ID NO: 27997 - DNA, 80 bp, synthetic construct
  misc_feature 1..80: note = Synthetic: >NC_045512.2-cand-4510-4589
  source 1..80: mol_type = other DNA
attatggtgctagattttacttttacaccagtaaaacaactgtagcgtcacttatcaacacacttaacgatctaaatgaa

SEQ ID NO: 27998 - DNA, 80 bp, synthetic construct
  misc_feature 1..80: note = Synthetic: >NC_045512.2-cand-4590-4669
  source 1..80: mol_type = other DNA
actcttgttacaatgccacttggctatgtaacacatggcttaaatttggaagaagctgctcggtatatgagatctctcaa

SEQ ID NO: 27999 - DNA, 80 bp, synthetic construct
  misc_feature 1..80: note = Synthetic: >NC_045512.2-cand-4670-4749
  source 1..80: mol_type = other DNA
agtgccagctacagtttctgtttcttcacctgatgctgttacagcgtataatggttatcttacttcttcttctaaaacac

SEQ ID NO: 28000 - DNA, 80 bp, synthetic construct
  misc_feature 1..80: note = Synthetic: >NC_045512.2-cand-4750-4829
  source 1..80: mol_type = other DNA
ctgaagaacattttattgaaaccatctcacttgctggttcctataaagattggtcctattctggacaatctacacaacta

SEQ ID NO: 28001 - DNA, 80 bp, synthetic construct
  misc_feature 1..80: note = Synthetic: >NC_045512.2-cand-4830-4909
  source 1..80: mol_type = other DNA
ggtatagaatttcttaagagaggtgataaaagtgtatattacactagtaatcctaccacattccacctagatggtgaagt

SEQ ID NO: 28002 - DNA, 80 bp, synthetic construct
  misc_feature 1..80: note = Synthetic: >NC_045512.2-cand-4910-4989
  source 1..80: mol_type = other DNA
tatcacctttgacaatcttaagacacttctttctttgagagaagtgaggactattaaggtgtttacaacagtagacaaca

SEQ ID NO: 28003 - DNA, 80 bp, synthetic construct
  misc_feature 1..80: note = Synthetic: >NC_045512.2-cand-4990-5069
  source 1..80: mol_type = other DNA
ttaacctccacacgcaagttgtggacatgtcaatgacatatggacaacagtttggtccaacttatttggatggagctgat

SEQ ID NO: 28004 - DNA, 80 bp, synthetic construct
  misc_feature 1..80: note = Synthetic: >NC_045512.2-cand-5070-5149
  source 1..80: mol_type = other DNA
gttactaaaataaaacctcataattcacatgaaggtaaaacattttatgttttacctaatgatgacactctacgtgttga

SEQ ID NO: 28005 - DNA, 80 bp, synthetic construct
  misc_feature 1..80: note = Synthetic: >NC_045512.2-cand-5150-5229
  source 1..80: mol_type = other DNA
ggcttttgagtactaccacacaactgatcctagttttctgggtaggtacatgtcagcattaaatcacactaaaaagtgga

SEQ ID NO: 28006 - DNA, 80 bp, synthetic construct
  misc_feature 1..80: note = Synthetic: >NC_045512.2-cand-5230-5309
  source 1..80: mol_type = other DNA
aatacccacaagttaatggtttaacttctattaaatgggcagataacaactgttatcttgccactgcattgttaacactc

SEQ ID NO: 28007 - DNA, 80 bp, synthetic construct
  misc_feature 1..80: note = Synthetic: >NC_045512.2-cand-5310-5389
  source 1..80: mol_type = other DNA
caacaaatagagttgaagtttaatccacctgctctacaagatgcttattacagagcaagggctggtgaagctgctaactt

SEQ ID NO: 28008 - DNA, 80 bp, synthetic construct
  misc_feature 1..80: note = Synthetic: >NC_045512.2-cand-5390-5469
  source 1..80: mol_type = other DNA
ttgtgcacttatcttagcctactgtaataagacagtaggtgagttaggtgatgttagagaaacaatgagttacttgtttc

SEQ ID NO: 28009 - DNA, 80 bp, synthetic construct
  misc_feature 1..80: note = Synthetic: >NC_045512.2-cand-5470-5549
  source 1..80: mol_type = other DNA
aacatgccaatttagattcttgcaaaagagtcttgaacgtggtgtgtaaaacttgtggacaacagcagacaacccttaag

SEQ ID NO: 28010 - DNA, 80 bp, synthetic construct
  misc_feature 1..80: note = Synthetic: >NC_045512.2-cand-5550-5629
  source 1..80: mol_type = other DNA
ggtgtagaagctgttatgtacatgggcacactttcttatgaacaatttaagaaaggtgttcagataccttgtacgtgtgg

SEQ ID NO: 28011 - DNA, 80 bp, synthetic construct
  misc_feature 1..80: note = Synthetic: >NC_045512.2-cand-5630-5709
  source 1..80: mol_type = other DNA
taaacaagctacaaaatatctagtacaacaggagtcaccttttgttatgatgtcagcaccacctgctcagtatgaactta

SEQ ID NO: 28012 - DNA, 80 bp, synthetic construct
  misc_feature 1..80: note = Synthetic: >NC_045512.2-cand-5710-5789
  source 1..80: mol_type = other DNA
agcatggtacatttacttgtgctagtgagtacactggtaattaccagtgtggtcactataaacatataacttctaaagaa

SEQ ID NO: 28013 - DNA, 80 bp, synthetic construct
  misc_feature 1..80: note = Synthetic: >NC_045512.2-cand-5790-5869
  source 1..80: mol_type = other DNA
actttgtattgcatagacggtgctttacttacaaagtcctcagaatacaaaggtcctattacggatgttttctacaaaga

SEQ ID NO: 28014 - DNA, 80 bp, synthetic construct
  misc_feature 1..80: note = Synthetic: >NC_045512.2-cand-5870-5949
  source 1..80: mol_type = other DNA
aaacagttacacaacaaccataaaaccagttacttataaattggatggtgttgtttgtacagaaattgaccctaagttgg

SEQ ID NO: 28015 - DNA, 80 bp, synthetic construct
  misc_feature 1..80: note = Synthetic: >NC_045512.2-cand-5950-6029
  source 1..80: mol_type = other DNA
acaattattataagaaagacaattcttatttcacagagcaaccaattgatcttgtaccaaaccaaccatatccaaacgca

SEQ ID NO: 28016 - DNA, 80 bp, synthetic construct
  misc_feature 1..80: note = Synthetic: >NC_045512.2-cand-6030-6109
  source 1..80: mol_type = other DNA
agcttcgataattttaagtttgtatgtgataatatcaaatttgctgatgatttaaaccagttaactggttataagaaacc

SEQ ID NO: 28017 - DNA, 80 bp, synthetic construct
  misc_feature 1..80: note = Synthetic: >NC_045512.2-cand-6110-6189
  source 1..80: mol_type = other DNA
tgcttcaagagagcttaaagttacatttttccctgacttaaatggtgatgtggtggctattgattataaacactacacac

SEQ ID NO: 28018 - DNA, 80 bp, synthetic construct
  misc_feature 1..80: note = Synthetic: >NC_045512.2-cand-6190-6269
  source 1..80: mol_type = other DNA
cctcttttaagaaaggagctaaattgttacataaacctattgtttggcatgttaacaatgcaactaataaagccacgtat

SEQ ID NO: 28019 - DNA, 80 bp, synthetic construct
  misc_feature 1..80: note = Synthetic: >NC_045512.2-cand-6270-6349
  source 1..80: mol_type = other DNA
aaaccaaatacctggtgtatacgttgtctttggagcacaaaaccagttgaaacatcaaattcgtttgatgtactgaagtc

SEQ ID NO: 28020 - DNA, 80 bp, synthetic construct
  misc_feature 1..80: note = Synthetic: >NC_045512.2-cand-6350-6429
  source 1..80: mol_type = other DNA
agaggacgcgcagggaatggataatcttgcctgcgaagatctaaaaccagtctctgaagaagtagtggaaaatcctacca

SEQ ID NO: 28021 - DNA, 80 bp, synthetic construct
  misc_feature 1..80: note = Synthetic: >NC_045512.2-cand-6430-6509
  source 1..80: mol_type = other DNA
tacagaaagacgttcttgagtgtaatgtgaaaactaccgaagttgtaggagacattatacttaaaccagcaaataatagt

SEQ ID NO: 28022 - DNA, 80 bp, synthetic construct
  misc_feature 1..80: note = Synthetic: >NC_045512.2-cand-6510-6589
  source 1..80: mol_type = other DNA
ttaaaaattacagaagaggttggccacacagatctaatggctgcttatgtagacaattctagtcttactattaagaaacc

SEQ ID NO: 28023 - DNA, 80 bp, synthetic construct
  misc_feature 1..80: note = Synthetic: >NC_045512.2-cand-6590-6669
  source 1..80: mol_type = other DNA
taatgaattatctagagtattaggtttgaaaacccttgctactcatggtttagctgctgttaatagtgtcccttgggata

SEQ ID NO: 28024 - DNA, 80 bp, synthetic construct
  misc_feature 1..80: note = Synthetic: >NC_045512.2-cand-6670-6749
  source 1..80: mol_type = other DNA
ctatagctaattatgctaagccttttcttaacaaagttgttagtacaactactaacatagttacacggtgtttaaaccgt

SEQ ID NO: 28025 - DNA, 80 bp, synthetic construct
  misc_feature 1..80: note = Synthetic: >NC_045512.2-cand-6750-6829
  source 1..80: mol_type = other DNA
gtttgtactaattatatgccttatttctttactttattgctacaattgtgtacttttactagaagtacaaattctagaat

SEQ ID NO: 28026 - DNA, 80 bp, synthetic construct
  misc_feature 1..80: note = Synthetic: >NC_045512.2-cand-6830-6909
  source 1..80: mol_type = other DNA
taaagcatctatgccgactactatagcaaagaatactgttaagagtgtcggtaaattttgtctagaggcttcatttaatt

SEQ ID NO: 28027 - DNA, 80 bp, synthetic construct
  misc_feature 1..80: note = Synthetic: >NC_045512.2-cand-6910-6989
  source 1..80: mol_type = other DNA
atttgaagtcacctaatttttctaaactgataaatattataatttggtttttactattaagtgtttgcctaggttcttta

SEQ ID NO: 28028 - DNA, 80 bp, synthetic construct
  misc_feature 1..80: note = Synthetic: >NC_045512.2-cand-6990-7069
  source 1..80: mol_type = other DNA
atctactcaaccgctgctttaggtgttttaatgtctaatttaggcatgccttcttactgtactggttacagagaaggcta

SEQ ID NO: 28029 - DNA, 80 bp, synthetic construct
  misc_feature 1..80: note = Synthetic: >NC_045512.2-cand-7070-7149
  source 1..80: mol_type = other DNA
tttgaactctactaatgtcactattgcaacctactgtactggttctataccttgtagtgtttgtcttagtggtttagatt

SEQ ID NO: 28030 - DNA, 80 bp, synthetic construct
  misc_feature 1..80: note = Synthetic: >NC_045512.2-cand-7150-7229
  source 1..80: mol_type = other DNA
ctttagacacctatccttctttagaaactatacaaattaccatttcatcttttaaatgggatttaactgcttttggctta

SEQ ID NO: 28031 - DNA, 80 bp, synthetic construct
  misc_feature 1..80: note = Synthetic: >NC_045512.2-cand-7230-7309
  source 1..80: mol_type = other DNA
gttgcagagtggtttttggcatatattcttttcactaggtttttctatgtacttggattggctgcaatcatgcaattgtt

SEQ ID NO: 28032 - DNA, 80 bp, synthetic construct
  misc_feature 1..80: note = Synthetic: >NC_045512.2-cand-7310-7389
  source 1..80: mol_type = other DNA
tttcagctattttgcagtacattttattagtaattcttggcttatgtggttaataattaatcttgtacaaatggccccga

SEQ ID NO: 28033 - DNA, 80 bp, synthetic construct
  misc_feature 1..80: note = Synthetic: >NC_045512.2-cand-7390-7469
  source 1..80: mol_type = other DNA
tttcagctatggttagaatgtacatcttctttgcatcattttattatgtatggaaaagttatgtgcatgttgtagacggt

SEQ ID NO: 28034 - DNA, 80 bp, synthetic construct
  misc_feature 1..80: note = Synthetic: >NC_045512.2-cand-7470-7549
  source 1..80: mol_type = other DNA
tgtaattcatcaacttgtatgatgtgttacaaacgtaatagagcaacaagagtcgaatgtacaactattgttaatggtgt

SEQ ID NO: 28035 - DNA, 80 bp, synthetic construct
  misc_feature 1..80: note = Synthetic: >NC_045512.2-cand-7550-7629
  source 1..80: mol_type = other DNA
tagaaggtccttttatgtctatgctaatggaggtaaaggcttttgcaaactacacaattggaattgtgttaattgtgata

SEQ ID NO: 28036 - DNA, 80 bp, synthetic construct
  misc_feature 1..80: note = Synthetic: >NC_045512.2-cand-7630-7709
  source 1..80: mol_type = other DNA
cattctgtgctggtagtacatttattagtgatgaagttgcgagagacttgtcactacagtttaaaagaccaataaatcct

SEQ ID NO: 28037 - DNA, 80 bp, synthetic construct
  misc_feature 1..80: note = Synthetic: >NC_045512.2-cand-7710-7789
  source 1..80: mol_type = other DNA
actgaccagtcttcttacatcgttgatagtgttacagtgaagaatggttccatccatctttactttgataaagctggtca

SEQ ID NO: 28038 - DNA, 80 bp, synthetic construct
  misc_feature 1..80: note = Synthetic: >NC_045512.2-cand-7790-7869
  source 1..80: mol_type = other DNA
aaagacttatgaaagacattctctctctcattttgttaacttagacaacctgagagctaataacactaaaggttcattgc

SEQ ID NO: 28039 - DNA, 80 bp, synthetic construct
  misc_feature 1..80: note = Synthetic: >NC_045512.2-cand-7870-7949
  source 1..80: mol_type = other DNA
ctattaatgttatagtttttgatggtaaatcaaaatgtgaagaatcatctgcaaaatcagcgtctgtttactacagtcag

SEQ ID NO: 28040 - DNA, 80 bp, synthetic construct
  misc_feature 1..80: note = Synthetic: >NC_045512.2-cand-7950-8029
  source 1..80: mol_type = other DNA
cttatgtgtcaacctatactgttactagatcaggcattagtgtctgatgttggtgatagtgcggaagttgcagttaaaat

SEQ ID NO: 28041 - DNA, 80 bp, synthetic construct
  misc_feature 1..80: note = Synthetic: >NC_045512.2-cand-8030-8109
  source 1..80: mol_type = other DNA
gtttgatgcttacgttaatacgttttcatcaacttttaacgtaccaatggaaaaactcaaaacactagttgcaactgcag

SEQ ID NO: 28042 - DNA, 80 bp, synthetic construct
  misc_feature 1..80: note = Synthetic: >NC_045512.2-cand-8110-8189
  source 1..80: mol_type = other DNA
aagctgaacttgcaaagaatgtgtccttagacaatgtcttatctacttttatttcagcagctcggcaagggtttgttgat

SEQ ID NO: 28043 - DNA, 80 bp, synthetic construct
  misc_feature 1..80: note = Synthetic: >NC_045512.2-cand-8190-8269
  source 1..80: mol_type = other DNA
tcagatgtagaaactaaagatgttgttgaatgtcttaaattgtcacatcaatctgacatagaagttactggcgatagttg

SEQ ID NO: 28044 - DNA, 80 bp, synthetic construct
  misc_feature 1..80: note = Synthetic: >NC_045512.2-cand-8270-8349
  source 1..80: mol_type = other DNA
taataactatatgctcacctataacaaagttgaaaacatgacaccccgtgaccttggtgcttgtattgactgtagtgcgc

SEQ ID NO: 28045 - DNA, 80 bp, synthetic construct
  misc_feature 1..80: note = Synthetic: >NC_045512.2-cand-8350-8429
  source 1..80: mol_type = other DNA
gtcatattaatgcgcaggtagcaaaaagtcacaacattgctttgatatggaacgttaaagatttcatgtcattgtctgaa

SEQ ID NO: 28046 - DNA, 80 bp, synthetic construct
  misc_feature 1..80: note = Synthetic: >NC_045512.2-cand-8430-8509
  source 1..80: mol_type = other DNA
caactacgaaaacaaatacgtagtgctgctaaaaagaataacttaccttttaagttgacatgtgcaactactagacaagt

SEQ ID NO: 28047 - DNA, 80 bp, synthetic construct
  misc_feature 1..80: note = Synthetic: >NC_045512.2-cand-8510-8589
  source 1..80: mol_type = other DNA
tgttaatgttgtaacaacaaagatagcacttaagggtggtaaaattgttaataattggttgaagcagttaattaaagtta

SEQ ID NO: 28048 - DNA, 80 bp, synthetic construct
  misc_feature 1..80: note = Synthetic: >NC_045512.2-cand-8590-8669
  source 1..80: mol_type = other DNA
cacttgtgttcctttttgttgctgctattttctatttaataacacctgttcatgtcatgtctaaacatactgacttttca

SEQ ID NO: 28049 - DNA, 80 bp, synthetic construct
  misc_feature 1..80: note = Synthetic: >NC_045512.2-cand-8670-8749
  source 1..80: mol_type = other DNA
agtgaaatcataggatacaaggctattgatggtggtgtcactcgtgacatagcatctacagatacttgttttgctaacaa

SEQ ID NO: 28050 - DNA, 80 bp, synthetic construct
  misc_feature 1..80: note = Synthetic: >NC_045512.2-cand-8750-8829
  source 1..80: mol_type = other DNA
acatgctgattttgacacatggtttagccagcgtggtggtagttatactaatgacaaagcttgcccattgattgctgcag

SEQ ID NO: 28051 - DNA, 80 bp, synthetic construct
  misc_feature 1..80: note = Synthetic: >NC_045512.2-cand-8830-8909
  source 1..80: mol_type = other DNA
tcataacaagagaagtgggttttgtcgtgcctggtttgcctggcacgatattacgcacaactaatggtgactttttgcat

SEQ ID NO: 28052 - DNA, 80 bp, synthetic construct
  misc_feature 1..80: note = Synthetic: >NC_045512.2-cand-8910-8989
  source 1..80: mol_type = other DNA
ttcttacctagagtttttagtgcagttggtaacatctgttacacaccatcaaaacttatagagtacactgactttgcaac

SEQ ID NO: 28053 - DNA, 80 bp, synthetic construct
  misc_feature 1..80: note = Synthetic: >NC_045512.2-cand-8990-9069
  source 1..80: mol_type = other DNA
atcagcttgtgttttggctgctgaatgtacaatttttaaagatgcttctggtaagccagtaccatattgttatgatacca

SEQ ID NO: 28054 - DNA, 80 bp, synthetic construct
  misc_feature 1..80: note = Synthetic: >NC_045512.2-cand-9070-9149
  source 1..80: mol_type = other DNA
atgtactagaaggttctgttgcttatgaaagtttacgccctgacacacgttatgtgctcatggatggctctattattcaa

SEQ ID NO: 28055 - DNA, 80 bp, synthetic construct
  misc_feature 1..80: note = Synthetic: >NC_045512.2-cand-9150-9229
  source 1..80: mol_type = other DNA
tttcctaacacctaccttgaaggttctgttagagtggtaacaacttttgattctgagtactgtaggcacggcacttgtga

SEQ ID NO: 28056 - DNA, 80 bp, synthetic construct
  misc_feature 1..80: note = Synthetic: >NC_045512.2-cand-9230-9309
  source 1..80: mol_type = other DNA
aagatcagaagctggtgtttgtgtatctactagtggtagatgggtacttaacaatgattattacagatctttaccaggag

SEQ ID NO: 28057 - DNA, 80 bp, synthetic construct
  misc_feature 1..80: note = Synthetic: >NC_045512.2-cand-9310-9389
  source 1..80: mol_type = other DNA
ttttctgtggtgtagatgctgtaaatttacttactaatatgtttacaccactaattcaacctattggtgctttggacata

SEQ ID NO: 28058 - DNA, 80 bp, synthetic construct
  misc_feature 1..80: note = Synthetic: >NC_045512.2-cand-9390-9469
  source 1..80: mol_type = other DNA
tcagcatctatagtagctggtggtattgtagctatcgtagtaacatgccttgcctactattttatgaggtttagaagagc

SEQ ID NO: 28059 - DNA, 80 bp, synthetic construct
  misc_feature 1..80: note = Synthetic: >NC_045512.2-cand-9470-9549
  source 1..80: mol_type = other DNA
ttttggtgaatacagtcatgtagttgcctttaatactttactattccttatgtcattcactgtactctgtttaacaccag

SEQ ID NO: 28060 - DNA, 80 bp, synthetic construct
  misc_feature 1..80: note = Synthetic: >NC_045512.2-cand-9550-9629
  source 1..80: mol_type = other DNA
tttactcattcttacctggtgtttattctgttatttacttgtacttgacattttatcttactaatgatgtttctttttta

SEQ ID NO: 28061 - DNA, 80 bp, synthetic construct
  misc_feature 1..80: note = Synthetic: >NC_045512.2-cand-9630-9709
  source 1..80: mol_type = other DNA
gcacatattcagtggatggttatgttcacacctttagtacctttctggataacaattgcttatatcatttgtatttccac

SEQ ID NO: 28062 - DNA, 80 bp, synthetic construct
  misc_feature 1..80: note = Synthetic: >NC_045512.2-cand-9710-9789
  source 1..80: mol_type = other DNA
aaagcatttctattggttctttagtaattacctaaagagacgtgtagtctttaatggtgtttcctttagtacttttgaag

SEQ ID NO: 28063 - DNA, 80 bp, synthetic construct
  misc_feature 1..80: note = Synthetic: >NC_045512.2-cand-9790-9869
  source 1..80: mol_type = other DNA
aagctgcgctgtgcacctttttgttaaataaagaaatgtatctaaagttgcgtagtgatgtgctattacctcttacgcaa

SEQ ID NO: 28064 - DNA, 80 bp, synthetic construct
  misc_feature 1..80: note = Synthetic: >NC_045512.2-cand-9870-9949
  source 1..80: mol_type = other DNA
tataatagatacttagctctttataataagtacaagtattttagtggagcaatggatacaactagctacagagaagctgc

SEQ ID NO: 28065 - DNA, 80 bp, synthetic construct
  misc_feature 1..80: note = Synthetic: >NC_045512.2-cand-9950-10029
  source 1..80: mol_type = other DNA
ttgttgtcatctcgcaaaggctctcaatgacttcagtaactcaggttctgatgttctttaccaaccaccacaaacctcta

SEQ ID NO: 28066 - DNA, 80 bp, synthetic construct
  misc_feature 1..80: note = Synthetic: >NC_045512.2-cand-10020-10099
  source 1..80: mol_type = other DNA
caaacctctatcacctcagctgttttgcagagtggttttagaaaaatggcattcccatctggtaaagttgagggttgtat

SEQ ID NO: 28067 - DNA, 80 bp, synthetic construct
  misc_feature 1..80: note = Synthetic: >NC_045512.2-cand-10100-10179
  source 1..80: mol_type = other DNA
ggtacaagtaacttgtggtacaactacacttaacggtctttggcttgatgacgtagtttactgtccaagacatgtgatct

SEQ ID NO: 28068 - DNA, 80 bp, synthetic construct
  misc_feature 1..80: note = Synthetic: >NC_045512.2-cand-10180-10259
  source 1..80: mol_type = other DNA
gcacctctgaagacatgcttaaccctaattatgaagatttactcattcgtaagtctaatcataatttcttggtacaggct

SEQ ID NO: 28069 - DNA, 80 bp, synthetic construct
  misc_feature 1..80: note = Synthetic: >NC_045512.2-cand-10260-10339
  source 1..80: mol_type = other DNA
ggtaatgttcaactcagggttattggacattctatgcaaaattgtgtacttaagcttaaggttgatacagccaatcctaa

SEQ ID NO: 28070 - DNA, 80 bp, synthetic construct
  misc_feature 1..80: note = Synthetic: >NC_045512.2-cand-10340-10419
  source 1..80: mol_type = other DNA
gacacctaagtataagtttgttcgcattcaaccaggacagactttttcagtgttagcttgttacaatggttcaccatctg

SEQ ID NO: 28071 - DNA, 80 bp, synthetic construct
  misc_feature 1..80: note = Synthetic: >NC_045512.2-cand-10420-10499
  source 1..80: mol_type = other DNA
gtgtttaccaatgtgctatgaggcccaatttcactattaagggttcattccttaatggttcatgtggtagtgttggtttt

SEQ ID NO: 28072 - DNA, 80 bp, synthetic construct
  misc_feature 1..80: note = Synthetic: >NC_045512.2-cand-10500-10579
  source 1..80: mol_type = other DNA
aacatagattatgactgtgtctctttttgttacatgcaccatatggaattaccaactggagttcatgctggcacagactt

SEQ ID NO: 28073 - DNA, 80 bp, synthetic construct
  misc_feature 1..80: note = Synthetic: >NC_045512.2-cand-10580-10659
  source 1..80: mol_type = other DNA
agaaggtaacttttatggaccttttgttgacaggcaaacagcacaagcagctggtacggacacaactattacagttaatg

SEQ ID NO: 28074 - DNA, 80 bp, synthetic construct
  misc_feature 1..80: note = Synthetic: >NC_045512.2-cand-10660-10739
  source 1..80: mol_type = other DNA
ttttagcttggttgtacgctgctgttataaatggagacaggtggtttctcaatcgatttaccacaactcttaatgacttt

SEQ ID NO: 28075 - DNA, 80 bp, synthetic construct
  misc_feature 1..80: note = Synthetic: >NC_045512.2-cand-10740-10819
  source 1..80: mol_type = other DNA
aaccttgtggctatgaagtacaattatgaacctctaacacaagaccatgttgacatactaggacctctttctgctcaaac

SEQ ID NO: 28076 - DNA, 80 bp, synthetic construct
  misc_feature 1..80: note = Synthetic: >NC_045512.2-cand-10820-10899
  source 1..80: mol_type = other DNA
tggaattgccgttttagatatgtgtgcttcattaaaagaattactgcaaaatggtatgaatggacgtaccatattgggta

SEQ ID NO: 28077 - DNA, 80 bp, synthetic construct
  misc_feature 1..80: note = Synthetic: >NC_045512.2-cand-10900-10979
  source 1..80: mol_type = other DNA
gtgctttattagaagatgaatttacaccttttgatgttgttagacaatgctcaggtgttactttccaaagtgcagtgaaa

SEQ ID NO: 28078 - DNA, 80 bp, synthetic construct
  misc_feature 1..80: note = Synthetic: >NC_045512.2-cand-10980-11059
  source 1..80: mol_type = other DNA
agaacaatcaagggtacacaccactggttgttactcacaattttgacttcacttttagttttagtccagagtactcaatg

SEQ ID NO: 28079 - DNA, 80 bp, synthetic construct
  misc_feature 1..80: note = Synthetic: >NC_045512.2-cand-11060-11139
  source 1..80: mol_type = other DNA
gtctttgttcttttttttgtatgaaaatgcctttttaccttttgctatgggtattattgctatgtctgcttttgcaatga

SEQ ID NO: 28080 - DNA, 80 bp, synthetic construct
  misc_feature 1..80: note = Synthetic: >NC_045512.2-cand-11140-11219
  source 1..80: mol_type = other DNA
tgtttgtcaaacataagcatgcatttctctgtttgtttttgttaccttctcttgccactgtagcttattttaatatggtc

SEQ ID NO: 28081 - DNA, 80 bp, synthetic construct
  misc_feature 1..80: note = Synthetic: >NC_045512.2-cand-11220-11299
  source 1..80: mol_type = other DNA
tatatgcctgctagttgggtgatgcgtattatgacatggttggatatggttgatactagtttgtctggttttaagctaaa

SEQ ID NO: 28082 - DNA, 80 bp, synthetic construct
  misc_feature 1..80: note = Synthetic: >NC_045512.2-cand-11300-11379
  source 1..80: mol_type = other DNA
agactgtgttatgtatgcatcagctgtagtgttactaatccttatgacagcaagaactgtgtatgatgatggtgctagga

SEQ ID NO: 28083 - DNA, 80 bp, synthetic construct
  misc_feature 1..80: note = Synthetic: >NC_045512.2-cand-11380-11459
  source 1..80: mol_type = other DNA
gagtgtggacacttatgaatgtcttgacactcgtttataaagtttattatggtaatgctttagatcaagccatttccatg

SEQ ID NO: 28084 - DNA, 80 bp, synthetic construct
  misc_feature 1..80: note = Synthetic: >NC_045512.2-cand-11460-11539
  source 1..80: mol_type = other DNA
tgggctcttataatctctgttacttctaactactcaggtgtagttacaactgtcatgtttttggccagaggtattgtttt

SEQ ID NO: 28085 - DNA, 80 bp, synthetic construct
  misc_feature 1..80: note = Synthetic: >NC_045512.2-cand-11540-11619
  source 1..80: mol_type = other DNA
tatgtgtgttgagtattgccctattttcttcataactggtaatacacttcagtgtataatgctagtttattgtttcttag

SEQ ID NO: 28086 - DNA, 80 bp, synthetic construct
  misc_feature 1..80: note = Synthetic: >NC_045512.2-cand-11620-11699
  source 1..80: mol_type = other DNA
gctatttttgtacttgttactttggcctcttttgtttactcaaccgctactttagactgactcttggtgtttatgattac

SEQ ID NO: 28087 - DNA, 80 bp, synthetic construct
  misc_feature 1..80: note = Synthetic: >NC_045512.2-cand-11700-11779
  source 1..80: mol_type = other DNA
ttagtttctacacaggagtttagatatatgaattcacagggactactcccacccaagaatagcatagatgccttcaaact

SEQ ID NO: 28088 - DNA, 80 bp, synthetic construct
  misc_feature 1..80: note = Synthetic: >NC_045512.2-cand-11780-11859
  source 1..80: mol_type = other DNA
caacattaaattgttgggtgttggtggcaaaccttgtatcaaagtagccactgtacagtctaaaatgtcagatgtaaagt

SEQ ID NO: 28089 - DNA, 80 bp, synthetic construct
  misc_feature 1..80: note = Synthetic: >NC_045512.2-cand-11860-11939
  source 1..80: mol_type = other DNA
gcacatcagtagtcttactctcagttttgcaacaactcagagtagaatcatcatctaaattgtgggctcaatgtgtccag

SEQ ID NO: 28090 - DNA, 80 bp, synthetic construct
  misc_feature 1..80: note = Synthetic: >NC_045512.2-cand-11940-12019
  source 1..80: mol_type = other DNA
ttacacaatgacattctcttagctaaagatactactgaagcctttgaaaaaatggtttcactactttctgttttgctttc

SEQ ID NO: 28091 - DNA, 80 bp, synthetic construct
  misc_feature 1..80: note = Synthetic: >NC_045512.2-cand-12020-12099
  source 1..80: mol_type = other DNA
catgcagggtgctgtagacataaacaagctttgtgaagaaatgctggacaacagggcaaccttacaagctatagcctcag

SEQ ID NO: 28092 - DNA, 80 bp, synthetic construct
  misc_feature 1..80: note = Synthetic: >NC_045512.2-cand-12100-12179
  source 1..80: mol_type = other DNA
agtttagttcccttccatcatatgcagcttttgctactgctcaagaagcttatgagcaggctgttgctaatggtgattct

SEQ ID NO: 28093 - DNA, 80 bp, synthetic construct
  misc_feature 1..80: note = Synthetic: >NC_045512.2-cand-12180-12259
  source 1..80: mol_type = other DNA
gaagttgttcttaaaaagttgaagaagtctttgaatgtggctaaatctgaatttgaccgtgatgcagccatgcaacgtaa

SEQ ID NO: 28094 - DNA, 80 bp, synthetic construct
  misc_feature 1..80: note = Synthetic: >NC_045512.2-cand-12260-12339
  source 1..80: mol_type = other DNA
gttggaaaagatggctgatcaagctatgacccaaatgtataaacaggctagatctgaggacaagagggcaaaagttacta

SEQ ID NO: 28095 - DNA, 80 bp, synthetic construct
  misc_feature 1..80: note = Synthetic: >NC_045512.2-cand-12340-12419
  source 1..80: mol_type = other DNA
gtgctatgcagacaatgcttttcactatgcttagaaagttggataatgatgcactcaacaacattatcaacaatgcaaga

SEQ ID NO: 28096 - DNA, 80 bp, synthetic construct
  misc_feature 1..80: note = Synthetic: >NC_045512.2-cand-12420-12499
  source 1..80: mol_type = other DNA
gatggttgtgttcccttgaacataatacctcttacaacagcagccaaactaatggttgtcataccagactataacacata

SEQ ID NO: 28097 - DNA, 80 bp, synthetic construct
  misc_feature 1..80: note = Synthetic: >NC_045512.2-cand-12500-12579
  source 1..80: mol_type = other DNA
taaaaatacgtgtgatggtacaacatttacttatgcatcagcattgtgggaaatccaacaggttgtagatgcagatagta

SEQ ID NO: 28098 - DNA, 80 bp, synthetic construct
  misc_feature 1..80: note = Synthetic: >NC_045512.2-cand-12580-12659
  source 1..80: mol_type = other DNA
aaattgttcaacttagtgaaattagtatggacaattcacctaatttagcatggcctcttattgtaacagctttaagggcc

SEQ ID NO: 28099 - DNA, 80 bp, synthetic construct
  misc_feature 1..80: note = Synthetic: >NC_045512.2-cand-12660-12739
  source 1..80: mol_type = other DNA
aattctgctgtcaaattacagaataatgagcttagtcctgttgcactacgacagatgtcttgtgctgccggtactacaca

SEQ ID NO: 28100 - DNA, 80 bp, synthetic construct
  misc_feature 1..80: note = Synthetic: >NC_045512.2-cand-12740-12819
  source 1..80: mol_type = other DNA
aactgcttgcactgatgacaatgcgttagcttactacaacacaacaaagggaggtaggtttgtacttgcactgttatccg

SEQ ID NO: 28101 - DNA, 80 bp, synthetic construct
  misc_feature 1..80: note = Synthetic: >NC_045512.2-cand-12820-12899
  source 1..80: mol_type = other DNA
atttacaggatttgaaatgggctagattccctaagagtgatggaactggtactatctatacagaactggaaccaccttgt

SEQ ID NO: 28102 - DNA, 80 bp, synthetic construct
  misc_feature 1..80: note = Synthetic: >NC_045512.2-cand-12900-12979
  source 1..80: mol_type = other DNA
aggtttgttacagacacacctaaaggtcctaaagtgaagtatttatactttattaaaggattaaacaacctaaatagagg

SEQ ID NO: 28103 - DNA, 80 bp, synthetic construct
  misc_feature 1..80: note = Synthetic: >NC_045512.2-cand-12980-13059
  source 1..80: mol_type = other DNA
tatggtacttggtagtttagctgccacagtacgtctacaagctggtaatgcaacagaagtgcctgccaattcaactgtat

SEQ ID NO: 28104 - DNA, 80 bp, synthetic construct
  misc_feature 1..80: note = Synthetic: >NC_045512.2-cand-13040-13119
  source 1..80: mol_type = other DNA
gcctgccaattcaactgtattatctttctgtgcttttgctgtagatgctgctaaagcttacaaagattatctagctagtg

SEQ ID NO: 28105 - DNA, 80 bp, synthetic construct
  misc_feature 1..80: note = Synthetic: >NC_045512.2-cand-13140-13219
  source 1..80: mol_type = other DNA
tgtgttaagatgttgtgtacacacactggtactggtcaggcaataacagttacaccggaagccaatatggatcaagaatc

SEQ ID NO: 28106 - DNA, 80 bp, synthetic construct
  misc_feature 1..80: note = Synthetic: >NC_045512.2-cand-13220-13299
  source 1..80: mol_type = other DNA
ctttggtggtgcatcgtgttgtctgtactgccgttgccacatagatcatccaaatcctaaaggattttgtgacttaaaag

SEQ ID NO: 28107 - DNA, 80 bp, synthetic construct
  misc_feature 1..80: note = Synthetic: >NC_045512.2-cand-13300-13379
  source 1..80: mol_type = other DNA
gtaagtatgtacaaatacctacaacttgtgctaatgaccctgtgggttttacacttaaaaacacagtctgtaccgtctgc

SEQ ID NO: 28108 - DNA, 80 bp, synthetic construct
  misc_feature 1..80: note = Synthetic: >NC_045512.2-cand-13380-13459
  source 1..80: mol_type = other DNA
ggtatgtggaaaggttatggctgtagttgtgatcaactccgcgaacccatgcttcagtcagctgatgcacaatcgttttt

SEQ ID NO: 28109 - DNA, 80 bp, synthetic construct
  misc_feature 1..80: note = Synthetic: >NC_045512.2-cand-13450-13529
  source 1..80: mol_type = other DNA
aatcgtttttaaacgggtttgcggtgtaagtgcagcccgtcttacaccgtgcggcacaggcactagtactgatgtcgtat

SEQ ID NO: 28110 - DNA, 80 bp, synthetic construct
  misc_feature 1..80: note = Synthetic: >NC_045512.2-cand-13530-13609
  source 1..80: mol_type = other DNA
acagggcttttgacatctacaatgataaagtagctggttttgctaaattcctaaaaactaattgttgtcgcttccaagaa

SEQ ID NO: 28111 - DNA, 80 bp, synthetic construct
  misc_feature 1..80: note = Synthetic: >NC_045512.2-cand-13610-13689
  source 1..80: mol_type = other DNA
aaggacgaagatgacaatttaattgattcttactttgtagttaagagacacactttctctaactaccaacatgaagaaac

SEQ ID NO: 28112 - DNA, 80 bp, synthetic construct
  misc_feature 1..80: note = Synthetic: >NC_045512.2-cand-13690-13769
  source 1..80: mol_type = other DNA
aatttataatttacttaaggattgtccagctgttgctaaacatgacttctttaagtttagaatagacggtgacatggtac

SEQ ID NO: 28113 - DNA, 80 bp, synthetic construct
  misc_feature 1..80: note = Synthetic: >NC_045512.2-cand-13770-13849
  source 1..80: mol_type = other DNA
cacatatatcacgtcaacgtcttactaaatacacaatggcagacctcgtctatgctttaaggcattttgatgaaggtaat

SEQ ID NO: 28114 - DNA, 80 bp, synthetic construct
  misc_feature 1..80: note = Synthetic: >NC_045512.2-cand-13850-13929
  source 1..80: mol_type = other DNA
tgtgacacattaaaagaaatacttgtcacatacaattgttgtgatgatgattatttcaataaaaaggactggtatgattt

SEQ ID NO: 28115 - DNA, 80 bp, synthetic construct
  misc_feature 1..80: note = Synthetic: >NC_045512.2-cand-13930-14009
  source 1..80: mol_type = other DNA
tgtagaaaacccagatatattacgcgtatacgccaacttaggtgaacgtgtacgccaagctttgttaaaaacagtacaat

SEQ ID NO: 28116 - DNA, 80 bp, synthetic construct
  misc_feature 1..80: note = Synthetic: >NC_045512.2-cand-14010-14089
  source 1..80: mol_type = other DNA
tctgtgatgccatgcgaaatgctggtattgttggtgtactgacattagataatcaagatctcaatggtaactggtatgat

SEQ ID NO: 28117 - DNA, 80 bp, synthetic construct
  misc_feature 1..80: note = Synthetic: >NC_045512.2-cand-14090-14169
  source 1..80: mol_type = other DNA
ttcggtgatttcatacaaaccacgccaggtagtggagttcctgttgtagattcttattattcattgttaatgcctatatt

SEQ ID NO: 28118 - DNA, 80 bp, synthetic construct
  misc_feature 1..80: note = Synthetic: >NC_045512.2-cand-14170-14249
  source 1..80: mol_type = other DNA
aaccttgaccagggctttaactgcagagtcacatgttgacactgacttaacaaagccttacattaagtgggatttgttaa

SEQ ID NO: 28119 - DNA, 80 bp, synthetic construct
  misc_feature 1..80: note = Synthetic: >NC_045512.2-cand-14250-14329
  source 1..80: mol_type = other DNA
aatatgacttcacggaagagaggttaaaactctttgaccgttattttaaatattgggatcagacataccacccaaattgt

SEQ ID NO: 28120 - DNA, 80 bp, synthetic construct
  misc_feature 1..80: note = Synthetic: >NC_045512.2-cand-14330-14409
  source 1..80: mol_type = other DNA
gttaactgtttggatgacagatgcattctgcattgtgcaaactttaatgttttattctctacagtgttcccacctacaag

SEQ ID NO: 28121 - DNA, 80 bp, synthetic construct
  misc_feature 1..80: note = Synthetic: >NC_045512.2-cand-14410-14489
  source 1..80: mol_type = other DNA
ttttggaccactagtgagaaaaatatttgttgatggtgttccatttgtagtttcaactggataccacttcagagagctag

SEQ ID NO: 28122 - DNA, 80 bp, synthetic construct
  misc_feature 1..80: note = Synthetic: >NC_045512.2-cand-14490-14569
  source 1..80: mol_type = other DNA
gtgttgtacataatcaggatgtaaacttacatagctctagacttagttttaaggaattacttgtgtatgctgctgaccct

SEQ ID NO: 28123 - DNA, 80 bp, synthetic construct
  misc_feature 1..80: note = Synthetic: >NC_045512.2-cand-14570-14649
  source 1..80: mol_type = other DNA
gctatgcacgctgcttctggtaatctattactagataaacgcactacgtgcttttcagtagctgcacttactaacaatgt

SEQ ID NO: 28124 - DNA, 80 bp, synthetic construct
  misc_feature 1..80: note = Synthetic: >NC_045512.2-cand-14650-14729
  source 1..80: mol_type = other DNA
tgcttttcaaactgtcaaacccggtaattttaacaaagacttctatgactttgctgtgtctaagggtttctttaaggaag

SEQ ID NO: 28125 - DNA, 80 bp, synthetic construct
  misc_feature 1..80: note = Synthetic: >NC_045512.2-cand-14730-14809
  source 1..80: mol_type = other DNA
gaagttctgttgaattaaaacacttcttctttgctcaggatggtaatgctgctatcagcgattatgactactatcgttat

SEQ ID NO: 28126 - DNA, 80 bp, synthetic construct
  misc_feature 1..80: note = Synthetic: >NC_045512.2-cand-14810-14889
  source 1..80: mol_type = other DNA
aatctaccaacaatgtgtgatatcagacaactactatttgtagttgaagttgttgataagtactttgattgttacgatgg

SEQ ID NO: 28127 - DNA, 80 bp, synthetic construct
  misc_feature 1..80: note = Synthetic: >NC_045512.2-cand-14880-14959
  source 1..80: mol_type = other DNA
gttacgatggtggctgtattaatgctaaccaagtcatcgtcaacaacctagacaaatcagctggttttccatttaataaa

SEQ ID NO: 28128 - DNA, 80 bp, synthetic construct
  misc_feature 1..80: note = Synthetic: >NC_045512.2-cand-14970-15049
  source 1..80: mol_type = other DNA
ctagactttattatgattcaatgagttatgaggatcaagatgcacttttcgcatatacaaaacgtaatgtcatccctact

SEQ ID NO: 28129 - DNA, 80 bp, synthetic construct
  misc_feature 1..80: note = Synthetic: >NC_045512.2-cand-15050-15129
  source 1..80: mol_type = other DNA
ataactcaaatgaatcttaagtatgccattagtgcaaagaatagagctcgcaccgtagctggtgtctctatctgtagtac

SEQ ID NO: 28130 - DNA, 80 bp, synthetic construct
  misc_feature 1..80: note = Synthetic: >NC_045512.2-cand-15130-15209
  source 1..80: mol_type = other DNA
tatgaccaatagacagtttcatcaaaaattattgaaatcaatagccgccactagaggagctactgtagtaattggaacaa

SEQ ID NO: 28131 - DNA, 80 bp, synthetic construct
  misc_feature 1..80: note = Synthetic: >NC_045512.2-cand-15210-15289
  source 1..80: mol_type = other DNA
gcaaattctatggtggttggcacaacatgttaaaaactgtttatagtgatgtagaaaaccctcaccttatgggttgggat

SEQ ID NO: 28132 - DNA, 80 bp, synthetic construct
  misc_feature 1..80: note = Synthetic: >NC_045512.2-cand-15290-15369
  source 1..80: mol_type = other DNA
tatcctaaatgtgatagagccatgcctaacatgcttagaattatggcctcacttgttcttgctcgcaaacatacaacgtg

SEQ ID NO: 28133 - DNA, 80 bp, synthetic construct
  misc_feature 1..80: note = Synthetic: >NC_045512.2-cand-15370-15449
  source 1..80: mol_type = other DNA
ttgtagcttgtcacaccgtttctatagattagctaatgagtgtgctcaagtattgagtgaaatggtcatgtgtggcggtt

SEQ ID NO: 28134 - DNA, 80 bp, synthetic construct
  misc_feature 1..80: note = Synthetic: >NC_045512.2-cand-15450-15529
  source 1..80: mol_type = other DNA
cactatatgttaaaccaggtggaacctcatcaggagatgccacaactgcttatgctaatagtgtttttaacatttgtcaa

SEQ ID NO: 28135 - DNA, 80 bp, synthetic construct
  misc_feature 1..80: note = Synthetic: >NC_045512.2-cand-15530-15609
  source 1..80: mol_type = other DNA
gctgtcacggccaatgttaatgcacttttatctactgatggtaacaaaattgccgataagtatgtccgcaatttacaaca

SEQ ID NO: 28136 - DNA, 80 bp, synthetic construct
  misc_feature 1..80: note = Synthetic: >NC_045512.2-cand-15610-15689
  source 1..80: mol_type = other DNA
cagactttatgagtgtctctatagaaatagagatgttgacacagactttgtgaatgagttttacgcatatttgcgtaaac

SEQ ID NO: 28137 - DNA, 80 bp, synthetic construct
  misc_feature 1..80: note = Synthetic: >NC_045512.2-cand-15680-15759
  source 1..80: mol_type = other DNA
ttgcgtaaacatttctcaatgatgatactctctgacgatgctgttgtgtgtttcaatagcacttatgcatctcaaggtct

SEQ ID NO: 28138 - DNA, 80 bp, synthetic construct
  misc_feature 1..80: note = Synthetic: >NC_045512.2-cand-15760-15839
  source 1..80: mol_type = other DNA
agtggctagcataaagaactttaagtcagttctttattatcaaaacaatgtttttatgtctgaagcaaaatgttggactg

SEQ ID NO: 28139 - DNA, 80 bp, synthetic construct
  misc_feature 1..80: note = Synthetic: >NC_045512.2-cand-15840-15919
  source 1..80: mol_type = other DNA
agactgaccttactaaaggacctcatgaattttgctctcaacatacaatgctagttaaacagggtgatgattatgtgtac

SEQ ID NO: 28140 - DNA, 80 bp, synthetic construct
  misc_feature 1..80: note = Synthetic: >NC_045512.2-cand-15960-16039
  source 1..80: mol_type = other DNA
gttttgtagatgatatcgtaaaaacagatggtacacttatgattgaacggttcgtgtctttagctatagatgcttaccca

SEQ ID NO: 28141 - DNA, 80 bp, synthetic construct
  misc_feature 1..80: note = Synthetic: >NC_045512.2-cand-16000-16079
  source 1..80: mol_type = other DNA
gattgaacggttcgtgtctttagctatagatgcttacccacttactaaacatcctaatcaggagtatgctgatgtctttc

SEQ ID NO: 28142 - DNA, 80 bp, synthetic construct
  misc_feature 1..80: note = Synthetic: >NC_045512.2-cand-16080-16159
  source 1..80: mol_type = other DNA
atttgtacttacaatacataagaaagctacatgatgagttaacaggacacatgttagacatgtattctgttatgcttact

SEQ ID NO: 28143 - DNA, 80 bp, synthetic construct
  misc_feature 1..80: note = Synthetic: >NC_045512.2-cand-16160-16239
  source 1..80: mol_type = other DNA
aatgataacacttcaaggtattgggaacctgagttttatgaggctatgtacacaccgcatacagtcttacaggctgttgg

SEQ ID NO: 28144 - DNA, 80 bp, synthetic construct
  misc_feature 1..80: note = Synthetic: >NC_045512.2-cand-16240-16319
  source 1..80: mol_type = other DNA
ggcttgtgttctttgcaattcacagacttcattaagatgtggtgcttgcatacgtagaccattcttatgttgtaaatgct

SEQ ID NO: 28145 - DNA, 80 bp, synthetic construct
  misc_feature 1..80: note = Synthetic: >NC_045512.2-cand-16320-16399
  source 1..80: mol_type = other DNA
gttacgaccatgtcatatcaacatcacataaattagtcttgtctgttaatccgtatgtttgcaatgctccaggttgtgat

SEQ ID NO: 28146 - DNA, 80 bp, synthetic construct
  misc_feature 1..80: note = Synthetic: >NC_045512.2-cand-16400-16479
  source 1..80: mol_type = other DNA
gtcacagatgtgactcaactttacttaggaggtatgagctattattgtaaatcacataaaccacccattagttttccatt

SEQ ID NO: 28147 - DNA, 80 bp, synthetic construct
  misc_feature 1..80: note = Synthetic: >NC_045512.2-cand-16480-16559
  source 1..80: mol_type = other DNA
gtgtgctaatggacaagtttttggtttatataaaaatacatgtgttggtagcgataatgttactgactttaatgcaattg

SEQ ID NO: 28148 - DNA, 80 bp, synthetic construct
  misc_feature 1..80: note = Synthetic: >NC_045512.2-cand-16560-16639
  source 1..80: mol_type = other DNA
caacatgtgactggacaaatgctggtgattacattttagctaacacctgtactgaaagactcaagctttttgcagcagaa

SEQ ID NO: 28149 - DNA, 80 bp, synthetic construct
  misc_feature 1..80: note = Synthetic: >NC_045512.2-cand-16640-16719
  source 1..80: mol_type = other DNA
acgctcaaagctactgaggagacatttaaactgtcttatggtattgctactgtacgtgaagtgctgtctgacagagaatt

SEQ ID NO: 28150 - DNA, 80 bp, synthetic construct
  misc_feature 1..80: note = Synthetic: >NC_045512.2-cand-16720-16799
  source 1..80: mol_type = other DNA
acatctttcatgggaagttggtaaacctagaccaccacttaaccgaaattatgtctttactggttatcgtgtaactaaaa

SEQ ID NO: 28151 - DNA, 80 bp, synthetic construct
  misc_feature 1..80: note = Synthetic: >NC_045512.2-cand-16800-16879
  source 1..80: mol_type = other DNA
acagtaaagtacaaataggagagtacacctttgaaaaaggtgactatggtgatgctgttgtttaccgaggtacaacaact

SEQ ID NO: 28152 - DNA, 80 bp, synthetic construct
  misc_feature 1..80: note = Synthetic: >NC_045512.2-cand-16890-16969
  source 1..80: mol_type = other DNA
atgttggtgattattttgtgctgacatcacatacagtaatgccattaagtgcacctacactagtgccacaagagcactat

SEQ ID NO: 28153 - DNA, 80 bp, synthetic construct
  misc_feature 1..80: note = Synthetic: >NC_045512.2-cand-16970-17049
  source 1..80: mol_type = other DNA
gttagaattactggcttatacccaacactcaatatctcagatgagttttctagcaatgttgcaaattatcaaaaggttgg

SEQ ID NO: 28154 - DNA, 80 bp, synthetic construct
  misc_feature 1..80: note = Synthetic: >NC_045512.2-cand-17050-17129
  source 1..80: mol_type = other DNA
tatgcaaaagtattctacactccagggaccacctggtactggtaagagtcattttgctattggcctagctctctactacc

SEQ ID NO: 28155 - DNA, 80 bp, synthetic construct
  misc_feature 1..80: note = Synthetic: >NC_045512.2-cand-17130-17209
  source 1..80: mol_type = other DNA
cttctgctcgcatagtgtatacagcttgctctcatgccgctgttgatgcactatgtgagaaggcattaaaatatttgcct

SEQ ID NO: 28156 - DNA, 80 bp, synthetic construct
  misc_feature 1..80: note = Synthetic: >NC_045512.2-cand-17210-17289
  source 1..80: mol_type = other DNA
atagataaatgtagtagaattatacctgcacgtgctcgtgtagagtgttttgataaattcaaagtgaattcaacattaga

SEQ ID NO: 28157 - DNA, 80 bp, synthetic construct
  misc_feature 1..80: note = Synthetic: >NC_045512.2-cand-17290-17369
  source 1..80: mol_type = other DNA
acagtatgtcttttgtactgtaaatgcattgcctgagacgacagcagatatagttgtctttgatgaaatttcaatggcca

SEQ ID NO: 28158 - DNA, 80 bp, synthetic construct
  misc_feature 1..80: note = Synthetic: >NC_045512.2-cand-17370-17449
  source 1..80: mol_type = other DNA
caaattatgatttgagtgttgtcaatgccagattacgtgctaagcactatgtgtacattggcgaccctgctcaattacct

SEQ ID NO: 28159 - DNA, 80 bp, synthetic construct
  misc_feature 1..80: note = Synthetic: >NC_045512.2-cand-17450-17529
  source 1..80: mol_type = other DNA
gcaccacgcacattgctaactaagggcacactagaaccagaatatttcaattcagtgtgtagacttatgaaaactatagg

SEQ ID NO: 28160 - DNA, 80 bp, synthetic construct
  misc_feature 1..80: note = Synthetic: >NC_045512.2-cand-17530-17609
  source 1..80: mol_type = other DNA
tccagacatgttcctcggaacttgtcggcgttgtcctgctgaaattgttgacactgtgagtgctttggtttatgataata

SEQ ID NO: 28161 - DNA, 80 bp, synthetic construct
  misc_feature 1..80: note = Synthetic: >NC_045512.2-cand-17610-17689
  source 1..80: mol_type = other DNA
agcttaaagcacataaagacaaatcagctcaatgctttaaaatgttttataagggtgttatcacgcatgatgtttcatct

SEQ ID NO: 28162 - DNA, 80 bp, synthetic construct
  misc_feature 1..80: note = Synthetic: >NC_045512.2-cand-17660-17739
  source 1..80: mol_type = other DNA
aagggtgttatcacgcatgatgtttcatctgcaattaacaggccacaaataggcgtggtaagagaattccttacacgtaa

SEQ ID NO: 28163 - DNA, 80 bp, synthetic construct
  misc_feature 1..80: note = Synthetic: >NC_045512.2-cand-17740-17819
  source 1..80: mol_type = other DNA
ccctgcttggagaaaagctgtctttatttcaccttataattcacagaatgctgtagcctcaaagattttgggactaccaa

SEQ ID NO: 28164 - DNA, 80 bp, synthetic construct
  misc_feature 1..80: note = Synthetic: >NC_045512.2-cand-17820-17899
  source 1..80: mol_type = other DNA
ctcaaactgttgattcatcacagggctcagaatatgactatgtcatattcactcaaaccactgaaacagctcactcttgt

SEQ ID NO: 28165 - DNA, 80 bp, synthetic construct
  misc_feature 1..80: note = Synthetic: >NC_045512.2-cand-17900-17979
  source 1..80: mol_type = other DNA
aatgtaaacagatttaatgttgctattaccagagcaaaagtaggcatactttgcataatgtctgatagagacctttatga

SEQ ID NO: 28166 - DNA, 80 bp, synthetic construct
  misc_feature 1..80: note = Synthetic: >NC_045512.2-cand-17980-18059
  source 1..80: mol_type = other DNA
caagttgcaatttacaagtcttgaaattccacgtaggaatgtggcaactttacaagctgaaaatgtaacaggactcttta

SEQ ID NO: 28167 - DNA, 80 bp, synthetic construct
  misc_feature 1..80: note = Synthetic: >NC_045512.2-cand-18060-18139
  source 1..80: mol_type = other DNA
aagattgtagtaaggtaatcactgggttacatcctacacaggcacctacacacctcagtgttgacactaaattcaaaact

SEQ ID NO: 28168 - DNA, 80 bp, synthetic construct
  misc_feature 1..80: note = Synthetic: >NC_045512.2-cand-18140-18219
  source 1..80: mol_type = other DNA
gaaggtttatgtgttgacatacctggcatacctaaggacatgacctatagaagactcatctctatgatgggttttaaaat

SEQ ID NO: 28169 - DNA, 80 bp, synthetic construct
  misc_feature 1..80: note = Synthetic: >NC_045512.2-cand-18220-18299
  source 1..80: mol_type = other DNA
gaattatcaagttaatggttaccctaacatgtttatcacccgcgaagaagctataagacatgtacgtgcatggattggct

SEQ ID NO: 28170 - DNA, 80 bp, synthetic construct
  misc_feature 1..80: note = Synthetic: >NC_045512.2-cand-18320-18399
  source 1..80: mol_type = other DNA
gctactagagaagctgttggtaccaatttacctttacagctaggtttttctacaggtgttaacctagttgctgtacctac

SEQ ID NO: 28171 - DNA, 80 bp, synthetic construct
  misc_feature 1..80: note = Synthetic: >NC_045512.2-cand-18380-18459
  source 1..80: mol_type = other DNA
aacctagttgctgtacctacaggttatgttgatacacctaataatacagatttttccagagttagtgctaaaccaccgcc

SEQ ID NO: 28172 - DNA, 80 bp, synthetic construct
  misc_feature 1..80: note = Synthetic: >NC_045512.2-cand-18450-18529
  source 1..80: mol_type = other DNA
aaccaccgcctggagatcaatttaaacacctcataccacttatgtacaaaggacttccttggaatgtagtgcgtataaag

SEQ ID NO: 28173 - DNA, 80 bp, synthetic construct
  misc_feature 1..80: note = Synthetic: >NC_045512.2-cand-18530-18609
  source 1..80: mol_type = other DNA
attgtacaaatgttaagtgacacacttaaaaatctctctgacagagtcgtatttgtcttatgggcacatggctttgagtt

SEQ ID NO: 28174 - DNA, 80 bp, synthetic construct
  misc_feature 1..80: note = Synthetic: >NC_045512.2-cand-18610-18689
  source 1..80: mol_type = other DNA
gacatctatgaagtattttgtgaaaataggacctgagcgcacctgttgtctatgtgatagacgtgccacatgcttttcca

SEQ ID NO: 28175 - DNA, 80 bp, synthetic construct
  misc_feature 1..80: note = Synthetic: >NC_045512.2-cand-18690-18769
  source 1..80: mol_type = other DNA
ctgcttcagacacttatgcctgttggcatcattctattggatttgattacgtctataatccgtttatgattgatgttcaa

SEQ ID NO: 28176 - DNA, 80 bp, synthetic construct
  misc_feature 1..80: note = Synthetic: >NC_045512.2-cand-18780-18859
  source 1..80: mol_type = other DNA
ttacaggtaacctacaaagcaaccatgatctgtattgtcaagtccatggtaatgcacatgtagctagttgtgatgcaatc

SEQ ID NO: 28177 - DNA, 80 bp, synthetic construct
  misc_feature 1..80: note = Synthetic: >NC_045512.2-cand-18850-18929
  source 1..80: mol_type = other DNA
tgatgcaatcatgactaggtgtctagctgtccacgagtgctttgttaagcgtgttgactggactattgaatatcctataa

SEQ ID NO: 28178 - DNA, 80 bp, synthetic construct
  misc_feature 1..80: note = Synthetic: >NC_045512.2-cand-18930-19009
  source 1..80: mol_type = other DNA
ttggtgatgaactgaagattaatgcggcttgtagaaaggttcaacacatggttgttaaagctgcattattagcagacaaa

SEQ ID NO: 28179 - DNA, 80 bp, synthetic construct
  misc_feature 1..80: note = Synthetic: >NC_045512.2-cand-19010-19089
  source 1..80: mol_type = other DNA
ttcccagttcttcacgacattggtaaccctaaagctattaagtgtgtacctcaagctgatgtagaatggaagttctatga

SEQ ID NO: 28180 - DNA, 80 bp, synthetic construct
  misc_feature 1..80: note = Synthetic: >NC_045512.2-cand-19090-19169
  source 1..80: mol_type = other DNA
tgcacagccttgtagtgacaaagcttataaaatagaagaattattctattcttatgccacacattctgacaaattcacag

SEQ ID NO: 28181 - DNA, 80 bp, synthetic construct
  misc_feature 1..80: note = Synthetic: >NC_045512.2-cand-19170-19249
  source 1..80: mol_type = other DNA
atggtgtatgcctattttggaattgcaatgtcgatagatatcctgctaattccattgtttgtagatttgacactagagtg

SEQ ID NO: 28182 - DNA, 80 bp, synthetic construct
  misc_feature 1..80: note = Synthetic: >NC_045512.2-cand-19250-19329
  source 1..80: mol_type = other DNA
ctatctaaccttaacttgcctggttgtgatggtggcagtttgtatgtaaataaacatgcattccacacaccagcttttga

SEQ ID NO: 28183 - DNA, 80 bp, synthetic construct
  misc_feature 1..80: note = Synthetic: >NC_045512.2-cand-19330-19409
  source 1..80: mol_type = other DNA
taaaagtgcttttgttaatttaaaacaattaccatttttctattactctgacagtccatgtgagtctcatggaaaacaag

SEQ ID NO: 28184 - DNA, 80 bp, synthetic construct
  misc_feature 1..80: note = Synthetic: >NC_045512.2-cand-19410-19489
  source 1..80: mol_type = other DNA
tagtgtcagatatagattatgtaccactaaagtctgctacgtgtataacacgttgcaatttaggtggtgctgtctgtaga

SEQ ID NO: 28185 - DNA, 80 bp, synthetic construct
  misc_feature 1..80: note = Synthetic: >NC_045512.2-cand-19490-19569
  source 1..80: mol_type = other DNA
catcatgctaatgagtacagattgtatctcgatgcttataacatgatgatctcagctggctttagcttgtgggtttacaa

SEQ ID NO: 28186 - DNA, 80 bp, synthetic construct
  misc_feature 1..80: note = Synthetic: >NC_045512.2-cand-19570-19649
  source 1..80: mol_type = other DNA
acaatttgatacttataacctctggaacacttttacaagacttcagagtttagaaaatgtggcttttaatgttgtaaata

SEQ ID NO: 28187 - DNA, 80 bp, synthetic construct
  misc_feature 1..80: note = Synthetic: >NC_045512.2-cand-19650-19729
  source 1..80: mol_type = other DNA
agggacactttgatggacaacagggtgaagtaccagtttctatcattaataacactgtttacacaaaagttgatggtgtt

SEQ ID NO: 28188 - DNA, 80 bp, synthetic construct
  misc_feature 1..80: note = Synthetic: >NC_045512.2-cand-19730-19809
  source 1..80: mol_type = other DNA
gatgtagaattgtttgaaaataaaacaacattacctgttaatgtagcatttgagctttgggctaagcgcaacattaaacc

SEQ ID NO: 28189 - DNA, 80 bp, synthetic construct
  misc_feature 1..80: note = Synthetic: >NC_045512.2-cand-19810-19889
  source 1..80: mol_type = other DNA
agtaccagaggtgaaaatactcaataatttgggtgtggacattgctgctaatactgtgatctgggactacaaaagagatg

SEQ ID NO: 28190 - DNA, 80 bp, synthetic construct
  misc_feature 1..80: note = Synthetic: >NC_045512.2-cand-19890-19969
  source 1..80: mol_type = other DNA
ctccagcacatatatctactattggtgtttgttctatgactgacatagccaagaaaccaactgaaacgatttgtgcacca

SEQ ID NO: 28191 - DNA, 80 bp, synthetic construct
  misc_feature 1..80: note = Synthetic: >NC_045512.2-cand-19970-20049
  source 1..80: mol_type = other DNA
ctcactgtcttttttgatggtagagttgatggtcaagtagacttatttagaaatgcccgtaatggtgttcttattacaga

SEQ ID NO: 28192 - DNA, 80 bp, synthetic construct
  misc_feature 1..80: note = Synthetic: >NC_045512.2-cand-20050-20129
  source 1..80: mol_type = other DNA
aggtagtgttaaaggtttacaaccatctgtaggtcccaaacaagctagtcttaatggagtcacattaattggagaagccg

SEQ ID NO: 28193 - DNA, 80 bp, synthetic construct
  misc_feature 1..80: note = Synthetic: >NC_045512.2-cand-20120-20199
  source 1..80: mol_type = other DNA
ggagaagccgtaaaaacacagttcaattattataagaaagttgatggtgttgtccaacaattacctgaaacttactttac

SEQ ID NO: 28194 - DNA, 80 bp, synthetic construct
  misc_feature 1..80: note = Synthetic: >NC_045512.2-cand-20200-20279
  source 1..80: mol_type = other DNA
tcagagtagaaatttacaagaatttaaacccaggagtcaaatggaaattgatttcttagaattagctatggatgaattca

SEQ ID NO: 28195 - DNA, 80 bp, synthetic construct
  misc_feature 1..80: note = Synthetic: >NC_045512.2-cand-20280-20359
  source 1..80: mol_type = other DNA
ttgaacggtataaattagaaggctatgccttcgaacatatcgtttatggagattttagtcatagtcagttaggtggttta

SEQ ID NO: 28196 - DNA, 80 bp, synthetic construct
  misc_feature 1..80: note = Synthetic: >NC_045512.2-cand-20360-20439
  source 1..80: mol_type = other DNA
catctactgattggactagctaaacgttttaaggaatcaccttttgaattagaagattttattcctatggacagtacagt

SEQ ID NO: 28197 - DNA, 80 bp, synthetic construct
  misc_feature 1..80: note = Synthetic: >NC_045512.2-cand-20440-20519
  source 1..80: mol_type = other DNA
taaaaactatttcataacagatgcgcaaacaggttcatctaagtgtgtgtgttctgttattgatttattacttgatgatt

SEQ ID NO: 28198 - DNA, 80 bp, synthetic construct
  misc_feature 1..80: note = Synthetic: >NC_045512.2-cand-20520-20599
  source 1..80: mol_type = other DNA
ttgttgaaataataaaatcccaagatttatctgtagtttctaaggttgtcaaagtgactattgactatacagaaatttca

SEQ ID NO: 28199 - DNA, 80 bp, synthetic construct
  misc_feature 1..80: note = Synthetic: >NC_045512.2-cand-20600-20679
  source 1..80: mol_type = other DNA
tttatgctttggtgtaaagatggccatgtagaaacattttacccaaaattacaatctagtcaagcgtggcaaccgggtgt

SEQ ID NO: 28200 - DNA, 80 bp, synthetic construct
  misc_feature 1..80: note = Synthetic: >NC_045512.2-cand-20680-20759
  source 1..80: mol_type = other DNA
tgctatgcctaatctttacaaaatgcaaagaatgctattagaaaagtgtgaccttcaaaattatggtgatagtgcaacat

SEQ ID NO: 28201 - DNA, 80 bp, synthetic construct
  misc_feature 1..80: note = Synthetic: >NC_045512.2-cand-20760-20839
  source 1..80: mol_type = other DNA
tacctaaaggcataatgatgaatgtcgcaaaatatactcaactgtgtcaatatttaaacacattaacattagctgtaccc

SEQ ID NO: 28202 - DNA, 80 bp, synthetic construct
  misc_feature 1..80: note = Synthetic: >NC_045512.2-cand-20840-20919
  source 1..80: mol_type = other DNA
tataatatgagagttatacattttggtgctggttctgataaaggagttgcaccaggtacagctgttttaagacagtggtt

SEQ ID NO: 28203 - DNA, 80 bp, synthetic construct
  misc_feature 1..80: note = Synthetic: >NC_045512.2-cand-20920-20999
  source 1..80: mol_type = other DNA
gcctacgggtacgctgcttgtcgattcagatcttaatgactttgtctctgatgcagattcaactttgattggtgattgtg

SEQ ID NO: 28204 - DNA, 80 bp, synthetic construct
  misc_feature 1..80: note = Synthetic: >NC_045512.2-cand-21000-21079
  source 1..80: mol_type = other DNA
caactgtacatacagctaataaatgggatctcattattagtgatatgtacgaccctaagactaaaaatgttacaaaagaa

SEQ ID NO: 28205 - DNA, 80 bp, synthetic construct
  misc_feature 1..80: note = Synthetic: >NC_045512.2-cand-21080-21159
  source 1..80: mol_type = other DNA
aatgactctaaagagggttttttcacttacatttgtgggtttatacaacaaaagctagctcttggaggttccgtggctat

SEQ ID NO: 28206 - DNA, 80 bp, synthetic construct
  misc_feature 1..80: note = Synthetic: >NC_045512.2-cand-21160-21239
  source 1..80: mol_type = other DNA
aaagataacagaacattcttggaatgctgatctttataagctcatgggacacttcgcatggtggacagcctttgttacta

SEQ ID NO: 28207 - DNA, 80 bp, synthetic construct
  misc_feature 1..80: note = Synthetic: >NC_045512.2-cand-21240-21319
  source 1..80: mol_type = other DNA
atgtgaatgcgtcatcatctgaagcatttttaattggatgtaattatcttggcaaaccacgcgaacaaatagatggttat

SEQ ID NO: 28208 - DNA, 80 bp, synthetic construct
  misc_feature 1..80: note = Synthetic: >NC_045512.2-cand-21320-21399
  source 1..80: mol_type = other DNA
gtcatgcatgcaaattacatattttggaggaatacaaatccaattcagttgtcttcctattctttatttgacatgagtaa

SEQ ID NO: 28209 - DNA, 80 bp, synthetic construct
  misc_feature 1..80: note = Synthetic: >NC_045512.2-cand-21420-21499
  source 1..80: mol_type = other DNA
gtactgctgttatgtctttaaaagaaggtcaaatcaatgatatgattttatctcttcttagtaaaggtagacttataatt

SEQ ID NO: 28210 - DNA, 80 bp, synthetic construct
  misc_feature 1..80: note = Synthetic: >NC_045512.2-cand-21480-21559
  source 1..80: mol_type = other DNA
gtaaaggtagacttataattagagaaaacaacagagttgttatttctagtgatgttcttgttaacaactaaacgaacaat

SEQ ID NO: 28211 - DNA, 80 bp, synthetic construct
  misc_feature 1..80: note = Synthetic: >NC_045512.2-cand-21560-21639
  source 1..80: mol_type = other DNA
gtttgtttttcttgttttattgccactagtctctagtcagtgtgttaatcttacaaccagaactcaattaccccctgcat

SEQ ID NO: 28212 - DNA, 80 bp, synthetic construct
  misc_feature 1..80: note = Synthetic: >NC_045512.2-cand-21640-21719
  source 1..80: mol_type = other DNA
acactaattctttcacacgtggtgtttattaccctgacaaagttttcagatcctcagttttacattcaactcaggacttg

SEQ ID NO: 28213 - DNA, 80 bp, synthetic construct
  misc_feature 1..80: note = Synthetic: >NC_045512.2-cand-21720-21799
  source 1..80: mol_type = other DNA
ttcttacctttcttttccaatgttacttggttccatgctatacatgtctctgggaccaatggtactaagaggtttgataa

SEQ ID NO: 28214 - DNA, 80 bp, synthetic construct
  misc_feature 1..80: note = Synthetic: >NC_045512.2-cand-21800-21879
  source 1..80: mol_type = other DNA
ccctgtcctaccatttaatgatggtgtttattttgcttccactgagaagtctaacataataagaggctggatttttggta

SEQ ID NO: 28215 - DNA, 80 bp, synthetic construct
  misc_feature 1..80: note = Synthetic: >NC_045512.2-cand-21880-21959
  source 1..80: mol_type = other DNA
ctactttagattcgaagacccagtccctacttattgttaataacgctactaatgttgttattaaagtctgtgaatttcaa

SEQ ID NO: 28216 - DNA, 80 bp, synthetic construct
  misc_feature 1..80: note = Synthetic: >NC_045512.2-cand-21960-22039
  source 1..80: mol_type = other DNA
ttttgtaatgatccatttttgggtgtttattaccacaaaaacaacaaaagttggatggaaagtgagttcagagtttattc

SEQ ID NO: 28217 - DNA, 80 bp, synthetic construct
  misc_feature 1..80: note = Synthetic: >NC_045512.2-cand-22040-22119
  source 1..80: mol_type = other DNA
tagtgcgaataattgcacttttgaatatgtctctcagccttttcttatggaccttgaaggaaaacagggtaatttcaaaa

SEQ ID NO: 28218 - DNA, 80 bp, synthetic construct
  misc_feature 1..80: note = Synthetic: >NC_045512.2-cand-22120-22199
  source 1..80: mol_type = other DNA
atcttagggaatttgtgtttaagaatattgatggttattttaaaatatattctaagcacacgcctattaatttagtgcgt

SEQ ID NO: 28219 - DNA, 80 bp, synthetic construct
  misc_feature 1..80: note = Synthetic: >NC_045512.2-cand-22200-22279
  source 1..80: mol_type = other DNA
gatctccctcagggtttttcggctttagaaccattggtagatttgccaataggtattaacatcactaggtttcaaacttt

SEQ ID NO: 28220 - DNA, 80 bp, synthetic construct
  misc_feature 1..80: note = Synthetic: >NC_045512.2-cand-22280-22359
  source 1..80: mol_type = other DNA
acttgctttacatagaagttatttgactcctggtgattcttcttcaggttggacagctggtgctgcagcttattatgtgg

SEQ ID NO: 28221 - DNA, 80 bp, synthetic construct
  misc_feature 1..80: note = Synthetic: >NC_045512.2-cand-22360-22439
  source 1..80: mol_type = other DNA
gttatcttcaacctaggacttttctattaaaatataatgaaaatggaaccattacagatgctgtagactgtgcacttgac

SEQ ID NO: 28222 - DNA, 80 bp, synthetic construct
  misc_feature 1..80: note = Synthetic: >NC_045512.2-cand-22440-22519
  source 1..80: mol_type = other DNA
cctctctcagaaacaaagtgtacgttgaaatccttcactgtagaaaaaggaatctatcaaacttctaactttagagtcca

SEQ ID NO: 28223 - DNA, 80 bp, synthetic construct
  misc_feature 1..80: note = Synthetic: >NC_045512.2-cand-22520-22599
  source 1..80: mol_type = other DNA
accaacagaatctattgttagatttcctaatattacaaacttgtgcccttttggtgaagtttttaacgccaccagatttg

SEQ ID NO: 28224 - DNA, 80 bp, synthetic construct
  misc_feature 1..80: note = Synthetic: >NC_045512.2-cand-22600-22679
  source 1..80: mol_type = other DNA
catctgtttatgcttggaacaggaagagaatcagcaactgtgttgctgattattctgtcctatataattccgcatcattt

SEQ ID NO: 28225 - DNA, 80 bp, synthetic construct
  misc_feature 1..80: note = Synthetic: >NC_045512.2-cand-22680-22759
  source 1..80: mol_type = other DNA
tccacttttaagtgttatggagtgtctcctactaaattaaatgatctctgctttactaatgtctatgcagattcatttgt

SEQ ID NO: 28226 - DNA, 80 bp, synthetic construct
  misc_feature 1..80: note = Synthetic: >NC_045512.2-cand-22760-22839
  source 1..80: mol_type = other DNA
aattagaggtgatgaagtcagacaaatcgctccagggcaaactggaaagattgctgattataattataaattaccagatg

SEQ ID NO: 28227 - DNA, 80 bp, synthetic construct
  misc_feature 1..80: note = Synthetic: >NC_045512.2-cand-22840-22919
  source 1..80: mol_type = other DNA
attttacaggctgcgttatagcttggaattctaacaatcttgattctaaggttggtggtaattataattacctgtataga

SEQ ID NO: 28228 - DNA, 80 bp, synthetic construct
  misc_feature 1..80: note = Synthetic: >NC_045512.2-cand-22920-22999
  source 1..80: mol_type = other DNA
ttgtttaggaagtctaatctcaaaccttttgagagagatatttcaactgaaatctatcaggccggtagcacaccttgtaa

SEQ ID NO: 28229 - DNA, 80 bp, synthetic construct
  misc_feature 1..80: note = Synthetic: >NC_045512.2-cand-23000-23079
  source 1..80: mol_type = other DNA
tggtgttgaaggttttaattgttactttcctttacaatcatatggtttccaacccactaatggtgttggttaccaaccat

SEQ ID NO: 28230 - DNA, 80 bp, synthetic construct
  misc_feature 1..80: note = Synthetic: >NC_045512.2-cand-23080-23159
  source 1..80: mol_type = other DNA
acagagtagtagtactttcttttgaacttctacatgcaccagcaactgtttgtggacctaaaaagtctactaatttggtt

SEQ ID NO: 28231 - DNA, 80 bp, synthetic construct
  misc_feature 1..80: note = Synthetic: >NC_045512.2-cand-23160-23239
  source 1..80: mol_type = other DNA
aaaaacaaatgtgtcaatttcaacttcaatggtttaacaggcacaggtgttcttactgagtctaacaaaaagtttctgcc

SEQ ID NO: 28232 - DNA, 80 bp, synthetic construct
  misc_feature 1..80: note = Synthetic: >NC_045512.2-cand-23240-23319
  source 1..80: mol_type = other DNA
tttccaacaatttggcagagacattgctgacactactgatgctgtccgtgatccacagacacttgagattcttgacatta

SEQ ID NO: 28233 - DNA, 80 bp, synthetic construct
  misc_feature 1..80: note = Synthetic: >NC_045512.2-cand-23320-23399
  source 1..80: mol_type = other DNA
caccatgttcttttggtggtgtcagtgttataacaccaggaacaaatacttctaaccaggttgctgttctttatcaggat

SEQ ID NO: 28234 - DNA, 80 bp, synthetic construct
  misc_feature 1..80: note = Synthetic: >NC_045512.2-cand-23400-23479
  source 1..80: mol_type = other DNA
gttaactgcacagaagtccctgttgctattcatgcagatcaacttactcctacttggcgtgtttattctacaggttctaa

SEQ ID NO: 28235 - DNA, 80 bp, synthetic construct
  misc_feature 1..80: note = Synthetic: >NC_045512.2-cand-23520-23599
  source 1..80: mol_type = other DNA
catgtcaacaactcatatgagtgtgacatacccattggtgcaggtatatgcgctagttatcagactcagactaattctcc

SEQ ID NO: 28236 - DNA, 80 bp, synthetic construct
  misc_feature 1..80: note = Synthetic: >NC_045512.2-cand-23570-23649
  source 1..80: mol_type = other DNA
cgctagttatcagactcagactaattctcctcggcgggcacgtagtgtagctagtcaatccatcattgcctacactatgt

SEQ ID NO: 28237 - DNA, 80 bp, synthetic construct
  misc_feature 1..80: note = Synthetic: >NC_045512.2-cand-23650-23729
  source 1..80: mol_type = other DNA
cacttggtgcagaaaattcagttgcttactctaataactctattgccatacccacaaattttactattagtgttaccaca

SEQ ID NO: 28238 - DNA, 80 bp, synthetic construct
  misc_feature 1..80: note = Synthetic: >NC_045512.2-cand-23730-23809
  source 1..80: mol_type = other DNA
gaaattctaccagtgtctatgaccaagacatcagtagattgtacaatgtacatttgtggtgattcaactgaatgcagcaa

SEQ ID NO: 28239 - DNA, 80 bp, synthetic construct
  misc_feature 1..80: note = Synthetic: >NC_045512.2-cand-23810-23889
  source 1..80: mol_type = other DNA
tcttttgttgcaatatggcagtttttgtacacaattaaaccgtgctttaactggaatagctgttgaacaagacaaaaaca

SEQ ID NO: 28240 - DNA, 80 bp, synthetic construct
  misc_feature 1..80: note = Synthetic: >NC_045512.2-cand-23890-23969
  source 1..80: mol_type = other DNA
cccaagaagtttttgcacaagtcaaacaaatttacaaaacaccaccaattaaagattttggtggttttaatttttcacaa

SEQ ID NO: 28241 - DNA, 80 bp, synthetic construct
  misc_feature 1..80: note = Synthetic: >NC_045512.2-cand-23970-24049
  source 1..80: mol_type = other DNA
atattaccagatccatcaaaaccaagcaagaggtcatttattgaagatctacttttcaacaaagtgacacttgcagatgc

SEQ ID NO: 28242 - DNA, 80 bp, synthetic construct
  misc_feature 1..80: note = Synthetic: >NC_045512.2-cand-24050-24129
  source 1..80: mol_type = other DNA
tggcttcatcaaacaatatggtgattgccttggtgatattgctgctagagacctcatttgtgcacaaaagtttaacggcc

SEQ ID NO: 28243 - DNA, 80 bp, synthetic construct
  misc_feature 1..80: note = Synthetic: >NC_045512.2-cand-24130-24209
  source 1..80: mol_type = other DNA
ttactgttttgccacctttgctcacagatgaaatgattgctcaatacacttctgcactgttagcgggtacaatcacttct

SEQ ID NO: 28244 - DNA, 80 bp, synthetic construct
  misc_feature 1..80: note = Synthetic: >NC_045512.2-cand-24210-24289
  source 1..80: mol_type = other DNA
ggttggacctttggtgcaggtgctgcattacaaataccatttgctatgcaaatggcttataggtttaatggtattggagt

SEQ ID NO: 28245 - DNA, 80 bp, synthetic construct
  misc_feature 1..80: note = Synthetic: >NC_045512.2-cand-24290-24369
  source 1..80: mol_type = other DNA
tacacagaatgttctctatgagaaccaaaaattgattgccaaccaatttaatagtgctattggcaaaattcaagactcac

SEQ ID NO: 28246 - DNA, 80 bp, synthetic construct
  misc_feature 1..80: note = Synthetic: >NC_045512.2-cand-24370-24449
  source 1..80: mol_type = other DNA
tttcttccacagcaagtgcacttggaaaacttcaagatgtggtcaaccaaaatgcacaagctttaaacacgcttgttaaa

SEQ ID NO: 28247 - DNA, 80 bp, synthetic construct
  misc_feature 1..80: note = Synthetic: >NC_045512.2-cand-24450-24529
  source 1..80: mol_type = other DNA
caacttagctccaattttggtgcaatttcaagtgttttaaatgatatcctttcacgtcttgacaaagttgaggctgaagt

SEQ ID NO: 28248 - DNA, 80 bp, synthetic construct
  misc_feature 1..80: note = Synthetic: >NC_045512.2-cand-24530-24609
  source 1..80: mol_type = other DNA
gcaaattgataggttgatcacaggcagacttcaaagtttgcagacatatgtgactcaacaattaattagagctgcagaaa

SEQ ID NO: 28249 - DNA, 80 bp, synthetic construct
  misc_feature 1..80: note = Synthetic: >NC_045512.2-cand-24610-24689
  source 1..80: mol_type = other DNA
tcagagcttctgctaatcttgctgctactaaaatgtcagagtgtgtacttggacaatcaaaaagagttgatttttgtgga

SEQ ID NO: 28250 - DNA, 80 bp, synthetic construct
  misc_feature 1..80: note = Synthetic: >NC_045512.2-cand-24690-24769
  source 1..80: mol_type = other DNA
aagggctatcatcttatgtccttccctcagtcagcacctcatggtgtagtcttcttgcatgtgacttatgtccctgcaca

SEQ ID NO: 28251 - DNA, 80 bp, synthetic construct
  misc_feature 1..80: note = Synthetic: >NC_045512.2-cand-24770-24849
  source 1..80: mol_type = other DNA
agaaaagaacttcacaactgctcctgccatttgtcatgatggaaaagcacactttcctcgtgaaggtgtctttgtttcaa

SEQ ID NO: 28252 - DNA, 80 bp, synthetic construct
  misc_feature 1..80: note = Synthetic: >NC_045512.2-cand-24850-24929
  source 1..80: mol_type = other DNA
atggcacacactggtttgtaacacaaaggaatttttatgaaccacaaatcattactacagacaacacatttgtgtctggt

SEQ ID NO: 28253 - DNA, 80 bp, synthetic construct
  misc_feature 1..80: note = Synthetic: >NC_045512.2-cand-24930-25009
  source 1..80: mol_type = other DNA
aactgtgatgttgtaataggaattgtcaacaacacagtttatgatcctttgcaacctgaattagactcattcaaggagga

SEQ ID NO: 28254 - DNA, 80 bp, synthetic construct
  misc_feature 1..80: note = Synthetic: >NC_045512.2-cand-25010-25089
  source 1..80: mol_type = other DNA
gttagataaatattttaagaatcatacatcaccagatgttgatttaggtgacatctctggcattaatgcttcagttgtaa

SEQ ID NO: 28255 - DNA, 80 bp, synthetic construct
  misc_feature 1..80: note = Synthetic: >NC_045512.2-cand-25090-25169
  source 1..80: mol_type = other DNA
acattcaaaaagaaattgaccgcctcaatgaggttgccaagaatttaaatgaatctctcatcgatctccaagaacttgga

SEQ ID NO: 28256 - DNA, 80 bp, synthetic construct
  misc_feature 1..80: note = Synthetic: >NC_045512.2-cand-25170-25249
  source 1..80: mol_type = other DNA
aagtatgagcagtatataaaatggccatggtacatttggctaggttttatagctggcttgattgccatagtaatggtgac

SEQ ID NO: 28257 - DNA, 80 bp, synthetic construct
  misc_feature 1..80: note = Synthetic: >NC_045512.2-cand-25250-25329
  source 1..80: mol_type = other DNA
aattatgctttgctgtatgaccagttgctgtagttgtctcaagggctgttgttcttgtggatcctgctgcaaatttgatg

SEQ ID NO: 28258 - DNA, 80 bp, synthetic construct
  misc_feature 1..80: note = Synthetic: >NC_045512.2-cand-25330-25409
  source 1..80: mol_type = other DNA
aagacgactctgagccagtgctcaaaggagtcaaattacattacacataaacgaacttatggatttgtttatgagaatct

SEQ ID NO: 28259 - DNA, 80 bp, synthetic construct
  misc_feature 1..80: note = Synthetic: >NC_045512.2-cand-25410-25489
  source 1..80: mol_type = other DNA
tcacaattggaactgtaactttgaagcaaggtgaaatcaaggatgctactccttcagattttgttcgcgctactgcaacg

SEQ ID NO: 28260 - DNA, 80 bp, synthetic construct
  misc_feature 1..80: note = Synthetic: >NC_045512.2-cand-25510-25589
  source 1..80: mol_type = other DNA
ccctttcggatggcttattgttggcgttgcacttcttgctgtttttcagagcgcttccaaaatcataaccctcaaaaaga

SEQ ID NO: 28261 - DNA, 80 bp, synthetic construct
  misc_feature 1..80: note = Synthetic: >NC_045512.2-cand-25590-25669
  source 1..80: mol_type = other DNA
gatggcaactagcactctccaagggtgttcactttgtttgcaacttgctgttgttgtttgtaacagtttactcacacctt

SEQ ID NO: 28262 - DNA, 80 bp, synthetic construct
  misc_feature 1..80: note = Synthetic: >NC_045512.2-cand-25670-25749
  source 1..80: mol_type = other DNA
ttgctcgttgctgctggccttgaagccccttttctctatctttatgctttagtctacttcttgcagagtataaactttgt

SEQ ID NO: 28263 - DNA, 80 bp, synthetic construct
  misc_feature 1..80: note = Synthetic: >NC_045512.2-cand-25750-25829
  source 1..80: mol_type = other DNA
aagaataataatgaggctttggctttgctggaaatgccgttccaaaaacccattactttatgatgccaactattttcttt

SEQ ID NO: 28264 - DNA, 80 bp, synthetic construct
  misc_feature 1..80: note = Synthetic: >NC_045512.2-cand-25830-25909
  source 1..80: mol_type = other DNA
gctggcatactaattgttacgactattgtataccttacaatagtgtaacttcttcaattgtcattacttcaggtgatggc

SEQ ID NO: 28265 - DNA, 80 bp, synthetic construct
  misc_feature 1..80: note = Synthetic: >NC_045512.2-cand-25910-25989
  source 1..80: mol_type = other DNA
acaacaagtcctatttctgaacatgactaccagattggtggttatactgaaaaatgggaatctggagtaaaagactgtgt

SEQ ID NO: 28266 - DNA, 80 bp, synthetic construct
  misc_feature 1..80: note = Synthetic: >NC_045512.2-cand-25990-26069
  source 1..80: mol_type = other DNA
tgtattacacagttacttcacttcagactattaccagctgtactcaactcaattgagtacagacactggtgttgaacatg

SEQ ID NO: 28267 - DNA, 80 bp, synthetic construct
  misc_feature 1..80: note = Synthetic: >NC_045512.2-cand-26070-26149
  source 1..80: mol_type = other DNA
ttaccttcttcatctacaataaaattgttgatgagcctgaagaacatgtccaaattcacacaatcgacggttcatccgga

SEQ ID NO: 28268 - DNA, 80 bp, synthetic construct
  misc_feature 1..80: note = Synthetic: >NC_045512.2-cand-26150-26229
  source 1..80: mol_type = other DNA
gttgttaatccagtaatggaaccaatttatgatgaaccgacgacgactactagcgtgcctttgtaagcacaagctgatga

SEQ ID NO: 28269 - DNA, 80 bp, synthetic construct
  misc_feature 1..80: note = Synthetic: >NC_045512.2-cand-26230-26309
  source 1..80: mol_type = other DNA
gtacgaacttatgtactcattcgtttcggaagagacaggtacgttaatagttaatagcgtacttctttttcttgctttcg

SEQ ID NO: 28270 - DNA, 80 bp, synthetic construct
  misc_feature 1..80: note = Synthetic: >NC_045512.2-cand-26310-26389
  source 1..80: mol_type = other DNA
tggtattcttgctagttacactagccatccttactgcgcttcgattgtgtgcgtactgctgcaatattgttaacgtgagt

SEQ ID NO: 28271 - DNA, 80 bp, synthetic construct
  misc_feature 1..80: note = Synthetic: >NC_045512.2-cand-26390-26469
  source 1..80: mol_type = other DNA
cttgtaaaaccttctttttacgtttactctcgtgttaaaaatctgaattcttctagagttcctgatcttctggtctaaac

SEQ ID NO: 28272 - DNA, 80 bp, synthetic construct
  misc_feature 1..80: note = Synthetic: >NC_045512.2-cand-26470-26549
  source 1..80: mol_type = other DNA
gaactaaatattatattagtttttctgtttggaactttaattttagccatggcagattccaacggtactattaccgttga

SEQ ID NO: 28273 - DNA, 80 bp, synthetic construct
  misc_feature 1..80: note = Synthetic: >NC_045512.2-cand-26550-26629
  source 1..80: mol_type = other DNA
agagcttaaaaagctccttgaacaatggaacctagtaataggtttcctattccttacatggatttgtcttctacaatttg

SEQ ID NO: 28274 - DNA, 80 bp, synthetic construct
  misc_feature 1..80: note = Synthetic: >NC_045512.2-cand-26630-26709
  source 1..80: mol_type = other DNA
cctatgccaacaggaataggtttttgtatataattaagttaattttcctctggctgttatggccagtaactttagcttgt

SEQ ID NO: 28275 - DNA, 80 bp, synthetic construct
  misc_feature 1..80: note = Synthetic: >NC_045512.2-cand-26710-26789
  source 1..80: mol_type = other DNA
tttgtgcttgctgctgtttacagaataaattggatcaccggtggaattgctatcgcaatggcttgtcttgtaggcttgat

SEQ ID NO: 28276 - DNA, 80 bp, synthetic construct
  misc_feature 1..80: note = Synthetic: >NC_045512.2-cand-26790-26869
  source 1..80: mol_type = other DNA
gtggctcagctacttcattgcttctttcagactgtttgcgcgtacgcgttccatgtggtcattcaatccagaaactaaca

SEQ ID NO: 28277 - DNA, 80 bp, synthetic construct
  misc_feature 1..80: note = Synthetic: >NC_045512.2-cand-26870-26949
  source 1..80: mol_type = other DNA
ttcttctcaacgtgccactccatggcactattctgaccagaccgcttctagaaagtgaactcgtaatcggagctgtgatc

SEQ ID NO: 28278 - DNA, 80 bp, synthetic construct
  misc_feature 1..80: note = Synthetic: >NC_045512.2-cand-26950-27029
  source 1..80: mol_type = other DNA
cttcgtggacatcttcgtattgctggacaccatctaggacgctgtgacatcaaggacctgcctaaagaaatcactgttgc

SEQ ID NO: 28279 - DNA, 80 bp, synthetic construct
  misc_feature 1..80: note = Synthetic: >NC_045512.2-cand-27030-27109
  source 1..80: mol_type = other DNA
tacatcacgaacgctttcttattacaaattgggagcttcgcagcgtgtagcaggtgactcaggttttgctgcatacagtc

SEQ ID NO: 28280 - DNA, 80 bp, synthetic construct
  misc_feature 1..80: note = Synthetic: >NC_045512.2-cand-27110-27189
  source 1..80: mol_type = other DNA
gctacaggattggcaactataaattaaacacagaccattccagtagcagtgacaatattgctttgcttgtacagtaagtg

SEQ ID NO: 28281 - DNA, 80 bp, synthetic construct
  misc_feature 1..80: note = Synthetic: >NC_045512.2-cand-27190-27269
  source 1..80: mol_type = other DNA
acaacagatgtttcatctcgttgactttcaggttactatagcagagatattactaattattatgaggacttttaaagttt

SEQ ID NO: 28282 - DNA, 80 bp, synthetic construct
  misc_feature 1..80: note = Synthetic: >NC_045512.2-cand-27270-27349
  source 1..80: mol_type = other DNA
ccatttggaatcttgattacatcataaacctcataattaaaaatttatctaagtcactaactgagaataaatattctcaa

SEQ ID NO: 28283 - DNA, 80 bp, synthetic construct
  misc_feature 1..80: note = Synthetic: >NC_045512.2-cand-27350-27429
  source 1..80: mol_type = other DNA
ttagatgaagagcaaccaatggagattgattaaacgaacatgaaaattattcttttcttggcactgataacactcgctac

SEQ ID NO: 28284 - DNA, 80 bp, synthetic construct
  misc_feature 1..80: note = Synthetic: >NC_045512.2-cand-27430-27509
  source 1..80: mol_type = other DNA
ttgtgagctttatcactaccaagagtgtgttagaggtacaacagtacttttaaaagaaccttgctcttctggaacatacg

SEQ ID NO: 28285 - DNA, 80 bp, synthetic construct
  misc_feature 1..80: note = Synthetic: >NC_045512.2-cand-27510-27589
  source 1..80: mol_type = other DNA
agggcaattcaccatttcatcctctagctgataacaaatttgcactgacttgctttagcactcaatttgcttttgcttgt

SEQ ID NO: 28286 - DNA, 80 bp, synthetic construct
  misc_feature 1..80: note = Synthetic: >NC_045512.2-cand-27590-27669
  source 1..80: mol_type = other DNA
cctgacggcgtaaaacacgtctatcagttacgtgccagatcagtttcacctaaactgttcatcagacaagaggaagttca

SEQ ID NO: 28287 - DNA, 80 bp, synthetic construct
  misc_feature 1..80: note = Synthetic: >NC_045512.2-cand-27670-27749
  source 1..80: mol_type = other DNA
agaactttactctccaatttttcttattgttgcggcaatagtgtttataacactttgcttcacactcaaaagaaagacag

SEQ ID NO: 28288 - DNA, 80 bp, synthetic construct
  misc_feature 1..80: note = Synthetic: >NC_045512.2-cand-27750-27829
  source 1..80: mol_type = other DNA
aatgattgaactttcattaattgacttctatttgtgctttttagcctttctgctattccttgttttaattatgcttatta

SEQ ID NO: 28289 - DNA, 80 bp, synthetic construct
  misc_feature 1..80: note = Synthetic: >NC_045512.2-cand-27830-27909
  source 1..80: mol_type = other DNA
tcttttggttctcacttgaactgcaagatcataatgaaacttgtcacgcctaaacgaacatgaaatttcttgttttctta

SEQ ID NO: 28290 - DNA, 80 bp, synthetic construct
  misc_feature 1..80: note = Synthetic: >NC_045512.2-cand-27910-27989
  source 1..80: mol_type = other DNA
ggaatcatcacaactgtagctgcatttcaccaagaatgtagtttacagtcatgtactcaacatcaaccatatgtagttga

SEQ ID NO: 28291 - DNA, 80 bp, synthetic construct
  misc_feature 1..80: note = Synthetic: >NC_045512.2-cand-27990-28069
  source 1..80: mol_type = other DNA
tgacccgtgtcctattcacttctattctaaatggtatattagagtaggagctagaaaatcagcacctttaattgaattgt

SEQ ID NO: 28292 - DNA, 80 bp, synthetic construct
  misc_feature 1..80: note = Synthetic: >NC_045512.2-cand-28070-28149
  source 1..80: mol_type = other DNA
gcgtggatgaggctggttctaaatcacccattcagtacatcgatatcggtaattatacagtttcctgtttaccttttaca

SEQ ID NO: 28293 - DNA, 80 bp, synthetic construct
  misc_feature 1..80: note = Synthetic: >NC_045512.2-cand-28150-28229
  source 1..80: mol_type = other DNA
attaattgccaggaacctaaattgggtagtcttgtagtgcgttgttcgttctatgaagactttttagagtatcatgacgt

SEQ ID NO: 28294 - DNA, 80 bp, synthetic construct
  misc_feature 1..80: note = Synthetic: >NC_045512.2-cand-28230-28309
  source 1..80: mol_type = other DNA
tcgtgttgttttagatttcatctaaacgaacaaactaaaatgtctgataatggaccccaaaatcagcgaaatgcaccccg

SEQ ID NO: 28295 - DNA, 80 bp, synthetic construct
  misc_feature 1..80: note = Synthetic: >NC_045512.2-cand-28290-28369
  source 1..80: mol_type = other DNA
aatcagcgaaatgcaccccgcattacgtttggtggaccctcagattcaactggcagtaaccagaatggagaacgcagtgg

SEQ ID NO: 28296 - DNA, 80 bp, synthetic construct
  misc_feature 1..80: note = Synthetic: >NC_045512.2-cand-28390-28469
  source 1..80: mol_type = other DNA
ggccccaaggtttacccaataatactgcgtcttggttcaccgctctcactcaacatggcaaggaagaccttaaattccct

SEQ ID NO: 28297 - DNA, 80 bp, synthetic construct
  misc_feature 1..80: note = Synthetic: >NC_045512.2-cand-28460-28539
  source 1..80: mol_type = other DNA
taaattccctcgaggacaaggcgttccaattaacaccaatagcagtccagatgaccaaattggctactaccgaagagcta

SEQ ID NO: 28298 - DNA, 80 bp, synthetic construct
  misc_feature 1..80: note = Synthetic: >NC_045512.2-cand-28540-28619
  source 1..80: mol_type = other DNA
ccagacgaattcgtggtggtgacggtaaaatgaaagatctcagtccaagatggtatttctactacctaggaactgggcca

SEQ ID NO: 28299 - DNA, 80 bp, synthetic construct
  misc_feature 1..80: note = Synthetic: >NC_045512.2-cand-28620-28699
  source 1..80: mol_type = other DNA
gaagctggacttccctatggtgctaacaaagacggcatcatatgggttgcaactgagggagccttgaatacaccaaaaga

SEQ ID NO: 28300 - DNA, 80 bp, synthetic construct
  misc_feature 1..80: note = Synthetic: >NC_045512.2-cand-28700-28779
  source 1..80: mol_type = other DNA
tcacattggcacccgcaatcctgctaacaatgctgcaatcgtgctacaacttcctcaaggaacaacattgccaaaaggct

SEQ ID NO: 28301 - DNA, 80 bp, synthetic construct
  misc_feature 1..80: note = Synthetic: >NC_045512.2-cand-28780-28859
  source 1..80: mol_type = other DNA
tctacgcagaagggagcagaggcggcagtcaagcctcttctcgttcctcatcacgtagtcgcaacagttcaagaaattca

SEQ ID NO: 28302 - DNA, 80 bp, synthetic construct
  misc_feature 1..80: note = Synthetic: >NC_045512.2-cand-28880-28959
  source 1..80: mol_type = other DNA
aacttctcctgctagaatggctggcaatggcggtgatgctgctcttgctttgctgctgcttgacagattgaaccagcttg

SEQ ID NO: 28303 - DNA, 80 bp, synthetic construct
  misc_feature 1..80: note = Synthetic: >NC_045512.2-cand-28940-29019
  source 1..80: mol_type = other DNA
tgacagattgaaccagcttgagagcaaaatgtctggtaaaggccaacaacaacaaggccaaactgtcactaagaaatctg

SEQ ID NO: 28304 - DNA, 80 bp, synthetic construct
  misc_feature 1..80: note = Synthetic: >NC_045512.2-cand-29010-29089
  source 1..80: mol_type = other DNA
aagaaatctgctgctgaggcttctaagaagcctcggcaaaaacgtactgccactaaagcatacaatgtaacacaagcttt

SEQ ID NO: 28305 - DNA, 80 bp, synthetic construct
  misc_feature 1..80: note = Synthetic: >NC_045512.2-cand-29130-29209
  source 1..80: mol_type = other DNA
gaccaggaactaatcagacaaggaactgattacaaacattggccgcaaattgcacaatttgcccccagcgcttcagcgtt

SEQ ID NO: 28306 - DNA, 80 bp, synthetic construct
  misc_feature 1..80: note = Synthetic: >NC_045512.2-cand-29170-29249
  source 1..80: mol_type = other DNA
ggccgcaaattgcacaatttgcccccagcgcttcagcgttcttcggaatgtcgcgcattggcatggaagtcacaccttcg

SEQ ID NO: 28307 - DNA, 80 bp, synthetic construct
  misc_feature 1..80: note = Synthetic: >NC_045512.2-cand-29250-29329
  source 1..80: mol_type = other DNA
ggaacgtggttgacctacacaggtgccatcaaattggatgacaaagatccaaatttcaaagatcaagtcattttgctgaa

SEQ ID NO: 28308 - DNA, 80 bp, synthetic construct
  misc_feature 1..80: note = Synthetic: >NC_045512.2-cand-29330-29409
  source 1..80: mol_type = other DNA
taagcatattgacgcatacaaaacattcccaccaacagagcctaaaaaggacaaaaagaagaaggctgatgaaactcaag

SEQ ID NO: 28309 - DNA, 80 bp, synthetic construct
  misc_feature 1..80: note = Synthetic: >NC_045512.2-cand-29410-29489
  source 1..80: mol_type = other DNA
ccttaccgcagagacagaagaaacagcaaactgtgactcttcttcctgctgcagatttggatgatttctccaaacaattg

SEQ ID NO: 28310 - DNA, 80 bp, synthetic construct
  misc_feature 1..80: note = Synthetic: >NC_045512.2-cand-29490-29569
  source 1..80: mol_type = other DNA
caacaatccatgagcagtgctgactcaactcaggcctaaactcatgcagaccacacaaggcagatgggctatataaacgt

SEQ ID NO: 28311 - DNA, 80 bp, synthetic construct
  misc_feature 1..80: note = Synthetic: >NC_045512.2-cand-29570-29649
  source 1..80: mol_type = other DNA
tttcgcttttccgtttacgatatatagtctactcttgtgcagaatgaattctcgtaactacatagcacaagtagatgtag

SEQ ID NO: 28312 - DNA, 80 bp, synthetic construct
  misc_feature 1..80: note = Synthetic: >NC_045512.2-cand-29650-29729
  source 1..80: mol_type = other DNA
ttaactttaatctcacatagcaatctttaatcagtgtgtaacattagggaggacttgaaagagccaccacattttcaccg

SEQ ID NO: 28313 - DNA, 80 bp, synthetic construct
  misc_feature 1..80: note = Synthetic: >NC_045512.2-cand-29740-29819
  source 1..80: mol_type = other DNA
gagtacgatcgagtgtacagtgaacaatgctagggagagctgcctatatggaagagccctaatgtgtaaaattaatttta

SEQ ID NO: 28314 - DNA, 80 bp, synthetic construct
  misc_feature 1..80: note = Synthetic: >NC_006317.1-cand-0-79
  source 1..80: mol_type = other DNA
accggggatcctaggcgttttttagtcacgcttaaatctttgattgcgtcaatcatgggtcaattgttcagcttttttga

SEQ ID NO: 28315 - DNA, 80 bp, synthetic construct
  misc_feature 1..80: note = Synthetic: >NC_006317.1-cand-60-139
  source 1..80: mol_type = other DNA
caattgttcagcttttttgaagaagttccgaatatcatccatgaggctatcaacatagctctgatagcagtgagcttaat

SEQ ID NO: 28316 - DNA, 80 bp, synthetic construct
  misc_feature 1..80: note = Synthetic: >NC_006317.1-cand-140-219
  source 1..80: mol_type = other DNA
tgctgccttgaaagggatgattaacttgtggaagagtggccttttccaattgatattctttttgactctagcaggaagat

SEQ ID NO: 28317 - DNA, 80 bp, synthetic construct
  misc_feature 1..80: note = Synthetic: >NC_006317.1-cand-220-299
  source 1..80: mol_type = other DNA
cgtgttcttttagaattggaaggagcacagaattgcaaaacataacgtttgatatgttgaaggtattcgaggaccacccc

SEQ ID NO: 28318 - DNA, 80 bp, synthetic construct
  misc_feature 1..80: note = Synthetic: >NC_006317.1-cand-300-379
  source 1..80: mol_type = other DNA
acatcttgcatggtgaatcattccacctactatgtccatgaaaacaaaaatgccacttggtgtcttgaggtgtctgtgac

SEQ ID NO: 28319 - DNA, 80 bp, synthetic construct
  misc_feature 1..80: note = Synthetic: >NC_006317.1-cand-380-459
  source 1..80: mol_type = other DNA
tgatgttaccctgctcatggctgaacatgatcgtcaagtcctcaacaatctgtcaaactgtgtgcaccctgcagttgagc

SEQ ID NO: 28320 - DNA, 80 bp, synthetic construct
  misc_feature 1..80: note = Synthetic: >NC_006317.1-cand-460-539
  source 1..80: mol_type = other DNA
acagaagcaggatggttggcttacttgagtggatttttagagccctaaagtatgacttcaatcatgatccaacaccgttg

SEQ ID NO: 28321 - DNA, 80 bp, synthetic construct
  misc_feature 1..80: note = Synthetic: >NC_006317.1-cand-540-619
  source 1..80: mol_type = other DNA
tgtcaaaagcaaacttcaacagtgaatgaaacacgtgtgcagataaacatcactgaggggtttgggtctcacgggtttga

SEQ ID NO: 28322 - DNA, 80 bp, synthetic construct
  misc_feature 1..80: note = Synthetic: >NC_006317.1-cand-620-699
  source 1..80: mol_type = other DNA
agataccatccttcaaagactaggggttctattcggttcaagaattgcattttcaaatatccaggatttaggtaaaaaaa

SEQ ID NO: 28323 - DNA, 80 bp, synthetic construct
  misc_feature 1..80: note = Synthetic: >NC_006317.1-cand-700-779
  source 1..80: mol_type = other DNA
ggtttttattgattagaaattcaacttggaaaaatcaatgcgaaatgaatcatgtaaactccatgcatttaatgttggcg

SEQ ID NO: 28324 - DNA, 80 bp, synthetic construct
  misc_feature 1..80: note = Synthetic: >NC_006317.1-cand-780-859
  source 1..80: mol_type = other DNA
aatgctggtcgctcttctggttctagaagaccactcggcattttctcctggacaataactgatgcagtgggcaatgacat

SEQ ID NO: 28325 - DNA, 80 bp, synthetic construct
  misc_feature 1..80: note = Synthetic: >NC_006317.1-cand-860-939
  source 1..80: mol_type = other DNA
gcctggtggttattgtcttgaaagatggatgctagtgacgtcagatcttaagtgctttggaaacacagcactagcaaaat

SEQ ID NO: 28326 - DNA, 80 bp, synthetic construct
  misc_feature 1..80: note = Synthetic: >NC_006317.1-cand-940-1019
  source 1..80: mol_type = other DNA
gtaaccttgaccacgattcggaattctgtgacatgttgaaattgtttgagttcaacaaaaaagcgatagagacattgaat

SEQ ID NO: 28327 - DNA, 80 bp, synthetic construct
  misc_feature 1..80: note = Synthetic: >NC_006317.1-cand-1020-1099
  source 1..80: mol_type = other DNA
gacaatacaaaaaacaaggtaaacttgctgacccactcaattaatgcattaatatctgacaacttactgatgaagaatcg

SEQ ID NO: 28328 - DNA, 80 bp, synthetic construct
  misc_feature 1..80: note = Synthetic: >NC_006317.1-cand-1100-1179
  source 1..80: mol_type = other DNA
acttaaagaattgttgaacactccttattgtaattacaccaaattttggtatgtcaatcacacagcatcaggggaacact

SEQ ID NO: 28329 - DNA, 80 bp, synthetic construct
  misc_feature 1..80: note = Synthetic: >NC_006317.1-cand-1180-1259
  source 1..80: mol_type = other DNA
cattgccacggtgctggcttgttagaaataatagctacttgaatgaaagtgaatttagaaatgattggattattgagagt

SEQ ID NO: 28330 - DNA, 80 bp, synthetic construct
  misc_feature 1..80: note = Synthetic: >NC_006317.1-cand-1260-1339
  source 1..80: mol_type = other DNA
gatcatttattgtctgaaatgctcaataaagaatacatagatagacagggaaagacaccgttgactttggtggatatctg

SEQ ID NO: 28331 - DNA, 80 bp, synthetic construct
  misc_feature 1..80: note = Synthetic: >NC_006317.1-cand-1340-1419
  source 1..80: mol_type = other DNA
tttctggagcactttgtttttcacaacaacactgtttcttcacctggtaggctttccaactcatagacacatacgtggtg

SEQ ID NO: 28332 - DNA, 80 bp, synthetic construct
  misc_feature 1..80: note = Synthetic: >NC_006317.1-cand-1420-1499
  source 1..80: mol_type = other DNA
aaccctgcccactaccccataggctcaacagtagaggaggatgtagatgtgggaaataccctgaactaaaaaagccaatc

SEQ ID NO: 28333 - DNA, 80 bp, synthetic construct
  misc_feature 1..80: note = Synthetic: >NC_006317.1-cand-1500-1579
  source 1..80: mol_type = other DNA
acctggcacaagaaccactagaaggacaatcattgtctcccaccgacccgggcaatgcccgggtcggtgtggccccccag

SEQ ID NO: 28334 - DNA, 80 bp, synthetic construct
  misc_feature 1..80: note = Synthetic: >NC_006317.1-cand-1580-1659
  source 1..80: mol_type = other DNA
tccgcggcaaatgccgcggactggggagcaccaatctagatggtgaatgctgcctccagtgtgaagagcaatgcatcagg

SEQ ID NO: 28335 - DNA, 80 bp, synthetic construct
  misc_feature 1..80: note = Synthetic: >NC_006317.1-cand-1660-1739
  source 1..80: mol_type = other DNA
caataaaccttccagtttggtttgaggtggttggcctgctatggctgactgaaacattagacaatcaagtagggcacagt

SEQ ID NO: 28336 - DNA, 80 bp, synthetic construct
  misc_feature 1..80: note = Synthetic: >NC_006317.1-cand-1740-1819
  source 1..80: mol_type = other DNA
gtggctctgaggactgtgggatgtctttgtctttctttttctttggcacaataactccattgtgtttcttacagaggtga

SEQ ID NO: 28337 - DNA, 80 bp, synthetic construct
  misc_feature 1..80: note = Synthetic: >NC_006317.1-cand-1820-1899
  source 1..80: mol_type = other DNA
ccaaaatctgaccagattggctcctcaaactttctcgcctgttcagatgccaatttaatgtcgacaatctttaagtcttt

SEQ ID NO: 28338 - DNA, 80 bp, synthetic construct
  misc_feature 1..80: note = Synthetic: >NC_006317.1-cand-1900-1979
  source 1..80: mol_type = other DNA
gcgaccgtgtgtatctactaagcgccttatatcatctgaaccttgggtggtgaggaccatgttttgaggaaggagcccta

SEQ ID NO: 28339 - DNA, 80 bp, synthetic construct
  misc_feature 1..80: note = Synthetic: >NC_006317.1-cand-1980-2059
  source 1..80: mol_type = other DNA
taacatagctgagcaagcctggctgtgcagattctaggtcctttagcaacatcccatgtgaatgcctgctaccatttttg

SEQ ID NO: 28340 - DNA, 80 bp, synthetic construct
  misc_feature 1..80: note = Synthetic: >NC_006317.1-cand-2060-2139
  source 1..80: mol_type = other DNA
aaccccttctcatcatgtggtttcctataacagaggatataattacctgtgtctggttggtacaatgctaattcaaccgg

SEQ ID NO: 28341 - DNA, 80 bp, synthetic construct
  misc_feature 1..80: note = Synthetic: >NC_006317.1-cand-2140-2219
  source 1..80: mol_type = other DNA
atcattactggtaccctcaatgtcaatccatgttgtcagagttgggtcaatcttacccattgcctctctcacaactgact

SEQ ID NO: 28342 - DNA, 80 bp, synthetic construct
  misc_feature 1..80: note = Synthetic: >NC_006317.1-cand-2220-2299
  source 1..80: mol_type = other DNA
cttgcaactcagtcaagtgggagagtctaatgttctgacctgccttttctggtgttctcggcccttgttggggctttgtg

SEQ ID NO: 28343 - DNA, 80 bp, synthetic construct
  misc_feature 1..80: note = Synthetic: >NC_006317.1-cand-2300-2379
  source 1..80: mol_type = other DNA
cttaaatcaacagtggtgttttcccatgacctacccttgatctgggatctggagccaatgtaaggccaaccttctcctga

SEQ ID NO: 28344 - DNA, 80 bp, synthetic construct
  misc_feature 1..80: note = Synthetic: >NC_006317.1-cand-2380-2459
  source 1..80: mol_type = other DNA
aaggcagattttgtacagaaggttttcataagggtttctatttccaggtttctcatctacaaacatgccttcctttttct

SEQ ID NO: 28345 - DNA, 80 bp, synthetic construct
  misc_feature 1..80: note = Synthetic: >NC_006317.1-cand-2460-2539
  source 1..80: mol_type = other DNA
ttatggatagggttgtctttatgatctgagaaaagttgtcaggagtgatccttatggtttccagcatgttaccaccatcc

SEQ ID NO: 28346 - DNA, 80 bp, synthetic construct
  misc_feature 1..80: note = Synthetic: >NC_006317.1-cand-2540-2619
  source 1..80: mol_type = other DNA
agaagcgttgcaccagctttaacagctgcagaaagactatagttatatcctgagatgttcaagccgctctcatctttagt

SEQ ID NO: 28347 - DNA, 80 bp, synthetic construct
  misc_feature 1..80: note = Synthetic: >NC_006317.1-cand-2620-2699
  source 1..80: mol_type = other DNA
cactatttgaagacagtcatgttctgctgtaagtttttctaggtcaatcaggttggggaacttaactgtataaagaagtc

SEQ ID NO: 28348 - DNA, 80 bp, synthetic construct
  misc_feature 1..80: note = Synthetic: >NC_006317.1-cand-2700-2779
  source 1..80: mol_type = other DNA
ccaaagatgttagtgcctgaacaacatcccccatggtattgtcactttgtttagtcatacaagcgattgtcagtgcaggg

SEQ ID NO: 28349 - DNA, 80 bp, synthetic construct
  misc_feature 1..80: note = Synthetic: >NC_006317.1-cand-2780-2859
  source 1..80: mol_type = other DNA
acagatccaaattgattattcagcctgttcggatcagctacgtcccaaatccttacaacccctggagacctcacttgctg

SEQ ID NO: 28350 - DNA, 80 bp, synthetic construct
  misc_feature 1..80: note = Synthetic: >NC_006317.1-cand-2860-2939
  source 1..80: mol_type = other DNA
ctgttgaaaaccaagtttccttaaaagatcagaccttttggtgagctgtgattgggaaaggtttcccaggtacacacctc

SEQ ID NO: 28351 - DNA, 80 bp, synthetic construct
  misc_feature 1..80: note = Synthetic: >NC_006317.1-cand-2940-3019
  source 1..80: mol_type = other DNA
ctgaggctgatctttctgtttgtccaacttttcttttcagtttctccaggtctgatgcaagatccatcagttcagatttg

SEQ ID NO: 28352 - DNA, 80 bp, synthetic construct
  misc_feature 1..80: note = Synthetic: >NC_006317.1-cand-3020-3099
  source 1..80: mol_type = other DNA
ttgagatcaccaagttttaagattgtgtctctttgggaactcttcatgctcatcaggttgtccacttctttatttaggtc

SEQ ID NO: 28353 - DNA, 80 bp, synthetic construct
  misc_feature 1..80: note = Synthetic: >NC_006317.1-cand-3110-3189
  source 1..80: mol_type = other DNA
tcaagatctccatcattccttttagactttctaaggatcctttgaacaagagagacttgattgaaatcaagaccatcaag

SEQ ID NO: 28354 - DNA, 80 bp, synthetic construct
  misc_feature 1..80: note = Synthetic: >NC_006317.1-cand-3190-3269
  source 1..80: mol_type = other DNA
tatcattttggcatccctcagaacatcggtcttcaccggtgttgtgaactcactgagccctcttctcagggattgagtcc

SEQ ID NO: 28355 - DNA, 80 bp, synthetic construct
  misc_feature 1..80: note = Synthetic: >NC_006317.1-cand-3270-3349
  source 1..80: mol_type = other DNA
atctgaagctggggatttcctttgagttgctcattgtggaaaagacttgctgaccagtaaaggtagacaatttgcctagg

SEQ ID NO: 28356 - DNA, 80 bp, synthetic construct
  misc_feature 1..80: note = Synthetic: >NC_003977.2-cand-0-79
  source 1..80: mol_type = other DNA
ccacaaccttccaccaaactctgcaagatcccagagtgagaggcctgtatttccctgctggtggctccagttcaggaaca

SEQ ID NO: 28357 - DNA, 80 bp, synthetic construct
  misc_feature 1..80: note = Synthetic: >NC_003977.2-cand-90-169
  source 1..80: mol_type = other DNA
ttctgactactgcctctcccttatcgtcaatcttctcgaggattggggaccctgcgctgaacatggagaacatcacatca

SEQ ID NO: 28358 - DNA, 80 bp, synthetic construct
  misc_feature 1..80: note = Synthetic: >NC_003977.2-cand-170-249
  source 1..80: mol_type = other DNA
ggattcctaggaccccttctcgtgttacaggcggggtttttcttgttgacaagaatcctcacaataccgcagagtctaga

SEQ ID NO: 28359 - DNA, 80 bp, synthetic construct
  misc_feature 1..80: note = Synthetic: >NC_003977.2-cand-260-339
  source 1..80: mol_type = other DNA
acttctctcaattttctagggggaactaccgtgtgtcttggccaaaattcgcagtccccaacctccaatcactcaccaac

SEQ ID NO: 28360 - DNA, 80 bp, synthetic construct
  misc_feature 1..80: note = Synthetic: >NC_003977.2-cand-340-419
  source 1..80: mol_type = other DNA
ctcttgtcctccaacttgtcctggttatcgctggatgtgtctgcggcgttttatcatcttcctcttcatcctgctgctat

SEQ ID NO: 28361 - DNA, 80 bp, synthetic construct
  misc_feature 1..80: note = Synthetic: >NC_003977.2-cand-420-499
  source 1..80: mol_type = other DNA
gcctcatcttcttgttggttcttctggactatcaaggtatgttgcccgtttgtcctctaattccaggatcctcaacaacc

SEQ ID NO: 28362 - DNA, 80 bp, synthetic construct
  misc_feature 1..80: note = Synthetic: >NC_003977.2-cand-510-589
  source 1..80: mol_type = other DNA
catgccggacctgcatgactactgctcaaggaacctctatgtatccctcctgttgctgtaccaaaccttcggacggaaat

SEQ ID NO: 28363 - DNA, 80 bp, synthetic construct
  misc_feature 1..80: note = Synthetic: >NC_003977.2-cand-590-669
  source 1..80: mol_type = other DNA
tgcacctgtattcccatcccatcatcctgggctttcggaaaattcctatgggagtgggcctcagcccgtttctcctggct

SEQ ID NO: 28364 - DNA, 80 bp, synthetic construct
  misc_feature 1..80: note = Synthetic: >NC_003977.2-cand-670-749
  source 1..80: mol_type = other DNA
cagtttactagtgccatttgttcagtggttcgtagggctttcccccactgtttggctttcagttatatggatgatgtggt

SEQ ID NO: 28365 - DNA, 80 bp, synthetic construct
  misc_feature 1..80: note = Synthetic: >NC_003977.2-cand-750-829
  source 1..80: mol_type = other DNA
attgggggccaagtctgtacagcatcttgagtccctttttaccgctgttaccaattttcttttgtctttgggtatacatt

SEQ ID NO: 28366 - DNA, 80 bp, synthetic construct
  misc_feature 1..80: note = Synthetic: >NC_003977.2-cand-830-909
  source 1..80: mol_type = other DNA
taaaccctaacaaaacaaagagatggggttactctctaaattttatgggttatgtcattggatgttatgggtccttgcca

SEQ ID NO: 28367 - DNA, 80 bp, synthetic construct
  misc_feature 1..80: note = Synthetic: >NC_003977.2-cand-910-989
  source 1..80: mol_type = other DNA
caagaacacatcatacaaaaaatcaaagaatgttttagaaaacttcctattaacaggcctattgattggaaagtatgtca

SEQ ID NO: 28368 - DNA, 80 bp, synthetic construct
  misc_feature 1..80: note = Synthetic: >NC_003977.2-cand-990-1069
  source 1..80: mol_type = other DNA
acgaattgtgggtcttttgggttttgctgccccttttacacaatgtggttatcctgcgttgatgcctttgtatgcatgta

SEQ ID NO: 28369 - DNA, 80 bp, synthetic construct
  misc_feature 1..80: note = Synthetic: >NC_003977.2-cand-1070-1149
  source 1..80: mol_type = other DNA
ttcaatctaagcaggctttcactttctcgccaacttacaaggcctttctgtgtaaacaatacctgaacctttaccccgtt

SEQ ID NO: 28370 - DNA, 80 bp, synthetic construct
  misc_feature 1..80: note = Synthetic: >NC_003977.2-cand-1150-1229
  source 1..80: mol_type = other DNA
gcccggcaacggccaggtctgtgccaagtgtttgctgacgcaacccccactggctggggcttggtcatgggccatcagcg

SEQ ID NO: 28371 - DNA, 80 bp, synthetic construct
  misc_feature 1..80: note = Synthetic: >NC_003977.2-cand-1230-1309
  source 1..80: mol_type = other DNA
catgcgtggaaccttttcggctcctctgccgatccatactgcggaactcctagccgcttgttttgctcgcagcaggtctg

SEQ ID NO: 28372 - DNA, 80 bp, synthetic construct
  misc_feature 1..80: note = Synthetic: >NC_003977.2-cand-1310-1389
  source 1..80: mol_type = other DNA
gagcaaacattatcgggactgataactctgttgtcctatcccgcaaatatacatcgtttccatggctgctaggctgtgct

SEQ ID NO: 28373 - DNA, 80 bp, synthetic construct
  misc_feature 1..80: note = Synthetic: >NC_003977.2-cand-1390-1469
  source 1..80: mol_type = other DNA
gccaactggatcctgcgcgggacgtcctttgtttacgtcccgtcggcgctgaatcctgcggacgacccttctcggggtcg

SEQ ID NO: 28374 - DNA, 80 bp, synthetic construct
  misc_feature 1..80: note = Synthetic: >NC_003977.2-cand-1470-1549
  source 1..80: mol_type = other DNA
cttgggactctctcgtccccttctccgtctgccgttccgaccgaccacggggcgcacctctctttacgcggactccccgt

SEQ ID NO: 28375 - DNA, 80 bp, synthetic construct
  misc_feature 1..80: note = Synthetic: >NC_003977.2-cand-1550-1629
  source 1..80: mol_type = other DNA
ctgtgccttctcatctgccggaccgtgtgcacttcgcttcacctctgcacgtcgcatggagaccaccgtgaacgcccacc

SEQ ID NO: 28376 - DNA, 80 bp, synthetic construct
  misc_feature 1..80: note = Synthetic: >NC_003977.2-cand-1630-1709
  source 1..80: mol_type = other DNA
aaatattgcccaaggtcttacataagaggactcttggactctcagcaatgtcaacgaccgaccttgaggcatacttcaaa

SEQ ID NO: 28377 - DNA, 80 bp, synthetic construct
  misc_feature 1..80: note = Synthetic: >NC_003977.2-cand-1710-1789
  source 1..80: mol_type = other DNA
gactgtttgtttaaagactgggaggagttgggggaggagattaggttaaaggtctttgtactaggaggctgtaggcataa

SEQ ID NO: 28378 - DNA, 80 bp, synthetic construct
  misc_feature 1..80: note = Synthetic: >NC_003977.2-cand-1800-1879
  source 1..80: mol_type = other DNA
gcaccagcaccatgcaactttttcacctctgcctaatcatctcttgttcatgtcctactgttcaagcctccaagctgtgc

SEQ ID NO: 28379 - DNA, 80 bp, synthetic construct
  misc_feature 1..80: note = Synthetic: >NC_003977.2-cand-1890-1969
  source 1..80: mol_type = other DNA
tttggggcatggacatcgacccttataaagaatttggagctactgtggagttactctcgtttttgccttctgacttcttt

SEQ ID NO: 28380 - DNA, 80 bp, synthetic construct
  misc_feature 1..80: note = Synthetic: >NC_003977.2-cand-1970-2049
  source 1..80: mol_type = other DNA
ccttcagtacgagatcttctagataccgcctcagctctgtatcgggaagccttagagtctcctgagcattgttcacctca

SEQ ID NO: 28381 - DNA, 80 bp, synthetic construct
  misc_feature 1..80: note = Synthetic: >NC_003977.2-cand-2050-2129
  source 1..80: mol_type = other DNA
ccatactgcactcaggcaagcaattctttgctggggggaactaatgactctagctacctgggtgggtgttaatttggaag

SEQ ID NO: 28382 - DNA, 80 bp, synthetic construct
  misc_feature 1..80: note = Synthetic: >NC_003977.2-cand-2130-2209
  source 1..80: mol_type = other DNA
atccagcgtctagagacctagtagtcagttatgtcaacactaatatgggcctaaagttcaggcaactcttgtggtttcac

SEQ ID NO: 28383 - DNA, 80 bp, synthetic construct
  misc_feature 1..80: note = Synthetic: >NC_003977.2-cand-2210-2289
  source 1..80: mol_type = other DNA
atttcttgtctcacttttggaagagaaacagttatagagtatttggtgtctttcggagtgtggattcgcactcctccagc

SEQ ID NO: 28384 - DNA, 80 bp, synthetic construct
  misc_feature 1..80: note = Synthetic: >NC_003977.2-cand-2290-2369
  source 1..80: mol_type = other DNA
ttatagaccaccaaatgcccctatcctatcaacacttccggagactactgttgttagacgacgaggcaggtcccctagaa

SEQ ID NO: 28385 - DNA, 80 bp, synthetic construct
  misc_feature 1..80: note = Synthetic: >NC_003977.2-cand-2370-2449
  source 1..80: mol_type = other DNA
gaagaactccctcgcctcgcagacgaaggtctcaatcgccgcgtcgcagaagatctcaatctcgggaatctcaatgttag

SEQ ID NO: 28386 - DNA, 80 bp, synthetic construct
  misc_feature 1..80: note = Synthetic: >NC_003977.2-cand-2450-2529
  source 1..80: mol_type = other DNA
tattccttggactcataaggtggggaactttactgggctttattcttctactgtacctgtctttaatcctcattggaaaa

SEQ ID NO: 28387 - DNA, 80 bp, synthetic construct
  misc_feature 1..80: note = Synthetic: >NC_003977.2-cand-2530-2609
  source 1..80: mol_type = other DNA
caccatcttttcctaatatacatttacaccaagacattatcaaaaaatgtgaacagtttgtaggcccactcacagttaat

SEQ ID NO: 28388 - DNA, 80 bp, synthetic construct
  misc_feature 1..80: note = Synthetic: >NC_003977.2-cand-2610-2689
  source 1..80: mol_type = other DNA
gagaaaagaagattgcaattgattatgcctgccaggttttatccaaaggttaccaaatatttaccattggataagggtat

SEQ ID NO: 28389 - DNA, 80 bp, synthetic construct
  misc_feature 1..80: note = Synthetic: >NC_003977.2-cand-2690-2769
  source 1..80: mol_type = other DNA
taaaccttattatccagaacatctagttaatcattacttccaaactagacactatttacacactctatggaaggcgggta

SEQ ID NO: 28390 - DNA, 80 bp, synthetic construct
  misc_feature 1..80: note = Synthetic: >NC_003977.2-cand-2770-2849
  source 1..80: mol_type = other DNA
tattatataagagagaaacaacacatagcgcctcattttgtgggtcaccatattcttgggaacaagatctacagcatggg

SEQ ID NO: 28391 - DNA, 80 bp, synthetic construct
  misc_feature 1..80: note = Synthetic: >NC_003977.2-cand-2850-2929
  source 1..80: mol_type = other DNA
gcagaatctttccaccagcaatcctctgggattctttcccgaccaccagttggatccagccttcagagcaaacaccgcaa

SEQ ID NO: 28392 - DNA, 80 bp, synthetic construct
  misc_feature 1..80: note = Synthetic: >NC_003977.2-cand-2930-3009
  source 1..80: mol_type = other DNA
atccagattgggacttcaatcccaacaaggacacctggccagacgccaacaaggtaggagctggagcattcgggctgggt

SEQ ID NO: 28393 - DNA, 80 bp, synthetic construct
  misc_feature 1..80: note = Synthetic: >NC_003977.2-cand-3010-3089
  source 1..80: mol_type = other DNA
ttcaccccaccgcacggaggccttttggggtggagccctcaggctcagggcatactacaaactttgccagcaaatccgcc

SEQ ID NO: 28394 - DNA, 80 bp, synthetic construct
  misc_feature 1..80: note = Synthetic: >NC_003977.2-cand-3090-3169
  source 1..80: mol_type = other DNA
tcctgcctccaccaatcgccagtcaggaaggcagcctaccccgctgtctccacctttgagaaacactcatcctcaggcca

SEQ ID NO: 28395 - DNA, 80 bp, synthetic construct
  misc_feature 1..80: note = Synthetic: >PT0010.8-cand-1310-1389
  source 1..80: mol_type = other DNA
tttacaaattggatctgtcattactgagtgcgaaaaatacatacttaaaaatctttgttttagaaactgtatcgatttct

SEQ ID NO: 28396 - DNA, 80 bp, synthetic construct
  misc_feature 1..80: note = Synthetic: >PT0010.8-cand-1390-1469
  source 1..80: mol_type = other DNA
acatatacgctgataaatataataacaagaaaatagaattagcatcgtttaacacaatattacgaaatattttgagactc

SEQ ID NO: 28397 - DNA, 80 bp, synthetic construct
  misc_feature 1..80: note = Synthetic: >PT0010.8-cand-1470-1549
  source 1..80: mol_type = other DNA
atcaacaatgaaaactttaaatacttaacagaggaatcaatgataaaaattttaagcgatgatatgttatatataaaaaa

SEQ ID NO: 28398 - DNA, 80 bp, synthetic construct
  misc_feature 1..80: note = Synthetic: >PT0010.8-cand-1550-1629
  source 1..80: mol_type = other DNA
tgaggatttcaccccactgattctcattaaatggttagagagtacaccaaccatgtaccgtcgagttacttagatgcctc

SEQ ID NO: 28399 - DNA, 80 bp, synthetic construct
  misc_feature 1..80: note = Synthetic: >PT0010.8-cand-1560-1639
  source 1..80: mol_type = other DNA
accccactgattctcattaaatggttagagagtacaccaaccatgtaccgtcgagttacttagatgcctcagaatatcat

SEQ ID NO: 28400 - DNA, 80 bp, synthetic construct
  misc_feature 1..80: note = Synthetic: >PT0010.8-cand-1570-1649
  source 1..80: mol_type = other DNA
ttctcattaaatggttagagagtacaccaaccatgtaccgtcgagttacttagatgcctcagaatatcatttctttcccc

SEQ ID NO: 28401 - DNA, 80 bp, synthetic construct
  misc_feature 1..80: note = Synthetic: >PT0010.8-cand-1580-1659
  source 1..80: mol_type = other DNA
atggttagagagtacaccaaccatgtaccgtcgagttacttagatgcctcagaatatcatttctttccccacaagttata

SEQ ID NO: 28402 - DNA, 80 bp, synthetic construct
  misc_feature 1..80: note = Synthetic: >PT0010.8-cand-1600-1679
  source 1..80: mol_type = other DNA
ccatgtaccgtcgagttacttagatgcctcagaatatcatttctttccccacaagttataaaatcactttatagtcatcg

SEQ ID NO: 28403 - DNA, 80 bp, synthetic construct
  misc_feature 1..80: note = Synthetic: >PT0010.8-cand-1610-1689
  source 1..80: mol_type = other DNA
tcgagttacttagatgcctcagaatatcatttctttccccacaagttataaaatcactttatagtcatcgactggttagt

SEQ ID NO: 28404 - DNA, 80 bp, synthetic construct
  misc_feature 1..80: note = Synthetic: >PT0002.7-cand-450-529
  source 1..80: mol_type = other DNA
ttcacagactgaagattgtcgagatttgtgtaccaaaaaaggagatgtccatgcggatactttggtggaatagatgaagg

SEQ ID NO: 28405 - DNA, 80 bp, synthetic construct
  misc_feature 1..80: note = Synthetic: >PT0002.7-cand-460-539
  source 1..80: mol_type = other DNA
gaagattgtcgagatttgtgtaccaaaaaaggagatgtccatgcggatactttggtggaatagatgaaggaaatcctatt

SEQ ID NO: 28406 - DNA, 80 bp, synthetic construct
  misc_feature 1..80: note = Synthetic: >PT0002.7-cand-540-619
  source 1..80: mol_type = other DNA
tgtaaatcgtgttgtgttggtgaatattgcgactacctacgtaattatagacttgatccatttcctccatgcaaactatc

SEQ ID NO: 28407 - DNA, 80 bp, synthetic construct
  misc_feature 1..80: note = Synthetic: >PT0002.7-cand-620-699
  source 1..80: mol_type = other DNA
tatctaaatgtaattaattatgattttgatgataatgttaccatacattatatcactacttggttagtgtgtattattta

SEQ ID NO: 28408 - DNA, 80 bp, synthetic construct
  misc_feature 1..80: note = Synthetic: >PT0002.7-cand-1070-1149
  source 1..80: mol_type = other DNA
tacgaagttaatctaagtcatttagattatcaaagtgttaactatttgatcgattacatttatgggatacctttgagcct

SEQ ID NO: 28409 - DNA, 80 bp, synthetic construct
  misc_feature 1..80: note = Synthetic: >PT0002.7-cand-1100-1179
  source 1..80: mol_type = other DNA
caaagtgttaactatttgatcgattacatttatgggatacctttgagcctaactaacaataacgtgaaatatattctttc

SEQ ID NO: 28410 - DNA, 80 bp, synthetic construct
  misc_feature 1..80: note = Synthetic: >PT0002.7-cand-1110-1189
  source 1..80: mol_type = other DNA
actatttgatcgattacatttatgggatacctttgagcctaactaacaataacgtgaaatatattctttcaaccgctgat

SEQ ID NO: 28411 - DNA, 80 bp, synthetic construct
  misc_feature 1..80: note = Synthetic: >PT0002.7-cand-1190-1269
  source 1..80: mol_type = other DNA
ttttttacaaattggatctgtcattactgagtgcgaaaaatacatacttaaaaatctttgttttagaaactgtatcgatt

SEQ ID NO: 28412 - DNA, 80 bp, synthetic construct
  misc_feature 1..80: note = Synthetic: >PT0002.7-cand-1340-1419
  source 1..80: mol_type = other DNA
tattttgagactcatcaacaatgaaaactttaaatacttaacagaggaatcaatgataaaaattttaagcgatgatatgt

SEQ ID NO: 28413 - DNA, 80 bp, synthetic construct
  misc_feature 1..80: note = Synthetic: >PT0002.7-cand-1420-1499
  source 1..80: mol_type = other DNA
tatatataaaaaatgaggatttcaccccactgattctcattaaatggttagagagtacaccaaccatgtaccgtcgagtt

SEQ ID NO: 28414 - DNA, 80 bp, synthetic construct
  misc_feature 1..80: note = Synthetic: >PT0002.7-cand-1500-1579
  source 1..80: mol_type = other DNA
acttagatgcctcagaatatcatttctttccccacaagttataaaatcactttatagtcatcgactggttagttcaatct

SEQ ID NO: 28415 - DNA, 80 bp, synthetic construct
  misc_feature 1..80: note = Synthetic: >PT0003.1-cand-0-79
  source 1..80: mol_type = other DNA
ctggagaatttgccaaggtcagatgtagagttggtagtgataacacaaaatgtgaacactgcccacctcatacatatacc

SEQ ID NO: 28416 - DNA, 80 bp, synthetic construct
  misc_feature 1..80: note = Synthetic: >PT0003.1-cand-80-159
  source 1..80: mol_type = other DNA
gcaatccccaattattctaatagatgtcatcaatgtagaaaatgcccaacaggatcatttgataaggtaaagtgtaccgg

SEQ ID NO: 28417 - DNA, 80 bp, synthetic construct
  misc_feature 1..80: note = Synthetic: >PT0003.1-cand-160-239
  source 1..80: mol_type = other DNA
aacacagaacaaatgttcgtgtcatcctggttggtatacgctactgattcttcacagactgaagattgtcgagatttgtg

SEQ ID NO: 28418 - DNA, 80 bp, synthetic construct
  misc_feature 1..80: note = Synthetic: >PT0010.8-cand-220-299
  source 1..80: mol_type = other DNA
gtactattttacattactacattggctacggcatatatacctatttcgtcacttccacacgctccggtaaacgggtgtca

SEQ ID NO: 28419 - DNA, 80 bp, synthetic construct
  misc_feature 1..80: note = Synthetic: >PT0010.8-cand-300-379
  source 1..80: mol_type = other DNA
tgtgacgagggagaatcttgataagaggcataatcaatgttgtaatccgatgtccacctggagaatttgccaaggtcaga

SEQ ID NO: 28420 - DNA, 80 bp, synthetic construct
  misc_feature 1..80: note = Synthetic: >PT0010.8-cand-310-389
  source 1..80: mol_type = other DNA
gagaatcttgataagaggcataatcaatgttgtaatccgatgtccacctggagaatttgccaaggtcagatgtagagttg

SEQ ID NO: 28421 - DNA, 80 bp, synthetic construct
  misc_feature 1..80: note = Synthetic: >PT0010.8-cand-320-399
  source 1..80: mol_type = other DNA
ataagaggcataatcaatgttgtaatccgatgtccacctggagaatttgccaaggtcagatgtagagttggtagtgataa

SEQ ID NO: 28422 - DNA, 80 bp, synthetic construct
  misc_feature 1..80: note = Synthetic: >PT0010.8-cand-330-409
  source 1..80: mol_type = other DNA
taatcaatgttgtaatccgatgtccacctggagaatttgccaaggtcagatgtagagttggtagtgataacacaaaatgt

SEQ ID NO: 28423 - DNA, 80 bp, synthetic construct
  misc_feature 1..80: note = Synthetic: >PT0010.8-cand-410-489
  source 1..80: mol_type = other DNA
gaacactgcccacctcatacatataccgcaatccccaattattctaatagatgtcatcaatgtagaaaatgcccaacagg

SEQ ID NO: 28424 - DNA, 80 bp, synthetic construct
  misc_feature 1..80: note = Synthetic: >PT0010.8-cand-490-569
  source 1..80: mol_type = other DNA
atcatttgataaggtaaagtgtaccggaacacagaacaaatgttcgtgtcatcctggttggtatacgctactgattcttc

SEQ ID NO: 28425 - DNA, 80 bp, synthetic construct
  misc_feature 1..80: note = Synthetic: >PT0010.8-cand-570-649
  source 1..80: mol_type = other DNA
acagactgaagattgtcgagatttgtgtaccaaaaaaggagatgtccatgcggatactttggtggaatagatgaaggaaa

SEQ ID NO: 28426 - DNA, 80 bp, synthetic construct
  misc_feature 1..80: note = Synthetic: >PT0010.8-cand-580-659
  source 1..80: mol_type = other DNA
gattgtcgagatttgtgtaccaaaaaaggagatgtccatgcggatactttggtggaatagatgaaggaaatcctatttgt

SEQ ID NO: 28427 - DNA, 80 bp, synthetic construct
  misc_feature 1..80: note = Synthetic: >PT0010.8-cand-660-739
  source 1..80: mol_type = other DNA
aaatcgtgttgtgttggtgaatattgcgactacctacgtaattatagacttgatccatttcctccatgcaaactatctat

SEQ ID NO: 28428 - DNA, 80 bp, synthetic construct
  misc_feature 1..80: note = Synthetic: >PT0010.8-cand-990-1069
  source 1..80: mol_type = other DNA
taatatactcttacaacgccatcatgaatagcagtgaattaattgctgttattatggatttagaaatagtggacgatttt

SEQ ID NO: 28429 - DNA, 80 bp, synthetic construct
  misc_feature 1..80: note = Synthetic: >PT0010.8-cand-1070-1149
  source 1..80: mol_type = other DNA
gtgatattaatatagttattaatgatgaaaggataaacgcgcatagactcatcctatctggagcctccgaatattttttc

SEQ ID NO: 28430 - DNA, 80 bp, synthetic construct
  misc_feature 1..80: note = Synthetic: >PT0010.8-cand-1230-1309
  source 1..80: mol_type = other DNA
atttgatcgattacatttatgggatacctttgagcctaactaacaataacgtgaaatatattctttcaaccgctgatttt

SEQ ID NO: 28431 - DNA, 80 bp, synthetic construct
  misc_feature 1..80: note = Synthetic: >PT0009.1-cand-460-539
  source 1..80: mol_type = other DNA
gtatggaagacctattaataattacttatcttttgacgatcttgttataattataatataaaaatacttatgacatagta

SEQ ID NO: 28432 - DNA, 80 bp, synthetic construct
  misc_feature 1..80: note = Synthetic: >PT0009.1-cand-540-619
  source 1..80: mol_type = other DNA
actcataattgctgacgcgataaattcgtaataatctgttttgttcaaatttttataaggaatctacaggcataaaaata

SEQ ID NO: 28433 - DNA, 80 bp, synthetic construct
  misc_feature 1..80: note = Synthetic: >PT0009.1-cand-620-699
  source 1..80: mol_type = other DNA
aaaatataatctataatatactcttacaacgccatcatgaatagcagtgaattaattgctgttattatggatttagaaat

SEQ ID NO: 28434 - DNA, 80 bp, synthetic construct
  misc_feature 1..80: note = Synthetic: >PT0009.1-cand-700-779
  source 1..80: mol_type = other DNA
agtggacgattttgtgatattaatatagttattaatgatgaaaggataaacgcgcatagactcatcctatctggagcctc

SEQ ID NO: 28435 - DNA, 80 bp, synthetic construct
  misc_feature 1..80: note = Synthetic: >PT0009.1-cand-780-859
  source 1..80: mol_type = other DNA
cgaatattttttccattctgttttccaataattttatcgattctaatgaatacgaagttaatctaagtcatttagattat

SEQ ID NO: 28436 - DNA, 80 bp, synthetic construct
  misc_feature 1..80: note = Synthetic: >PT0009.1-cand-940-1019
  source 1..80: mol_type = other DNA
aaccgctgatttttttacaaattggatctgtcattactgagtgcgaaaaatacatacttaaaaatctttgttttagaaac

SEQ ID NO: 28437 - DNA, 80 bp, synthetic construct
  misc_feature 1..80: note = Synthetic: >PT0009.1-cand-1020-1099
  source 1..80: mol_type = other DNA
tgtatcgatttctacatatacgctgataaatataataacaagaaaatagaattagcatcgtttaacacaatattacgaaa

SEQ ID NO: 28438 - DNA, 80 bp, synthetic construct
  misc_feature 1..80: note = Synthetic: >KJ642617.1.1-cand-0-79
  source 1..80: mol_type = other DNA
aacttatgacttaactaacttatgacttaactaacttatgacttaactaacttatgacttaacttatgacttaactaact

SEQ ID NO: 28439 - DNA, 80 bp, synthetic construct
  misc_feature 1..80: note = Synthetic: >KJ642617.1.1-cand-60-139
  source 1..80: mol_type = other DNA
aacttatgacttaactaacttatgacttaactaacttatgacttaactaacttatgacttaactaacttatgacttaact

SEQ ID NO: 28440 - DNA, 80 bp, synthetic construct
  misc_feature 1..80: note = Synthetic: >KJ642617.1.3-cand-0-79
  source 1..80: mol_type = other DNA
gtcataagttagttaagtcataagttagttaagtcataagttagttaagtcataagttagttaagtcataagttagttaa

SEQ ID NO: 28441 - DNA, 80 bp, synthetic construct
  misc_feature 1..80: note = Synthetic: >KJ642617.1.3-cand-60-139
  source 1..80: mol_type = other DNA
ttaagtcataagttagttaagtcataagttaagtcataagttagttaagtcataagttagttaagtcataagttagttaa

SEQ ID NO: 28442 - DNA, 80 bp, synthetic construct
  misc_feature 1..80: note = Synthetic: >PT0004.2-cand-0-79
  source 1..80: mol_type = other DNA
ttttctagatagagtattaaatattaataagaaccgtgggtcatttatacataatctcgggttatcatccattaatataa

SEQ ID NO: 28443 - DNA, 80 bp, synthetic construct
  misc_feature 1..80: note = Synthetic: >PT0001.14-cand-40-119
  source 1..80: mol_type = other DNA
aagtatgctaaaatgtgcgaaccaaaatgtgatatggggttgcgattttaaacggattaatatatgtcataggtggagtc

SEQ ID NO: 28444 - DNA, 80 bp, synthetic construct
  misc_feature 1..80: note = Synthetic: >PT0002.7-cand-80-159
  source 1..80: mol_type = other DNA
tataaagaatttactgactacatgtactattttacattactacattggctacggcatatatacctatttcgtcacttcca

SEQ ID NO: 28445 - DNA, 80 bp, synthetic construct
  misc_feature 1..80: note = Synthetic: >PT0002.7-cand-90-169
  source 1..80: mol_type = other DNA
ttactgactacatgtactattttacattactacattggctacggcatatatacctatttcgtcacttccacacgctccgg

SEQ ID NO: 28446 - DNA, 80 bp, synthetic construct
  misc_feature 1..80: note = Synthetic: >PT0002.7-cand-100-179
  source 1..80: mol_type = other DNA
catgtactattttacattactacattggctacggcatatatacctatttcgtcacttccacacgctccggtaaacgggtg

SEQ ID NO: 28447 - DNA, 80 bp, synthetic construct
  misc_feature 1..80: note = Synthetic: >PT0002.7-cand-180-259
  source 1..80: mol_type = other DNA
tcatgtgacgagggagaatcttgataagaggcataatcaatgttgtaatccgatgtccacctggagaatttgccaaggtc

SEQ ID NO: 28448 - DNA, 80 bp, synthetic construct
  misc_feature 1..80: note = Synthetic: >PT0002.7-cand-190-269
  source 1..80: mol_type = other DNA
agggagaatcttgataagaggcataatcaatgttgtaatccgatgtccacctggagaatttgccaaggtcagatgtagag

SEQ ID NO: 28449 - DNA, 80 bp, synthetic construct
  misc_feature 1..80: note = Synthetic: >PT0002.7-cand-200-279
  source 1..80: mol_type = other DNA
ttgataagaggcataatcaatgttgtaatccgatgtccacctggagaatttgccaaggtcagatgtagagttggtagtga

SEQ ID NO: 28450 - DNA, 80 bp, synthetic construct
  misc_feature 1..80: note = Synthetic: >PT0002.7-cand-210-289
  source 1..80: mol_type = other DNA
gcataatcaatgttgtaatccgatgtccacctggagaatttgccaaggtcagatgtagagttggtagtgataacacaaaa

SEQ ID NO: 28451 - DNA, 80 bp, synthetic construct
  misc_feature 1..80: note = Synthetic: >PT0002.7-cand-290-369
  source 1..80: mol_type = other DNA
tgtgaacactgcccacctcatacatataccgcaatccccaattattctaatagatgtcatcaatgtagaaaatgcccaac

SEQ ID NO: 28452 - DNA, 80 bp, synthetic construct
  misc_feature 1..80: note = Synthetic: >PT0002.7-cand-370-449
  source 1..80: mol_type = other DNA
aggatcatttgataaggtaaagtgtaccggaacacagaacaaatgttcgtgtcatcctggttggtatacgctactgattc

SEQ ID NO: 28453 - DNA, 80 bp, synthetic construct
  source 1..80: mol_type = other DNA
gcggctagctccttttaatgtatggtattgaatataccacaattctaacctttctgatatcaatagttttattgaactat

SEQ ID NO: 28454 - DNA, 80 bp, synthetic construct
  source 1..80: mol_type = other DNA
ggattgtcaactgatagaaagatggatgaagtttcacacgttggaatttaattcgctttcgattctaggatgatgatgac

SEQ ID NO: 28455 - DNA, 80 bp, synthetic construct
  source 1..80: mol_type = other DNA
taatttacgctatttgatcccagctgtcacatcattatattcaggttatgagctcttaatagaaaaattctttgagcggc

SEQ ID NO: 28456 - DNA, 80 bp, synthetic construct
  source 1..80: mol_type = other DNA
aaattctaaatatacagactgcattagagaaggcattacgatgggcttcaggatcatcagaggtcataacaagcacagga

SEQ ID NO: 28457 - DNA, 80 bp, synthetic construct
  source 1..80: mol_type = other DNA
cgagctcaattgtaattacaacatatgcccatactgtgcgtccagactaacttcagatggactagtcagacatgtgactc

SEQ ID NO: 28458 - DNA, 80 bp, synthetic construct
  source 1..80: mol_type = other DNA
accacactactcattctgctagtggtttcattatcgccagttcaatctgctccagttggtcaggagaaagcagtcgaagt

SEQ ID NO: 28459 - DNA, 80 bp, synthetic construct
  source 1..80: mol_type = other DNA
ctaccaggtgagagaaagctacacaagcatgtgcctctttgtattaggaagtgttctctttgcggtatcctggctgataa

SEQ ID NO: 28460 - DNA, 80 bp, synthetic construct
  source 1..80: mol_type = other DNA
agggtttgattgacggtatcggcaacagttttttccctgggctttctgtctgcaaaacatgctctattggcagcataaat

SEQ ID NO: 28461 - DNA, 80 bp, synthetic construct
  source 1..80: mol_type = other DNA
ggtttcgagatagagtctcacaaatgctattgtagtctgttttgttgtccctattgcagagcttgctcatctgacaaaat

SEQ ID NO: 28462 - DNA, 80 bp, synthetic construct
  source 1..80: mol_type = other DNA
tttcctggatagcatagccaaagggatgaaaagtctgttaaattctacgaatttagagacaagcctgtcgattgaggccc

SEQ ID NO: 28463 - DNA, 80 bp, synthetic construct
  source 1..80: mol_type = other DNA
gacaagcctgtcgattgaggccccgtggggagcaatcaatgttcagtcaacctttaaaccaacagtttcagctgccaaca

SEQ ID NO: 28464 - DNA, 80 bp, synthetic construct
  source 1..80: mol_type = other DNA
gattgtcaactgacagaaaaatggatgaagtatcacatgttggaatttaattcgctttcggttcaaaagtgatgatgacg

SEQ ID NO: 28465 - DNA, 80 bp, synthetic construct
  source 1..80: mol_type = other DNA
gagtgtactctcaaaagtagtttctgtaagacatctagaaaatttggtactgagaagagaaaatcatcaggatgtgcttt

SEQ ID NO: 28466 - DNA, 80 bp, synthetic construct
  source 1..80: mol_type = other DNA
tccactcaaaagagttgttgttaaaatcagtactaatagctattggttattcaaaagaaatcgaaaccactgccactgcc

SEQ ID NO: 28467 - DNA, 80 bp, synthetic construct
  source 1..80: mol_type = other DNA
ttcaaaatgcagcctttacaatgtggagattgatgtacctagaacataaactaatgccaattttagatcaaaactttatt

SEQ ID NO: 28468 - DNA, 80 bp, synthetic construct
  source 1..80: mol_type = other DNA
gagcaataataagaatggaaatatgatagaatttaatctgcttgatcaaagaataatatggcagaattggtatgcattta

SEQ ID NO: 28469 - DNA, 80 bp, synthetic construct
  source 1..80: mol_type = other DNA
agtaacccatttaaagggctgtcaactgatagaaaaatggatgaggtctctcaaataggaatttaattcgttgtcgattt

SEQ ID NO: 28470 - DNA, 80 bp, synthetic construct
  source 1..80: mol_type = other DNA
ggctgtcaactgatagaaaaatggatgaggtctctcaaataggaatttaattcgttgtcgatttgagaatgggtataaca

SEQ ID NO: 28471 - DNA, 80 bp, synthetic construct
  source 1..80: mol_type = other DNA
aagacgcaaaattacggcatgtatttaccaataacgggatcactagacgctgtatacacaaattcaactagtgaagaatc

SEQ ID NO: 28472 - DNA, 80 bp, synthetic construct
  source 1..80: mol_type = other DNA
agcagatcttatattgaacgaatggctgtgcaatcctatggatatatcactttactattatcaacaaaatagcgaatcaa

SEQ ID NO: 28473 - DNA, 80 bp, synthetic construct
  source 1..80: mol_type = other DNA
tattaaaaactataattaatacaatggactacataatttttagatttttactactcattgctctgatgtcaccatttgtg

SEQ ID NO: 28474 - DNA, 80 bp, synthetic construct
  source 1..80: mol_type = other DNA
aagttggtggaccgaacgcactagatatcactgctgatccaacaacagtcccacaggttcaaagaattatgcgaataaat

SEQ ID NO: 28475 - DNA, 80 bp, synthetic construct
  source 1..80: mol_type = other DNA
tggaaaaaatggtggcaagtgttttatacagtagttgactatattaatcaaattatacaagttatgtccaaacggtcaag

SEQ ID NO: 28476 - DNA, 80 bp, synthetic construct
  source 1..80: mol_type = other DNA
gtaaataattttagctataacggaggatctttgcccactgattttagcatttcaagatatgaagttattaaagaaaattc

SEQ ID NO: 28477 - DNA, 80 bp, synthetic construct
  source 1..80: mol_type = other DNA
ttaatcagattgtacaggtaatgtccaaaagatcaagatcattaaattctactgcgttttattatagagtatagatatat

SEQ ID NO: 28478 - DNA, 80 bp, synthetic construct
  source 1..80: mol_type = other DNA
cgataatctatggtattgcgccgccgccacaatttaaaaaacgctataatacgaatgacaattcaagaggaatgaattat

SEQ ID NO: 28479 - DNA, 80 bp, synthetic construct
  source 1..80: mol_type = other DNA
gtagcggtactaatttgtgaggcattgaattcaattaaagtcacgcagtctgatgttgcaagtgtactttcaagagtagt

SEQ ID NO: 28480 - DNA, 80 bp, synthetic construct
  source 1..80: mol_type = other DNA
ttccgtaagacatcttgagaatttagtgctaagaagagaaaatcatcaggacgttctttttcactcaaaagagttactac

SEQ ID NO: 28481 - DNA, 80 bp, synthetic construct
  source 1..80: mol_type = other DNA
ttaaatcagttttaatagctattggtcattcaaaagagattgaaacgactgctactgctgaagggggagaaattgttttt

SEQ ID NO: 28482 - DNA, 80 bp, synthetic construct
  source 1..80: mol_type = other DNA
ttcaaaatgcagcatttacgatgtggaagttaacgtacttggaacataaactaatgccaattcttgatcaaaactttatt

SEQ ID NO: 28483 - DNA, 80 bp, synthetic construct
  source 1..80: mol_type = other DNA
gaagacaaaccaatctcagaatcacatgtgaaagaacttattgctgaattgcggtggcaatacaataaatttgcagtaat

SEQ ID NO: 28484 - DNA, 80 bp, synthetic construct
  source 1..80: mol_type = other DNA
tacacatggtaaaggtcactatagagttgtgaaatactcgttagttgcaaatcatgcggatcgagtttacgctactttca

SEQ ID NO: 28485 - DNA, 80 bp, synthetic construct
  source 1..80: mol_type = other DNA
gagtaataccaaaaacggaggtctactggagtttaatttgctggaccaaaggattatatggcaaaattggtacgcattca

SEQ ID NO: 28486 - DNA, 80 bp, synthetic construct
  source 1..80: mol_type = other DNA
ggctgtcaactgatagaaaaatggatgcagtttctcaagtaggaatttaattcgttatctgtgagcggtgagagtcagtt

SEQ ID NO: 28487 - DNA, 80 bp, synthetic construct
  source 1..80: mol_type = other DNA
acatcggatccaactactgcaccacaaactgaacgtatgatgcgagtaaattggaagaaatggtggcaagttttctatac

SEQ ID NO: 28488 - DNA, 80 bp, synthetic construct
  source 1..80: mol_type = other DNA
gacattttgtctctgtgatccccgcacagacgttccactatgccggctcttgctataatcggtgatactctcttgaatgc

SEQ ID NO: 28489 - DNA, 80 bp, synthetic construct
  source 1..80: mol_type = other DNA
ctctgattccccagataattggcatacccgaagatgctctcaagcagtggactttatttactgattgggcaaaactaaat

SEQ ID NO: 28490 - DNA, 80 bp, synthetic construct
  source 1..80: mol_type = other DNA
gacattgatttgaatgctgatgagacatttaaagagattttgaccattggtaagagattggtatcaggtgacatcaccca

SEQ ID NO: 28491 - DNA, 80 bp, synthetic construct
  source 1..80: mol_type = other DNA
gtttgtgtatcggcagtttcgtggaaaattggaagttggatacttcgggaagacggacaatgttcgtgaaaaaccatctt

SEQ ID NO: 28492 - DNA, 80 bp, synthetic construct
  source 1..80: mol_type = other DNA
tctttccgctgttgggagcaggacaaattgagagtttgaaggatctcctttcacgccacttcgaggtctgggtctacttt

SEQ ID NO: 28493 - DNA, 80 bp, synthetic construct
  source 1..80: mol_type = other DNA
gcgccaaagcctgtgattgattggatgatccgtcatgagatagatctggccacagtggagtttgatgttcgtaacatgct

SEQ ID NO: 28494 - DNA, 80 bp, synthetic construct
  source 1..80: mol_type = other DNA
gaaaatgttgtccaacaatccaatcaagtgggagacgttgcttgagaaaatcgccaatgtagctgaaagtcggattacgg

SEQ ID NO: 28495 - DNA, 80 bp, synthetic construct
  source 1..80: mol_type = other DNA
cagatcgggacgaggttggtgaatggcgcccctgggtgattggcctgttaatgatattcggtcagtcattgaagattggt

SEQ ID NO: 28496 - DNA, 80 bp, synthetic construct
  source 1..80: mol_type = other DNA
ggcttgatggctgtttttcttgaagtggaggcagttggggcccgtttgctacaggaacttatcgcgcgtatgaagagtga

SEQ ID NO: 28497 - DNA, 80 bp, synthetic construct
  source 1..80: mol_type = other DNA
ctctcttattgataaatacacaccgccctcaagcaatgctcaaaaccaaggatttacaacatacgtgcactctgttaaac

SEQ ID NO: 28498 - DNA, 80 bp, synthetic construct
  source 1..80: mol_type = other DNA
ccctggagccgtgccgcatcttcaatttgttaacaatgagttgaaggtcgggtggaaggtcgcgccgatacgtcgtgatg

SEQ ID NO: 28499 - DNA, 80 bp, synthetic construct
  source 1..80: mol_type = other DNA
ggcgaaactactccattcgtctcaatgctcgtaatcctcagttaggcggtgcttttacgattgagagcggagcctttaag

SEQ ID NO: 28500 - DNA, 80 bp, synthetic construct
  source 1..80: mol_type = other DNA
taggcggtgcttttacgattgagagcggagcctttaaggtgtagtgtgaacggggctaaggcctggatacaaatgcagtc

SEQ ID NO: 28501 - DNA, 80 bp, synthetic construct
  source 1..80: mol_type = other DNA
aaaataacgctaagagtggaaatgttactgacttcaatctattggaccaaagaataatttggcagaattggtatgcattt

SEQ ID NO: 28502 - DNA, 80 bp, synthetic construct
  source 1..80: mol_type = other DNA
gtagcattgttgatttgtgaagctctcaactcactaaagatcactcaggcagatgttgcaaatgtattgtctcgcgtcgt

SEQ ID NO: 28503 - DNA, 80 bp, synthetic construct
  source 1..80: mol_type = other DNA
gtcagttcgacatttagagaacttagtactaaggaaagaaaaccaccaagatgtactcttccactcaaaagatttactaa

SEQ ID NO: 28504 - DNA, 80 bp, synthetic construct
  source 1..80: mol_type = other DNA
tcgcagtcattacacatgggaaagggcattatagagtagttaaatactcatcagttgctaatcatgcagacagagtttac

SEQ ID NO: 28505 - DNA, 80 bp, synthetic construct
  source 1..80: mol_type = other DNA
aaaataataataaatctggaatttcgtcagacttcgatcttcttgatcagagaataatttggcaaaactggtatgcgttc

SEQ ID NO: 28506 - DNA, 80 bp, synthetic construct
  source 1..80: mol_type = other DNA
catttagaggtctgtcaactgataggaaaatggatgaagtctctcaagtaggtgtttaattcgctttcaattcgaagttg

SEQ ID NO: 28507 - DNA, 80 bp, synthetic construct
  source 1..80: mol_type = other DNA
ctgtcaactgatagaaagatggatgaagtctctcaagtaggcgtttaattcgctttcaattcaaagttgatggtgactta

SEQ ID NO: 28508 - DNA, 80 bp, synthetic construct
  source 1..80: mol_type = other DNA
aaaataatgctaaaagtggtaatattactgacttcaatttgttagaccaaagaattatttggcaaaattggtacgcattc

SEQ ID NO: 28509 - DNA, 80 bp, synthetic construct
  source 1..80: mol_type = other DNA
gaaacaactatgttcaataaggtggctaatttaatttgtgaagcacttaattcaattaaagttactcaatctgacgttgc

SEQ ID NO: 28510 - DNA, 80 bp, synthetic construct
  source 1..80: mol_type = other DNA
ttgtcaactgatagaaagatggatgaagtttcgcatgttggagtttaattcgctttcgattcaaggatgatgataacgga

SEQ ID NO: 28511 - DNA, 80 bp, synthetic construct
  source 1..80: mol_type = other DNA
gaaacggttatgtttaataaggtggctgtcttaatttgtgaagcacttaattcaatcaaagtcacacaatctgaaattgc

SEQ ID NO: 28512 - DNA, 80 bp, synthetic construct
  source 1..80: mol_type = other DNA
aattatggtatgtacttaccaataactggatcactagacgctgtatatacaaattcaactagtggagaatcatttctaac

SEQ ID NO: 28513 - DNA, 80 bp, synthetic construct
  source 1..80: mol_type = other DNA
ttcaacgctatgtttatactatccaacagaagctaaaaatgagatttcagataatgaatgggaaaatactctatcgcaat

SEQ ID NO: 28514 - DNA, 80 bp, synthetic construct
  source 1..80: mol_type = other DNA
caactatattgtgattataatgtagtattgatgagatatgataatacgtctgaattagatgcatcggagttagcagatct

SEQ ID NO: 28515 - DNA, 80 bp, synthetic construct
  source 1..80: mol_type = other DNA
tatattgaacgaatggctgtgcaatcctatggatatatcactttactattatcaacaaaatagcgaatcaaataaatgga

SEQ ID NO: 28516 - DNA, 80 bp, synthetic construct
  source 1..80: mol_type = other DNA
tatcaatgggaacagattgtacggtaaaagtttgtccactcaatactcaaactttaggaattggatgcaaaactacagac

SEQ ID NO: 28517 - DNA, 80 bp, synthetic construct
  source 1..80: mol_type = other DNA
gtggatacatttgagattgttgcctcatctgaaaaattggtaattactgatgttgtaaatggcgttaatcataaaataaa

SEQ ID NO: 28518 - DNA, 80 bp, synthetic construct
  source 1..80: mol_type = other DNA
tatttcaataagtacgtgtactatacgtaattgtaataaactaggaccacgagaaaatgttgctataattcaagttggtg

SEQ ID NO: 28519 - DNA, 80 bp, synthetic construct
  source 1..80: mol_type = other DNA
ctataactaatacgatggactatataattttcaagtttttattactcattgctctaatatcaccatttgtgaggacgcaa

SEQ ID NO: 28520 - DNA, 80 bp, synthetic construct
  source 1..80: mol_type = other DNA
gaccgaacgcactagatatctctgctgatccaacaacagttccacaggttcaaagaatcatgcgagtaaattggaaaaaa

SEQ ID NO: 28521 - DNA, 80 bp, synthetic construct
  source 1..80: mol_type = other DNA
tggtggcaagtgttttatacagtagttgactatatcaaccaaattatacaagttatgtccaaacggtcaagatcattaga

SEQ ID NO: 28522 - DNA, 80 bp, synthetic construct
  source 1..80: mol_type = other DNA
gagtaataacaagaatgggagtccactggattttaatttgcttgaccaaaggataatatggcaaaattggtacgcattta

SEQ ID NO: 28523 - DNA, 80 bp, synthetic construct
  source 1..80: mol_type = other DNA
gagtaataacaaaaacggaggtctattggagtttaatctacttgatcagaggataatatggcaaaattggtacgcattta

SEQ ID NO: 28524 - DNA, 80 bp, synthetic construct
  source 1..80: mol_type = other DNA
ccaaaatgtagcatttacaatgtggaaattgacatacttggaacataaactaatgccaattcttgatccaaactttattg

SEQ ID NO: 28525 - DNA, 80 bp, synthetic construct
  source 1..80: mol_type = other DNA
ctgtcaactgatagaaaaatggatgaggtttctcaaataggaatctaattcgttatctgtttgaaggtgggtatggcgaa

SEQ ID NO: 28526 - DNA, 80 bp, synthetic construct
  source 1..80: mol_type = other DNA
cattattaactcttcttttgaagctgcagttgtcgctgcaacttctacattggaattaatgggtattcagtatgattata

SEQ ID NO: 28527 - DNA, 80 bp, synthetic construct
  source 1..80: mol_type = other DNA
agtctacacagcagatggctagctcgattattaacacttcttttgaagccgcagtcgttgctgccacttcaactcttgaa

SEQ ID NO: 28528 - DNA, 80 bp, synthetic construct
  source 1..80: mol_type = other DNA
taattaagtgtactagattaatgagagataagattgaacgtggtgaagttgaagtggatgattcgttcgttgaagaaaag

SEQ ID NO: 28529 - DNA, 80 bp, synthetic construct
  source 1..80: mol_type = other DNA
aatagtcacataatatgattaacttaccgtcttcacatgaccctctatgagcacaatagttaaaagctaacactgtcaaa

SEQ ID NO: 28530 - DNA, 80 bp, synthetic construct
  source 1..80: mol_type = other DNA
ctgtcaactgatagaaagatggatgaggtttctcaaataggaatttaattcgttatcgatttgataatgggcatgacaaa

SEQ ID NO: 28531 - DNA, 80 bp, synthetic construct
  source 1..80: mol_type = other DNA
gagaattttatgacttccactttatgcttatattatccaagttcagttacgactgaaataactgatcccgactggacgaa

SEQ ID NO: 28532 - DNA, 80 bp, synthetic construct
  source 1..80: mol_type = other DNA
ttatatattaaaatcaataactaatatgatggactttatcatatatcggtttttactaatagttgttgtcatactgccat

SEQ ID NO: 28533 - DNA, 80 bp, synthetic construct
  source 1..80: mol_type = other DNA
aggggcatattgcttctgcgactcagaaaacacgcaactcagcgaggcgtacgtcgatcgatcggacgtatgcaggcatg

SEQ ID NO: 28534 - DNA, 80 bp, synthetic construct
  source 1..80: mol_type = other DNA
tttccagacatgtcgggcaccgcactatcatgggtgcagaaaatctcgggtggtctggtggccttcgcaatcggcgctat

SEQ ID NO: 28535 - DNA, 80 bp, synthetic construct
  source 1..80: mol_type = other DNA
cggagcttattgcttttgtgataccgagaacacgcaagtgagtaaagcatatgtcatgaaatcagacgactgcacccaaa

SEQ ID NO: 28536 - DNA, 80 bp, synthetic construct
  source 1..80: mol_type = other DNA
gccaccatctatgttaatggagagactcctattaactttaatggagtgaaattggttgcaggccctttatcgactgcctg

SEQ ID NO: 28537 - DNA, 80 bp, synthetic construct
  source 1..80: mol_type = other DNA
gagcatttggagacatccaagcgaggactacctccagcgccgacctgtatgcaaatacgaacctggtgctacagcgtcct

SEQ ID NO: 28538 - DNA, 80 bp, synthetic construct
  source 1..80: mol_type = other DNA
aaatctggctccatccatgtcccatacactcaggccccttccggattttcccagtgggtgaaggacaaaccgccctcttt

SEQ ID NO: 28539 - DNA, 80 bp, synthetic construct
  source 1..80: mol_type = other DNA
gaagtacaccgcgccgtttgggtgcgaggtacatgtaaaccctgtgagggccgagaattgtgctgtggggtctatccctc

SEQ ID NO: 28540 - DNA, 80 bp, synthetic construct
  source 1..80: mol_type = other DNA
tgtcttttgacatccccgatgccttgttcaccagggtatctgaaacaccgacgttgtccaccgcagagtgtacgcttaat

SEQ ID NO: 28541 - DNA, 80 bp, synthetic construct
  source 1..80: mol_type = other DNA
tgcatataccatccggcacagccacactgagggaatctatagtcgaaataaccccagaaggtactcaaaccttccacttc

SEQ ID NO: 28542 - DNA, 80 bp, synthetic construct
  source 1..80: mol_type = other DNA
tcgacagccagcattcacccagactttaaaatacagatttgtaccactatggtgcattgtagtggggactgtcacccccc

SEQ ID NO: 28543 - DNA, 80 bp, synthetic construct
  source 1..80: mol_type = other DNA
attacgcatccgcgtacaaagcacacactgcgtccgtgcaagctcagttgaacgttacggtgggggaccactttaccaca

SEQ ID NO: 28544 - DNA, 80 bp, synthetic construct
  source 1..80: mol_type = other DNA
aaaagatcatattgtgacacagccccagcgacacgtccaaacctacaccgccgcggtatctaagaccgcatggacgtggt

SEQ ID NO: 28545 - DNA, 80 bp, synthetic construct
  source 1..80: mol_type = other DNA
accgccgcggtatctaagaccgcatggacgtggttaacatcattgctgggagggtcggcgttaataatcatcattggcct

SEQ ID NO: 28546 - DNA, 80 bp, synthetic construct
  source 1..80: mol_type = other DNA
cggcgcatactgcttctgtgactctgaaaacacccaactcagccgcgcgtatgtgacaaaatctgacgactgctcagctg

SEQ ID NO: 28547 - DNA, 80 bp, synthetic construct
  source 1..80: mol_type = other DNA
gcagtggtgtacgtgaatggtgaaacgcctattagttttaatggcatcagattggtcgcaggtcctttatctactgcttg

SEQ ID NO: 28548 - DNA, 80 bp, synthetic construct
  source 1..80: mol_type = other DNA
gacgccgtttgacaggaaggtggtgcagtacgctggagagatatataattatgatttcccagagtacggagcaggacacg

SEQ ID NO: 28549 - DNA, 80 bp, synthetic construct
  source 1..80: mol_type = other DNA
ccggagcattcggagatcttcaagccagaacgacaaccagcaatgacctgtatgccaacaccaatttggtgttgcaaaga

SEQ ID NO: 28550 - DNA, 80 bp, synthetic construct
  source 1..80: mol_type = other DNA
cccaccgccggaaccattcacgtgccttacacgcaggcaccatcaggctttgaacagtggaagaaagacaagcctccatc

SEQ ID NO: 28551 - DNA, 80 bp, synthetic construct
  source 1..80: mol_type = other DNA
actgaagtatacagcaccatttggatgtgagatctatgtgaatcctgtcagagctgaaaattgtgccgtgggatctatac

SEQ ID NO: 28552 - DNA, 80 bp, synthetic construct
  source 1..80: mol_type = other DNA
cattagccttcgacatacccgacgccttgtttaccagggtgtctgaaacaccgacactgtcgaacgcagagtgctccttg

SEQ ID NO: 28553 - DNA, 80 bp, synthetic construct
  source 1..80: mol_type = other DNA
aatgagtgcgtatactcatctgattttggcgggatcgccactgtcaagtacacagcgagtaaatcaggcaaatgtgcagt

SEQ ID NO: 28554 - DNA, 80 bp, synthetic construct
  source 1..80: mol_type = other DNA
acatattccctcaggcacggcgactctgaaagaatcactagtggatgtggtagaacaaggatccctgacccttcattttt

SEQ ID NO: 28555 - DNA, 80 bp, synthetic construct
  source 1..80: mol_type = other DNA
atcacgctctagcttacaaagcccacaccgcctcagttcaggcgttcttgaatatcactgtgggagagcagtcaacaaca

SEQ ID NO: 28556 - DNA, 80 bp, synthetic construct
  source 1..80: mol_type = other DNA
caactgccaatatacatccggaatttaaacttcagatatgtacaacgcatcttacatgcaaaggcgattgtcatccgcct

SEQ ID NO: 28557 - DNA, 80 bp, synthetic construct
  source 1..80: mol_type = other DNA
aaagaccatatagtaacacacccacagctccacgcccagacatttacagccgcggtctctaagaccgcatggacgtggtt

SEQ ID NO: 28558 - DNA, 80 bp, synthetic construct
  source 1..80: mol_type = other DNA
cggcgcgtactgtttctgcgatgcagaaaacactcaggtgagtagagcatacgtaacgaaatctgacgattgctccacag

SEQ ID NO: 28559 - DNA, 80 bp, synthetic construct
  source 1..80: mol_type = other DNA
ctgcagtagtgtacgtgaatggagagactcctatcagcttcaacggagtcaaactggtggcaggaccgctttcgactgcc

SEQ ID NO: 28560 - DNA, 80 bp, synthetic construct
  source 1..80: mol_type = other DNA
gcaagtacgaatctgatactgcaaagaccgaacgccggtacaatccatgtcccatacactcaggcaccttcgggttttga

SEQ ID NO: 28561 - DNA, 80 bp, synthetic construct
  source 1..80: mol_type = other DNA
cgccttttgggtgcgagattctcataaatccagtgagggctgagaactgtgccgtgggatcaattccactagcatttgac

SEQ ID NO: 28562 - DNA, 80 bp, synthetic construct
  source 1..80: mol_type = other DNA
attccagacgccctgtttaccagggtatcagaaacaccgactttgtcagatgctgggtgctctttaaatgaatgcgtgta

SEQ ID NO: 28563 - DNA, 80 bp, synthetic construct
  source 1..80: mol_type = other DNA
tcaacagccaacatacacccggagttcaaacttcaaatttgcacaaccacaattacatgcaaaggtgactgtcacccacc

SEQ ID NO: 28564 - DNA, 80 bp, synthetic construct
  source 1..80: mol_type = other DNA
taaagaccacattgtaacacgtccacaacaccacgcccaaacattcacagcggcagtctctaagactgcgtggacgtggc

SEQ ID NO: 28565 - DNA, 80 bp, synthetic construct
  source 1..80: mol_type = other DNA
aggagcacagtgtttttgcgacagcgagaacacccagatgagcgaggcgtacgtcaaactgtcagcggactgcgtaacgg

SEQ ID NO: 28566 - DNA, 80 bp, synthetic construct
  source 1..80: mol_type = other DNA
ctggctagcggttagctccttttaatgtatggtattgaatataccacaattctaacctttctgatatcatttattttatt

SEQ ID NO: 28567 - DNA, 80 bp, synthetic construct
  source 1..80: mol_type = other DNA
ggctagcggttagctccttttaatgtacggtattgaatataccacagttttaacctttttgatatcagttatattgttga

SEQ ID NO: 28568 - DNA, 80 bp, synthetic construct
  source 1..80: mol_type = other DNA
ctccttaatgcacaaaattatggaataaatcttccgattactggctcaatggacacaccatatacgaactcaacgcgaga

SEQ ID NO: 28569 - DNA, 80 bp, synthetic construct
  source 1..80: mol_type = other DNA
atacactttctcagctatttttaatcaaaggatggccaacaggatctgtttattttaaagattatactgatattgcctcg

SEQ ID NO: 28570 - DNA, 80 bp, synthetic construct
  source 1..80: mol_type = other DNA
attcaataaaaagggaaggagcagatagagcatcaattcgaaaacaattgtttttaacacctatatcaaataaaagacta

SEQ ID NO: 28571 - DNA, 80 bp, synthetic construct
  source 1..80: mol_type = other DNA
aatatatttaatgatgaagaatcaggtgaagaggttgaaaatgctattgctagcaagtatcctgatatattctgttctgc

SEQ ID NO: 28572 - DNA, 80 bp, synthetic construct
  source 1..80: mol_type = other DNA
tgaaaatagaagagacagagttcatgaagatggatttaggattttatcagcgacaatgctagccatagactctgatattg

SEQ ID NO: 28573 - DNA, 80 bp, synthetic construct
  source 1..80: mol_type = other DNA
taaatgtgaaatagtaagagcgactgaggacgctattattgctaaatttgaaccagtttcagaacatttatgtataggaa

SEQ ID NO: 28574 - DNA, 80 bp, synthetic construct
  source 1..80: mol_type = other DNA
tgtattctataaagcttttccaataaagaaagaacagccaatggtctatggaattaaagctctgttaggtatatctaata

SEQ ID NO: 28575 - DNA, 80 bp, synthetic construct
  source 1..80: mol_type = other DNA
catgaaccatggtcatggccatttgaggactgttccatattccgaaatcaataatgcgattagatctttcgcaaaaaaga

SEQ ID NO: 28576 - DNA, 80 bp, synthetic construct
  source 1..80: mol_type = other DNA
gatcaaaagaattcgctctgactcattgtcacccaatgcaggtgaaaagttcattaatatgtgtgatatgttgttacaga

SEQ ID NO: 28577 - DNA, 80 bp, synthetic construct
  source 1..80: mol_type = other DNA
tcatcgttaagactgacgaaggttggattccatctgataactgtcccgctttagatagatttaaaactaagactgaaaaa

SEQ ID NO: 28578 - DNA, 80 bp, synthetic construct
  source 1..80: mol_type = other DNA
tgagactattatagctaaaataatgaaaaacgataaaaattagatgttatcagcaacattctgatcgaaaaaaaactaag

SEQ ID NO: 28579 - DNA, 80 bp, synthetic construct
  source 1..80: mol_type = other DNA
ctagcggttagctctttttaatgtatggtattgaatataccacaattctgaccattttgatatttatcatattattgaat

SEQ ID NO: 28580 - DNA, 80 bp, synthetic construct
  source 1..80: mol_type = other DNA
tgtaaggacacaaaattatggcatgtatttaccaataacgggatcactagacgctgtatatacgaattcgactagtggag

SEQ ID NO: 28581 - DNA, 80 bp, synthetic construct
  source 1..80: mol_type = other DNA
agccatttttaacttcgacgctatgtttatactatccagcagaagctaaaaatgagatttcagatgatgaatgggaaaat

SEQ ID NO: 28582 - DNA, 80 bp, synthetic construct
  source 1..80: mol_type = other DNA
actctatcacaattatttttaactaaaggatggccaattggatcagtttattttaaagactacaatgatattaatacatt

SEQ ID NO: 28583 - DNA, 80 bp, synthetic construct
  source 1..80: mol_type = other DNA
ttctgtgaatccacaactatattgtgattataatgtagtattgatgagatatgacaatacatctgaattagatgcatcag

SEQ ID NO: 28584 - DNA, 80 bp, synthetic construct
  source 1..80: mol_type = other DNA
tcaaataaatggatatcgatgggaacagactgcacggtaaaagtttgtccactcaatacacaaaccctagggattggatg

SEQ ID NO: 28585 - DNA, 80 bp, synthetic construct
  source 1..80: mol_type = other DNA
caaaactacggatgtaaacacatttgagattgttgcgtcgtctgaaaaattagtaattactgacgttgtaaatggtgcta

SEQ ID NO: 28586 - DNA, 80 bp, synthetic construct
  source 1..80: mol_type = other DNA
accataagataaatatttcaataaatacgtgcactatacgtaactgtaataaattaggaccacgagaaaatgttgctata

SEQ ID NO: 28587 - DNA, 80 bp, synthetic construct
  source 1..80: mol_type = other DNA
tatattttaaaaactacaactaatacgatggactacataattttcaggtttttactactcattgctttaatatcaccatt

SEQ ID NO: 28588 - DNA, 80 bp, synthetic construct
  source 1..80: mol_type = other DNA
attcaagtgggtggaccgaacgcattagatatcactgctgatccaacaacagtcccacaagttcaaagaatcatgcgaat

SEQ ID NO: 28589 - DNA, 80 bp, synthetic construct
  source 1..80: mol_type = other DNA
aaattggaaaaaatggtggcaagtattttatacagtagttgactatattaaccaagttatacaagtcatgtccaaaagat

SEQ ID NO: 28590 - DNA, 80 bp, synthetic construct
  source 1..80: mol_type = other DNA
ttaaccaagttatacaagtcatgtccaaaagatcaagatcattagacgcagctgctttttattatagaatttagatatag

SEQ ID NO: 28591 - DNA, 80 bp, synthetic construct
  source 1..80: mol_type = other DNA
tatatattaaaaactataactaatacgatggactatataatttttaggtttttactactcatcgctctgatgtcaccatt

SEQ ID NO: 28592 - DNA, 80 bp, synthetic construct
  source 1..80: mol_type = other DNA
tgtgaggacgcaaaattatggtatgcatttaccaataacaggatcactaaacgctgtatacacaaattcaactagtggag

SEQ ID NO: 28593 - DNA, 80 bp, synthetic construct
  source 1..80: mol_type = other DNA
caaaactacggacgtggatacacttgagattgttgcgtcgtctgaaaaattggtaattactgatgttgtaaatggtgtta

SEQ ID NO: 28594 - DNA, 80 bp, synthetic construct
  source 1..80: mol_type = other DNA
gaaagcaaaaatttttgaaaagaagagaagctgaacgtgttaaatccgctgaaatgggttaacggctatttttaaaaccc

SEQ ID NO: 28595 - DNA, 80 bp, synthetic construct
  source 1..80: mol_type = other DNA
acgaaaagtacaataattgggttattaaggcaaggaaagtaaacgaaaacatgagctctcttcagaatgttatttcgcaa

SEQ ID NO: 28596 - DNA, 80 bp, synthetic construct
  source 1..80: mol_type = other DNA
caataatttatggcattgcgccgccaccacaattcaaaaaacgttacaatacaaatgacaattcaagaggaatgaattat

SEQ ID NO: 28597 - DNA, 80 bp, synthetic construct
  source 1..80: mol_type = other DNA
ttctgtaagacaccttgagaatttagtattgagaagagagaaccatcaggacgttctttttcattcaaaggagctactac

SEQ ID NO: 28598 - DNA, 80 bp, synthetic construct
  source 1..80: mol_type = other DNA
tcaaatcagttttaatagctattggtcaatctaaagagattgaaacaactgccactgctgagggaggagaaattgttttc

SEQ ID NO: 28599 - DNA, 80 bp, synthetic construct
  source 1..80: mol_type = other DNA
gaagacaaaccaatctcagagtcacatgtaaaagaattaattgctgaattgcggtggcagtataacaagtttgctgtaat

SEQ ID NO: 28600 - DNA, 80 bp, synthetic construct
  source 1..80: mol_type = other DNA
tacacatggtaaaggtcattatagagttgtgaagtattcgtcagttgcgaatcatgcagacagagtttatgctactttca

SEQ ID NO: 28601 - DNA, 80 bp, synthetic construct
  source 1..80: mol_type = other DNA
gagtaataataagaatggaagtgcactggaatttaacttgcttgaccaaagaataatatggcagaattggtatgcgttca

SEQ ID NO: 28602 - DNA, 80 bp, synthetic construct
  source 1..80: mol_type = other DNA
tgatagaaagatggatgaagtttctcaagtaggaatttaattcgttatctgtttgaaagtgggtatggcgaagtaagaat

SEQ ID NO: 28603 - DNA, 80 bp, synthetic construct
  source 1..80: mol_type = other DNA
attttcaatcagatacacaagcacagggatgtctggagaatttcgggcctttgaagtttaaaatgaattacataccagca

SEQ ID NO: 28604 - DNA, 80 bp, synthetic construct
  source 1..80: mol_type = other DNA
acgagacgactatgtttaataaagtggccatcttaatttgtgaagcacttaattcaatcaaagttacacaatctgaagtt

SEQ ID NO: 28605 - DNA, 80 bp, synthetic construct
  source 1..80: mol_type = other DNA
agccatcagtccctcaagaattccgcatttacgatgacgtgatcataaatgatgaccaaggactcttcaaagttctgtag

SEQ ID NO: 28606 - DNA, 80 bp, synthetic construct
  source 1..80: mol_type = other DNA
ccatggctgagctagcttgcttttgttatcctcatttggagaacgatagctataaatttattccttttaataatttagca

SEQ ID NO: 28607 - DNA, 80 bp, synthetic construct
  source 1..80: mol_type = other DNA
acacttatacctatgagtaaacatagcatattaccatcttcacgtaaccctctatgagcacaatagttaaaagctaacac

SEQ ID NO: 28608 - DNA, 80 bp, synthetic construct
  source 1..80: mol_type = other DNA
tgaataataacaaaaacggaagtccactggagtttaatttgcttgatcagagaataatatggcaaaattggtacgcattt

SEQ ID NO: 28609 - DNA, 80 bp, synthetic construct
  source 1..80: mol_type = other DNA
aactgatagaaaaatggatgaagtttctcaagtaggaatctaattcgttatctgtttgaaggtgggtatggcagagcaag

SEQ ID NO: 28610 - DNA, 80 bp, synthetic construct
  source 1..80: mol_type = other DNA
tcgccagatggtaagctctattattaacacttcttttgaagctgcagttgttgctgccacttcaacattagaattaatgg

SEQ ID NO: 28611 - DNA, 80 bp, synthetic construct
  source 1..80: mol_type = other DNA
taacatcattaaccatctacacatgaccctctatgagcacaatagtttaaaagctaacactgtcaaaactatgctagtgg

SEQ ID NO: 28612 - DNA, 80 bp, synthetic construct
  source 1..80: mol_type = other DNA
ggatagctccttttaatgtatggtattgaatataccacagttctattttatttgatatcattcgttcttgtgagttatat

SEQ ID NO: 28613 - DNA, 80 bp, synthetic construct
  source 1..80: mol_type = other DNA
atgcacaaaattatggaataaatttgccaattactggatctatggatatagcatatactaattcaacacaagacaataat

SEQ ID NO: 28614 - DNA, 80 bp, synthetic construct
  source 1..80: mol_type = other DNA
tttttatcttcaactttatgtctatattatccatcagaagctccaactcaaattagtgatactgaatggaaagatacatt

SEQ ID NO: 28615 - DNA, 80 bp, synthetic construct
  source 1..80: mol_type = other DNA
atctcagctgtttttaactaaaggatggccgacaggttcagtttattttaatgagtactcaaacgttttagaattttcca

SEQ ID NO: 28616 - DNA, 80 bp, synthetic construct
  source 1..80: mol_type = other DNA
tcgacccaaagctatactgtgattataatgtcgtgctaattagattcgtttctggtgaggagttggacatatccgaatta

SEQ ID NO: 28617 - DNA, 80 bp, synthetic construct
  source 1..80: mol_type = other DNA
gctgatctaatactgaatgagtggttatgtaatccaatggatataacattatattattatcaacaaactggagaggcaaa

SEQ ID NO: 28618 - DNA, 80 bp, synthetic construct
  source 1..80: mol_type = other DNA
tctgaaaactataataaagataatggactatattatttatagaataacatttgtaattgtagtattatcagtattgtcga

SEQ ID NO: 28619 - DNA, 80 bp, synthetic construct
  source 1..80: mol_type = other DNA
cggctgatcccacaacctctccacaaacagaacgaatgatgcgcgtgaactggaaaaaatggtggcaagtgttctataca

SEQ ID NO: 28620 - DNA, 80 bp, synthetic construct
  source 1..80: mol_type = other DNA
tagtacaagtaatgtccaaaagatcgagatcgttagattcgtcatctttctattatagagtgtagatatatcctaaaata

SEQ ID NO: 28621 - DNA, 80 bp, synthetic construct
  source 1..80: mol_type = other DNA
tattcttaatgtttaagggattaatgaggcaatgcaactatgaatacacgtacgaatagtcacataatataactaaaatt

SEQ ID NO: 28622 - DNA, 80 bp, synthetic construct
  source 1..80: mol_type = other DNA
caactgatagaaagatggatgaagtctcacaagtaggaatttaattcgttatcgatttgaggatgggtatgacgaagcaa

SEQ ID NO: 28623 - DNA, 80 bp, synthetic construct
  source 1..80: mol_type = other DNA
tagttatagttatattatcaccactccttaatgcacaaaattatggaataaatcttccgattactggctcaatggacaca

SEQ ID NO: 28624 - DNA, 80 bp, synthetic construct
  source 1..80: mol_type = other DNA
ccatatacgaactcaacacgagaggaagtattcctaacttcgactttatgtttgtattacccaactgaagcagcaacaga

SEQ ID NO: 28625 - DNA, 80 bp, synthetic construct
  source 1..80: mol_type = other DNA
gtggttatgtaatcctatggatattacgttgtattattaccaacaaactgatgaggcaaataaatggatttcaatgggat

SEQ ID NO: 28626 - DNA, 80 bp, synthetic construct
  source 1..80: mol_type = other DNA
tccgtttaagggactgtcaactgatagaaagatggatgaggtttctcaaataggaatttaattcgttatcgatttgagaa

SEQ ID NO: 28627 - DNA, 80 bp, synthetic construct
  source 1..80: mol_type = other DNA
tctttgtcaatgcacagaattatgggataaatttaccaataactggatcaatggatatagcatacgtgaacgccatagag

SEQ ID NO: 28628 - DNA, 80 bp, synthetic construct
  source 1..80: mol_type = other DNA
gatgaaccaattctaacgtcaacgttatgtttatattacccaacggaagctagaacagaaataaatgataatgagtggat

SEQ ID NO: 28629 - DNA, 80 bp, synthetic construct
  source 1..80: mol_type = other DNA
gagtacactatcacagttgtttttaacaaagggatggccaactggttcagtatactttaaagagtacgacgatatagcta

SEQ ID NO: 28630 - DNA, 80 bp, synthetic construct
  source 1..80: mol_type = other DNA
ctttctcagtagatccacaactgtattgtgactataatatagttttaatgcgatacaattcaagcttggaactagacatg

SEQ ID NO: 28631 - DNA, 80 bp, synthetic construct
  source 1..80: mol_type = other DNA
aataaaagtgtgtccattgaacactcaaacactagggataggatgtcagacaacaaatactagaacatttgaagaagtgg

SEQ ID NO: 28632 - DNA, 80 bp, synthetic construct
  source 1..80: mol_type = other DNA
caacagctgaaaaactagtaatcactgacgtagttgacggtgtgaatcataaattggatgttactaccgcaacttgtact

SEQ ID NO: 28633 - DNA, 80 bp, synthetic construct
  source 1..80: mol_type = other DNA
attagaaattgcaagaagctagggccaagagagaatgtggccgtaatacaagttggtggtgctgacatacttgatataac

SEQ ID NO: 28634 - DNA, 80 bp, synthetic construct
  source 1..80: mol_type = other DNA
caattatatattaaagagtataactagaatgatggactatataatttataaatttttacttatagtcacaattacttcaa

SEQ ID NO: 28635 - DNA, 80 bp, synthetic construct
  source 1..80: mol_type = other DNA
aaccaaattgtacaagcgatgtccaaaaggtccagatcactagattccgcagcgttttactatagagtatagatattatc

SEQ ID NO: 28636 - DNA, 80 bp, synthetic construct
  source 1..80: mol_type = other DNA
ctttctcagtagatccacaactgtattgcgactataacatagttctgatgcgctataattcgagtttagaactagacatg

SEQ ID NO: 28637 - DNA, 80 bp, synthetic construct
  source 1..80: mol_type = other DNA
tctttgtcaatgcacagaattatgggataaatttaccaataactggatcaatggatgtatcatatgcaaatactacaaag

SEQ ID NO: 28638 - DNA, 80 bp, synthetic construct
  source 1..80: mol_type = other DNA
acggttagctccttttaatgtatggtattgaatataccacaattctaatctttctgatatcaatcattctactcaactat

SEQ ID NO: 28639 - DNA, 80 bp, synthetic construct
  source 1..80: mol_type = other DNA
gagtgcaaggacaaaaacctacctgactacagctgtaaggtcttcaccggcgtctacccatttatgtggggcggagccta

SEQ ID NO: 28640 - DNA, 80 bp, synthetic construct
  source 1..80: mol_type = other DNA
cagtctcagcccttgaaacaaaattaggggagttgaaaagacagctggcagatctggtagcatctcagaagttagcttca

SEQ ID NO: 28641 - DNA, 80 bp, synthetic construct
  source 1..80: mol_type = other DNA
attggagagtcattggcgcatacatcttgagctttgcaattccaatcatcctcaaggctctgtacatgctctcaacaaga

SEQ ID NO: 28642 - DNA, 80 bp, synthetic construct
  source 1..80: mol_type = other DNA
aaagttgaaggacgcagaaaaggctgtggacgcagatccagatgatgttaataaaagtacactccagagtagaaaggcag

SEQ ID NO: 28643 - DNA, 80 bp, synthetic construct
  source 1..80: mol_type = other DNA
tgttggtttagtctggtgtgtgctattagtcttagaattaattgtctgggctgccagtgcagagatgcagaatttgaacg

SEQ ID NO: 28644 - DNA, 80 bp, synthetic construct
  source 1..80: mol_type = other DNA
acccgtctgaggcaacaacatctgcacttcaggcccattttaaagtctgtaagctcacatcacgattccaagagaattta

SEQ ID NO: 28645 - DNA, 80 bp, synthetic construct
  source 1..80: mol_type = other DNA
ccaggtcttcatggttgggcaactatgttattattgctaacattttgctttgggtgggttctaataccgaccattacaat

SEQ ID NO: 28646 - DNA, 80 bp, synthetic construct
  source 1..80: mol_type = other DNA
tctttgttggtttagtctggtgtgttctattagtcttagaattgattgtctgggctgctagtgcagagacgcagaatttg

SEQ ID NO: 28647 - DNA, 80 bp, synthetic construct
  source 1..80: mol_type = other DNA
aacgcaggctggactgatacggcacacggatctgggataatacctatgaaaactgatcttgaattggacttttcacttcc

SEQ ID NO: 28648 - DNA, 80 bp, synthetic construct
  source 1..80: mol_type = other DNA
gcaggtcttcatggctgggcaaccatgttgttactactaacattttgctttggctgggttttaataccaaccattacaat

SEQ ID NO: 28649 - DNA, 80 bp, synthetic construct
  source 1..80: mol_type = other DNA
cacaggaaaagctgttcaattggttcttgtccttattgtttaaacccgtcagaggcaacaacatctgctcttcaggccca

SEQ ID NO: 28650 - DNA, 80 bp, synthetic construct
  source 1..80: mol_type = other DNA
taagaaagtcattaacagtatatgagcctatgcagggttgttaccgcactttatctcttttccggtatcggagtcggttc

SEQ ID NO: 28651 - DNA, 80 bp, synthetic construct
  source 1..80: mol_type = other DNA
tttgtcggtttagtctggtgtgtgctattagtcttagaattgattgtatgggctgctagtgccgagacacaaaatttgaa

SEQ ID NO: 28652 - DNA, 80 bp, synthetic construct
  source 1..80: mol_type = other DNA
ccaggtcttcatggctgggcaactacattgttattgctaacattttgctttggctgggttctgataccaactattacaat

SEQ ID NO: 28653 - DNA, 80 bp, synthetic construct
  source 1..80: mol_type = other DNA
gcaggctggactgacacagcgcatggatctgggatagtccctatgaaaactgaccttgaattggacttttcccttccttc

SEQ ID NO: 28654 - DNA, 80 bp, synthetic construct
  source 1..80: mol_type = other DNA
taatcagatagtacaagtaatgtccaaaagatcgagatcgttagattcgtcatctttctattatagagtgtagatatatc

SEQ ID NO: 28655 - DNA, 80 bp, synthetic construct
  source 1..80: mol_type = other DNA
tgtatatgaatagtcacataattaaaatcattaaccatctacacatgaccctctgtgagcacaatagttaaaagctaaca

SEQ ID NO: 28656 - DNA, 80 bp, synthetic construct
  source 1..80: mol_type = other DNA
tttctgtgagacatcttgagaatttagtgttgagaaaagaaaatcatcaggacgttctttttcactcaaaggagctacta

SEQ ID NO: 28657 - DNA, 80 bp, synthetic construct
  source 1..80: mol_type = other DNA
aataccaggaaaatcatcgtcaataattaaatgcactagacttatgaaggataaaatagaacgtggagaagttgaggttg

SEQ ID NO: 28658 - DNA, 80 bp, synthetic construct
  source 1..80: mol_type = other DNA
tggttgatgctcaagatggagtctactcagcagatggcttcttctattatcaattcttcatttgaagctgcggtagttgc

SEQ ID NO: 28659 - DNA, 80 bp, synthetic construct
  source 1..80: mol_type = other DNA
tggaaaatttagctctgcgatcaggaatagaaattggatgactgactctcgaactgtagctaagttggatgaggatgtaa

SEQ ID NO: 28660 - DNA, 80 bp, synthetic construct
  source 1..80: mol_type = other DNA
aatacccgggaaatcgtcatctatagttaaatgtactagactaatgaaagataaattagaacgcggtgaagttgaagttg

SEQ ID NO: 28661 - DNA, 80 bp, synthetic construct
  source 1..80: mol_type = other DNA
tttataatgtttaaaggattgttgcagcaatgcaattacacttgtacttacgagtaattgaacgaccaattcaatattac

SEQ ID NO: 28662 - DNA, 80 bp, synthetic construct
  source 1..80: mol_type = other DNA
acttacgagtaattgaacgaccaattcaatattaccatctacacgtaaccctctatgagcacaatagttaaaagctaaca

SEQ ID NO: 28663 - DNA, 80 bp, synthetic construct
  source 1..80: mol_type = other DNA
ataatggaccaccaagagtatcaacaattcctggccagaataaatgctgccagggatgcttgcattgccaaagatataga

SEQ ID NO: 28664 - DNA, 80 bp, synthetic construct
  source 1..80: mol_type = other DNA
ttccatttattgacataatactagatataagacctgaggtagatccattaactttggatgcgccgcatatcacccctgac

SEQ ID NO: 28665 - DNA, 80 bp, synthetic construct
  source 1..80: mol_type = other DNA
aattacctgtatataaacaatatcttatacattatagattataaagtatctgtatcaaatgagagtagtatgataacata

SEQ ID NO: 28666 - DNA, 80 bp, synthetic construct
  source 1..80: mol_type = other DNA
tgataaatattacgaactgactagggatatatctactagattaaacattccaatagaaatagtcattatccgcatagatc

SEQ ID NO: 28667 - DNA, 80 bp, synthetic construct
  source 1..80: mol_type = other DNA
cagtgagtagagatttacacataagctccgatagatttaaagaaatatatcccacactagttgtagatatcaactttaat

SEQ ID NO: 28668 - DNA, 80 bp, synthetic construct
  source 1..80: mol_type = other DNA
cagttttttgacttaaaacaaatgctttatgaaaaatttggtgatgatgaggaattcttgttgaaggttgctcatggtga

SEQ ID NO: 28669 - DNA, 80 bp, synthetic construct
  source 1..80: mol_type = other DNA
ttttactttaacagctccatggtgtaaaacaggctgcccagatttctggaaacacccaatatacaaggaatttaagatga

SEQ ID NO: 28670 - DNA, 80 bp, synthetic construct
  source 1..80: mol_type = other DNA
gtatgcccataccagagcgtagactttttgaggaatctgtaagatttaatgcttatgaatctgaaaggtggaatactaat

SEQ ID NO: 28671 - DNA, 80 bp, synthetic construct
  source 1..80: mol_type = other DNA
ctagttaaagtgagagaatatacaaaaaaagaatattctgaatacgtgtcaaaatctgcaaagaatatattcttagcaac

SEQ ID NO: 28672 - DNA, 80 bp, synthetic construct
  source 1..80: mol_type = other DNA
tgttgatttgttaatggccaggcacgactactttgggaaagaattatgcaaatctttgaatatagaatatagaaacgatg

SEQ ID NO: 28673 - DNA, 80 bp, synthetic construct
  source 1..80: mol_type = other DNA
tggatgttataaacaaccaaataagaatgagatcagtaatgggtgggccttaatgatagaaagggtacaagaacagagag

SEQ ID NO: 28674 - DNA, 80 bp, synthetic construct
  source 1..80: mol_type = other DNA
tgggtgggccttaatgatagaaagggtacaagaacagagagaaatttcaaaatcacttcacgatcagaaaccaagcatac

SEQ ID NO: 28675 - DNA, 80 bp, synthetic construct
  source 1..80: mol_type = other DNA
aaatttcaaaatcacttcacgatcagaaaccaagcatacattttatatggggggctcataacccaggaaatagcaataat

SEQ ID NO: 28676 - DNA, 80 bp, synthetic construct
  source 1..80: mol_type = other DNA
ataacccaggaaatagcaataatgcaacgtttaagctgatactactatccaaatcattacagagtataaaaggattatct

SEQ ID NO: 28677 - DNA, 80 bp, synthetic construct
  source 1..80: mol_type = other DNA
acggaataaacttgccaattactggatctatggatacagcctatgctaattcaacgcagaatgaaaatttcctatcatca

SEQ ID NO: 28678 - DNA, 80 bp, synthetic construct
  source 1..80: mol_type = other DNA
actctatgcttatattatcctactgaagctcaaacgcaaataagtgacaatgaatggaaagatacgttatctcaattatt

SEQ ID NO: 28679 - DNA, 80 bp, synthetic construct
  source 1..80: mol_type = other DNA
tttgactaaaggatggccaacaggctcagtatattttaatgagtattcaaatgttctagaattctctgttgatccaaagt

SEQ ID NO: 28680 - DNA, 80 bp, synthetic construct
  source 1..80: mol_type = other DNA
tatattgtgattataatattgtattaattagatttgcttcaggagaagaattagatatatctgaattggctgatctaata

SEQ ID NO: 28681 - DNA, 80 bp, synthetic construct
  source 1..80: mol_type = other DNA
ttaaatgaatggttatgcaatccgatggacataacattatactattaccaacaaacaggagaggcaaataaatggatctc

SEQ ID NO: 28682 - DNA, 80 bp, synthetic construct
  source 1..80: mol_type = other DNA
aacaaaaataatggactacctaatttatagaataacatttataattgttgtactatcagtgctatctaacgcacaaaatt

SEQ ID NO: 28683 - DNA, 80 bp, synthetic construct
  source 1..80: mol_type = other DNA
ttgacgcaatcaatcctatcaacgctatagacgatcttgaatcattgattagaaatgtgatccaagattatgacaaaaca

SEQ ID NO: 28684 - DNA, 80 bp, synthetic construct
  source 1..80: mol_type = other DNA
tttttaatgttgaaaggacttgcgaggcaatgcaactatgaatgtacgtacgaatagtcacataatacagactatattaa

SEQ ID NO: 28685 - DNA, 80 bp, synthetic construct
  source 1..80: mol_type = other DNA
cgtacgaatagtcacataatacagactatattaaacatctacacatgaccctctatgagcacaatagttaaaagctaaca

SEQ ID NO: 28686 - DNA, 80 bp, synthetic construct
  source 1..80: mol_type = other DNA
tactactcatcgctctgatgtcaccatttgtgagggcgcaaaattatggtatgtatttaccaataacaggatcactagac

SEQ ID NO: 28687 - DNA, 80 bp, synthetic construct
  source 1..80: mol_type = other DNA
tgagatttcagataatgaatgggaaaatactctatcgcaattatttttaactaaaggatggccgactggatcagtttatt

SEQ ID NO: 28688 - DNA, 80 bp, synthetic construct
  source 1..80: mol_type = other DNA
actttactattatcaacaaaatagcgaatcaaataaatggatatcaatgggaacggactgtacggtaaaagtttgtccac

SEQ ID NO: 28689 - DNA, 80 bp, synthetic construct
  source 1..80: mol_type = other DNA
taataaatgcgcaaaactatggagtaaatttgccaattacaggttcaatggatactgcgtatgcaaactctacacaaagt

SEQ ID NO: 28690 - DNA, 80 bp, synthetic construct
  source 1..80: mol_type = other DNA
taccttatcacaactgttcttaacaaaaggatggccaacaggatcagtgtactttaaagaatatgctgatatagcggcct

SEQ ID NO: 28691 - DNA, 80 bp, synthetic construct
  source 1..80: mol_type = other DNA
ttatatcttaaaatcaataacgagaataatggactatataatttatagatttttgtttatggtagtgatcttggccacca

SEQ ID NO: 28692 - DNA, 80 bp, synthetic construct
  source 1..80: mol_type = other DNA
cgtctggctagcggttagctctttttaatgtatggtattgaatataccacaattctgaccattttgatatctatcatatt

SEQ ID NO: 28693 - DNA, 80 bp, synthetic construct
  source 1..80: mol_type = other DNA
ggaaaatactctatcacaattatttttaaccaaaggatggccgactgggtcagtttattttaaagactacaatgatattg

SEQ ID NO: 28694 - DNA, 80 bp, synthetic construct
  source 1..80: mol_type = other DNA
accaaattatacaagttatgtccaaacggtcaagatcattagacacggctgctttttattatagaatttagatataactt

SEQ ID NO: 28695 - DNA, 80 bp, synthetic construct
  source 1..80: mol_type = other DNA
catatgagtagtcacataatttaaaaatattaaccatccacacatgaccctctatgagcacaatagttaaaagctaacac

SEQ ID NO: 28696 - DNA, 80 bp, synthetic construct
  source 1..80: mol_type = other DNA
gcggttagctccttttaatgtatggtattgaatataccacaattctaatcttcttgctatcgattatattattgaattat

SEQ ID NO: 28697 - DNA, 80 bp, synthetic construct
  source 1..80: mol_type = other DNA
aaatgcacaaaattacggtgttaatttgccaataacaggatcaatggatactacgtatgcaaattctacacagaatgaat

SEQ ID NO: 28698 - DNA, 80 bp, synthetic construct
  source 1..80: mol_type = other DNA
catttttgacatcaacgttgtgtctgtactatccagttgaggcatcaaatgaaatagccgatactgaatggaaaaataca

SEQ ID NO: 28699 - DNA, 80 bp, synthetic construct
  source 1..80: mol_type = other DNA
ttgtcgcaactatttctaactaaaggatggccaactggatccgtatatttcaaggaatatactgacatagcagctttttc

SEQ ID NO: 28700 - DNA, 80 bp, synthetic construct
  source 1..80: mol_type = other DNA
gattataacctagttttaatgaagtatgactcaacactggaattggatatgtctgagttggcggatcttatattgaacga

SEQ ID NO: 28701 - DNA, 80 bp, synthetic construct
  source 1..80: mol_type = other DNA
gcgacaactgagaagctggtaattactgacgttgtggatggtgttaaccacaagttggatgttacaacgacaacttgcac

SEQ ID NO: 28702 - DNA, 80 bp, synthetic construct
  source 1..80: mol_type = other DNA
atattaaaatcaataacaagaataatggactatataatctacagatttttacttatagtagtaatactggccacgataac

SEQ ID NO: 28703 - DNA, 80 bp, synthetic construct
  source 1..80: mol_type = other DNA
ataattcaagcaatgtccaagaggtctaggtcgctaaattcatcagcattttattacagagtgtagacacatgttagatt

SEQ ID NO: 28704 - DNA, 80 bp, synthetic construct
  source 1..80: mol_type = other DNA
ccagatcgtacaggtaatgtccaaaagatcaagatcattaaattccgctgcgttctattatagagtatagatatatctta

SEQ ID NO: 28705 - DNA, 80 bp, synthetic construct
  source 1..80: mol_type = other DNA
cagtggttgatgctcaagatggagtctacacagcagatggctagttcgattattaacacttcttttgaagccgcagtcgt

SEQ ID NO: 28706 - DNA, 80 bp, synthetic construct
  source 1..80: mol_type = other DNA
cttatgagtaaacatagcatattaccatcttcacgtaaccctctatgagcacaatagttaaaagctaacactgtcaaaaa

SEQ ID NO: 28707 - DNA, 80 bp, synthetic construct
  source 1..80: mol_type = other DNA
ttgtttattgtaaatattacgccatttgtaaattcacagaactatggcataaatttaccaattactggatctatggacgc

SEQ ID NO: 28708 - DNA, 80 bp, synthetic construct
  source 1..80: mol_type = other DNA
aaaattagcaataacggacgttgttgatggggtgaactacaaaataaatgttactactactacatgtacaattagaaact

SEQ ID NO: 28709 - DNA, 80 bp, synthetic construct
  source 1..80: mol_type = other DNA
gatagaaaaatggatgaagtctcacatgttggaatttaattcgctttcgattcaagaatgatgatgacgaagcaagaata

SEQ ID NO: 28710 - DNA, 80 bp, synthetic construct
  source 1..80: mol_type = other DNA
gatagaaagatggatgaagtttcgcacgttggaatttaattcgctttcgattctaagatgatgatgacggagcaagaata

SEQ ID NO: 28711 - DNA, 80 bp, synthetic construct
  source 1..80: mol_type = other DNA
atgagaaatataatcattgggttcttaaagctagaaaggtaaacgaaaacatgaattcccttcaaaatgtcatttctcaa

SEQ ID NO: 28712 - DNA, 80 bp, synthetic construct
  source 1..80: mol_type = other DNA
caacaagcacacattaatgagttacaaatgtacaataataaattggaacgtgatttacaatcgaagattggatcagctgt

SEQ ID NO: 28713 - DNA, 80 bp, synthetic construct
  source 1..80: mol_type = other DNA
gtcatccatggaatggtacttaagatcaatggaattatctgatgatgtaaaatcggacattgaacaacagctgaattcaa

SEQ ID NO: 28714 - DNA, 80 bp, synthetic construct
  source 1..80: mol_type = other DNA
tagaccaattaaacccagttaatgcaatagatgacttcgagtcaatacttcgtaatttaatttcagattatgatagattg

SEQ ID NO: 28715 - DNA, 80 bp, synthetic construct
  source 1..80: mol_type = other DNA
tttataatgttcaaaggtttgctgcagcaatgtaactatacttgtacttatgagtgattgaatggacaattaaataccat

SEQ ID NO: 28716 - DNA, 80 bp, synthetic construct
  source 1..80: mol_type = other DNA
tatgagtgattgaatggacaattaaataccattaccatctacacatgaccctctatgagcacgatagttaaaagctaaca

SEQ ID NO: 28717 - DNA, 80 bp, synthetic construct
  source 1..80: mol_type = other DNA
atggagtctactcagcagatggtaaactctattattaacacttcttttgaagctgcagttgttgctgctacttcaacatt

SEQ ID NO: 28718 - DNA, 80 bp, synthetic construct
  source 1..80: mol_type = other DNA
aattaaagatactaaccatctacacatgaccctctatgagcacaatagttaaaagctaacactgtcaaaaacctaaatgg

SEQ ID NO: 28719 - DNA, 80 bp, synthetic construct
  source 1..80: mol_type = other DNA
tctggctagcggttggctctttgtaatgtatggtattgaagatgccacaattcggaccatcttgatatctaccatattat

SEQ ID NO: 28720 - DNA, 80 bp, synthetic construct
  source 1..80: mol_type = other DNA
ccatttgtgaggacgcaaaattacggcatgtatttaccaataacgggatcactagacgctgtatacacaaattcaactag

SEQ ID NO: 28721 - DNA, 80 bp, synthetic construct
  source 1..80: mol_type = other DNA
tggaggatcatttctaacttcaacgttatgtttatattatccaacaggagctaaaaatgagatttcagataatgaatggg

SEQ ID NO: 28722 - DNA, 80 bp, synthetic construct
  source 1..80: mol_type = other DNA
aaaatactctatcacaattatttttagctaaaggatggccaactggatcagtttattttaaagactataatgatattact

SEQ ID NO: 28723 - DNA, 80 bp, synthetic construct
  source 1..80: mol_type = other DNA
acattttctatgaatccacaactgtattgtgattataatgtagtattgatgcgatatgataatacatctgaattagatgc

SEQ ID NO: 28724 - DNA, 80 bp, synthetic construct
  source 1..80: mol_type = other DNA
atcggagttagcagatcttatattgaacgaatggctgtgcaatcctatggatatatcactttactattatcaacaaaata

SEQ ID NO: 28725 - DNA, 80 bp, synthetic construct
  source 1..80: mol_type = other DNA
gcgaatcaaataaatggatatcaatgggaacagactgcacagtaaaagtttgtccactcaatacgcaaactttagggatt

SEQ ID NO: 28726 - DNA, 80 bp, synthetic construct
  source 1..80: mol_type = other DNA
ggatgtaaaactacggacgtagattcatttgagattgttgcgtcgtctggaaaattggtaattactgatgttgtaaatgg

SEQ ID NO: 28727 - DNA, 80 bp, synthetic construct
  source 1..80: mol_type = other DNA
tattaatcataaaataaatatttcaataaatacgtgcactatacgtaattgtaataaactaggaccacgagaaaatgttg

SEQ ID NO: 28728 - DNA, 80 bp, synthetic construct
  source 1..80: mol_type = other DNA
tgaattatatattaaaaactataactaatacaatggactacataatttttagatttttactactcatcgctctgatgtca

SEQ ID NO: 28729 - DNA, 80 bp, synthetic construct
  source 1..80: mol_type = other DNA
ctataattcaagttggtggaccgaacgcactagatatcactgctgatccaacaacagtcccacaggttcaaagaattatg

SEQ ID NO: 28730 - DNA, 80 bp, synthetic construct
  source 1..80: mol_type = other DNA
cgagtaaattggaaaaaatggtggcaagtgttttatacagtagttgactatattaaccaaattatacaagttatgtccaa

SEQ ID NO: 28731 - DNA, 80 bp, synthetic construct
  source 1..80: mol_type = other DNA
atagaaagatggatgaagtttcgcacgttggaatttaattcgctttcgattctaggatgataatgacggcagagtaatag

SEQ ID NO: 28732 - DNA, 80 bp, synthetic construct
  source 1..80: mol_type = other DNA
tcacataatataattaaagttaccatcttcacatgaccctctatgagcgcaatagttaaaagctaacactgtcaaaaacc

SEQ ID NO: 28733 - DNA, 80 bp, synthetic construct
  source 1..80: mol_type = other DNA
ccttttaatgtatggtattgaatataccacaattctaacttttccgatatcaattattctattaaattatatattaaaat

SEQ ID NO: 28734 - DNA, 80 bp, synthetic construct
  source 1..80: mol_type = other DNA
ttttcctgactaaaggacggccgacaaattcagtctacttcaagagttatgctgatatatcgtccttctctgtagatccg

SEQ ID NO: 28735 - DNA, 80 bp, synthetic construct
  source 1..80: mol_type = other DNA
cagttatattgtgattacaatattgtgttaatacagaaccaaaattcattagcgttagatgtctcagaacttgccgattt

SEQ ID NO: 28736 - DNA, 80 bp, synthetic construct
  source 1..80: mol_type = other DNA
aattttaaatgaatggttatgtaatccgatggacgtaacgttgtactattatcaacaaacagatgaagcgaataaatgga

SEQ ID NO: 28737 - DNA, 80 bp, synthetic construct
  source 1..80: mol_type = other DNA
caataactaatataatggactttatcatatatcggtttttactaatagttgttgtcatgctgccatttattaaagctcaa

SEQ ID NO: 28738 - DNA, 80 bp, synthetic construct
  source 1..80: mol_type = other DNA
tttcagtggttgctgctcaagatggagtctactcagcagatggtgagctctattattaacacttcttttgaagctgcagt

SEQ ID NO: 28739 - DNA, 80 bp, synthetic construct
  source 1..80: mol_type = other DNA
cattcaaggggctgtcaactgataggaaaatggatgaagtttctcaagtaggaatttaattcgttatctgtttgaaggtg

SEQ ID NO: 28740 - DNA, 80 bp, synthetic construct
  source 1..80: mol_type = other DNA
gtttctcaagtaggaatttaattcgttatctgtttgaaggtgggtatggcaaagtaagaattgaaagcgcttatgtgacc

SEQ ID NO: 28741 - DNA, 80 bp, synthetic construct
  source 1..80: mol_type = other DNA
cgtttggctagcggtcagctccttttaatgtatggtattgaatataccacaattctaacctttctgatatcaatagtttt

SEQ ID NO: 28742 - DNA, 80 bp, synthetic construct
  source 1..80: mol_type = other DNA
caccgccacaattcaaaaaacgttataacacgaatgacaattcaagaggaatgaattatgaaactccaatgtttaataaa

SEQ ID NO: 28743 - DNA, 80 bp, synthetic construct
  source 1..80: mol_type = other DNA
ttgatgtattcattccaattattgctatagatgattttgaatccctgatcagaaatattatacttgattatgataggatg

SEQ ID NO: 28744 - DNA, 80 bp, synthetic construct
  source 1..80: mol_type = other DNA
cacataatataattaaaattaccatcttcacatgaccctctatgagcacaatagtttaaaagctacacgcagtcactcca

SEQ ID NO: 28745 - DNA, 80 bp, synthetic construct
  source 1..80: mol_type = other DNA
cgtctggctaacggttagctccttttaatgtatggtattgaatataccacaattctaatctttttgatatcaatcattct

SEQ ID NO: 28746 - DNA, 80 bp, synthetic construct
  source 1..80: mol_type = other DNA
tcatacaggtaatgtccaaaagatcaagatcattaaattctgcagctttttactatagagtatagatataccttagatta

SEQ ID NO: 28747 - DNA, 80 bp, synthetic construct
  source 1..80: mol_type = other DNA
caagaagaagtatttctaacttcgactttgtgtttgtattacccgactgaagctgtaacagaaataaacgataattcatg

SEQ ID NO: 28748 - DNA, 80 bp, synthetic construct
  source 1..80: mol_type = other DNA
ttggatgcaaaactacggacgtggatacatttgagattgttgcctcatctgaaaaattggtaattactgatgttgtaaat

SEQ ID NO: 28749 - DNA, 80 bp, synthetic construct
  source 1..80: mol_type = other DNA
attgaattatatattaaaaactataactaatacgatggactatataattttcaagtttttattactcatcgctctaatat

SEQ ID NO: 28750 - DNA, 80 bp, synthetic construct
  source 1..80: mol_type = other DNA
ccattgtcacgagcgcgcagaactatggagtgaatttacccattacaggatcaatggatactgcgtatgcaaactctacg

SEQ ID NO: 28751 - DNA, 80 bp, synthetic construct
  source 1..80: mol_type = other DNA
caaaatgaaccatttttgacatcgactctttgtttatactacccaatcgaagcatcaaacgaaatagcagacacagagtg

SEQ ID NO: 28752 - DNA, 80 bp, synthetic construct
  source 1..80: mol_type = other DNA
gaaaaacacattatctcaactatttctaacgaaaggatggccgacaggatcagtgtattttaaagaatacgcagatatag

SEQ ID NO: 28753 - DNA, 80 bp, synthetic construct
  source 1..80: mol_type = other DNA
cagcattttcagttgatccacaactatactgtgattataatatagttttaatgaaatatgattcaacactagaattggat

SEQ ID NO: 28754 - DNA, 80 bp, synthetic construct
  source 1..80: mol_type = other DNA
gataaattatattttaaaatcaataacaagaataatggactacataatttacagatttctatttgtcgtagttctcatgg

SEQ ID NO: 28755 - DNA, 80 bp, synthetic construct
  source 1..80: mol_type = other DNA
agctgatccaacaactgcaccacagacagaaagaatgatgcgggtaaactggaaaaaatggtggcaggttttttatacag

SEQ ID NO: 28756 - DNA, 80 bp, synthetic construct
  source 1..80: mol_type = other DNA
cgtttggctagcggttagctccttttaatgtatggtattgaatataccacatttctaatctatttaatatcaattatatt

SEQ ID NO: 28757 - DNA, 80 bp, synthetic construct
  source 1..80: mol_type = other DNA
cgattcttgttagtgcacagaattacggtattaatttgccgataactggatcaatggatgtgtcatacgtgaatgctaca

SEQ ID NO: 28758 - DNA, 80 bp, synthetic construct
  source 1..80: mol_type = other DNA
aaggacgaaccatttttgacatcaacactgtgtttatactatccaacagaggctagaacagaaataaatgataacgaatg

SEQ ID NO: 28759 - DNA, 80 bp, synthetic construct
  source 1..80: mol_type = other DNA
gacgagcacactatcacaattgtttctgacaaagggatggccaactggttcaatatattttaaggaatacgatgatataa

SEQ ID NO: 28760 - DNA, 80 bp, synthetic construct
  source 1..80: mol_type = other DNA
ctactttttcagtagatccgcagctatactgtgattataacatagttctgatgcgctataattcgagtttagaactggat

SEQ ID NO: 28761 - DNA, 80 bp, synthetic construct
  source 1..80: mol_type = other DNA
atgtcagagttagcgaatttgatactaaatgaatggctatgtaatccaatggacattacattgtattattaccaacaaac

SEQ ID NO: 28762 - DNA, 80 bp, synthetic construct
  source 1..80: mol_type = other DNA
aataaaagtgtgtccattgaacacccagacattggggataggatgccagactacaaatactgggacatttgaagaggtag

SEQ ID NO: 28763 - DNA, 80 bp, synthetic construct
  source 1..80: mol_type = other DNA
caacggctgagaaactagtaatcaccgatgtagttgacggtgtaaaccataaactggatgttactaccgcgacttgtaca

SEQ ID NO: 28764 - DNA, 80 bp, synthetic construct
  source 1..80: mol_type = other DNA
attagaaattgtaaaaaactgggaccaagagagaatgtggcagtgatacaggttggtggtgctgacatccttgatataac

SEQ ID NO: 28765 - DNA, 80 bp, synthetic construct
  source 1..80: mol_type = other DNA
atttaattatatattgaaaagtataactagaatgatggactacataatttacaaatttttgctcatagtcacaatcacct

SEQ ID NO: 28766 - DNA, 80 bp, synthetic construct
  source 1..80: mol_type = other DNA
ttgtacaggcaatgtctaaaaggtccagatcattagattctgcagctttttattatagagtgtagatattatgtaggtta

SEQ ID NO: 28767 - DNA, 80 bp, synthetic construct
  source 1..80: mol_type = other DNA
cgtttggctagcggttagctccttttgatgtatggtattgaatataccacaactctaatcttcttgatattgcttgtatt

SEQ ID NO: 28768 - DNA, 80 bp, synthetic construct
  source 1..80: mol_type = other DNA
caccattcgtaaactcacagaattatggcataaatctaccaattactggatctatggatatgaactatcagaatgtatca

SEQ ID NO: 28769 - DNA, 80 bp, synthetic construct
  source 1..80: mol_type = other DNA
acttcagagccttttttgacatcgacgctgtgtttatattacccagcagaagctgagacagagattgctgatagttcatg

SEQ ID NO: 28770 - DNA, 80 bp, synthetic construct
  source 1..80: mol_type = other DNA
gaaagacacattggcacagttatttttgacaaaaggatggccaactggctcaatttaccttaaaagttacgtggatatag

SEQ ID NO: 28771 - DNA, 80 bp, synthetic construct
  source 1..80: mol_type = other DNA
cgacattctcaataaatcctcagttgtattgtgattataatatagtattaatgaagtataatgctgattcagagttagat

SEQ ID NO: 28772 - DNA, 80 bp, synthetic construct
  source 1..80: mol_type = other DNA
atgtcggaattggcggatctgatacttaatgaatggttatgcaatccaatggacataacgctgtattactatcaacagac

SEQ ID NO: 28773 - DNA, 80 bp, synthetic construct
  source 1..80: mol_type = other DNA
ctattaaagtatgtccattaaatacacagacattaggtattggatgtcttactactgacactacgacttttgaagaaatt

SEQ ID NO: 28774 - DNA, 80 bp, synthetic construct
  source 1..80: mol_type = other DNA
gcaacagctgagaaattggtaataacggacgttgttgatggagtgaactataaggtaaacgtcactactacaacatgtac

SEQ ID NO: 28775 - DNA, 80 bp, synthetic construct
  source 1..80: mol_type = other DNA
cattagaaattgtaaaaagctgggacctagagagaacgttgcagttatccaaataggtggttcaaatatcttagatatta

SEQ ID NO: 28776 - DNA, 80 bp, synthetic construct
  source 1..80: mol_type = other DNA
attgaattacatattaaaatcagtaaccagaattatggactatatattgtatagattcttgctatttgttgttattgtca

SEQ ID NO: 28777 - DNA, 80 bp, synthetic construct
  source 1..80: mol_type = other DNA
ctataaaggtatgtccactgaatacacaaacattaggaataggttgtcaaacaacgaatgtagactcatttgaaacagtt

SEQ ID NO: 28778 - DNA, 80 bp, synthetic construct
  source 1..80: mol_type = other DNA
taattcaagcaatgtccaaaagatccagatcactggattcagctgctttttactatagggtgtagatacaagttaggtta

SEQ ID NO: 28779 - DNA, 80 bp, synthetic construct
  source 1..80: mol_type = other DNA
cggccttttcagtggaaccacagttatactgtgattataatttagttttaatgaaatatgactctacacaaaaactagat

SEQ ID NO: 28780 - DNA, 80 bp, synthetic construct
  source 1..80: mol_type = other DNA
atgtctgaattggccgatcttatattgaatgaatggctgtgcaatccaatggacataacgctatattattatcagcagac

SEQ ID NO: 28781 - DNA, 80 bp, synthetic construct
  source 1..80: mol_type = other DNA
catacgcaactgtaaaaagttaggaccaagggagaacgtagcagtcatacaggtaggcggcgcgaacattttagacatca

SEQ ID NO: 28782 - DNA, 80 bp, synthetic construct
  source 1..80: mol_type = other DNA
aaataattcagacaatgtccaaaagatctagatcgcttaattcgtcggcgttctactatagagtgtaggtgcatgttaga

SEQ ID NO: 28783 - DNA, 80 bp, synthetic construct
  source 1..80: mol_type = other DNA
gactataacatagttttaatgaaatacaattcaactctagaacttgatatgtcagaattagcaaatttaatattaaatga

SEQ ID NO: 28784 - DNA, 80 bp, synthetic construct
  source 1..80: mol_type = other DNA
acattaatcaaatagtaaaagtaatgtccaaaagatcaagatcgttagattcgtcatctttctattatagagtatagata

SEQ ID NO: 28785 - DNA, 80 bp, synthetic construct
  source 1..80: mol_type = other DNA
atagtcacgtaattaaaaatattaaccatctacacatgaccctctatgagcacaatagttaaaagctaacactgtcaaaa

SEQ ID NO: 28786 - DNA, 80 bp, synthetic construct
  source 1..80: mol_type = other DNA
gtttggctagcagatagctccttttaatgtatggtattgaatataccacagttctattttatttgatatcgttcgttttt

SEQ ID NO: 28787 - DNA, 80 bp, synthetic construct
  source 1..80: mol_type = other DNA
tcaattattgttaacgcacaaaattacgggattaatttgcctataactgggtctatggatatgtcatatgtgaacattac

SEQ ID NO: 28788 - DNA, 80 bp, synthetic construct
  source 1..80: mol_type = other DNA
taaagatgaaccatttctaacgtcaacattatgtttgtactatccaacagaggctagaacagagatacacgataatgagt

SEQ ID NO: 28789 - DNA, 80 bp, synthetic construct
  source 1..80: mol_type = other DNA
ggatacgtacgttatcgcagttgttcttaacaaagggatggccaactggatccgtatactttaaagaatacgatgatata

SEQ ID NO: 28790 - DNA, 80 bp, synthetic construct
  source 1..80: mol_type = other DNA
actgctttttcagtggatcctcaattgtattgtgactataacatagttttaatgaaatacaattcaactctagaacttga

SEQ ID NO: 28791 - DNA, 80 bp, synthetic construct
  source 1..80: mol_type = other DNA
aataaaagtatgtccattaaatgctcaaacgttaggaataggatgtcagactacagatactggaacatttgaagaagtcg

SEQ ID NO: 28792 - DNA, 80 bp, synthetic construct
  source 1..80: mol_type = other DNA
cgacagctgaaaaattagcaattactgatgtggttgatggcgtaaatcacaaactagatgttactactgcgacttgtact

SEQ ID NO: 28793 - DNA, 80 bp, synthetic construct
  source 1..80: mol_type = other DNA
gcaaaaaactaggaccgagagaaaatgtagcagtaattcaagtaggtggtgctgatgtccttgatataacgtctgatccg

SEQ ID NO: 28794 - DNA, 80 bp, synthetic construct
  source 1..80: mol_type = other DNA
tatttaattacatattaaagagtataactagaatgatggactatataatttataaatttttgattatagtcacgatcttt

SEQ ID NO: 28795 - DNA, 80 bp, synthetic construct
  source 1..80: mol_type = other DNA
acaactaatccacaaactgaacggatgatgagaataaattggaaaaaatggtggcaagtgttctatactatagttgatta

SEQ ID NO: 28796 - DNA, 80 bp, synthetic construct
  source 1..80: mol_type = other DNA
tgtacaagcaatgtccaaaaggtccagatcactgaattcggcggcattttattacagagtgtagatattatgtagattag

SEQ ID NO: 28797 - DNA, 80 bp, synthetic construct
  source 1..80: mol_type = other DNA
tgccatttattaaagctcaaaattatggaataaatcttccaataacaggttctatggataccgcatatacaaactccaca

SEQ ID NO: 28798 - DNA, 80 bp, synthetic construct
  source 1..80: mol_type = other DNA
caacaagagaattttatgacttccactttatgcttatattatccaagttcagtcacgactgaaataactgaccccgactg

SEQ ID NO: 28799 - DNA, 80 bp, synthetic construct
  source 1..80: mol_type = other DNA
gacgaacacactgtcacaacttttcctgactaaaggatggccgacaaattccgtctacttcaagagttatgctgatatag

SEQ ID NO: 28800 - DNA, 80 bp, synthetic construct
  source 1..80: mol_type = other DNA
cgtccttctctgtagatccgcagttatattgtgattacaatattgtgttagtacagtaccaaaattcattagcgttggat

SEQ ID NO: 28801 - DNA, 80 bp, synthetic construct
  source 1..80: mol_type = other DNA
gtctcagaacttgctgatttaattttaaatgaatggttatgtaatccaatggacgtaacgttgtactattatcaacaaac

SEQ ID NO: 28802 - DNA, 80 bp, synthetic construct
  source 1..80: mol_type = other DNA
cggttaaagtatgtcccttaaatacgcaaactttaggaattggatgtacaacaaccgacgtcacaacatttgaagaggta

SEQ ID NO: 28803 - DNA, 80 bp, synthetic construct
  source 1..80: mol_type = other DNA
gcaaacgcggaaaaattagtaataactgacgtcgtggacggagtcaatcataagattaatattacagtgaatacatgtac

SEQ ID NO: 28804 - DNA, 80 bp, synthetic construct
  source 1..80: mol_type = other DNA
tatacggaattgcaaaaagttaggaccgagggaaaatgtagcaattatacaagtaggtggttctgacgtcatagacataa

SEQ ID NO: 28805 - DNA, 80 bp, synthetic construct
  source 1..80: mol_type = other DNA
attaaattatatattaaaatcaataactaatataatggactttatcatatatcggtttttactaatagttgttgtcatgc

SEQ ID NO: 28806 - DNA, 80 bp, synthetic construct
  source 1..80: mol_type = other DNA
ctcaaaattatggaataaatctaccaattactggatctatggatacggcatatgccaattcgacgcaaaataataatttt

SEQ ID NO: 28807 - DNA, 80 bp, synthetic construct
  source 1..80: mol_type = other DNA
ttatcatcaacgttatgcctttattatccagctgaagctagaacgcaaattagtgataatgaatggaaagatacattgtc

SEQ ID NO: 28808 - DNA, 80 bp, synthetic construct
  source 1..80: mol_type = other DNA
tcagctatttttaactaaaggatggccgactggttcagtttactttaatgaatattcaaatgttctagaattttctgttg

SEQ ID NO: 28809 - DNA, 80 bp, synthetic construct
  source 1..80: mol_type = other DNA
acccaaggttatattgtgattataatattgttttaattagatttattgctggagaagaattagatatatctgaattagct

SEQ ID NO: 28810 - DNA, 80 bp, synthetic construct
  source 1..80: mol_type = other DNA
gacttaatcctgaatgaatggttgtgtaacccaatggacataactctatattattaccagcaaactggagaagcgaataa

SEQ ID NO: 28811 - DNA, 80 bp, synthetic construct
  source 1..80: mol_type = other DNA
aaaaacagtaacaaaagtaatggactatattatatatagagtagcatttatagtcgtaatttcaaccgtgttgtctaacg

SEQ ID NO: 28812 - DNA, 80 bp, synthetic construct
  source 1..80: mol_type = other DNA
aaggggctgtcaactgatagaaaaatggatgaagtttctcaagtaggaatctagttcgttatctgtttgaaggtgggtat

SEQ ID NO: 28813 - DNA, 80 bp, synthetic construct
  source 1..80: mol_type = other DNA
ttagctccttttaatgtatggtattgaatataccacaattctaacttttttgatatcaattattctattaaattatatat

SEQ ID NO: 28814 - DNA, 80 bp, synthetic construct
  source 1..80: mol_type = other DNA
taaaatcaataactaatataatggactttatcatatatcggtttttactaatagttgttgtcgtactgccatttattaaa

SEQ ID NO: 28815 - DNA, 80 bp, synthetic construct
  source 1..80: mol_type = other DNA
aaatagcgaatcaaataaatggatatcaatgggaacggactgtacggtaaaagtttgtccactcaatacacaaactttag

SEQ ID NO: 28816 - DNA, 80 bp, synthetic construct
  source 1..80: mol_type = other DNA
tacaagttatgtccaaacggtcaagatcattagacacagctgctttttattatagaatttagatatagcttagataagat

SEQ ID NO: 28817 - DNA, 80 bp, synthetic construct
  source 1..80: mol_type = other DNA
ttccgctgcgttctattatagagtatagatatatcttagattagaattgtttgatgtgaccccgggacattacctgtaca

SEQ ID NO: 28818 - DNA, 80 bp, synthetic construct
  source 1..80: mol_type = other DNA
tttaccaaggaaataacatcactgtagctgcctatgctaacggcgaccatgccgtcacagttaaggacgccaaattcatt

SEQ ID NO: 28819 - DNA, 80 bp, synthetic construct
  source 1..80: mol_type = other DNA
acttgaatgacataatctttgtcacgaagtctggactcccttcgggcatgccattcactagtgttgtcaattctcttaac

SEQ ID NO: 28820 - DNA, 80 bp, synthetic construct
  source 1..80: mol_type = other DNA
acgaagtctggactcccttcgggcatgccattcactagtgttgtcaattctcttaaccatatgacatactttgcggctgc

SEQ ID NO: 28821 - DNA, 80 bp, synthetic construct
  source 1..80: mol_type = other DNA
aacgttgagcaaaattgttaaaaatatgaggcgggttatattgcctactgctcctcctgaatatatggaggccatatacc

SEQ ID NO: 28822 - DNA, 80 bp, synthetic construct
  source 1..80: mol_type = other DNA
aggattgtgacacgtgtcattctcctgcgagtcttccagctgtgattgagaagtaattgcaataattgactcagatccag

SEQ ID NO: 28823 - DNA, 80 bp, synthetic construct
  source 1..80: mol_type = other DNA
caacaagctcatatcaatgaactacaaatgtataataataaactagagcgtgatttacaatcaaaaataggatcagttat

SEQ ID NO: 28824 - DNA, 80 bp, synthetic construct
  source 1..80: mol_type = other DNA
tggttgatgctcaagatggagtctactcagcagatggtaggttctattattaacacttcttttgaagctgcagttgttgc

SEQ ID NO: 28825 - DNA, 80 bp, synthetic construct
  source 1..80: mol_type = other DNA
taatacaaaatatgttaaccatctacacatgaccctctatgagcacaatagttaaaagctaacactgtcaaaaacctaaa

SEQ ID NO: 28826 - DNA, 80 bp, synthetic construct
  source 1..80: mol_type = other DNA
ttttcagtggttgatgctcaagatggagtctactcagcagattctatgtgctattattaacacttcttttgaagctgcag

SEQ ID NO: 28827 - DNA, 80 bp, synthetic construct
  source 1..80: mol_type = other DNA
tcgatgcaattaatcctaatcatgctatagatgatcttgaatcactgattagaaacttaattcaagattacgatagaaca

SEQ ID NO: 28828 - DNA, 80 bp, synthetic construct
  source 1..80: mol_type = other DNA
ttcttgatgttaaaaggacttgtgaggcaatgcaactatgaatgtatatatgaatagtcacataatttaaaatattaacc

SEQ ID NO: 28829 - DNA, 80 bp, synthetic construct
  source 1..80: mol_type = other DNA
agtcacataatttaaaatattaaccatccacacatgaccctctatgagcacaatagttaaaagctaacactgtcagcccc

SEQ ID NO: 28830 - DNA, 80 bp, synthetic construct
  source 1..80: mol_type = other DNA
ctagcggttagctccttttaatgtatggtattgaatataccacagttctattctatttgatatctttcgttcttgtaagt

SEQ ID NO: 28831 - DNA, 80 bp, synthetic construct
  source 1..80: mol_type = other DNA
atctaacgcacaaaattacggaataaatttgccgattaccggatctatggatacagcctatgctaattcaacgcagaatg

SEQ ID NO: 28832 - DNA, 80 bp, synthetic construct
  source 1..80: mol_type = other DNA
aaaatttcctatcatcaactctatgcttatattatcctactgaagctcaaacgcaaataagtgataatgaatggaaagac

SEQ ID NO: 28833 - DNA, 80 bp, synthetic construct
  source 1..80: mol_type = other DNA
acgttatctaagttatttttgactaaaggatggccaacaggctcagtatattttaatgaatattcaaatgttttagaatt

SEQ ID NO: 28834 - DNA, 80 bp, synthetic construct
  source 1..80: mol_type = other DNA
ctctgttgatccaaagttatattgtgattataatgttgtattaattagatttgcttcaggagaagagttagatatatctg

SEQ ID NO: 28835 - DNA, 80 bp, synthetic construct
  source 1..80: mol_type = other DNA
aattggctgatctaatattaaatgaatggttgtgcaatccgatggacatagcattatactattaccaacaaacaggagag

SEQ ID NO: 28836 - DNA, 80 bp, synthetic construct
  source 1..80: mol_type = other DNA
atcatcatgtaccgttaaagtgtgtccattaaatacgcaaactttaggagttggatgtcaaactacgaatacaaatactt

SEQ ID NO: 28837 - DNA, 80 bp, synthetic construct
  source 1..80: mol_type = other DNA
ttgaaacggtggctgaaagtgagaaattagcaatagttgatgttgtcgatggcgtgaatcataagttagacatcacatcc

SEQ ID NO: 28838 - DNA, 80 bp, synthetic construct
  source 1..80: mol_type = other DNA
acgacatgtacaatacgaaactgtaataaactaggaccaagagagaatgtggctataatacaagttggtggttctaacat

SEQ ID NO: 28839 - DNA, 80 bp, synthetic construct
  source 1..80: mol_type = other DNA
tatattctgaaaactataacaaaaataatggactacctaatttataggataacatttataattgttgtactatcagtgct

SEQ ID NO: 28840 - DNA, 80 bp, synthetic construct
  source 1..80: mol_type = other DNA
tttctattcatggtagtaatactggccataatagtgaatgcacaaaattatggagttaatttgccaataacaggatcgat

SEQ ID NO: 28841 - DNA, 80 bp, synthetic construct
  source 1..80: mol_type = other DNA
ggatactacctatgcaaattcaacgcagagtgaatcattcttaacatcaactttatgtctgtactatccagtcgaggcat

SEQ ID NO: 28842 - DNA, 80 bp, synthetic construct
  source 1..80: mol_type = other DNA
caaatgaaatagcagataccgaatggaaaaacacattatcgcaactgtttctgactaaaggatggtcgactggatccgtg

SEQ ID NO: 28843 - DNA, 80 bp, synthetic construct
  source 1..80: mol_type = other DNA
gattacaatctggttctaatgaagtatgattcgaccctagaattagacatgtctgagttagcggaccttatattgaatga

SEQ ID NO: 28844 - DNA, 80 bp, synthetic construct
  source 1..80: mol_type = other DNA
cggttaaagtatgtccattgaatacacagacgcttggtattggatgtctaacaaccgatccgaatacatttgaaacagtt

SEQ ID NO: 28845 - DNA, 80 bp, synthetic construct
  source 1..80: mol_type = other DNA
gcgacaactgaaaagttagtaattactgatgttgtagatggcgttaaccacaagttagatgttacaacaacaacttgcac

SEQ ID NO: 28846 - DNA, 80 bp, synthetic construct
  source 1..80: mol_type = other DNA
ttgtcttcatgatatcagttacattgttgaattatatattaaaatcaataactagaataatggactatattatttacaga

SEQ ID NO: 28847 - DNA, 80 bp, synthetic construct
  source 1..80: mol_type = other DNA
gtaaaaagttaggaccaagagaaaatgtggcggttatacaggtgggtggtgcaaacattttagacatcactgctgatccg

SEQ ID NO: 28848 - DNA, 80 bp, synthetic construct
  source 1..80: mol_type = other DNA
acgttaaccagataattcaagcgatgtccaagagatctagatcactaaattcatcagcattctattacagaatataggta

SEQ ID NO: 28849 - DNA, 80 bp, synthetic construct
  source 1..80: mol_type = other DNA
ggctatcggatagctccttttaatgtatggtattgaatacgtcacaatactagctgttgggctatcacttgtatttatta

SEQ ID NO: 28850 - DNA, 80 bp, synthetic construct
  source 1..80: mol_type = other DNA
ttcattaaaacgcaaaactatggaataaacttaccgataactggttctatggatacaccatatatgaattcaacaatgag

SEQ ID NO: 28851 - DNA, 80 bp, synthetic construct
  source 1..80: mol_type = other DNA
tgaaacattcttaacttctactttatgtttatactacccgaacgaagcggtaactcagatcgcagatgataagtggaaag

SEQ ID NO: 28852 - DNA, 80 bp, synthetic construct
  source 1..80: mol_type = other DNA
atactctctcacaactttttctcactaaagggtggccaacaggatcggtttactttaaagaatatgctgatgttgcatca

SEQ ID NO: 28853 - DNA, 80 bp, synthetic construct
  source 1..80: mol_type = other DNA
cgataaaagtatgtccgctcaatacacagacccttggaataggatgttcgactactgatccaacaacatttgaggaagta

SEQ ID NO: 28854 - DNA, 80 bp, synthetic construct
  source 1..80: mol_type = other DNA
gcttctgcagagaaattggtgataacagatgttgtagatggagttaaccacaaactagatgtgacaaccgctacgtgtac

SEQ ID NO: 28855 - DNA, 80 bp, synthetic construct
  source 1..80: mol_type = other DNA
attatatactgaaatcaataactagaacaatggactttgttatctatagatttttgtttattatagttgtactagcacca

SEQ ID NO: 28856 - DNA, 80 bp, synthetic construct
  source 1..80: mol_type = other DNA
atgttaatcaaattgtacaagtgatgtccaaacgatcacgttctttaaattccgctgctttttattatcgagtctagata

SEQ ID NO: 28857 - DNA, 80 bp, synthetic construct
  source 1..80: mol_type = other DNA
gattatagtcatgatcttttcaattattgttaacgcacaaaattacgggattaatttgcctataactgggtcgatggata

SEQ ID NO: 28858 - DNA, 80 bp, synthetic construct
  source 1..80: mol_type = other DNA
tgtcatatgtgaacattactaaagatgaaccatttctaacgtcaacattatgtttatactatccaacagaggctagaaca

SEQ ID NO: 28859 - DNA, 80 bp, synthetic construct
  source 1..80: mol_type = other DNA
gagatacacgataatgagtggatacgtacgttatcgcagttgttcttaacaaagggatggccaactggatccgtatactt

SEQ ID NO: 28860 - DNA, 80 bp, synthetic construct
  source 1..80: mol_type = other DNA
aataccaggaaaatcatcctccgtcattaagtgtactagattaatgaaagataagatggaacgtggggaagttgaagttg

SEQ ID NO: 28861 - DNA, 80 bp, synthetic construct
  source 1..80: mol_type = other DNA
cacataatttgcaatgaattaaccatctacacatgaccctctatgagcacaatagttaaaagctaacactgtcaaaaacc

SEQ ID NO: 28862 - DNA, 80 bp, synthetic construct
  source 1..80: mol_type = other DNA
tctatgctaatacacaactggtactgcagagaccgtccgcgggtacggttcacgtgccttactctcaggcaccatctggc

SEQ ID NO: 28863 - DNA, 80 bp, synthetic construct
  source 1..80: mol_type = other DNA
aataaatgataactcatggaaggatacactttctcagctatttttaatcaaaggatggccaacaggatctatttatttta

SEQ ID NO: 28864 - DNA, 80 bp, synthetic construct
  source 1..80: mol_type = other DNA
aaattgtacaagctaatgtccaaaagatcaagatcattaaattctgctgcattttactacagagtataggtatagcttag

SEQ ID NO: 28865 - DNA, 80 bp, synthetic construct
  source 1..80: mol_type = other DNA
gggacgcaagttcagatcgtctagagcgttgaaaccaccatgtgtcaccagcaacactgagatgtttttcctattcagca

SEQ ID NO: 28866 - DNA, 80 bp, synthetic construct
  source 1..80: mol_type = other DNA
aacacagataagcgataatgaatggaaggacacattatctcaattgtttttaactaaaggatggccaacaggctcagtct

SEQ ID NO: 28867 - DNA, 80 bp, synthetic construct
  source 1..80: mol_type = other DNA
attttaatgaatactcgaatgttctagaattctccgtcgatccaaagttatattgtgattataatgttgtattaatcaga

SEQ ID NO: 28868 - DNA, 80 bp, synthetic construct
  source 1..80: mol_type = other DNA
ctgttaaagtgtgtccattaaatacgcaaactctaggagttggatgtcaaactacgaatacaaatacttttgaaacagtg

SEQ ID NO: 28869 - DNA, 80 bp, synthetic construct
  source 1..80: mol_type = other DNA
gctgaaagtgagaaattggctatagttgacgttgtcgatggtgtgaatcataaattggatattacatctacaacatgtac

SEQ ID NO: 28870 - DNA, 80 bp, synthetic construct
  source 1..80: mol_type = other DNA
gatacgaaactgtaataaactaggaccgagggaaaatgtagctataatacaggttggtggttctaacatactcgatataa

SEQ ID NO: 28871 - DNA, 80 bp, synthetic construct
  source 1..80: mol_type = other DNA
aaatagtgcaagtaatgtccaaaagatcaagatcactagactcatcttctttttactatagagtgtagatatatcctaaa

SEQ ID NO: 28872 - DNA, 80 bp, synthetic construct
  source 1..80: mol_type = other DNA
atacttcaagatatgagaaataccatcatggcatcaaaatctgtgggaactgctgaggaaaaactgaagaagaaatctgc

SEQ ID NO: 28873 - DNA, 80 bp, synthetic construct
  source 1..80: mol_type = other DNA
cagctacactgttcaatgacattgctgttccacactctgtgtgggttttttcctgtgctccagatagatgtcctcctact

SEQ ID NO: 28874 - DNA, 80 bp, synthetic construct
  source 1..80: mol_type = other DNA
gtcctcctactgcactttatgttgcagggattcctgaactcggagctttcttctcaattcttcaagacatgcgaaacaca

SEQ ID NO: 28875 - DNA, 80 bp, synthetic construct
  source 1..80: mol_type = other DNA
aaataatccaagcaatgtccaaaagatcgcgatcgttaaactctgcagcattttattatagagtttagatataactttgg

SEQ ID NO: 28876 - DNA, 80 bp, synthetic construct
  source 1..80: mol_type = other DNA
caagcaatgtccaaaagatcgcgatcgttaaactctgcagcattttattatagagtttagatataactttggttagagtt

SEQ ID NO: 28877 - DNA, 80 bp, synthetic construct
  source 1..80: mol_type = other DNA
ggtgacgtctataacatggactacccgccctttggcgcaggaagaccaggacaatttggcgatatccaaagtcgcacgcc

SEQ ID NO: 28878 - DNA, 80 bp, synthetic construct
  source 1..80: mol_type = other DNA
ttgacaagagccaagatgattcacttgcgcttactgccttgatgttgttagaagatttaggggtggatcactccctgttg

SEQ ID NO: 28879 - DNA, 80 bp, synthetic construct
  source 1..80: mol_type = other DNA
tgatgagttggagaaagcggtatactctaggtatgaagtgcagggtatatcagttgtggtaatgtccatggccacctttg

SEQ ID NO: 28880 - DNA, 80 bp, synthetic construct
  source 1..80: mol_type = other DNA
gtaaagagctgccttgcagcacgtacgtgcagagcaccgccgcaactaccgaggagatagaggtacacatgcccccagac

SEQ ID NO: 28881 - DNA, 80 bp, synthetic construct
  source 1..80: mol_type = other DNA
agtggttgatgctcaagatggagtctactcagcagatggcatcttctatcattaactcttctttcgaagctgcagttgtc

SEQ ID NO: 28882 - DNA, 80 bp, synthetic construct
  source 1..80: mol_type = other DNA
cgtttaaagggctgtcaactgatagaaaaatggatgaagtctctcaaataggaatttaattcgttatcgatttaagaatg

SEQ ID NO: 28883 - DNA, 80 bp, synthetic construct
  source 1..80: mol_type = other DNA
gtctctcaaataggaatttaattcgttatcgatttaagaatgggtataacaaagtaagaatagaaagcgcttatgtgacc

SEQ ID NO: 28884 - DNA, 80 bp, synthetic construct
  source 1..80: mol_type = other DNA
ttactattatcaacaaagtagcgaatcaaataaatggatatcgatgggaacagacttcacggtaaaagtttgtccactca

SEQ ID NO: 28885 - DNA, 80 bp, synthetic construct
  source 1..80: mol_type = other DNA
agtcatgtccaaacgatcaagatcattagacgcagctgctttttattatagaacttagattagaattgtatgatgtgacc

SEQ ID NO: 28886 - DNA, 80 bp, synthetic construct
  source 1..80: mol_type = other DNA
gttatacaagtcatgtccaaacgaccaagatcattagacgcagctgctttttattatagaacttagattagaattgtatg

SEQ ID NO: 28887 - DNA, 80 bp, synthetic construct
  source 1..80: mol_type = other DNA
aaagaatatacagatatcacttcgttctcaattgatccacaactttattgtgattataatgttgtgctaatgaagcatga

SEQ ID NO: 28888 - DNA, 80 bp, synthetic construct
  source 1..80: mol_type = other DNA
atgctcaagatggagtctactcaacagatggccagctcgatcattaacgcttcttttgaagctgcagttgttgctgccac

SEQ ID NO: 28889 - DNA, 80 bp, synthetic construct
  source 1..80: mol_type = other DNA
cactgaatggaaaatttggttcagcggcaagaaacagaaatttgatggctgataccagaaccacagctagattggatgaa

SEQ ID NO: 28890 - DNA, 80 bp, synthetic construct
  source 1..80: mol_type = other DNA
caacaaaaccaaattgccgatttacaacactactgtaataaattggaagttgagtcctacaaaataaaatccagttcaca

SEQ ID NO: 28891 - DNA, 80 bp, synthetic construct
  source 1..80: mol_type = other DNA
agtatcttcagttgaatggtacatgaaatcaatggaattgcctgatgaagttaagacggatattgaacaacagctaaatt

SEQ ID NO: 28892 - DNA, 80 bp, synthetic construct
  source 1..80: mol_type = other DNA
ccattgacgtaatcaacccaattaatgccatagatgcctttgagtccctaattagaaatattatacttgcttataataga

SEQ ID NO: 28893 - DNA, 80 bp, synthetic construct
  source 1..80: mol_type = other DNA
atattcttaatgtttaaggccttaatgaggcaatgcaactatgaatatacgtatgaatagtcacatcatatacttaaagt

SEQ ID NO: 28894 - DNA, 80 bp, synthetic construct
  source 1..80: mol_type = other DNA
gaacgagtcatctgcgtgttgggacgcaagttcagatcgtctagagcgttgaaaccaccatgtgtcaccagcaacactga

SEQ ID NO: 28895 - DNA, 80 bp, synthetic construct
  source 1..80: mol_type = other DNA
gaataagaagcaaaagcaaaagcgacaggcgccacaaaacaacacaaatcaaaagaagcagccgcctaaaaagaaaccag

SEQ ID NO: 28896 - DNA, 80 bp, synthetic construct
  source 1..80: mol_type = other DNA
aacaaactcagattattattatcatcgaaaggaattgatcaaaagatgagagtacttaatgcttgttttagtgtgaaaag

SEQ ID NO: 28897 - DNA, 80 bp, synthetic construct
  source 1..80: mol_type = other DNA
tttattatgtttaaaggattgttgcagcaaagtaattacacttatacctatgagtaaacatagtattattaccatcttca

SEQ ID NO: 28898 - DNA, 80 bp, synthetic construct
  source 1..80: mol_type = other DNA
atgaagtttctcaagtaggaatctagttcgttatctgtttgaaggtgggtatggcagagtaagaattgaaagcgcttatg

SEQ ID NO: 28899 - DNA, 80 bp, synthetic construct
  source 1..80: mol_type = other DNA
tttctgtacgacatttagaaaatttagtactaagaagagaaaaccatcaagacgtgctctttcattcaaaagaattgcta

SEQ ID NO: 28900 - DNA, 80 bp, synthetic construct
  source 1..80: mol_type = other DNA
aagtctcacaagtaggaatttaattcgttatcgatttgaggatgggtatgacgaagcgagaatagaaagcgcttatgtga

SEQ ID NO: 28901 - DNA, 80 bp, synthetic construct
  source 1..80: mol_type = other DNA
ggagtttatggaaagggaatgccccttcataaagccagaagttaagcctgggacaccagcacaggagatagaattcttga

SEQ ID NO: 28902 - DNA, 80 bp, synthetic construct
  source 1..80: mol_type = other DNA
tagtatgtggtttattccctacacagatacaagtgcgtaacatcatgagtccagtgatgggagtaattggtttttctttc

SEQ ID NO: 28903 - DNA, 80 bp, synthetic construct
  source 1..80: mol_type = other DNA
gggggaaagaaatggtggatcatttccatcttggtgatgatatggatcctgagctgaggggccttgctcagtcactcata

SEQ ID NO: 28904 - DNA, 80 bp, synthetic construct
  source 1..80: mol_type = other DNA
ttcagaatgcagcttttactgtgtggaaattgacgtatttagaccataaattaatgcctattttggatcagaatttcatt

SEQ ID NO: 28905 - DNA, 80 bp, synthetic construct
  source 1..80: mol_type = other DNA
tcgagggtctttcctagtgggaagtgcttgggaataacaatatcatctacctactgctcgactaaccatgattacaccat

SEQ ID NO: 28906 - DNA, 80 bp, synthetic construct
  source 1..80: mol_type = other DNA
tttctgtacgacatctagaaaacttagtgctgaggagggaaaatcatcaagacgtacttttccattcaaaagaactacta

SEQ ID NO: 28907 - DNA, 80 bp, synthetic construct
  source 1..80: mol_type = other DNA
tttccgttagacatcttgaaaactcagtgcttaggagggaaaatcatcaagatgtacttttccattcaaaagagctacta

SEQ ID NO: 28908 - DNA, 80 bp, synthetic construct
  source 1..80: mol_type = other DNA
cttaaatctgtggtgatagctattggtcagtcaaaagaaatcgaaactactgctactgctgaaggaggagaaattgtttt

SEQ ID NO: 28909 - DNA, 80 bp, synthetic construct
  source 1..80: mol_type = other DNA
gagtaacaacaagaacggaaatatactagagttcaacttgttagaccaacgaataatatggcagaattggtatgcattta

SEQ ID NO: 28910 - DNA, 80 bp, synthetic construct
  source 1..80: mol_type = other DNA
ttcagaatgcagcttttactatgtggaaattgacttatctagatcataaactaatgcctattttggaccaaaattttatc

SEQ ID NO: 28911 - DNA, 80 bp, synthetic construct
  source 1..80: mol_type = other DNA
aaaataacactaagagtggtaatgttattgattttaatttactggatcaaagaataatttggcaaaattggtatgcattt

SEQ ID NO: 28912 - DNA, 80 bp, synthetic construct
  source 1..80: mol_type = other DNA
ccaaaatactgcttttactatgtggaaattgacatatttagatcataaattaatgcctattttagatcaaaacttcattg

SEQ ID NO: 28913 - DNA, 80 bp, synthetic construct
  source 1..80: mol_type = other DNA
ggcttttaaagcgtctcagtcgccgtttgagccttgcggtgtagccatggctgagctagcttgcttttgttatcctcatt

SEQ ID NO: 28914 - DNA, 80 bp, synthetic construct
  source 1..80: mol_type = other DNA
attccttttaatagtttggcaataaaatgcatgttgacagcaaagatagataaaaaggaccaggataaattttataactc

SEQ ID NO: 28915 - DNA, 80 bp, synthetic construct
  source 1..80: mol_type = other DNA
aattgtttatggaattgcgccacctccacaatttaagaagcgttataatactaatgataactcaagaggtatgaactatg

SEQ ID NO: 28916 - DNA, 80 bp, synthetic construct
  source 1..80: mol_type = other DNA
gtggctattttgatttgcgaagcattgaattcgatcaaagttactcaatctgatgttgcaaatgttctttcaagagtagt

SEQ ID NO: 28917 - DNA, 80 bp, synthetic construct
  source 1..80: mol_type = other DNA
ttctgttagacatttggaaaatttggtattaaggaaagagaatcatcaggatgtactttttcattcaaaagaactactct

SEQ ID NO: 28918 - DNA, 80 bp, synthetic construct
  source 1..80: mol_type = other DNA
taaaagctgttttgatagctattggtcaatcaaaagaaattgaaactactgccactgctgaaggaggagaaatagtattc

SEQ ID NO: 28919 - DNA, 80 bp, synthetic construct
  source 1..80: mol_type = other DNA
gtggaaattgacatacctggatcataaactaatgcctattttagatcaaaactttatcgaatataaaattaccttgaatg

SEQ ID NO: 28920 - DNA, 80 bp, synthetic construct
  source 1..80: mol_type = other DNA
aagataaaccaatttcagatatgtgtgttaaagaacttgttgctgaattgaggtggcagtataatagattcgctgtgata

SEQ ID NO: 28921 - DNA, 80 bp, synthetic construct
  source 1..80: mol_type = other DNA
acacatggtaaaggtcactatagagttgttaaatattcatcagttgctaatcatgcagatagagtatttgctacatacaa

SEQ ID NO: 28922 - DNA, 80 bp, synthetic construct
  source 1..80: mol_type = other DNA
aaaccaatgttaaaagtgggaatgccattgattttaatttactagaccaaagaataatttggcagaactggtatgcgttt

SEQ ID NO: 28923 - DNA, 80 bp, synthetic construct
  source 1..80: mol_type = other DNA
acatcttccatgaaacaaggtaatactcttgatatatgtaagaagctactctttcaaaagatgaaacaagagaaaaatcc

SEQ ID NO: 28924 - DNA, 80 bp, synthetic construct
  source 1..80: mol_type = other DNA
gtttcgcacgttggaatttaattcactttcgattctaggatgatgatgacggagcaagaatagaaagcgcttatgtgacc

SEQ ID NO: 28925 - DNA, 80 bp, synthetic construct
  source 1..80: mol_type = other DNA
gtggcatctctgatttgtgaagcacttaattcaattaaagttactcaacctgatcttactaatattctttcgagggtagt

SEQ ID NO: 28926 - DNA, 80 bp, synthetic construct
  source 1..80: mol_type = other DNA
attgttgaggtctgttttaatagctattggtcaaacaaaagaaattgaaaccactgccacagctgagggaggtgaaatag

SEQ ID NO: 28927 - DNA, 80 bp, synthetic construct
  source 1..80: mol_type = other DNA
aaaataatgccaagaatggtaatgctactgaatttaatctcttggatcagagaattatttggcaaaattggtatgcgttc

SEQ ID NO: 28928 - DNA, 80 bp, synthetic construct
  source 1..80: mol_type = other DNA
catttaaaggattgtcaactgatagaaagatggatgaagtctcgcaaattggaatttaattcgctttcgattcgaaggtg

SEQ ID NO: 28929 - DNA, 80 bp, synthetic construct
  source 1..80: mol_type = other DNA
aaaacagtgctaagagtggtaatgttattgattttaacttgttagaccagagaattatttggcaaaattggtacgcattc

SEQ ID NO: 28930 - DNA, 80 bp, synthetic construct
  source 1..80: mol_type = other DNA
gaggatagaccagtctcagaatcacatgtaaaagaacttattgctgaattgcgatggcagtacaataaattcgcagtaat

SEQ ID NO: 28931 - DNA, 80 bp, synthetic construct
  source 1..80: mol_type = other DNA
cactcatggtaaaggtcactacagagttgtaaaatattcatcagttgcaaatcacgcagatagagtttatgctactttca

SEQ ID NO: 28932 - DNA, 80 bp, synthetic construct
  source 1..80: mol_type = other DNA
gagtaataataagaatggaaatatgctggagtttaatttactggaccagcgaataatatggcagaattggtatgcattca

SEQ ID NO: 28933 - DNA, 80 bp, synthetic construct
  source 1..80: mol_type = other DNA
cttttaaaggactgtcaactgatagaaagatggatgaagtctcacaagtaggaatttaattcgttatcggttcgaggatg

SEQ ID NO: 28934 - DNA, 80 bp, synthetic construct
  source 1..80: mol_type = other DNA
gtggcaatgttgatttgtgaggctctgaattcattaaaaattactcaaactgacgttgcaaacgtgttatcccgtgttgt

SEQ ID NO: 28935 - DNA, 80 bp, synthetic construct
  source 1..80: mol_type = other DNA
ttcagttcgacatatagaaaatctggtactaagaaaagaaaatccccaagatatactctttcattcaaaagatctgctaa

SEQ ID NO: 28936 - DNA, 80 bp, synthetic construct
  source 1..80: mol_type = other DNA
ttaaatcagtactcatagctatcggacaatcgaaagaaattgaaactacagctacagctgaaggaggagaaattgtattt

SEQ ID NO: 28937 - DNA, 80 bp, synthetic construct
  source 1..80: mol_type = other DNA
gaataacaataaatctggaattccatctgactttaatcttctcgaccaaagagtaatttggcaaaattggtatgcgttta

SEQ ID NO: 28938 - DNA, 80 bp, synthetic construct
  source 1..80: mol_type = other DNA
agaataatgctaagagtggtaatgttactgactttaatttgttagatcaaaggattatttggcaaaattggtatgcattt

SEQ ID NO: 28939 - DNA, 80 bp, synthetic construct
  source 1..80: mol_type = other DNA
agaataatgccaagagtgggaatgttactgactttaatctgcttgaccaaagaataatttggcagaattggtatgctttt

SEQ ID NO: 28940 - DNA, 80 bp, synthetic construct
  source 1..80: mol_type = other DNA
tgtatttaaaggattgtcaactgatagaaagatggatgaagtttcacatgttggaatttaattcgctttcgattcgagaa

SEQ ID NO: 28941 - DNA, 80 bp, synthetic construct
  source 1..80: mol_type = other DNA
tgctgagatcagtactaatagctattggtcactcaaaagaaattgaaacaactgccactgctgaaggaggggaagtagtt

SEQ ID NO: 28942 - DNA, 80 bp, synthetic construct
  source 1..80: mol_type = other DNA
tttcaaaatgcagcttttacaatgtggaaactgacatacctggagcatagactaatgccaattttggatcaaaattttat

SEQ ID NO: 28943 - DNA, 80 bp, synthetic construct
  source 1..80: mol_type = other DNA
cgtcttcaatgaaacaaggtaatactcttgatgtgtgcaaaaaactactcttccaaaaaatgaagcgagaaagcaattca

SEQ ID NO: 28944 - DNA, 80 bp, synthetic construct
  source 1..80: mol_type = other DNA
gtggcagcattaatttgtgaagcattaaattcaaccaaagttactcaatctgatattgctagtgtgctctcaagagtagt

SEQ ID NO: 28945 - DNA, 80 bp, synthetic construct
  source 1..80: mol_type = other DNA
ccaaaatactgcatttacaatgtggagattgacgtatttggagcataaattaatgccaattcttgacccaaatttcattg

SEQ ID NO: 28946 - DNA, 80 bp, synthetic construct
  source 1..80: mol_type = other DNA
agtacaagattacagttaacgaagataaaccaatctcagaatcacatataaaagaacttattgctgaattgcggtggcag

SEQ ID NO: 28947 - DNA, 80 bp, synthetic construct
  source 1..80: mol_type = other DNA
gagtaacaataagaatggaaatatgttggaatttaacctactagatcaaagaataatatggcaaaattggtatgcgttta

SEQ ID NO: 28948 - DNA, 80 bp, synthetic construct
  source 1..80: mol_type = other DNA
cgttcaagggactgtcaactgataggaagatggacgaagtttctcaaataggaatttaattcgttatcgattcaagaatg

SEQ ID NO: 28949 - DNA, 80 bp, synthetic construct
  source 1..80: mol_type = other DNA
gaataacgctaaaagtggtaacgttactgattttaatttgctagaccaaagaataatctggcaaaattggtacgcgttca

SEQ ID NO: 28950 - DNA, 80 bp, synthetic construct
  source 1..80: mol_type = other DNA
cattcaaaggattgtcaactgatagaaagatggacgaagtttcgcatgtaggaatttaattcactttcgattcaaggatg

SEQ ID NO: 28951 - DNA, 80 bp, synthetic construct
  source 1..80: mol_type = other DNA
acataagaataatgctaagagtggtaatactaccgatttcaatttactagaccaaagaattatttggcaaaattggtatg

SEQ ID NO: 28952 - DNA, 80 bp, synthetic construct
  source 1..80: mol_type = other DNA
catttacatcttcaatgaaacaaggtaatacaattgatgtatgtaagaaactactctttcaaaagatgaaacaagagaaa

SEQ ID NO: 28953 - DNA, 80 bp, synthetic construct
  source 1..80: mol_type = other DNA
tagaaaaatggatgaagtttctcaagtaggaatctagttcgttatctgtttgaaggtgggtatggcagagtaagaattga

SEQ ID NO: 28954 - DNA, 80 bp, synthetic construct
  source 1..80: mol_type = other DNA
gagcaataataagaatggtaatgtgctagagtttaatctacttgatcaaagagtaatatggcagaactggtatgcgttta

SEQ ID NO: 28955 - DNA, 80 bp, synthetic construct
  source 1..80: mol_type = other DNA
catcctcaatgaaacaaggtaacactcttgaaatatgcaagaaactactgttccaaaaaatgaagcgggaaagtaatccg

SEQ ID NO: 28956 - DNA, 80 bp, synthetic construct
  source 1..80: mol_type = other DNA
agaataatgccaagagtggtaatactactgatttcaatttgctagaccaaagaattatttggcaaaattggtatgcattt

SEQ ID NO: 28957 - DNA, 80 bp, synthetic construct
  source 1..80: mol_type = other DNA
cgttcaaaggattgtcaactgatagaaaaatggatgaagtctcacatgttggaatttaattcgctttcgattcaagaatg

SEQ ID NO: 28958 - DNA, 80 bp, synthetic construct
  source 1..80: mol_type = other DNA
tttgatatcagttatattgttgaattacgtactcaaatccttaactagaatgatggactttattatttacagatttcttt

SEQ ID NO: 28959 - DNA, 80 bp, synthetic construct
  source 1..80: mol_type = other DNA
aaagaatatgccgatatcgcttcattctcaattgacccacaactttattgcgattataatgttgtactgatgaagtatga

SEQ ID NO: 28960 - DNA, 80 bp, synthetic construct
  source 1..80: mol_type = other DNA
tacttattgttattgcatcaccttttgttaaaacgcaaaactatggaattaatttaccgattactggctccatggataca

SEQ ID NO: 28961 - DNA, 80 bp, synthetic construct
  source 1..80: mol_type = other DNA
gcatatgcaaattcatcacagcaagaaacatttttgacttcaacgctatgcttgtattatcctacagaagcatcaactca

SEQ ID NO: 28962 - DNA, 80 bp, synthetic construct
  source 1..80: mol_type = other DNA
aattggagatacggaatggaaggatactctgtcccaattattcttgactaaagggtggccaactggatcagtctatttta

SEQ ID NO: 28963 - DNA, 80 bp, synthetic construct
  source 1..80: mol_type = other DNA
gattataatgttgtactgatgaagtatgattcaacgttagagctagatatgtctgaattagctgatttaattctaaatga

SEQ ID NO: 28964 - DNA, 80 bp, synthetic construct
  source 1..80: mol_type = other DNA
atggttatgtaacccaatggatataacattatattattatcagcaaacagatgaagcgaataaatggatatcgatgggac

SEQ ID NO: 28965 - DNA, 80 bp, synthetic construct
  source 1..80: mol_type = other DNA
ccataaaagtatgtccattgaatacacagactttaggaataggttgtattaccacaaatacagcgacatttgaagaggtg

SEQ ID NO: 28966 - DNA, 80 bp, synthetic construct
  source 1..80: mol_type = other DNA
gctacaagtgaaaaattagtaataaccgatgttgttgatggtgtgaaccataaacttgatgtgactacaaatacctgtac

SEQ ID NO: 28967 - DNA, 80 bp, synthetic construct
  source 1..80: mol_type = other DNA
aattaggaattgtaagaagttaggaccaagagaaaatgtagcgattatacaagtcggtggctcagatgtgttagatatta

SEQ ID NO: 28968 - DNA, 80 bp, synthetic construct
  source 1..80: mol_type = other DNA
tctgatatcaatagttttattgaactatatattaaaatcactaactagtgcgatggactttataatttatagatttcttt

SEQ ID NO: 28969 - DNA, 80 bp, synthetic construct
  source 1..80: mol_type = other DNA
actactgcaccacaaactgaacgtatgatgcgagtaaattggaagaaatggtggcaagttttctatacggtagtagatta

SEQ ID NO: 28970 - DNA, 80 bp, synthetic construct
  source 1..80: mol_type = other DNA
attgtgcaagttatgtccaaaagatcacggtcattaaattcagcagctttttactataggatttgatatatcttaggtta

SEQ ID NO: 28971 - DNA, 80 bp, synthetic construct
  source 1..80: mol_type = other DNA
aaaagatcacggtcattaaattcagcagctttttactataggatttgatatatcttaggttagaattggtcgatgtgacc

SEQ ID NO: 28972 - DNA, 80 bp, synthetic construct
  source 1..80: mol_type = other DNA
tttgatatttatcatattattgaattatatattaaaaactataactaatacgatggactatataatttttaggttattac

SEQ ID NO: 28973 - DNA, 80 bp, synthetic construct
  source 1..80: mol_type = other DNA
gcatatgcaaactctacacaacaggaaaattttatgacttccactttatgtttatattatccaagttcagttacgactga

SEQ ID NO: 28974 - DNA, 80 bp, synthetic construct
  source 1..80: mol_type = other DNA
atagtgcaagtaatgtccaaaagatcgagatcgttagattcgtcggctttctattatagagtatagcgataccctaaaaa

SEQ ID NO: 28975 - DNA, 80 bp, synthetic construct
  source 1..80: mol_type = other DNA
aaagatcgagatcgttagattcgtcggctttctattatagagtatagcgataccctaaaaaagaattgtatgatgtgacc

SEQ ID NO: 28976 - DNA, 80 bp, synthetic construct
  source 1..80: mol_type = other DNA
taacatttgtaattgtagtattatcagtattagcgaatgcgccaaattatggaataaatttgccaattactggatctatg

SEQ ID NO: 28977 - DNA, 80 bp, synthetic construct
  source 1..80: mol_type = other DNA
gatacagcatatgctaactcaacaccaaacaataattttttatcttcaactttatgtctatattatccatcagaagctcc

SEQ ID NO: 28978 - DNA, 80 bp, synthetic construct
  source 1..80: mol_type = other DNA
aactcaaattagtgacactgaatggaaagatacactatctcagctgtttttaaccaaaggatggccgacaagttcagctt

SEQ ID NO: 28979 - DNA, 80 bp, synthetic construct
  source 1..80: mol_type = other DNA
attttaatgaatattcaaaggttttagaattttccatgcacccaaagctatactgtgattataatattgtgctaattaaa

SEQ ID NO: 28980 - DNA, 80 bp, synthetic construct
  source 1..80: mol_type = other DNA
ttcgcttctggtgaggagttggacatatctgaattagctgatctaatactgaatgagtggttatgtaatccaatggatat

SEQ ID NO: 28981 - DNA, 80 bp, synthetic construct
  source 1..80: mol_type = other DNA
ggtcatcatgccccgttaaagtgtgtccattaaatactcagacattagggattggatgtcaggcgacaaatacagctact

SEQ ID NO: 28982 - DNA, 80 bp, synthetic construct
  source 1..80: mol_type = other DNA
tttggaacagttgctgatagcgggaaattgggaataattgatgttgttgacagcgtaaatcataaattagatgtcacatc

SEQ ID NO: 28983 - DNA, 80 bp, synthetic construct
  source 1..80: mol_type = other DNA
attttatttgatatcgttcgttcttgtgagttatattctgaagactataataaagataatggactatattatttatagaa

SEQ ID NO: 28984 - DNA, 80 bp, synthetic construct
  source 1..80: mol_type = other DNA
tactacatgtacgaaacgggattgtaataaactaggaccgagagaaaatgtggccataatacaggttggtggttctaata

SEQ ID NO: 28985 - DNA, 80 bp, synthetic construct
  source 1..80: mol_type = other DNA
tattagatattgcggctgatcccacaacttctccaccaacagaacgaatgatgcgcgtgaactggaaaaaatggtggcaa

SEQ ID NO: 28986 - DNA, 80 bp, synthetic construct
  source 1..80: mol_type = other DNA
atagtgcaaatgatgtccaaaagatcgagatcgttagagtcggggcccttctattatagagtatagagaacctcaataat

SEQ ID NO: 28987 - DNA, 80 bp, synthetic construct
  source 1..80: mol_type = other DNA
aaagatcgagatcgttagagtcggggcccttctattatagagtatagagaacctcaataatagaattgtatgatgtgacc

SEQ ID NO: 28988 - DNA, 80 bp, synthetic construct
  source 1..80: mol_type = other DNA
atagtgcaaataatgtccaaaagatcgagatcgttagattcatcatctttcaattatagagtgtagggccatcccaaact

SEQ ID NO: 28989 - DNA, 80 bp, synthetic construct
  source 1..80: mol_type = other DNA
aaagatcgagatcgttagattcatcatctttcaattatagagtgtagggccatcccaaactagaattgtatgatgtgacc

SEQ ID NO: 28990 - DNA, 80 bp, synthetic construct
  source 1..80: mol_type = other DNA
atagtgcaagtaatgttctatagattgagattgttagatttgtcgggtcctctttttagagtatagagatatcctaaaat

SEQ ID NO: 28991 - DNA, 80 bp, synthetic construct
  source 1..80: mol_type = other DNA
atagattgagattgttagatttgtcgggtcctctttttagagtatagagatatcctaaaatagaattgtatgatgtgacc

SEQ ID NO: 28992 - DNA, 80 bp, synthetic construct
  source 1..80: mol_type = other DNA
atagtgcaagtaatgtccaaaagatcgaggtcgttagattcgtgggctttctattatagagtatagcccgcacctaaaat

SEQ ID NO: 28993 - DNA, 80 bp, synthetic construct
  source 1..80: mol_type = other DNA
aaagatcgagctcgttagattcgtgggctttctattatagagtatagcccgcacctaaaatagaattgtatgatgtgacc

SEQ ID NO: 28994 - DNA, 80 bp, synthetic construct
  source 1..80: mol_type = other DNA
tttacgttggttactgtaacattatctgccttgacgagagctcagaattatggacttaacttaccaataacaggatcaat

SEQ ID NO: 28995 - DNA, 80 bp, synthetic construct
  source 1..80: mol_type = other DNA
ccgttaaagtgtgtccattaaatactcagacattaggaattggatgtcaaacgacaaatacagctacttttgaaacagtt

SEQ ID NO: 28996 - DNA, 80 bp, synthetic construct
  source 1..80: mol_type = other DNA
gctgatagcgaaaaattggcaataattgatgttgtcgacagcgtaaatcataaattagatgtcacatctactacatgtac

SEQ ID NO: 28997 - DNA, 80 bp, synthetic construct
  source 1..80: mol_type = other DNA
aatacggaattgtaataaactaggaccgagagaaaatgtggctataatacaggttggcggttctaatatattagatataa

SEQ ID NO: 28998 - DNA, 80 bp, synthetic construct
  source 1..80: mol_type = other DNA
atagtacaagtaatgtccaaaagatcgagatcgttagattcatcctctttctattatagagtatgaagacatcctaaaat

SEQ ID NO: 28999 - DNA, 80 bp, synthetic construct
  source 1..80: mol_type = other DNA
aaagatcgagatcgttagattcatcctctttctattatagagtatgaagacatcctaaaatagaattgtatgatgtgacc

SEQ ID NO: 29000 - DNA, 80 bp, synthetic construct
  source 1..80: mol_type = other DNA
atagtacaagttatgtccaaaagatcgagatcgtcagattcgtcctatttctattatagagtgtagaagaagactactcc

SEQ ID NO: 29001 - DNA, 80 bp, synthetic construct
  source 1..80: mol_type = other DNA
aaagatcgagatcgtcagattcgtcctatttctattatagagtgtagaagaagactactccagaattgtatgatgtgacc

SEQ ID NO: 29002 - DNA, 80 bp, synthetic construct
  source 1..80: mol_type = other DNA
aactcaaattagtgacactgaatggaaagatacactatctcagctggccttacccaaggaagggccgacaggttcagttt

SEQ ID NO: 29003 - DNA, 80 bp, synthetic construct
  source 1..80: mol_type = other DNA
attttaatggatattcagacgttctagaattttccatcgaaccaaagttatactgtgattataatgttgtgctaattaag

SEQ ID NO: 29004 - DNA, 80 bp, synthetic construct
  source 1..80: mol_type = other DNA
gttcaacgcgcccgttaaaagtgtgtccattaaatactcagacattaggaattggatgtcaaacgaccaatacagctact

SEQ ID NO: 29005 - DNA, 80 bp, synthetic construct
  source 1..80: mol_type = other DNA
aaagatcaagatcattaaattctgctgcgttttattatagagtatagatactctctaaaatagaactgtttgatgtgacc

SEQ ID NO: 29006 - DNA, 80 bp, synthetic construct
  source 1..80: mol_type = other DNA
ccatatacgaattcaacaatgagtgaaacgtttctaacttccacattatgcttgtattatccgaatgaagcggctactga

SEQ ID NO: 29007 - DNA, 80 bp, synthetic construct
  source 1..80: mol_type = other DNA
aattgcagacgccaagtggacggagacgctgtcacaactgtttctaactaaaggatggtcaacaggatcagtttacttca

SEQ ID NO: 29008 - DNA, 80 bp, synthetic construct
  source 1..80: mol_type = other DNA
atggatacgcagatattgcatcattctctgtagaaccacaactatactgtgattataatattgtgttaatgaaatacgat

SEQ ID NO: 29009 - DNA, 80 bp, synthetic construct
  source 1..80: mol_type = other DNA
aatggttatgcaatccaatggacataacgctctactattaccaacaaactgacgaggctaataagtggatatctatgggt

SEQ ID NO: 29010 - DNA, 80 bp, synthetic construct
  source 1..80: mol_type = other DNA
cgattaaagtgtgtcctctgaatgcgcagacccttggaataggatgcttaactacggatactaattcatttgaagtagta

SEQ ID NO: 29011 - DNA, 80 bp, synthetic construct
  source 1..80: mol_type = other DNA
gccaatactgaaaaattagccataactgatgtcgtcgatggagttaattataaattggatgtaacaacgaatacatgtac

SEQ ID NO: 29012 - DNA, 80 bp, synthetic construct
  source 1..80: mol_type = other DNA
tataaggaattgcaagaaacttggaccaagagagaacgttgcagtaattcaagtaggaggttcaaacatacttgatataa

SEQ ID NO: 29013 - DNA, 80 bp, synthetic construct
  source 1..80: mol_type = other DNA
tttgatatcgcttgtattcatcaattacctattaaaatcagtaactagaataatggactttattatctatagatttttaa

SEQ ID NO: 29014 - DNA, 80 bp, synthetic construct
  source 1..80: mol_type = other DNA
acgttaaccaaattgtgcaagttatgtccaagcgatcgcgatctctaaactcagctgcattttactatcgagtttagata

SEQ ID NO: 29015 - DNA, 80 bp, synthetic construct
  source 1..80: mol_type = other DNA
ctctttattgtaattgtcacaccatttgtaaattcacagaactatggcataaacttgccaattactggatccatggacac

SEQ ID NO: 29016 - DNA, 80 bp, synthetic construct
  source 1..80: mol_type = other DNA
gaactatcagaacgtatcggcttcagaaccatttttgacatcaacgctatgtctttattatccaacagaagctgaaacag

SEQ ID NO: 29017 - DNA, 80 bp, synthetic construct
  source 1..80: mol_type = other DNA
agattgctgatagttcatggaaagatacactatcgcaattgttcttgacaaaaggatggccaactggttctgtttacctt

SEQ ID NO: 29018 - DNA, 80 bp, synthetic construct
  source 1..80: mol_type = other DNA
aaaagctacacagatattacaactttttcgataaatcctcagttatactgtgattataatatagtactgatgaaatatag

SEQ ID NO: 29019 - DNA, 80 bp, synthetic construct
  source 1..80: mol_type = other DNA
tgctaattcggaattagacatgtcggaattggcagatctaatacttaatgaatggttatgtaatccaatggacataacat

SEQ ID NO: 29020 - DNA, 80 bp, synthetic construct
  source 1..80: mol_type = other DNA
aaagttagcgataacagatgtcgttgatggagtgaattataagataaatattactactactacatgcaccattagaaact

SEQ ID NO: 29021 - DNA, 80 bp, synthetic construct
  source 1..80: mol_type = other DNA
gtaaaaaactgggacctagggaaaacgttgcagttattcaagtaggtggttcgaacgtgttagacattacagccgacccg

SEQ ID NO: 29022 - DNA, 80 bp, synthetic construct
  source 1..80: mol_type = other DNA
ggctttaaaagagagagaagtggcgcaacgatgggagggagaagtttaaagacgtggcgcagagaccgcgctaaatattg

SEQ ID NO: 29023 - DNA, 80 bp, synthetic construct
  source 1..80: mol_type = other DNA
tactaggaaacgctctgatcaccatttgtaaggacacaacagaattatggcatgtatttccaataacaggatcaatggac

SEQ ID NO: 29024 - DNA, 80 bp, synthetic construct
  source 1..80: mol_type = other DNA
actgtatacactaactctactcaagaaggaattatttctaggtatccacattatgtttgtactatccaactgaaggaagt

SEQ ID NO: 29025 - DNA, 80 bp, synthetic construct
  source 1..80: mol_type = other DNA
aaaatcaatgatggtgaatggagagactcattgtcgcaaatgttacttacgaaagtcttggccaacaggatctcaaaaca

SEQ ID NO: 29026 - DNA, 80 bp, synthetic construct
  source 1..80: mol_type = other DNA
tcggataccaaatattgttgatttttctgttgaaccacagctgtattgtgactataatttagtacttatgaaatatgatc

SEQ ID NO: 29027 - DNA, 80 bp, synthetic construct
  source 1..80: mol_type = other DNA
aaacacaagaattagattatgtcagagttagccgatctaatattgaacgaatggttatgcaacccaatggatgtaacgct

SEQ ID NO: 29028 - DNA, 80 bp, synthetic construct
  source 1..80: mol_type = other DNA
atcatcatgtactgtgaaagtgtgtccactaaatacacaaacgataggaataggttgtcaaacaacgaatgtagactcat

SEQ ID NO: 29029 - DNA, 80 bp, synthetic construct
  source 1..80: mol_type = other DNA
tgctgagaatgaaaaattagctatagtggatgtagttgatgggataactcataaaatatttccctcgcgcgttctatgta

SEQ ID NO: 29030 - DNA, 80 bp, synthetic construct
  source 1..80: mol_type = other DNA
ttcgatggtaccgatatctaattccgaggcgaggatcaaaactataactaatacgaacgaatacataatttttagatttt

SEQ ID NO: 29031 - DNA, 80 bp, synthetic construct
  source 1..80: mol_type = other DNA
tttttgttgttattgtcacaccatttgtaaattcacaaaattatggcattaatttaccgataacggggtcaatggataca

SEQ ID NO: 29032 - DNA, 80 bp, synthetic construct
  source 1..80: mol_type = other DNA
aactatcaaaacgtgtctaatcctgaaccgtttctaacatcaacactatgcttgtattatccagtaaaagcagaaacaga

SEQ ID NO: 29033 - DNA, 80 bp, synthetic construct
  source 1..80: mol_type = other DNA
aatagcagatagttcatggaaagatactttatcgcaattatttctgacaaaaggatggccaactggttctgtctatctta

SEQ ID NO: 29034 - DNA, 80 bp, synthetic construct
  source 1..80: mol_type = other DNA
aaagttacacaaatattgcaactttttcaataaatccgcaattatactgtgactataacattgtactaatgaagtataat

SEQ ID NO: 29035 - DNA, 80 bp, synthetic construct
  source 1..80: mol_type = other DNA
tttgatattgcttgtattgttgaactatatattaaaatcaataacctgggttatggactatatactctatcgttttttgc

SEQ ID NO: 29036 - DNA, 80 bp, synthetic construct
  source 1..80: mol_type = other DNA
acagcagatccgacaacggcaccacagacagaaaggatgatgagaataagttggaaaaaatggtggcaagtcttttacac

SEQ ID NO: 29037 - DNA, 80 bp, synthetic construct
  source 1..80: mol_type = other DNA
aaataatccaagcaatgtccaagagatcacgatcactagattcagcagcgttttactatagaatctaaatgtcattgaag

SEQ ID NO: 29038 - DNA, 80 bp, synthetic construct
  source 1..80: mol_type = other DNA
agagatcacgatcactagattcagcagcgttttactatagaatctaaatgtcattgaagttaaagttgtatgatgtgacc

SEQ ID NO: 29039 - DNA, 80 bp, synthetic construct
  source 1..80: mol_type = other DNA
ttttgctatttattgtaatcattacaccatttgtaaattcacagaactatggcataaatttaccaattactggatctatg

SEQ ID NO: 29040 - DNA, 80 bp, synthetic construct
  source 1..80: mol_type = other DNA
aacctatcagaacggatcaacttcagagccatttttaacatcaacattgtgcctttattacccagcagaagctgaaacag

SEQ ID NO: 29041 - DNA, 80 bp, synthetic construct
  source 1..80: mol_type = other DNA
agattgctgatagctcgtggaaagatacattgtcacaattgtttttaacaaaaggatggccaactggttctgtttatctt

SEQ ID NO: 29042 - DNA, 80 bp, synthetic construct
  source 1..80: mol_type = other DNA
aaaagttacacagatattgcgactttttcaataaatcctcaattatattgcgattacaatatagttctaatgaaatataa

SEQ ID NO: 29043 - DNA, 80 bp, synthetic construct
  source 1..80: mol_type = other DNA
cgctaactcggagttggacaggtcagaattagcagatttgatacttaacgaatggttatgtaatccaatggacataacgt

SEQ ID NO: 29044 - DNA, 80 bp, synthetic construct
  source 1..80: mol_type = other DNA
agactcatgtaccattaaagtgtgtccactaaatacgcaaacattaggtattggatgtctcactagtgatactacaactt

SEQ ID NO: 29045 - DNA, 80 bp, synthetic construct
  source 1..80: mol_type = other DNA
aaaattagcaataacagatgttgttgatggagtgaattacaaagtaaatgtcaccactactacatgtacaattaggaact

SEQ ID NO: 29046 - DNA, 80 bp, synthetic construct
  source 1..80: mol_type = other DNA
agtcttcttgatattgctagtattgttgaattatatactaaaatcaataactagagttatggactacatactctacaggt

SEQ ID NO: 29047 - DNA, 80 bp, synthetic construct
  source 1..80: mol_type = other DNA
gtaaaaagttgggacctagagagaatgttgcagtgatacaactaggtggttcaaatattttagatataacagctgatcct

SEQ ID NO: 29048 - DNA, 80 bp, synthetic construct
  source 1..80: mol_type = other DNA
atgtaaatcaaataattcaagcaatgtccaaaagatgccgatcattagactcagcagcattttattatagaatctagata

SEQ ID NO: 29049 - DNA, 80 bp, synthetic construct
  source 1..80: mol_type = other DNA
aattaaggtatgtccattgaatacacagacgttaggaattggttgtctcaccacggatactacaactttcgaagaagttg

SEQ ID NO: 29050 - DNA, 80 bp, synthetic construct
  source 1..80: mol_type = other DNA
caacagctgtcaagttggcaataacggacgttgttgacggagtgaattataaaataaacgtaacgacgactacatgtact

SEQ ID NO: 29051 - DNA, 80 bp, synthetic construct
  source 1..80: mol_type = other DNA
atgtgaaccaaataattcaagcaatgtccaagagatcgcggtcactggactcagcatcattttattatagaatgtagata

SEQ ID NO: 29052 - DNA, 80 bp, synthetic construct
  source 1..80: mol_type = other DNA
tttttattgtgattgtcacaccatttgtaaactcgcagaactatggcattaacttaccgataactggatcaatggataca

SEQ ID NO: 29053 - DNA, 80 bp, synthetic construct
  source 1..80: mol_type = other DNA
aattatcaaaatgtgtctaattcggaaccgtttttaacatcaacattatgcttgtattatccagtagaagcagagacaga

SEQ ID NO: 29054 - DNA, 80 bp, synthetic construct
  source 1..80: mol_type = other DNA
gatagcagacagctcgtggaaagatactttatcgcagttattcttgacaaaaggatggccaactggttctgtttatttta

SEQ ID NO: 29055 - DNA, 80 bp, synthetic construct
  source 1..80: mol_type = other DNA
agagctatacagatattgcaactttttcaataaatcctcaactatattgtgattataatatagtattaatgaaatataac

SEQ ID NO: 29056 - DNA, 80 bp, synthetic construct
  source 1..80: mol_type = other DNA
gctaattcagagttagatatgtcagaattagccgatttaatacttaatgagtggctttgcaatccaatggacataacatt

SEQ ID NO: 29057 - DNA, 80 bp, synthetic construct
  source 1..80: mol_type = other DNA
aaagttggcgataacagacgttgttgatggagtgaattataaagtaaacgtaacgacgactacatgtaccatcagaaact

SEQ ID NO: 29058 - DNA, 80 bp, synthetic construct
  source 1..80: mol_type = other DNA
gtaagaaattgggcccacgagagaatgttgcagttatccaagtcggtggttcaaatatattagatattacggcagacccg

SEQ ID NO: 29059 - DNA, 80 bp, synthetic construct
  source 1..80: mol_type = other DNA
tctggtattgcttgtattattgaattatatattaaaatcaataaccagaataatggactacatactctatcgttttttgc

SEQ ID NO: 29060 - DNA, 80 bp, synthetic construct
  source 1..80: mol_type = other DNA
aaataattcaagcaatgtccaagagatcgcggtcactggattcagcgtcattttattatagaatctaaatatcattgaag

SEQ ID NO: 29061 - DNA, 80 bp, synthetic construct
  source 1..80: mol_type = other DNA
agagatcgcggtcactggattcagcgtcattttattatagaatctaaatatcattgaagttagaattgtatgatgtgacc

SEQ ID NO: 29062 - DNA, 80 bp, synthetic construct
  source 1..80: mol_type = other DNA
ttgaaacagttgcaacgaccgaaaagttagtgattactgatgtcgtggatggcgttaaccataaattggatgttacaacg

SEQ ID NO: 29063 - DNA, 80 bp, synthetic construct
  source 1..80: mol_type = other DNA
ttagtagtggtaatactgaccaccgtgacaaatgcgcaaaattatggcgttaatttgcctattacaggatctatggatac

SEQ ID NO: 29064 - DNA, 80 bp, synthetic construct
  source 1..80: mol_type = other DNA
cacatacgcaaattcaacacaaagtgaatcttttttaacatcaactctgtgtttgtattacccagtcgaagcatcgaatg

SEQ ID NO: 29065 - DNA, 80 bp, synthetic construct
  source 1..80: mol_type = other DNA
aaatagctgacaccgaatggaaaaatactttgtcacaactatttctgaccaaaggatggccaactggacctgtgtacttc

SEQ ID NO: 29066 - DNA, 80 bp, synthetic construct
  source 1..80: mol_type = other DNA
atcgcttcgcacagtaaaagtatgtccattaaatacacaaacgctcggtatcggatgtctaataactgatccaaatacat

SEQ ID NO: 29067 - DNA, 80 bp, synthetic construct
  source 1..80: mol_type = other DNA
ttgagacagttgcaacgaccgaaaagttagtgattactgatgtcgtggatggatgcgtacataaattggatgttacaacg

SEQ ID NO: 29068 - DNA, 80 bp, synthetic construct
  source 1..80: mol_type = other DNA
acaacttctactatacgcaactgtaagaaattaggaccaagagaaaacgtagcagttatccaagtaggcggtgcgaacat

SEQ ID NO: 29069 - DNA, 80 bp, synthetic construct
  source 1..80: mol_type = other DNA
tcttgatatcaattacattgctaaattatatattaaaatcaataacaagaataatggactatataatttataggtttcta

SEQ ID NO: 29070 - DNA, 80 bp, synthetic construct
  source 1..80: mol_type = other DNA
acgtcaatcagataattcaggcaatgtccaaaagatctaggtcgctaaactcatcagcattctactacagagtgtagata

SEQ ID NO: 29071 - DNA, 80 bp, synthetic construct
  source 1..80: mol_type = other DNA
tgatttatgtagcattatttgccttgacaagagctcagaattatgggcttaacttaccaataacagggtcaatggacact

SEQ ID NO: 29072 - DNA, 80 bp, synthetic construct
  source 1..80: mol_type = other DNA
gtatacgctaactctactcacgaaggaatatttctaacatctacattatgtttgtattatccaactgaagcaagtactca

SEQ ID NO: 29073 - DNA, 80 bp, synthetic construct
  source 1..80: mol_type = other DNA
aattaatgatggtgaatggaaagactcattgtcacaaatgtttctcacaaagggttggccaacaggatcagtctatttta

SEQ ID NO: 29074 - DNA, 80 bp, synthetic construct
  source 1..80: mol_type = other DNA
aagagtattcaaatatgggtgatttttcgggtgatccaccattatatggtgattataacttagtactaatgaaatatgat

SEQ ID NO: 29075 - DNA, 80 bp, synthetic construct
  source 1..80: mol_type = other DNA
caaaatcttgaaatagatatgtcagagttagctgatttaatattgaatgaatggttatgtaatcccatggatataacatt

SEQ ID NO: 29076 - DNA, 80 bp, synthetic construct
  source 1..80: mol_type = other DNA
ctgtgaaagtgtgtccactgaatacgcaaacgttaggaataggttgtcaaactacaaatgtagactcgtttgaaatggtt

SEQ ID NO: 29077 - DNA, 80 bp, synthetic construct
  source 1..80: mol_type = other DNA
gctgagaatgagaaattagctatagtggatgtcgttgatgggataaatcataaaataaatttgacaactacgacatgtac

SEQ ID NO: 29078 - DNA, 80 bp, synthetic construct
  source 1..80: mol_type = other DNA
tattcgaaattgtaagaagttaggtccaagagagaatgtagctgtaatacaagttggtggctctaatgtattagacataa

SEQ ID NO: 29079 - DNA, 80 bp, synthetic construct
  source 1..80: mol_type = other DNA
tctgatatcaattattctactcaactatatattaaaatcagtaactcgaataatggactacattatatatagatctttgt

SEQ ID NO: 29080 - DNA, 80 bp, synthetic construct
  source 1..80: mol_type = other DNA
cagcagatccaacgactaatccacaaactgagagaatgatgagagtgagttggaaaaaatggtggcaagtattttacact

SEQ ID NO: 29081 - DNA, 80 bp, synthetic construct
  source 1..80: mol_type = other DNA
atagtagattatattaaccagatcatacaggtaatgtctaaaagatcaagatcattaaattctgcagctttttactatag

SEQ ID NO: 29082 - DNA, 80 bp, synthetic construct
  source 1..80: mol_type = other DNA
cacactttaatagtacacgagtctcccattgatatccatttattcgcctcatccgtttgctgataatagtacaacgttat

SEQ ID NO: 29083 - DNA, 80 bp, synthetic construct
  source 1..80: mol_type = other DNA
ctatttgttgtaattgtcacaccattcgtaaactcacagaattatggcataaatctaccgattactggatctatggatat

SEQ ID NO: 29084 - DNA, 80 bp, synthetic construct
  source 1..80: mol_type = other DNA
gaactatcagaatgtatcaacttctgagccttttttgacatcgacgctgtgtctatattatccagcagaagctgaaacag

SEQ ID NO: 29085 - DNA, 80 bp, synthetic construct
  source 1..80: mol_type = other DNA
agattgctgatagttcatggaaagacacattgtcacagctatttttgacaaaaggatggccaactggttcagtttacctt

SEQ ID NO: 29086 - DNA, 80 bp, synthetic construct
  source 1..80: mol_type = other DNA
aaaagttacacagatatagcgacattctcaataaatcctcagttgtattgtgattataatatagtgttaatgaaatataa

SEQ ID NO: 29087 - DNA, 80 bp, synthetic construct
  source 1..80: mol_type = other DNA
tgctaattcagagttggatatgtcggaattggcggacctgatacttaatgaatggttatgcaatccaatggacataacgt

SEQ ID NO: 29088 - DNA, 80 bp, synthetic construct
  source 1..80: mol_type = other DNA
agattcatgtactattaaagtatgtccattaaatacacagacattaggtattggatgtcttactactgacactacgactt

SEQ ID NO: 29089 - DNA, 80 bp, synthetic construct
  source 1..80: mol_type = other DNA
agaaattggcaataacggacgttgttgatggagtaaactacaaaataaacgtcaccactacaacatgtaccattagaaat

SEQ ID NO: 29090 - DNA, 80 bp, synthetic construct
  source 1..80: mol_type = other DNA
tcttgatattgcttgtattattaaattatatattaaaatcagtaaccagaattatggactatatattgtatagattcttg

SEQ ID NO: 29091 - DNA, 80 bp, synthetic construct
  source 1..80: mol_type = other DNA
gattacaatttagtcctaatgaaatataattcaactctagaattagatatgtctgaattggcggacctcatattaaatga

SEQ ID NO: 29092 - DNA, 80 bp, synthetic construct
  source 1..80: mol_type = other DNA
caacgaccgaaaagttagtgattactgatgtcgtggatggcgttaaccataaattggatgttacaacgacaacttgtact

SEQ ID NO: 29093 - DNA, 80 bp, synthetic construct
  source 1..80: mol_type = other DNA
taatcattgttctgatatcgccatttgtaagaacacaaaattatggcatatatttaccaataacgggatcactggatgct

SEQ ID NO: 29094 - DNA, 80 bp, synthetic construct
  source 1..80: mol_type = other DNA
gtatatacgaattcaactagtggagaaacatttctaacttcaacactatgcttatactatccagcagaagctaaaaatga

SEQ ID NO: 29095 - DNA, 80 bp, synthetic construct
  source 1..80: mol_type = other DNA
gatttcagatgatgaatgggaaaatactttatcacaattatttctaactaaaggatggccaactggatcagtttatttta

SEQ ID NO: 29096 - DNA, 80 bp, synthetic construct
  source 1..80: mol_type = other DNA
aggactataatgacattactacattttccattaatccacaactgtattgtgattataatgtagtattaatgagatatgat

SEQ ID NO: 29097 - DNA, 80 bp, synthetic construct
  source 1..80: mol_type = other DNA
aatacatctgaattagatgcgtcggagttagcagatcttatattaaatgaatggctgtgcaatcctatggatatatcact

SEQ ID NO: 29098 - DNA, 80 bp, synthetic construct
  source 1..80: mol_type = other DNA
ttactattatcagcaaagtagcgaatcaaataaatggatctcaatgggaacggattgcacggtaaaagtttgcccactta

SEQ ID NO: 29099 - DNA, 80 bp, synthetic construct
  source 1..80: mol_type = other DNA
atacacaaacgttaggaattggatgcaaaactacggacgtgagtacatttgagacagttgcgtcgtctgaaaaattagta

SEQ ID NO: 29100 - DNA, 80 bp, synthetic construct
  source 1..80: mol_type = other DNA
attactgacgttgtaaatggtgttaatcataagataaatatttcaataagtacgtgcactattcgaaattgtaagaagtt

SEQ ID NO: 29101 - DNA, 80 bp, synthetic construct
  source 1..80: mol_type = other DNA
ttttatatctatcatattattgaattatatattaaaaactataactaatacaatggactacataatctatagatttttac

SEQ ID NO: 29102 - DNA, 80 bp, synthetic construct
  source 1..80: mol_type = other DNA
gcatatacaaattcaactaatgaagaattacttctaacttcaacgctatgtttatactatccaacagaagctaaaaatga

SEQ ID NO: 29103 - DNA, 80 bp, synthetic construct
  source 1..80: mol_type = other DNA
tattcatcgctctgatgtcaccatttgtggggacgcaaaattatggcatgtatttaccaataacggggtcactagacgct

SEQ ID NO: 29104 - DNA, 80 bp, synthetic construct
  source 1..80: mol_type = other DNA
attatacaagttatgtccaaacggtcaagatcattagacacggctgctatttattatagaatttagacatagcttagatt

SEQ ID NO: 29105 - DNA, 80 bp, synthetic construct
  source 1..80: mol_type = other DNA
aacggtcaagatcattagacacggctgctatttattatagaatttagacatagcttagattagaattgtatgatgtgacc

SEQ ID NO: 29106 - DNA, 80 bp, synthetic construct
  source 1..80: mol_type = other DNA
acttatagtcacaattacttcaatctttgtcaatgcacagaattacggtattaacttaccaataactggatcaatggatg

SEQ ID NO: 29107 - DNA, 80 bp, synthetic construct
  source 1..80: mol_type = other DNA
tatcatatgcaaatactacaaagggtgagccattcctaacgtcaacgttatgtttatattacccaccggaagctagaaca

SEQ ID NO: 29108 - DNA, 80 bp, synthetic construct
  source 1..80: mol_type = other DNA
gaaataaatgataatgaatggatgagtacactatcacagttgtttttaacaaagggatggccaactggttcagtatattt

SEQ ID NO: 29109 - DNA, 80 bp, synthetic construct
  source 1..80: mol_type = other DNA
caaagagtacgacgatatagctactttctcagtagatccacaactgtattgtgactataatatagttttaatgcgataca

SEQ ID NO: 29110 - DNA, 80 bp, synthetic construct
  source 1..80: mol_type = other DNA
attcaagcttggaactagacatgtcagagttagcgaatttgatactgaatgaatggttatgtaatccaatggatgttaca

SEQ ID NO: 29111 - DNA, 80 bp, synthetic construct
  source 1..80: mol_type = other DNA
tacttaatatcaattatgctattcaattatatattaaagagtataactagaatgatggaccatataatttataaattttt

SEQ ID NO: 29112 - DNA, 80 bp, synthetic construct
  source 1..80: mol_type = other DNA
atgtgaaccaaattgtacaagcaatggaaaaaaggtccagatctctagactctgcagcattctactatagagtgtaggta

SEQ ID NO: 29113 - DNA, 80 bp, synthetic construct
  source 1..80: mol_type = other DNA
aaaggtccagatctctagactctgcagcattctactatagagtgtaggtattacttacattagaattgtatgatgtgacc

SEQ ID NO: 29114 - DNA, 80 bp, synthetic construct
  source 1..80: mol_type = other DNA
ggatatattatatgcaaatactacaaaggatgaaccattcctaacgtcaacgttatgtttatattacccaacggaagcta

SEQ ID NO: 29115 - DNA, 80 bp, synthetic construct
  source 1..80: mol_type = other DNA
atacaattcaagcttgaaactagacatgtcagagttagcgaatttgatactgaatgaatggctatgtaatccaatggata

SEQ ID NO: 29116 - DNA, 80 bp, synthetic construct
  source 1..80: mol_type = other DNA
acttatagtcatgatcatttcagtcgttgttaacgcacaaaactatggcattaatttaccaataactggatcaatggatg

SEQ ID NO: 29117 - DNA, 80 bp, synthetic construct
  source 1..80: mol_type = other DNA
catcatacgtgaacgctaccaaggacgagccatttctaacgtcgacgctatgtttgtattatccaacagaagctaggaca

SEQ ID NO: 29118 - DNA, 80 bp, synthetic construct
  source 1..80: mol_type = other DNA
gaaataaatgataatgagtggacaaacacactatcacaactatttttaacgaaagggtggccaactggatctgtgtactt

SEQ ID NO: 29119 - DNA, 80 bp, synthetic construct
  source 1..80: mol_type = other DNA
taaggagtatgatgatatagttacattttcagtagatccgcaactgtattgtgattataatatagttctaatgggataca

SEQ ID NO: 29120 - DNA, 80 bp, synthetic construct
  source 1..80: mol_type = other DNA
attaaagtttagagttagatatgtcagaattagccaatctaatattgaatgaatggctatgcaatccgatggatatcaca

SEQ ID NO: 29121 - DNA, 80 bp, synthetic construct
  source 1..80: mol_type = other DNA
ctattaaagtatgtccattgaatgcccaaacactaggaataggatgtcagactacaaatactggaacgtttgaagaagtt

SEQ ID NO: 29122 - DNA, 80 bp, synthetic construct
  source 1..80: mol_type = other DNA
tacttaatatcaattatattatttaactacatacttaaaagtataactaggatgatggactacataatttataaatttct

SEQ ID NO: 29123 - DNA, 80 bp, synthetic construct
  source 1..80: mol_type = other DNA
cttagatatcatagctgatccgacgacagcaccacaaactgagagaatgatgagagttaattggaagaaatggtggcaag

SEQ ID NO: 29124 - DNA, 80 bp, synthetic construct
  source 1..80: mol_type = other DNA
tatagtagattatattaatcagattgtacaggtaatgtccaaaagatcaagatcattgaattccgctgggctctattata

SEQ ID NO: 29125 - DNA, 80 bp, synthetic construct
  source 1..80: mol_type = other DNA
taattatagttgtactgtcgccatttcttaatgcacaaaattatggaataaatcttccgattactgggtcaatggatgca

SEQ ID NO: 29126 - DNA, 80 bp, synthetic construct
  source 1..80: mol_type = other DNA
aagattatgctgatattgcctcattttcagttgatccacaactatactgcgattataatttggtactaatgaaatatgac

SEQ ID NO: 29127 - DNA, 80 bp, synthetic construct
  source 1..80: mol_type = other DNA
ctataaaagtatgtccactgaatgcgcagacattgggaattggatgtttaactactgatacaagtacgtttgaagaaatt

SEQ ID NO: 29128 - DNA, 80 bp, synthetic construct
  source 1..80: mol_type = other DNA
gtatacacaaattcaactagtggagaatcatttctaacttcaacgttatgtttatattatccaacagaagctaaaaatga

SEQ ID NO: 29129 - DNA, 80 bp, synthetic construct
  source 1..80: mol_type = other DNA
atacacaaactttagggattggatgtaaaactacggacgtggatacatttgagattgttgcgtcgtctgaaaaattggta

SEQ ID NO: 29130 - DNA, 80 bp, synthetic construct
  source 1..80: mol_type = other DNA
aagactacaatgatattactacattttctatggatccacaactgtattgtgattataatgtagtgttgatgcgatatgat

SEQ ID NO: 29131 - DNA, 80 bp, synthetic construct
  source 1..80: mol_type = other DNA
atgtaaaccagataattcaagcaatgtccaaaagatctagatcgttagattcagcggctttttattatagagtttgaata

SEQ ID NO: 29132 - DNA, 80 bp, synthetic construct
  source 1..80: mol_type = other DNA
tgtaaaaagctgggacctagagagaacgttgcagttatccaagtaggtggttcaaataacttagatattacagctgatcc

SEQ ID NO: 29133 - DNA, 80 bp, synthetic construct
  source 1..80: mol_type = other DNA
ttttttgttgttgttatcgcaccatttgtgaattcacagaattatggtattaatctgccaatcactggatcaatggacac

SEQ ID NO: 29134 - DNA, 80 bp, synthetic construct
  source 1..80: mol_type = other DNA
aaattatcaaaatgtgtcagctcaagaaccatttttgacatcaacactctgcttgtattatccaacagaagctgagacag

SEQ ID NO: 29135 - DNA, 80 bp, synthetic construct
  source 1..80: mol_type = other DNA
aaatagctgacagttcatggaaagaaacattgtcacaactgttcctaacaaaaggatggccaacaggttctgtttatctc

SEQ ID NO: 29136 - DNA, 80 bp, synthetic construct
  source 1..80: mol_type = other DNA
aaaagttatgcggatattgcgactttctcaataaatcctcagttatattgtgattataatattgtgttgatgaagtacag

SEQ ID NO: 29137 - DNA, 80 bp, synthetic construct
  source 1..80: mol_type = other DNA
tgctaattcagagctagatatgtcagaattagcggatctgatacttaacgaatggttatgtaacccaatggatataacgt

SEQ ID NO: 29138 - DNA, 80 bp, synthetic construct
  source 1..80: mol_type = other DNA
aattaaagtatgtccattaaatacgcagacactgggaattggatgtcttacaaccgatacgaccactttcgaggaagttg

SEQ ID NO: 29139 - DNA, 80 bp, synthetic construct
  source 1..80: mol_type = other DNA
aaaattggctataactgacgtcgtagatggagtaaactataagataaatgttactactactacatgtacaattaggaact

SEQ ID NO: 29140 - DNA, 80 bp, synthetic construct
  source 1..80: mol_type = other DNA
gtaagaaactagggcctagagagaacgtcgcagtcattcaggtaggtggttcaaacatattagatataacggcagatcca

SEQ ID NO: 29141 - DNA, 80 bp, synthetic construct
  source 1..80: mol_type = other DNA
tcctgatttgcctggtattattgaattatatattaaaatcaataactagagtaatggactacatattgtatcgattcttg

SEQ ID NO: 29142 - DNA, 80 bp, synthetic construct
  source 1..80: mol_type = other DNA
ataattcaagcaatgtccaaaagatctagatcgttagattcagcggctttttattatagagtttgaatatcattgagatt

SEQ ID NO: 29143 - DNA, 80 bp, synthetic construct
  source 1..80: mol_type = other DNA
aaagatctagatcgttagattcagcggctttttattatagagtttgaatatcattgagattatagttgtatgatgtgacc

SEQ ID NO: 29144 - DNA, 80 bp, synthetic construct
  source 1..80: mol_type = other DNA
ttcgttgtagtaattatgaccatcattgtgaacgcgcaaaattatggaataaatctacccatcacaggatcaatggatac

SEQ ID NO: 29145 - DNA, 80 bp, synthetic construct
  source 1..80: mol_type = other DNA
tgcatatgcgaattctacacagaacgagccgtttttgacatcgaccctttgcctatattatccaaccgaagcatcaaacg

SEQ ID NO: 29146 - DNA, 80 bp, synthetic construct
  source 1..80: mol_type = other DNA
agatcgctgacacggaatggaaaaacaccttgtcccaactatttttaacaaaaggatggcccacaggatcagtatatttt

SEQ ID NO: 29147 - DNA, 80 bp, synthetic construct
  source 1..80: mol_type = other DNA
aaagagtatacagatatagcagcgttttcagttgacccacaactatattgcgattacaacatagttctgatgaagtataa

SEQ ID NO: 29148 - DNA, 80 bp, synthetic construct
  source 1..80: mol_type = other DNA
ttcagcgctagaattggatatgtcagaattagctgatcttattttgaacgaatggttatgtaatccgatggacataacgt

SEQ ID NO: 29149 - DNA, 80 bp, synthetic construct
  source 1..80: mol_type = other DNA
tcttgatatcaattacattgttaaactatattttaaaatcagtaacgaggatgatagactacataatttatagattttta

SEQ ID NO: 29150 - DNA, 80 bp, synthetic construct
  source 1..80: mol_type = other DNA
catagctgatccgacgacagcaccacaaactgagagaatgatgagaataaattggaaaaagtggtggcaagtcttttaca

SEQ ID NO: 29151 - DNA, 80 bp, synthetic construct
  source 1..80: mol_type = other DNA
atgtaaatcaaataatccaagcaatgtccaagagatcacgatcactagattcagcagcgttttactacagaatctaaatg

SEQ ID NO: 29152 - DNA, 80 bp, synthetic construct
  source 1..80: mol_type = other DNA
agattcatgtacaattaaggtatgtccattgaatacgcagacattaggaataggatgtcttaccacagacactacaactt

SEQ ID NO: 29153 - DNA, 80 bp, synthetic construct
  source 1..80: mol_type = other DNA
gctgatagtcacaattacttcaattgttgttaacgcgcagaattatggtataaatttgccaataactggatcgatggatg

SEQ ID NO: 29154 - DNA, 80 bp, synthetic construct
  source 1..80: mol_type = other DNA
tatcatatgtaaatgctactaaggatgaaccatttctaacatcaacattgtgtttgtactatccgacagaagccagaaca

SEQ ID NO: 29155 - DNA, 80 bp, synthetic construct
  source 1..80: mol_type = other DNA
gaaataaatgataatgagtggacaagtacgttgtcacagctatttttgacgaagggatggccaactggatccgtatactt

SEQ ID NO: 29156 - DNA, 80 bp, synthetic construct
  source 1..80: mol_type = other DNA
gactataatatagttttgatgcgatacaattcgagcctagaacttgacatgtcggaattggcgaatctaatattgaatga

SEQ ID NO: 29157 - DNA, 80 bp, synthetic construct
  source 1..80: mol_type = other DNA
caatcatgcacaataaaagtgtgtccattgaatacccaaacactaggaataggatgtcaaacgacaaatactggaacgtt

SEQ ID NO: 29158 - DNA, 80 bp, synthetic construct
  source 1..80: mol_type = other DNA
tgaagaagttgcaacagctgaaaaattggtgattactgatgtagtagacggcgtgaaccacaaattagatgttactacta

SEQ ID NO: 29159 - DNA, 80 bp, synthetic construct
  source 1..80: mol_type = other DNA
cgacctgtactatcagaaattgcaagaaattggggccaagagaaaacgtagcagtaatacaagtaggtggtgctgatatc

SEQ ID NO: 29160 - DNA, 80 bp, synthetic construct
  source 1..80: mol_type = other DNA
tacttaatatcgattatattgtttaattacatattgaagagtataactagaatgatggactacataatttataaattttt

SEQ ID NO: 29161 - DNA, 80 bp, synthetic construct
  source 1..80: mol_type = other DNA
aaattgtacaagcaatgtctaagaggtccagatcattggattcagcagcattttattatagagtgtagatattatgtaga

SEQ ID NO: 29162 - DNA, 80 bp, synthetic construct
  source 1..80: mol_type = other DNA
taattgtagttgtactgtcatcattccttaacgcacaaaattatggaataaatattccaattactgggtcaatggataca

SEQ ID NO: 29163 - DNA, 80 bp, synthetic construct
  source 1..80: mol_type = other DNA
ccatatacaaactcaacgcaagaagaagtatttctaacttcgactttgtgcttgtattacccgactgaagctgcaacaga

SEQ ID NO: 29164 - DNA, 80 bp, synthetic construct
  source 1..80: mol_type = other DNA
aataaacgataattcatggaaagatacgctttctcagctatttttgactaaaggatggccaacaggatctgtttatttta

SEQ ID NO: 29165 - DNA, 80 bp, synthetic construct
  source 1..80: mol_type = other DNA
gattataatttggtactaatgaagtatgacgctacactgcaactggacatgtctgaattagcagacttaatacttaatga

SEQ ID NO: 29166 - DNA, 80 bp, synthetic construct
  source 1..80: mol_type = other DNA
ctataaaagtatgtccgctgaatacgcagacgttaggaattgggtgtctaactactgatacgagtacgtttgaagaagtt

SEQ ID NO: 29167 - DNA, 80 bp, synthetic construct
  source 1..80: mol_type = other DNA
gcaacagctgaaaaactagtgattactgacgttgtagatggagtcaatcataaattgaacgtgacgacaaatacttgtac

SEQ ID NO: 29168 - DNA, 80 bp, synthetic construct
  source 1..80: mol_type = other DNA
aattaggaattgtaaaaaattaggaccaagagagaacgtggcagttatacaggttggtggctcaaatatacttgacataa

SEQ ID NO: 29169 - DNA, 80 bp, synthetic construct
  source 1..80: mol_type = other DNA
tttgatatcagtcgtattgttgaactacgtgcttaaatcattaactagaataatggacttcattatctacagatttcttt

SEQ ID NO: 29170 - DNA, 80 bp, synthetic construct
  source 1..80: mol_type = other DNA
tggttatagttctatttgcaccaattattaaagctcagaattatggaatcaatttgccaataactggatccatggataca

SEQ ID NO: 29171 - DNA, 80 bp, synthetic construct
  source 1..80: mol_type = other DNA
ccatatgtgaacttaacgatgggtgagacgtttttaacttctacattatgtttgtattatccgaatgaagcggctactga

SEQ ID NO: 29172 - DNA, 80 bp, synthetic construct
  source 1..80: mol_type = other DNA
aattgcggatgataagtggacggaaacactgtcgcaattgtttctaactaaaggctggccaacgggatcagtttatttta

SEQ ID NO: 29173 - DNA, 80 bp, synthetic construct
  source 1..80: mol_type = other DNA
aagggtatgcggatatcgcgtcattttctgtagaaccacaattgtattgtgattataatattgtgttaatgaaatacgat

SEQ ID NO: 29174 - DNA, 80 bp, synthetic construct
  source 1..80: mol_type = other DNA
aattaaagtgtgtcctttaaatgctcagactcttggaataggatgtttaactacagacaccaattcatttgaaatagtag

SEQ ID NO: 29175 - DNA, 80 bp, synthetic construct
  source 1..80: mol_type = other DNA
ctaatgcggagaaactggctataactgatgttgttgatggagtcaatcataaattagacgtaacgacgagtacgtgtaca

SEQ ID NO: 29176 - DNA, 80 bp, synthetic construct
  source 1..80: mol_type = other DNA
ataagaaactgtaagaaacttggaccaagagaaaatgttgcggtagttcaagtaggaggtccaaatgtacttgatataac

SEQ ID NO: 29177 - DNA, 80 bp, synthetic construct
  source 1..80: mol_type = other DNA
tttgatatcgcttgtatttatcaattatttattaaaatcagtgactagagtaatggactttatcatttatagatttttac

SEQ ID NO: 29178 - DNA, 80 bp, synthetic construct
  source 1..80: mol_type = other DNA
ggcagatccaactaccgcaccacaaactgaaagaatgatgcgtataaattggaaaaggtggtggcaagtattttatacga

SEQ ID NO: 29179 - DNA, 80 bp, synthetic construct
  source 1..80: mol_type = other DNA
atgttaatcaaattgtacgagttatgtccaagcgatcacgttccctaaattcagctgcattttattatcgagtttagata

SEQ ID NO: 29180 - DNA, 80 bp, synthetic construct
  source 1..80: mol_type = other DNA
tagcattcatagtcgtaatttcaaccgtgttatctaatgctcaaaattatggaataaatttaccaatcactggatctatg

SEQ ID NO: 29181 - DNA, 80 bp, synthetic construct
  source 1..80: mol_type = other DNA
gatacagcatatgccaattcaacacaaaataacaattttctatcatcaacgctatgcctttactacccagctgaagctag

SEQ ID NO: 29182 - DNA, 80 bp, synthetic construct
  source 1..80: mol_type = other DNA
aacacaaattagtgataatgaatggaaagatacactatctcagttatttttaactaaaggatggccgactggttcagttt

SEQ ID NO: 29183 - DNA, 80 bp, synthetic construct
  source 1..80: mol_type = other DNA
aatgaatattcaaatgttctagaattttctgtcgacccaaagttatattgcgattacaatattgttttgattagatttgt

SEQ ID NO: 29184 - DNA, 80 bp, synthetic construct
  source 1..80: mol_type = other DNA
tgctggggaagaattagatatatctgaattagctgatttgatcttgaatgaatggttgtgtaacccaatggacataactc

SEQ ID NO: 29185 - DNA, 80 bp, synthetic construct
  source 1..80: mol_type = other DNA
ctattaaagtatgtccattgaatacgcagactttaggagttggatgtcaaacaacaaatacaggaacttttgagatggta

SEQ ID NO: 29186 - DNA, 80 bp, synthetic construct
  source 1..80: mol_type = other DNA
attttacttgatatcgtttgttcttgtgagtcacattctgaaaacagcaacaaaagtaatggactatattatatatagag

SEQ ID NO: 29187 - DNA, 80 bp, synthetic construct
  source 1..80: mol_type = other DNA
acggctgaccccacaacttctccgcaaacagaacgaatgatgcgtgtgaattggaagagatggtggcaggttttttatac

SEQ ID NO: 29188 - DNA, 80 bp, synthetic construct
  source 1..80: mol_type = other DNA
atagttcaagtcatgtccaaaaggtcgagatcattagattcatcttctttttattatagagtgtagatatatccttagat

SEQ ID NO: 29189 - DNA, 80 bp, synthetic construct
  source 1..80: mol_type = other DNA
taacatttataattgttgtactatcagtgctatctaacgcacaaaattacggaataaatttgccaattactggatctatg

SEQ ID NO: 29190 - DNA, 80 bp, synthetic construct
  source 1..80: mol_type = other DNA
gatacagcctatgctaattcaacgcagaatgaaaatttcctatcatcaactctatgcttatattatcctactgaagctca

SEQ ID NO: 29191 - DNA, 80 bp, synthetic construct
  source 1..80: mol_type = other DNA
aacgcaaataagtgacaacgaatggaaaaatacgttatctcaattatttttgactaaaggatggccaacaggctcagtat

SEQ ID NO: 29192 - DNA, 80 bp, synthetic construct
  source 1..80: mol_type = other DNA
attttaatgaatattcaaatgttctagaattttctattgatccaaaattatattgtgattataatattgtattaattaga

SEQ ID NO: 29193 - DNA, 80 bp, synthetic construct
  source 1..80: mol_type = other DNA
tttgcttcaggagaagagttagatatatctgaattggctgatctaatattaaacgaatggttatgcaatccgatggacat

SEQ ID NO: 29194 - DNA, 80 bp, synthetic construct
  source 1..80: mol_type = other DNA
tagctgaaagtgagaaattagcaatagttgatgttgtcgatggcgtgaatcataagttagacatcacatccacaacatgt

SEQ ID NO: 29195 - DNA, 80 bp, synthetic construct
  source 1..80: mol_type = other DNA
attctatttgatatctttcgttcttgtgagttatattctgaaaactataacaaaaatgatggactacctaatttacagaa

SEQ ID NO: 29196 - DNA, 80 bp, synthetic construct
  source 1..80: mol_type = other DNA
acaatacgaaactgtaataaactaggaccaagagagaatgtggctataatacaagttggtggttctaacatactcgacat

SEQ ID NO: 29197 - DNA, 80 bp, synthetic construct
  source 1..80: mol_type = other DNA
atatcaaccagatagtacaagtaatgtccaaaagatcaaggtcactagactcgtcttccttttattatagagtgtagata

SEQ ID NO: 29198 - DNA, 80 bp, synthetic construct
  source 1..80: mol_type = other DNA
gctacactgcaactggacatgtccgaattagcagatttgatacttaatgagtggttgtgtaatcctatggatgttacctt

SEQ ID NO: 29199 - DNA, 80 bp, synthetic construct
  source 1..80: mol_type = other DNA
aaattgtgcaagcgatgtccaaaagatcgagatcactaaactctgctgcattttactacagagtgtagatatagcttaga

SEQ ID NO: 29200 - DNA, 80 bp, synthetic construct
  source 1..80: mol_type = other DNA
cttatagtagtgatcttggccaccatgataaatgcgcaaaactatggagtaaatttgccaattacaggttcaatggatac

SEQ ID NO: 29201 - DNA, 80 bp, synthetic construct
  source 1..80: mol_type = other DNA
tgcgtatgcagactctacacaaagtgagccatttttgacatcaaccctttgtttgtattatcctgttgaggcatcaaacg

SEQ ID NO: 29202 - DNA, 80 bp, synthetic construct
  source 1..80: mol_type = other DNA
aaatagctgatactgaatggaaagataccttatcacaactgttcttgacaaaaggatggccaacaggatcagtgtacctt

SEQ ID NO: 29203 - DNA, 80 bp, synthetic construct
  source 1..80: mol_type = other DNA
aaagaatatgctgatatagcggccttttcagtggaaccacagttatactgcgattataatttagttttaatgaaatatga

SEQ ID NO: 29204 - DNA, 80 bp, synthetic construct
  source 1..80: mol_type = other DNA
ctctacacaagaactagatatgtctgaattggccgatcttatattgaacgaatggctgtgcaatccaatggacataacgc

SEQ ID NO: 29205 - DNA, 80 bp, synthetic construct
  source 1..80: mol_type = other DNA
tcttgacatcgattacattattgaattatatgttaaaatcaataacgagaataatggactatataatttacagatttctg

SEQ ID NO: 29206 - DNA, 80 bp, synthetic construct
  source 1..80: mol_type = other DNA
aaagatctagatcgtttaattcgtcggcgttctactatagagtgtaggtgcatgttagattagagttgtacgatgtgacc

SEQ ID NO: 29207 - DNA, 80 bp, synthetic construct
  source 1..80: mol_type = other DNA
gtgtatatgaattcaactagtgaagaaccattcctaacttcaacgctatgtctgtactatccagcagaggctaaaaatga

SEQ ID NO: 29208 - DNA, 80 bp, synthetic construct
  source 1..80: mol_type = other DNA
gggaccacgcgaaaatgttgctatcattcaagttggtggaccgaatgcgttagatatcactgctgatccaacgacagttc

SEQ ID NO: 29209 - DNA, 80 bp, synthetic construct
  source 1..80: mol_type = other DNA
gtaaaaaattaggaccaagggaaaacgtagcagttatacaggttggtggcccagatgtacttgacataacagctgatcca

SEQ ID NO: 29210 - DNA, 80 bp, synthetic construct
  source 1..80: mol_type = other DNA
caatagttgactacgtgaatcaaattgtgcaagcaatgtccaaaagatcgagatcattaaattctgctgcattttactac

SEQ ID NO: 29211 - DNA, 80 bp, synthetic construct
  source 1..80: mol_type = other DNA
aacggtcaagatcattagacacagctgctttttattatagaatttagatatagctttggtcggactgtaaagatgtaacg

SEQ ID NO: 29212 - DNA, 80 bp, synthetic construct
  source 1..80: mol_type = other DNA
aaaagttacgtgaatatagcaacattctcaataaatcctcagttatattgtgattataatatagtattaatgaagtataa

SEQ ID NO: 29213 - DNA, 80 bp, synthetic construct
  source 1..80: mol_type = other DNA
aaagatcgagatcgttagattcgtcatctttctattatagagtgtagatatatcctaaaatagaactgtttgatgtgacc

SEQ ID NO: 29214 - DNA, 80 bp, synthetic construct
  source 1..80: mol_type = other DNA
tactcattgctttaatatcaccatttgtaaggacacaaaattatggcatgtatttaccaataacgggatcactagacgct

SEQ ID NO: 29215 - DNA, 80 bp, synthetic construct
  source 1..80: mol_type = other DNA
gtatatacgaattcgactagtggagagccatttttaacttcaacgctgtgtttatactatccaacagaagctaaaaatga

SEQ ID NO: 29216 - DNA, 80 bp, synthetic construct
  source 1..80: mol_type = other DNA
aagactacaatgatattaatacattttctgttaatccacaactatattgtgattataatgtagtattgatgagatatgac

SEQ ID NO: 29217 - DNA, 80 bp, synthetic construct
  source 1..80: mol_type = other DNA
atacacaaaccctagggattggatgcaaaactacggatgtaaacacatttgagattgttgcgtcgtctgaaaaattagta

SEQ ID NO: 29218 - DNA, 80 bp, synthetic construct
  source 1..80: mol_type = other DNA
aacgatcaagatcattagacgcagctgctttttattatagaatttagatatagatttggtcagatttgtatgatgtgacc

SEQ ID NO: 29219 - DNA, 80 bp, synthetic construct
  source 1..80: mol_type = other DNA
cagtcttgtactataaaagtatgtccattgaatacgcagactttaggaataggttgtattaccacaaatacagcaacatt

SEQ ID NO: 29220 - DNA, 80 bp, synthetic construct
  source 1..80: mol_type = other DNA
tactactcatcgctttaatgtcaccattcgtaagaacgcaaaattacggcatgtatttaccaataacgggatcactagac

SEQ ID NO: 29221 - DNA, 80 bp, synthetic construct
  source 1..80: mol_type = other DNA
catcttgatatctatcatattattgaattacatattaaaaactataactaatacaatggactacataatttttagaattt

SEQ ID NO: 29222 - DNA, 80 bp, synthetic construct
  source 1..80: mol_type = other DNA
aacggtcaagatcattagacacggctgctttctattatagaatttagatataacttgggtcacatttgtatgatgtgacc

SEQ ID NO: 29223 - DNA, 80 bp, synthetic construct
  source 1..80: mol_type = other DNA
tttgatatcaattattctattaaactatatattaaaatcaataactaatatgatggattttatcatatatcggtttttac

SEQ ID NO: 29224 - DNA, 80 bp, synthetic construct
  source 1..80: mol_type = other DNA
tttattgtagttattttgtcaccattactaaaagcccaaaattatggaattaatctaccaattactggttcaatggacac

SEQ ID NO: 29225 - DNA, 80 bp, synthetic construct
  source 1..80: mol_type = other DNA
cttttctcacatctactttgtgtctatattatccaactgaagctgcaacagaaataaatgataattcgtggaaggataca

SEQ ID NO: 29226 - DNA, 80 bp, synthetic construct
  source 1..80: mol_type = other DNA
ctctcacaattattcttgactaaaggatggccaactggatcagtttattttaaagaatacacggatattgcttccttttc

SEQ ID NO: 29227 - DNA, 80 bp, synthetic construct
  source 1..80: mol_type = other DNA
aataaaagtatgtccacttaatacacagactcttggaattgggtgtttgactactgatacggcaacatttgaagaagtcg

SEQ ID NO: 29228 - DNA, 80 bp, synthetic construct
  source 1..80: mol_type = other DNA
aaaactggtgattactgacgttgtcgatggtgtgaatcataaacttgatgttacaactgctacttgcactatcagaaact

SEQ ID NO: 29229 - DNA, 80 bp, synthetic construct
  source 1..80: mol_type = other DNA
gcaaaaaattaggaccaagggaaaatgtagcagtaattcaagttggaggttctgatgttctcgacataacggctgatcca

SEQ ID NO: 29230 - DNA, 80 bp, synthetic construct
  source 1..80: mol_type = other DNA
aaataattcaagcaatgtccaaaagatcacgatcacttaactctgctgcattctattatagaatataggtatagctttgg

SEQ ID NO: 29231 - DNA, 80 bp, synthetic construct
  source 1..80: mol_type = other DNA
agaagctacacagatatttcaactttttcaataaatcctcagttgtattgcgattacaacatagttctaatgaaatatag

SEQ ID NO: 29232 - DNA, 80 bp, synthetic construct
  source 1..80: mol_type = other DNA
aaactaccagaacgtatcgacctcagaaccatttctaacatcaacattatgtctttattatccaacagaggctgaaacag

SEQ ID NO: 29233 - DNA, 80 bp, synthetic construct
  source 1..80: mol_type = other DNA
agattgctgacagttcatggaaagatacgctatcacagttatttttaacaaaagggtggccaactggttctgtttatctt

SEQ ID NO: 29234 - DNA, 80 bp, synthetic construct
  source 1..80: mol_type = other DNA
cgccgattcggaactagatatgtcagagttagcagacttgatactcaatgaatggctatgtaatccaatggatataacgt

SEQ ID NO: 29235 - DNA, 80 bp, synthetic construct
  source 1..80: mol_type = other DNA
gtaaaaaactgggacctagagagaatgttgcagtcatccaagtaggtggttcaaacgttttagatattacagcagatcct

SEQ ID NO: 29236 - DNA, 80 bp, synthetic construct
  source 1..80: mol_type = other DNA
tcttgatactgcttgtattattaaattatatactaaaatcaataactcgaattatggactatatactctacagatttttg

SEQ ID NO: 29237 - DNA, 80 bp, synthetic construct
  source 1..80: mol_type = other DNA
aaataattcaagcaatgtccaaaagatcgcgatcgttagattcggcagcattttattatagaatttaaatatcactgaga

SEQ ID NO: 29238 - DNA, 80 bp, synthetic construct
  source 1..80: mol_type = other DNA
aaagatcgcgatcgttagattcggcagcattttattatagaatttaaatatcactgagattacagttgtatgatgtgacc

SEQ ID NO: 29239 - DNA, 80 bp, synthetic construct
  source 1..80: mol_type = other DNA
cacagattcaaagaatcatgcgaagaaattggaaaaaatggtggcaagtgttttatacagtagttgactatattaaccaa

SEQ ID NO: 29240 - DNA, 80 bp, synthetic construct
  source 1..80: mol_type = other DNA
attatacaagttatgtccaagcggtcaagatcattagacgcagctgctttttattatagagtttagatatagctttggtc

SEQ ID NO: 29241 - DNA, 80 bp, synthetic construct
  source 1..80: mol_type = other DNA
aggaccacgagaaaatgttgctataattcaagttggtgggccgaatgcattagacattactgctgatccaacaacagttc

SEQ ID NO: 29242 - DNA, 80 bp, synthetic construct
  source 1..80: mol_type = other DNA
tactcatcgctctgatgtcgccatttgtaagaacgcaaaattacggcatatatttacttataatgggatcactagacgct

SEQ ID NO: 29243 - DNA, 80 bp, synthetic construct
  source 1..80: mol_type = other DNA
attactgatgttgtaaatggtgttaatcataaaataaatatttcaataaatacgtgtactatacgtaattgtaataaact

SEQ ID NO: 29244 - DNA, 80 bp, synthetic construct
  source 1..80: mol_type = other DNA
ttttatctaattgtgtagagtggtcacaatgtcaaatgtttattgatgatatatattataatggtaatgttgagactatc

SEQ ID NO: 29245 - DNA, 80 bp, synthetic construct
  source 1..80: mol_type = other DNA
acttaaaacatatacacagacatcagactttataaattcagtagaaatgacatgctcttacaatatagttatcattcctg

SEQ ID NO: 29246 - DNA, 80 bp, synthetic construct
  source 1..80: mol_type = other DNA
tgattcagaatctattgaacagatagcagaatggattttaaatgtttggaaatgtgatgacatgaatttggaaatttata

SEQ ID NO: 29247 - DNA, 80 bp, synthetic construct
  source 1..80: mol_type = other DNA
aattggagtaaacaatttatgggctgcatttggtagtgactgtgatatatctgtctgtccattagatactacaagtaatg

SEQ ID NO: 29248 - DNA, 80 bp, synthetic construct
  source 1..80: mol_type = other DNA
gacatagaatacagatgaacactgctcgatgtaaattaaaaaattgtgttaagggtgaagctcgactgaatactgcacta

SEQ ID NO: 29249 - DNA, 80 bp, synthetic construct
  source 1..80: mol_type = other DNA
caacatcatcaagttttgataattcattgtcaccattaaataacggccaaacaacaagatcatttaaaataaatgcaaag

SEQ ID NO: 29250 - DNA, 80 bp, synthetic construct
  source 1..80: mol_type = other DNA
ctatattttatacaataattgattatattaatacaattgtacaaacaatgactcccagacatcgtgcgatttatccagaa

SEQ ID NO: 29251 - DNA, 80 bp, synthetic construct
  source 1..80: mol_type = other DNA
acaaacaatgactcccagacatcgtgcgatttatccagaagggtggatgttgaggtatgcgtaaacaagatcatgtggct

SEQ ID NO: 29252 - DNA, 80 bp, synthetic construct
  source 1..80: mol_type = other DNA
tgccatggcgggtgcctacccctcatattcgacaaactgggcagacgagcaggtactgaaggctaagaacataggattat

SEQ ID NO: 29253 - DNA, 80 bp, synthetic construct
  source 1..80: mol_type = other DNA
tgtcattaaatgtactagactaatgaaagagaagatagaacgcggagaagtcgaagtggatgatacattcgttgaagaga

SEQ ID NO: 29254 - DNA, 80 bp, synthetic construct
  source 1..80: mol_type = other DNA
gaatggaaattgacactatagattggaaatccagatatgaccaacttgaaagacgatttgagtcattaaagcagcgagtt

SEQ ID NO: 29255 - DNA, 80 bp, synthetic construct
  source 1..80: mol_type = other DNA
ttcatccattgaatggtacttaaggtctatggaactatcagatgacattaaatcagatattgaacaacaactcaattcaa

SEQ ID NO: 29256 - DNA, 80 bp, synthetic construct
  source 1..80: mol_type = other DNA
tttattttaatgaatattcaaacgttttagaattttccatcgacccaaagctatactgtgattacaacgttgtgctaatt

SEQ ID NO: 29257 - DNA, 80 bp, synthetic construct
  source 1..80: mol_type = other DNA
accccgttcatgtacaatgccatggcgggtgcctacccctcatattcgacaaactgggcagacgagcaggtactgaaggc

SEQ ID NO: 29258 - DNA, 80 bp, synthetic construct
  source 1..80: mol_type = other DNA
agttgccttgatcgagcgacattcaatccgtcaaaacttaggagctacccgaaacagcacgcttaccatgcgccctccat

SEQ ID NO: 29259 - DNA, 80 bp, synthetic construct
  source 1..80: mol_type = other DNA
tgtcattagatgtactattttgatgaaagagaagatagaacgcggagaagttgaagtggatgacgcattcgttgaagaaa

SEQ ID NO: 29260 - DNA, 80 bp, synthetic construct
  source 1..80: mol_type = other DNA
aaatggaagttgacactatagattggaaatctagatatgaacaacttgagaaacgatttgagtcattgaaacagcgagtg

SEQ ID NO: 29261 - DNA, 80 bp, synthetic construct
  source 1..80: mol_type = other DNA
cagcaagctcatattaatgaattacaaatatataataataaattagagcgtgatttgcaatcaaagatagggtcagttat

SEQ ID NO: 29262 - DNA, 80 bp, synthetic construct
  source 1..80: mol_type = other DNA
ttcgtccattgaatggtacttacgatccatggagctatcagacgacatcaaatcagatattgaacaacaacttaattcaa

SEQ ID NO: 29263 - DNA, 80 bp, synthetic construct
  source 1..80: mol_type = other DNA
tagaccagattaatccagttaatgcatttgatgattttgagtccattcttcgtaatttaatatctgattatgatagaatg

SEQ ID NO: 29264 - DNA, 80 bp, synthetic construct
  source 1..80: mol_type = other DNA
ttcattatgtttaaaggattgttgcagcaaagtaattacatttatacttatgaatgaatatgttatattatcatcttcac

SEQ ID NO: 29265 - DNA, 80 bp, synthetic construct
  source 1..80: mol_type = other DNA
aataatagagactcctagaggagctatcaaagttactgcccaaccaacagaccacgtcgtgggagagtacctggtacttt

SEQ ID NO: 29266 - DNA, 80 bp, synthetic construct
  source 1..80: mol_type = other DNA
ctaccacgaattcgcatacgaagggctaaaaatccgccctgcttgcccatacaaaattgcagtcataggagtcttcggag

SEQ ID NO: 29267 - DNA, 80 bp, synthetic construct
  source 1..80: mol_type = other DNA
actcttaaagatgctagggataagattgttgaaggtacattatattctaatgttagcgatcttattcagcaatttaatca

SEQ ID NO: 29268 - DNA, 80 bp, synthetic construct
  source 1..80: mol_type = other DNA
tgaaactttattagcgaatgttaccgcagtacgtcaagagtatgctataccagttggaccagtatttccaccaggcatga

SEQ ID NO: 29269 - DNA, 80 bp, synthetic construct
  source 1..80: mol_type = other DNA
tgaaactctgttagcaaatgtgaccgcggtgcgtcaagaatatgccataccagttggaccggtatttccaccaggcatga

SEQ ID NO: 29270 - DNA, 80 bp, synthetic construct
  source 1..80: mol_type = other DNA
ctggctttaagtattggctaaaagaacgaggggcgtcgctgcagcacacagcaccatttggctgtcaaatagcaacaaac

SEQ ID NO: 29271 - DNA, 80 bp, synthetic construct
  source 1..80: mol_type = other DNA
cactgaatggaaaatttggttcggcagcaaggaatagaaattggatggttgatactagaactacagctaggttagatgaa

SEQ ID NO: 29272 - DNA, 80 bp, synthetic construct
  source 1..80: mol_type = other DNA
gtcttcagttgaatggtacatgaaatcaatggaactgcctgatgaaattaagacggatattgaacaacagttgaattcca

SEQ ID NO: 29273 - DNA, 80 bp, synthetic construct
  source 1..80: mol_type = other DNA
cccgaacacggtgggagtaccgtataagactctagtcaatagaccgggctacagtcccatggtattggagatggaactac

SEQ ID NO: 29274 - DNA, 80 bp, synthetic construct
  source 1..80: mol_type = other DNA
tgcttagcctaatatgctgcattagaacagctaaagcggccacataccaggaggccgcggtatacctgtggaacgagcag

SEQ ID NO: 29275 - DNA, 80 bp, synthetic construct
  source 1..80: mol_type = other DNA
taccacactcattagtggccgaacaccgcccagtaaaaggggaaagaatggaatggctggttaataagataaacggccac

SEQ ID NO: 29276 - DNA, 80 bp, synthetic construct
  source 1..80: mol_type = other DNA
tgacgcatagtcagtttgatctaagcgccgatggcgagacactgcccgtcccgtcagacctggatgctgacgccccagcc

SEQ ID NO: 29277 - DNA, 80 bp, synthetic construct
  source 1..80: mol_type = other DNA
gaacgagtaatctgcgtactgggacgtaagtttagatcgtccagagcattgaaaccaccatgtatcaccagtaatactga

SEQ ID NO: 29278 - DNA, 80 bp, synthetic construct
  source 1..80: mol_type = other DNA
caccagtaggaaccgcaaaaacagttatgtgcggtacatatccagtaatccatgccgtaggaccaaacttctcaaattac

SEQ ID NO: 29279 - DNA, 80 bp, synthetic construct
  source 1..80: mol_type = other DNA
aatgagcaccgtacccgtcgcgccgcctagaagaaggagagggagaaacctgaccgtgatatgtgacgagagagaaggga

SEQ ID NO: 29280 - DNA, 80 bp, synthetic construct
  source 1..80: mol_type = other DNA
tcacagtagatatgaaaagggacgtgaaggtaactcctggcacaaagcatacagaggaaaggcctaaggtgcaggttata

SEQ ID NO: 29281 - DNA, 80 bp, synthetic construct
  source 1..80: mol_type = other DNA
aaggacttgtaaggcaatgcaactacgaatgtgcatacgaatagtcacataatcaacaacaaattaaccatctacacatg

SEQ ID NO: 29282 - DNA, 80 bp, synthetic construct
  source 1..80: mol_type = other DNA
cagcagagtcaaatagcagaccttcaaaattactgtaacaaattagaagctgacttacagaataaaattggctcactagt

SEQ ID NO: 29283 - DNA, 80 bp, synthetic construct
  source 1..80: mol_type = other DNA
ttcatctgttgaatggtatctcaaatcgatggaattaccagatgaagtgaaaactgatatagaacagcaattgaattcaa

SEQ ID NO: 29284 - DNA, 80 bp, synthetic construct
  source 1..80: mol_type = other DNA
ttgacactattagtccaataaatgcaatagatgattttgaaattctaataagaaatctaattcatgactatgatagaaca

SEQ ID NO: 29285 - DNA, 80 bp, synthetic construct
  source 1..80: mol_type = other DNA
tttttaatgtttaagggactattacggcaatgcaactacgaatatgcatacgaatagtcacataattcaccaattattta

SEQ ID NO: 29286 - DNA, 80 bp, synthetic construct
  source 1..80: mol_type = other DNA
aataccaggaaagtcgtcatctgtcataaagtgcactagattaatgaaagataagatagagcgtggtgaagttgaagttg

SEQ ID NO: 29287 - DNA, 80 bp, synthetic construct
  source 1..80: mol_type = other DNA
tttttgatgttaaaaggacttgtgaggcaatgcaactacgaatgtgcatacgaatagtcacataatttgcaacaaaatga

SEQ ID NO: 29288 - DNA, 80 bp, synthetic construct
  source 1..80: mol_type = other DNA
aaccctgcagtgacagcagcatctctggcaatattggagaggtttgctgagcctcacccaattgtgtcgtgtgccattga

SEQ ID NO: 29289 - DNA, 80 bp, synthetic construct
  source 1..80: mol_type = other DNA
tacctgatccagtgagccacactgaaggagcccacaaaatagtgtttgagatggaaggcaatgcctccggcccagcagca

SEQ ID NO: 29290 - DNA, 80 bp, synthetic construct
  source 1..80: mol_type = other DNA
aagaacggtggtgaactcaccactactgacccgcctggtacaacgggtccaaccacatcccatactgttgttgctaatcc

SEQ ID NO: 29291 - DNA, 80 bp, synthetic construct
  source 1..80: mol_type = other DNA
cagtctttcgtacttttgcttggaatgacaggatgcccacgggaacttttcttggatctgtatcgcttcaccccaacatt

SEQ ID NO: 29292 - DNA, 80 bp, synthetic construct
  source 1..80: mol_type = other DNA
aaaagtaaatttgattatgtgatggatgactctggtgttaaaaataatcttttgggtaaagctataactattgatcaggc

SEQ ID NO: 29293 - DNA, 80 bp, synthetic construct
  source 1..80: mol_type = other DNA
tggaaagtttggctcagctattagaaatagaaattggatgactgattctaaaacggttgctaaattagatgaagacgtga

SEQ ID NO: 29294 - DNA, 80 bp, synthetic construct
  source 1..80: mol_type = other DNA
ataaacttagaatgactttatcttctaaaggaatcgatcaaaagatgagagtacttaatgcttgttttagtgtaaaaaga

SEQ ID NO: 29295 - DNA, 80 bp, synthetic construct
  source 1..80: mol_type = other DNA
taattaaatgcactagacttatgaaggataaaatagaacgtggagaagttgaggttgatgattcatatgttgatgagaaa

SEQ ID NO: 29296 - DNA, 80 bp, synthetic construct
  source 1..80: mol_type = other DNA
atggaaattgatactattgattggaaatctcgttatgatcagttagaaaaaagatttgagtcactaaaacaaagagttaa

SEQ ID NO: 29297 - DNA, 80 bp, synthetic construct
  source 1..80: mol_type = other DNA
tgaaaaatacaatacctgggtacaaaaagcgaagaaagtaaatgaaaatatgtattctcttcagaatgttatttcacaac

SEQ ID NO: 29298 - DNA, 80 bp, synthetic construct
  source 1..80: mol_type = other DNA
aacaaaaccaaatagcagatcttcaacaatattgtaataaattggaagctgatttgcaaggcaaatttagttcattagta

SEQ ID NO: 29299 - DNA, 80 bp, synthetic construct
  source 1..80: mol_type = other DNA
tcatcagttgagtggtatctaaggtctatggaattaccagatgatgtaaagaatgatgttgaacagcagttaaattcaat

SEQ ID NO: 29300 - DNA, 80 bp, synthetic construct
  source 1..80: mol_type = other DNA
tgatttaattaatcccattaatgctatagatgatatcgaatcgttgattagaaatttaattcaagattatgacagaacat

SEQ ID NO: 29301 - DNA, 80 bp, synthetic construct
  source 1..80: mol_type = other DNA
ttttagtgttgaaaggactgttgaagcaatgcaactatgaatatacatatgaatagtcgcataattaaaaatattaacca

SEQ ID NO: 29302 - DNA, 80 bp, synthetic construct
  source 1..80: mol_type = other DNA
tctacacatgaccctctatgagcacaatagttaaaagctaacactgtcaaaaacctaaatggctataggggcgttatgtg

SEQ ID NO: 29303 - DNA, 80 bp, synthetic construct
  source 1..80: mol_type = other DNA
cactgaatggaaaatttgattcagcagcaagaaatagaaattggatgactgatgctaaaactacagctagattagatgaa

SEQ ID NO: 29304 - DNA, 80 bp, synthetic construct
  source 1..80: mol_type = other DNA
gatgtaaataaacttagaatgatgctatcatctaaaggaattgatcaaaagatgagagtacttaatgcatgtttcagtgt

SEQ ID NO: 29305 - DNA, 80 bp, synthetic construct
  source 1..80: mol_type = other DNA
atgaaaaatatacaagttgggtgcaaaaagcaaaaaaagtaaatgaaaatatgtactctctccaaaacgtaatatcacag

SEQ ID NO: 29306 - DNA, 80 bp, synthetic construct
  source 1..80: mol_type = other DNA
caacagagccagattgctgatttacaacattactgtaataaattggaagtcgatctacaaaataaaatcaattcacttgt

SEQ ID NO: 29307 - DNA, 80 bp, synthetic construct
  source 1..80: mol_type = other DNA
atcttcagttgaatggtacataaaatcaatgggattgcctgatgaaattaagacggacattgaacaacaactaaattcca

SEQ ID NO: 29308 - DNA, 80 bp, synthetic construct
  source 1..80: mol_type = other DNA
aagccgcagtcgttgctgccacttcgactcttgaacttatgggtattcaatatgactataatgaagtctatactagggtt

SEQ ID NO: 29309 - DNA, 80 bp, synthetic construct
  source 1..80: mol_type = other DNA
ttgatgtgatcaatccaatcaatgctatagatgactttgaatcactgatcagaaatattatactcgattatgacagaata

SEQ ID NO: 29310 - DNA, 80 bp, synthetic construct
  source 1..80: mol_type = other DNA
tttttaatgttcaaaggattaatgaggcaatgcaactatgaatacacgtatgaatagtcacataatataattaaattacc

SEQ ID NO: 29311 - DNA, 80 bp, synthetic construct
  source 1..80: mol_type = other DNA
atgttgtcatcgaaaggaattgaccaaaaaatgagagtgttgaacgcctgtttcaatgttaagagagtgcctggaaaatc

SEQ ID NO: 29312 - DNA, 80 bp, synthetic construct
  source 1..80: mol_type = other DNA
tagtaaaatgtactaagttaatgaaagacaaactagaacgtggtgaagttgaagtggatgattctttcgttgaagagaag

SEQ ID NO: 29313 - DNA, 80 bp, synthetic construct
  source 1..80: mol_type = other DNA
atggaagtcgatactatcaattggaaactaagatatgatcaactagaaaagaggttcgaatcattgaagcaccgggttaa

SEQ ID NO: 29314 - DNA, 80 bp, synthetic construct
  source 1..80: mol_type = other DNA
tgaaaagtataatacttgggttgtaaaggctagaaaagtgaacgaaaatatgaactctcttcagagtgtgatatctcaac

SEQ ID NO: 29315 - DNA, 80 bp, synthetic construct
  source 1..80: mol_type = other DNA
aacaagcacacattaatgaattacagatgtacaacaataaattagagcgtgacttgcagtcaaaaattggatcggtcgtc

SEQ ID NO: 29316 - DNA, 80 bp, synthetic construct
  source 1..80: mol_type = other DNA
tcatcgatagaatggtatttacgctcaatggagttgtctgatgatgtgaaagtagatattgagcaacagcttaattcgat

SEQ ID NO: 29317 - DNA, 80 bp, synthetic construct
  source 1..80: mol_type = other DNA
agaccagttaaatccagttaacgcaatagatgattttgaatcagtgcttcgcaacttgatttctgattatgatagattat

SEQ ID NO: 29318 - DNA, 80 bp, synthetic construct
  source 1..80: mol_type = other DNA
ttataatgtttaaagggttattgcagcaatgtgattatacgtgtacttatgaataagtggaataaaaaataactttacca

SEQ ID NO: 29319 - DNA, 80 bp, synthetic construct
  source 1..80: mol_type = other DNA
aacaaacttagaatgatgctatcatctaaaggaattgatcaaaaaatgagagtacttaatgcatgtttcaatgtgaagcg

SEQ ID NO: 29320 - DNA, 80 bp, synthetic construct
  source 1..80: mol_type = other DNA
agttccaggtaaatcatcatcaataattaaatgtactagattaatgagagataagattgaacgtggtgaagtcgaagtgg

SEQ ID NO: 29321 - DNA, 80 bp, synthetic construct
  source 1..80: mol_type = other DNA
gtcttcagtcgaatggtacctgaaatcaatggaattgcctgatgaaattaagacagatattgaacaacaactaaattaca

SEQ ID NO: 29322 - DNA, 80 bp, synthetic construct
  source 1..80: mol_type = other DNA
tggggattcaactggaccagaagataatcatcttatacatgagccattggggaagagaggccgtgaatcacttccatctt

SEQ ID NO: 29323 - DNA, 80 bp, synthetic construct
  source 1..80: mol_type = other DNA
aagacagtggaggccgacccagatgatgttaacaagaatacactccagagcagacgggcagctgtgtcagcattggagga

SEQ ID NO: 29324 - DNA, 80 bp, synthetic construct
  source 1..80: mol_type = other DNA
ctattgggcagtatgttatgggcttcgctttggcaattgtcttgaaagcattatacatgctatctacccgtggaaggcaa

SEQ ID NO: 29325 - DNA, 80 bp, synthetic construct
  source 1..80: mol_type = other DNA
acaatcaaagaaaacaaggggacacgaatcagattcaaggatgacagttcatttgaggagatcaatgggataaggcggcc

SEQ ID NO: 29326 - DNA, 80 bp, synthetic construct
  source 1..80: mol_type = other DNA
gaattccttatcaaaccatgtccgtttttaaagaagcaaggcagctcaggtaaggaggaggaatttcttgtaagcaatga

SEQ ID NO: 29327 - DNA, 80 bp, synthetic construct
  source 1..80: mol_type = other DNA
tgcatacttaattggtagggaaaaaacattgcaagagtcacacttgactgagattgatgatttgattgatctagcagact

SEQ ID NO: 29328 - DNA, 80 bp, synthetic construct
  source 1..80: mol_type = other DNA
caggggaccctacaccaccagactctataaaatctccacaagcgccgtgggtctttgcctgtgcgcctgatcgatgccct

SEQ ID NO: 29329 - DNA, 80 bp, synthetic construct
  source 1..80: mol_type = other DNA
ttctatcagtcctacctaaggcgcactcaatcaatgggaatccaactggaccaaaggattatcttgctgttcatgatgga

SEQ ID NO: 29330 - DNA, 80 bp, synthetic construct
  source 1..80: mol_type = other DNA
cactcaacgggaaatttggttcagctgtgcgaaataagaactggatgactgattcaagaacagtggctagattggatgag

SEQ ID NO: 29331 - DNA, 80 bp, synthetic construct
  source 1..80: mol_type = other DNA
gacgtaaacaaactgagaatgatgctttcatctaaaggaattgatcaaaaaatgagagtattgaatgcttgttttagtgt

SEQ ID NO: 29332 - DNA, 80 bp, synthetic construct
  source 1..80: mol_type = other DNA
agcaacaaagtcaaatagctgatttacaaaactactgtaataagttggagactgatttacagaataaaattggttcatta

SEQ ID NO: 29333 - DNA, 80 bp, synthetic construct
  source 1..80: mol_type = other DNA
gtttcatctgttgaatggtatcttagatcaatggaattaccagatgaagtcaaaactgatatagaacaacagttgaattc

SEQ ID NO: 29334 - DNA, 80 bp, synthetic construct
  source 1..80: mol_type = other DNA
tagacaccattaatccgataaatgcaattgatgatctcgagactctaattagaaatttagtgcatgactatgatagaaca

SEQ ID NO: 29335 - DNA, 80 bp, synthetic construct
  source 1..80: mol_type = other DNA
ttcttaatgtttaaaggactgttacggcaatgcaactatgaatatgcatacgaatagtcacataattcactaaccgttta

SEQ ID NO: 29336 - DNA, 80 bp, synthetic construct
  source 1..80: mol_type = other DNA
aatttagacgctaactacgtcgaaacagcccgcaacacaattgattattttgtagattttgtagacaacgtatgtatgga

SEQ ID NO: 29337 - DNA, 80 bp, synthetic construct
  source 1..80: mol_type = other DNA
ttggtatctgactttgatgagtatgtagctacgtcaagctgttagaactctgtaagtaaggatgcggcgaggaatcgtgg

SEQ ID NO: 29338 - DNA, 80 bp, synthetic construct
  source 1..80: mol_type = other DNA
caagaaatcaccaccgacgtgatgagacagagaggtctagagatatctgcacgtacggttgactcgctgctcttgaatgg

SEQ ID NO: 29339 - DNA, 80 bp, synthetic construct
  source 1..80: mol_type = other DNA
gtgtgcacatacgtgccggcgaccatttgtgatcaaatgaccggcatccttgctacagaagtcacgccggaggatgcaca

SEQ ID NO: 29340 - DNA, 80 bp, synthetic construct
  source 1..80: mol_type = other DNA
tccattgatggaatccggttggtcagacacagcacatggtgtaggtgtagtcccaatgaaaacagatttagaactagact

SEQ ID NO: 29341 - DNA, 80 bp, synthetic construct
  source 1..80: mol_type = other DNA
attttcagcttgataagcagattgtccatgctgaaattcaaaatttggggcattggatggatggtactttcaacataaaa

SEQ ID NO: 29342 - DNA, 80 bp, synthetic construct
  source 1..80: mol_type = other DNA
tcttttgtttttaggtccacttgaagacggtgggataattcttaagcaatggtgtacaacttcatgtgtgtttggtgacc

SEQ ID NO: 29343 - DNA, 80 bp, synthetic construct
  source 1..80: mol_type = other DNA
tccattgatggaatcagggtggtctgatacagcacatggtgtaggtatagtccctatgagaacagatctagaacttgatt

SEQ ID NO: 29344 - DNA, 80 bp, synthetic construct
  source 1..80: mol_type = other DNA
tttctccatcagtaaaagtttgcatgattggcactgtctcaaaattacagcctggtgatacattactgtttttaggtcca

SEQ ID NO: 29345 - DNA, 80 bp, synthetic construct
  source 1..80: mol_type = other DNA
ccgacttgcgaatatcagggcaatacaatttcaggatttaaaaggatgatggccacgagagattcttttcaatcattcaa

SEQ ID NO: 29346 - DNA, 80 bp, synthetic construct
  source 1..80: mol_type = other DNA
cctcatataactagtaaccgactagaatggattgaccctgacagtagtattaaagaccatataaatgtagtgctaaatcg

SEQ ID NO: 29347 - DNA, 80 bp, synthetic construct
  source 1..80: mol_type = other DNA
caacaagcacacattaatgaactacaaatgtataataataaattagaacgtgatttgcaatccaaaattggatctgttgt

SEQ ID NO: 29348 - DNA, 80 bp, synthetic construct
  source 1..80: mol_type = other DNA
tttataatgtttaaaggattattgcagcaatgcaactacacttatacttatgagtaattgaatgaacaattcaatactat

SEQ ID NO: 29349 - DNA, 80 bp, synthetic construct
  source 1..80: mol_type = other DNA
atgcgcagcgcagaagatcccgagagactcgctaattatgcgagaaagctcgcatctgccgcaggaaaagtcctggacag

SEQ ID NO: 29350 - DNA, 80 bp, synthetic construct
  source 1..80: mol_type = other DNA
tcagttgcaaatctctttttcgacggccctagccagcgccgaatttcgcgtacaagtctgttctacacaagtacactgtg

SEQ ID NO: 29351 - DNA, 80 bp, synthetic construct
  source 1..80: mol_type = other DNA
tccaggacaataagacggcagttcagaaggagtctctcaagaacattggaggagtctttttataactcagagatccatgg

SEQ ID NO: 29352 - DNA, 80 bp, synthetic construct
  source 1..80: mol_type = other DNA
tggtactccagggaagtccttaaaagacaaggctactcagactgttggccgagaagtcacgaaggagacaaagtcggcct

SEQ ID NO: 29353 - DNA, 80 bp, synthetic construct
  source 1..80: mol_type = other DNA
gagatgccagtctgtgaatgattgatccgggagaggtttttgacgaccccatcgatcctattgagtcggaagcggagtcg

SEQ ID NO: 29354 - DNA, 80 bp, synthetic construct
  source 1..80: mol_type = other DNA
ataggcctcttgaactgatctctggagtgatttcttacattctcttgcgactagacaatcacccatccttgtatattatg

SEQ ID NO: 29355 - DNA, 80 bp, synthetic construct
  source 1..80: mol_type = other DNA
ctcagagagccatctcttcgaggagagatattctctattccccaaaaagttcctgcagcttacccaaccacaatgagaga

SEQ ID NO: 29356 - DNA, 80 bp, synthetic construct
  source 1..80: mol_type = other DNA
catgatgtacttgtccactgctttaggggatgttcctagctttgcaagactccatgatctatacaatagacccataactt

SEQ ID NO: 29357 - DNA, 80 bp, synthetic construct
  source 1..80: mol_type = other DNA
gaggacaatcaggctcatctccaaggcgatcccatagaggtggacagtctccccgaagacatgagacgactccaactaga

SEQ ID NO: 29358 - DNA, 80 bp, synthetic construct
  source 1..80: mol_type = other DNA
tgatgacaagccgtctggtcttggcagtatagccaaagcaggggaaagcaagtgtcaggaagactttcaaatggatgagg

SEQ ID NO: 29359 - DNA, 80 bp, synthetic construct
  source 1..80: mol_type = other DNA
tcgagagtcagagaaaaaggtaacggcagccccccagactaggaaagtcgtatcttcatgggagttgtacaagagtgaag

SEQ ID NO: 29360 - DNA, 80 bp, synthetic construct
  source 1..80: mol_type = other DNA
acctcctctttttcatccgagttatacctcagattctccaaacgggggaagttcttccgagatgcagaatatctgacttc

SEQ ID NO: 29361 - DNA, 80 bp, synthetic construct
  source 1..80: mol_type = other DNA
ctctgctctcagagaaatgagccttgtattgttcaactgtagcagtcccaagagtgaaatgcagagagctcgctccttaa

SEQ ID NO: 29362 - DNA, 80 bp, synthetic construct
  source 1..80: mol_type = other DNA
ctcttaaagagtctataaactggtttattacaagaaactcaaacctggctcaaaccctagtcagaaacataatatccctg

SEQ ID NO: 29363 - DNA, 80 bp, synthetic construct
  source 1..80: mol_type = other DNA
cgggggaagttcttccgagatgcagaatatctgacttcctctgctctcagagaaatgagccttgtattgttcaactgtag

SEQ ID NO: 29364 - DNA, 80 bp, synthetic construct
  source 1..80: mol_type = other DNA
tcgggttaatacaaaattccagaacaataagacgacaattcagaaggagtctttcaagaacattggaggagtctttttat

SEQ ID NO: 29365 - DNA, 80 bp, synthetic construct
  source 1..80: mol_type = other DNA
cccggctatcaaagacctgaagaagcccagtataacattaggaaaagctcctgatttgaataaagcatacaaatcaattc

SEQ ID NO: 29366 - DNA, 80 bp, synthetic construct
  source 1..80: mol_type = other DNA
acatatgctgcagcaccatgatgtacttgtccactgctttaggggatgttcctagctttgcaagacttcatgatctatac

SEQ ID NO: 29367 - DNA, 80 bp, synthetic construct
  source 1..80: mol_type = other DNA
gacgggaatgtcctgataccagagatgcaatcgtctctacttcaacaacatatggagctactggagtcttctgtaatccc

SEQ ID NO: 29368 - DNA, 80 bp, synthetic construct
  source 1..80: mol_type = other DNA
cctaatgcatcccttagcggacccatcaacagtcttcaaggagggggatgaagcggaggattttgttgaagtccacctcc

SEQ ID NO: 29369 - DNA, 80 bp, synthetic construct
  source 1..80: mol_type = other DNA
tctgaaatgttggggttacttcctaaatcttcgatctcctgctcctgtggggtgactggaaggggaaatcctcgaatatc

SEQ ID NO: 29370 - DNA, 80 bp, synthetic construct
  source 1..80: mol_type = other DNA
tgtgtctgtgcttccgtcttttgatcagtcatttttttcacgaggccctctgaagggatacctgggctcatccacctcca

SEQ ID NO: 29371 - DNA, 80 bp, synthetic construct
  source 1..80: mol_type = other DNA
ttggcgacactggttctgataatctgcttgatggcatgctgtggaagaaccaagcgaacagagtcaagaagacgaggctc

SEQ ID NO: 29372 - DNA, 80 bp, synthetic construct
  source 1..80: mol_type = other DNA
caccggggctttccagagaggggcttctctacgagctagagagcatatcaagaaatgctctctcaatataccgtgccatc

SEQ ID NO: 29373 - DNA, 80 bp, synthetic construct
  source 1..80: mol_type = other DNA
tcatttttttcacgaggccctctgaagggatacctgggctcatccacctccatgtcgactcagctattccacgcatggga

SEQ ID NO: 29374 - DNA, 80 bp, synthetic construct
  source 1..80: mol_type = other DNA
ctgccgtttgtccaaatcttctatctcacatctctgtcagcacagacacgatgtcggatttgactcatgatggaagaaac

SEQ ID NO: 29375 - DNA, 80 bp, synthetic construct
  source 1..80: mol_type = other DNA
actcttatcacttaccaatctcatcttttgcttcagagagttgagaaaaatctctccaaaagtatgagaaccaacttgcg

SEQ ID NO: 29376 - DNA, 80 bp, synthetic construct
  source 1..80: mol_type = other DNA
acaaatgagctctctaatgaggcaagttttgggtgggcacggagaagataccttagagtcagatgaagacattcagagat

SEQ ID NO: 29377 - DNA, 80 bp, synthetic construct
  source 1..80: mol_type = other DNA
tgctgaaagactctttgcgtaggactaggtgggtggaccaggaagtacgccatgcagcgaggaccatggtaggaagttat

SEQ ID NO: 29378 - DNA, 80 bp, synthetic construct
  source 1..80: mol_type = other DNA
agccccagcaagaggatgtcacgcaaagccgggtgttcagaatgggtctgctctgctcagcaggttgcagtttcaacctc

SEQ ID NO: 29379 - DNA, 80 bp, synthetic construct
  source 1..80: mol_type = other DNA
aggctgctaaaagactctttgcgtaggactaggtgggtagaccaagaggtacgccatgcagcgaggaccatggtaggatg

SEQ ID NO: 29380 - DNA, 80 bp, synthetic construct
  source 1..80: mol_type = other DNA
tataacagacttggcccagttctactctaagtcctctcccatagaaaagctattaaactgcacactcgagaatagagggt

SEQ ID NO: 29381 - DNA, 80 bp, synthetic construct
  source 1..80: mol_type = other DNA
caactgaggatgtattctctgtactcgatcaagtgttcggactgagaaaggtgttttccagaactcatgagttttttcaa

SEQ ID NO: 29382 - DNA, 80 bp, synthetic construct
  source 1..80: mol_type = other DNA
accttcgaagatacaacaggtggatcaccctcaaagacatcagatccagatcatctctgttggattatagctgcttataa

SEQ ID NO: 29383 - DNA, 80 bp, synthetic construct
  source 1..80: mol_type = other DNA
tcatcaaactcgccctaactcgtttgcagagtttttaaacaaaacatactcgagtgactcgtgaatgagcaagatttttg

SEQ ID NO: 29384 - DNA, 80 bp, synthetic construct
  source 1..80: mol_type = other DNA
tcaacccaagtgcgatcagggccggcttggctgatctagagatggctgaagagactgtagatctcatcgctaggaacatc

SEQ ID NO: 29385 - DNA, 80 bp, synthetic construct
  source 1..80: mol_type = other DNA
ttatgcgtctctctgaatgaactttctacgtaagatggtaaagaactgtagagatgaggacacccagaagccctctctcg

SEQ ID NO: 29386 - DNA, 80 bp, synthetic construct
  source 1..80: mol_type = other DNA
agaggtctgatgaggataaagattcttcagtgcttctggaatagatgattcttcaggcccttcggtttgtgcctctccta

SEQ ID NO: 29387 - DNA, 80 bp, synthetic construct
  source 1..80: mol_type = other DNA
atctcttcattgtgtctcgggaaattccccatctatacaataccagataagctaggtccttggagccccatcgatataca

SEQ ID NO: 29388 - DNA, 80 bp, synthetic construct
  source 1..80: mol_type = other DNA
gcgatgccaggttgtgaatgattgatccgggagaggttttcgacgaccccatcgatccgatcgagtcggaagccgagtca

SEQ ID NO: 29389 - DNA, 80 bp, synthetic construct
  source 1..80: mol_type = other DNA
agagggaaccccaccatccccaacatcttgagaaactctgactacaacctcaactctcccctgatagaagactcggccaa

SEQ ID NO: 29390 - DNA, 80 bp, synthetic construct
  source 1..80: mol_type = other DNA
attgatgttggaatggttgaaaacagggaatagacctctccggatgactctgacagacaattgttctaggtcttacaaag

SEQ ID NO: 29391 - DNA, 80 bp, synthetic construct
  source 1..80: mol_type = other DNA
tttgagatcgttcaatgagctctattctggaaaccaaagaatgattgggctggtcaaggttgttgttggattggcgctgt

SEQ ID NO: 29392 - DNA, 80 bp, synthetic construct
  source 1..80: mol_type = other DNA
ttcaactagatgatgacaagccgtcgggccttggcagcatagccaaagcaggagaaagcaaatgtcaagaagattttcaa

SEQ ID NO: 29393 - DNA, 80 bp, synthetic construct
  source 1..80: mol_type = other DNA
ctgacctatccctccaaacacagaggtctgatgaggataaagattcttcagtgcttctggaatagatgattcttcaggcc

SEQ ID NO: 29394 - DNA, 80 bp, synthetic construct
  source 1..80: mol_type = other DNA
cttctgtttgtgcctctcctaatctcttcattgtgtctcgggaaattccccatctatacaataccagataagcttggtcc

SEQ ID NO: 29395 - DNA, 80 bp, synthetic construct
  source 1..80: mol_type = other DNA
cttttcctgtagtcactgggtttataacccaggtgacctcatctttctcatccgagttatacctcagattctccaaaagg

SEQ ID NO: 29396 - DNA, 80 bp, synthetic construct
  source 1..80: mol_type = other DNA
tctctctgaatgaactttctacgtaagatggtaaagaactgtagagatgaggacacccagaagccctctctcatatcagc

SEQ ID NO: 29397 - DNA, 80 bp, synthetic construct
  source 1..80: mol_type = other DNA
agatctcgtggggtaggaaggtggttggtaccaccgtgcctcatccctctgaaatgttggggttgcttccgagatcctcg

SEQ ID NO: 29398 - DNA, 80 bp, synthetic construct
  source 1..80: mol_type = other DNA
cactctgtctggttttcaaaacttacggtaccatgctggtaaatccggactacaaggctattcaacatctgtctagagct

SEQ ID NO: 29399 - DNA, 80 bp, synthetic construct
  source 1..80: mol_type = other DNA
tatcagctcctccagatgacgatgatctatggttaccccctccagaatacgttccgttgaaggagctcacgggcaagaag

SEQ ID NO: 29400 - DNA, 80 bp, synthetic construct
  source 1..80: mol_type = other DNA
gtatgctctgctcaacaggttgcagtttcaacctcagcaaacccagcccctgcttccgagctggacatcagaactctctc

SEQ ID NO: 29401 - DNA, 80 bp, synthetic construct
  source 1..80: mol_type = other DNA
acgacttagtctttgtgtatggctgttacaggcattggggacatccttacatagattaccgaaaggggttgtcaaagcta

SEQ ID NO: 29402 - DNA, 80 bp, synthetic construct
  source 1..80: mol_type = other DNA
cgtctgcccgatgcgcagcgcagaagatcccgagagactcgccaattatgcgagaaagctagcatctgctgcaggaaaag

SEQ ID NO: 29403 - DNA, 80 bp, synthetic construct
  source 1..80: mol_type = other DNA
tctctttctcgacggccttggccagcgccgaattccgcgtacaagtctgttctacacaagtacactgtgcagccaggtgc

SEQ ID NO: 29404 - DNA, 80 bp, synthetic construct
  source 1..80: mol_type = other DNA
ctctagtcaatagaccgggctacagtcccatggtattggagatggaactactgtcagtcactttggagccaacgctatcg

SEQ ID NO: 29405 - DNA, 80 bp, synthetic construct
  source 1..80: mol_type = other DNA
agacatggagggattgctgacaatgtatgaaacgctgttcccaataaatgaaaaattggtgaacaaattcacagactttg

SEQ ID NO: 29406 - DNA, 80 bp, synthetic construct
  source 1..80: mol_type = other DNA
ggatggaagggtgccaaggattctgaatatggatgatgtaaggaaaatattaagcgcaataatgttcgattggtttgacg

SEQ ID NO: 29407 - DNA, 80 bp, synthetic construct
  source 1..80: mol_type = other DNA
actataaaacttgaggataatatgtattatatatttggatattatgactgtatggaacatgagaaccaaacaccattcca

SEQ ID NO: 29408 - DNA, 80 bp, synthetic construct
  source 1..80: mol_type = other DNA
atttattaatctggtagaaaaatatgataaattgttactggatgatagaaattttaatagaatgtcatacctaccaacaa

SEQ ID NO: 29409 - DNA, 80 bp, synthetic construct
  source 1..80: mol_type = other DNA
tactacaacaggaatatgcattaaggtacttttcaaaatcaaggtttataagcaaaaaggagaaaaggttgagtaggaat

SEQ ID NO: 29410 - DNA, 80 bp, synthetic construct
  source 1..80: mol_type = other DNA
gatttttcagacaatcttatggaagacagacatagtccaatatcgctaatacaagtgatgcgcaactgcatcagtacaca

SEQ ID NO: 29411 - DNA, 80 bp, synthetic construct
  source 1..80: mol_type = other DNA
catgaatgatagtgaatggaataaagcgtgcacgcttgtagttaatcctaaaagctacattgacattatgaactcatcat

SEQ ID NO: 29412 - DNA, 80 bp, synthetic construct
  source 1..80: mol_type = other DNA
acactgaacattacagcgtttcacaaagatgcaaattgtttactaaatataaacttgggattatatcaaaactggtgaga

SEQ ID NO: 29413 - DNA, 80 bp, synthetic construct
  source 1..80: mol_type = other DNA
ccaaattacattttctctagtcacgaatcgtgcgcattaaatgtacacaattgcaaatggtgtcagacaaacaaccatta

SEQ ID NO: 29414 - DNA, 80 bp, synthetic construct
  source 1..80: mol_type = other DNA
taaagtatgggacgattttagactcaagaaaatatataataatataatggactttattagagcacttgtgaagtcgaacg

SEQ ID NO: 29415 - DNA, 80 bp, synthetic construct
  source 1..80: mol_type = other DNA
tgaaacaacgtaaatgcagaaatgagtatttgctagaatggtacaatcatttactaatgccaataacgttacaagcgtta

SEQ ID NO: 29416 - DNA, 80 bp, synthetic construct
  source 1..80: mol_type = other DNA
gaaatgttggacattgttcgtcacaagaatcagtatacaaatgcatcccagatatatttctgatttgtgaaatggaaaaa

SEQ ID NO: 29417 - DNA, 80 bp, synthetic construct
  source 1..80: mol_type = other DNA
tggaatgaagctgttagagcgttgtttagatatttagaaccagtggatataaacggagaggagtatgtactatttgacta

SEQ ID NO: 29418 - DNA, 80 bp, synthetic construct
  source 1..80: mol_type = other DNA
tgaggtgaactgggaagtgaggggactaattatgcaaaatatggatggaagggtgccaaggattctgaatatggatgatg

SEQ ID NO: 29419 - DNA, 80 bp, synthetic construct
  source 1..80: mol_type = other DNA
acagctatttctcttcaggcaccgccgagtaccgccacggaactgaatcatccgccgatctccttcggagcaccaagcga

SEQ ID NO: 29420 - DNA, 80 bp, synthetic construct
  source 1..80: mol_type = other DNA
tgaacggagtcacaccaggaacgtctaaagacctgaaagtcatagctggaccgatttcagcatcgtttacaccattcgat

SEQ ID NO: 29421 - DNA, 80 bp, synthetic construct
  source 1..80: mol_type = other DNA
caaaggtcaaaaataggcaatggtagtgtaaaactaaccgagaaagcaaaagaacttaataaaattgttgaagacgagag

SEQ ID NO: 29422 - DNA, 80 bp, synthetic construct
  source 1..80: mol_type = other DNA
aatctctgctatcaggattaagaataccaataaacagaaaagagttaaatagacaaaagaaactgttaacactacaaagc

SEQ ID NO: 29423 - DNA, 80 bp, synthetic construct
  source 1..80: mol_type = other DNA
aaagtcctggacagaaacatctctggaaagatcggggacttacaagcagtaatggccgtgccagacatggagacgccaac

SEQ ID NO: 29424 - DNA, 80 bp, synthetic construct
  source 1..80: mol_type = other DNA
attcgaaagcatttcgaaacatggtgtatgttagatcattagcagctaatttaaattcagtgaaatgtacaggtggaagt

SEQ ID NO: 29425 - DNA, 80 bp, synthetic construct
  source 1..80: mol_type = other DNA
ttcagatatatgtgttaaagaacttgttgctgaattaagatggcaatataacagatttgctgtaataacacatggtaaag

SEQ ID NO: 29426 - DNA, 80 bp, synthetic construct
  source 1..80: mol_type = other DNA
gcaaaacagaatttgcatcagcatacagggctcataccgcatccgcatcagctaagctccgcgtcctttaccaaggaaat

SEQ ID NO: 29427 - DNA, 80 bp, synthetic construct
  source 1..80: mol_type = other DNA
ctggtatgttcctaactctgttcgtcaacacattgctaaacatcaccatcgctagccgcgtgctggaagatcgtctgaca

SEQ ID NO: 29428 - DNA, 80 bp, synthetic construct
  source 1..80: mol_type = other DNA
caagctccagatctaacttcgagaagctcagaggacccgtcataactttgtacggcggtcctaaataggtacgcactaca

SEQ ID NO: 29429 - DNA, 80 bp, synthetic construct
  source 1..80: mol_type = other DNA
taccactgcgtctgcccgatgcgcagcgcagaagatcccgagagactcgccaattatgcgagaaagctagcatctgctgc

SEQ ID NO: 29430 - DNA, 80 bp, synthetic construct
  source 1..80: mol_type = other DNA
ttgtagaggttaaacctgaaacctcctaaaccagcacagtatgggttgtcaagcaagaagaaacccaatccagggtcttt

SEQ ID NO: 29431 - DNA, 80 bp, synthetic construct
  source 1..80: mol_type = other DNA
gggttgcataatgtgtcagaagggaagaacctacctatacttctagcaatagtttctatcaaactctgaacaatcctctc

SEQ ID NO: 29432 - DNA, 80 bp, synthetic construct
  source 1..80: mol_type = other DNA
gagcatgttgtatgctatatgccaaagagaaggatccaccaccctctgtgactgcagtcattaggttggatgcttcttct

SEQ ID NO: 29433 - DNA, 80 bp, synthetic construct
  source 1..80: mol_type = other DNA
ttgtcttgccaccaatgtctcaacttccggcaagctgcaactagctgctatccatcttatagttggcctaacgtgctgtg

SEQ ID NO: 29434 - DNA, 80 bp, synthetic construct
  source 1..80: mol_type = other DNA
atggaagaagaattctgaattatattccataacaaagtcagtgttcgacgtagatttctctgaggggtatatagctaaat

SEQ ID NO: 29435 - DNA, 80 bp, synthetic construct
  source 1..80: mol_type = other DNA
aaacccctaaattcttcttcatgcgaaaacagatagctgctgccattttacacctcattattgtgggctcatctttggct

SEQ ID NO: 29436 - DNA, 80 bp, synthetic construct
  source 1..80: mol_type = other DNA
gggaaacttaaaagcatgctgctgtcatctgaaccctgcatcatgtcacacaccattgagtacgacatctcaggatggac

SEQ ID NO: 29437 - DNA, 80 bp, synthetic construct
  source 1..80: mol_type = other DNA
tttcatgttaaatatcctgaaagtaagtgatctcacaaattcttgatgtagggtgtgcaatagtgatgaagtgaaatgca

SEQ ID NO: 29438 - DNA, 80 bp, synthetic construct
  source 1..80: mol_type = other DNA
gtattccctgcatcattcctgtctttgttttgataaaggtctttcctgggtccatccaagtctgcgggacctctccatgg

SEQ ID NO: 29439 - DNA, 80 bp, synthetic construct
  source 1..80: mol_type = other DNA
tatgccttaaatagatcctgaacaaactgatcctccaccttaagttccatgtgactgtcaagtatcctaagatattggag

SEQ ID NO: 29440 - DNA, 80 bp, synthetic construct
  source 1..80: mol_type = other DNA
ccactttgctatagctttcttaaattctgagaacagagaactaacacccatgcccattagcatgtagtgcaaggtacact

SEQ ID NO: 29441 - DNA, 80 bp, synthetic construct
  source 1..80: mol_type = other DNA
gttcatcatcatgtacttgtttgtaaacattgagcagcccctgatgatgatcggccaccactttgaatgtgtaaactcac

SEQ ID NO: 29442 - DNA, 80 bp, synthetic construct
  source 1..80: mol_type = other DNA
ggccctttacagtgttttctagctcttaaaccatggctttcaggaatcttcattttgttgttagggttgcataatgtgtc

SEQ ID NO: 29443 - DNA, 80 bp, synthetic construct
  source 1..80: mol_type = other DNA
gtcctgtactccttgtcaaaaactcttaaagatgctagagacaaaattgtcgaaggtacattatactctaatgtgagtga

SEQ ID NO: 29444 - DNA, 80 bp, synthetic construct
  source 1..80: mol_type = other DNA
caaatgtgacatctgttagacaagaatacgcaataccagttggaccagtctttccaccaggtatgaattggactgatttg

SEQ ID NO: 29445 - DNA, 80 bp, synthetic construct
  source 1..80: mol_type = other DNA
agcaaggaggatgatgtcggacaggaagtaccactgcgtctgcccgatgcgcagcgcagaagatcccgagagactcgcca

SEQ ID NO: 29446 - DNA, 80 bp, synthetic construct
  source 1..80: mol_type = other DNA
attctaatcgtggtgctatgcgtgtcgtttagcaggcactaacttgacgactaagcatgaaggtatatgtgtcccctaag

SEQ ID NO: 29447 - DNA, 80 bp, synthetic construct
  source 1..80: mol_type = other DNA
acacacagacgatcgtcagggtcccgtcggagtttaactccttcgtgatccctagcctgtggtcagcggggttgtcgatc

SEQ ID NO: 29448 - DNA, 80 bp, synthetic construct
  source 1..80: mol_type = other DNA
actagaagaactagatccacagtccatgcggatggacgagtctgacaaccaacaacccatatcaacggctgaaccggttg

SEQ ID NO: 29449 - DNA, 80 bp, synthetic construct
  source 1..80: mol_type = other DNA
gtgccacctgggtcaacatggaggttaagataatagatgcagtcatgtgtgcaaggccaccgtacttctgtggcggcttt

SEQ ID NO: 29450 - DNA, 80 bp, synthetic construct
  source 1..80: mol_type = other DNA
ttgccggtggagttgggctattgataaccctggcagtgctaattctggtaatagttacttgcataactttgagaaggtga

SEQ ID NO: 29451 - DNA, 80 bp, synthetic construct
  source 1..80: mol_type = other DNA
gtgcaccgcccacctgtcgtccaaaggacgaaaccggtcccagcaccacgcaccagtttgcgtcccgtccccgcgcccag

SEQ ID NO: 29452 - DNA, 80 bp, synthetic construct
  source 1..80: mol_type = other DNA
cggttgttcaacccgtaccacctccacgtcctaaacgtgccaggcggctagcggctgcacgtatgcaggtccaggtggaa

SEQ ID NO: 29453 - DNA, 80 bp, synthetic construct
  source 1..80: mol_type = other DNA
gagtaaagtgcgaaaaagtgatgctttttgatacaactccaccggcctctgttagtcctgtacaatacctgacgagtcac

SEQ ID NO: 29454 - DNA, 80 bp, synthetic construct
  source 1..80: mol_type = other DNA
agtgaaactactgtaagcttgagctcgttctcaattacatctgacagtagctctctaagcaccttcccggatctggagtc

SEQ ID NO: 29455 - DNA, 80 bp, synthetic construct
  source 1..80: mol_type = other DNA
actagaagaacttggcaatgatccacagtccatgcggatggacgagtctgacaaccaacaacccatatcaacggcagaac

SEQ ID NO: 29456 - DNA, 80 bp, synthetic construct
  source 1..80: mol_type = other DNA
gtgcaccgcccactcatcgtcccaaggacaaaaccggtcccagcaccgcgcaccagcttgtaccccgtccccgcgcctag

SEQ ID NO: 29457 - DNA, 80 bp, synthetic construct
  source 1..80: mol_type = other DNA
gctcttcctctgcattgcaagagtataccactcattatgtcgaaagtctttgtagatatcgaggccgagagcccgttttt

SEQ ID NO: 29458 - DNA, 80 bp, synthetic construct
  source 1..80: mol_type = other DNA
ttgccggtggagttgggttactgatagctctggcagtgataatcctagtaatagttacttgcataactatgagaaggtga

SEQ ID NO: 29459 - DNA, 80 bp, synthetic construct
  source 1..80: mol_type = other DNA
tcggaattagacacaggatcaggcttcttttgcagtcaagacgtgccgagccacttgttccatctatagatgcaagtgaa

SEQ ID NO: 29460 - DNA, 80 bp, synthetic construct
  source 1..80: mol_type = other DNA
gctagagcagcagagaaggaggctgcagaagctaaggaagcagaagaaacactggcagccctgccgcctttgatcccgac

SEQ ID NO: 29461 - DNA, 80 bp, synthetic construct
  source 1..80: mol_type = other DNA
ctccgctgctcgacgacatccctgaagtggatgtagaggagctggagtttagagcaggagcaggtgttgttgaaacgcct

SEQ ID NO: 29462 - DNA, 80 bp, synthetic construct
  source 1..80: mol_type = other DNA
cggaatgccctcaaggttacaccgcaagacagagacaccatggtcggtagctatcttgttctgtctccccaaacagtcct

SEQ ID NO: 29463 - DNA, 80 bp, synthetic construct
  source 1..80: mol_type = other DNA
gattgatatcacctgtaatctgatccccttcaatcggagactccctcacgcgttggtcacggaataccacccaatcaaag

SEQ ID NO: 29464 - DNA, 80 bp, synthetic construct
  source 1..80: mol_type = other DNA
gagaaagagtagagtggctcgtgaataagatcccaggctatcacgtgctactggtcagcgagtacaacctcatattgcct

SEQ ID NO: 29465 - DNA, 80 bp, synthetic construct
  source 1..80: mol_type = other DNA
ggttatgccgatagaacgagtgaggctgtggtgacggccctcgcgcgccggttctcgtccttcagagcggttagacctcc

SEQ ID NO: 29466 - DNA, 80 bp, synthetic construct
  source 1..80: mol_type = other DNA
actagaagaaccaggcaacgattcacagtccatgcggatggacgagtctgataaccaacaacccgtgccaacggcagaac

SEQ ID NO: 29467 - DNA, 80 bp, synthetic construct
  source 1..80: mol_type = other DNA
tggttgttcaacccgtaccacctccgcgtcctaaacgtgccaggcgactggcagccgcacgtatgcaggttcaggtggag

SEQ ID NO: 29468 - DNA, 80 bp, synthetic construct
  source 1..80: mol_type = other DNA
gtgcaccgcccacccgtcgttcaaaggacgaaaccagttccagcaccgcgcactagtttgcgccccgtccccgcgcctag

SEQ ID NO: 29469 - DNA, 80 bp, synthetic construct
  source 1..80: mol_type = other DNA
tttagatcaggcttgggttcggagatcgaggtcgcccttgccaccagatacgaggtggagggtggctacaacttattact

SEQ ID NO: 29470 - DNA, 80 bp, synthetic construct
  source 1..80: mol_type = other DNA
agcaagcggagcgcaagggcaaggtgcacattccttttccacttgtcaacatcacctgccgagtgccattggcccccgaa

SEQ ID NO: 29471 - DNA, 80 bp, synthetic construct
  source 1..80: mol_type = other DNA
ggactacattatatatagatctttgttgatttctgtagcattatttgccttgacaagagctcagaactatgggattaact

SEQ ID NO: 29472 - DNA, 80 bp, synthetic construct
  source 1..80: mol_type = other DNA
ggactacattatatatagatttttgttaatttctgtaacattatttgccttgactaaagctcagaattatggacttaaca

SEQ ID NO: 29473 - DNA, 80 bp, synthetic construct
  source 1..80: mol_type = other DNA
ttgccggcggagttgggttgctgatagctctggccgtgctaattctggtaatagttacttgtgtgactttgagaaggtaa

SEQ ID NO: 29474 - DNA, 80 bp, synthetic construct
  source 1..80: mol_type = other DNA
acattggaagtgcgcccgcccgcagaatgtattctaagcataagtaccattgcatctgtccgatgagatgtgcagaagat

SEQ ID NO: 29475 - DNA, 80 bp, synthetic construct
  source 1..80: mol_type = other DNA
tgctggctactattgtggccatgtacgtgctgaccaaccagaaacataattgaacatagcagcaattggcaagctgctca

SEQ ID NO: 29476 - DNA, 80 bp, synthetic construct
  source 1..80: mol_type = other DNA
cataattgaacatagcagcaattggcaagctgctcatatagaatttgcggcgattggcatgccgctttaaaatttttatt

SEQ ID NO: 29477 - DNA, 80 bp, synthetic construct
  source 1..80: mol_type = other DNA
acccacagaggggacacctgtaaccgtggatgaaaccagaaccagaacgcccgaaccaattattgaagaagaagaagagg

SEQ ID NO: 29478 - DNA, 80 bp, synthetic construct
  source 1..80: mol_type = other DNA
cggcggagttgggttactgatagctctggcagtgctaagtctggcaatagttacttgtgtgactttgagaaggtaaatca

SEQ ID NO: 29479 - DNA, 80 bp, synthetic construct
  source 1..80: mol_type = other DNA
acggcgatgtcatgggtgcagaagatcacgggaggtgtgggactggttgtcgctgtcgcagcactgatcctaatcgtggt

SEQ ID NO: 29480 - DNA, 80 bp, synthetic construct
  source 1..80: mol_type = other DNA
aaaaacctacctgactacagctgtaaggtcttcaccggcgtctacccatttatgtggggcggagcctactgcttctgcga

SEQ ID NO: 29481 - DNA, 80 bp, synthetic construct
  source 1..80: mol_type = other DNA
ggtaccagcctcgaccctggactccgcgccccactatccaagtaatcaggcccagaccgcgccctcagaggcaagccggg

SEQ ID NO: 29482 - DNA, 80 bp, synthetic construct
  source 1..80: mol_type = other DNA
accacatagtcaactacccggcgtcacataccaccctcggggtccaggacatctccgctacggcgatgtcatgggtgcag

SEQ ID NO: 29483 - DNA, 80 bp, synthetic construct
  source 1..80: mol_type = other DNA
aaaaaatgggacaagtgaaaatggagtcctatctggtagacacctaccaaggcatcccttatacagcagctgttcaagtt

SEQ ID NO: 29484 - DNA, 80 bp, synthetic construct
  source 1..80: mol_type = other DNA
caccagacggcagtggatgtggcagagatacatactatgtggccaaagcaaacagaggccaatgagcaagtctgcctata

SEQ ID NO: 29485 - DNA, 80 bp, synthetic construct
  source 1..80: mol_type = other DNA
gcagggaactaccttgcagcacatacgcgcagagcaccgctgcaactgccgaggagatagaggtacatatgcccccagac

SEQ ID NO: 29486 - DNA, 80 bp, synthetic construct
  source 1..80: mol_type = other DNA
gtgcgtaccccatgtttgaggtggaacctaggcaggtcacatcaaatgaccatgctaatgctagagcgttctcgcatcta

SEQ ID NO: 29487 - DNA, 80 bp, synthetic construct
  source 1..80: mol_type = other DNA
ctagaaccggccctagacgacggggcgatcggaaaccttgcggccgtgtctgactgggtaatgagcaccgtacctgtcgc

SEQ ID NO: 29488 - DNA, 80 bp, synthetic construct
  source 1..80: mol_type = other DNA
aagggccgaacaacccctgaatagtaacaaaacatgaaaatcaataaaaatcataaaatagaaaaaccataaacagaagt

SEQ ID NO: 29489 - DNA, 80 bp, synthetic construct
  source 1..80: mol_type = other DNA
atgctactgtatcccgaccacccaacactcctgtcctaccggaacatgggagaagaaccaaactaccaagaagagtgggt

SEQ ID NO: 29490 - DNA, 80 bp, synthetic construct
  source 1..80: mol_type = other DNA
atccaatttcgagaagctcagaggacccgtcataactttgtacggcggtcctaaatagatggagttcatcccaacccaaa

SEQ ID NO: 29491 - DNA, 80 bp, synthetic construct
  source 1..80: mol_type = other DNA
ctttttacaataggaggtaccagcctcgaccctggactccgcgctctactatccaaatcatcaggcccagaccgcgccct

SEQ ID NO: 29492 - DNA, 80 bp, synthetic construct
  source 1..80: mol_type = other DNA
ctgtcatgggtgcagaagatcacgggaggcgtgggactggttgtcgctgttgcagcactgattctaatcgtggtgctatg

SEQ ID NO: 29493 - DNA, 80 bp, synthetic construct
  source 1..80: mol_type = other DNA
gatgtggaccagagaagatgctgcaagaaggaagaagctgcaggactggtactggtgggcgacttgactaatccgcccta

SEQ ID NO: 29494 - DNA, 80 bp, synthetic construct
  source 1..80: mol_type = other DNA
agggcaggtgggtatatattctcgtcggacaccggtccaggtcatttacaacagaagtcagtacgccagtcagtgctgcc

SEQ ID NO: 29495 - DNA, 80 bp, synthetic construct
  source 1..80: mol_type = other DNA
atgtacgcacccatttcaccacgaccctcctgtgataggccgggagaaattccattcccgaccgcagcacggtaaagagc

SEQ ID NO: 29496 - DNA, 80 bp, synthetic construct
  source 1..80: mol_type = other DNA
taatgaagtctgatgactgcgctgctgaccatgctcaggcgtataaagcacacacagctgcagcacaggcctttctcaac

SEQ ID NO: 29497 - DNA, 80 bp, synthetic construct
  source 1..80: mol_type = other DNA
attacggtcgcagatcaatcaaccacaacgatcgtgtatgttaatggagaaacacccgtcaactttaacggcatcagatt

SEQ ID NO: 29498 - DNA, 80 bp, synthetic construct
  source 1..80: mol_type = other DNA
aactgcaggccctttatcaacagcgtggacgcctttcgaccgcaagatagttcagtacgctgaagaagtgtacaactatg

SEQ ID NO: 29499 - DNA, 80 bp, synthetic construct
  source 1..80: mol_type = other DNA
atttccctgaatacggagcaggtaccgcaggagctttcggcgacatccaagctagaacaactaccagcacagacctatac

SEQ ID NO: 29500 - DNA, 80 bp, synthetic construct
  source 1..80: mol_type = other DNA
gccaacaccaatctggtattgcagagaccgaaatccggaacggttcacgttccgtatacccaggccccttcaggttttga

SEQ ID NO: 29501 - DNA, 80 bp, synthetic construct
  source 1..80: mol_type = other DNA
gcagtggaaaaaggacaaaccaccgtcactgaaatacaccgccccatttgggtgtgaaatcaaagtgaaccccaatcaaa

SEQ ID NO: 29502 - DNA, 80 bp, synthetic construct
  source 1..80: mol_type = other DNA
acgctgtcgaacgcggaatgcaccctaaatgaatgcgtatattcttcggatttcgggggaattgcttcggtgaagtattc

SEQ ID NO: 29503 - DNA, 80 bp, synthetic construct
  source 1..80: mol_type = other DNA
agccactaaagcagggaagtgtgcagtacacataccttcaggtactgcgaccgttagagaagccacagtggatcttgtcg

SEQ ID NO: 29504 - DNA, 80 bp, synthetic construct
  source 1..80: mol_type = other DNA
aacagggatccctcacagtacacttctcaacagcgaatatccacccagaatttaggctgcagatctgcaccacttatgtg

SEQ ID NO: 29505 - DNA, 80 bp, synthetic construct
  source 1..80: mol_type = other DNA
tcgccaggtgggcaagagagtacaaggaggaccaggacgatgaacgtccgctgggattgagagatcgccagctggtgatg

SEQ ID NO: 29506 - DNA, 80 bp, synthetic construct
  source 1..80: mol_type = other DNA
gatcacatcgttactcggaggttcggcagtgctcgtagtaattggattaatattggcaattatcgtagctacgtatgtac

SEQ ID NO: 29507 - DNA, 80 bp, synthetic construct
  source 1..80: mol_type = other DNA
tgaccggccagaggaggtactaaactaacacagcaattggcaggctgtaaattgagtaccattaatcagataatagcagc

SEQ ID NO: 29508 - DNA, 80 bp, synthetic construct
  source 1..80: mol_type = other DNA
aggctgtaaattgagtaccattaatcagataatagcagcaattggcgagctgcataaaatttttaataacaactatcaca

SEQ ID NO: 29509 - DNA, 80 bp, synthetic construct
  source 1..80: mol_type = other DNA
ggatgttgctgggcctttaagaagcataagatcacttctgtgtacaaacgcccggatacccaaacggtagtaaaagtgcc

SEQ ID NO: 29510 - DNA, 80 bp, synthetic construct
  source 1..80: mol_type = other DNA
cagtgatttccattctttcgttctgccaagagtagggagcagtactttggaaatcggcctcagagaccgaattaagaaat

SEQ ID NO: 29511 - DNA, 80 bp, synthetic construct
  source 1..80: mol_type = other DNA
tgctggagaaaccaaaggaacctgtaccgctggttacagacgaagacatcggcgaggctaagaacgcagctgctgaggcg

SEQ ID NO: 29512 - DNA, 80 bp, synthetic construct
  source 1..80: mol_type = other DNA
aaagaaatcaaagaggcagaagaattgcgggcagccttgccgcccctgactgctgacgttgaagaaccgacgctcgaagc

SEQ ID NO: 29513 - DNA, 80 bp, synthetic construct
  source 1..80: mol_type = other DNA
agatgttgacctcatgttgcaagaagcaggggcaggatccgtagagacgccgcgggggttgatcaaagtcaccagctata

SEQ ID NO: 29514 - DNA, 80 bp, synthetic construct
  source 1..80: mol_type = other DNA
gcggtgaggagaaaatcggttcctacgctatactctcaccgcaagccgtgttacgcagtgaaaaacttgcgtgtattcat

SEQ ID NO: 29515 - DNA, 80 bp, synthetic construct
  source 1..80: mol_type = other DNA
gcactcgctgagcaggtgatcgtgattacccattccggcaggaaaggtaggtatgcagtggagccgtatcatggaaaagt

SEQ ID NO: 29516 - DNA, 80 bp, synthetic construct
  source 1..80: mol_type = other DNA
aattgtacctgagggcaccgccattcctgtgcctgattttcaggcactcagtgagagtgccacgatagtgtataacgaac

SEQ ID NO: 29517 - DNA, 80 bp, synthetic construct
  source 1..80: mol_type = other DNA
gggagttcgtgaacaggtacttgcaccatatcgcggtccacggaggggcgcttaataccgacgaagagtactataagaca

SEQ ID NO: 29518 - DNA, 80 bp, synthetic construct
  source 1..80: mol_type = other DNA
gtgaaacctggcgactatgacggagaatatctatatgatatagacaaaaaacagtgcgtgaagaaagaactggttagcgg

SEQ ID NO: 29519 - DNA, 80 bp, synthetic construct
  source 1..80: mol_type = other DNA
tctagggatgacgggtgaactcattgaacccccatttcatgagttcgcgtacgaaagcctgaagactagacctgccgcac

SEQ ID NO: 29520 - DNA, 80 bp, synthetic construct
  source 1..80: mol_type = other DNA
cccaccaagtacctactattggggtgtatggagtaccaggttctggtaaatctggaatcataaagagcgcagtcacgaag

SEQ ID NO: 29521 - DNA, 80 bp, synthetic construct
  source 1..80: mol_type = other DNA
cggcgaaactaaagaaaaactgcaaagacatcacggacaaaggactagatcagaagctagcagatcttgcagcagtcatg

SEQ ID NO: 29522 - DNA, 80 bp, synthetic construct
  source 1..80: mol_type = other DNA
aaaaagagaattgtgcggaaattatcagagacgtcaaacacgctagagggctggacgtcaatgcgcggactgtggactcc

SEQ ID NO: 29523 - DNA, 80 bp, synthetic construct
  source 1..80: mol_type = other DNA
gtactgctgaacggttgtaagtacccagtcgaaaccttatacattgacgaagcttttgcgtgccacgcaggaacccttag

SEQ ID NO: 29524 - DNA, 80 bp, synthetic construct
  source 1..80: mol_type = other DNA
ggccttgattgcgattgtcaagcccaagaaagccgtgttgtgcggggaccctaagcaatgtgggttcttcaacatgatgt

SEQ ID NO: 29525 - DNA, 80 bp, synthetic construct
  source 1..80: mol_type = other DNA
ctgtgacttctgtcgtgtccaccctgttttacgacaagaaaatgaggacaaccaaccagaaagagacgcaaatcgaaatc

SEQ ID NO: 29526 - DNA, 80 bp, synthetic construct
  source 1..80: mol_type = other DNA
gataccacagggagcacgaagcctaagaaggaggatttgatcctcacttgcttccgagggtgggtaaagcaactgcagat

SEQ ID NO: 29527 - DNA, 80 bp, synthetic construct
  source 1..80: mol_type = other DNA
tgactacaaaggcaatgaaatcatgacagcggcagcatcgcaaggactaacccggaagggcgtctatgccgtcaggtaca

SEQ ID NO: 29528 - DNA, 80 bp, synthetic construct
  source 1..80: mol_type = other DNA
aggtcaatgagaacccgctgtatgcccccaattccgaacacgtgaatgttctgctgactcgaacggaggaccgaatcgtt

SEQ ID NO: 29529 - DNA, 80 bp, synthetic construct
  source 1..80: mol_type = other DNA
tggaagaccctggcgggtgacccctggattaagaccctgaccgccaagtatccaggtgaattctcagcgacgctagaaga

SEQ ID NO: 29530 - DNA, 80 bp, synthetic construct
  source 1..80: mol_type = other DNA
atggcaagctgaacatgacgccattatgaagcacatcatggaagaacctaaccctgccgacgtcttccagaacaaagcga

SEQ ID NO: 29531 - DNA, 80 bp, synthetic construct
  source 1..80: mol_type = other DNA
cgtttgctgggctaaagctcttgtccctgtgctgaaaacagccggaatttccttgacggcagaccaatggaataccgtcg

SEQ ID NO: 29532 - DNA, 80 bp, synthetic construct
  source 1..80: mol_type = other DNA
caggaaccttccttagagcgagaatcgatttgtcttcatgacgacgagtcatgccgctatgaagggcagattgctgtcta

SEQ ID NO: 29533 - DNA, 80 bp, synthetic construct
  source 1..80: mol_type = other DNA
aaaattttaaaactgacaaggcgcactctgcagagattgtgttaaatcaactgtgcgtacggttcttcgggctagacttg

SEQ ID NO: 29534 - DNA, 80 bp, synthetic construct
  source 1..80: mol_type = other DNA
gattcaggtatattctcagcgcctacagtcccgctgtctataaagaataatcactgggacaactccccatctccgaatat

SEQ ID NO: 29535 - DNA, 80 bp, synthetic construct
  source 1..80: mol_type = other DNA
gtacggaatcaacatggacgtggtgaggcagctttctaggcgctacccgcagctgccacgagcggtaaccacagggcgag

SEQ ID NO: 29536 - DNA, 80 bp, synthetic construct
  source 1..80: mol_type = other DNA
cgctggatatgaactcgggtgcgttgcgcgcctacgatccccggataaacttagtgcctatgaacaggaggttaccccat

SEQ ID NO: 29537 - DNA, 80 bp, synthetic construct
  source 1..80: mol_type = other DNA
gctcttgtcaccaaccactcagaacaccctcctagcgacttttcgacatttgttagtaaacttaaaggtcggaccgtact

SEQ ID NO: 29538 - DNA, 80 bp, synthetic construct
  source 1..80: mol_type = other DNA
agtggtcggagacaaaatgaccgtgaccggaaagaccgtcgactggctgtccgaatcccccgaagctacttttcgcacgc

SEQ ID NO: 29539 - DNA, 80 bp, synthetic construct
  source 1..80: mol_type = other DNA
gcctagacttagggattccagcagagcttcctaagtacgacattgtcttcgtcaatgtaagaacgccgtatagataccac

SEQ ID NO: 29540 - DNA, 80 bp, synthetic construct
  source 1..80: mol_type = other DNA
cactatcagcagtgtgaagatcacgctattaagctgagcatgctgactaagaaagcatgtttgcacctcaatcctggggg

SEQ ID NO: 29541 - DNA, 80 bp, synthetic construct
  source 1..80: mol_type = other DNA
gcacatgcgtcagcgtgggatacggatatgcagaccgagccagtgaaagcataataggtgcagttgccagacagttcaaa

SEQ ID NO: 29542 - DNA, 80 bp, synthetic construct
  source 1..80: mol_type = other DNA
ttcgccagagtgtgcaaacctaaaatatccttagaagagacggaagtgctgtttgtattcattggatatgatcgtaggac

SEQ ID NO: 29543 - DNA, 80 bp, synthetic construct
  source 1..80: mol_type = other DNA
acccgtataaactctcctctacgctaacaaacatctattcgggctccaactttcatgaagcggggtgtgctccctcatac

SEQ ID NO: 29544 - DNA, 80 bp, synthetic construct
  source 1..80: mol_type = other DNA
catgttgtccgaggggacattgccaccgcagaagatggggtgatcattaacgcagctaatagtaggtgccaaccaggagg

SEQ ID NO: 29545 - DNA, 80 bp, synthetic construct
  source 1..80: mol_type = other DNA
aggcgtgtgtggggctctatacaagaagtttccggaaagctttgacctacagcctatagaagtgggtaaggcgcgcttgg

SEQ ID NO: 29546 - DNA, 80 bp, synthetic construct
  source 1..80: mol_type = other DNA
taaagggtgcgaaaaaacacatcatacacgcggtcggacctaactttaacaaggtgtcagaaatagaaggcgacaaacaa

SEQ ID NO: 29547 - DNA, 80 bp, synthetic construct
  source 1..80: mol_type = other DNA
ctcgccgaggcgtatgaatccgtcgccaaactagtgaatgacaataattaccgatcagtcgccatcccgctcctgtccac

SEQ ID NO: 29548 - DNA, 80 bp, synthetic construct
  source 1..80: mol_type = other DNA
aggcatatttgccggtaataaagaccgacttatgcagtcattaaaccacctcctcactgccatggatacgaccgacgcgg

SEQ ID NO: 29549 - DNA, 80 bp, synthetic construct
  source 1..80: mol_type = other DNA
atgtcgctatctactgtcgcgataaaaaatgggaaactacgctcaaggaagtggtggcccggagggaggcggtagaggag

SEQ ID NO: 29550 - DNA, 80 bp, synthetic construct
  source 1..80: mol_type = other DNA
atatgcatatcggaagacgcttccctgaccgagcctgatgtggagttagttcgggttcacccgaagagctcgctagccgg

SEQ ID NO: 29551 - DNA, 80 bp, synthetic construct
  source 1..80: mol_type = other DNA
cagaaaaggttatagcatcacggatggaaaaaccttttcttacctagaaggaaccaagttccaccaggcggcgaaagatg

SEQ ID NO: 29552 - DNA, 80 bp, synthetic construct
  source 1..80: mol_type = other DNA
tggccgaaataaacgccatgtggccgaatgcaacagaagctaacgagcaaatatgcctctatatcctgggggaaagcatg

SEQ ID NO: 29553 - DNA, 80 bp, synthetic construct
  source 1..80: mol_type = other DNA
agtagcataagatctaaatgccccgtagaagagtctgaagcatcaacaccacctaatacactcccttgtttatgtatcca

SEQ ID NO: 29554 - DNA, 80 bp, synthetic construct
  source 1..80: mol_type = other DNA
tgctatgacaccagagcgtgttcagcggttgaaggcatcaaggccggaacagatcacggtgtgctcatcgttcccgttgc

SEQ ID NO: 29555 - DNA, 80 bp, synthetic construct
  source 1..80: mol_type = other DNA
cgaagtacagaataaccggcgtacagaagatccaatgttcttgccctatattgttctctccgaaggtgccagagtacatc

SEQ ID NO: 29556 - DNA, 80 bp, synthetic construct
  source 1..80: mol_type = other DNA
caccctagaagataccttcctcgcccacttgaaattgaggtggaacgtgcaggaaccccggcgccggcttcgaacgtaga

SEQ ID NO: 29557 - DNA, 80 bp, synthetic construct
  source 1..80: mol_type = other DNA
agctgcaacggaagagaactttgaaacgatctccgtagttgacagcgtagttagctcggagagtacagccgaaacaaatc

SEQ ID NO: 29558 - DNA, 80 bp, synthetic construct
  source 1..80: mol_type = other DNA
ttgacggaccaaacacaatcgtagtagaggcagatgtacacgcagacttgatgcgtttctcatccacctggtctatccca

SEQ ID NO: 29559 - DNA, 80 bp, synthetic construct
  source 1..80: mol_type = other DNA
cacgcttccgatttcgatgcggacagcatctccttggctttgtcagagttttcctcgacagacgcacgaagcgtagtttc

SEQ ID NO: 29560 - DNA, 80 bp, synthetic construct
  source 1..80: mol_type = other DNA
cagttctagttctgatgcgggcataagacctatccctgctcctaggactatcttcagacaggcgcctgttcctcgacctc

SEQ ID NO: 29561 - DNA, 80 bp, synthetic construct
  source 1..80: mol_type = other DNA
gcaaaactaggagttctagtgcgtcactgtcgccaccgattcacgctcgtaggcaagtatcaggctccagatccagtctg

SEQ ID NO: 29562 - DNA, 80 bp, synthetic construct
  source 1..80: mol_type = other DNA
gcatccaatccgccaggagttaacagagtgatcaccagggaggagttcgaagccttcgtcgcacaacagcaatgacggta

SEQ ID NO: 29563 - DNA, 80 bp, synthetic construct
  source 1..80: mol_type = other DNA
caggccaaggacatttgcaacaaaaatccgtacggcagaccgttctatctgaggtcgtattggaacgcacgctattggat

SEQ ID NO: 29564 - DNA, 80 bp, synthetic construct
  source 1..80: mol_type = other DNA
gacgtgtacgccccgcgtctcgatcttaacaaggaggagttactgaggaagaagctccaacttaaccctactcaagctaa

SEQ ID NO: 29565 - DNA, 80 bp, synthetic construct
  source 1..80: mol_type = other DNA
taggagcagatatcagtcacggaaagtagagaatatgaaggcgataaccaccatgagaatgttgcgcggtctaggtcatt

SEQ ID NO: 29566 - DNA, 80 bp, synthetic construct
  source 1..80: mol_type = other DNA
acttgaaaaccgacaacaaagtagagtgctaccgcaccttataccccgtcccgctgtattccagcagtgtgaaccgatcg

SEQ ID NO: 29567 - DNA, 80 bp, synthetic construct
  source 1..80: mol_type = other DNA
ttttcatgccctaaagtggccgtagaagcctgcaacgtggtgcttaaagagaattttccgaccgtggcctcgtattgcat

SEQ ID NO: 29568 - DNA, 80 bp, synthetic construct
  source 1..80: mol_type = other DNA
tacccccgaatacgacgcatacctagatatggtggacggcgctacttgctgcctagataccgccagtttttgccccgcta

SEQ ID NO: 29569 - DNA, 80 bp, synthetic construct
  source 1..80: mol_type = other DNA
agaatacactgcagaacgtactggccgctgctacaaaaagaaactgcaatgttacacaaatgcgtgaactgccagtgctg

SEQ ID NO: 29570 - DNA, 80 bp, synthetic construct
  source 1..80: mol_type = other DNA
gactccgcggcctttaatgtagagtgtttcaagaagtatgcctgcaacaacgagtattgggacacatacagagataatcc

SEQ ID NO: 29571 - DNA, 80 bp, synthetic construct
  source 1..80: mol_type = other DNA
gaaatacttaaaaccgtcaaacactatcatattttcggtgggctctactatctatcacgaaaagagggacctactgcgga

SEQ ID NO: 29572 - DNA, 80 bp, synthetic construct
  source 1..80: mol_type = other DNA
tatcagattaactgaggaaaatgtaactaactacatcaccaagctaaaagggccgaaggcagcagcactgtatgccaaga

SEQ ID NO: 29573 - DNA, 80 bp, synthetic construct
  source 1..80: mol_type = other DNA
cccacaatctctgcatgctgcaagatatacctatggacagattcgtgatggatttgaaacgtgacgtcaaagtgacgccg

SEQ ID NO: 29574 - DNA, 80 bp, synthetic construct
  source 1..80: mol_type = other DNA
aatacatcgtgagctggttcggcggctgaatgcagtactactacctaacgtccatacactttttgatatgtcggcagaag

SEQ ID NO: 29575 - DNA, 80 bp, synthetic construct
  source 1..80: mol_type = other DNA
acttcgatgcgattattgccgagcatttccaacacggagatcaagttctagaaacggacatagcgtccttcgataaaagc

SEQ ID NO: 29576 - DNA, 80 bp, synthetic construct
  source 1..80: mol_type = other DNA
atgcgatggcgctaactgcacttatgatacttgaagatctaggagtcgaccaagagctattgactctaattgaagctgcc

SEQ ID NO: 29577 - DNA, 80 bp, synthetic construct
  source 1..80: mol_type = other DNA
gcatgtttcttactctattcgtaaatacaattataaacatagttattgcgagcagagtattgcgagaaaggcttactaac

SEQ ID NO: 29578 - DNA, 80 bp, synthetic construct
  source 1..80: mol_type = other DNA
tctccgtgcgcagctttcatcggagacgataatatagtgaaaggagtaaaatctgataagctaatggccgataggtgcgc

SEQ ID NO: 29579 - DNA, 80 bp, synthetic construct
  source 1..80: mol_type = other DNA
gctggcacttaccatcagtgttccatttacgcggtacgcataattacacgtgtcggtgtgagacgatagtaagctgcgac

SEQ ID NO: 29580 - DNA, 80 bp, synthetic construct
  source 1..80: mol_type = other DNA
gcgataccgtgaccggaactgcatgtcgcgtcgcggatcccctaaaaaggctatttaagttggggaaaccattggcagcc

SEQ ID NO: 29581 - DNA, 80 bp, synthetic construct
  source 1..80: mol_type = other DNA
gacgacgagcatgacgacgaccgcagacgagcggtgtttgaggaggcagagaggtggaaccgggctggcatttccgtaga

SEQ ID NO: 29582 - DNA, 80 bp, synthetic construct
  source 1..80: mol_type = other DNA
actttgcaaggcagtagaatccaggtacgagatcgtgggcacttctattataatagcagctatggccaccttagctcgta

SEQ ID NO: 29583 - DNA, 80 bp, synthetic construct
  source 1..80: mol_type = other DNA
acgtagcgacattcaaacacctgcgaggaaaccccatacacctctacggctaacctgaatggactgtgatatagtacagt

SEQ ID NO: 29584 - DNA, 80 bp, synthetic construct
  source 1..80: mol_type = other DNA
ccgcaaccatgttcccttaccaaccatccatgtacccaatgcaacctgcgccgtaccgtccgtatccggctccccggaga

SEQ ID NO: 29585 - DNA, 80 bp, synthetic construct
  source 1..80: mol_type = other DNA
ccatggtatccgcgcaccgacccattcttggcgttgcaagtgcaagagttggccaggtccatggccaacctaacattcaa

SEQ ID NO: 29586 - DNA, 80 bp, synthetic construct
  source 1..80: mol_type = other DNA
gcagcgccgggagagtccgcccgaaggcccccctgctaagaaaaagaaacgtgaaccccagcaagcagcgaccccgatta

SEQ ID NO: 29587 - DNA, 80 bp, synthetic construct
  source 1..80: mol_type = other DNA
aaaatgcgcagaagaagaatggcaaggggaagaagaagaagccgaaaggtgccgttcaacccaagaatcaaccggccagt

SEQ ID NO: 29588 - DNA, 80 bp, synthetic construct
  source 1..80: mol_type = other DNA
aagaagaaacctaataagaaacccggaaaaaggcagcgcatggttatgaaactcgaatctgacaaaactttcccgattat

SEQ ID NO: 29589 - DNA, 80 bp, synthetic construct
  source 1..80: mol_type = other DNA
ataacgagacgttggcagccttgaagacgaagaaggcaaccaagtacgacttggagtacgcagacgttccccaaagtatg

SEQ ID NO: 29590 - DNA, 80 bp, synthetic construct
  source 1..80: mol_type = other DNA
acggcaggttcacggtcccaaaaggagtaggcgctaaaggagatagtggccgacctatactagacaaccaaggaagggta

SEQ ID NO: 29591 - DNA, 80 bp, synthetic construct
  source 1..80: mol_type = other DNA
gtagccatagtgctaggaggagtaaacgaaggttcacgcactgcactgtccgttgtaatgtggactgaaaaaggggtcac

SEQ ID NO: 29592 - DNA, 80 bp, synthetic construct
  source 1..80: mol_type = other DNA
cgtcaagtacactcccgaaaattgtgagcaatggtctctagttactgccgtttgcttgcttgcaaatgtaacgtttccgt

SEQ ID NO: 29593 - DNA, 80 bp, synthetic construct
  source 1..80: mol_type = other DNA
gttcccagccgcctatatgctacgaccgcaaaccgtcagaaactcttgccatgcttagcgagaatatagacaacccaggt

SEQ ID NO: 29594 - DNA, 80 bp, synthetic construct
  source 1..80: mol_type = other DNA
tacgacgtgttactggattccgtgctgaagtgtccgggcaggcagaaacgttcaacggaggaactcttcaaagaatataa

SEQ ID NO: 29595 - DNA, 80 bp, synthetic construct
  source 1..80: mol_type = other DNA
gctgacgaaaccctacatggctaagtgcatcaggtgtgctgtgggcagctgccacagccctatagccatagaagaggtga

SEQ ID NO: 29596 - DNA, 80 bp, synthetic construct
  source 1..80: mol_type = other DNA
gaagtgacggacatgatggctacatacgcattcagacctcatcgcagtacggactggacccttcaggaggtgtaaagagc

SEQ ID NO: 29597 - DNA, 80 bp, synthetic construct
  source 1..80: mol_type = other DNA
agaacgatgcgctacaatctgcaaggaaacattgaagagatacctctgcatgaggtgtccctacatacttcccgcccctg

SEQ ID NO: 29598 - DNA, 80 bp, synthetic construct
  source 1..80: mol_type = other DNA
ccatattatagacggccacggctacttcctcttagctagatgccctgaaggggactcattgaccatggagttcaagaaag

SEQ ID NO: 29599 - DNA, 80 bp, synthetic construct
  source 1..80: mol_type = other DNA
atacagtaacgcactcatgctccgtaccctacaaagttaaattcatacctgtagggcgcgaactttatacgcaccccccc

SEQ ID NO: 29600 - DNA, 80 bp, synthetic construct
  source 1..80: mol_type = other DNA
gaacacggcacagaccacccatgccgagtgtatgctcatgatgcccagaagagaggtgcttacgtcgaaatgcacctccc

SEQ ID NO: 29601 - DNA, 80 bp, synthetic construct
  source 1..80: mol_type = other DNA
tggatccgaagtggatagtactctgctctccatgagcggaggggctgtgcaggtgaatcctccagcaggaactaacgtct

SEQ ID NO: 29602 - DNA, 80 bp, synthetic construct
  source 1..80: mol_type = other DNA
tagtggagtgtaactgcggcacccaaatttccgagaccgtcagtaccgtaaaaaagttcaaccagtgcacgcagaccaac

SEQ ID NO: 29603 - DNA, 80 bp, synthetic construct
  source 1..80: mol_type = other DNA
aggtgtcgcgcctaccgactgcagagtgacaaatgggtgtttaattccgataaactgccgaaagcttcaggggacactct

SEQ ID NO: 29604 - DNA, 80 bp, synthetic construct
  source 1..80: mol_type = other DNA
aaaaggtaaactgcatgtaccattcctcctatcagaagcaaagtgcacagtgcccctggcgccagagccggtagtgtcgt

SEQ ID NO: 29605 - DNA, 80 bp, synthetic construct
  source 1..80: mol_type = other DNA
tcggattcaggtcggtgtctttaaaactccatcctaataacccaacttacctgacgaccagacatttaggcggcgaacca

SEQ ID NO: 29606 - DNA, 80 bp, synthetic construct
  source 1..80: mol_type = other DNA
cagtatacccatgaacttatctcggagcccgttgtaaagaacttctccatcacggaaaagggttgggaattcgtgtggtg

SEQ ID NO: 29607 - DNA, 80 bp, synthetic construct
  source 1..80: mol_type = other DNA
gtatgccgcatgaaatagttacccactattactacaggtatccaatgtcaaccgtggtgggattatctatatgtgccgca

SEQ ID NO: 29608 - DNA, 80 bp, synthetic construct
  source 1..80: mol_type = other DNA
attgtcataatatccatagcggcgtcactctgcttgttatgcaaatctcgagtctcgtgcttaacaccttacagattgac

SEQ ID NO: 29609 - DNA, 80 bp, synthetic construct
  source 1..80: mol_type = other DNA
cccgaacgcacgccttcccatctgtctggcattgctttgctgcgcgcgtcctacgagagctgaaacgacgtgggaaactc

SEQ ID NO: 29610 - DNA, 80 bp, synthetic construct
  source 1..80: mol_type = other DNA
ttgaccacctatggaataataatcagcagatgttctggctccaactgcttataccccttgcagctttaatagtgattact

SEQ ID NO: 29611 - DNA, 80 bp, synthetic construct
  source 1..80: mol_type = other DNA
agaatcctaaaatgcgtctgttgctttgtgccttttttagtcctagccggcgccgccggcgccggcgcttacgagcacgc

SEQ ID NO: 29612 - DNA, 80 bp, synthetic construct
  source 1..80: mol_type = other DNA
tagcaatcagcatcacccctactaagatccaaattattcccaccctgaacttagagtatattacatgtcattataaaacc

SEQ ID NO: 29613 - DNA, 80 bp, synthetic construct
  source 1..80: mol_type = other DNA
gggttagattctcccgcggtgaagtgctgcggaacgcaggaatgctctgaagtcacccgccccgatgaaaagtgtaaagt

SEQ ID NO: 29614 - DNA, 80 bp, synthetic construct
  source 1..80: mol_type = other DNA
atttacaggtgtgtatccattcatgtggggcggcgcctattgtttctgcgacacagagaactcccaggtgagtaaagcat

SEQ ID NO: 29615 - DNA, 80 bp, synthetic construct
  source 1..80: mol_type = other DNA
gtggcaagaaggagaattgccaggaaatagtcaacgacgtgaagaagcaccgcggactggacatccaggcaaaaacagtg

SEQ ID NO: 29616 - DNA, 80 bp, synthetic construct
  source 1..80: mol_type = other DNA
aggtcaaatacgaaggaaaggtcactgggtacgcctgcctggtgggcgataaagtcatgaaacctgcccacgtgaaagga

SEQ ID NO: 29617 - DNA, 80 bp, synthetic construct
  source 1..80: mol_type = other DNA
aagcatttcgaaatatggtgtatgttagatcattagcagctaatttaaactcagtgaaatgtacaggtggaagttacgat

SEQ ID NO: 29618 - DNA, 80 bp, synthetic construct
  source 1..80: mol_type = other DNA
agcggactacacatacaacctagagttgggtctaccagcaacgcttggcaggtatgacctagtggtcataaacatccaca

SEQ ID NO: 29619 - DNA, 80 bp, synthetic construct
  source 1..80: mol_type = other DNA
gatctggagttgcagcgaggaactttgtctaaagtttctatcattatagccatcatgatagtcttctccaacagagtgtt

SEQ ID NO: 29620 - DNA, 80 bp, synthetic construct
  source 1..80: mol_type = other DNA
tccaattagacaatgaaagaccatctggcctcggcgagatggccaaagcaggggagagcaagtgtcaggaagactttcaa

SEQ ID NO: 29621 - DNA, 80 bp, synthetic construct
  source 1..80: mol_type = other DNA
cgtcggggaagccctcaaaagacaaagccacccagactgccacccgggaacccaagaaggagacagtatccgccccttct

SEQ ID NO: 29622 - DNA, 80 bp, synthetic construct
  source 1..80: mol_type = other DNA
caacgaagaggacgacccatctgtagatgctgaaatcgctcatcagattgctgaaagcttttccaagaagtacaaatttc

SEQ ID NO: 29623 - DNA, 80 bp, synthetic construct
  source 1..80: mol_type = other DNA
ctagcatcatggttgtcagagaacagaggagggccggtccccagcgaaaaagtcattatcacagctctctccaaaccccc

SEQ ID NO: 29624 - DNA, 80 bp, synthetic construct
  source 1..80: mol_type = other DNA
gcctgggaagaatttgctgccagccctattaggataacaactgagaacttaacaacctatgttactaaactaaaagggcc

SEQ ID NO: 29625 - DNA, 80 bp, synthetic construct
  source 1..80: mol_type = other DNA
ggtgggtgtggcagtggggatgtgcatgtgtgcacgacgcagatgcattacaccgtacgaactgacaccaggagctaccg

SEQ ID NO: 29626 - DNA, 80 bp, synthetic construct
  source 1..80: mol_type = other DNA
atgaccatctaaaggagaaatcatcactgagatatgggaatgttctggatgtcaactctatcgatcttgaagagccaagc

SEQ ID NO: 29627 - DNA, 80 bp, synthetic construct
  source 1..80: mol_type = other DNA
aagatcacgggaggcgtgggactggttgtcgctgttgcagcactgattctaatcgtggtgctatgcgtgtcgtttagcag

SEQ ID NO: 29628 - DNA, 80 bp, synthetic construct
  source 1..80: mol_type = other DNA
ttgcataacttgagaaggtgaatcataagtaccgtgtaatgcgggctattatatatgtaatcattattatattcttaact

SEQ ID NO: 29629 - DNA, 80 bp, synthetic construct
  source 1..80: mol_type = other DNA
aaggtgtatgccaagaccagcagttgagctaccctggccgcaggaggccgtcgatatagagttcggggcgccgaccgaag

SEQ ID NO: 29630 - DNA, 80 bp, synthetic construct
  source 1..80: mol_type = other DNA
tttgagaaggtgaatcataagtaccgtgtataatgcgggctggtatatatgtaaccattattatatattttaaccatatt

SEQ ID NO: 29631 - DNA, 80 bp, synthetic construct
  source 1..80: mol_type = other DNA
agaaggaaggtaacgtggattgccccgccgactgtgacaggagccgatttaacccacgacttggatttaggactaccgcc

SEQ ID NO: 29632 - DNA, 80 bp, synthetic construct
  source 1..80: mol_type = other DNA
cccgaagcccttgtcagaagcggtaaacgagaagctacgctctcactgcacccgatacatcccacattgctaagttacag

SEQ ID NO: 29633 - DNA, 80 bp, synthetic construct
  source 1..80: mol_type = other DNA
gaatggtaaatagtcctgtagcattcttaaaggtgacaaaggcccatgtacctatccctttgggaggtgatgggtcaatg

SEQ ID NO: 29634 - DNA, 80 bp, synthetic construct
  source 1..80: mol_type = other DNA
cctgtagcattcttaaaggtgacaaaggcccatgtacctatccctttgggaggtgatgggtcaatgtctattatggaact

SEQ ID NO: 29635 - DNA, 80 bp, synthetic construct
  source 1..80: mol_type = other DNA
gatagatgaaaccagcacctttttgaaggccctgcaacgtgcgtaccccatgtttgaggtggaacccaggcaggtcacac

SEQ ID NO: 29636 - DNA, 80 bp, synthetic construct
  source 1..80: mol_type = other DNA
aatctaaaataccgtgcataatgcggacaattatattataatccttatacttaaccaccatcatacatattaaccagccc

SEQ ID NO: 29637 - DNA, 80 bp, synthetic construct
  source 1..80: mol_type = other DNA
ggctacgccgacagaacaagcgaggccgtggtaacggccctcgcccgtcggttctcgtcatttagagccgtcaggcctcc

SEQ ID NO: 29638 - DNA, 80 bp, synthetic construct
  source 1..80: mol_type = other DNA
gtgtgtaactagcaacaccgaagtgttcttgctgttcacgaactttgacaatggtagaaggacagtaaccctgcatcaaa

SEQ ID NO: 29639 - DNA, 80 bp, synthetic construct
  source 1..80: mol_type = other DNA
tctatgcagtccatgcaccgacttctttgtacttccaggcaatgaaaggagtacgcacagcgtattggattgggttcgac

SEQ ID NO: 29640 - DNA, 80 bp, synthetic construct
  source 1..80: mol_type = other DNA
cgtgcgggggcctatattttctcatccgatgtcggtccagggcacctgcaacagaaatcagtgaggcagcatgacttaga

SEQ ID NO: 29641 - DNA, 80 bp, synthetic construct
  source 1..80: mol_type = other DNA
ggtgccgattatggatcgtgtgatcgaggaaaaggtctacccgccaaaattagatgaggcaaaagagaaacagctacttt

SEQ ID NO: 29642 - DNA, 80 bp, synthetic construct
  source 1..80: mol_type = other DNA
acgaaggtaccagaaccgccctttccgttgtgacatggaataaagacatggtcacgaagattacacctgaaggcactgtg

SEQ ID NO: 29643 - DNA, 80 bp, synthetic construct
  source 1..80: mol_type = other DNA
atggaccctgtgtacgtggacatagacgctgacagcgcctttttgaaggccctgcaacgtgcgtaccccatgtttgaggt

SEQ ID NO: 29644 - DNA, 80 bp, synthetic construct
  source 1..80: mol_type = other DNA
tatgagtacaagtacccagctatcaaagacttgaagaagcccagtataatcttaggaaaggctccggacttgaacaaagc

SEQ ID NO: 29645 - DNA, 80 bp, synthetic construct
  source 1..80: mol_type = other DNA
cattatagccatcatgatagtcttctccaacagagtgtttaatgtctcgaaaccgttgattgaccctttattctatccac

SEQ ID NO: 29646 - DNA, 80 bp, synthetic construct
  source 1..80: mol_type = other DNA
gtattggctctgcggacgagtccctccacctctcttcggatgtgcctatgtctttcggatcgttctccgacggagagatt

SEQ ID NO: 29647 - DNA, 80 bp, synthetic construct
  source 1..80: mol_type = other DNA
ctgacgtagcgctggcagatgatgggactgtcaattcggatgacgaggattacttctccggtgagactagaagccccgaa

SEQ ID NO: 29648 - DNA, 80 bp, synthetic construct
  source 1..80: mol_type = other DNA
accagctacgggatcttgatcgcaagaaaaggagataagatcaccccggattctcttgtggagataaagcgtactgatgt

SEQ ID NO: 29649 - DNA, 80 bp, synthetic construct
  source 1..80: mol_type = other DNA
agctttagtgaaatcaaatctttatgtaggacattgttcttcagaagaaaagatatatgaatctattaaggatattttaa

SEQ ID NO: 29650 - DNA, 80 bp, synthetic construct
  source 1..80: mol_type = other DNA
gcgtgtcgtttagcaggcactaacttgacgactaagcatgaaggtatatgtgtcccctaagagacacaccgtatatagct

SEQ ID NO: 29651 - DNA, 80 bp, synthetic construct
  source 1..80: mol_type = other DNA
tgccgtgcatgatgcggaccgatttattattcatatatgtcacccttattatatcacatcacatattcaattttaaaatt

SEQ ID NO: 29652 - DNA, 80 bp, synthetic construct
  source 1..80: mol_type = other DNA
actagaagaactagaccatgagtccatgcggatggacgagtctgacaaccaacccataacaacggcagaaccggttgttc

SEQ ID NO: 29653 - DNA, 80 bp, synthetic construct
  source 1..80: mol_type = other DNA
aacccgtaccacctccgcgtcctaaacgtgccaggcgactagcggccgcacgtatgcaggtccaggtggaagtacaccgc

SEQ ID NO: 29654 - DNA, 80 bp, synthetic construct
  source 1..80: mol_type = other DNA
ccacccgtcgtccaaaggacgaaaccggtcccagcaccgcgcaccagtttgcgtcccgtccccgcgcccagaaggtgtat

SEQ ID NO: 29655 - DNA, 80 bp, synthetic construct
  source 1..80: mol_type = other DNA
gccaagaccagcgtgccaagacacggtagttgagctaccctggccgcaggaggccgtcgatatagagttcggggcgccga

SEQ ID NO: 29656 - DNA, 80 bp, synthetic construct
  source 1..80: mol_type = other DNA
ccgaagaggagagtgaaatcacattcggagacttttctgcttcggagtgggagaccatcagcaactcatcctgactaggc

SEQ ID NO: 29657 - DNA, 80 bp, synthetic construct
  source 1..80: mol_type = other DNA
ggaatggattcacccgccattaaatgctgcggcactcaggagtgttctccaacttacaggccggacgagcaatgcaaagt

SEQ ID NO: 29658 - DNA, 80 bp, synthetic construct
  source 1..80: mol_type = other DNA
ccccgttcggttgtgaaatttacaccaaccctatccgtgctgaaaactgcgctgtgggatcaattccgctagcttttgac

SEQ ID NO: 29659 - DNA, 80 bp, synthetic construct
  source 1..80: mol_type = other DNA
ccagtcatttacagctgcggtatcaaaaaccgcttggacgtggttaacatccttactgggagagtcaaacacaaagttac

SEQ ID NO: 29660 - DNA, 80 bp, synthetic construct
  source 1..80: mol_type = other DNA
cgcttgcagagcaagtaattgtaatcacacactctggaaggaagggtagatacgcagttgagccttaccacggaaaagtg

SEQ ID NO: 29661 - DNA, 80 bp, synthetic construct
  source 1..80: mol_type = other DNA
gtagtacccgaagggcaagctatacctgtccaagacttccaagcactcagtgagagcgccacaattgtgtacaacgaacg

SEQ ID NO: 29662 - DNA, 80 bp, synthetic construct
  source 1..80: mol_type = other DNA
ctgccgctacagaggctaatgagcaggtgtgcttatacattctgggtgaaagtatgagcagtataagatccaaatgcccc

SEQ ID NO: 29663 - DNA, 80 bp, synthetic construct
  source 1..80: mol_type = other DNA
acaccctagaaagtaccttgcagacgcagcttccgcaaacaatggggcagccgaatcaacatcggtggacgtgcagccac

SEQ ID NO: 29664 - DNA, 80 bp, synthetic construct
  source 1..80: mol_type = other DNA
caccaagtgcaccaagtggaggctgaagtgcatcgcttcagcgcaagtgctcaatcttcgtcctggtccattccacgtgc

SEQ ID NO: 29665 - DNA, 80 bp, synthetic construct
  source 1..80: mol_type = other DNA
gattctgcggccttcaatgtagagtgttttaaaaaatacgcttgcaataatgagtattgggagacctacaagaagaatcc

SEQ ID NO: 29666 - DNA, 80 bp, synthetic construct
  source 1..80: mol_type = other DNA
gtgactctgtgaccggaactgcatgccgtgtagcagaccctttgaagagattatttaagcttggaaaaccactggctgtg

SEQ ID NO: 29667 - DNA, 80 bp, synthetic construct
  source 1..80: mol_type = other DNA
gatgatgaacatgatgatgacaggcgtcgagcactacaggaggaatctgcccggtggaaccgggtgggaattttttccga

SEQ ID NO: 29668 - DNA, 80 bp, synthetic construct
  source 1..80: mol_type = other DNA
gctgtgcaaagccgtcgagtcgcgatatgaaacagtgggcacggctgtcattatcatggccatgactacgctcgccagca

SEQ ID NO: 29669 - DNA, 80 bp, synthetic construct
  source 1..80: mol_type = other DNA
gagaaactctcaaaggcaaattgcatgtgcccttcgtactgaccgaagcgaaatgcacagtaccattggctccagaaccc

SEQ ID NO: 29670 - DNA, 80 bp, synthetic construct
  source 1..80: mol_type = other DNA
ccctctggcatgccattcaccagtgtcatcaattccctcaaccacatgacatatttcgccgcggcagtgttgcgggccta

SEQ ID NO: 29671 - DNA, 80 bp, synthetic construct
  source 1..80: mol_type = other DNA
cccaacgcgtgtgcgtgatcctggagttttgccccacgcccaggttgacgctcgcgctgtggatcctatcacatttaaca

SEQ ID NO: 29672 - DNA, 80 bp, synthetic construct
  source 1..80: mol_type = other DNA
tggcaacttgcccgttagaaactggaatttggactttgggctacttggaactactttactaaacttggatgctaattacg

SEQ ID NO: 29673 - DNA, 80 bp, synthetic construct
  source 1..80: mol_type = other DNA
gctaactacttggtatccgaacttggtaagcatgtagctatatcaagctgattgaactctgtaagtaaggatgtatttat

SEQ ID NO: 29674 - DNA, 80 bp, synthetic construct
  source 1..80: mol_type = other DNA
ttgcagcactgattctaatcgtggtgctatgcgtgtcgttcagcaggcactaacttgacaactaagtatgaaggtatatg

SEQ ID NO: 29675 - DNA, 80 bp, synthetic construct
  source 1..80: mol_type = other DNA
tgactctgctcaccaccaggagactaggggcaaacccggaaccaacggctagaaacttcaccgtcgaccgagatggcctg

SEQ ID NO: 29676 - DNA, 80 bp, synthetic construct
  source 1..80: mol_type = other DNA
tcagatctcatgagattttcctctaactggtcgataccacaggcatctgactttgtatcggtgcagggcacgatagacat

SEQ ID NO: 29677 - DNA, 80 bp, synthetic construct
  source 1..80: mol_type = other DNA
atttagcagtgcattgcaggaggacgcccgcagtctggcgtcatcagctagttctggtatcagacccgtacctgccccac

SEQ ID NO: 29678 - DNA, 80 bp, synthetic construct
  source 1..80: mol_type = other DNA
gcaccgtcttcacccaaaaacctgtcccgaagccgcgcagacggcgccgtaggtcatctgctaattcgacgactccgctc

SEQ ID NO: 29679 - DNA, 80 bp, synthetic construct
  source 1..80: mol_type = other DNA
gtgtcggcatcacgcgccacctctagatcaagcttggtgtccaacccgccgggagtgaagcgagtcatcaccagggagga

SEQ ID NO: 29680 - DNA, 80 bp, synthetic construct
  source 1..80: mol_type = other DNA
cgccgggtactaagcataccgaagaacgaccgaaagtgcaggttatccaggcagccgatccgttggctactgcatacctg

SEQ ID NO: 29681 - DNA, 80 bp, synthetic construct
  source 1..80: mol_type = other DNA
cactgatcctaatcgtggtactatgcgtgtcgtttagcaggcactaacttgacaactaggtatgaaggcatacgcgtccc

SEQ ID NO: 29682 - DNA, 80 bp, synthetic construct
  source 1..80: mol_type = other DNA
tcagcatttattgttctggggcttattgctacagcagtggttgccctagttctgttcttccatagacattaacatcttgt

SEQ ID NO: 29683 - DNA, 80 bp, synthetic construct
  source 1..80: mol_type = other DNA
tcaacagctaatatacacccggagttcaagctccaaatatgcacaacttttctcacatgcaagggtgactgtcacccgcc

SEQ ID NO: 29684 - DNA, 80 bp, synthetic construct
  source 1..80: mol_type = other DNA
taaagatcacatagtatcacatccacaacaccatgcccagacgtttacggcagcggtctctaagaccgcatggacatggt

SEQ ID NO: 29685 - DNA, 80 bp, synthetic construct
  source 1..80: mol_type = other DNA
acagacttatgcagtcgctgaatcatctgcttacagcgttggacaccacggacgcagatgtggctatctactgcagggac

SEQ ID NO: 29686 - DNA, 80 bp, synthetic construct
  source 1..80: mol_type = other DNA
ctggaaaaaccagacccggcagatgtgttccaaaataaagcaaacgtgtgctgggccaaggccttagtacccgtattgag

SEQ ID NO: 29687 - DNA, 80 bp, synthetic construct
  source 1..80: mol_type = other DNA
atgctgtggatcccaggagtgtccaaaggtgtacagaccagatgaacaatgtaaggtcttcaccggagtgtaccccttca

SEQ ID NO: 29688 - DNA, 80 bp, synthetic construct
  source 1..80: mol_type = other DNA
tgactaagtcagacgactgttccacagaccatgctttggcctataaagcacacaccgcctcggtccaggcttttctaaat

SEQ ID NO: 29689 - DNA, 80 bp, synthetic construct
  source 1..80: mol_type = other DNA
ataacagtcggggaacagtccaccaccgctgtagtgtacgtgaacggggaaactcccattagctttaacggtgtcaagtt

SEQ ID NO: 29690 - DNA, 80 bp, synthetic construct
  source 1..80: mol_type = other DNA
agtcgcaggcccactgtccaccgcctggaccccgttcgaccggaaggtggtccagtatgcaggagagatctataattacg

SEQ ID NO: 29691 - DNA, 80 bp, synthetic construct
  source 1..80: mol_type = other DNA
accaaatacaggcacaattcatgtaccgtacacgcaggcaccttccggattcgaacaatggaagaaagacaggcctcctt

SEQ ID NO: 29692 - DNA, 80 bp, synthetic construct
  source 1..80: mol_type = other DNA
cattgaagtacacagcacccttcggatgcgaagttcatatcaaccctgtgagagccgaaaactgtgccgtgggatccata

SEQ ID NO: 29693 - DNA, 80 bp, synthetic construct
  source 1..80: mol_type = other DNA
ccgcttgcatttgacataccagacgccctgttcaccagggtgtcagaaacaccgacactgtcaagtgctgagtgctcact

SEQ ID NO: 29694 - DNA, 80 bp, synthetic construct
  source 1..80: mol_type = other DNA
ggcgagctgcttatgcaaacttataaagaatatacggcggcaattggcaagctgcccgcaaaaaatttttattttctttt

SEQ ID NO: 29695 - DNA, 80 bp, synthetic construct
  source 1..80: mol_type = other DNA
atacggcggcaattggcaagctgcccgcaaaaaatttttattttcttttaccatcaattggattttgtttttaatatttc

SEQ ID NO: 29696 - DNA, 80 bp, synthetic construct
  source 1..80: mol_type = other DNA
tgcacggtgggccaaagagtacaaagaagatcaagacgatgaaagaccattgggattgagggacagacagttagtaatgg

SEQ ID NO: 29697 - DNA, 80 bp, synthetic construct
  source 1..80: mol_type = other DNA
gctgttgctgggcatttaagaaacacaaaatcacatctgtgtacaaacgccctgacacgcagaccgttataaaagtcccc

SEQ ID NO: 29698 - DNA, 80 bp, synthetic construct
  source 1..80: mol_type = other DNA
ccagcgacttccattcctttgtactgcctaggcttggcagttgctcattggaaattgggctgaggagcagaataaagaag

SEQ ID NO: 29699 - DNA, 80 bp, synthetic construct
  source 1..80: mol_type = other DNA
ctgctcgcagataagaaagaaccaccgcccctggtcactcaggaggatgtctcagcggcgaaagaagcggctgcagaagc

SEQ ID NO: 29700 - DNA, 80 bp, synthetic construct
  source 1..80: mol_type = other DNA
caaggagatcaaagaggccgaggaactgcgcatcgcattgccccctatcgttcctgacgtggaggaaccgacactagagg

SEQ ID NO: 29701 - DNA, 80 bp, synthetic construct
  source 1..80: mol_type = other DNA
ctgatgtcgacctaatgctgcaggaggccggcgcgggttccgtagagactcctcgtgggcttataaaggtaaccagctac

SEQ ID NO: 29702 - DNA, 80 bp, synthetic construct
  source 1..80: mol_type = other DNA
tccggcgaagacaaaataggctcgtatgctgtgctatcaccccaagccgttcttcggagcgagaagctctcctgcataca

SEQ ID NO: 29703 - DNA, 80 bp, synthetic construct
  source 1..80: mol_type = other DNA
cccattggctgaagaagccatagtcatcacccatgcgggtcgaaaagggcgttacgcagtcgagccataccatggcaaag

SEQ ID NO: 29704 - DNA, 80 bp, synthetic construct
  source 1..80: mol_type = other DNA
tggtggttcctgaggggcatgcgattccagttgcggatttccaggcacttagcgagagtgctaccatcgtgtacaacgaa

SEQ ID NO: 29705 - DNA, 80 bp, synthetic construct
  source 1..80: mol_type = other DNA
agggaattcgtgaacaggtatctacatcatatcgctgttaacggcggagccttaaatactgatgaagagtactacaaagt

SEQ ID NO: 29706 - DNA, 80 bp, synthetic construct
  source 1..80: mol_type = other DNA
tcaagcccagcgaatatgagggagagtacctgtacgacattgacaagaggcaatgcgtcaaaaaggatcaagtgtctggt

SEQ ID NO: 29707 - DNA, 80 bp, synthetic construct
  source 1..80: mol_type = other DNA
ctaggcttaacgggcgaattagtggaacctccgtttcacgagttcgcgtatgagagcttgaaaaccagaccggcagcacc

SEQ ID NO: 29708 - DNA, 80 bp, synthetic construct
  source 1..80: mol_type = other DNA
ctaccaggtaccgaccataggcgtttacggcgtaccagggtcgggtaagtcaggcatcatcaagagcgctgtcacgaaac

SEQ ID NO: 29709 - DNA, 80 bp, synthetic construct
  source 1..80: mol_type = other DNA
ttgactcagtgttgttaaacgggtgtaaacaccctgttgacacgctatacatcgacgaagcgttcgcatgtcacgccggg

SEQ ID NO: 29710 - DNA, 80 bp, synthetic construct
  source 1..80: mol_type = other DNA
actcttcgcgcgctgatcgcaatcatcaaacctaagaaagcagtgctgtgtggtgacccgaagcagtgcggcttttttaa

SEQ ID NO: 29711 - DNA, 80 bp, synthetic construct
  source 1..80: mol_type = other DNA
cagtcacgtcagtcgtatccacactgttttacgacaagaaaatgcgcaccaccaatccaaaagagacgcagatagaaatc

SEQ ID NO: 29712 - DNA, 80 bp, synthetic construct
  source 1..80: mol_type = other DNA
gattacaagggtaacgagatcatgacggcagcagcatcccaaggcttgacccgaaaggggatctacgccgtcaggtacaa

SEQ ID NO: 29713 - DNA, 80 bp, synthetic construct
  source 1..80: mol_type = other DNA
agtcaatgagaacccattgtatgcacccaactcagaacacgtcaatgtcctgctcacacgtactgaggacagaatcgtat

SEQ ID NO: 29714 - DNA, 80 bp, synthetic construct
  source 1..80: mol_type = other DNA
tcacggccagatacccaggagactttactgccacccttgaggagtggcaacaggagcatgatgctattatgaggcacatc

SEQ ID NO: 29715 - DNA, 80 bp, synthetic construct
  source 1..80: mol_type = other DNA
tcgtacttaaccaactgtgcgtccggttcttcgggttggatttagattcagggttgttttctgcgcccactgtcccgtta

SEQ ID NO: 29716 - DNA, 80 bp, synthetic construct
  source 1..80: mol_type = other DNA
tcgatcaagagcaatcactgggacaattcaccatcaccgaatatgtacggactgaacaatgaggtggtccgtcagctttc

SEQ ID NO: 29717 - DNA, 80 bp, synthetic construct
  source 1..80: mol_type = other DNA
acccgagcatcaacctcgtaccggttaaccgcagactacctcatgctttagtcacacacaggctagaacacccgcggagc

SEQ ID NO: 29718 - DNA, 80 bp, synthetic construct
  source 1..80: mol_type = other DNA
gacttttcaacgttcgctagtaaactgaaaggacggaccgttctggtagttggcgacaagatgaacatcaccgggaagac

SEQ ID NO: 29719 - DNA, 80 bp, synthetic construct
  source 1..80: mol_type = other DNA
cgtcgactggttatccgagaacccggaagccacttacaaatctcgactggatctcggtattccgagcgagctgcccaaat

SEQ ID NO: 29720 - DNA, 80 bp, synthetic construct
  source 1..80: mol_type = other DNA
aacatgctggcaaagaaagcatgcctacaccttaatcctggcgggacttgcgtcagtataggttacggttacgcagatag

SEQ ID NO: 29721 - DNA, 80 bp, synthetic construct
  source 1..80: mol_type = other DNA
tctctagggtgtgcaagcctaaagcgtcactggaggagacagaggtcctgttcgtcttcatagggtacgaccggagaact

SEQ ID NO: 29722 - DNA, 80 bp, synthetic construct
  source 1..80: mol_type = other DNA
cgcacgcacaatccctataagctgtcttctacattaactaatatctacactgggtcacatctgcacgaagccggatgtgc

SEQ ID NO: 29723 - DNA, 80 bp, synthetic construct
  source 1..80: mol_type = other DNA
tccttcctaccacgtggtccggggcgacatagctaatgcggaggaagtggtcattgtcaacgcagcaaacagcagagggc

SEQ ID NO: 29724 - DNA, 80 bp, synthetic construct
  source 1..80: mol_type = other DNA
ggaggaccctgaccaggaacaagacactatctgcttgcatgacgacgaatcttgtcgccatgaggggcaagtggctgtct

SEQ ID NO: 29725 - DNA, 80 bp, synthetic construct
  source 1..80: mol_type = other DNA
agaaatttcccgagaactttgacctacagccaatcgacgtgggaaagtctcggcttgttaagggggcggcaaagcacatc

SEQ ID NO: 29726 - DNA, 80 bp, synthetic construct
  source 1..80: mol_type = other DNA
atacatgctgtgggacccaatttcaacaaagtatcagaagtagagggtgataagcaactggcagatgcgtatgagtcggt

SEQ ID NO: 29727 - DNA, 80 bp, synthetic construct
  source 1..80: mol_type = other DNA
cgctaaaataatcaatgacaaccactaccgatcggtggctatcccactcttgtcaacaggcatctttgccggtaacaaag

SEQ ID NO: 29728 - DNA, 80 bp, synthetic construct
  source 1..80: mol_type = other DNA
atatgtatctccgaagacgcgtcccaagcagaacccgacgttgaactggtcagggtgcacccaaagagctcactagcggg

SEQ ID NO: 29729 - DNA, 80 bp, synthetic construct
  source 1..80: mol_type = other DNA
acgtaaagggtttagcacgacggatggaaagacgttttcgtatctcgaagggacaaagtttcaccaggcagcaaaggacg

SEQ ID NO: 29730 - DNA, 80 bp, synthetic construct
  source 1..80: mol_type = other DNA
cgaccgcgactgaagccaacgaacagatatgcttgtacattctgggagaaagtatgagtagcatccggtctaagtgccct

SEQ ID NO: 29731 - DNA, 80 bp, synthetic construct
  source 1..80: mol_type = other DNA
actcaatgacacctgagcgagtacacaggcttaaagcagcacgtccggagcaaataacagtgtgctcgtcgtttcctctg

SEQ ID NO: 29732 - DNA, 80 bp, synthetic construct
  source 1..80: mol_type = other DNA
aagattcagtgtgcgcaccccattctcttcctcccgaaggtgcccgagtacatccatccccgtaagtaccttccgagtgc

SEQ ID NO: 29733 - DNA, 80 bp, synthetic construct
  source 1..80: mol_type = other DNA
tgagagcaacatcggtgaagagacggcagcagatagtgtgcaggacgagccggctactcccgaaccagtaactcaaacag

SEQ ID NO: 29734 - DNA, 80 bp, synthetic construct
  source 1..80: mol_type = other DNA
aggactcgctgagcatagcttcggaaactactgtgacttcattggcacctaacgagatagtggtggaagcagaagtacat

SEQ ID NO: 29735 - DNA, 80 bp, synthetic construct
  source 1..80: mol_type = other DNA
tcagatctcatgagattttcctctaactggtcgataccacaggcatctgactttgacgtcgataatgtatcggtgcaggg

SEQ ID NO: 29736 - DNA, 80 bp, synthetic construct
  source 1..80: mol_type = other DNA
cacgatagacatatttagcagtgcattgcaggaggacgcccgcagtctggcgtcatcagctagttctggtatcagacccg

SEQ ID NO: 29737 - DNA, 80 bp, synthetic construct
  source 1..80: mol_type = other DNA
tacctgccccacgcaccgtcttcacccaaaaacctgtcccgaagccgcgcagacggcgccgtaggtcatctgctaattcg

SEQ ID NO: 29738 - DNA, 80 bp, synthetic construct
  source 1..80: mol_type = other DNA
acgactcccctcgtgtcggcatcacgcgccacctctagatcaagcttggtgtccaacccgccgggagtgaagcgagtcat

SEQ ID NO: 29739 - DNA, 80 bp, synthetic construct
  source 1..80: mol_type = other DNA
caccagggaggagtttgaagctttcgtcgctcagcagcaatgacggttcgaggcgggtgcatacatattctcctcagaca

SEQ ID NO: 29740 - DNA, 80 bp, synthetic construct
  source 1..80: mol_type = other DNA
caggtcaagggcacttgcagcagaagtcagtaagacaaacagttctgtcagaagttgtgctagagcggacagaactggag

SEQ ID NO: 29741 - DNA, 80 bp, synthetic construct
  source 1..80: mol_type = other DNA
attgcgtatgccccgcgcctcgacctagaaaaagaagaagccttacgcaagaaattgcaactgaacccgacccaggctaa

SEQ ID NO: 29742 - DNA, 80 bp, synthetic construct
  source 1..80: mol_type = other DNA
gaagcagataccaatctagaagggtagaaaatatgaaagctataactactaaaaggatgctcagtggactcggacattat

SEQ ID NO: 29743 - DNA, 80 bp, synthetic construct
  source 1..80: mol_type = other DNA
cttaaaactgaaggcaaagtcgaatgctaccgtacgttacatcctgtccctttgtactcggcaagcgtcaatcaagcatt

SEQ ID NO: 29744 - DNA, 80 bp, synthetic construct
  source 1..80: mol_type = other DNA
ctcgaatccgcgggtggcggtggaagcttgcaatgcagtattaaaagagaacttccctactgtggcctcatactgtataa

SEQ ID NO: 29745 - DNA, 80 bp, synthetic construct
  source 1..80: mol_type = other DNA
caccagaatatgacgcttatctggacatggtagatggtgccacttgctgcttggatacggcaagcttctgtccggcgaaa

SEQ ID NO: 29746 - DNA, 80 bp, synthetic construct
  source 1..80: mol_type = other DNA
cttcgtagttttccgaagaggcatgtataccttgagcctaccatccgctcagcggtgccttctgccatccagaatacttt

SEQ ID NO: 29747 - DNA, 80 bp, synthetic construct
  source 1..80: mol_type = other DNA
gcaaaacgtactagcagctgccaccaaaagaaactgcaacgttacgcagatgcgagagctgccggttctggactccgctg

SEQ ID NO: 29748 - DNA, 80 bp, synthetic construct
  source 1..80: mol_type = other DNA
cggtgctaacagcccgcaacattggtctatgcagttcagacgttatggagcagtctcgcagaggactgtctatactaagg

SEQ ID NO: 29749 - DNA, 80 bp, synthetic construct
  source 1..80: mol_type = other DNA
agtgaagacgatgcaatggcaatgacggcactaatgatcctggaagacctgggtgtagaccaggaattgctcacgttaat

SEQ ID NO: 29750 - DNA, 80 bp, synthetic construct
  source 1..80: mol_type = other DNA
agaggcggcatttggggaaatatcatcaatccatctccccacaaagactaaatttaagttcggggcaatgatgaagtccg

SEQ ID NO: 29751 - DNA, 80 bp, synthetic construct
  source 1..80: mol_type = other DNA
ttttacgtgaacgtctgacgaattcaccgtgtgcagcgttcataggcgacgacaatattgtcaaaggtgtcaaatctgac

SEQ ID NO: 29752 - DNA, 80 bp, synthetic construct
  source 1..80: mol_type = other DNA
ttgcagccgacgatgagcacgatgacgaccgtcgtagagctctgtacgaggagtcgactcgctggaaccgcgtaggtata

SEQ ID NO: 29753 - DNA, 80 bp, synthetic construct
  source 1..80: mol_type = other DNA
ttccacgagttgtgcaaggccgtggagtcacggtatgagacgtcaggaacggccgtgattataaccgccatgtctacttt

SEQ ID NO: 29754 - DNA, 80 bp, synthetic construct
  source 1..80: mol_type = other DNA
aaaaagtatctaaaaccatcgaataacgtcatattttccgtgggttccaccctttaccacgaaaaacgggacctactaaa

SEQ ID NO: 29755 - DNA, 80 bp, synthetic construct
  source 1..80: mol_type = other DNA
ggcgaagaatgtttcatcatttaaatacctaagagggaacccggtgaccctctacggctaacctgaatggaccgtgacgt

SEQ ID NO: 29756 - DNA, 80 bp, synthetic construct
  source 1..80: mol_type = other DNA
agtccagtccgccaccatgtttccataccaacaaaccatgtttccaatgcaacccgtgccctttcgcaacccgtatgcgc

SEQ ID NO: 29757 - DNA, 80 bp, synthetic construct
  source 1..80: mol_type = other DNA
ccacgcagaccgtggttccctaggacggaccccttcctggctatgcaagtacaggagctggcccgttcaatggcaaacct

SEQ ID NO: 29758 - DNA, 80 bp, synthetic construct
  source 1..80: mol_type = other DNA
aacgtttaagcaacgccgggatacgccgccagaggggccacctgctaagaagaagcgtaaggagccgcagcagcaggctg

SEQ ID NO: 29759 - DNA, 80 bp, synthetic construct
  source 1..80: mol_type = other DNA
gctgctcaggcacagggtaagaagaagaatggcaaaaccaagaagaagaaacgcaatgggggtccaccccccaaaaacca

SEQ ID NO: 29760 - DNA, 80 bp, synthetic construct
  source 1..80: mol_type = other DNA
aagtggcactaaaaagaaggtgaataaaaagccaggcaaaaggcaaaggatggtcatgaagctggaatctgacaaaacat

SEQ ID NO: 29761 - DNA, 80 bp, synthetic construct
  source 1..80: mol_type = other DNA
tccccatcatgctggacggaaaaatcaacgggtatgcttgtgtcgtagggggaaagctgttccggcctatgcatgtcgaa

SEQ ID NO: 29762 - DNA, 80 bp, synthetic construct
  source 1..80: mol_type = other DNA
gggaaaatagacaacgacacactggcctctcttaagaccaagaaggcatccaagtatgacctggaatacgcagacgtacc

SEQ ID NO: 29763 - DNA, 80 bp, synthetic construct
  source 1..80: mol_type = other DNA
ggagatagcggtcgccccatactcgacaaccaagggcgtgttgtggccatcgtactcgggtgcgtgaacgaggggtctag

SEQ ID NO: 29764 - DNA, 80 bp, synthetic construct
  source 1..80: mol_type = other DNA
aactgccttgtccgtggtcatgtggaacgaaaagggggttactgtgaagtacaccccggaaaactgcgagcagtggtctc

SEQ ID NO: 29765 - DNA, 80 bp, synthetic construct
  source 1..80: mol_type = other DNA
cattcccatgttccacaccgcccatgtgttacgaccgcaagcccgcagagacgttggcactactcagtgccaacgttgac

SEQ ID NO: 29766 - DNA, 80 bp, synthetic construct
  source 1..80: mol_type = other DNA
ttgaagcggtgaagagcgacggacacgacggctatgtcaggctacagacttcctcacagtacggattagatccttccgga

SEQ ID NO: 29767 - DNA, 80 bp, synthetic construct
  source 1..80: mol_type = other DNA
aacctaaaaggcagaaccatgagatacgacatgcacggcacgatagaagaggttcccctgcaccaggtgtcactgcacac

SEQ ID NO: 29768 - DNA, 80 bp, synthetic construct
  source 1..80: mol_type = other DNA
atccaggccgtgtcatattatagacggccacgggtactttctacttgctcgctgccccgaaggagactctattaccatgg

SEQ ID NO: 29769 - DNA, 80 bp, synthetic construct
  source 1..80: mol_type = other DNA
agtttaagaaggattcagtcacacactcctgctcggtgccctatgaagtgaagttcacgcccgtgggcagggaactgtac

SEQ ID NO: 29770 - DNA, 80 bp, synthetic construct
  source 1..80: mol_type = other DNA
caccctcctgagcacggcacagaacatccgtgccacgtgtacgcacacgacgcacaacggaaggacgcgtatgtcgaaat

SEQ ID NO: 29771 - DNA, 80 bp, synthetic construct
  source 1..80: mol_type = other DNA
gcatctgcccggttctgaagtagatagcacactgctctctatgagcggaagctcagttcaggtaacaccaccggcagggc

SEQ ID NO: 29772 - DNA, 80 bp, synthetic construct
  source 1..80: mol_type = other DNA
agagcgtcctggtagagtgcgattgtggttcacccgtctcagagaccattaatacagcaaaaacctacaaccagtgcaca

SEQ ID NO: 29773 - DNA, 80 bp, synthetic construct
  source 1..80: mol_type = other DNA
aagacaactcagtgcagggcttatcgtttacaaaacgacaagtgggtgtacaattctgacaagcttccgaaagcgtccgg

SEQ ID NO: 29774 - DNA, 80 bp, synthetic construct
  source 1..80: mol_type = other DNA
ctataataactttcggcttcagatctatctccctgaaactgcacccgcgtaacccgacgtacctgaccacccgttccctg

SEQ ID NO: 29775 - DNA, 80 bp, synthetic construct
  source 1..80: mol_type = other DNA
gacggtgaaccaaatcacacccacgagctcatttcagaacccactacccgtaactttacggtgacggagagcgggttgga

SEQ ID NO: 29776 - DNA, 80 bp, synthetic construct
  source 1..80: mol_type = other DNA
gttcgtatggggcaatcatccgcctcagaggtactgggctcaagaaactgcacctggcaaccctcatggattgccgcacg

SEQ ID NO: 29777 - DNA, 80 bp, synthetic construct
  source 1..80: mol_type = other DNA
gtaatcacacactactaccacagatacccgatgtccaccatccttggattgtcgatttgcgcggccgtagtgaccaccgc

SEQ ID NO: 29778 - DNA, 80 bp, synthetic construct
  source 1..80: mol_type = other DNA
agtagccgcgtccacatggctgctctgcaagtcgcgcgcatcatgcctgaccccgtatagattgaccccaaacgctcagc

SEQ ID NO: 29779 - DNA, 80 bp, synthetic construct
  source 1..80: mol_type = other DNA
tacctgtgtgtctggcagtactatgttgcgcaaggactgcgagagcagaaaccacatgggagtctttagaccacctctgg

SEQ ID NO: 29780 - DNA, 80 bp, synthetic construct
  source 1..80: mol_type = other DNA
aaccataaccagcagatgttctggagtcaactcctcattcctctggccgcgcttattgtagtgactcggttactgaaatg

SEQ ID NO: 29781 - DNA, 80 bp, synthetic construct
  source 1..80: mol_type = other DNA
tatgtgttgcgtggttccttttttagtgctagcaggcgccgcaaacgtcggcgcctacgaacacgcaactacaatgccga

SEQ ID NO: 29782 - DNA, 80 bp, synthetic construct
  source 1..80: mol_type = other DNA
aaagtaagactcatccctacactaaatctagaatatattacgtgccactacaagacagggcttgactcaccctccatcaa

SEQ ID NO: 29783 - DNA, 80 bp, synthetic construct
  source 1..80: mol_type = other DNA
cagattgttcgacgtcaaaaatgaggacctggctatggaaggaaaggtaatgaaaccactccacgtgaaaggaactattg

SEQ ID NO: 29784 - DNA, 80 bp, synthetic construct
  source 1..80: mol_type = other DNA
atgctaatactaacctgatactgcaaagaccaaatacaggcacaattcatgtaccgtacacgcaggcaccttccggattc

SEQ ID NO: 29785 - DNA, 80 bp, synthetic construct
  source 1..80: mol_type = other DNA
gaacaatggaagaaagacaggcctccttcattgaagtacacagcacccttcggatgcgaagttcatatcaaccctgtgag

SEQ ID NO: 29786 - DNA, 80 bp, synthetic construct
  source 1..80: mol_type = other DNA
agccgaaaactgtgccgtgggatccataccgcttgcatttgacataccagacgccctgttcaccagggtgtcagaaacac

SEQ ID NO: 29787 - DNA, 80 bp, synthetic construct
  source 1..80: mol_type = other DNA
aggactgccggaatcgacatgacggcggaccattggaacacagtcgcccactttaaggatgacaaggcgcactcggcaga

SEQ ID NO: 29788 - DNA, 80 bp, synthetic construct
  source 1..80: mol_type = other DNA
caataactacccaaaatggagaaagttcacgttgacatcgaggaagatagccccttcctcagagcattacaacggagctt

SEQ ID NO: 29789 - DNA, 80 bp, synthetic construct
  source 1..80: mol_type = other DNA
atggagaagccagtagtaaacgtagacgtagacccccagagtccgtttgtcgtgcaactgcaaaagagcttcccgcaatt

SEQ ID NO: 29790 - DNA, 80 bp, synthetic construct
  source 1..80: mol_type = other DNA
tcggcggcgcctcgtcgctattaattataggacttatgatttttgcttgcagcatgatgctgactagcacacgaagatga

SEQ ID NO: 29791 - DNA, 80 bp, synthetic construct
  source 1..80: mol_type = other DNA
atggcagtggtacaacccctggcaacaggccccacggacgtgcctatgtctttcggatcgttttctgacggagagatcga

SEQ ID NO: 29792 - DNA, 80 bp, synthetic construct
  source 1..80: mol_type = other DNA
gccactccaaatgaccatgctaatgccagagcattttcgcatctggccagtaaattaatcgagctggaggttcctaccac

SEQ ID NO: 29793 - DNA, 80 bp, synthetic construct
  source 1..80: mol_type = other DNA
cagctataattataataattggacttgtgttagccactgttgtggctatgtatgtgctgaccaaccagaaacacaattag

SEQ ID NO: 29794 - DNA, 80 bp, synthetic construct
  source 1..80: mol_type = other DNA
aggttaatgagaatcccttgtacgcacccacctcagagcatgtaaacgtgctgttgacccggacggaagacaagattgtg

SEQ ID NO: 29795 - DNA, 80 bp, synthetic construct
  source 1..80: mol_type = other DNA
ctgaggatttcgacgccataattgccgagcacttccaaccaggcgattgggtgttagagacagacatagcgtccttcgat

SEQ ID NO: 29796 - DNA, 80 bp, synthetic construct
  source 1..80: mol_type = other DNA
aaaagcgaagacgacgcgatggctctgacggcactgatgattctggaagaccttggggtggacccagagctgttgaccct

SEQ ID NO: 29797 - DNA, 80 bp, synthetic construct
  source 1..80: mol_type = other DNA
gctccagaacggcgctgtctgtcgtgacgtggaacgaaaaaggggttacagtcaaatacacccccgagaacagcgagcag

SEQ ID NO: 29798 - DNA, 80 bp, synthetic construct
  source 1..80: mol_type = other DNA
tcgccagatgggctaaagagtataaggaagatcaagaagatgaaagaccattggggcttagggaccgccagttggtaatg

SEQ ID NO: 29799 - DNA, 80 bp, synthetic construct
  source 1..80: mol_type = other DNA
tcagggccttaatagccattatacgccccaagaaagcagtgctatgtggtgacccaaagcaatgtggcttctttaatatg

SEQ ID NO: 29800 - DNA, 80 bp, synthetic construct
  source 1..80: mol_type = other DNA
gcggagacatagccactgccacggaaggagtaatcgtcaatgctgccaacagcaagggccaaccaggcagtggagtgtgc

SEQ ID NO: 29801 - DNA, 80 bp, synthetic construct
  source 1..80: mol_type = other DNA
ggagctctgtatcggaagtaccccgaaagcttcgacctacaaccaatagaagtggggaaagctagattagtcaaaggtaa

SEQ ID NO: 29802 - DNA, 80 bp, synthetic construct
  source 1..80: mol_type = other DNA
ctcaaaacatctcatccatgcagtggggccgaattttaacaaagtgtctgaagtggaaggtgacaaacagctggcagagg

SEQ ID NO: 29803 - DNA, 80 bp, synthetic construct
  source 1..80: mol_type = other DNA
cgtacgaatctatagccaagattattaatgacaacaattacagatctgtggctatcccgcttctgtccaccggaatattt

SEQ ID NO: 29804 - DNA, 80 bp, synthetic construct
  source 1..80: mol_type = other DNA
gccggaaacaaggataggttaatgcaatccttaaaccatctgttaacggcattggacacaacagacgcagacgtggccat

SEQ ID NO: 29805 - DNA, 80 bp, synthetic construct
  source 1..80: mol_type = other DNA
gcttcgacacaacaccattcatgttcaaaaacttagctggtgcctacccctcctattcgaccaattgggctgacgagacc

SEQ ID NO: 29806 - DNA, 80 bp, synthetic construct
  source 1..80: mol_type = other DNA
atacctgaatacgacgcctacttggacatggtggacggtgcatcatgctgcttggatacagcgagtttttgccctgccaa

SEQ ID NO: 29807 - DNA, 80 bp, synthetic construct
  source 1..80: mol_type = other DNA
gtgttaacggctcgtaatattggcctatgcagttccgacgttatggaacggtcgcgtagaggcatgtccattctcaggaa

SEQ ID NO: 29808 - DNA, 80 bp, synthetic construct
  source 1..80: mol_type = other DNA
tccccttgcgccgcgttcatcggcgacgacaacatcgtgaaaggggttaaatctgacaaactcatggccgataggtgcgc

SEQ ID NO: 29809 - DNA, 80 bp, synthetic construct
  source 1..80: mol_type = other DNA
aaaaatatctaaaaccctcaaataacatcttgttctcagtcggttctacaatctaccacgagaagagggacctacttaga

SEQ ID NO: 29810 - DNA, 80 bp, synthetic construct
  source 1..80: mol_type = other DNA
atggtcattagtgactgctgtatgcctgctcgccaatatcacgttcccttgcacccaaccacccatctgctacgaccgca

SEQ ID NO: 29811 - DNA, 80 bp, synthetic construct
  source 1..80: mol_type = other DNA
cacacccaccagagcacggagctgaacaaccttgtcacgtgtacgctcacgacgcacaaaataggggagcttacgtggaa

SEQ ID NO: 29812 - DNA, 80 bp, synthetic construct
  source 1..80: mol_type = other DNA
atgcaccttccaggctccgaagtggacagtactttactgtccatgagcggtagttctgttcatgtgactccacctgccgg

SEQ ID NO: 29813 - DNA, 80 bp, synthetic construct
  source 1..80: mol_type = other DNA
gcaaagcgtccaagtggagtgcgaatgtggtggcaccaagatctctgaaaccatcaattctgctaagcaatacagtcagt

SEQ ID NO: 29814 - DNA, 80 bp, synthetic construct
  source 1..80: mol_type = other DNA
gctctaagacatctcagtgcagggcatatcgtacacagaatgacaaatgggtgtacaattcggacaaactgcctaaagca

SEQ ID NO: 29815 - DNA, 80 bp, synthetic construct
  source 1..80: mol_type = other DNA
tcgggagaaactctcaaaggcaaactgcatgtgcccttcgtactgaccgaagcaaaatgcacagtaccattggccccgga

SEQ ID NO: 29816 - DNA, 80 bp, synthetic construct
  source 1..80: mol_type = other DNA
acccattatcacctttgggtttcgctccgtgtctctgaaacttcatcccaagaaccccaccttcctaaccacgaggcagc

SEQ ID NO: 29817 - DNA, 80 bp, synthetic construct
  source 1..80: mol_type = other DNA
tggatggagaaccagcctacacccacgaacttataacccaccctgtagtgagaaatttctcggttacagagaaaggttgg

SEQ ID NO: 29818 - DNA, 80 bp, synthetic construct
  source 1..80: mol_type = other DNA
gagtttgtgtggggaaaccatccgcctcaaaggtactggtcccaagaaactgcaccgggtaatccacacggactgccaca

SEQ ID NO: 29819 - DNA, 80 bp, synthetic construct
  source 1..80: mol_type = other DNA
gcaatgcagttctttgaggggacatgtccagaagactggaccagctatgggatcctgatcgcaaggaaaggagacaagat

SEQ ID NO: 29820 - DNA, 80 bp, synthetic construct
  source 1..80: mol_type = other DNA
tagaaatatagaagacaatcaggctcatctccagggggagcctatagaagtggacaatctccctgaggacatgaggcgac

SEQ ID NO: 29821 - DNA, 80 bp, synthetic construct
  source 1..80: mol_type = other DNA
taacaaaatacaaaatcactaaaaattataaaaacagaaaaatacataaataggtatatgtgtcccctaagagacacatt

SEQ ID NO: 29822 - DNA, 80 bp, synthetic construct
  source 1..80: mol_type = other DNA
ttacctacccaaaatggagaaagttcacgttgacatcgaggaagacagcccattcctcagagctttgcaacggagcttcc

SEQ ID NO: 29823 - DNA, 80 bp, synthetic construct
  source 1..80: mol_type = other DNA
ccatgtacgtgctgaccaaccagaaacataattgaacatagcagcaattggcaagctgctcatatagaattcgcggcgat

SEQ ID NO: 29824 - DNA, 80 bp, synthetic construct
  source 1..80: mol_type = other DNA
ctacagagggaacacctgaacaaccggcacctataaccgtggatgaaaccagaactagaacgcccgaaccaattatcatt

SEQ ID NO: 29825 - DNA, 80 bp, synthetic construct
  source 1..80: mol_type = other DNA
ctgaccaaccagaaacataattgaacatagcagcaattggcaagctgcttatatagaactcgcggcgattggcatgccgc

SEQ ID NO: 29826 - DNA, 80 bp, synthetic construct
  source 1..80: mol_type = other DNA
tatgcccgggtcttctgcgcactatgggcggcgcatgagattagcccaatacaatcactacccattatggagaaagttca

SEQ ID NO: 29827 - DNA, 80 bp, synthetic construct
  source 1..80: mol_type = other DNA
agctgcccgcaaaaatttttattttcttttaccatcaattggattttgtttttaatatttcaaaaaaaaagaaaaaaaaa

SEQ ID NO: 29828 - DNA, 80 bp, synthetic construct
  source 1..80: mol_type = other DNA
ccaagcagaacccgacgttgaactggtcagggtgcacccaaagagctcactagtgggacgtaaagggtttagcacgacgg

SEQ ID NO: 29829 - DNA, 80 bp, synthetic construct
  source 1..80: mol_type = other DNA
atggaaagacgttttcgtatctcgaagggacaaagtttcaccaggcagcaaaggacgtggccgagataaacgcaatgtgg

SEQ ID NO: 29830 - DNA, 80 bp, synthetic construct
  source 1..80: mol_type = other DNA
cttttaacgtagagtgtttcaaaaaatacgcatgcaacgatgagtattgggaaacgtacaaagaaaaccctatcagatta

SEQ ID NO: 29831 - DNA, 80 bp, synthetic construct
  source 1..80: mol_type = other DNA
attcaattttaaaatttctatacgcgtctttaatggcgcatataataaccacttacaattttctttattttctttatttg

SEQ ID NO: 29832 - DNA, 80 bp, synthetic construct
  source 1..80: mol_type = other DNA
tcaacgggcggaccgttaagtatagctgctcatgtggttctaaaccatcaggcacaacaactacagacaagactatcaat

SEQ ID NO: 29833 - DNA, 80 bp, synthetic construct
  source 1..80: mol_type = other DNA
agctgcaccgttgacaaatgccaggcatatgtcacgagccatacgaaatggcaatttaattcacctttcgttccgcgtgc

SEQ ID NO: 29834 - DNA, 80 bp, synthetic construct
  source 1..80: mol_type = other DNA
atggcctgccaggcagcggtacaacccccggtaagtacaggccctacggacgtgcctatgtctttcggatcattttctga

SEQ ID NO: 29835 - DNA, 80 bp, synthetic construct
  source 1..80: mol_type = other DNA
atggaaagaattcacgttgacttagacgctgacagcccgtatgtcaagtcgttacagcggagctttccacaatttgagat

SEQ ID NO: 29836 - DNA, 80 bp, synthetic construct
  source 1..80: mol_type = other DNA
agtgctttccccgcaggccgtgcttaagagtgaaaaattatcgtgcatccaccccttggctgaacaagtcatagtaataa

SEQ ID NO: 29837 - DNA, 80 bp, synthetic construct
  source 1..80: mol_type = other DNA
aacaaaacacattatccacgctgtggggcccaatttcaacaaagtctctgaggttgaaggtgacaaacagctggcggaag

SEQ ID NO: 29838 - DNA, 80 bp, synthetic construct
  source 1..80: mol_type = other DNA
atatgcatatctgatgattcgtcagtgacagaaccggatgcggagttagtgagggtgcatccgaaaagctccctagccgg

SEQ ID NO: 29839 - DNA, 80 bp, synthetic construct
  source 1..80: mol_type = other DNA
aaggaagggctacagcaccagcgacggaaagactttttcatacctggaagggacaaaatttcatcaggcggccaaagaca

SEQ ID NO: 29840 - DNA, 80 bp, synthetic construct
  source 1..80: mol_type = other DNA
tccatccgcggaagtacctcgtggtagagaaccaatccgcggaaagggaaatggaacagccagcaaacaggactgtgagc

SEQ ID NO: 29841 - DNA, 80 bp, synthetic construct
  source 1..80: mol_type = other DNA
gagacaagtgctagagtgcctgaaccagtcaatattgaagaagaagaggagggcagcataagttcgctgtcagacggccc

SEQ ID NO: 29842 - DNA, 80 bp, synthetic construct
  source 1..80: mol_type = other DNA
tatccggcaggtgctgcaggttgaggtggatgtccacaggccaccttccgtgttcagctcatcttggtccattcctcatg

SEQ ID NO: 29843 - DNA, 80 bp, synthetic construct
  source 1..80: mol_type = other DNA
catctgactttgacgtggatagtttatccatccttactttggaggaggctagcatgattgaggctgcggccacggagact

SEQ ID NO: 29844 - DNA, 80 bp, synthetic construct
  source 1..80: mol_type = other DNA
gactcttactccgcaagaagtgtggagtttatggcgcgaccggtgccagcgcccaggacaatatttaggaaaccccctca

SEQ ID NO: 29845 - DNA, 80 bp, synthetic construct
  source 1..80: mol_type = other DNA
ccctgctccacgcacaagaataagcaggtttaattcgagaaccagcctagtctctggcccaccagatgtaaatagggtga

SEQ ID NO: 29846 - DNA, 80 bp, synthetic construct
  source 1..80: mol_type = other DNA
ccactagagatgaactcgaggcgttagtaccgtcacgagcaccaagtaggccggcctcgaggaccagcctggtttccaac

SEQ ID NO: 29847 - DNA, 80 bp, synthetic construct
  source 1..80: mol_type = other DNA
cctccaggcgtgaatagggagattactagagaagagttcgaggcgttcgtagcacaacagcaatgacggttcgacgcggg

SEQ ID NO: 29848 - DNA, 80 bp, synthetic construct
  source 1..80: mol_type = other DNA
gcacctcccgggctcagaagtggacagtagcttggtgtccttgagtagcggctcagtctctgtgacaccccctgctggaa

SEQ ID NO: 29849 - DNA, 80 bp, synthetic construct
  source 1..80: mol_type = other DNA
caagtgctctagtggaatgcgagtgcagcggcacgacgatctccgagaccattaataagacaaagcagttcagccagtgc

SEQ ID NO: 29850 - DNA, 80 bp, synthetic construct
  source 1..80: mol_type = other DNA
acaaagaaggagcagtgtcgagcataccgcctgcagaatgataagtgggtgtacaactcagacaaactgcccaaagcagc

SEQ ID NO: 29851 - DNA, 80 bp, synthetic construct
  source 1..80: mol_type = other DNA
atgtatgtgctgaccaaccagaaacacaattagaattagcagcgattggcatgctgcttgtaaagttttactacaaataa

SEQ ID NO: 29852 - DNA, 80 bp, synthetic construct
  source 1..80: mol_type = other DNA
ccacagaggggacatctgaacaaccagcacttgtaaacgtggatgcaaccaggactagaacgcctgaaccgatcatcatt

SEQ ID NO: 29853 - DNA, 80 bp, synthetic construct
  source 1..80: mol_type = other DNA
ttccgccggacgtctctaagctcttcctctgcattgcaagagtttaccactcagtatgtcgaaagtctttgtagatatcg

SEQ ID NO: 29854 - DNA, 80 bp, synthetic construct
  source 1..80: mol_type = other DNA
tctctaatggcgcatataataaccacctacaatttttttcattttctttatttgtgccactatagggcacttactaacca

SEQ ID NO: 29855 - DNA, 80 bp, synthetic construct
  source 1..80: mol_type = other DNA
gagaaagagtggagtggcttgtgaataagatcccaggctatcacttgctactggttagcgagtataaccttatactgccc

SEQ ID NO: 29856 - DNA, 80 bp, synthetic construct
  source 1..80: mol_type = other DNA
cgttcagcaggcactaacttgacaattaagtatgaaggtatatgtgtcccctaagagacacactgcatatagcaaataat

SEQ ID NO: 29857 - DNA, 80 bp, synthetic construct
  source 1..80: mol_type = other DNA
ttgcataactttgagaaggtgaattataagtaccgggtataatgcgggctggtatatatgtaaccacaaccatattaata

SEQ ID NO: 29858 - DNA, 80 bp, synthetic construct
  source 1..80: mol_type = other DNA
ttcaagtatcaaattcggtgccgtgcatgatgcggaccgatttattattcacatatgtaatccttattatatcacatcac

SEQ ID NO: 29859 - DNA, 80 bp, synthetic construct
  source 1..80: mol_type = other DNA
ggcgcatataataaccacttacaattttctttattttctttattaaccatagaagtaattcattttgtttttaatatttc

SEQ ID NO: 29860 - DNA, 80 bp, synthetic construct
  source 1..80: mol_type = other DNA
atgggcggcgtatgagagtagcccaaattaaaactacccattatggagaaagttcacgttgatatcgaggaggatagccc

SEQ ID NO: 29861 - DNA, 80 bp, synthetic construct
  source 1..80: mol_type = other DNA
acgggggtgtatccgtttatgtggggaggcgcctactgcttctgtgactctgaaaacacgcaaattagtcgagcgtatgt

SEQ ID NO: 29862 - DNA, 80 bp, synthetic construct
  source 1..80: mol_type = other DNA
gatgaaatcagatgactgctcagctgaccacgccttggcctacaaagctcatactgcctcagtccaagcttttctgaata

SEQ ID NO: 29863 - DNA, 80 bp, synthetic construct
  source 1..80: mol_type = other DNA
taactgtgggagagcaatcgacgacagcggtagtgtacgtgaatggagaaacaccggtcaattttaacggcattaaattg

SEQ ID NO: 29864 - DNA, 80 bp, synthetic construct
  source 1..80: mol_type = other DNA
gttgcaggccctttatcaactgcctggaccccatttgatcggaaagtggtgcagtacgccggagagatctacaattatga

SEQ ID NO: 29865 - DNA, 80 bp, synthetic construct
  source 1..80: mol_type = other DNA
cttcccggagtacggagctgggcatgcaggggcgttcggggatcttcaagccagaacaatcaccagtaatgacctgtacg

SEQ ID NO: 29866 - DNA, 80 bp, synthetic construct
  source 1..80: mol_type = other DNA
ccaacacgaatttagtattgcaaagacccaacacaggcaccatccatgttccttacacgcaggcaccgtcaggctttgag

SEQ ID NO: 29867 - DNA, 80 bp, synthetic construct
  source 1..80: mol_type = other DNA
caccatttgggtgcgaaattcatgtgaatcccgtcagagctgagaattgcgcagtaggatttataccattagccttcgac

SEQ ID NO: 29868 - DNA, 80 bp, synthetic construct
  source 1..80: mol_type = other DNA
atacccgatgccttgtttaccagggtgtcagaaacaccgacgttgtcgagcgctgagtgctccttgaatgagtgtacata

SEQ ID NO: 29869 - DNA, 80 bp, synthetic construct
  source 1..80: mol_type = other DNA
ctcaacggactttggcgggatcgccactgtcaagtactcggctagtaaatcaggcaaatgcgcagtacatgttccctcag

SEQ ID NO: 29870 - DNA, 80 bp, synthetic construct
  source 1..80: mol_type = other DNA
ctctgaaagagtcattggtggaagtggtcgaacaagggtcaatgacccttcacttttcgaccgccagtatacacccagag

SEQ ID NO: 29871 - DNA, 80 bp, synthetic construct
  source 1..80: mol_type = other DNA
tttaaattgcagatctgtacgaaggtactcacatgtaaaggcgactgtcatccgcctaaagaccatattgtgacgcaccc

SEQ ID NO: 29872 - DNA, 80 bp, synthetic construct
  source 1..80: mol_type = other DNA
ccagcaccacgcccagacatttacagctgcggtatccaagaccgcttggacgtggttaacgtcactcttaggagggtcag

SEQ ID NO: 29873 - DNA, 80 bp, synthetic construct
  source 1..80: mol_type = other DNA
ggaaagctgcctattagaaacatgtagcggcaattggcaagccgcctataaatgtttagcagcaattggcaagctgcata

SEQ ID NO: 29874 - DNA, 80 bp, synthetic construct
  source 1..80: mol_type = other DNA
tataaattacctagcggcaattggcacgccgcttataaaatttttattttcttttaccaataattggattttgtttttaa

SEQ ID NO: 29875 - DNA, 80 bp, synthetic construct
  source 1..80: mol_type = other DNA
gcattgtcgtaaatggccgcacacagagaaatactaatactatgaaaaactatttattaccagtagttgcacaggctttt

SEQ ID NO: 29876 - DNA, 80 bp, synthetic construct
  source 1..80: mol_type = other DNA
gccaggtgggctaaagaatacaaagatgaccaagatgatgagagaccgctagggttacgggaccgacagctcgtgatggg

SEQ ID NO: 29877 - DNA, 80 bp, synthetic construct
  source 1..80: mol_type = other DNA
ctgttgttgggcatttaagaaacacaagattacatctgtgtataaacgtcccgacactcaaacggttatcaaggtaccta

SEQ ID NO: 29878 - DNA, 80 bp, synthetic construct
  source 1..80: mol_type = other DNA
gtgacttccattcctttgtgctacccagacctggtagcaatacattggaaattgggcttagaacccggataaagaagtta

SEQ ID NO: 29879 - DNA, 80 bp, synthetic construct
  source 1..80: mol_type = other DNA
ctggaagataaaaagataccaccacctataattactccagaagacgtctcaacagcaaaagaagccgcagcggaagccaa

SEQ ID NO: 29880 - DNA, 80 bp, synthetic construct
  source 1..80: mol_type = other DNA
ggagattagggaggctgaggagttgcgaatcgcactaccccctatagtgccggacgtggaagaaccaactctagaagccg

SEQ ID NO: 29881 - DNA, 80 bp, synthetic construct
  source 1..80: mol_type = other DNA
acgtggacttgatgctgcaagaggcaggcgctggttccgtcgagactcccagaggattaatcaaagttactagctactct

SEQ ID NO: 29882 - DNA, 80 bp, synthetic construct
  source 1..80: mol_type = other DNA
ggtgaggataagattggttcttatgccgtgttgtcgcctcaagccgtcctgagaagtgaaaaactgtcctgcatacaccc

SEQ ID NO: 29883 - DNA, 80 bp, synthetic construct
  source 1..80: mol_type = other DNA
ccttgcggaggaagtcatcgtaataacgcacgcaggaaggaaaggacgctatgctgttgagccgtatcatggcaaagtgg

SEQ ID NO: 29884 - DNA, 80 bp, synthetic construct
  source 1..80: mol_type = other DNA
tggtccctgaaggacatgcgatccctgtagcagactttcaggctctcagtgagagcgctactattgtgtacaacgaacga

SEQ ID NO: 29885 - DNA, 80 bp, synthetic construct
  source 1..80: mol_type = other DNA
gagtttgtgaacaggtacttgcatcacatcgccattaatggaggagccttgaataccgatgaagagtactataaagtggt

SEQ ID NO: 29886 - DNA, 80 bp, synthetic construct
  source 1..80: mol_type = other DNA
caaacctaccgagtatgatggagagtacttgtatgatattgacaggaaacagtgtgtcaagaaagaacaggtgtctggcc

SEQ ID NO: 29887 - DNA, 80 bp, synthetic construct
  source 1..80: mol_type = other DNA
tcggcctgacaggtgagctggtagagcctccatttcacgaattcgcgtatgaaagcctgaagaccagaccggcagctcca

SEQ ID NO: 29888 - DNA, 80 bp, synthetic construct
  source 1..80: mol_type = other DNA
tatcaagtgcctaccataggagtgtacggagtaccaggctcgggtaagtcaggaattataaaaagtgccgttaccaagag

SEQ ID NO: 29889 - DNA, 80 bp, synthetic construct
  source 1..80: mol_type = other DNA
agcgcaaagaaggaaaattgcgccgaggttatccgcgacgtgaagaaaatgcgaggcttagacatagtggcacgcactgt

SEQ ID NO: 29890 - DNA, 80 bp, synthetic construct
  source 1..80: mol_type = other DNA
agattcagtgctgctgaatggctgcaagcacccagttgatacactgtacattgatgaggcttttgcttgtcatgccggga

SEQ ID NO: 29891 - DNA, 80 bp, synthetic construct
  source 1..80: mol_type = other DNA
tccgcgctttgattgcaattattaaaccaaaaaaggcagttctctgcggagacccgaagcagtgcggcttctttaatatg

SEQ ID NO: 29892 - DNA, 80 bp, synthetic construct
  source 1..80: mol_type = other DNA
atgtgcctcagagtgcatttcaatcacgaaatttgcacgcaggtgttccataaaagcatatcccgtaggtgcactaaatc

SEQ ID NO: 29893 - DNA, 80 bp, synthetic construct
  source 1..80: mol_type = other DNA
cggtcacatccgtggtgtctacgctgttttatgacaagaagatgcgcactactaatcccagggagacaaaaattgaaatt

SEQ ID NO: 29894 - DNA, 80 bp, synthetic construct
  source 1..80: mol_type = other DNA
gacaccacagggagtacaaagcctagaaaagatgatctcatattgacgtgcttcaggggatgggtaaagcagctgcaaat

SEQ ID NO: 29895 - DNA, 80 bp, synthetic construct
  source 1..80: mol_type = other DNA
cacagggattaacccgaaaaggggtttatgccgtcaggtataaagtcaatgagaatcccctatacgccgcaaattcagag

SEQ ID NO: 29896 - DNA, 80 bp, synthetic construct
  source 1..80: mol_type = other DNA
cacgtcaacgtcctactcactcgtacagaggataggattgtgtggaaaaccctggcaggagatccttggattaaaactct

SEQ ID NO: 29897 - DNA, 80 bp, synthetic construct
  source 1..80: mol_type = other DNA
tacggccaagtacaccggtgactttactgctaccttggaagaatggcaacaagagcatgacgccattatgaagcacattc

SEQ ID NO: 29898 - DNA, 80 bp, synthetic construct
  source 1..80: mol_type = other DNA
tggaaagacctgatcctgcggacgtgttccagaataaagccaatgtgtgctgggctaaagccttagtacccgtactgaag

SEQ ID NO: 29899 - DNA, 80 bp, synthetic construct
  source 1..80: mol_type = other DNA
actgcaggtattgacctaacggcagagcagtggaacaccattgtccaattcagagatgacaaggctcactcggcagaaat

SEQ ID NO: 29900 - DNA, 80 bp, synthetic construct
  source 1..80: mol_type = other DNA
agcactcaaccaattgtgtgtacggttctttggactagatttggattcagggttgttttctgcccccactgtgccgttgt

SEQ ID NO: 29901 - DNA, 80 bp, synthetic construct
  source 1..80: mol_type = other DNA
ctataaaaaataaccactgggataattcaccttcacccaatatgtacgggttgaataaggaagtagcgcgacaactttct

SEQ ID NO: 29902 - DNA, 80 bp, synthetic construct
  source 1..80: mol_type = other DNA
cagccaagctgaagaagaattgtaaagacataacagacaaggacctagacaaaaagatggcagagctcgcagctgtcatg

SEQ ID NO: 29903 - DNA, 80 bp, synthetic construct
  source 1..80: mol_type = other DNA
cgacgctacccgcagcttcctcgtgcagtggcgactggcagagttttggacatgaatactgggaccctgcgtggttacga

SEQ ID NO: 29904 - DNA, 80 bp, synthetic construct
  source 1..80: mol_type = other DNA
cccatgcattaatcttgtgcccgttaatcggaggctaccgcatgcattggtaacgcaccattcagagcaaccacgcagcg

SEQ ID NO: 29905 - DNA, 80 bp, synthetic construct
  source 1..80: mol_type = other DNA
atttttcggcatttgccagcaagttgaggggtaggactgtcctggttgtaggagagaaactaaacataaccgggaaaaat

SEQ ID NO: 29906 - DNA, 80 bp, synthetic construct
  source 1..80: mol_type = other DNA
gttgactggctatccgaaagtcccgaagccactttcaaatcgcgcctggatctcggtatcccgcacgaactgcccaaata

SEQ ID NO: 29907 - DNA, 80 bp, synthetic construct
  source 1..80: mol_type = other DNA
tgacattgtgtttgtgaatgtccggacaccttacaagtaccatcactaccagcagtgtgaagaccatgcgatcaagctca

SEQ ID NO: 29908 - DNA, 80 bp, synthetic construct
  source 1..80: mol_type = other DNA
gtatgttgacaaagaaagcgtgcttacatcttaatcctggtggaacctgtgtcagcattggctatggctacgcagatcga

SEQ ID NO: 29909 - DNA, 80 bp, synthetic construct
  source 1..80: mol_type = other DNA
gccagtgaaagcattgtcggagctattgcaaggcagtttaagttctcccgagtgtgtaagccaaaagtatcaacggagga

SEQ ID NO: 29910 - DNA, 80 bp, synthetic construct
  source 1..80: mol_type = other DNA
gacagagatactatttgtcttcatagggtatgaccggaaggttcgtacacacaatccctataaattgtcttcaacattga

SEQ ID NO: 29911 - DNA, 80 bp, synthetic construct
  source 1..80: mol_type = other DNA
ccaacatttacacaggctcacacttacatgaggcaggctgcgctccatcctaccatgtagtgcgtggtgatattgccaat

SEQ ID NO: 29912 - DNA, 80 bp, synthetic construct
  source 1..80: mol_type = other DNA
gctgaggaaggagtaattgtcaacgccgctaatagcagagggcaacctgggggtggggtatgtggagctctttacaaacg

SEQ ID NO: 29913 - DNA, 80 bp, synthetic construct
  source 1..80: mol_type = other DNA
gaggaccccgatttggagcaggataccatatgtttgcatgatgatgaaacgtgccgctatgaaggacacgttgctgttta

SEQ ID NO: 29914 - DNA, 80 bp, synthetic construct
  source 1..80: mol_type = other DNA
cttcccggagaacttcgacctgcagcccatagaggtcggcaagtcaaggctggttaaaggggcggctaaacatatcattc

SEQ ID NO: 29915 - DNA, 80 bp, synthetic construct
  source 1..80: mol_type = other DNA
atgcagtaggacccaattttaataaggtgtcggaacttgatggggacaagcaattggcagaagcttatgaatcagtagct

SEQ ID NO: 29916 - DNA, 80 bp, synthetic construct
  source 1..80: mol_type = other DNA
aaaatcattaatgataatcattaccgcaccgtggcaattccgctgctgtcgacaggtatttttgccggaaacaaagacag

SEQ ID NO: 29917 - DNA, 80 bp, synthetic construct
  source 1..80: mol_type = other DNA
actcatgcagtcattaaatcacctgcttacggcattagacactaccgatgcagatgtagctatatactgcagagataaga

SEQ ID NO: 29918 - DNA, 80 bp, synthetic construct
  source 1..80: mol_type = other DNA
agtgggaaactactctgaaggaagttatagcacggagagaggctgtcgaagagatatgtatctctgaagacgcatccgta

SEQ ID NO: 29919 - DNA, 80 bp, synthetic construct
  source 1..80: mol_type = other DNA
gcagaacctgacgcagagctggtaagagtacatcccaaaagttcgctggcaggacgcaaaggctttagcacggtcgacgg

SEQ ID NO: 29920 - DNA, 80 bp, synthetic construct
  source 1..80: mol_type = other DNA
gaaaacattttcatatttggaagggactaaatttcatcaggcagcgaaggatgtggccgagattaatgcgatgtggccca

SEQ ID NO: 29921 - DNA, 80 bp, synthetic construct
  source 1..80: mol_type = other DNA
cagttaccgaggctaatgagcaaatatgcctgtacattttgggcgaaagtatgagcagcatccgatcgaagtgccccgtt

SEQ ID NO: 29922 - DNA, 80 bp, synthetic construct
  source 1..80: mol_type = other DNA
gaagaatctgaggcgtcaactccacccagcacgttgccgtgtctctgtatccattctatgacaccggaacgagtacacag

SEQ ID NO: 29923 - DNA, 80 bp, synthetic construct
  source 1..80: mol_type = other DNA
gcttaaggcctcacgtccagagcaaataacggtgtgttcgtcgtttcccctacccaagtacagaatcaccggggtgcaga

SEQ ID NO: 29924 - DNA, 80 bp, synthetic construct
  source 1..80: mol_type = other DNA
ccaggacgtctatgcggtagacggtcccaccagcatttaccatcaagcaaataaaggtgtaagagtggcctattggatcg

SEQ ID NO: 29925 - DNA, 80 bp, synthetic construct
  source 1..80: mol_type = other DNA
agattcaatgcgctcagcctatactcttcctcccgaaagtgccggaacatatccatccacgcaggtatcttcccccgcag

SEQ ID NO: 29926 - DNA, 80 bp, synthetic construct
  source 1..80: mol_type = other DNA
gagaacagagaggaagaggagaattctgtggaaacgctgcctgaatcgcctgaaattcctacagttgctgccgcctctga

SEQ ID NO: 29927 - DNA, 80 bp, synthetic construct
  source 1..80: mol_type = other DNA
aattgacacccaaacggaagagaccatgagcataacgtcggaaacgactgttgcctcgttcgtgcctaacgaaattgtgg

SEQ ID NO: 29928 - DNA, 80 bp, synthetic construct
  source 1..80: mol_type = other DNA
tcgaggcggaaatacactcggatctcatgcgattctcctctgactggtccattcctcaagcctctgactttgacgttgac

SEQ ID NO: 29929 - DNA, 80 bp, synthetic construct
  source 1..80: mol_type = other DNA
agcgtgtcggttcaaggtactgtggacatatttaacagtgcgctgcaggaggatgcgcgtagcgccgtatcatcttactg

SEQ ID NO: 29930 - DNA, 80 bp, synthetic construct
  source 1..80: mol_type = other DNA
ctcgggaataaaacccattcccgcgccacgtaccgtttttatccagccaccgaaacctcgcagaagacgtcgtaagtcga

SEQ ID NO: 29931 - DNA, 80 bp, synthetic construct
  source 1..80: mol_type = other DNA
aggccagtaccagttctacggctcccttggtaactgtgtccagcgccacttcgagatctagtttggtgtctaacccaccg

SEQ ID NO: 29932 - DNA, 80 bp, synthetic construct
  source 1..80: mol_type = other DNA
ggaagaattggggttattaccagagaggagttcgaagccttcgtcgcgcaacaacaatgacggttcgaagcgggtgcgta

SEQ ID NO: 29933 - DNA, 80 bp, synthetic construct
  source 1..80: mol_type = other DNA
ggtcaagggcatctacaacataaatctgtgaggcaaacagcgctgtccgaagtggtgcttgtacggacggagttggagaa

SEQ ID NO: 29934 - DNA, 80 bp, synthetic construct
  source 1..80: mol_type = other DNA
ttcgtaggccccgcgcctcgacttaatataagaggaaagtttacgtaagaaattgcaattgaatccgacacaggctaata

SEQ ID NO: 29935 - DNA, 80 bp, synthetic construct
  source 1..80: mol_type = other DNA
gctttgataccacgccgtttatgtttaaaaatttggccggagcctatccttcctactctacaaattgggctgacgaaaca

SEQ ID NO: 29936 - DNA, 80 bp, synthetic construct
  source 1..80: mol_type = other DNA
ggagcaggtatcaatccagaagagtggagaatatgaaagcagtgaccaccaaaagactactcggcggactgggacattac

SEQ ID NO: 29937 - DNA, 80 bp, synthetic construct
  source 1..80: mol_type = other DNA
ttgaagtctgaaggaaaagttgaatgttaccgtacattgtaccccgtccccttgtattcagcaagcgttaaccgcgtttt

SEQ ID NO: 29938 - DNA, 80 bp, synthetic construct
  source 1..80: mol_type = other DNA
ctcgaatcctcgagtggcagtcgaagcgtgtaatgctatgctaaaggagaactttccaacagtggcttcgtactgcataa

SEQ ID NO: 29939 - DNA, 80 bp, synthetic construct
  source 1..80: mol_type = other DNA
ccctgccaaattgcgtagttttcctaagagacatgcttatttggagccgaccattcgctcagcagtgccgtctgctatac

SEQ ID NO: 29940 - DNA, 80 bp, synthetic construct
  source 1..80: mol_type = other DNA
tggattccgccgccttcaatgtagagtgctttaagaagtatgcatgcaataatgaatattgggaaacatataaggaatgt

SEQ ID NO: 29941 - DNA, 80 bp, synthetic construct
  source 1..80: mol_type = other DNA
cctattagattaactgaagagaatgtgactaattatattactaaattgaaaggtccgaaggcggctgctttgtatgctaa

SEQ ID NO: 29942 - DNA, 80 bp, synthetic construct
  source 1..80: mol_type = other DNA
aacccacaaccttagcatgcttcaggacattcccatggatagatttgttatggatttaaaaagagatgtgaaggtgacac

SEQ ID NO: 29943 - DNA, 80 bp, synthetic construct
  source 1..80: mol_type = other DNA
ctggtaccaaacatacggaggagagacccaaggtacaggtaatccaggcagcagatccattggccacagcctacttatgc

SEQ ID NO: 29944 - DNA, 80 bp, synthetic construct
  source 1..80: mol_type = other DNA
gggattcatcgtgaactggtgcggaggttaaacgcagttttactgccgaacgtccataccttgttcgacatgtccgctga

SEQ ID NO: 29945 - DNA, 80 bp, synthetic construct
  source 1..80: mol_type = other DNA
ggatttcgatgccattattgctgaacatttccaacctggggacagtgtgttggagaccgacatcgcttcgttcgataaga

SEQ ID NO: 29946 - DNA, 80 bp, synthetic construct
  source 1..80: mol_type = other DNA
gcgaggacgatgcgatggcactgacagcattgatgatcctggaagatttaggcgtagaccaagagttgcttacgttgatt

SEQ ID NO: 29947 - DNA, 80 bp, synthetic construct
  source 1..80: mol_type = other DNA
gaagccgcattcggagaaatatcatccatccaccttcccacgaaaactaaatttaaatttggtgctatgatgaaatctgg

SEQ ID NO: 29948 - DNA, 80 bp, synthetic construct
  source 1..80: mol_type = other DNA
tgtttcttaccctgtttgtgaatacagttattaatattgttatagccagcagagtgctccgagaacgcctgacacagtcg

SEQ ID NO: 29949 - DNA, 80 bp, synthetic construct
  source 1..80: mol_type = other DNA
ccttgcgctgcatttatcggcgatgacaacattgttaaaggcgttaaatcggataagttgatggccgacaggtgtgccac

SEQ ID NO: 29950 - DNA, 80 bp, synthetic construct
  source 1..80: mol_type = other DNA
cctgtgtgacacggtaaccggcacggcatgtcgtgtggccgatcctttgaagagactgtttaaactcgggaaacctctcg

SEQ ID NO: 29951 - DNA, 80 bp, synthetic construct
  source 1..80: mol_type = other DNA
cggctgacgatgaacacgatgacgatcgtcgccgcgctctgcaggaggaatcagcccgctggaaccgcgtaggcatacac

SEQ ID NO: 29952 - DNA, 80 bp, synthetic construct
  source 1..80: mol_type = other DNA
tctgaattatgcaaggcggtggagtcacgttacgagaccacaggcacgtccgtgattataacagctatgaccaccttggc

SEQ ID NO: 29953 - DNA, 80 bp, synthetic construct
  source 1..80: mol_type = other DNA
gaaatatttaaaaccatcgaataacatcatattttcagtgggttccaccatctaccatgaaaaaagagacttgttaaaaa

SEQ ID NO: 29954 - DNA, 80 bp, synthetic construct
  source 1..80: mol_type = other DNA
acagagtgttcctgcgttcaagcacctgagaggaaacccagtaactctctacggctgacctgaatggactgtaacgtagt

SEQ ID NO: 29955 - DNA, 80 bp, synthetic construct
  source 1..80: mol_type = other DNA
tcagtccgcaaccatgttcccttaccaatccacaatgtttccaatgcaaccagcgccttttcgcaacccgtacgctcctc

SEQ ID NO: 29956 - DNA, 80 bp, synthetic construct
  source 1..80: mol_type = other DNA
ctagaagaccgtggttccctagaaccgatcccttcttagccatgcaggtgcaggagttggcccgatcaatggcgagcttg

SEQ ID NO: 29957 - DNA, 80 bp, synthetic construct
  source 1..80: mol_type = other DNA
acgtttaaacagcgtcgagatacgccacccgaggggccacctgctaagaagaagcgtaaggagcctcaacagcaggtagc

SEQ ID NO: 29958 - DNA, 80 bp, synthetic construct
  source 1..80: mol_type = other DNA
tcaggcgcaggttaagaaaaagaacggaaaaccgaagaagaagaaaagtaacggagcaccacccccaaaaaatcagaaga

SEQ ID NO: 29959 - DNA, 80 bp, synthetic construct
  source 1..80: mol_type = other DNA
gcaccaagaagaagaccaataagaaacctggaaaaagacaacggatggttatgaagttagaatcagacaaaacatttcct

SEQ ID NO: 29960 - DNA, 80 bp, synthetic construct
  source 1..80: mol_type = other DNA
acaatgaaactcttgcctccctgaagacgaagaaggcatccaaatacgacctagagtatgccgatgtccctcaaagcatg

SEQ ID NO: 29961 - DNA, 80 bp, synthetic construct
  source 1..80: mol_type = other DNA
cgagcagatacctttaaatacacacatgataagcctcaagggtattataattggcatcacggcgccgtgcagtatgaaaa

SEQ ID NO: 29962 - DNA, 80 bp, synthetic construct
  source 1..80: mol_type = other DNA
tgggagattcacggtgccgaaaggtgtgggagcgaaaggagacagtggacgccccatactagataatcaaggcagagtcg

SEQ ID NO: 29963 - DNA, 80 bp, synthetic construct
  source 1..80: mol_type = other DNA
gttggcacctaccttctgtgtttcacctacgtggcaagcagaattacacatgtcggtgtgagacgatagtgagttgcgac

SEQ ID NO: 29964 - DNA, 80 bp, synthetic construct
  source 1..80: mol_type = other DNA
gatccaggacagctttgtccgtagttatgtggaatgaaaaaggggtcaccgtaaaatacacaccagaaaattgcgagcaa

SEQ ID NO: 29965 - DNA, 80 bp, synthetic construct
  source 1..80: mol_type = other DNA
cgttcccttgctccactccaccaatttgctacgaccgagcacccgcagaaaccctgatgatgcttagcaagaacattgac

SEQ ID NO: 29966 - DNA, 80 bp, synthetic construct
  source 1..80: mol_type = other DNA
aatcctggctatgatgaattgctagaagcagtactgaaatgccctggcagacagaagagatccacggaggagttatttaa

SEQ ID NO: 29967 - DNA, 80 bp, synthetic construct
  source 1..80: mol_type = other DNA
ggagtacaaacttacacgtccgtacatggccaagtgcgttcggtgtgccgttggaagttgccacagcccgatcgctatag

SEQ ID NO: 29968 - DNA, 80 bp, synthetic construct
  source 1..80: mol_type = other DNA
aagcagtaagaagcgacgggcacgacggctacatccgaatacagacatcatcacagtacggtttagacccctccgggaat

SEQ ID NO: 29969 - DNA, 80 bp, synthetic construct
  source 1..80: mol_type = other DNA
gttaagagcagagttatgaggtacaatatgtatggcaagatcgtagaagtcccattacatcaggtttctttacacacatc

SEQ ID NO: 29970 - DNA, 80 bp, synthetic construct
  source 1..80: mol_type = other DNA
tcggccttgccacattattgatggtcacggatacttcctcctcgcacgttgcccagagggcgactctatcaccatggagt

SEQ ID NO: 29971 - DNA, 80 bp, synthetic construct
  source 1..80: mol_type = other DNA
ttaagaaggattccgttacccattcctgctcagtgccttatgaagtgaaattcacacccgtgggcagagaattatacagc

SEQ ID NO: 29972 - DNA, 80 bp, synthetic construct
  source 1..80: mol_type = other DNA
catcccccagaacacggcacagaacatccgtgccgtgtgtacgtccacgacgcccagaaaaaagatgcgtatgtggagat

SEQ ID NO: 29973 - DNA, 80 bp, synthetic construct
  source 1..80: mol_type = other DNA
gcacctgcccgggtccgaagttgacagttctctgctctccatgagcggtagtgcggtccgggtaacaccaccatcagggc

SEQ ID NO: 29974 - DNA, 80 bp, synthetic construct
  source 1..80: mol_type = other DNA
aaagtgtccttgtggagtgcaactgcggctccgctgtgtcagaaaccataaacactgcaaaatcatacagccaatgcacg

SEQ ID NO: 29975 - DNA, 80 bp, synthetic construct
  source 1..80: mol_type = other DNA
aaaacatcacaatgccgtgcgtaccgtctgcagaacgataagtgggtatacaattcggataaacttccaaaggcatcggg

SEQ ID NO: 29976 - DNA, 80 bp, synthetic construct
  source 1..80: mol_type = other DNA
agaaacgctgaaagggaaactgcacgtaccttatcttctttccgaagcgaagtgtaccgtacctttagcacccgagccaa

SEQ ID NO: 29977 - DNA, 80 bp, synthetic construct
  source 1..80: mol_type = other DNA
tagtaaccttcggctttcgattcgtatctttgaaattgcatccacggaatccgacgtatttgactacccgccagctagat

SEQ ID NO: 29978 - DNA, 80 bp, synthetic construct
  source 1..80: mol_type = other DNA
ggagaaccgaattacacccacgagctaatttcagaaccaacaattagaaattttacagtgactgagcatggatgggagta

SEQ ID NO: 29979 - DNA, 80 bp, synthetic construct
  source 1..80: mol_type = other DNA
tgtttggggtaatcatccgcctcagaggtactgggcacaagagacagctccaggcaacccgcatgggctgccgcacgaag

SEQ ID NO: 29980 - DNA, 80 bp, synthetic construct
  source 1..80: mol_type = other DNA
tgattactcattactatcacaggtacccaatgtccacgattctcggactatcgatttgcgctgcagtggtaaccacctca

SEQ ID NO: 29981 - DNA, 80 bp, synthetic construct
  source 1..80: mol_type = other DNA
atagccgcatccacctggctgttgtgcaagtcgagagtatcttgtttgactccgtatcgactgaccccgaatgctcagtt

SEQ ID NO: 29982 - DNA, 80 bp, synthetic construct
  source 1..80: mol_type = other DNA
acctgtgtgtctagccttcctgtgctgcgcgaggacagcccgtgcagagaccacatgggaatcactagaccatttatgga

SEQ ID NO: 29983 - DNA, 80 bp, synthetic construct
  source 1..80: mol_type = other DNA
gggattcttgtgctgcaaggtaacagatacgctcaacggggagagggtctcttttcccgtctgcacgtatgtgccagcga

SEQ ID NO: 29984 - DNA, 80 bp, synthetic construct
  source 1..80: mol_type = other DNA
gaatcaggtggggatcccgtataatacagtagtcaaccgcgcagggtacgcaccattggcaatcagcattattccaacca

SEQ ID NO: 29985 - DNA, 80 bp, synthetic construct
  source 1..80: mol_type = other DNA
agatacggctaattcctactttgaatttagaatatattacatgccactataagacaggattagattcacctttcattaaa

SEQ ID NO: 29986 - DNA, 80 bp, synthetic construct
  source 1..80: mol_type = other DNA
acacactgtacatagcaaataatctatagatcaaagggctacgtaacccctgaatagtaacaaaatacaaaatcactaaa

SEQ ID NO: 29987 - DNA, 80 bp, synthetic construct
  source 1..80: mol_type = other DNA
attgaatacagcagcaattggcaagctgcttacatagaactcgcggcgattggcatgccgctttaaaatttttattttat

SEQ ID NO: 29988 - DNA, 80 bp, synthetic construct
  source 1..80: mol_type = other DNA
ccacagaggggacacctgaacaaccaccacttgtaaccgaggatgagaccaggactagaacgcctgagccgatcatcatc

SEQ ID NO: 29989 - DNA, 80 bp, synthetic construct
  source 1..80: mol_type = other DNA
aaactcggggcaactcatattgacacattaattggcaataattggaagcttacataagcttaattcgacgaataattgga

SEQ ID NO: 29990 - DNA, 80 bp, synthetic construct
  source 1..80: mol_type = other DNA
ctgtgtatgataccgctgttgtagtggagagagtggccattccttgcacgagggtcgtacccgtgccggcaccacgcatt

SEQ ID NO: 29991 - DNA, 80 bp, synthetic construct
  source 1..80: mol_type = other DNA
acattgtatgtaggtgataatctatagatcaaagggctacgcaacccctgaatagtaacaaaatacaaaatcaataaaaa

SEQ ID NO: 29992 - DNA, 80 bp, synthetic construct
  source 1..80: mol_type = other DNA
cacagatgagggaattacccactttggactccgcagtattcaacgtggagtgtttcaaaaaattcgcatgcaaccaagaa

SEQ ID NO: 29993 - DNA, 80 bp, synthetic construct
  source 1..80: mol_type = other DNA
gccagccgagtgctggaagatcgtctgacaaaatccgcgtgcgcggccttcatcggcgacgacaacataatacatggagt

SEQ ID NO: 29994 - DNA, 80 bp, synthetic construct
  source 1..80: mol_type = other DNA
atggcgggcaagtgacacttgttccgccagtcgtctctaagctcttcctctgcattgcaagagtttaccactcagtatgt

SEQ ID NO: 29995 - DNA, 80 bp, synthetic construct
  source 1..80: mol_type = other DNA
accgtacgtaaagtgctgtggtacagctgaatgccgcacgcaggacaagcccgaatacaagtgtgcggtgttcacgggcg

SEQ ID NO: 29996 - DNA, 80 bp, synthetic construct
  source 1..80: mol_type = other DNA
tgtacccttttatgtggggaggtgcatactgtttctgtgattcggaaaacacacagatgagtgaagcctacgtggagcgc

SEQ ID NO: 29997 - DNA, 80 bp, synthetic construct
  source 1..80: mol_type = other DNA
gctgacgtgtgcaaacatgactatgcagccgcctaccgcgcccacactgcttccctcagagccaaaatcaaggtagcata

SEQ ID NO: 29998 - DNA, 80 bp, synthetic construct
  source 1..80: mol_type = other DNA
tggtactgtgaatcagactgtcgaggcgtatgtgaacggtgaccatgccgtaacgattgccgggacgaagtttatctttg

SEQ ID NO: 29999 - DNA, 80 bp, synthetic construct
  source 1..80: mol_type = other DNA
gtccggtgtcaacggcctggacaccgttcgatactaaaatcgtggtctataaaggggaggtatacaaccaggactttccc

SEQ ID NO: 30000 - DNA, 80 bp, synthetic construct
  source 1..80: mol_type = other DNA
ccgtatggtgccgggcagcctggaagatttggagacatccagagtaggacgttggacagtaaggacctatatgctaatac

SEQ ID NO: 30001 - DNA, 80 bp, synthetic construct
  source 1..80: mol_type = other DNA
gggccttaagctggcaagaccagcagccggcaacatccacgtcccctatacccagacaccatctggttttaaaacatggc

SEQ ID NO: 30002 - DNA, 80 bp, synthetic construct
  source 1..80: mol_type = other DNA
aaaaagacagggactcaccgctaaacgctaaggcaccctttggatgtacaatccagacaaatccggtcagagcgatgaat

SEQ ID NO: 30003 - DNA, 80 bp, synthetic construct
  source 1..80: mol_type = other DNA
gtctgcacgtatgtgccatcaacgatctgtgaccagatgacaggcattctggcgactgaggtcacgcctgaggatgcgca

SEQ ID NO: 30004 - DNA, 80 bp, synthetic construct
  source 1..80: mol_type = other DNA
tgcgctgtcggcaacatacccgtttcgatggatatcgccgacagcgcattcactagactgactgatgcgcctataatatc

SEQ ID NO: 30005 - DNA, 80 bp, synthetic construct
  source 1..80: mol_type = other DNA
agagttgacgtgcactgtgtctacatgcacgcactcatcggattttggcgggatcgctgtactttcttacaaggtggaaa

SEQ ID NO: 30006 - DNA, 80 bp, synthetic construct
  source 1..80: mol_type = other DNA
aagctggcaggtgcgacgtccattcgcactcgaacgttgcggtactccaggaagttttcatcgaggcagaaggtcgatca

SEQ ID NO: 30007 - DNA, 80 bp, synthetic construct
  source 1..80: mol_type = other DNA
gtgatccacttttcgaccgcatcagccgccccttccttcatagtatccgtctgcagctcacgtgccacgtgcacagcgaa

SEQ ID NO: 30008 - DNA, 80 bp, synthetic construct
  source 1..80: mol_type = other DNA
atgtgaaccaccgaaagaccatgtggtcacctatccggcgaatcacaacgggataattttgccggacttatccagcactg

SEQ ID NO: 30009 - DNA, 80 bp, synthetic construct
  source 1..80: mol_type = other DNA
caatgacttgggcgcaacatcttgccggtggagttgggctattgatagctctggcggtgctaattctagtaatagttact

SEQ ID NO: 30010 - DNA, 80 bp, synthetic construct
  source 1..80: mol_type = other DNA
tgcataactttgagaaggtgaatcataagtaccgtgcataatgcggacaactatattattatccttatacttaaccatca

SEQ ID NO: 30011 - DNA, 80 bp, synthetic construct
  source 1..80: mol_type = other DNA
tcatacatattaaccagcccaatactatgttacacaatattaacaatattaatatatactaatatcaattatattattac

SEQ ID NO: 30012 - DNA, 80 bp, synthetic construct
  source 1..80: mol_type = other DNA
atattacttatatgagctcgttaacgacgcatatacaatttattatatttttctttattttttttatatgtgccactata

SEQ ID NO: 30013 - DNA, 80 bp, synthetic construct
  source 1..80: mol_type = other DNA
tttttctttattttttttatatgtgccactatagggcacctactaaccatagaagtaattcattttgtttttaatatttc

SEQ ID NO: 30014 - DNA, 80 bp, synthetic construct
  source 1..80: mol_type = other DNA
aaaattgcttgtcggattaaaccagaggatcgtcgtgaatgggaggacccagaggaacactaatacaatgaagaattatt

SEQ ID NO: 30015 - DNA, 80 bp, synthetic construct
  source 1..80: mol_type = other DNA
tgctaccggtggtgtcgcaggcattcagtaagtgggcgaaagagtatcggcttgaccaagaagatgagaaaaacatgggt

SEQ ID NO: 30016 - DNA, 80 bp, synthetic construct
  source 1..80: mol_type = other DNA
atgcgcgaacgcaccctgacttgctgctgcctgtgggcctttaagatccataagaatcacaccatgtataagaagccgga

SEQ ID NO: 30017 - DNA, 80 bp, synthetic construct
  source 1..80: mol_type = other DNA
cacgcaaacaattgtcaaggtcccgtcggagttcaactcctttgtaattcccagcctatggtccgcagggttgtcgatag

SEQ ID NO: 30018 - DNA, 80 bp, synthetic construct
  source 1..80: mol_type = other DNA
gaatcagacaccgaattaggcttcttctgcagtcaagacgagtcgagccactcgttccatccatggacgtaggcgaggcc

SEQ ID NO: 30019 - DNA, 80 bp, synthetic construct
  source 1..80: mol_type = other DNA
agagcagcagagagggaagctgctgaagctaaggaagcagaagataccctagcagccttaccaccgctgattccgaccgc

SEQ ID NO: 30020 - DNA, 80 bp, synthetic construct
  source 1..80: mol_type = other DNA
tccagtactcgatgacatacccgaggtggatgtggaagagttggagtttcgagcgggagccggtgttgtcgagacaccca

SEQ ID NO: 30021 - DNA, 80 bp, synthetic construct
  source 1..80: mol_type = other DNA
ggaacgcccttaaagtcacaccccaagacagagacaccatggttggtagttatcttgtcctgtctcctcagactgtcctt

SEQ ID NO: 30022 - DNA, 80 bp, synthetic construct
  source 1..80: mol_type = other DNA
aaaagtgttaaactgcaggcattgcatcctttagcggagagcgtaaaaatcatcacccacaaaggccgtgcagggcgcta

SEQ ID NO: 30023 - DNA, 80 bp, synthetic construct
  source 1..80: mol_type = other DNA
ccaagtggatgcctatgacggccgtgttttaatccccacaggcgccgctatcccggtacccgatttccaggctctaagtg

SEQ ID NO: 30024 - DNA, 80 bp, synthetic construct
  source 1..80: mol_type = other DNA
agagtgcgactatggtgtacaacgaacgtgagttcatcaatcgcaaattgtaccacatagccgtacatggggcggcactg

SEQ ID NO: 30025 - DNA, 80 bp, synthetic construct
  source 1..80: mol_type = other DNA
aataccgatgaggagggttacgagaaagtgcgggccgaaaggacagatgccgaatacgtctttgacgtggatcgcaaaca

SEQ ID NO: 30026 - DNA, 80 bp, synthetic construct
  source 1..80: mol_type = other DNA
gtgcgttaagagggaggatgccgagggtctcgtgatgatcggagacctggtcaaccctccattccacgaatttgcgtatg

SEQ ID NO: 30027 - DNA, 80 bp, synthetic construct
  source 1..80: mol_type = other DNA
ctactaaattgatagagcaagagaccgaaaaagacacactcatcctggatatcggcagtgcgcctgccaggagaatgatg

SEQ ID NO: 30028 - DNA, 80 bp, synthetic construct
  source 1..80: mol_type = other DNA
aaggactgaaacgtagaccagcggctccatacaaaacaactgtggtcggagtcttcggcgtgcctggatctggaaaatcg

SEQ ID NO: 30029 - DNA, 80 bp, synthetic construct
  source 1..80: mol_type = other DNA
ggtataatcaaaagcctggtcacacgtgcagacttggtcaccagtggaaagagagaaaactgtcaggagatcatgcttga

SEQ ID NO: 30030 - DNA, 80 bp, synthetic construct
  source 1..80: mol_type = other DNA
cgtcaagagatacagagacctggacatcactgcaaagacggtggattccgtattgttgaatggcgttaagcagactgtcg

SEQ ID NO: 30031 - DNA, 80 bp, synthetic construct
  source 1..80: mol_type = other DNA
atgtcttgtacgtcgatgaagctttcgcttgccatgcagggacactgctagcgcttatcgccacggtacgaccacgtaag

SEQ ID NO: 30032 - DNA, 80 bp, synthetic construct
  source 1..80: mol_type = other DNA
aaggttgtgctttgcggcgacccaaaacagtgcggtttcttcaacttgatgcaactacaggtcaatttcaatcacaacat

SEQ ID NO: 30033 - DNA, 80 bp, synthetic construct
  source 1..80: mol_type = other DNA
ctgcaccgaggtgcatcataagagcatctccagaagatgcacgctaccaatcaccgccattgtctcaacattacattatg

SEQ ID NO: 30034 - DNA, 80 bp, synthetic construct
  source 1..80: mol_type = other DNA
agggcaaaatgcgcaccactaacccatacaataaacctgttattattgacaccacaggccagactaaaccaaaccgcgag

SEQ ID NO: 30035 - DNA, 80 bp, synthetic construct
  source 1..80: mol_type = other DNA
gacattgtgttaacatgtttccgcggttgggtcaaacagctgcaacttgactatcgtgggcacgaagtcatgacagccgc

SEQ ID NO: 30036 - DNA, 80 bp, synthetic construct
  source 1..80: mol_type = other DNA
tgcatcccaggggttgacccgaaagggcgtgtacgccgtccgaatgaaggtcaacgaaaacccactgtacgcacaatcat

SEQ ID NO: 30037 - DNA, 80 bp, synthetic construct
  source 1..80: mol_type = other DNA
cggagcatgttaatgttctactgacacgcacagagggcagactagtgtggaagacactgtcaggagatccctggatcaaa

SEQ ID NO: 30038 - DNA, 80 bp, synthetic construct
  source 1..80: mol_type = other DNA
tctgagcacacgtaccactgtgtgtgcccaatgcgcagcgctgaggacccagagcgtctgctgtattatgccaggaagtt

SEQ ID NO: 30039 - DNA, 80 bp, synthetic construct
  source 1..80: mol_type = other DNA
actttgagcaacatcccaaaagggaatttcacagcaactttggaagattggcaacaagagcacgacgccattatgagggc

SEQ ID NO: 30040 - DNA, 80 bp, synthetic construct
  source 1..80: mol_type = other DNA
aataacgcaggaagcagctcctttggacgtgttccaaaataaggctaaggtgtgttgggccaagtgtttggtacccgttt

SEQ ID NO: 30041 - DNA, 80 bp, synthetic construct
  source 1..80: mol_type = other DNA
tggaaaccgcggggatcaaactgtcagccactgattggagtgcgattattttggccttcaaagaagacagagcttattca

SEQ ID NO: 30042 - DNA, 80 bp, synthetic construct
  source 1..80: mol_type = other DNA
ccagaggttgcactgaatgagatctgcacaaaagtctacggagtggacttagacagtggtctgttctcggctccgcgtgt

SEQ ID NO: 30043 - DNA, 80 bp, synthetic construct
  source 1..80: mol_type = other DNA
gtcgctgcattatactacgaatcactgggataactcaccaggaggaagaatgtacggattctctgttgaggctgccaacc

SEQ ID NO: 30044 - DNA, 80 bp, synthetic construct
  source 1..80: mol_type = other DNA
gtctggaacaacaacacccattctataggggacggtgggcttcagggcaggtgctggtcgcggaacggaaaacacagccg

SEQ ID NO: 30045 - DNA, 80 bp, synthetic construct
  source 1..80: mol_type = other DNA
atcgacgtcacctgcaatctaatcccttttaacaggagactaccgcacacgctggtcacggagtaccatccaatcaaagg

SEQ ID NO: 30046 - DNA, 80 bp, synthetic construct
  source 1..80: mol_type = other DNA
tgaaagagtagagtggcttgtgaacaagatcccgggttaccacgtgctgttggttagtgagtacaacctcatcttgccga

SEQ ID NO: 30047 - DNA, 80 bp, synthetic construct
  source 1..80: mol_type = other DNA
ggagaaaggtgacgtggatcgctccgccgactgtaacaggagctgacctaacatatgacttagatctaggactaccgcct

SEQ ID NO: 30048 - DNA, 80 bp, synthetic construct
  source 1..80: mol_type = other DNA
aatgctggcaggtatgacctagtcttcgtcaacatgcatacaccgtacaggctccatcactaccaacaatgcgtcgatca

SEQ ID NO: 30049 - DNA, 80 bp, synthetic construct
  source 1..80: mol_type = other DNA
ggccaaggcatcaggagaagtcgttgacagaaacatcgcagcgaagatagacgacctgcagtcagtgatggcgaccccgg

SEQ ID NO: 30050 - DNA, 80 bp, synthetic construct
  source 1..80: mol_type = other DNA
cgccatgaaattacagatgctgggcggcgacgcactctacctgttgaaacccgggggaagcctccttttgagagcctacg

SEQ ID NO: 30051 - DNA, 80 bp, synthetic construct
  source 1..80: mol_type = other DNA
cgtacgctgacagaacgagtgaggctgtggtgacggctctcgctcgtcggttctcgtcatttagagccgtcacggtccgg

SEQ ID NO: 30052 - DNA, 80 bp, synthetic construct
  source 1..80: mol_type = other DNA
tgtgtgactagtaacaccgaggtgttcttgctgttctcgaactttgacaatggtagaagaacagtaaccctgcatcctac

SEQ ID NO: 30053 - DNA, 80 bp, synthetic construct
  source 1..80: mol_type = other DNA
aaatggtaagctatcatcaatctatgcaggtacagtgctgcaggcggctggctgtgctcccgcttatgccgttaaaaggg

SEQ ID NO: 30054 - DNA, 80 bp, synthetic construct
  source 1..80: mol_type = other DNA
cagacatcgcgaccgccattgaggatgcggtggtcaatgcagctaaccaccgtggacaagtgggcgacggtgtctgcagg

SEQ ID NO: 30055 - DNA, 80 bp, synthetic construct
  source 1..80: mol_type = other DNA
gcggtagcacggaaatggcctcaagccttccgtaacgcagcgacacctgtcggaaccgcaaaaaccgtcaagtgcgacga

SEQ ID NO: 30056 - DNA, 80 bp, synthetic construct
  source 1..80: mol_type = other DNA
gacttacatcatccatgcggtgggtccaaattttaacaacacatctgaggctgaggtggatcgtgacttggcggcggcgt

SEQ ID NO: 30057 - DNA, 80 bp, synthetic construct
  source 1..80: mol_type = other DNA
acagagccgtagcagcggagattaaccgactgtctataagtagtgtggcgattccactgctttccacaggtatattcagt

SEQ ID NO: 30058 - DNA, 80 bp, synthetic construct
  source 1..80: mol_type = other DNA
gcaggaaaagatagagtgcatcagtcgctctcgcatctgttggcggcaatggacactactgaagcacgggttaccatcta

SEQ ID NO: 30059 - DNA, 80 bp, synthetic construct
  source 1..80: mol_type = other DNA
ctgccgcgataaaacgtgggagcaaaagatcaaaacagttctgcagaatcgctgcgccactgaactggtgtctgatgagc

SEQ ID NO: 30060 - DNA, 80 bp, synthetic construct
  source 1..80: mol_type = other DNA
acaatgagtcacggacattttgccttcacacagatcagacatgcaggactccagcagaggtggcagtctatcaggatgtt

SEQ ID NO: 30061 - DNA, 80 bp, synthetic construct
  source 1..80: mol_type = other DNA
tacagcttgaagtcaatttgaccagagtccatccggatagtagcctggtgggacgtccagggtacagtaccactgatggg

SEQ ID NO: 30062 - DNA, 80 bp, synthetic construct
  source 1..80: mol_type = other DNA
accttatattcctatatggaaggtactaagttccaccaagcggctctggacatggctgagatcacgactttgtggccgag

SEQ ID NO: 30063 - DNA, 80 bp, synthetic construct
  source 1..80: mol_type = other DNA
agttcaggatgcaaatgaacacatttgcatgtatgcactgggcgagacgatggataatattcgtgccagatgcccagttg

SEQ ID NO: 30064 - DNA, 80 bp, synthetic construct
  source 1..80: mol_type = other DNA
aggatagtgactcatcgactccaccaaagacggtcccatgcctgtgtcggtacgctatgacaccagagagagttacaaga

SEQ ID NO: 30065 - DNA, 80 bp, synthetic construct
  source 1..80: mol_type = other DNA
ctacggatgcaccacacaaaagatttcgtggtttgctcgtcttttcagctgccaaagtatcgtatacctggcgtgcaacg

SEQ ID NO: 30066 - DNA, 80 bp, synthetic construct
  source 1..80: mol_type = other DNA
agtgaagtgtgagaaagtaatgctttttgatgcagctccaccagcctccgtcagtccagtgcagtacctgacaaaccaaa

SEQ ID NO: 30067 - DNA, 80 bp, synthetic construct
  source 1..80: mol_type = other DNA
gtgaaactaccataagtttgagttcattttcaattacgtctgacagcagctccctcagcacttttcctgatctggagtca

SEQ ID NO: 30068 - DNA, 80 bp, synthetic construct
  source 1..80: mol_type = other DNA
gcggaagaacttgaccatgactctcagtccgtgcggccagcgctgaatgaacccgatgaccatcaacctacgccaacggc

SEQ ID NO: 30069 - DNA, 80 bp, synthetic construct
  source 1..80: mol_type = other DNA
agaacttgccactcatcccgtaccaccgcctcgccctaaccgtgcaaggcggttggcggccgctcgtgtgcaagtccagg

SEQ ID NO: 30070 - DNA, 80 bp, synthetic construct
  source 1..80: mol_type = other DNA
tggaagtacatcaaccaccttccaaccaaccaacgaagccaatcccagcaccacgtaccagcctacgccccgtcccagct

SEQ ID NO: 30071 - DNA, 80 bp, synthetic construct
  source 1..80: mol_type = other DNA
cctagaagatacgtgccaagaccggtggtcgagttaccctggccgcaggagaccgtcgacgtagagttcggggcgccgac

SEQ ID NO: 30072 - DNA, 80 bp, synthetic construct
  source 1..80: mol_type = other DNA
cgaagaggagagcgatatcactttcggtgacttctccgcctcggagtgggaaaccattagtaattcatcctgactaggcc

SEQ ID NO: 30073 - DNA, 80 bp, synthetic construct
  source 1..80: mol_type = other DNA
gagcgggggcttatatcttctcatcagacgtcggtccagggcatctgcaacagaaatcagtgagacaacacgatctggag

SEQ ID NO: 30074 - DNA, 80 bp, synthetic construct
  source 1..80: mol_type = other DNA
gtgccgattatggatcgcgtagttgaggagaaagtctacccgccgaaatttgatgaggcaaaagagaaacagttgctcct

SEQ ID NO: 30075 - DNA, 80 bp, synthetic construct
  source 1..80: mol_type = other DNA
aaaactgcagatgcatgccacagatgccaaccggagccggtaccaatcaaggaaagttgagaacatgaaagcaacgatca

SEQ ID NO: 30076 - DNA, 80 bp, synthetic construct
  source 1..80: mol_type = other DNA
ttgaccggctgaaacagggcagcgcatcttacatctcggctgaggctgacaaagcagtcacataccatgttaaatatgct

SEQ ID NO: 30077 - DNA, 80 bp, synthetic construct
  source 1..80: mol_type = other DNA
aagcctcggtactctgtgccggtgatgcaaagacttagcagtgcaaccaccgcagttgcagcttgcaatgaattcctggc

SEQ ID NO: 30078 - DNA, 80 bp, synthetic construct
  source 1..80: mol_type = other DNA
ccggaactaccctacagtggcgtcctaccagattacggatgaatatgacgcatacttggatatggtagacgggtccgaga

SEQ ID NO: 30079 - DNA, 80 bp, synthetic construct
  source 1..80: mol_type = other DNA
gctgcttggacagagcaaatttttgtccagcgaagctgcgctgctacccaaaacatcatgcatatcacatgcctcagatc

SEQ ID NO: 30080 - DNA, 80 bp, synthetic construct
  source 1..80: mol_type = other DNA
cgatactaccccgttcatgttcgatacaatggccggggcttatccaacatatgcaaccaactgggccgacgaacaggtgt

SEQ ID NO: 30081 - DNA, 80 bp, synthetic construct
  source 1..80: mol_type = other DNA
agaagtgctgttccctcgccattccaaaatacactgcagaacgtcttggcagctgccaccaagcgtaactgtaatgttac

SEQ ID NO: 30082 - DNA, 80 bp, synthetic construct
  source 1..80: mol_type = other DNA
gcagatgcgtgaattaccaactctggactcagccgtgtacaatgtagaatgcttccgtaagtacgcttgcaacaacgaat

SEQ ID NO: 30083 - DNA, 80 bp, synthetic construct
  source 1..80: mol_type = other DNA
attgggaagagtttgctaaaaaacctattaggatcacaacagaaaacctgactacctacgtgactaaattaaaaggggga

SEQ ID NO: 30084 - DNA, 80 bp, synthetic construct
  source 1..80: mol_type = other DNA
aaggcggctgctttgtttgcaaagacccacaacttagttccactgcaggaagttccaatggatagatttgtcatggacat

SEQ ID NO: 30085 - DNA, 80 bp, synthetic construct
  source 1..80: mol_type = other DNA
gaagcgggacgtgaaggtcacacccgggacgaagcacacagaggaacgaccaaaggtccaagtgattcaagctgccgagc

SEQ ID NO: 30086 - DNA, 80 bp, synthetic construct
  source 1..80: mol_type = other DNA
ctctggctaccgcctacctgtgtggaattcacagagaactggttcgccggctcaatgctgtgttgctacctaacatccat

SEQ ID NO: 30087 - DNA, 80 bp, synthetic construct
  source 1..80: mol_type = other DNA
accctgtttgacatgtctgctgaagattttgatgccatcatatcagagcacttcaagccaggggaccatgtcttggaaac

SEQ ID NO: 30088 - DNA, 80 bp, synthetic construct
  source 1..80: mol_type = other DNA
ggacatcgcttcttttgacaaaagccaggacgattcactggcactaacagggctgatgatactggaagatttgggcgtcg

SEQ ID NO: 30089 - DNA, 80 bp, synthetic construct
  source 1..80: mol_type = other DNA
acaaccagttattggatcttatcgaggctgcgtttggtcagattaccagctgccaccttcctacagggactaggttcaaa

SEQ ID NO: 30090 - DNA, 80 bp, synthetic construct
  source 1..80: mol_type = other DNA
tttggtgctatgatgaagtcaggcatgtttcttacattgttcattaacaccgttttgaacattaccattgccagcagagt

SEQ ID NO: 30091 - DNA, 80 bp, synthetic construct
  source 1..80: mol_type = other DNA
tgaaagccaggaacataggactatgctccgcggcactgactgagggacaccttggcaagctatcaataatgaggaagaag

SEQ ID NO: 30092 - DNA, 80 bp, synthetic construct
  source 1..80: mol_type = other DNA
gctggaagccagattaactaactcagcctgtgccgcatttatcggcgacgacaacgtggttcacggagtcgtctccgata

SEQ ID NO: 30093 - DNA, 80 bp, synthetic construct
  source 1..80: mol_type = other DNA
aactgatggcagatagatgtgccacatgggttaacatggaggttaaaataatagatgcagtcatgtgcataaaaccaccc

SEQ ID NO: 30094 - DNA, 80 bp, synthetic construct
  source 1..80: mol_type = other DNA
ttttgtggaggtttcctggtttatgaccatgttacaaggacagcatgccgcatagcagacccattaaaaaggttattcaa

SEQ ID NO: 30095 - DNA, 80 bp, synthetic construct
  source 1..80: mol_type = other DNA
attgggcaaacctctgccggcagatgactgccaagatgaagaccgccgtagggcattgcacgacgaagttaaaaaatggt

SEQ ID NO: 30096 - DNA, 80 bp, synthetic construct
  source 1..80: mol_type = other DNA
ttagatcaggcttgggttcggagatcgaggtcgccctagcctccagatataggttggagggcagctataatctgttgttg

SEQ ID NO: 30097 - DNA, 80 bp, synthetic construct
  source 1..80: mol_type = other DNA
gctatgtccacctttgcacacagtatgaagaatttttctgcattgaggggacccgtcatacacttgtacggcggtcctaa

SEQ ID NO: 30098 - DNA, 80 bp, synthetic construct
  source 1..80: mol_type = other DNA
ataggtgctctacacgacacctataccaccatggatttcctaccaacacaagtgttttatggcaggcgttggagaccacg

SEQ ID NO: 30099 - DNA, 80 bp, synthetic construct
  source 1..80: mol_type = other DNA
aatgccaccacgcccttggaggccacgcccgcctacaattcaaagaccagatcaacaggcccgacaaatgcagcagttga

SEQ ID NO: 30100 - DNA, 80 bp, synthetic construct
  source 1..80: mol_type = other DNA
ttgctgcggtcagtacgcttgcccttaggcaaaacgctgctgcccctcagcgtggaagaaagaagcaaccacgtagaaag

SEQ ID NO: 30101 - DNA, 80 bp, synthetic construct
  source 1..80: mol_type = other DNA
aaaccaaaaccacaacccgagaaacctaagaagcaggagcagaaaccgaagcaaaagaagacccctaaacgaaagcccgg

SEQ ID NO: 30102 - DNA, 80 bp, synthetic construct
  source 1..80: mol_type = other DNA
agaatgaaaccgagtgaccagataatgttctcggtaggttccacattgtatacggaaagccgacgtctgctaaagagttg

SEQ ID NO: 30103 - DNA, 80 bp, synthetic construct
  source 1..80: mol_type = other DNA
gaggagggagcgcatgtgcatgaagattgagcacgattgcatctttgaggtcaagcacgaaggaaaggtcacaggttatg

SEQ ID NO: 30104 - DNA, 80 bp, synthetic construct
  source 1..80: mol_type = other DNA
cctgccttgtcggtgacaaggtaatgaagccggcacacgtccctggagtgatagacaacatcgatctcgcacgtctatcg

SEQ ID NO: 30105 - DNA, 80 bp, synthetic construct
  source 1..80: mol_type = other DNA
tataagaaatctagtaagtatgacctggaatgtgcgcaaataccggtggctatgaagtcagatgcatcgaaatacaccca

SEQ ID NO: 30106 - DNA, 80 bp, synthetic construct
  source 1..80: mol_type = other DNA
tgaaaaacccgaaggtcactataactggcactatggggctgtccagtacacaggaggcagattcacggtgcccacaggag

SEQ ID NO: 30107 - DNA, 80 bp, synthetic construct
  source 1..80: mol_type = other DNA
cgaaagtctttgtagatatcgaggccgagagcccgtttttaaaatcactacagagagcgtttccagcatttgaagtggaa

SEQ ID NO: 30108 - DNA, 80 bp, synthetic construct
  source 1..80: mol_type = other DNA
tgggtaagcctggcgacagcggccggcccatctttgacaacaagggccgcgttgtcgcaatagtgctaggaggagctaat

SEQ ID NO: 30109 - DNA, 80 bp, synthetic construct
  source 1..80: mol_type = other DNA
tcacaccggaaggcacagaggagtgggcagctccgacagtgacagctatgtgccttctggcgaatgtatccttcccttgt

SEQ ID NO: 30110 - DNA, 80 bp, synthetic construct
  source 1..80: mol_type = other DNA
ttccaaccgagctgctctccatgctgttatgaaaaggggcctgagccgacgctgagaatgctggaagagaacgtaaattc

SEQ ID NO: 30111 - DNA, 80 bp, synthetic construct
  source 1..80: mol_type = other DNA
agagggatactatgaactgttgcatgctgccgtgtactgcaaaaacagttcaaggtcgaagagaagcactgcaaatcatt

SEQ ID NO: 30112 - DNA, 80 bp, synthetic construct
  source 1..80: mol_type = other DNA
ttaatgcgtataagttgacccgtccatatgtggcttactgcgcagactgcggtatgggtcattcttgccacagcccagcc

SEQ ID NO: 30113 - DNA, 80 bp, synthetic construct
  source 1..80: mol_type = other DNA
atgatcgaaaatattcaggcggatgctacagacggcacgttaaagattcagttcgcttctcaaattggcctaacgaaaac

SEQ ID NO: 30114 - DNA, 80 bp, synthetic construct
  source 1..80: mol_type = other DNA
gcatctaccatcagtgttccatctgaaaggacgacaatcgtatacgtgccggtgcgatacaatagtgtcatgtgagggct

SEQ ID NO: 30115 - DNA, 80 bp, synthetic construct
  source 1..80: mol_type = other DNA
ggacacgcatgatcacacaaagattagatatgcagaagggcatgatatagcggaggctgccagatcaacccttaaggtac

SEQ ID NO: 30116 - DNA, 80 bp, synthetic construct
  source 1..80: mol_type = other DNA
acagtagcagtgagtgcacggtgacaggaacgatgggacacttcatcttggccaaatgtccaccaggcgaagtcattagt

SEQ ID NO: 30117 - DNA, 80 bp, synthetic construct
  source 1..80: mol_type = other DNA
gtctcatttgttgattcaaaaaatgaacagcggacctgtcggatagcctaccgccatgaacagaggctaatagggcgtga

SEQ ID NO: 30118 - DNA, 80 bp, synthetic construct
  source 1..80: mol_type = other DNA
aagattcacggtgcgaccacatcacgggatcgagctaccttgcaccacttaccagctaacgaccgccgaaacctctgaag

SEQ ID NO: 30119 - DNA, 80 bp, synthetic construct
  source 1..80: mol_type = other DNA
agatagacatgcacatgccgccagacgttccggacagaactattctttcccagcaatcaggaaatgttaagataacggtg

SEQ ID NO: 30120 - DNA, 80 bp, synthetic construct
  source 1..80: mol_type = other DNA
aatggacgaaccgtcaggtacagctcttcttgcggttcccaagccgtcgggacaacaaccacagacaagactatcaatag

SEQ ID NO: 30121 - DNA, 80 bp, synthetic construct
  source 1..80: mol_type = other DNA
ctgcaccgttgacaaatgccaggcatatgtcacgagccacacaaaatggcaattcaattcaccttttgtcccacgtcgga

SEQ ID NO: 30122 - DNA, 80 bp, synthetic construct
  source 1..80: mol_type = other DNA
tgcaagcagagcgcaagggcaaagtgcatatcccctttccccttattaacaccacctgccgtgtaccgctggctcccgag

SEQ ID NO: 30123 - DNA, 80 bp, synthetic construct
  source 1..80: mol_type = other DNA
gcccttgttaggagcggtaaacgcgaagctacactttcattgcaccctatccaccccacattgctaagttacagaacatt

SEQ ID NO: 30124 - DNA, 80 bp, synthetic construct
  source 1..80: mol_type = other DNA
tggagcggagcgggtctttgacgagcagtggatcaccacccagacggaggtaacaatcccagtaccagtggagggagtgg

SEQ ID NO: 30125 - DNA, 80 bp, synthetic construct
  source 1..80: mol_type = other DNA
agtatcggtggggcaaccataaaccgcaacgttttgtggtcgcactgacgactgaaggcagagcccatggctggccccat

SEQ ID NO: 30126 - DNA, 80 bp, synthetic construct
  source 1..80: mol_type = other DNA
gagattattgagtactactacgggctgcatcctacgacaaccattgtcgtggtggttgctgtctcagtagtggtgctctt

SEQ ID NO: 30127 - DNA, 80 bp, synthetic construct
  source 1..80: mol_type = other DNA
gtcagttgccgcctcggtctacatgtgcgtggtagcacgaaccaaatgtctgacaccatatgcactcaccccgggggccg

SEQ ID NO: 30128 - DNA, 80 bp, synthetic construct
  source 1..80: mol_type = other DNA
ttgtccctgtcactatcggggtgctgtgttgtgcaccgaaagcgcatgcagctagctttgctgaaggcatggcctatctg

SEQ ID NO: 30129 - DNA, 80 bp, synthetic construct
  source 1..80: mol_type = other DNA
tgggataataaccagtcaatgttctggatggagttgactggacctttggctcttcttatcctgactacatgttgcgcccg

SEQ ID NO: 30130 - DNA, 80 bp, synthetic construct
  source 1..80: mol_type = other DNA
atcactactttcctgctgcaagggctcttttttagtcgcagtgagcgtcgggagtgccgttgccagtgcttacgagcaca

SEQ ID NO: 30131 - DNA, 80 bp, synthetic construct
  source 1..80: mol_type = other DNA
acgccgtcacacatcacgcagaaggattcctggtgtgtaaaaccacagacacaatcgccggagaacgagtttcgttcccc

SEQ ID NO: 30132 - DNA, 80 bp, synthetic construct
  source 1..80: mol_type = other DNA
cggcagtcattccaaatcaagtgggattcccgtataaggctcatgttgcacgtgaaggatacagcccgctgacactgcag

SEQ ID NO: 30133 - DNA, 80 bp, synthetic construct
  source 1..80: mol_type = other DNA
atgcaggtgattgaaaccagtcttgagccaacgctcaacctggagtacatcacttgtgaatacaagacaaaggtcccatc

SEQ ID NO: 30134 - DNA, 80 bp, synthetic construct
  source 1..80: mol_type = other DNA
acccacagaggggacacctgaacaaccgacactcataaccgtggatgaaaccagaaccagaacgcccgaaccaattatta

SEQ ID NO: 30135 - DNA, 80 bp, synthetic construct
  source 1..80: mol_type = other DNA
ataataaccacctacaattttctttattttctttattttaaccatagaagtaattcattttgtttttaatatttcaaaaa

SEQ ID NO: 30136 - DNA, 80 bp, synthetic construct
  source 1..80: mol_type = other DNA
attaaaaggtggaaaggcagctgccctgtttgcaaagacgcataacttagttccactgcaggaagttccaatggatagat

SEQ ID NO: 30137 - DNA, 80 bp, synthetic construct
  source 1..80: mol_type = other DNA
gagcgtttggtgacatccaggctaggacaatatctagttccgatgtatacgccaacacaaaccttgtgctgcagagaccg

SEQ ID NO: 30138 - DNA, 80 bp, synthetic construct
  source 1..80: mol_type = other DNA
aaagccggagcgatccatgttccgtacacccaggccccatcgggttatgaacaatggaagaaagacaaaccaccatctct

SEQ ID NO: 30139 - DNA, 80 bp, synthetic construct
  source 1..80: mol_type = other DNA
agaattagcagcgattggcatgctgcttgtaaagttttattacaaataatgtgcggcaattggcgagccgctttaattag

SEQ ID NO: 30140 - DNA, 80 bp, synthetic construct
  source 1..80: mol_type = other DNA
gtgattacgcattactatcacaggtatcccatgtccaccattttaggcttatcaatctgtgcggcgatagtgacgacatc

SEQ ID NO: 30141 - DNA, 80 bp, synthetic construct
  source 1..80: mol_type = other DNA
cattgcagcatccgtatggcttttttgcaaatcacggattttctgcctgaccccctatcgcttgactccaaatgcccgca

SEQ ID NO: 30142 - DNA, 80 bp, synthetic construct
  source 1..80: mol_type = other DNA
tgcctttgtgcttagccgtcttgtgctgcgcacgcacagccaaagccgaaactacttgggaatccctagatcacctctgg

SEQ ID NO: 30143 - DNA, 80 bp, synthetic construct
  source 1..80: mol_type = other DNA
aatcacaaccagcagatgttttggagtcagctgctgatcccgctagcagcactgatagttgctacccgcttgctgaaatg

SEQ ID NO: 30144 - DNA, 80 bp, synthetic construct
  source 1..80: mol_type = other DNA
aaccatattaacattcaattttatatcacatcacatattcaattttaaaatttctatacgcgtctctaatggcgcatata

SEQ ID NO: 30145 - DNA, 80 bp, synthetic construct
  source 1..80: mol_type = other DNA
ataaccacttacaattttctttattttctttatttgtgccactatagggcacttactaaccatagaagtaattcattttg

SEQ ID NO: 30146 - DNA, 80 bp, synthetic construct
  source 1..80: mol_type = other DNA
gaatagtaacaaaacacaaaaattacaaaatatgtagttcaaagggctatactacccctgattagcaacaaaatagaaaa

SEQ ID NO: 30147 - DNA, 80 bp, synthetic construct
  source 1..80: mol_type = other DNA
aactggtatggaagacactttccggtgacccgtggataaagacgctgcagaacccaccgaaaggaaacttcaaagcaact

SEQ ID NO: 30148 - DNA, 80 bp, synthetic construct
  source 1..80: mol_type = other DNA
gcaatagctctgagtccctccacctctcttttggtggggtatccatgtccctcggatcaattttcgacggagagacggcc

SEQ ID NO: 30149 - DNA, 80 bp, synthetic construct
  source 1..80: mol_type = other DNA
cgccaggcagcggtacaacccctggcaacaggccccacggatgtgcctatgtctttcggatcgttttccgacggagagat

SEQ ID NO: 30150 - DNA, 80 bp, synthetic construct
  source 1..80: mol_type = other DNA
atgggcggcgcatgagagaagcccacaccaattacctacccaaaatggagaaagttcacgttgacatcgaggaagacagc

SEQ ID NO: 30151 - DNA, 80 bp, synthetic construct
  source 1..80: mol_type = other DNA
acaggggtttacccgttcatgtggggaggcgcatattgcttttgcgacactgagaacacccaagtcagcaaggcctacgt

SEQ ID NO: 30152 - DNA, 80 bp, synthetic construct
  source 1..80: mol_type = other DNA
tcaccgtgggagaacactccattgtgaccactgtgtatgtgaatggagaaactcctgtaaacttcaatggggtcaaatta

SEQ ID NO: 30153 - DNA, 80 bp, synthetic construct
  source 1..80: mol_type = other DNA
ccttttgaccgcaaaatcgtgcagtatgccggggagatctataattacgattttcctgagtatggggcaggacaaccagg

SEQ ID NO: 30154 - DNA, 80 bp, synthetic construct
  source 1..80: mol_type = other DNA
aagcaggagcgatccatgtgccatacactcaggcgccatcgggttttgagcaatggaagaaagataaagctccgtcattg

SEQ ID NO: 30155 - DNA, 80 bp, synthetic construct
  source 1..80: mol_type = other DNA
atccccgacgccttgttcaccagggtgtcagaaacaccgacactttcagcggccgaatgcactcttaatgagtgcgtgta

SEQ ID NO: 30156 - DNA, 80 bp, synthetic construct
  source 1..80: mol_type = other DNA
tcaggctccaaatatgcacatcatatgtcacgtgcaaaggtgattgtcaccccccgagagaccacattgtgacacacccc

SEQ ID NO: 30157 - DNA, 80 bp, synthetic construct
  source 1..80: mol_type = other DNA
tcgcggcgattggcatgccgctttaaaattttattttattttcttttcttttccgaatcggattttgtttttaatatttc

SEQ ID NO: 30158 - DNA, 80 bp, synthetic construct
  source 1..80: mol_type = other DNA
tggggtgctgctgggcttttagaaggcacaagataacatctatttataagcgcccagatacccaaaccatcatcaaagtg

SEQ ID NO: 30159 - DNA, 80 bp, synthetic construct
  source 1..80: mol_type = other DNA
actttatgctacaagaggctggggccggctcagtggagacacctcgtggcttgataaaggttaccagctatgccggcgag

SEQ ID NO: 30160 - DNA, 80 bp, synthetic construct
  source 1..80: mol_type = other DNA
gtaccaaccataggggtgtatggcgtgccgggttcaggcaagtctggcatcattaaaagcgcagtcaccaaaaaagatct

SEQ ID NO: 30161 - DNA, 80 bp, synthetic construct
  source 1..80: mol_type = other DNA
gctctgcggggatccaaaacagtgcggctttttcaatatgatgtgcctgaaagtgcattttaaccacgagatttgcacgc

SEQ ID NO: 30162 - DNA, 80 bp, synthetic construct
  source 1..80: mol_type = other DNA
ggtggtcggggagaagttgtccgtcccaggcaaaactgttgactggttgtcagaccagcctgaggctaccttcagagctc

SEQ ID NO: 30163 - DNA, 80 bp, synthetic construct
  source 1..80: mol_type = other DNA
tctcccgggtatgcaaaccgaaatcctcacttgaagagacagaagtcctgtttgtattcattgggtacgatcgcaaggcc

SEQ ID NO: 30164 - DNA, 80 bp, synthetic construct
  source 1..80: mol_type = other DNA
gaggggacattgccacggccaccgaaggagtgatcataaatgctgctaacagcaaaggacaacctggcggagtggtgtgc

SEQ ID NO: 30165 - DNA, 80 bp, synthetic construct
  source 1..80: mol_type = other DNA
ggagcgctgtataagaaattcccggaaagcttcgatttacagccgatcgaagtgggaaaagcgcgactggtcaaaggtgc

SEQ ID NO: 30166 - DNA, 80 bp, synthetic construct
  source 1..80: mol_type = other DNA
gtgacaaacagttggcagaggcttatgagtccatcgctaaaattgtcaacgataacaattacaagtcagtagcgattcca

SEQ ID NO: 30167 - DNA, 80 bp, synthetic construct
  source 1..80: mol_type = other DNA
gaagggcaagtcgctgtttaccaggatgtatacgcagttgacggaccgacaagtctctatcaccaagccgacaagggagt

SEQ ID NO: 30168 - DNA, 80 bp, synthetic construct
  source 1..80: mol_type = other DNA
catccacggaagtacctcgtggaaacaccaccggtggaagagaaccaatccacagaggggacacctgaaccagcacccgt

SEQ ID NO: 30169 - DNA, 80 bp, synthetic construct
  source 1..80: mol_type = other DNA
agggaactagcgtgaccagcgaggcagcgtcagccgagactaactcctacttcgcaagtagcatggagtttctggcgcga

SEQ ID NO: 30170 - DNA, 80 bp, synthetic construct
  source 1..80: mol_type = other DNA
actttgacgctattattgccgagcatttccagcctggggactgtgttctggaaactgacattgcgtcgtttgataaaagt

SEQ ID NO: 30171 - DNA, 80 bp, synthetic construct
  source 1..80: mol_type = other DNA
gtgtcaaatcattcagctacctgagaggggcccctataactctctacggctaacctgaatggactacgacatagtctagt

SEQ ID NO: 30172 - DNA, 80 bp, synthetic construct
  source 1..80: mol_type = other DNA
ctgaggggccgcccgctaagaaaccgaagagggaggccccgcaaaagcagaaaaggtgaggccaagggaagaagaagaag

SEQ ID NO: 30173 - DNA, 80 bp, synthetic construct
  source 1..80: mol_type = other DNA
aaccaggggaagaagaaggccaagacggggccgcctaatccgaaggtacagagtggaaacaagaagaagaccaacaagaa

SEQ ID NO: 30174 - DNA, 80 bp, synthetic construct
  source 1..80: mol_type = other DNA
tgggcgtttcacggtgccaaaaggagttggggccaagggagacagcggacgacccattctggataatcagggacgtgtgg

SEQ ID NO: 30175 - DNA, 80 bp, synthetic construct
  source 1..80: mol_type = other DNA
ggactccatcaccatggaatttaagaaaaattcagtcacacactcctgctcagtgccgtatgaagtgaaatttaatcctg

SEQ ID NO: 30176 - DNA, 80 bp, synthetic construct
  source 1..80: mol_type = other DNA
aggggtgggagtttgtatggggaaaccacccgccgaaaaggttttgggcacaggaaacagcgcccggaaatccacatgga

SEQ ID NO: 30177 - DNA, 80 bp, synthetic construct
  source 1..80: mol_type = other DNA
gggattcttgtgctgcaaagtgacagacacattgaacggggagagggtctcttttcccgtgtgcacgtatgtgccagcta

SEQ ID NO: 30178 - DNA, 80 bp, synthetic construct
  source 1..80: mol_type = other DNA
ctgcgtacgataccgctgttgtagtggaaagggtcgttcccgtgccggcaccgcgcattcagcgagcgtcgacgtacaga

SEQ ID NO: 30179 - DNA, 80 bp, synthetic construct
  source 1..80: mol_type = other DNA
aacttctgacaccaggctcgtaggaatattgaaatatggtggaagaatatggacgtttcataaagaaacgccaggcgctg

SEQ ID NO: 30180 - DNA, 80 bp, synthetic construct
  source 1..80: mol_type = other DNA
tgtcagttgctgcctctgtttatatgtgtgtagtggcacgcaacaagtgcctgacaccgtacgcactcacccccggggct

SEQ ID NO: 30181 - DNA, 80 bp, synthetic construct
  source 1..80: mol_type = other DNA
tcggtaagctttagttcaaagggccatatatacccctgaatagtaacaaaatataaaaattacaaaatatgtagttcaaa

SEQ ID NO: 30182 - DNA, 80 bp, synthetic construct
  source 1..80: mol_type = other DNA
ttagagacgaccatggcgggcaagtgacacttgttccgccggtcgtctctaagctcttcctctgcattgcaagagtttac

SEQ ID NO: 30183 - DNA, 80 bp, synthetic construct
  source 1..80: mol_type = other DNA
ttgcataactttgagaaggtgaatcataagtaccgtgtataatgcgggctggaatatatgtaaccattattatatacttt

SEQ ID NO: 30184 - DNA, 80 bp, synthetic construct
  source 1..80: mol_type = other DNA
aaccatattaatattcaattatcaaattcggtgccgtgcatgatgcggaccgatttattattcatatatgtcacccttat

SEQ ID NO: 30185 - DNA, 80 bp, synthetic construct
  source 1..80: mol_type = other DNA
tatatcacatcacatattcaattttaaaatttctatacgcgtctctaatggcgcatataataaccacctataattttctt

SEQ ID NO: 30186 - DNA, 80 bp, synthetic construct
  source 1..80: mol_type = other DNA
tggcgcatataataaccacctataattttctttattttctttatttgtgccactatagggcacttactaaccatagaagt

SEQ ID NO: 30187 - DNA, 80 bp, synthetic construct
  source 1..80: mol_type = other DNA
tccaagaagatacgtgccaagaccagcgtgccaagacacggtggtcgagttaccctggccgctggagaccatcgatgtag

SEQ ID NO: 30188 - DNA, 80 bp, synthetic construct
  source 1..80: mol_type = other DNA
gattgacatcacttgcaacctgatccccttcaaccggagactcccacacgcgttggtcacggaatatcatccagttaagg

SEQ ID NO: 30189 - DNA, 80 bp, synthetic construct
  source 1..80: mol_type = other DNA
tttagatcaggcttgggttcggagatcgaggtcgccctcgccaccagatacgaggtggaagggggtcacaatctattgct

SEQ ID NO: 30190 - DNA, 80 bp, synthetic construct
  source 1..80: mol_type = other DNA
tacccaaaatggagaaagttcacgttgacatcgaggaagacagccccttcctcagagcattacaacggagcttcccgcag

SEQ ID NO: 30191 - DNA, 80 bp, synthetic construct
  source 1..80: mol_type = other DNA
tgaccgcgggtcctctgtccacagcctggtcgccttttgacaaaaagatcgtgcagtacgccggggaaatctacaactat

SEQ ID NO: 30192 - DNA, 80 bp, synthetic construct
  source 1..80: mol_type = other DNA
gactttccggaatatggagccggccacgcaggagcgtttggtgacatccaggctaggacggtatctagtacagatgtata

SEQ ID NO: 30193 - DNA, 80 bp, synthetic construct
  source 1..80: mol_type = other DNA
cgccaacacaaaccttgtgctgcagagaccgaaagccggagcgatccatgttccgtacacccaggccccatcgggttatg

SEQ ID NO: 30194 - DNA, 80 bp, synthetic construct
  source 1..80: mol_type = other DNA
ggtgttgttgggcgttcaggaaacacaagataacatcagtgtataaacgaccagacacccaaacgatcattaaggtaaac

SEQ ID NO: 30195 - DNA, 80 bp, synthetic construct
  source 1..80: mol_type = other DNA
gacaaaattggctcgtatgcagtgctctccccacaagcggtactgcgaagtgaaaaactgacatgcattcacccgctcgc

SEQ ID NO: 30196 - DNA, 80 bp, synthetic construct
  source 1..80: mol_type = other DNA
gactaggtttgacaggggaacttgtcgatccccccttccatgaatttgcatatgaaagcttgaggacacgtcctgccgca

SEQ ID NO: 30197 - DNA, 80 bp, synthetic construct
  source 1..80: mol_type = other DNA
ccttatcaggtaccaactataggtgtgtatggcgttcccgggtcggggaagtctggaattatcaagagtgcagtcacaaa

SEQ ID NO: 30198 - DNA, 80 bp, synthetic construct
  source 1..80: mol_type = other DNA
gaaggacttggtagtgagtgctaagaaggagaactgcgccgagataataagggacgtcaagaagatgaaagggctagacg

SEQ ID NO: 30199 - DNA, 80 bp, synthetic construct
  source 1..80: mol_type = other DNA
tggcagaaattaacgctatgtggcccaccgctacagaggcaaatgagcaggtgtgcttgtacattctgggtgaaagtatg

SEQ ID NO: 30200 - DNA, 80 bp, synthetic construct
  source 1..80: mol_type = other DNA
acatcctagaaagtaccttgcagacgcagcttccgcgaacaatgaggcggccgagtcaccctcggtggacgtgcagtcac

SEQ ID NO: 30201 - DNA, 80 bp, synthetic construct
  source 1..80: mol_type = other DNA
agctggaagagagttctgagaacacggaacaaccggtggaggaggacgacagtataagcgtgctgtccgaggatgcacca

SEQ ID NO: 30202 - DNA, 80 bp, synthetic construct
  source 1..80: mol_type = other DNA
gtggatagtatctcagcactcggatcttgcgacagctccagcgatgcgcgtagcataggatcgtcctcggacgaaaccga

SEQ ID NO: 30203 - DNA, 80 bp, synthetic construct
  source 1..80: mol_type = other DNA
tgtttccatctttgacaaagggttggagtttctggccagacctgttcccgcaccgcgaaccatttttaggactccacctg

SEQ ID NO: 30204 - DNA, 80 bp, synthetic construct
  source 1..80: mol_type = other DNA
tcccgaaaccgcgcgtgcggaggccattgcatcctttgtctagcagatcatgctcgcgctctagcctggcgtctaatcca

SEQ ID NO: 30205 - DNA, 80 bp, synthetic construct
  source 1..80: mol_type = other DNA
aaaaaaaaatttctaaaaccatccaataacgtcttgttctctgtaggatctaccatctaccacgagaagcgagacttact

SEQ ID NO: 30206 - DNA, 80 bp, synthetic construct
  source 1..80: mol_type = other DNA
gacgttcaagcaacgtcgagatgtgccgcccgagggtccaccggctaagaagaagaagaaggacaactcgcaacaaggtg

SEQ ID NO: 30207 - DNA, 80 bp, synthetic construct
  source 1..80: mol_type = other DNA
gtcggaatcagaatggaaagaaaaagaacaagctagtaaagaaaaagaagaagacagggccgccgcccccaaaaaataat

SEQ ID NO: 30208 - DNA, 80 bp, synthetic construct
  source 1..80: mol_type = other DNA
ggcggcaaaaagaaagtcaataggaagccagggaagagacaacgaatggtcatgaagctggagtcagataagacattccc

SEQ ID NO: 30209 - DNA, 80 bp, synthetic construct
  source 1..80: mol_type = other DNA
tatcatgcttgatggaaaagttaatgggtacgcatgcgtggttggcggcaagctgttcagaccactgcatgtggagggta

SEQ ID NO: 30210 - DNA, 80 bp, synthetic construct
  source 1..80: mol_type = other DNA
agatcgacaacgacgtgctgtcctccctcaagaccaaaaaggcatctaagtatgatctggagtacgctgacgtgccacag

SEQ ID NO: 30211 - DNA, 80 bp, synthetic construct
  source 1..80: mol_type = other DNA
attataacctttgggttccgattagtgtctctgaaactccatcccaagaaccccaccttcctaaccacgaggcagctgga

SEQ ID NO: 30212 - DNA, 80 bp, synthetic construct
  source 1..80: mol_type = other DNA
atatagcaaataatccatagatcaaaggactacgcaacccctgaatagtaacaaaatacaaaatcactaaaaaaaaaaaa

SEQ ID NO: 30213 - DNA, 80 bp, synthetic construct
  source 1..80: mol_type = other DNA
ttgtaaagttttattacaaataacgtgcggcaattggcgagccgctttaattagaattttattttctttttaccataatt

SEQ ID NO: 30214 - DNA, 80 bp, synthetic construct
  source 1..80: mol_type = other DNA
tggatagtatctcagcactcgagtcttgtgacagcaccagcgatgcgcgtagcatagactcggatgaaaccgatgtttcc

SEQ ID NO: 30215 - DNA, 80 bp, synthetic construct
  source 1..80: mol_type = other DNA
atctttgacaaaaggttggagttcctggccagacctgttcccgcaccgcgaaccaaatttaggactccacccgtcccgaa

SEQ ID NO: 30216 - DNA, 80 bp, synthetic construct
  source 1..80: mol_type = other DNA
accgcgtgcgcggaggccattacatcctttgtctagtagatcaagctcgcgctctagcctggcgtctaatccaccaggtg

SEQ ID NO: 30217 - DNA, 80 bp, synthetic construct
  source 1..80: mol_type = other DNA
atggcggatgtgtgacatacacgacgccaaaagattttgttccagctcctgccacctccgctacgcgagagattaaccac

SEQ ID NO: 30218 - DNA, 80 bp, synthetic construct
  source 1..80: mol_type = other DNA
gtgctccactaaagagaagcctgactaccaatgcaaggtttacacaggcgtgtacccgttcatgtggggaggggcatatt

SEQ ID NO: 30219 - DNA, 80 bp, synthetic construct
  source 1..80: mol_type = other DNA
gcttctgcgactcagaaaacacgcaactcagcgaggcgtacgtcgatcgatcggacgtatgcaggcatgatcacgcatct

SEQ ID NO: 30220 - DNA, 80 bp, synthetic construct
  source 1..80: mol_type = other DNA
gcttacaaagcccatacagcatcgctgaaggccaaagtgagggttatgtacggcaacgtaaaccagactgtggatgttta

SEQ ID NO: 30221 - DNA, 80 bp, synthetic construct
  source 1..80: mol_type = other DNA
cgtgaacggagaccatgccgtcacgatagggggtactcagttcatattcgggccgctgtcatcggcctggaccccgttcg

SEQ ID NO: 30222 - DNA, 80 bp, synthetic construct
  source 1..80: mol_type = other DNA
acaacaagatagtcgtgtacaaagacgaagtgttcaatcaggacttcccgccgtacggatctgggcaaccagggcgcttc

SEQ ID NO: 30223 - DNA, 80 bp, synthetic construct
  source 1..80: mol_type = other DNA
cagacactgtcaaaggagaaagagtctcattccctgtatgcacctacgtcccctcaaccatctgtgatcaaatgactggc

SEQ ID NO: 30224 - DNA, 80 bp, synthetic construct
  source 1..80: mol_type = other DNA
ggcgacatccaaagcagaacagtggagagtaacgacctgtacgcgaacacggcactgaagctggcacgcccttcacccgg

SEQ ID NO: 30225 - DNA, 80 bp, synthetic construct
  source 1..80: mol_type = other DNA
cacggtccatgtaccgtacacacagacaccttcagggttcaaatattggctaaaggaaaaagggacagccctaaatacga

SEQ ID NO: 30226 - DNA, 80 bp, synthetic construct
  source 1..80: mol_type = other DNA
aggctccttttggctgccaaatcaaaacgaaccctgtcagggccatgaactgcgccgtgggaaacatccctgtctccatg

SEQ ID NO: 30227 - DNA, 80 bp, synthetic construct
  source 1..80: mol_type = other DNA
aatttgcctgacagcgcctttacccgcattgtcgaggcgccgaccatcactgacctgacttgcacagtggctacctgtac

SEQ ID NO: 30228 - DNA, 80 bp, synthetic construct
  source 1..80: mol_type = other DNA
gcactcctcggatttcggcggcgtcttgacactgacgtacaagaccgacaagaacggggactgctctgtacactcgcact

SEQ ID NO: 30229 - DNA, 80 bp, synthetic construct
  source 1..80: mol_type = other DNA
ctaacgtagctactctacaggaggccacagcaaaagtgaagacagcaggtaaggtgaccttacacttctccacggcaagc

SEQ ID NO: 30230 - DNA, 80 bp, synthetic construct
  source 1..80: mol_type = other DNA
gcatcaccttcttttgtggtgtcgctatgcagtgctaaggccacctgttcagcgtcgtgtgagcccccgaaagaccacat

SEQ ID NO: 30231 - DNA, 80 bp, synthetic construct
  source 1..80: mol_type = other DNA
agtcccatatgcggctagccacagtaacgtagtgtttccagacatgtcgggcaccgcactatcatgggtgcagaaaatct

SEQ ID NO: 30232 - DNA, 80 bp, synthetic construct
  source 1..80: mol_type = other DNA
cgggtggtctgggggccttcgcaatcggcgctatcctggtgctagttgtggtcacttgcattgggctccgcagataagtt

SEQ ID NO: 30233 - DNA, 80 bp, synthetic construct
  source 1..80: mol_type = other DNA
agggtaggcaatggcattgatatagcaagaaaattgaaaacagaaaaagttagggtaagcaatggcatataaccataact

SEQ ID NO: 30234 - DNA, 80 bp, synthetic construct
  source 1..80: mol_type = other DNA
atactagcgaccgacgtcacaccggaggacgcacagaagttgttagtgggattgaatcagaggatagttgtgaacggaag

SEQ ID NO: 30235 - DNA, 80 bp, synthetic construct
  source 1..80: mol_type = other DNA
gtataacttataacaaagcgcaacaagacctgcgcaattggccccgtggtccgcctcacggaaactcggggcaactcata

SEQ ID NO: 30236 - DNA, 80 bp, synthetic construct
  source 1..80: mol_type = other DNA
ttgacacattaattggcaataattggaagcttacataagcttaattcgacgaataattggatttttattttattttgcaa

SEQ ID NO: 30237 - DNA, 80 bp, synthetic construct
  source 1..80: mol_type = other DNA
ataattggaagcttacataagcttaattcgacgaataattggatttttattttattttgcaattggtttttaatatttcc

SEQ ID NO: 30238 - DNA, 80 bp, synthetic construct
  source 1..80: mol_type = other DNA
aacacagcgaaacactaacacgatgaagaactatctgcttccgattgtggccgtcgcatttagcaagtgggcgagggaat

SEQ ID NO: 30239 - DNA, 80 bp, synthetic construct
  source 1..80: mol_type = other DNA
acaaggcagaccttgatgatgaaaaacctctgggtgtccgagagaggtcacttacttgctgctgcttgtgggcatttaaa

SEQ ID NO: 30240 - DNA, 80 bp, synthetic construct
  source 1..80: mol_type = other DNA
acgaagaagatgcacaccatgtacaagaaaccagacacccagacaatagtgaaggtgccttcagagtttaactcgttcgt

SEQ ID NO: 30241 - DNA, 80 bp, synthetic construct
  source 1..80: mol_type = other DNA
catcccgagcctatggtctacaggcctcgcaatcccagtcagatcacgcattaagatgcttttggccaagaagaccaagc

SEQ ID NO: 30242 - DNA, 80 bp, synthetic construct
  source 1..80: mol_type = other DNA
gagagttaatacctgttctcgacgcgtcgtcagccagggatgctgaacaagaggagaaggagaggttggaggccgagctg

SEQ ID NO: 30243 - DNA, 80 bp, synthetic construct
  source 1..80: mol_type = other DNA
ttcgaggtggagtcattgcaggtcacaccaaatgaccatgcaaatgccagagcattttcgcacctggctaccaaattgat

SEQ ID NO: 30244 - DNA, 80 bp, synthetic construct
  source 1..80: mol_type = other DNA
actagagaagccttaccacccctcgtccccatcgcgccggcggagacgggagtcgtcgacgtcgacgttgaagaactaga

SEQ ID NO: 30245 - DNA, 80 bp, synthetic construct
  source 1..80: mol_type = other DNA
gtatcacgcaggtgcaggggtcgtggaaacacctcgcagcgcgttgaaagtcaccgcacagccgaacgacgtactactag

SEQ ID NO: 30246 - DNA, 80 bp, synthetic construct
  source 1..80: mol_type = other DNA
gaaattacgtagttctgtccccgcagaccgtgctcaagagctccaagttggcccccgtgcaccctctagcagagcaggtg

SEQ ID NO: 30247 - DNA, 80 bp, synthetic construct
  source 1..80: mol_type = other DNA
aaaataataacacataacgggagggccggccgttaccaggtcgacggatatgacggcagggtcctactaccatgtggatc

SEQ ID NO: 30248 - DNA, 80 bp, synthetic construct
  source 1..80: mol_type = other DNA
ggccattccggtccctgagtttcaagctttgagcgagagcgccactatggtgtacaacgaaagggagttcgtcaacagga

SEQ ID NO: 30249 - DNA, 80 bp, synthetic construct
  source 1..80: mol_type = other DNA
aactataccatattgccgttcacggaccgtcgctgaacaccgacgaggagaactacgagaaagtcagagctgaaagaact

SEQ ID NO: 30250 - DNA, 80 bp, synthetic construct
  source 1..80: mol_type = other DNA
gacgccgagtacgtgttcgacgtagataaaaaatgctgcgtcaagagagaggaagcgtcgggtttggtgttggtgggaga

SEQ ID NO: 30251 - DNA, 80 bp, synthetic construct
  source 1..80: mol_type = other DNA
gctaaccaaccccccgttccatgaattcgcctacgaagggctgaagatcaggccgtcggcaccatataagactacagtag

SEQ ID NO: 30252 - DNA, 80 bp, synthetic construct
  source 1..80: mol_type = other DNA
taggagtctttggggttccgggatcaggcaagtctgctattattaagagcctcgtgaccaaacacgatctggtcaccagc

SEQ ID NO: 30253 - DNA, 80 bp, synthetic construct
  source 1..80: mol_type = other DNA
caggaaatagtcaacgacgtgaagaagcaccgcggactggacatccaggcaaaaacagtggactccatcctgctaaacgg

SEQ ID NO: 30254 - DNA, 80 bp, synthetic construct
  source 1..80: mol_type = other DNA
cgagcaggagactgacaaagacacactcatcttggatatcggcagtgcgccttccaggagaatgatgtctacgcacaaat

SEQ ID NO: 30255 - DNA, 80 bp, synthetic construct
  source 1..80: mol_type = other DNA
gtgtcgtcgtgccgtggacatcctatatgtggacgaggctttcgcttgccattccggtactctgctggccctaattgctc

SEQ ID NO: 30256 - DNA, 80 bp, synthetic construct
  source 1..80: mol_type = other DNA
ttgttaaacctcggagcaaagtggtgttatgcggagaccccaagcaatgcggattcttcaatatgatgcagcttaaggtg

SEQ ID NO: 30257 - DNA, 80 bp, synthetic construct
  source 1..80: mol_type = other DNA
aacttcaaccacaacatctgcactgaagtatgtcataaaagtatatccagacgttgcacgcgtccagtcacggccatcgt

SEQ ID NO: 30258 - DNA, 80 bp, synthetic construct
  source 1..80: mol_type = other DNA
gtctacgttgcactacggaggcaagatgcgcacgaccaacccgtgcaacaaacccataatcatagacaccacaggacaga

SEQ ID NO: 30259 - DNA, 80 bp, synthetic construct
  source 1..80: mol_type = other DNA
ccaagcccaagccaggagacatcgtgttaacatgcttccgaggctgggtaaagcagctgcagttggactaccgtggacac

SEQ ID NO: 30260 - DNA, 80 bp, synthetic construct
  source 1..80: mol_type = other DNA
atgaaaatcccttgtatgcccctgcgtcggagcacgtgaatgtactgctgacgcgcactgaggataggctggtgtggaaa

SEQ ID NO: 30261 - DNA, 80 bp, synthetic construct
  source 1..80: mol_type = other DNA
acgctggccggcgatccctggattaaggtcctatcaaacattccacagggtaactttacggccacattggaagaatggca

SEQ ID NO: 30262 - DNA, 80 bp, synthetic construct
  source 1..80: mol_type = other DNA
agaagaacacgacaaaataatgaaggtgattgaaggaccggctgcgcctgtggacgcgttccagaacaaagcgaacgtgt

SEQ ID NO: 30263 - DNA, 80 bp, synthetic construct
  source 1..80: mol_type = other DNA
gttgggcgaaaagcctggtgcctgtcctggacactgccggaatcagattgacagcagaggagtggagcaccataattaca

SEQ ID NO: 30264 - DNA, 80 bp, synthetic construct
  source 1..80: mol_type = other DNA
accactgcgtatgccctatgcgcagcgcagaagaccccgaaaggctcgtatgctacgcaaagaaactggcagcggcctcc

SEQ ID NO: 30265 - DNA, 80 bp, synthetic construct
  source 1..80: mol_type = other DNA
gcatttaaggaggacagagcttactctccagaggtggccttgaatgaaatttgcaccaagtactatggagttgacctgga

SEQ ID NO: 30266 - DNA, 80 bp, synthetic construct
  source 1..80: mol_type = other DNA
cagtggcctgttttctgccccgaaggtgtccctgtattacgagaacaaccactgggataacagacctggtggaaggatgt

SEQ ID NO: 30267 - DNA, 80 bp, synthetic construct
  source 1..80: mol_type = other DNA
atggattcaatgccgcaacagctgccaggctggaagctagacataccttcctgaaggggcagtggcatacgggcaagcag

SEQ ID NO: 30268 - DNA, 80 bp, synthetic construct
  source 1..80: mol_type = other DNA
gcagttatcgcagaaagaaaaatccaaccgctttctgtgctggacaatgtaattcctatcaaccgcaggctgccgcacgc

SEQ ID NO: 30269 - DNA, 80 bp, synthetic construct
  source 1..80: mol_type = other DNA
cctggtggctgagtacaagacggttaaaggcagtagggttgagtggctggtcaataaagtaagagggtaccacgtcctgc

SEQ ID NO: 30270 - DNA, 80 bp, synthetic construct
  source 1..80: mol_type = other DNA
tggtgagtgagtacaacctggctttgcctcgacgcagggtcacttggttgtcaccgctgaatgtcacaggcgccgatagg

SEQ ID NO: 30271 - DNA, 80 bp, synthetic construct
  source 1..80: mol_type = other DNA
tgctacgacctaagtttaggactgccggctgacgccggcagattcgacttggtctttgtgaacattcacacggaattcag

SEQ ID NO: 30272 - DNA, 80 bp, synthetic construct
  source 1..80: mol_type = other DNA
aatccaccactaccagcagtgtgtcgaccacgccatgaagctgcagatgcttgggggagatgcgctacgactgctaaaac

SEQ ID NO: 30273 - DNA, 80 bp, synthetic construct
  source 1..80: mol_type = other DNA
ccggcggcagcctcttgatgagagcttacggatacgccgataaaatcagcgaagccgttgtttcctccttaagcagaaag

SEQ ID NO: 30274 - DNA, 80 bp, synthetic construct
  source 1..80: mol_type = other DNA
ttctcgtctgcaagagtgttgcgcccggattgtgtcaccagcaatacagaagtgttcttgctgttctccaactttgacaa

SEQ ID NO: 30275 - DNA, 80 bp, synthetic construct
  source 1..80: mol_type = other DNA
gggaaggtgctggatagagagatcgcagggaaaatcaccgacctgcagaccgtcatggctacgccagacgctgaatctcc

SEQ ID NO: 30276 - DNA, 80 bp, synthetic construct
  source 1..80: mol_type = other DNA
cggaaagagaccctctacgctacaccagatgaataccaagctgagtgccgtgtatgccggagaagccatgcacacggccg

SEQ ID NO: 30277 - DNA, 80 bp, synthetic construct
  source 1..80: mol_type = other DNA
ggtgtgcaccatcctacagagttaagagagcagacatagccacgtgcacagaagcggctgtggttaacgcagctaacgcc

SEQ ID NO: 30278 - DNA, 80 bp, synthetic construct
  source 1..80: mol_type = other DNA
cgtggaactgtaggggatggcgtatgcagggccgtggcgaagaaatggccgtcagcctttaagggagcagcaacaccagt

SEQ ID NO: 30279 - DNA, 80 bp, synthetic construct
  source 1..80: mol_type = other DNA
gggcacaattaaaacagtcatgtgcggctcgtaccccgtcatccacgctgtagggcctaatttctctgccacgactgaag

SEQ ID NO: 30280 - DNA, 80 bp, synthetic construct
  source 1..80: mol_type = other DNA
cggaaggggaccgcgaattggccgctgtctaccgggcagtggccgccgaagtaaacagactgtcactgagcagcgtagcc

SEQ ID NO: 30281 - DNA, 80 bp, synthetic construct
  source 1..80: mol_type = other DNA
atcccgctgctgtccacaggagtgttcagcggcggaagagataggctgcagcaatccctcaaccatctattcacagcaat

SEQ ID NO: 30282 - DNA, 80 bp, synthetic construct
  source 1..80: mol_type = other DNA
ggacgccacggacgctgacgtgaccatctactgcagagacaaaagttgggagaagaaaatccaggaagccatagacatga

SEQ ID NO: 30283 - DNA, 80 bp, synthetic construct
  source 1..80: mol_type = other DNA
ggacggctgtggagttgctcaatgatgacgtggagctgaccacagacttggtgagagtgcacccggacagcagcctggtg

SEQ ID NO: 30284 - DNA, 80 bp, synthetic construct
  source 1..80: mol_type = other DNA
ggtcgtaagggctacagtaccactgacgggtcgctgtactcgtacttggaaggtacgaaattcaaccaggctgctattga

SEQ ID NO: 30285 - DNA, 80 bp, synthetic construct
  source 1..80: mol_type = other DNA
tatggcagagatactgacgttgtggcccagactgcaagaggcaaacgaacagatatgcctatacgcgctgggcgaaacaa

SEQ ID NO: 30286 - DNA, 80 bp, synthetic construct
  source 1..80: mol_type = other DNA
taccttttgcctgcatacagacgtcacgtgtcgtacggcagccgaagtggccgtataccaggacgtgtatgctgtacatg

SEQ ID NO: 30287 - DNA, 80 bp, synthetic construct
  source 1..80: mol_type = other DNA
tggacaacatcagatccaaatgtccggtggacgattccgattcatcaacacctcccaggacagtgccctgcctgtgccgc

SEQ ID NO: 30288 - DNA, 80 bp, synthetic construct
  source 1..80: mol_type = other DNA
tacgcaatgacagcagaacggatcgcccgccttaggtcacaccaagttaaaagcatggtggtttgctcatcttttcccct

SEQ ID NO: 30289 - DNA, 80 bp, synthetic construct
  source 1..80: mol_type = other DNA
cccgaaataccatgtagatggggtgcagaaggtaaagtgcgagaaggttctcctgttcgacccgacggtaccttcagtgg

SEQ ID NO: 30290 - DNA, 80 bp, synthetic construct
  source 1..80: mol_type = other DNA
ttagtccgcggaagtatgccgcatcgacgacggaccactcagaccggtcgttacgagggtttgacttggactggaccacc

SEQ ID NO: 30291 - DNA, 80 bp, synthetic construct
  source 1..80: mol_type = other DNA
gactcgtcttccactgccagcgataccatgtcgctacccagtttgcagtcgtgtgacatcgactcgatctacgagccaat

SEQ ID NO: 30292 - DNA, 80 bp, synthetic construct
  source 1..80: mol_type = other DNA
ggctcccatagtagtgacggctgacgtacaccctgaacccgcaggcatcgcggacctggcggcagatgtgcatcctgaac

SEQ ID NO: 30293 - DNA, 80 bp, synthetic construct
  source 1..80: mol_type = other DNA
ccgcagaccatgtggacctcgagaacccgattcctccaccgcgcccgaagagagctgcataccttgcctcccgcgcggcg

SEQ ID NO: 30294 - DNA, 80 bp, synthetic construct
  source 1..80: mol_type = other DNA
gagcgaccggtgccggcgccgagaaagccgacgcctgccccaaggactgcgtttaggaacaagctgcctttgacgttcgg

SEQ ID NO: 30295 - DNA, 80 bp, synthetic construct
  source 1..80: mol_type = other DNA
cgactttgacgagcacgaggtcgatgcgttggcctccgggattactttcggagacttcgacgacgtcctgagactaggcc

SEQ ID NO: 30296 - DNA, 80 bp, synthetic construct
  source 1..80: mol_type = other DNA
gcgcgggtgcatatattttctcctcggacactggcagcggacatttacaacaaaaatccgttaggcagcacaatctccag

SEQ ID NO: 30297 - DNA, 80 bp, synthetic construct
  source 1..80: mol_type = other DNA
caccaacatcgctgtaccatcaggcgatgaaaggtgtcagaacggcgtattggattgggtttgacaccaccccgtttatg

SEQ ID NO: 30298 - DNA, 80 bp, synthetic construct
  source 1..80: mol_type = other DNA
tgcgcacaactggatgcggtcgaggaggagaaaatgtacccgccaaaattggatactgagagggagaagctgttgctgct

SEQ ID NO: 30299 - DNA, 80 bp, synthetic construct
  source 1..80: mol_type = other DNA
gaaaatgcagatgcacccatcggaggctaataagagtcgataccagtctcgcaaagtggagaacatgaaagccacggtgg

SEQ ID NO: 30300 - DNA, 80 bp, synthetic construct
  source 1..80: mol_type = other DNA
tggacaggctcacatcgggggccagattgtacacgggagcggacgtaggccgcataccaacatacgcggttcggtacccc

SEQ ID NO: 30301 - DNA, 80 bp, synthetic construct
  source 1..80: mol_type = other DNA
cgccccgtgtactcccctaccgtgatcgaaagattctcaagccccgatgtagcaatcgcagcgtgcaacgaatacctatc

SEQ ID NO: 30302 - DNA, 80 bp, synthetic construct
  source 1..80: mol_type = other DNA
cagaaattacccaacagtggcgtcgtaccagataacagatgaatacgacgcatacttggacatggttgacgggtcggaga

SEQ ID NO: 30303 - DNA, 80 bp, synthetic construct
  source 1..80: mol_type = other DNA
gttgcttggacagagcgacattctgcccggcgaagctccggtgctacccgaaacatcatgcgtaccaccagccgactgta

SEQ ID NO: 30304 - DNA, 80 bp, synthetic construct
  source 1..80: mol_type = other DNA
cgcagtgccgtcccgtcaccctttcagaacacactacagaacgtgctagcggccgccaccaagagaaactgcaacgtcac

SEQ ID NO: 30305 - DNA, 80 bp, synthetic construct
  source 1..80: mol_type = other DNA
accatggactcggcagtgttcaacgtggagtgcttcaagcgctatgcctgctccggagaatattgggaagaatatgctaa

SEQ ID NO: 30306 - DNA, 80 bp, synthetic construct
  source 1..80: mol_type = other DNA
acaacctatccggataaccactgagaacatcactacctatgtgaccaaattgaaaggcccgaaagctgctgccttgttcg

SEQ ID NO: 30307 - DNA, 80 bp, synthetic construct
  source 1..80: mol_type = other DNA
ctaagacccacaacttggttccgctgcaggaggttcccatggacagattcacggtcgacatgaaacgagatgtcaaagtc

SEQ ID NO: 30308 - DNA, 80 bp, synthetic construct
  source 1..80: mol_type = other DNA
tttgacgcgctagcaggcgcgtatccaacctacgccacaaactgggccgacgagcaggtgttacaggccaggaacatagg

SEQ ID NO: 30309 - DNA, 80 bp, synthetic construct
  source 1..80: mol_type = other DNA
actccagggacgaaacacacagaggaaagacccaaagtccaggtaattcaagcagcggagccattggcgaccgcttacct

SEQ ID NO: 30310 - DNA, 80 bp, synthetic construct
  source 1..80: mol_type = other DNA
gtgcggcatccacagggaattagtaaggagactaaatgctgtgttacgccctaacgtgcacacattgtttgatatgtcgg

SEQ ID NO: 30311 - DNA, 80 bp, synthetic construct
  source 1..80: mol_type = other DNA
ccgaagactttgacgcgatcatcgcctctcacttccacccaggagacccggttctagagacggacattgcatcattcgac

SEQ ID NO: 30312 - DNA, 80 bp, synthetic construct
  source 1..80: mol_type = other DNA
aaaagccaggacgactccttggctcttacaggtttaatgatcctcgaagatctaggggtggatcagtacctgctggactt

SEQ ID NO: 30313 - DNA, 80 bp, synthetic construct
  source 1..80: mol_type = other DNA
gatcgaggcagcctttggggaaatatccagctgtcacctaccaactggcacgcgcttcaagttcggagctatgatgaaat

SEQ ID NO: 30314 - DNA, 80 bp, synthetic construct
  source 1..80: mol_type = other DNA
cgggcatgtttctgactttgtttattaacactgttttgaacatcaccatagcaagcagggtactggagcagagactcact

SEQ ID NO: 30315 - DNA, 80 bp, synthetic construct
  source 1..80: mol_type = other DNA
gactccgcctgtgcggccttcatcggcgacgacaacatcgttcacggagtgatctccgacaagctgatggcggagaggtg

SEQ ID NO: 30316 - DNA, 80 bp, synthetic construct
  source 1..80: mol_type = other DNA
cgcgtcgtgggtcaacatggaggtgaagatcattgacgctgtcatgggcgaaaaacccccatatttttgtggtggattca

SEQ ID NO: 30317 - DNA, 80 bp, synthetic construct
  source 1..80: mol_type = other DNA
tagtttttgacagcgtcacacagaccgcctgccgtgtttcagacccacttaagcgcctgttcaagttgggtaagccgcta

SEQ ID NO: 30318 - DNA, 80 bp, synthetic construct
  source 1..80: mol_type = other DNA
acagctgaagacaagcaggacgaagacaggcgacgagcactgagtgacgaggttagcaagtggttccggacaggcttggg

SEQ ID NO: 30319 - DNA, 80 bp, synthetic construct
  source 1..80: mol_type = other DNA
actgtgtgcagcatccttgactgagggaagactcggcaaactgtccattctccgcaagaagcaattgaaaccttgcgaca

SEQ ID NO: 30320 - DNA, 80 bp, synthetic construct
  source 1..80: mol_type = other DNA
ggccgaactggaggtggcactaacatctaggtatgaggtagagggctgcaaaagtatcctcatagccatggccaccttgg

SEQ ID NO: 30321 - DNA, 80 bp, synthetic construct
  source 1..80: mol_type = other DNA
cgagggacattaaggcgtttaagaaattgagaggacctgttatacacctctacggcggtcctaaattggtgcgttaatac

SEQ ID NO: 30322 - DNA, 80 bp, synthetic construct
  source 1..80: mol_type = other DNA
acagaattctgattatagcgcactattatagcaccatgaattacatccctacgcaaacgttttacggccgccggtggcgc

SEQ ID NO: 30323 - DNA, 80 bp, synthetic construct
  source 1..80: mol_type = other DNA
ccgcgcccggcggcccgtccctggccgttgcaggccactccggtggctcccgtcgtccccgacttccaggcccagcagat

SEQ ID NO: 30324 - DNA, 80 bp, synthetic construct
  source 1..80: mol_type = other DNA
tcccgtcgtccccgacttccaggcccagcagatgcagcaactcatcagcgccgtaaatgcgctgacaatgagacagaacg

SEQ ID NO: 30325 - DNA, 80 bp, synthetic construct
  source 1..80: mol_type = other DNA
gcagcaactcatcagcgccgtaaatgcgctgacaatgagacagaacgcaattgctcctgctaggcctcccaaaccaaaga

SEQ ID NO: 30326 - DNA, 80 bp, synthetic construct
  source 1..80: mol_type = other DNA
agaagaagacaaccaaaccaaagccgaaaacgcagcccaagaagatcaaaggaaaaacgcagcagcaaaagaagaaagac

SEQ ID NO: 30327 - DNA, 80 bp, synthetic construct
  source 1..80: mol_type = other DNA
aagcaagccgacaagaagaagaagaaacccggaaaaagagaaagaatgtgcatgaagattgaaaatgactgtatcttcga

SEQ ID NO: 30328 - DNA, 80 bp, synthetic construct
  source 1..80: mol_type = other DNA
gtgggcgacaaagtcatgaaacctgcccacgtgaaaggagtcatcgacaacgcggacctggcaaagctagctttcaagaa

SEQ ID NO: 30329 - DNA, 80 bp, synthetic construct
  source 1..80: mol_type = other DNA
atcgagcaagtatgaccttgagtgtgcccagataccagttcacatgaggtcggatgcctcaaagtacacgcatgagaagc

SEQ ID NO: 30330 - DNA, 80 bp, synthetic construct
  source 1..80: mol_type = other DNA
ccgagggacactataactggcaccacggggctgttcagtacagcggaggtaggttcactataccgacaggagcgggcaaa

SEQ ID NO: 30331 - DNA, 80 bp, synthetic construct
  source 1..80: mol_type = other DNA
ccacgatggccgccaaagtgcatgttgatattgaggctgacagcccattcatcaagtctttgcagaaggcatttccgtcg

SEQ ID NO: 30332 - DNA, 80 bp, synthetic construct
  source 1..80: mol_type = other DNA
cagtcatgttctcggtaggatctacattgtacactgagagcagaaagctactgaggagctggcacttaccctccgtattc

SEQ ID NO: 30333 - DNA, 80 bp, synthetic construct
  source 1..80: mol_type = other DNA
ccgggagacagtggccggcccatctttgacaacaaggagagggtagtcgctatcgtcctgggcgaggccaacgagggctc

SEQ ID NO: 30334 - DNA, 80 bp, synthetic construct
  source 1..80: mol_type = other DNA
acgcacagcactgtcggtggtcacctggaacaaagatatggtgactagagtgacccccgaggggtccgaagagtggtccg

SEQ ID NO: 30335 - DNA, 80 bp, synthetic construct
  source 1..80: mol_type = other DNA
ccccgctgattactgccatgtgtgtccttgccaatgctaccttcccgtgcttccagcccccgtgtgtaccttgctgctat

SEQ ID NO: 30336 - DNA, 80 bp, synthetic construct
  source 1..80: mol_type = other DNA
gaaaacaacgcagaggccacactacggatgctcgaggataacgtggataggccagggtactacgacctccttcaggcagc

SEQ ID NO: 30337 - DNA, 80 bp, synthetic construct
  source 1..80: mol_type = other DNA
cttgacgtgccgaaacggaacaagacaccggcgcagcgtgtcgcaacacttcaacgtgtataaggctacacgcccttaca

SEQ ID NO: 30338 - DNA, 80 bp, synthetic construct
  source 1..80: mol_type = other DNA
tcgcgtactgcgccgactgcggagcagggcactcgtgtcatagccccgtagcaattgaagcgatcaggtccgaagctacc

SEQ ID NO: 30339 - DNA, 80 bp, synthetic construct
  source 1..80: mol_type = other DNA
gacgggatgctgaagattcagttctcggcacaaattggcatagataagagtgacaatcatgactacacgaagataaggta

SEQ ID NO: 30340 - DNA, 80 bp, synthetic construct
  source 1..80: mol_type = other DNA
cgcagacgggcacgccattgagaatgccgtccggtcatctttgaaggtagccacctccggagactgtttcgtccatggca

SEQ ID NO: 30341 - DNA, 80 bp, synthetic construct
  source 1..80: mol_type = other DNA
caatgggacatttcatactggcaacgtgcccaccgggtgaatttctgcaggtctcgatccaggacaccagaaacgcggtc

SEQ ID NO: 30342 - DNA, 80 bp, synthetic construct
  source 1..80: mol_type = other DNA
cgtgcctgcagaatacaatatcatcatgaccctcaaccggtgggtagagaaaaatttacaattagaccacactatggaaa

SEQ ID NO: 30343 - DNA, 80 bp, synthetic construct
  source 1..80: mol_type = other DNA
cacctgaaaggtaaacaatcctttacctgtaggtgcgataccatcgtatcatgtgaagggtacgtagttaagaaaatcac

SEQ ID NO: 30344 - DNA, 80 bp, synthetic construct
  source 1..80: mol_type = other DNA
agagatcccttgcaccacttatcaacagaccacagcggagaccgtggaggaaatcgacatgcatatgccgccagatacgc

SEQ ID NO: 30345 - DNA, 80 bp, synthetic construct
  source 1..80: mol_type = other DNA
cggacaggacgttgctatcacagcaatctggcaatgtaaagatcacagtcggaggaaagaaggtgaaatacaactgcacc

SEQ ID NO: 30346 - DNA, 80 bp, synthetic construct
  source 1..80: mol_type = other DNA
tgtggaaccggaaacgttggcactactaattcggacaagacgatcaacacgtgtctaatagagcagtgccacgtctcagt

SEQ ID NO: 30347 - DNA, 80 bp, synthetic construct
  source 1..80: mol_type = other DNA
gacggaccataagaaatggcagttcaactcacctttcgtcccgagagccgacgaaccggctagaaaaggcaaagtccata

SEQ ID NO: 30348 - DNA, 80 bp, synthetic construct
  source 1..80: mol_type = other DNA
tcccattcccgttggacaacatcacatgcagagttccaatggcgcgcgaaccaaccgtcatccacggcaaaagagaagtg

SEQ ID NO: 30349 - DNA, 80 bp, synthetic construct
  source 1..80: mol_type = other DNA
acactgcaccttcacccagatcatcccacgctcttttcctaccgcacactgggtgaggacccgcagtatcacgaggaatg

SEQ ID NO: 30350 - DNA, 80 bp, synthetic construct
  source 1..80: mol_type = other DNA
ggtgacagcggcggtggaacggaccatacccgtaccagtggacgggatggagtaccactggggaaacaacgacccagtga

SEQ ID NO: 30351 - DNA, 80 bp, synthetic construct
  source 1..80: mol_type = other DNA
ggctttggtctcaactcaccactgaagggaaaccgcacggctggccgcatcagatcgtacagtactactatgggctttac

SEQ ID NO: 30352 - DNA, 80 bp, synthetic construct
  source 1..80: mol_type = other DNA
ccggccgctacagtatccgcggtcgtcgggatgagcttactggcgttgatatcgatcttcgcgtcgtgctacatgctggc

SEQ ID NO: 30353 - DNA, 80 bp, synthetic construct
  source 1..80: mol_type = other DNA
tgcggcccgcagtaagtgcttgaccccttatgctttaacaccaggagctgcagttccgtggacgctggggatactctgct

SEQ ID NO: 30354 - DNA, 80 bp, synthetic construct
  source 1..80: mol_type = other DNA
tatgtgccccggcctgtacggtaaaacggtagggtacgccgtgacgtatcacgcggagggattcctagtgtgcaagacca

SEQ ID NO: 30355 - DNA, 80 bp, synthetic construct
  source 1..80: mol_type = other DNA
gcgccccgcgggcgcacgcagctagtgtggcagagactatggcctacttgtgggaccaaaaccaagcgttgttctggttg

SEQ ID NO: 30356 - DNA, 80 bp, synthetic construct
  source 1..80: mol_type = other DNA
gagtttgcggcccctgttgcctgcatcctcatcatcacgtattgcctcagaaacgtgctgtgttgctgtaagagcctttc

SEQ ID NO: 30357 - DNA, 80 bp, synthetic construct
  source 1..80: mol_type = other DNA
ttttttagtgctactgagcctcggggcaaccgccagagcttacgaacattcgacagtaatgccgaacgtggtggggttcc

SEQ ID NO: 30358 - DNA, 80 bp, synthetic construct
  source 1..80: mol_type = other DNA
cgtataaggctcacattgaaaggccaggatatagccccctcactttgcagatgcaggttgttgaaaccagcctcgaacca

SEQ ID NO: 30359 - DNA, 80 bp, synthetic construct
  source 1..80: mol_type = other DNA
acccttaatttggaatacataacctgtgagtacaagacggtcgtcccgtcgccgtacgtgaagtgctgcggcgcctcaga

SEQ ID NO: 30360 - DNA, 80 bp, synthetic construct
  source 1..80: mol_type = other DNA
agcagtggtgtatgtgaatggagagactcctgttaattttaatggagtgaagctgaccgcgggtcctctgtccacagcct

SEQ ID NO: 30361 - DNA, 80 bp, synthetic construct
  source 1..80: mol_type = other DNA
ggtcgccgttcgacaaaaagatcgtgcagtatgccggggaaatctataattatgactttccggaatacggagccggccac

SEQ ID NO: 30362 - DNA, 80 bp, synthetic construct
  source 1..80: mol_type = other DNA
caatcccggttatgacgagttacttgaagcagtactgaaatgtccaggcagaggcaagaggtccacggaggagctgttta

SEQ ID NO: 30363 - DNA, 80 bp, synthetic construct
  source 1..80: mol_type = other DNA
ctgcgtacgataccgctgttgtagtggagagagtggcaattccttgcataagaagggtcgttcccgtgccggcaccgcgc

SEQ ID NO: 30364 - DNA, 80 bp, synthetic construct
  source 1..80: mol_type = other DNA
agataaacaacccagaatgaaggtcactgtagatgttgaggctgatagcccatttttgaaggcccttcagaaagcattcc

SEQ ID NO: 30365 - DNA, 80 bp, synthetic construct
  source 1..80: mol_type = other DNA
atcaggatgtgtatgcggttgatggaccgacgagcctttatcatcaggccaacaaaggggttagagtcgcctattggata

SEQ ID NO: 30366 - DNA, 80 bp, synthetic construct
  source 1..80: mol_type = other DNA
gggcagcaagggtcgttcccgtgccagtctctcctacacccacgcctcgcgttctgagagcctcggtatgcagtgtgacc

SEQ ID NO: 30367 - DNA, 80 bp, synthetic construct
  source 1..80: mol_type = other DNA
gaccgccgggatagatctgaccacagagcagtggaacacagtggactactttaaagaggataaggcccactcagctgaga

SEQ ID NO: 30368 - DNA, 80 bp, synthetic construct
  source 1..80: mol_type = other DNA
tcgttctgaatcagctgtgcgtgcgatacttcggcctagacttagattcaggtttgttctccgcacccacagttccgctt

SEQ ID NO: 30369 - DNA, 80 bp, synthetic construct
  source 1..80: mol_type = other DNA
tctatcaggaacaaccattgggacaattcaccgtcacccaacatgtacgggttgaaccatgaagtggtcaggcaactatc

SEQ ID NO: 30370 - DNA, 80 bp, synthetic construct
  source 1..80: mol_type = other DNA
gatgtctccgtctttgacaaggggctggagttcatggctagacctgttcccgcaccgcgaaccattttcaggactccacc

SEQ ID NO: 30371 - DNA, 80 bp, synthetic construct
  source 1..80: mol_type = other DNA
tgtcccgaaaccgcgtgcgcggaggccattgcaccccttgtctagcagatcgagctcgcgctccagcctggtgtctaatc

SEQ ID NO: 30372 - DNA, 80 bp, synthetic construct
  source 1..80: mol_type = other DNA
caccgggtgtcaaccgagtgatcaccagggaagagtttgaggccttcgtcgcccaacagcaatgacggttcgacgcgggt

SEQ ID NO: 30373 - DNA, 80 bp, synthetic construct
  source 1..80: mol_type = other DNA
cgcacagacactttcaaatatacccatgaaaaacctcagggctactacagctggcaccatggagcggtacagtatgaaaa

SEQ ID NO: 30374 - DNA, 80 bp, synthetic construct
  source 1..80: mol_type = other DNA
cacgacacctatacatggcgggcaagtgacacttgttccgccggtcgtctctaagctcttcctctgcattgcaagagttt

SEQ ID NO: 30375 - DNA, 80 bp, synthetic construct
  source 1..80: mol_type = other DNA
tctttatttgtgccactatagggcacttactaaccatagaagtaattcattttgtttttaatatttcaaaaaaaaaaaaa

SEQ ID NO: 30376 - DNA, 80 bp, synthetic construct
  source 1..80: mol_type = other DNA
aataacaaaatataaaaatcaacaaaaatcataaaatagaaaactagaaatagaagtaggtatgaaggtatatgtgtccc

SEQ ID NO: 30377 - DNA, 80 bp, synthetic construct
  source 1..80: mol_type = other DNA
tacccattagcatagtacctactaaagtgaagctgattccaacagtgaatcttgagtacattacatgccattacaagacc

SEQ ID NO: 30378 - DNA, 80 bp, synthetic construct
  source 1..80: mol_type = other DNA
gcgtcaccgatcacgcccaggcatataaagcacatacagcctcagtccaagccttcttaaatatcacagttggaggacac

SEQ ID NO: 30379 - DNA, 80 bp, synthetic construct
  source 1..80: mol_type = other DNA
tcaacaacagcagtggtgtatgtgaatggagagactcctgttaattttaatggagtgaagctgaccgcgggtcctctgtc

SEQ ID NO: 30380 - DNA, 80 bp, synthetic construct
  source 1..80: mol_type = other DNA
cacagcctggtcgccgttcgacaaaaagatcgtgcagtacgccggggaaatctataattatgactttccggaatacggag

SEQ ID NO: 30381 - DNA, 80 bp, synthetic construct
  source 1..80: mol_type = other DNA
ccggccacgcaggagcgtttggtgacatccaggctaggacgatatctagttccgatgtatacgccaacacaaaccttgtg

SEQ ID NO: 30382 - DNA, 80 bp, synthetic construct
  source 1..80: mol_type = other DNA
ctgcagagaccaaaagccggagcaatccatgtcccgtacacccaggccccatcgggttatgaacaatggaagaaagacaa

SEQ ID NO: 30383 - DNA, 80 bp, synthetic construct
  source 1..80: mol_type = other DNA
cattgaaagaagccgcagtcgagctggccgaacagggttcggccactatacatttttcgactgccagcatccatccggag

SEQ ID NO: 30384 - DNA, 80 bp, synthetic construct
  source 1..80: mol_type = other DNA
tttagactccaaatatgcacgtcttatgttacgtgcaaaggggattgtcaccctccgaaagatcatatcgtgacgcatcc

SEQ ID NO: 30385 - DNA, 80 bp, synthetic construct
  source 1..80: mol_type = other DNA
taacatctttactgggagggtcagctataattataataattggacttgtgttagccactgttgtggctatgtatgtgctg

SEQ ID NO: 30386 - DNA, 80 bp, synthetic construct
  source 1..80: mol_type = other DNA
ggcatgctgcttgtaaagttttattacaaataacgtgcggcaattggcgagccgctttaattagaattttattttctttt

SEQ ID NO: 30387 - DNA, 80 bp, synthetic construct
  source 1..80: mol_type = other DNA
tccactctttcgtgctgcccagaattggaagcagcaccttggagattgggctgaggaccaggatcagaaaactactggag

SEQ ID NO: 30388 - DNA, 80 bp, synthetic construct
  source 1..80: mol_type = other DNA
gaacctgtggacagaccaccattgattaccgccgatgacatacacgaggccaagaacgcggcggatgaggctaaggaagt

SEQ ID NO: 30389 - DNA, 80 bp, synthetic construct
  source 1..80: mol_type = other DNA
caaggaggctgaagagctcagggcagcattaccaccgctgtctgccgatgtagaggaacctgcactggaggcggacgtcg

SEQ ID NO: 30390 - DNA, 80 bp, synthetic construct
  source 1..80: mol_type = other DNA
acttaatgctgcaggaggcgggagcgggatctgtcgaaacccccaggaggctcatcaaagtcaccagttatgcaggagaa

SEQ ID NO: 30391 - DNA, 80 bp, synthetic construct
  source 1..80: mol_type = other DNA
gacaaaatcggctcctacgcggtgctctccccacaggcagtactgcgaagtgaaaaactgacgtgtattcacccgcttgc

SEQ ID NO: 30392 - DNA, 80 bp, synthetic construct
  source 1..80: mol_type = other DNA
agagcaggtaattgtaattacacactctgggaggaaaggtagatacgcagttgagccttaccacggaaaagtggtagtac

SEQ ID NO: 30393 - DNA, 80 bp, synthetic construct
  source 1..80: mol_type = other DNA
ccgaggggcaggctatacccgtccaagacttccaagcactcagtgagagcgccacaattgtgtataacgaacgtgagttc

SEQ ID NO: 30394 - DNA, 80 bp, synthetic construct
  source 1..80: mol_type = other DNA
gtgaataggtatttacaccacattgccacgcacggtggagctctgaacacagacgaggagtattacagggtggtgaaacc

SEQ ID NO: 30395 - DNA, 80 bp, synthetic construct
  source 1..80: mol_type = other DNA
tagtgaacatgaaggtgagtacctatatgacattgacaagaaacagtgtgtgaagaaagaactggtttcgggactaggtt

SEQ ID NO: 30396 - DNA, 80 bp, synthetic construct
  source 1..80: mol_type = other DNA
tgacaggagaacttgtcgatccccccttccatgaatttgcatatgaaagcttgaggacacgtccagccgcaccttatcaa

SEQ ID NO: 30397 - DNA, 80 bp, synthetic construct
  source 1..80: mol_type = other DNA
gtaccaactataggtgtgtacggcgttcccgggtccgggaagtccggaattatcaagagcgcagtcacaaaaaaagactt

SEQ ID NO: 30398 - DNA, 80 bp, synthetic construct
  source 1..80: mol_type = other DNA
ggtagtgagtgctaagaaggagaactgtgccgagataataagggacgtcaagaaaatgaaagggttggacgtcaatgccc

SEQ ID NO: 30399 - DNA, 80 bp, synthetic construct
  source 1..80: mol_type = other DNA
gctatgtggtgacccaaagcaatgtggcttctttaatatgatgtgcttgaaagtgcacttcaaccatgaaatatgcactc

SEQ ID NO: 30400 - DNA, 80 bp, synthetic construct
  source 1..80: mol_type = other DNA
cagtgacgtcggtagtgtccacactgttttatgacaaaagaatgagaactactaacccacgggattctaaaatcgaaatt

SEQ ID NO: 30401 - DNA, 80 bp, synthetic construct
  source 1..80: mol_type = other DNA
gacacaacaggaagtactaaaccaaaaaaggatgacttgattcttacatgtttcaggggatgggttaagcaactgcaaat

SEQ ID NO: 30402 - DNA, 80 bp, synthetic construct
  source 1..80: mol_type = other DNA
agactacaaaggaaatgaaataatgaccgcggctgcctcacagggattaacgcggaaaggtgtctacgcggttaggtaca

SEQ ID NO: 30403 - DNA, 80 bp, synthetic construct
  source 1..80: mol_type = other DNA
ggaaaactcttgcaggggacccgtggataaagaccctgaccgcgaagtaccccggagatttcaccgcaacaatggaagaa

SEQ ID NO: 30404 - DNA, 80 bp, synthetic construct
  source 1..80: mol_type = other DNA
tggcaggcagaacatgatgccatcatgagacacatcctggagaaaccggaccccacggatgtcttccaaaacaaagctaa

SEQ ID NO: 30405 - DNA, 80 bp, synthetic construct
  source 1..80: mol_type = other DNA
atgtttgctgggcaaaggcacttgtacctgtgcttaagacagccgggatagatttgaccacagaacagtggaacacagtg

SEQ ID NO: 30406 - DNA, 80 bp, synthetic construct
  source 1..80: mol_type = other DNA
gattacttcaaagaggataaggcccactcagctgagatcgttttgaatcagctgtgcgtgcgattcttcggtctagactt

SEQ ID NO: 30407 - DNA, 80 bp, synthetic construct
  source 1..80: mol_type = other DNA
agattctggtttgttttccgcccccacagttccgctctccattaggaacaaccattgggacaactcaccgtcacccaaca

SEQ ID NO: 30408 - DNA, 80 bp, synthetic construct
  source 1..80: mol_type = other DNA
tgtacgggttgaaccatgaagtggtcaggcaactatcccgcaggtaccctcaactaccgcgtgcggtgactactgggaga

SEQ ID NO: 30409 - DNA, 80 bp, synthetic construct
  source 1..80: mol_type = other DNA
gtatacgacatgaacaccggtaccttgcgcaattatgatccgcgcataaatttcgtaccggtgaaccgtcgtctaccaca

SEQ ID NO: 30410 - DNA, 80 bp, synthetic construct
  source 1..80: mol_type = other DNA
gctctcgtgacgcaacatgccgatcacccccccagtgatttttccgcctttgtcagtaagcttaaaggcagaacggtcct

SEQ ID NO: 30411 - DNA, 80 bp, synthetic construct
  source 1..80: mol_type = other DNA
tgtagttggtgagaagatgagtatttcaggtaagacggtagactggttatctgatacacctgattctaccttcagggcgc

SEQ ID NO: 30412 - DNA, 80 bp, synthetic construct
  source 1..80: mol_type = other DNA
gcctggacttaggcatacccaatgaattaccgaagtacgatatcgtcttcgtaaacgtaagaacacaataccgctaccac

SEQ ID NO: 30413 - DNA, 80 bp, synthetic construct
  source 1..80: mol_type = other DNA
cactaccagcagtgtgaggaccacgccattaagttgagcatgttgactaagaaggcatgcctgcacctaaatcctggagg

SEQ ID NO: 30414 - DNA, 80 bp, synthetic construct
  source 1..80: mol_type = other DNA
aacttgtgtgagcattggttacggctatgcggaccgggccagcgaaagcatcattggagcagtcgctcggcagttcaagt

SEQ ID NO: 30415 - DNA, 80 bp, synthetic construct
  source 1..80: mol_type = other DNA
tctcgagggtgtgcaaaccaaaggtgtctaaggaagagactgaagtgctatttgtcttcatcgggttcgatcgtaaaacg

SEQ ID NO: 30416 - DNA, 80 bp, synthetic construct
  source 1..80: mol_type = other DNA
cgaacccataacccatacaaactttccaccaccttgactaatatttacaccggctcgaggctccatgaagctggctgcgc

SEQ ID NO: 30417 - DNA, 80 bp, synthetic construct
  source 1..80: mol_type = other DNA
gagcgaccctgatctcgaaactgaaacgatttgccttcatgacgatgaaacctgtcgattcgagggtcaagtcgcagtgt

SEQ ID NO: 30418 - DNA, 80 bp, synthetic construct
  source 1..80: mol_type = other DNA
gccttcgtaccatgtagtgcgcggagacatagccactgccacggaaggagtaatcgtcaatgctgccaacagcaagggcc

SEQ ID NO: 30419 - DNA, 80 bp, synthetic construct
  source 1..80: mol_type = other DNA
aaccaggcagtggagtgtgcggagctctgtatcggaagtaccccgaaagcttcgacctacaaccaatagaagtggggaaa

SEQ ID NO: 30420 - DNA, 80 bp, synthetic construct
  source 1..80: mol_type = other DNA
gctagattagtcaaaggtaactcaaaacatctcatccatgcagtggggcctaattttaacaaagtgtctgaagtggaagg

SEQ ID NO: 30421 - DNA, 80 bp, synthetic construct
  source 1..80: mol_type = other DNA
tgacaaacagctggcagaggcgtacgaatctatagccaagattattaatgacaacaattacagatctgtggctatcccgc

SEQ ID NO: 30422 - DNA, 80 bp, synthetic construct
  source 1..80: mol_type = other DNA
ttctgtccaccggaatatttgccggaaacaaggataggttaatgcaatccttaaaccatctgttaacggcattggacaca

SEQ ID NO: 30423 - DNA, 80 bp, synthetic construct
  source 1..80: mol_type = other DNA
acagacgcagacgtggccatatactgcagagacaagaaatgggaagtgacgttgaaagaggtcgtagccaggagagaagc

SEQ ID NO: 30424 - DNA, 80 bp, synthetic construct
  source 1..80: mol_type = other DNA
atatgtatctctgaagattcctccgtagcagagccggatgcagagctggttagagttcacccaaagagctctctggctgg

SEQ ID NO: 30425 - DNA, 80 bp, synthetic construct
  source 1..80: mol_type = other DNA
aaggaaaggctacagcactagtgacgggaagactttctcatatcttgaaggaaccaaattccatcaggcggcgaaggacg

SEQ ID NO: 30426 - DNA, 80 bp, synthetic construct
  source 1..80: mol_type = other DNA
acgtggcagaaatcaacgccatgtggcctaccgctacagaggctaatgagcaggtgtgcttatacattctgggtgaaagt

SEQ ID NO: 30427 - DNA, 80 bp, synthetic construct
  source 1..80: mol_type = other DNA
atgagcagtataagatccaaatgccccgttgaggaatcagaggcatccactccaccaagtacattgccctgcttgtgcat

SEQ ID NO: 30428 - DNA, 80 bp, synthetic construct
  source 1..80: mol_type = other DNA
acgctatgaccccggaacgtgttcagcgtttgaaagcctctcgccccgaacaaattacagtctgctcttccttccctttg

SEQ ID NO: 30429 - DNA, 80 bp, synthetic construct
  source 1..80: mol_type = other DNA
ccgaagtacagaataacaggagtgcagaagatccaatgttcgcaccctatacttttctctcctaaagtacctgagtatat

SEQ ID NO: 30430 - DNA, 80 bp, synthetic construct
  source 1..80: mol_type = other DNA
acaccctagaaagtatcttacagacgcagctcccgcgagcaatgaggcagccgaattaacatcggtggacgtgcaaccac

SEQ ID NO: 30431 - DNA, 80 bp, synthetic construct
  source 1..80: mol_type = other DNA
aggtggaagagagtcctgtgaacacggaacaaccggtggaggaggaagacgatataagcgtgctgtctgaggatacacca

SEQ ID NO: 30432 - DNA, 80 bp, synthetic construct
  source 1..80: mol_type = other DNA
aaccaagtgcacctagtggaggctgatgtacaccacttcagcgcaagtgctcagtcctcgtcctggtccattccatgtgc

SEQ ID NO: 30433 - DNA, 80 bp, synthetic construct
  source 1..80: mol_type = other DNA
atccgactttgatgtcgagagtctttccgtgctcgaatccctgggtgctagtgacgcgatcagcatggagtcgtcctcaa

SEQ ID NO: 30434 - DNA, 80 bp, synthetic construct
  source 1..80: mol_type = other DNA
acgaaacagctctcgctttgcggaccatttttaagactccacccattccaaggcctcgagtgcagagtacatccacagac

SEQ ID NO: 30435 - DNA, 80 bp, synthetic construct
  source 1..80: mol_type = other DNA
gtggacagtatttcagcactcgagtcttgcgacagcaccagcgatgcgcgtagcataggatcgtcctctgaaaccgatgt

SEQ ID NO: 30436 - DNA, 80 bp, synthetic construct
  source 1..80: mol_type = other DNA
atcaatttttgacaaggggttggagttcctggctagacctgttcccgcaccgcgaaccatttttaggactccacctgtcc

SEQ ID NO: 30437 - DNA, 80 bp, synthetic construct
  source 1..80: mol_type = other DNA
cgaaaccgcgtgtgcggaggccattgcaccctttggctagcagatcaagctcgcgctccagcctggcgtctaatccaccg

SEQ ID NO: 30438 - DNA, 80 bp, synthetic construct
  source 1..80: mol_type = other DNA
ggtgttaaccgagtgatcactagggaagaattcgaggccttcgttgcccaacagcaatgacggttcgacgcgggcgcata

SEQ ID NO: 30439 - DNA, 80 bp, synthetic construct
  source 1..80: mol_type = other DNA
cattttctcctcggacactggtcaaggacacttgcaacaaaaatcagtaaggcagacagtgttgtctgaagtggtgctag

SEQ ID NO: 30440 - DNA, 80 bp, synthetic construct
  source 1..80: mol_type = other DNA
tctcgtatgccccgcgcctcgacctgaataaagaagagatactgagaaagaagttacaattgaaccccacgcaagctaac

SEQ ID NO: 30441 - DNA, 80 bp, synthetic construct
  source 1..80: mol_type = other DNA
cggagtagatatcagtcccggagggttgaaaacatgaaggccataacaactaagagaatcttacagggattaggtcacta

SEQ ID NO: 30442 - DNA, 80 bp, synthetic construct
  source 1..80: mol_type = other DNA
tctgaaatctgaaggtaaggttgagtgctatcgtacgttgcaccccgttcctttgtattcagcaagtgtgaatagagcgt

SEQ ID NO: 30443 - DNA, 80 bp, synthetic construct
  source 1..80: mol_type = other DNA
tctccagtcccagagttgctgtcgaagcatgcaatgttgttctgaaggaaaattttccgacagtggcgtcgtactgcata

SEQ ID NO: 30444 - DNA, 80 bp, synthetic construct
  source 1..80: mol_type = other DNA
cctattagattgaccgaggaaaacgtggtcaactacataaccaaactaaaagggccgaaggcggctgccctgtatgcaaa

SEQ ID NO: 30445 - DNA, 80 bp, synthetic construct
  source 1..80: mol_type = other DNA
gactcataatttagacatgctgcaagacatacccatggacaggtttattatggatttaaaaagagatgtcaaggtaactc

SEQ ID NO: 30446 - DNA, 80 bp, synthetic construct
  source 1..80: mol_type = other DNA
caggaaccaagcacactgaagaaaggcctaaggtccaagtaatccaggctgcagatccattggctacggcttatctatgt

SEQ ID NO: 30447 - DNA, 80 bp, synthetic construct
  source 1..80: mol_type = other DNA
acgccataattgccgagcatttccaaccaggagattgggtgttagagacagacatagcgtccttcgataaaagcgaagac

SEQ ID NO: 30448 - DNA, 80 bp, synthetic construct
  source 1..80: mol_type = other DNA
tgttcttgactctgtttgtcaacactgtgatcaacatggtcatagccagcagagttttgcgggagagactgacaaactcc

SEQ ID NO: 30449 - DNA, 80 bp, synthetic construct
  source 1..80: mol_type = other DNA
gaaatttttaaaaccatccaataacgtcttgttctctgtaggatctacaatctaccacgagaagcgagacttacttagga

SEQ ID NO: 30450 - DNA, 80 bp, synthetic construct
  source 1..80: mol_type = other DNA
ttctatgtgactctgtgacaggaactgcatgccgcgtggcagaccctttgaagagattattcaagcttggaaaaccactg

SEQ ID NO: 30451 - DNA, 80 bp, synthetic construct
  source 1..80: mol_type = other DNA
gctgtggatgatgaacatgatgatgacaggcgacgagcactacaggaggaatctgcccggtggaatcgggtgggaatttt

SEQ ID NO: 30452 - DNA, 80 bp, synthetic construct
  source 1..80: mol_type = other DNA
ttccgagttgtgcaaagccgttgagtcgcgatatgaaacagtgggcacggccgtcattatcatggccatgactacgctcg

SEQ ID NO: 30453 - DNA, 80 bp, synthetic construct
  source 1..80: mol_type = other DNA
ccagcagtgtcgagtcgttcagttgtctgagaggggcccctatatccctctacggctaacctgaatggactgcgacgtag

SEQ ID NO: 30454 - DNA, 80 bp, synthetic construct
  source 1..80: mol_type = other DNA
acccaatgcagcccatgcccttccgcaatccttttgcgactcccagaagaccatggtttccaaggaccgaccccttttta

SEQ ID NO: 30455 - DNA, 80 bp, synthetic construct
  source 1..80: mol_type = other DNA
gcgatgcaggtgcaagagctggcacggtctatggccaatttgacgttcaagcaacggcgagacgtgccgcccgaaggtcc

SEQ ID NO: 30456 - DNA, 80 bp, synthetic construct
  source 1..80: mol_type = other DNA
accagctaagaagaagaagaaggataactcgcaacaaggtggtcggaatcagaatggaaagaaaaagaacaagctagtaa

SEQ ID NO: 30457 - DNA, 80 bp, synthetic construct
  source 1..80: mol_type = other DNA
agaaaaagaagaagacagggccgccaacccccaaaaataatggcggcaaaaagaaagtcaataggaagccagggaagaga

SEQ ID NO: 30458 - DNA, 80 bp, synthetic construct
  source 1..80: mol_type = other DNA
caacgaatggtcatgaagttggagtcagacaagacgttccctatcatgcttgatggaaaagttaatggatacgcatgcgt

SEQ ID NO: 30459 - DNA, 80 bp, synthetic construct
  source 1..80: mol_type = other DNA
ggtcggtggcaagctgtttagaccactgcatgtggagggcaagatcgacaacgacgtgttgtcctccctcaagacaaaaa

SEQ ID NO: 30460 - DNA, 80 bp, synthetic construct
  source 1..80: mol_type = other DNA
gctggcacctaccgtccgtttttcacctacgtggtaagcagaattacacttgtcggtgtgagactatagttagttgcgac

SEQ ID NO: 30461 - DNA, 80 bp, synthetic construct
  source 1..80: mol_type = other DNA
tggcagattcacagtgcccaaaggagtcggagccaaaggagatagtggccgccccatacttgacaatcaagggcgtgtgg

SEQ ID NO: 30462 - DNA, 80 bp, synthetic construct
  source 1..80: mol_type = other DNA
aaggggttacagtcaaatacacccccgagaacagcgagcagtggtccttggtgaccactatgtgtttgcttgccaatgtc

SEQ ID NO: 30463 - DNA, 80 bp, synthetic construct
  source 1..80: mol_type = other DNA
acgttcccgtgcacccaaccacccatctgctacgaccgcaagccagcagaaactttgtccatgctcagtcataacataga

SEQ ID NO: 30464 - DNA, 80 bp, synthetic construct
  source 1..80: mol_type = other DNA
aggcggtaaggagcgaagggcatgacggctatgtacgactccagacctcatctcagtatggattagacccatcaggaaac

SEQ ID NO: 30465 - DNA, 80 bp, synthetic construct
  source 1..80: mol_type = other DNA
ttgaaaggcagaaccatgaggtatgatatgcatggaactatagaagagataccgttacaccaggtgtctgttcatacctc

SEQ ID NO: 30466 - DNA, 80 bp, synthetic construct
  source 1..80: mol_type = other DNA
acgtccttgccacataatagatgggcatggatactttttgcttgccaggtgccctgcaggagactccataactatggaat

SEQ ID NO: 30467 - DNA, 80 bp, synthetic construct
  source 1..80: mol_type = other DNA
gtgggaagagaactgtatacacacccaccagagcatggagctgaacaaccttgtcacgtgtacgctcacgacgcacaaaa

SEQ ID NO: 30468 - DNA, 80 bp, synthetic construct
  source 1..80: mol_type = other DNA
taggggagcttacgtggaaatgcaccttccaggctccgaagtggacagtactttactgtccatgagcggtagttctgttc

SEQ ID NO: 30469 - DNA, 80 bp, synthetic construct
  source 1..80: mol_type = other DNA
atgtgactccacctgccgggcaaagcgtccaagtggagtgcgaatgtggtggcaccaagatctccgaaaccatcaattct

SEQ ID NO: 30470 - DNA, 80 bp, synthetic construct
  source 1..80: mol_type = other DNA
gctaagcaatacagtcagtgctctaagacatctcagtgtagggcatatcgtacacagaatgacaaatgggtgtacaattc

SEQ ID NO: 30471 - DNA, 80 bp, synthetic construct
  source 1..80: mol_type = other DNA
ggacaaactgcctaaagcattgggagaaactctcaaaggcaaactgcatgtgcccttcgtactgaccgaagcaaaatgca

SEQ ID NO: 30472 - DNA, 80 bp, synthetic construct
  source 1..80: mol_type = other DNA
cagtaccattggccccggaacccattattacctttgggtttcgctccgtgtctctgaaacttcatcccaagaaccccacc

SEQ ID NO: 30473 - DNA, 80 bp, synthetic construct
  source 1..80: mol_type = other DNA
ttcctaaccacgaggcagctggatggagaaccagcctacacccacgaacttataacccaccctgtagtgagaaatttctc

SEQ ID NO: 30474 - DNA, 80 bp, synthetic construct
  source 1..80: mol_type = other DNA
ggttacagagaaaggttgggaatttgtgtggggaaaccatccgcctcaaaggtactggtcccaagaaactgcaccgggta

SEQ ID NO: 30475 - DNA, 80 bp, synthetic construct
  source 1..80: mol_type = other DNA
cgcactactaccacaggtatcccatgtccaccattctaggcttatcaatttgtgcggcgatagtgacgacatccattgca

SEQ ID NO: 30476 - DNA, 80 bp, synthetic construct
  source 1..80: mol_type = other DNA
gcatccgtatggctcttttgcaaatcacggatttcctgcctgaccccctatcgcttgactccaaatgcccgcatgccttt

SEQ ID NO: 30477 - DNA, 80 bp, synthetic construct
  source 1..80: mol_type = other DNA
gtgcttagccgttttgtgctgcgcacgcacagccaaagccgaaactacttgggaatccctggatcacctctggaaccaca

SEQ ID NO: 30478 - DNA, 80 bp, synthetic construct
  source 1..80: mol_type = other DNA
accagcagatgttctggagtcaactgctaatcccgctagcagcactgatagttgctacccgcttgctgaaatgtgtgtgt

SEQ ID NO: 30479 - DNA, 80 bp, synthetic construct
  source 1..80: mol_type = other DNA
cagctaatttaaactcagtgaaatgtacaggtggaagttacgattttagtatacctgtgggtgcatggccagttatgaat

SEQ ID NO: 30480 - DNA, 80 bp, synthetic construct
  source 1..80: mol_type = other DNA
acaatggaagaaagataaaccaccatccctcaagttcacagccccgttcggttgtgaaatttacaccaaccctatccgtg

SEQ ID NO: 30481 - DNA, 80 bp, synthetic construct
  source 1..80: mol_type = other DNA
ctgaaaactgcgctgtgggatcaatcccgctagcttttgacattcccgacgctctgtttaccagggtgtccgaaacaccg

SEQ ID NO: 30482 - DNA, 80 bp, synthetic construct
  source 1..80: mol_type = other DNA
gctggaagagagccctgagaacacggaacaactggtggaggaggaagacagtataagcgtgctgtccgaggcaccacacc

SEQ ID NO: 30483 - DNA, 80 bp, synthetic construct
  source 1..80: mol_type = other DNA
accgagtgattactagggaagaattcgaggccttcgttgcccaacagcaatgacggttcgacgcgggcgcgtacattttc

SEQ ID NO: 30484 - DNA, 80 bp, synthetic construct
  source 1..80: mol_type = other DNA
tcctcggatactggtcaaggacatttgcaacaaaaatcagtaaggcagacagtattgtctgaagtggtgctagagaggac

SEQ ID NO: 30485 - DNA, 80 bp, synthetic construct
  source 1..80: mol_type = other DNA
tctataacagacctataacttattacttcagaaagcaagtcattcgagggaatatttatctatcttggagttggtctgac

SEQ ID NO: 30486 - DNA, 80 bp, synthetic construct
  source 1..80: mol_type = other DNA
ctgtcaaaactatatgatcaagttcacattaagaaagtgatagataagtcctaccaagaatgtttggcaagggacctagc

SEQ ID NO: 30487 - DNA, 80 bp, synthetic construct
  source 1..80: mol_type = other DNA
ccctgccaagttgcgtagctttccgaagaagcacgcatacctcgagcccaccattcgatctgcagtcccatcagcaattc

SEQ ID NO: 30488 - DNA, 80 bp, synthetic construct
  source 1..80: mol_type = other DNA
taatgtgcggcaattggcgagccgctttaattagaatttttattttcttttaccataattggattttgtttttaatattt

SEQ ID NO: 30489 - DNA, 80 bp, synthetic construct
  source 1..80: mol_type = other DNA
ggtagaggagatatgtatctccgaagattcctccgtagcagagccagatgcagagctggttagagttcaccctaagagct

SEQ ID NO: 30490 - DNA, 80 bp, synthetic construct
  source 1..80: mol_type = other DNA
ctttggctggaaggaaaggttacagcactagcgatgggaagactttctcatatcttgaaggaactaaatttcatcaggcg

SEQ ID NO: 30491 - DNA, 80 bp, synthetic construct
  source 1..80: mol_type = other DNA
tgggattcatagagaattggtgcgcagactgaatgcagttctgttgcccaacatacacacattatttgacatgtctgctg

SEQ ID NO: 30492 - DNA, 80 bp, synthetic construct
  source 1..80: mol_type = other DNA
ccttgcgccgcgttcattggcgacgataatatcgtgaaaggggttaagtccgacaaactcatggccgataggtgtgctac

SEQ ID NO: 30493 - DNA, 80 bp, synthetic construct
  source 1..80: mol_type = other DNA
aggcatctaagtatgatctggagtatgctgatgtgccgcagagcatgcgcgcagacacatttaaatacactcatgaaaaa

SEQ ID NO: 30494 - DNA, 80 bp, synthetic construct
  source 1..80: mol_type = other DNA
cagctaaacaatacagtcagtgctcaaagacatcccagtgcagggcttaccgtacacagaatgacaaatgggtgtacaat

SEQ ID NO: 30495 - DNA, 80 bp, synthetic construct
  source 1..80: mol_type = other DNA
taatccacacggactaccacacgaggtgattacgcattattatcacaggtatcccatgtccaccatccttggcttatcaa

SEQ ID NO: 30496 - DNA, 80 bp, synthetic construct
  source 1..80: mol_type = other DNA
tctgtgcggcgctagtgacgacatccatcgcagcatccgtatggctgttttgcaaatcacggatttcatgcctgaccccc

SEQ ID NO: 30497 - DNA, 80 bp, synthetic construct
  source 1..80: mol_type = other DNA
tatcgcttgactccgaatgcccgcatgcctctgtgcttagtcgtcttgtgctgcgcacgcacagccaaagccgaaactac

SEQ ID NO: 30498 - DNA, 80 bp, synthetic construct
  source 1..80: mol_type = other DNA
ttgggaatccctagatcacctctggaatcacaaccagcagatgttctggagtcagctgctaatcccgctagcagcactga

SEQ ID NO: 30499 - DNA, 80 bp, synthetic construct
  source 1..80: mol_type = other DNA
tagttgctacccgcttgttgaaatgtgtgtgttgcgttgtgccttttttagtcgtggccggcgccgtaggcgccggcgct

SEQ ID NO: 30500 - DNA, 80 bp, synthetic construct
  source 1..80: mol_type = other DNA
attacagtcggaggacactcaacgacagcagtggtgtatgtgaatggagagactcccgttaatttcaatggagtgaagct

SEQ ID NO: 30501 - DNA, 80 bp, synthetic construct
  source 1..80: mol_type = other DNA
ccaagtcagtgacgtcggtagtgtccacactgttttatgacaaaagaatgagaactactaacccaagggattccaaaatt

SEQ ID NO: 30502 - DNA, 80 bp, synthetic construct
  source 1..80: mol_type = other DNA
gcaaatagactacaaaggaaatgaaataatgaccgcggctgcctcacagggattgacgcggaaaggtgtctatgcggtta

SEQ ID NO: 30503 - DNA, 80 bp, synthetic construct
  source 1..80: mol_type = other DNA
ggtacaaagttaacgagaacccattgtacgcacccacctcagagcatgtaaatgtgctgttgacccggacggaagacaag

SEQ ID NO: 30504 - DNA, 80 bp, synthetic construct
  source 1..80: mol_type = other DNA
attgtgtggaagactcttgcaggggacccgtggataaagaccctgaccgcgaagtaccccggggatttcactgcaacaat

SEQ ID NO: 30505 - DNA, 80 bp, synthetic construct
  source 1..80: mol_type = other DNA
ggaagaatggcaggcagaacatgatgccatcatgagacacatcctggagaaaccagatcccacggatgtcttccaaaata

SEQ ID NO: 30506 - DNA, 80 bp, synthetic construct
  source 1..80: mol_type = other DNA
gaagcgtatgaatctatagccaggattattaatgataacaattacagatctgtggctatcccgcttctgtccactggaat

SEQ ID NO: 30507 - DNA, 80 bp, synthetic construct
  source 1..80: mol_type = other DNA
ccatatactgcagagacaaaaaatgggaagtcacgttgaaagaggttgtagccaggagagaggcggtagaggagatatgt

SEQ ID NO: 30508 - DNA, 80 bp, synthetic construct
  source 1..80: mol_type = other DNA
aatcagattgaccgaggaaaatgtggtcaactatataaccaagttgaaagggccgaaggcggctgccctgtatgcaaaga

SEQ ID NO: 30509 - DNA, 80 bp, synthetic construct
  source 1..80: mol_type = other DNA
cgcattattatcacaggtatcccatgtccaccatccttggcttatcaatctgtacggcgatagtgacgacatccatcgca

SEQ ID NO: 30510 - DNA, 80 bp, synthetic construct
  source 1..80: mol_type = other DNA
ctctggagtatacccatttatgtggggaggggcgtattgcttttgcgatacggagaatacccagataagcaaggcgtatg

SEQ ID NO: 30511 - DNA, 80 bp, synthetic construct
  source 1..80: mol_type = other DNA
gacttcccagagtacggagccggccatgcaggtgcgttcggtgacatccaagctaggacgatatccagctccgatgtata

SEQ ID NO: 30512 - DNA, 80 bp, synthetic construct
  source 1..80: mol_type = other DNA
ctctcaagttcacagccccttttgggtgtgaaatttataccaaccccatccgtgctgaaaactgcgctgtgggatcaatc

SEQ ID NO: 30513 - DNA, 80 bp, synthetic construct
  source 1..80: mol_type = other DNA
gacaaaatcggctcctacgcagtgctctctccacaagcagtactgcggagcgaaaaactgacatgcattcatccactcgc

SEQ ID NO: 30514 - DNA, 80 bp, synthetic construct
  source 1..80: mol_type = other DNA
cagagcaagtaatcgtaattacacactcagggagaaagggtaggtacgcagtagaaccctaccacggaaaagtggtagta

SEQ ID NO: 30515 - DNA, 80 bp, synthetic construct
  source 1..80: mol_type = other DNA
acacaactggaagtactaaatcaaaaaaagaggacttgattctcacgtgcttcaggggatgggttaagcaactgcaaata

SEQ ID NO: 30516 - DNA, 80 bp, synthetic construct
  source 1..80: mol_type = other DNA
ggtgaatgagaaccccttgtacgcacccacctcagagcatgtgaatgtgttgttgacccgcacggaagacaaaattgtgt

SEQ ID NO: 30517 - DNA, 80 bp, synthetic construct
  source 1..80: mol_type = other DNA
tggcaggcggagcacgatgccatcatgagacatatcctggagaaacctgatcccacggatgtcttccagaataaagctaa

SEQ ID NO: 30518 - DNA, 80 bp, synthetic construct
  source 1..80: mol_type = other DNA
cgtctgttgggcaaaggcacttgtacccgtgcttaagaccgccgggatagatctgaccacagagcagtggaacacagtgg

SEQ ID NO: 30519 - DNA, 80 bp, synthetic construct
  source 1..80: mol_type = other DNA
gattcaggtttgttctccgcacccacagttccgctttctatcaggaacaaccattgggacaattcaccgtcacccaacat

SEQ ID NO: 30520 - DNA, 80 bp, synthetic construct
  source 1..80: mol_type = other DNA
gctctcgtgacgcaacacgctgaccatccccccagtgacttttccgcctttgtcagcaagcttaagggtagaacggtcct

SEQ ID NO: 30521 - DNA, 80 bp, synthetic construct
  source 1..80: mol_type = other DNA
agtagttggtgagaagatgaatatttcgggtaaggcagtagactggttatctgaaacaccggatgctacattcagggcgc

SEQ ID NO: 30522 - DNA, 80 bp, synthetic construct
  source 1..80: mol_type = other DNA
gcctagatttaggcatacccactgaactgccgaaatatgatatcgtcttcgtaaatgtaagaacacagtaccgctaccat

SEQ ID NO: 30523 - DNA, 80 bp, synthetic construct
  source 1..80: mol_type = other DNA
aacatgtgtaagcattggctacggctacgcggaccgggctagcgaaagcattattggtgcagttgctcggcagttcaagt

SEQ ID NO: 30524 - DNA, 80 bp, synthetic construct
  source 1..80: mol_type = other DNA
tctcacgggtgtgcaaaccaaaagtgtctaaggaggagaccgaagttttatttgtcttcattggattcgatcgcaaaaca

SEQ ID NO: 30525 - DNA, 80 bp, synthetic construct
  source 1..80: mol_type = other DNA
cgaacccataatccatataagctttcctccaccttgaccaacatctacaccggttcggggctccatgaagccggctgcgc

SEQ ID NO: 30526 - DNA, 80 bp, synthetic construct
  source 1..80: mol_type = other DNA
ctcaaaacatattattcatgcagtggggccgaatttcagcaaggtgtccgaagtggaaggcgacaagcagctggcagaag

SEQ ID NO: 30527 - DNA, 80 bp, synthetic construct
  source 1..80: mol_type = other DNA
agtagtataagatctaaatgccccgtagaggaatcagaggcatccaccccaccaagtacactgccttgtttgtgtattca

SEQ ID NO: 30528 - DNA, 80 bp, synthetic construct
  source 1..80: mol_type = other DNA
cgctatgaccccggagcgggtccagcgtttgaaagcctctcgccccgaacagatcacagtttgttcttccttcccattgc

SEQ ID NO: 30529 - DNA, 80 bp, synthetic construct
  source 1..80: mol_type = other DNA
cgaagtacagaataacaggagtgcagaagattcaatgctcgcatcctatactcttttctcctaaagtgccagagtatata

SEQ ID NO: 30530 - DNA, 80 bp, synthetic construct
  source 1..80: mol_type = other DNA
catcctagaaaataccttgcagacgcgactcccgcggacaatgaggcagccgaaccaacaatggagtgcgtgcagccgct

SEQ ID NO: 30531 - DNA, 80 bp, synthetic construct
  source 1..80: mol_type = other DNA
gcaggaagagaggcctgcgaacacggaacaaccggtggaggaagatgacagtattagtgtgctgtccgaggacgcaccac

SEQ ID NO: 30532 - DNA, 80 bp, synthetic construct
  source 1..80: mol_type = other DNA
accaagtacatcaagtggaggcagaagtgcatcgctcactctgcgcaagtgctcagtcctcgtcctggtccattccccgt

SEQ ID NO: 30533 - DNA, 80 bp, synthetic construct
  source 1..80: mol_type = other DNA
gcatccgattttgagagtctctccgtgctcgattccttgggtgccaatgacacaatcagtatggggtcttcctcaaatga

SEQ ID NO: 30534 - DNA, 80 bp, synthetic construct
  source 1..80: mol_type = other DNA
aacagcgcttgcgcttcggaccatcttcaggactccacctatcccaaagcctcgagtgaggagtacatccacagacgtgg

SEQ ID NO: 30535 - DNA, 80 bp, synthetic construct
  source 1..80: mol_type = other DNA
acagtatttcagtactcgagtctttgggcagtaccagcgatgtgcgcagcataggttcgtcctcggatgagaccgatgtc

SEQ ID NO: 30536 - DNA, 80 bp, synthetic construct
  source 1..80: mol_type = other DNA
ccctgccaagttgcgtagcttcccaaagaaacacgcatacctcgagcccaccattaggtctgcagttccatccgcaatcc

SEQ ID NO: 30537 - DNA, 80 bp, synthetic construct
  source 1..80: mol_type = other DNA
agaacacgctgcagaatgtactcgcagctgccacaaagaggaactgtaatgtgactcaaatgagagaactgcctgtactg

SEQ ID NO: 30538 - DNA, 80 bp, synthetic construct
  source 1..80: mol_type = other DNA
aataagattgaccgaagaaaacgtggtcaactacataactaaattaaaggggccgaaggcagccgctctgtatgcaaaga

SEQ ID NO: 30539 - DNA, 80 bp, synthetic construct
  source 1..80: mol_type = other DNA
gcgaagacgacgctatggctctgacggcactgatgatcctggaagacctcggggtggatccagagctgctgaccctaatc

SEQ ID NO: 30540 - DNA, 80 bp, synthetic construct
  source 1..80: mol_type = other DNA
gaatgtttctgaccctgtttgtcaacaccgtgatcaacatggtcatagccagcagagttttgcgggagagactgacgaac

SEQ ID NO: 30541 - DNA, 80 bp, synthetic construct
  source 1..80: mol_type = other DNA
gctgtggatgatgaacatgacgatgacaggcggcgagcattacaagaggaatccgcccggtggaaccgcgtgggtatctt

SEQ ID NO: 30542 - DNA, 80 bp, synthetic construct
  source 1..80: mol_type = other DNA
atccaatgcagcctatgcctttccgcaacccttttgcggctcctagaagaccatggttcccaaggaccgacccctttcta

SEQ ID NO: 30543 - DNA, 80 bp, synthetic construct
  source 1..80: mol_type = other DNA
caacgtatggtcatgaagctggagtcagataagaccttccccatcatgcttgatggaagaattaatgggtatgcatgcgt

SEQ ID NO: 30544 - DNA, 80 bp, synthetic construct
  source 1..80: mol_type = other DNA
aggcggtaaggagcgaagggcatgatggctacgtacgactccagacctcgtcccaatacggattggacccatctggaaat

SEQ ID NO: 30545 - DNA, 80 bp, synthetic construct
  source 1..80: mol_type = other DNA
gcgcccatgccacataatagatgggcatggctacttcttgcttgctaggtgcccagcaggtgactccataactatggaat

SEQ ID NO: 30546 - DNA, 80 bp, synthetic construct
  source 1..80: mol_type = other DNA
gtgggaagggaactgtacacacatccaccagagcacggagccgaacaaccatgccacgtgtacgctcacgatgcacagaa

SEQ ID NO: 30547 - DNA, 80 bp, synthetic construct
  source 1..80: mol_type = other DNA
aaagcgtcctcgtagaatgtgaatgtggtggcaccaagatctccgaaaccatcaattctgctaagcaatacagccagtgc

SEQ ID NO: 30548 - DNA, 80 bp, synthetic construct
  source 1..80: mol_type = other DNA
tccaagacagctcagtgcagggcataccgaacacagaatgacaaatgggtgtataattcggacaaattgcctaaagcagc

SEQ ID NO: 30549 - DNA, 80 bp, synthetic construct
  source 1..80: mol_type = other DNA
ccattattacttttgggttccgttctgtgtctctgaaacttcaccccaagaatcccacctttttgaccacgaggcagctg

SEQ ID NO: 30550 - DNA, 80 bp, synthetic construct
  source 1..80: mol_type = other DNA
atttgtgtggggaaaccatccgcctcagaggtactggtcccaggagactgcaccaggtaatccccacggactgccgcacg

SEQ ID NO: 30551 - DNA, 80 bp, synthetic construct
  source 1..80: mol_type = other DNA
tatgcccttgtgcctagcagttttgtgctgcgcacgcacagccagagccgaaaccacttgggaatccctggatcaccttt

SEQ ID NO: 30552 - DNA, 80 bp, synthetic construct
  source 1..80: mol_type = other DNA
ggaaccataatcagcagatgttctggagccagttgctaatcccgctagcagcactgatagtcgctacccgcttgctgaaa

SEQ ID NO: 30553 - DNA, 80 bp, synthetic construct
  source 1..80: mol_type = other DNA
tgtgtgtgttgtgtcgtgccttttttagtcgtggccggcgccgtaggcgccggcgcttacgaacacgcgaccacgatgcc

SEQ ID NO: 30554 - DNA, 80 bp, synthetic construct
  source 1..80: mol_type = other DNA
acactaaagtagatgttaccaacattatcgtcactactggcagtgcataatactgccttttataaacactactggcagtg

SEQ ID NO: 30555 - DNA, 80 bp, synthetic construct
  source 1..80: mol_type = other DNA
acccttattatatcacatcacatattcaattttaaaatttttatacgcgtctctaatggcgcatataataaccacttaca

SEQ ID NO: 30556 - DNA, 80 bp, synthetic construct
  source 1..80: mol_type = other DNA
tactgggaagagtttgctgctaaacctatcagaattacaacagagaatttgaccacttatgtgaccaaattaaaaggtgg

SEQ ID NO: 30557 - DNA, 80 bp, synthetic construct
  source 1..80: mol_type = other DNA
cctttcttggatcccttgttactccacgtagtgagagataaacaacccagaatgaaggtcactgtagatgttgaggctga

SEQ ID NO: 30558 - DNA, 80 bp, synthetic construct
  source 1..80: mol_type = other DNA
tatgtagttcaaagggctacactacccctgattagtaacaaaatagaaaattacaaaaatatgtagttaagtattacaag

SEQ ID NO: 30559 - DNA, 80 bp, synthetic construct
  source 1..80: mol_type = other DNA
caagagccaagatgactctttggcgctgacggcactgatgctgttggaggacctcggggttgaccaagaactactagacc

SEQ ID NO: 30560 - DNA, 80 bp, synthetic construct
  source 1..80: mol_type = other DNA
cacccgacctatcctatccaaaatggagaaagtacacgtagacttagacgccgacagcccatacgtcaagtcgctgcaaa

SEQ ID NO: 30561 - DNA, 80 bp, synthetic construct
  source 1..80: mol_type = other DNA
cgctactcaatgcacatcgaaacagcaccctgactaccagtgccagatattcgcaggagtatacccattcatgtggggag

SEQ ID NO: 30562 - DNA, 80 bp, synthetic construct
  source 1..80: mol_type = other DNA
tgccacctgcgcagtgcataatgctgcgaataatcacactacaggtagcttactaccatcattaacactactggcagtgc

SEQ ID NO: 30563 - DNA, 80 bp, synthetic construct
  source 1..80: mol_type = other DNA
cactactggcagtgcataatgctgccttttataacactatcggcagtgcataatactgcctattataaaatcttttaaaa

SEQ ID NO: 30564 - DNA, 80 bp, synthetic construct
  source 1..80: mol_type = other DNA
gggtcagtcggtcctgagagatgggcggcgcatgagagaagcccagaccaattacctacccaaaatggagaaagttcacg

SEQ ID NO: 30565 - DNA, 80 bp, synthetic construct
  source 1..80: mol_type = other DNA
cactattcgggaagctgagatagaagttgaagggaattctcagctgcaaatctctttctcgacggccttagccagcgccg

SEQ ID NO: 30566 - DNA, 80 bp, synthetic construct
  source 1..80: mol_type = other DNA
gtgatacagtggtttcgtgtgagggctacgtcgttaagagaataacgatgagcccaggcctttatggaaaaaccacaggg

SEQ ID NO: 30567 - DNA, 80 bp, synthetic construct
  source 1..80: mol_type = other DNA
atagggcacggtatagaggaacctaccctacaaactaatcgatccaatatggaaagaattcacgttgacttagatgctga

SEQ ID NO: 30568 - DNA, 80 bp, synthetic construct
  source 1..80: mol_type = other DNA
tgtaccctttcatgtggggaggcgcacagtgcttctgtgacagtgagaacacacaactgagtgaggcatacgtcgagttc

SEQ ID NO: 30569 - DNA, 80 bp, synthetic construct
  source 1..80: mol_type = other DNA
aaggggcttgtttacaactacgacttccctgagtatggagctatgaaaccaggagcgttcggcgatattcaagcatcctc

SEQ ID NO: 30570 - DNA, 80 bp, synthetic construct
  source 1..80: mol_type = other DNA
ttgggggagcatcatctctcattgttgtaggacttatagtgttggtctgcagctctatgcttataaacacacgtagatga

SEQ ID NO: 30571 - DNA, 80 bp, synthetic construct
  source 1..80: mol_type = other DNA
attttacttaaaaacactatacacactttataaattcttttataatttttcttttgtttttattttgtttttaaaatttc

SEQ ID NO: 30572 - DNA, 80 bp, synthetic construct
  source 1..80: mol_type = other DNA
gtgccgacttggacgacgagaaggagctaggggtgcgggagcgcactcttactatgggctgctgctgggctttcaagacc

SEQ ID NO: 30573 - DNA, 80 bp, synthetic construct
  source 1..80: mol_type = other DNA
gcttctaaatggggttaagcaccccgttaacaccctgtacattgatgaggcatttgcctgccatgcagggacgctgctgg

SEQ ID NO: 30574 - DNA, 80 bp, synthetic construct
  source 1..80: mol_type = other DNA
tccaatcaccgctatcattgtatctgccccatgataagcgctgaagacccggacagactacaacggtatgcagaaagact

SEQ ID NO: 30575 - DNA, 80 bp, synthetic construct
  source 1..80: mol_type = other DNA
ataccccggggatttcacggcttcattggacgactggcagcgcgaacacgacgctattatggcacgcgttcttgataaac

SEQ ID NO: 30576 - DNA, 80 bp, synthetic construct
  source 1..80: mol_type = other DNA
cctgggggagagtatgtccagcatccgctccaaatgcccagtagaggagtcagaggcgtctgctccacctcacacacttc

SEQ ID NO: 30577 - DNA, 80 bp, synthetic construct
  source 1..80: mol_type = other DNA
tgtccggctaaactgagaagctacccaaagaagcatagctacttgcagccagagataagatcagccgtcccatcgcctat

SEQ ID NO: 30578 - DNA, 80 bp, synthetic construct
  source 1..80: mol_type = other DNA
ttctgcgggggattcatcctggtggatcagataaccggcacagcctgtagggtcgcagaccctctaaaaaggctttttaa

SEQ ID NO: 30579 - DNA, 80 bp, synthetic construct
  source 1..80: mol_type = other DNA
tacggcgctttcagtggtcacttggaaccagaaaggggtgaccatcaaggatacccccgaaggttctgaaccgtggtcac

SEQ ID NO: 30580 - DNA, 80 bp, synthetic construct
  source 1..80: mol_type = other DNA
acctggggttctgcccgtattgcagacactcagcgccgtgtttcagcccaataaaaattgagaacgtgtgggacgaatct

SEQ ID NO: 30581 - DNA, 80 bp, synthetic construct
  source 1..80: mol_type = other DNA
aaattggggctgcgagcagacgcaacagcagaatggattacagggactacatccaggaatttttctgtggtgcgagaagg

SEQ ID NO: 30582 - DNA, 80 bp, synthetic construct
  source 1..80: mol_type = other DNA
gctggagtacgtatggggcaaccatgaaccagtcagagtctgggcccaggagtcggcaccaggcgacccgcatggatggc

SEQ ID NO: 30583 - DNA, 80 bp, synthetic construct
  source 1..80: mol_type = other DNA
gcctggggaaggtagacgccttcgaacatgcgaccactgtgccaaatgttccggggatcccgtataaggcgttggtcgaa

SEQ ID NO: 30584 - DNA, 80 bp, synthetic construct
  source 1..80: mol_type = other DNA
ggagctggtctgacgacacctcagtgttcaagagggtggcctgtaattctagcttgagtctgtcgtctcactggatcagg

SEQ ID NO: 30585 - DNA, 80 bp, synthetic construct
  source 1..80: mol_type = other DNA
gattgtgacaaaggactttgtttattctcaaagttccaactgtctttttgacagaaactatacactcatgctaaaagatc

SEQ ID NO: 30586 - DNA, 80 bp, synthetic construct
  source 1..80: mol_type = other DNA
tgatagatagagaatctcaaaccaggaacacgagaaccaaaatactcgctcaaggagacaaccaggttctatgcccgaca

SEQ ID NO: 30587 - DNA, 80 bp, synthetic construct
  source 1..80: mol_type = other DNA
cttctgcgacgctgaaaacacgcaattgagcgaagcacacgtggagaagtccgaatcatgcaaaacagaatttgcatcag

SEQ ID NO: 30588 - DNA, 80 bp, synthetic construct
  source 1..80: mol_type = other DNA
ggccgacccagatgatgttaacaagaatacactccagagcagacgggcagctgtgtcagcattggaggacaaattggcag

SEQ ID NO: 30589 - DNA, 80 bp, synthetic construct
  source 1..80: mol_type = other DNA
gaattcttaatcaaaccatgtccatttttaaagaaacaaggcagctcaggcaaggaggaggattttcttgtgagtaatga

SEQ ID NO: 30590 - DNA, 80 bp, synthetic construct
  source 1..80: mol_type = other DNA
ccgcgggcaatatagcaacactaaaactcgacgtacttccgaggaagcgcagtgcataatgctgcgcagtgttgccacat

SEQ ID NO: 30591 - DNA, 80 bp, synthetic construct
  source 1..80: mol_type = other DNA
atggcctgccaggcagtggaacaacccccggcaacaggccccacggacgtgcctatgtctttcggatcgttttctgacgg

SEQ ID NO: 30592 - DNA, 80 bp, synthetic construct
  source 1..80: mol_type = other DNA
cactattgaatcaaacagccgaccaattgcactaccatcacaatggagaagccagtagtaaacgtagacgtagaccccca

SEQ ID NO: 30593 - DNA, 80 bp, synthetic construct
  source 1..80: mol_type = other DNA
agcggtggactgttcatacgggaacattcccatttctattgacatcccgaacgctgcctttattcagcagacttcggcgg

SEQ ID NO: 30594 - DNA, 80 bp, synthetic construct
  source 1..80: mol_type = other DNA
gatggccaccctgcagtatgtatccgaccgcgaaggtcaatgccccgtacattcgcattcgagcacagcaactctccaag

SEQ ID NO: 30595 - DNA, 80 bp, synthetic construct
  source 1..80: mol_type = other DNA
gaggaagcgcagtgcataatgctgcgcagtgttgccacataaccactatattaaccatttatctagcggacgccaaaaaa

SEQ ID NO: 30596 - DNA, 80 bp, synthetic construct
  source 1..80: mol_type = other DNA
tgcactaccatcacaatggagaagccagtagtaaacgtagacgtagaccctcagagtccgtttgtcgtgcaactgcaaaa

SEQ ID NO: 30597 - DNA, 80 bp, synthetic construct
  source 1..80: mol_type = other DNA
atagcaacactaaaaactcgatgtacttccgaggaagcgcagtgcataaggctgcgcagtgttgccacataaccactata

SEQ ID NO: 30598 - DNA, 80 bp, synthetic construct
  source 1..80: mol_type = other DNA
cacgagatctcgttaccagcggaaagaaagaaaattgtcgcgagattgaggccgatgtgctacgactaaggggtatgcag

SEQ ID NO: 30599 - DNA, 80 bp, synthetic construct
  source 1..80: mol_type = other DNA
cctggtccaaacaggtacggtctatgtatgcgcactgccaaggaactagcgcgacgttacccttgtatactaaaggccgt

SEQ ID NO: 30600 - DNA, 80 bp, synthetic construct
  source 1..80: mol_type = other DNA
atatagtggtgagtatccccgcctgtcacgcgggagaccggggttcggttccccgacggggagccaaacagccgaccaac

SEQ ID NO: 30601 - DNA, 80 bp, synthetic construct
  source 1..80: mol_type = other DNA
cctacgaacatgcgaccaccattccaaatgtgccgaagattccgtataaagcacttgtagaacggtctggctacgccccg

SEQ ID NO: 30602 - DNA, 80 bp, synthetic construct
  source 1..80: mol_type = other DNA
tgacttccctgaatacggcgcaatgaaacctggagtgttcggagacatccaagctacctccttgaccagtagagacctta

SEQ ID NO: 30603 - DNA, 80 bp, synthetic construct
  source 1..80: mol_type = other DNA
aatgaaactcgatgtatttccggtgaagcgcggtccctcttgctcctgcgtgtagacacataatcactttattcatttga

SEQ ID NO: 30604 - DNA, 80 bp, synthetic construct
  source 1..80: mol_type = other DNA
ggctaaagagcgcaaagaagatcttgataatgaaaagaagctgggcactagggagcgtaagcttatttacgggtgtctat

SEQ ID NO: 30605 - DNA, 80 bp, synthetic construct
  source 1..80: mol_type = other DNA
gggcgtttcgtactaagaaagtgcactcgttttaccgcccgcccggaacgcagaccagcgtgaaagtcccggcatctttt

SEQ ID NO: 30606 - DNA, 80 bp, synthetic construct
  source 1..80: mol_type = other DNA
cgaaaaaggaggagaaattactgcaggtctcagaagagttagttgcggaggctaaagcggcctttgaagatgcacaggag

SEQ ID NO: 30607 - DNA, 80 bp, synthetic construct
  source 1..80: mol_type = other DNA
gagatcagagcggagcaactccgtgaagcacttccaccactggtagcagacaaaggtattgaagccgctgcagaagtcgt

SEQ ID NO: 30608 - DNA, 80 bp, synthetic construct
  source 1..80: mol_type = other DNA
tgtgaagtggaagggcttcaagctgatataggagcagctcttgttgagacgccacgagggcatgtaaggattatacctca

SEQ ID NO: 30609 - DNA, 80 bp, synthetic construct
  source 1..80: mol_type = other DNA
agtaacagaccgcatgattgggcagtacatcgtggtctcaccaacctccgtgcttaagaacgccaaattaacacctgttc

SEQ ID NO: 30610 - DNA, 80 bp, synthetic construct
  source 1..80: mol_type = other DNA
accctttggctgaccaagtcaaaattataacacattcagggaggacaggaagattcgcggtggaaccgtatgatgctaaa

SEQ ID NO: 30611 - DNA, 80 bp, synthetic construct
  source 1..80: mol_type = other DNA
gtgttgatgccagcaggtagcgccgttccatggcctgagttcctggcgttaagtgaaagcgccacgctagtgtataacga

SEQ ID NO: 30612 - DNA, 80 bp, synthetic construct
  source 1..80: mol_type = other DNA
cggggctggttctctcgggagaactaactaacccaccgtatcatgaaatggcgcttgaggggctgaagactcgacccgct

SEQ ID NO: 30613 - DNA, 80 bp, synthetic construct
  source 1..80: mol_type = other DNA
gttccgtataaggtcgaaacaataggagtaataggcacaccaggatcaggcaagtctgcgattattaaatcgaccgttac

SEQ ID NO: 30614 - DNA, 80 bp, synthetic construct
  source 1..80: mol_type = other DNA
ccgtacgagatcttgttaccagcggaaagaaggaaaactgccgtgaaattgaaactgacgtgttgaggttgagaggtatg

SEQ ID NO: 30615 - DNA, 80 bp, synthetic construct
  source 1..80: mol_type = other DNA
cagatcacgtcaaggacggtagactcagtcatgcttaacggatgccataaagccgtagagatgctatacgttgatgaagc

SEQ ID NO: 30616 - DNA, 80 bp, synthetic construct
  source 1..80: mol_type = other DNA
atttgcgtgccatgctggtacgttgcttgccttgatcgctattgttagaccccgaaagaaggtagtacttcgcggagatc

SEQ ID NO: 30617 - DNA, 80 bp, synthetic construct
  source 1..80: mol_type = other DNA
ctaagcagtgtggttttttcaatatgatgcagctcaaagtacattttaatcaccctgaaaaagatatatgtactaagacg

SEQ ID NO: 30618 - DNA, 80 bp, synthetic construct
  source 1..80: mol_type = other DNA
ttttacaaattcatctcttgccgctgcacgcaaccagtaacggcgattgtttcaacactccattacgacggaaagatgaa

SEQ ID NO: 30619 - DNA, 80 bp, synthetic construct
  source 1..80: mol_type = other DNA
acgcgggaaatgaagtgatgacggctgctgcctcgcagggactgactagaaagggtgtttacgccgttcggcaaaaagtt

SEQ ID NO: 30620 - DNA, 80 bp, synthetic construct
  source 1..80: mol_type = other DNA
aatgagaatccactgtacgcgattacgtcggagcacgtgaatgtgttactcacccgtactgaggatagattagtgtggaa

SEQ ID NO: 30621 - DNA, 80 bp, synthetic construct
  source 1..80: mol_type = other DNA
aagctgaacataaggggatcatcgctgcaataaacagcccaacccctcctataaacccgttcagctgtaagactaatgtg

SEQ ID NO: 30622 - DNA, 80 bp, synthetic construct
  source 1..80: mol_type = other DNA
tgctgggcgaaggcactggaaccgatactggccacagccggtattgtcctcaccggttgccagtggagtgagctgtttcc

SEQ ID NO: 30623 - DNA, 80 bp, synthetic construct
  source 1..80: mol_type = other DNA
ttccgagcaccactatcactgcgtctgccctatgcggagccctgaagatcccgaccgtatgatgaaatacgccaataagt

SEQ ID NO: 30624 - DNA, 80 bp, synthetic construct
  source 1..80: mol_type = other DNA
accgtaacctcccgcacgctcttgtccccgagtataaagagaaacaacccggcccgattaaaaattttttaaatcagttt

SEQ ID NO: 30625 - DNA, 80 bp, synthetic construct
  source 1..80: mol_type = other DNA
aagcatcactccatacttgtagtatcagaaacgaaaatcgaagttcccaataagcgcatcgaatggattgcaccgcttgg

SEQ ID NO: 30626 - DNA, 80 bp, synthetic construct
  source 1..80: mol_type = other DNA
catagctggtgcagataagagctacaacctggccttcggatttccaccgcaggcacggtatgatatggtgtttatcaata

SEQ ID NO: 30627 - DNA, 80 bp, synthetic construct
  source 1..80: mol_type = other DNA
tggcggagaaggcaaataagattactaataaaaatttgcatgagaagattaaagacctccggatcgtacttgatactccg

SEQ ID NO: 30628 - DNA, 80 bp, synthetic construct
  source 1..80: mol_type = other DNA
ttcggcaattagataatagccgtacacggcagttcactccacatcatttgaactgtgtaatctcgtcggtgtatgaaggc

SEQ ID NO: 30629 - DNA, 80 bp, synthetic construct
  source 1..80: mol_type = other DNA
acgagagaaggagtcggagctgcgccatcctaccgtgtgaaacgggaaaatattgcagactgccatgaggaagcaatcgt

SEQ ID NO: 30630 - DNA, 80 bp, synthetic construct
  source 1..80: mol_type = other DNA
caacgccgctaactcgctgggtaaaccaggtgaaggagtttgccgcgccgtctacaagcgttggccgagcagctttattg

SEQ ID NO: 30631 - DNA, 80 bp, synthetic construct
  source 1..80: mol_type = other DNA
attccgccacagaaacgggtacggctaaattaactgtaagccaaggaatgaaagtgatacacgcggtcggccccgacttc

SEQ ID NO: 30632 - DNA, 80 bp, synthetic construct
  source 1..80: mol_type = other DNA
cgtaagtatcctgaggcggaagctttgaagctgctgcaaaacgcttaccatgcagtggcggacttggttaacaaacacaa

SEQ ID NO: 30633 - DNA, 80 bp, synthetic construct
  source 1..80: mol_type = other DNA
cattaagtccattgctatcccgctactatcaacaggtatatatgcagctggtaaggatcgcttggaagtttcgctcaatt

SEQ ID NO: 30634 - DNA, 80 bp, synthetic construct
  source 1..80: mol_type = other DNA
gcctgaccaccgcactagacaggaccgatgcagatgtaactatttattgtttggataagaaatggaaagagagaattgac

SEQ ID NO: 30635 - DNA, 80 bp, synthetic construct
  source 1..80: mol_type = other DNA
gcggtgttgcaacttaaggagtcagtgacagaactgaaggacgaggacatggaaatcgatgacgaattggtatggattca

SEQ ID NO: 30636 - DNA, 80 bp, synthetic construct
  source 1..80: mol_type = other DNA
ttcaccaagcagccaaagatatggctgaaataaaagtgctgtttccggacgaccaggaaagcaacgaacagttatgcgct

SEQ ID NO: 30637 - DNA, 80 bp, synthetic construct
  source 1..80: mol_type = other DNA
tacatactgggcgaaactatggaagcaattcgtgaaaaatgcccagttgatcgtaacccgtcatccagtcctccgaagac

SEQ ID NO: 30638 - DNA, 80 bp, synthetic construct
  source 1..80: mol_type = other DNA
gctgccttgcctttgcatgtatgcaatgactccggaaagagttcataggctcagaagtaacaatgttaaagaaattactg

SEQ ID NO: 30639 - DNA, 80 bp, synthetic construct
  source 1..80: mol_type = other DNA
ccgcacactcctacttttgtcccggcccgtaaatatgtggaagtgccagaatcacctgccatcacacctgtacaggccga

SEQ ID NO: 30640 - DNA, 80 bp, synthetic construct
  source 1..80: mol_type = other DNA
cacgctagatcagccacctgccgcggacggtataccgcttgatgttacggacatttcattaaatatggaagatagtagcg

SEQ ID NO: 30641 - DNA, 80 bp, synthetic construct
  source 1..80: mol_type = other DNA
aaggattgtccattttagatttccacgggtcagaaagttccatttttagtatggatagctggtcgtcaggaaccagttct

SEQ ID NO: 30642 - DNA, 80 bp, synthetic construct
  source 1..80: mol_type = other DNA
ttggggccagaggacaatagaaggcaagtagtgacagtcgatgtccactccacccaagaggatactcccattcctcctcc

SEQ ID NO: 30643 - DNA, 80 bp, synthetic construct
  source 1..80: mol_type = other DNA
aaggttaaagaaactggcccggttagcggcggcgaaacagaccccagtagcacttaccgtatcgaatgatgtgggctcaa

SEQ ID NO: 30644 - DNA, 80 bp, synthetic construct
  source 1..80: mol_type = other DNA
tggatgagtccctctgcctttcatttggcagcgtatccatgtcttttggatctttttccgacggtgagatcgatgaaata

SEQ ID NO: 30645 - DNA, 80 bp, synthetic construct
  source 1..80: mol_type = other DNA
agtcgtatgaagactgagtcagaacccgttttatttggaacttttgaacctggagaagttaattccattatatcgtctcg

SEQ ID NO: 30646 - DNA, 80 bp, synthetic construct
  source 1..80: mol_type = other DNA
actacttgcatgaaaactacccaacggtagcgtcctaccagattactgatgaatacgacgcttacctcgatatggtggat

SEQ ID NO: 30647 - DNA, 80 bp, synthetic construct
  source 1..80: mol_type = other DNA
gggactgtcgcttgcctggacaccgcaacattctgcccggctaaactcagaagttatccaaagaggcatgagtatcgcgc

SEQ ID NO: 30648 - DNA, 80 bp, synthetic construct
  source 1..80: mol_type = other DNA
accgaatatccgtagcgcagtcccgtctgctatgcagaacacgttgcaaaacgtgctcatcgctgcaaccaagaggaact

SEQ ID NO: 30649 - DNA, 80 bp, synthetic construct
  source 1..80: mol_type = other DNA
gcaacgttacacaaatgcgtgaactaccaacgctggactcagcgacgtttaacgtcgagtgctttaaaaaatatgcgtgc

SEQ ID NO: 30650 - DNA, 80 bp, synthetic construct
  source 1..80: mol_type = other DNA
gcaacaatgaatactgggaagagtttgcccgtaaaccaattagaattaccacggagttcgttactgcgtatgtagccaga

SEQ ID NO: 30651 - DNA, 80 bp, synthetic construct
  source 1..80: mol_type = other DNA
ctgaaaggaccaaaggcagcagccttatttgcaaagacgtacaatttggtcccattgcaagaggtacccatggataggtt

SEQ ID NO: 30652 - DNA, 80 bp, synthetic construct
  source 1..80: mol_type = other DNA
tcacaccaggtaccaagcacaccgaagagagaccaaaggtgcaggtaatccaagctgcagagccactagcgacggcatat

SEQ ID NO: 30653 - DNA, 80 bp, synthetic construct
  source 1..80: mol_type = other DNA
ttgtgcggaatccatcgcgagttggtgcgtagacttacggcggtgttgctacctaacattcatacactttttgatatgtc

SEQ ID NO: 30654 - DNA, 80 bp, synthetic construct
  source 1..80: mol_type = other DNA
atctaggcgtggatcacctactactcgacttaattgagtgtgcctttggtgaaatatcgtcaacacacttgcccacgggc

SEQ ID NO: 30655 - DNA, 80 bp, synthetic construct
  source 1..80: mol_type = other DNA
actcgtttcaaatttggtgcaatgatgaaatccggaatgtttcttacattattcgttaacacagttttgaatgttgtgat

SEQ ID NO: 30656 - DNA, 80 bp, synthetic construct
  source 1..80: mol_type = other DNA
tactagaggaaaggcttaagatgtcgagatgcgcggcgtttatcggcgacgataacattatacacggggtagtgtctgat

SEQ ID NO: 30657 - DNA, 80 bp, synthetic construct
  source 1..80: mol_type = other DNA
aaggtgatggcagagaggtgcgccacctggcttaacatggaagttaagattatcgacgccattatcggtgagagaccacc

SEQ ID NO: 30658 - DNA, 80 bp, synthetic construct
  source 1..80: mol_type = other DNA
ctcaacagccacgtcctcgcccgccaccccgccaaaagaagcagccgccaaagcaattaccaaaaccgaagaaaccgaaa

SEQ ID NO: 30659 - DNA, 80 bp, synthetic construct
  source 1..80: mol_type = other DNA
acacaggataagaagaagcgacagcccgcgaagccgaaacctggaaagaggcagcgcatggcgcttaagctagaggccga

SEQ ID NO: 30660 - DNA, 80 bp, synthetic construct
  source 1..80: mol_type = other DNA
cagactgtttgatgttaagaacgagaatggtgatgtcatcggacatgctctggccatggaaggaaaagtaatgaaaccac

SEQ ID NO: 30661 - DNA, 80 bp, synthetic construct
  source 1..80: mol_type = other DNA
ccagatggacgatattaagatcagtacttcaggaccgtgcagaagacttggccataaaggttacttcctccttgcgaaat

SEQ ID NO: 30662 - DNA, 80 bp, synthetic construct
  source 1..80: mol_type = other DNA
gtccgcccggggacagcgtgacggtcagtatagtgagcagcagttcaactacatcatgcacgttggcacgtaagataaaa

SEQ ID NO: 30663 - DNA, 80 bp, synthetic construct
  source 1..80: mol_type = other DNA
gaaaaatttacgctaagccaccatccggaaagaatattacctacgagtgtaaatgcggagactataaaacaggaacggta

SEQ ID NO: 30664 - DNA, 80 bp, synthetic construct
  source 1..80: mol_type = other DNA
aaaacccgcactgaaattactggctgcactgccattaagcagtgtgtcgcttataagagcgaccaaacgaagtgggtctt

SEQ ID NO: 30665 - DNA, 80 bp, synthetic construct
  source 1..80: mol_type = other DNA
ttaactcacccgacctgataaggcatgccgatcacgctgcacaaggaaagttgcatttaccttttagattggtcccgagt

SEQ ID NO: 30666 - DNA, 80 bp, synthetic construct
  source 1..80: mol_type = other DNA
tcctgcaaggtcccagtggctcacgcaccgagtgtagtgcacggtttcaaacacattagcctccaactggatacagacca

SEQ ID NO: 30667 - DNA, 80 bp, synthetic construct
  source 1..80: mol_type = other DNA
gccaataacggcgcaatggagaagccagtagttaacgtagacgtagaccctcagagtccgtttgtcgtgcaactgcaaaa

SEQ ID NO: 30668 - DNA, 80 bp, synthetic construct
  source 1..80: mol_type = other DNA
ccctgaatagtaacaaaatatgaaaatcaataaaaatcataaaatagaaaaaccataaatagaagtagttcaaagggcta

SEQ ID NO: 30669 - DNA, 80 bp, synthetic construct
  source 1..80: mol_type = other DNA
tgatgcaccccctggcagacccgtccacagttttcaaggatggtgatgaggctgaggattttgtagaggttcaccttcct

SEQ ID NO: 30670 - DNA, 80 bp, synthetic construct
  source 1..80: mol_type = other DNA
actcttattgatgctatgagcaagattgtcgaaggcacactatactctaatgtgagtgatctaattcaacaatttaacca

SEQ ID NO: 30671 - DNA, 80 bp, synthetic construct
  source 1..80: mol_type = other DNA
ctgatttgatcactacctattcaccatctagagaggataacttgcagcgtgtatttacagtgccttccattagaagcatg

SEQ ID NO: 30672 - DNA, 80 bp, synthetic construct
  source 1..80: mol_type = other DNA
caccccgcagcacaattgattattttgtatattttggagatcacgtgtgtatggatgaaatggttagagaatcacgaaga

SEQ ID NO: 30673 - DNA, 80 bp, synthetic construct
  source 1..80: mol_type = other DNA
agtatatcgagaattggagtctgcacagcagaagacaacgaacaggttttacatttcataaaccaaatattttcccttat

SEQ ID NO: 30674 - DNA, 80 bp, synthetic construct
  source 1..80: mol_type = other DNA
ataagacaaacattgcagataggatagagcagatttttgagacagccccttttattaaaatcgtggagcaccatacccta

SEQ ID NO: 30675 - DNA, 80 bp, synthetic construct
  source 1..80: mol_type = other DNA
caaagagaatatccagaatggtttctggggccgtacctcatttccagaagcttcctgatatacgtctgagaccaggtgat

SEQ ID NO: 30676 - DNA, 80 bp, synthetic construct
  source 1..80: mol_type = other DNA
tttgaatctctaagcggtagggaaaagtctcggcatatagggtcagctcaggggctcttatactcaatattagtggcaat

SEQ ID NO: 30677 - DNA, 80 bp, synthetic construct
  source 1..80: mol_type = other DNA
gtttaaagggggctatattacctctgttaagtactaaccaacaagtagataaatagacgctaaccacatatataatcagc

SEQ ID NO: 30678 - DNA, 80 bp, synthetic construct
  source 1..80: mol_type = other DNA
ggatcagtatgaatacaaatacccagccattaaagacctgaagaaacccagtatcaccttagggaaggctcccgacttaa

SEQ ID NO: 30679 - DNA, 80 bp, synthetic construct
  source 1..80: mol_type = other DNA
tgaggtccggagagagattcctcaagatttggtcgcagactgtagaggaaattatctcctatgtcgcgattaacttctcc

SEQ ID NO: 30680 - DNA, 80 bp, synthetic construct
  source 1..80: mol_type = other DNA
agatataaagcggaccgatgtagaaggaaattgggctctgacgggaggtatggagctgacaagggaccccactgtttcag

SEQ ID NO: 30681 - DNA, 80 bp, synthetic construct
  source 1..80: mol_type = other DNA
ctataaactggttcattatgagaaactcaaatttggcgcagactctaattagaaacatcatatccctgacaggccctgat

SEQ ID NO: 30682 - DNA, 80 bp, synthetic construct
  source 1..80: mol_type = other DNA
acaaaatcactaaaaattataaaaacagaaaaacacataaataggtatacgtgtcccctaagagacacattgtatgtagg

SEQ ID NO: 30683 - DNA, 80 bp, synthetic construct
  source 1..80: mol_type = other DNA
taagtatagatcaaagggccgaataacccctgaatagtaacaaaatatgaaaatcaataaaaatcataaaatagaaaaac

SEQ ID NO: 30684 - DNA, 80 bp, synthetic construct
  source 1..80: mol_type = other DNA
gatataggtagtgcgccacataggtacgcactacatggctgcgtgagacacacgtagcctatcagtttcttactgctcta

SEQ ID NO: 30685 - DNA, 80 bp, synthetic construct
  source 1..80: mol_type = other DNA
actagaaatagaagtaggtaagaaggtatatgtgtcccctaagagacacaccatatatagctaagaatcaatagataagc

SEQ ID NO: 30686 - DNA, 80 bp, synthetic construct
  source 1..80: mol_type = other DNA
tgaaaatcaataaaaatcataaaatagaaaaacacatctataggtatacgtgtcccctgggagacacattgcatgtaggt

SEQ ID NO: 30687 - DNA, 80 bp, synthetic construct
  source 1..80: mol_type = other DNA
gctaatttaaattcagtgaaatgtgtaggtggtagttatgattttagattacctgtaggtgaatggcctattatgaatgg

SEQ ID NO: 30688 - DNA, 80 bp, synthetic construct
  source 1..80: mol_type = other DNA
ccgaataacccctgaatagtaacaaaatatgaaaatcaataaaaatcataaaatagaaaaccataaacagaagtagttca

SEQ ID NO: 30689 - DNA, 80 bp, synthetic construct
  source 1..80: mol_type = other DNA
gataagcatagatcaaagggctgaacaacccctgaataataacaaaatataaaaaccaacaaaaatcataaaatagaaaa

SEQ ID NO: 30690 - DNA, 80 bp, synthetic construct
  source 1..80: mol_type = other DNA
agtgcataatgctgcgcagtgttgccacattatcactatattaaccatttatttagcggacgccgaaactcaatgtattt

SEQ ID NO: 30691 - DNA, 80 bp, synthetic construct
  source 1..80: mol_type = other DNA
caaggtacctaccatcggtgtctacggcgtcccaggctcaggtaaatcgggtatcatcaagagtgcagtcacgaagcggg

SEQ ID NO: 30692 - DNA, 80 bp, synthetic construct
  source 1..80: mol_type = other DNA
agggctgtaatacccccgattagtaacaaaatataaaaataaaaatatgtagttaagtactaaccaattagtagacaaat

SEQ ID NO: 30693 - DNA, 80 bp, synthetic construct
  source 1..80: mol_type = other DNA
aattacaaagaccacaaccaggggtggtgcatacaccttatacccaagcgccttcagggttcgaacgctggaagaaagat

SEQ ID NO: 30694 - DNA, 80 bp, synthetic construct
  source 1..80: mol_type = other DNA
cggtgacccgaagcaatgcggattctttaacatgatgtgcctcaaggtgcacttcaaccatgaaatctgtaccgaagtgt

SEQ ID NO: 30695 - DNA, 80 bp, synthetic construct
  source 1..80: mol_type = other DNA
atgctatgacagctgagagagtctacagactgcgaatggcaaagaacgaacagtttgccgtgtgttcctcattccagctg

SEQ ID NO: 30696 - DNA, 80 bp, synthetic construct
  source 1..80: mol_type = other DNA
ggttactgaatgcacctatgcatccgactttgggggaattgccactatcagctataaggcaagtaaggcagggaactgcc

SEQ ID NO: 30697 - DNA, 80 bp, synthetic construct
  source 1..80: mol_type = other DNA
tctttaactccttcgtcatcccccaattaaacagctacggattggacatagggttacgccgccgaattaaaatgctcctg

SEQ ID NO: 30698 - DNA, 80 bp, synthetic construct
  source 1..80: mol_type = other DNA
cgggagaagagacgatcggatcttatgcagtgctctcgccacaggctgtcctcaacagcgagaaattagcctgtatccac

SEQ ID NO: 30699 - DNA, 80 bp, synthetic construct
  source 1..80: mol_type = other DNA
ccgctggctgaacaggtgctcgtcatgacccataaagggcgtgcaggtagatataaagtcgaaccctaccatggacgggt

SEQ ID NO: 30700 - DNA, 80 bp, synthetic construct
  source 1..80: mol_type = other DNA
tctacggagttcctggttcgggaaaatcgggaatcattaagagcgcagtcacgaaaagagacctagtggtcagcgcaaag

SEQ ID NO: 30701 - DNA, 80 bp, synthetic construct
  source 1..80: mol_type = other DNA
ggtactgcgcacctagttaagcacacgcccaacattatccatgcagttgggccgaatttctcccgcgtatccgaagtgga

SEQ ID NO: 30702 - DNA, 80 bp, synthetic construct
  source 1..80: mol_type = other DNA
aggcaaccagaagctgtcggaggtctacatggacattgccaaaatcgtcaacagggaacgatacaacaaggtgtcaatac

SEQ ID NO: 30703 - DNA, 80 bp, synthetic construct
  source 1..80: mol_type = other DNA
ttccctactgtggcgagctacaccatcaccgacgagtacgacgcctatttagatatggttgacggagcatcgtgctgctt

SEQ ID NO: 30704 - DNA, 80 bp, synthetic construct
  source 1..80: mol_type = other DNA
ttccgtcccccatacagaatacacttcagaacgttttagcggcggccaccaaacgaaactgtaacgtcactcagatgcgc

SEQ ID NO: 30705 - DNA, 80 bp, synthetic construct
  source 1..80: mol_type = other DNA
gagttaccggtcctggactcggccgcatttaacgtagagtgcttcaaaaaatatgcatgcaacaacgaatattgggatac

SEQ ID NO: 30706 - DNA, 80 bp, synthetic construct
  source 1..80: mol_type = other DNA
actgtaaatgccccgacgtaaaggagggaacaactggcagcgactacacgactgcttgcacggacctgaagcagtgtcga

SEQ ID NO: 30707 - DNA, 80 bp, synthetic construct
  source 1..80: mol_type = other DNA
gcgtaccttattgacaacaagaaatgggtctataactccggcaagttacctagaggagaaggcgaaacctttaaaggcaa

SEQ ID NO: 30708 - DNA, 80 bp, synthetic construct
  source 1..80: mol_type = other DNA
tcttccgatctgtgagacacacgtagcctaccagtttcttactgctctactctgcaaagcaagagattaagaacccatca

SEQ ID NO: 30709 - DNA, 80 bp, synthetic construct
  source 1..80: mol_type = other DNA
ctccacccagtgctcagcaaaatcacaccctgactaccaatgtcaagtgttcacaggggtctacccattcatgtggggag

SEQ ID NO: 30710 - DNA, 80 bp, synthetic construct
  source 1..80: mol_type = other DNA
gtaccggaaaagccggttcctttggtgatttgcaatctagaacactcaccagtaacgatttgtacgccaatacaaacctg

SEQ ID NO: 30711 - DNA, 80 bp, synthetic construct
  source 1..80: mol_type = other DNA
aagctgcaacgaccgcaaccaggagtagtccatacgccttacactcaggcgccatccgggttcgaacgctggaagaaaga

SEQ ID NO: 30712 - DNA, 80 bp, synthetic construct
  source 1..80: mol_type = other DNA
tcggggagctccattgaatgacatcgctccctttgggtgcacgatagctttagacccgctgcgagcggaaaactgcgcgg

SEQ ID NO: 30713 - DNA, 80 bp, synthetic construct
  source 1..80: mol_type = other DNA
tgggcaacatccccctttctatagacatcccggatgctgcgtttaccaggatcgcagagacgcccactgtgtccgacctg

SEQ ID NO: 30714 - DNA, 80 bp, synthetic construct
  source 1..80: mol_type = other DNA
ttcactccccgtcaggcattgcagtaatcaaagaaaacgatgttacactggtagacagcggtgcctttacattccacttt

SEQ ID NO: 30715 - DNA, 80 bp, synthetic construct
  source 1..80: mol_type = other DNA
tctacagccagcatccacccggcgttcaaaatgcaggtgtgtactagtgtagttacctgcaaaggtgactgtaagccacc

SEQ ID NO: 30716 - DNA, 80 bp, synthetic construct
  source 1..80: mol_type = other DNA
ttgtcgattacccggctcagcacacagaaacatatacatcagcagtatcggcaactgcttggtcatggctgaaagtgcta

SEQ ID NO: 30717 - DNA, 80 bp, synthetic construct
  source 1..80: mol_type = other DNA
agacactaacgtactatcgttattatatcaccgtggttcgacgtactcccgagccgtgatgaaggtggtgcataatgcca

SEQ ID NO: 30718 - DNA, 80 bp, synthetic construct
  source 1..80: mol_type = other DNA
cctgcgcagtgtataatgctgcgactataacactatcggcagtgcataatgctgccttttataaaacactactggcggcg

SEQ ID NO: 30719 - DNA, 80 bp, synthetic construct
  source 1..80: mol_type = other DNA
ggcagttacaacgctgccttttataaacttttacaacactactggcagcgcataatgctgacttttataaaatctttaaa

SEQ ID NO: 30720 - DNA, 80 bp, synthetic construct
  source 1..80: mol_type = other DNA
tcccccaattaaacagctacggattggatatagggttacgccgccgaattaaaatgctcctggaagagaagaagaagccg

SEQ ID NO: 30721 - DNA, 80 bp, synthetic construct
  source 1..80: mol_type = other DNA
ataaagtgcctaccattggagtctacggagttcctggttcgggaaaatcgggaattattaagagcgcagtcacgaaaaga

SEQ ID NO: 30722 - DNA, 80 bp, synthetic construct
  source 1..80: mol_type = other DNA
gacctagtggtcagcgcaaagaaggagaactgcatggaaatcatcaaagatgttaaacgtatgcgaggcatggatgtcgc

SEQ ID NO: 30723 - DNA, 80 bp, synthetic construct
  source 1..80: mol_type = other DNA
ggactccgtgttgcttaacggagttaaacacccagtagacacactgtacattgacgaagcctttgcatgccacgcgggga

SEQ ID NO: 30724 - DNA, 80 bp, synthetic construct
  source 1..80: mol_type = other DNA
tgcggcacacgcattccaagcacaagtaccactgtatctgcccgatgatcagcgcggaagaccctgatcgactccacagg

SEQ ID NO: 30725 - DNA, 80 bp, synthetic construct
  source 1..80: mol_type = other DNA
atagacaccaccagcaccacaaaaccgcaacgagatgacataatactaacatgctttagagggtgggttaagcaattaca

SEQ ID NO: 30726 - DNA, 80 bp, synthetic construct
  source 1..80: mol_type = other DNA
ccctaacggctcactaccctggggaattttcggcaacattagaggagtggcaagccgagcatgatgccattatggagcgt

SEQ ID NO: 30727 - DNA, 80 bp, synthetic construct
  source 1..80: mol_type = other DNA
atcctggaaactcccgctagcagcgatgtttaccagaataaagtgcacgtatgctgggcaaaagcacttgaaccagtttt

SEQ ID NO: 30728 - DNA, 80 bp, synthetic construct
  source 1..80: mol_type = other DNA
tggcattgaacttcctgtgcactaggttcttcggggtggacattgatagtgggttattctcagcgccaactgtaccttta

SEQ ID NO: 30729 - DNA, 80 bp, synthetic construct
  source 1..80: mol_type = other DNA
cctggcccaaacagatacggcttgtgtatgcgcactgccaaggagctggctcgtcgctatccatgcatactgaaagctgt

SEQ ID NO: 30730 - DNA, 80 bp, synthetic construct
  source 1..80: mol_type = other DNA
tatgcagataagcttagaaagagtgacgtaacagataggtttatagcctctaaagctgctgacctactgacggtgatgtc

SEQ ID NO: 30731 - DNA, 80 bp, synthetic construct
  source 1..80: mol_type = other DNA
agatactggccgacttgcggacgtacgtaccaatacaatcaaagactatagccccctgatcaacgtggtgccgctcaacc

SEQ ID NO: 30732 - DNA, 80 bp, synthetic construct
  source 1..80: mol_type = other DNA
gccgtcttccacactcattggttgtgtcgcatagatacaccggtgacggaaattactctcagctgctgtcaaagttgata

SEQ ID NO: 30733 - DNA, 80 bp, synthetic construct
  source 1..80: mol_type = other DNA
ggaaaaaccgtgctggtgataggaaccccaatttccattcctggaaaacgggtagaaacactaggccctggtccgcagtg

SEQ ID NO: 30734 - DNA, 80 bp, synthetic construct
  source 1..80: mol_type = other DNA
cacgtacaaggtagacttggacttaggcatccccagcacgattggaaaatatgacataatatttgtcaacgtcaggacac

SEQ ID NO: 30735 - DNA, 80 bp, synthetic construct
  source 1..80: mol_type = other DNA
gaggcacttgcgtggcactaggctacggtaccgcagacagagcgaccgaaaatattatttctgcggtagctcgatctttt

SEQ ID NO: 30736 - DNA, 80 bp, synthetic construct
  source 1..80: mol_type = other DNA
agattctctagagtctgtcagcctaagtgtgcgtgggaaaacactgaggtcgcgttcgtcttttttggcaaggacaacgg

SEQ ID NO: 30737 - DNA, 80 bp, synthetic construct
  source 1..80: mol_type = other DNA
ctctgttatcaacaggcatatacgcaggtggcaaggaccgcgtaatgcaatcattaaaccacctgtttactgccatggac

SEQ ID NO: 30738 - DNA, 80 bp, synthetic construct
  source 1..80: mol_type = other DNA
accaccgatgcagatgtaactatctattgcctggacaaacagtgggaagcgcgaatcaaagacgccatcgcccggaagga

SEQ ID NO: 30739 - DNA, 80 bp, synthetic construct
  source 1..80: mol_type = other DNA
aagcgtcgaagaactcgtagaagatgacaaacctgtcgacatcgagttgatccgcgtgcacccattaagtagtctggtcg

SEQ ID NO: 30740 - DNA, 80 bp, synthetic construct
  source 1..80: mol_type = other DNA
ccaagtacagaataacgggcgtgcagaagatccagtgcaacaagccagttatattctcgggggttgtaccaccagcaata

SEQ ID NO: 30741 - DNA, 80 bp, synthetic construct
  source 1..80: mol_type = other DNA
tctcggctatcgaggaaacagtgccagtaacaattgaacggcttgttccaagacgtcctgctccaccggtgccggtacct

SEQ ID NO: 30742 - DNA, 80 bp, synthetic construct
  source 1..80: mol_type = other DNA
tatctccgaagccgaagttcacgattcagattctgaatgcagtatccctccaatgcctttcgttgtggaagcagaggttc

SEQ ID NO: 30743 - DNA, 80 bp, synthetic construct
  source 1..80: mol_type = other DNA
acgcgagtcaaggttcgcactggagcattccaagtgcgtcaggctttgaaatccgtgaattgccagaagatcgcagcata

SEQ ID NO: 30744 - DNA, 80 bp, synthetic construct
  source 1..80: mol_type = other DNA
tccggctcaccgacaacacgtacgtcggtaatttctgaccactccgtgaacctgatcacattcgacagcgttactgacat

SEQ ID NO: 30745 - DNA, 80 bp, synthetic construct
  source 1..80: mol_type = other DNA
atttgaaaacttcaaacaagcgccttttcagttcctatcagagatacacccaataccagcaccacgacgcagagtgggag

SEQ ID NO: 30746 - DNA, 80 bp, synthetic construct
  source 1..80: mol_type = other DNA
ggcctgagaccgacactaagcgctacgacaagacggaggaaaaaccagttcctaagccacgcacgcgcacaacgaagtac

SEQ ID NO: 30747 - DNA, 80 bp, synthetic construct
  source 1..80: mol_type = other DNA
aaacagcctccaggcgtagctaggtccatttcagaagccgaactggacgagtttatccgccgacattcaaactgacggta

SEQ ID NO: 30748 - DNA, 80 bp, synthetic construct
  source 1..80: mol_type = other DNA
gcaagggataggggcttatctttctgctgaatcgcaaccagtggagtgctataaagttaactaccccatccccatatact

SEQ ID NO: 30749 - DNA, 80 bp, synthetic construct
  source 1..80: mol_type = other DNA
ccaccacacgtagcaacagattctcatcggctgacgtcgcggtaagggtatgtaatttggtattgcaagagaacttcccc

SEQ ID NO: 30750 - DNA, 80 bp, synthetic construct
  source 1..80: mol_type = other DNA
tacagaatacacttcagaacgttttagcggcagccaccaaacgaaactgtaacgtcactcagatgcgcgagttaccggtc

SEQ ID NO: 30751 - DNA, 80 bp, synthetic construct
  source 1..80: mol_type = other DNA
ctggactcggccgcatttaacgtagagtgctttaaaaaatatgcatgcaacaacgaatattgggatacttttaaaaacaa

SEQ ID NO: 30752 - DNA, 80 bp, synthetic construct
  source 1..80: mol_type = other DNA
ggctcactactgagaatgtcactcagtatgttactaaactcaaaggcccgaaagctgctgcactgttcgctaagacgcat

SEQ ID NO: 30753 - DNA, 80 bp, synthetic construct
  source 1..80: mol_type = other DNA
acgagttaatcaaggccgttgaatcacgatatgaagtgttttacatctcattggttatcaccgctttgacaactcttgca

SEQ ID NO: 30754 - DNA, 80 bp, synthetic construct
  source 1..80: mol_type = other DNA
gctacagtcagcaatttcaaacacataagaggaaaccccataaccctctacggctgacctaaataggttgtgcagaagaa

SEQ ID NO: 30755 - DNA, 80 bp, synthetic construct
  source 1..80: mol_type = other DNA
gtaagaaaccagcacctaaaccgaagcctgcggcgcccaagaagaaaaagcaaccacctccggctaagaagcaaaagcgc

SEQ ID NO: 30756 - DNA, 80 bp, synthetic construct
  source 1..80: mol_type = other DNA
ggggatagcggacgcccaattctagacaatcgcggccgtgtggttgctatagtattgggcggagctaacgagggatctcg

SEQ ID NO: 30757 - DNA, 80 bp, synthetic construct
  source 1..80: mol_type = other DNA
gcccgtccatacatagctgactgctccaactgcggccacggcagatgcgacagtcccattgccattgaggacattcgagg

SEQ ID NO: 30758 - DNA, 80 bp, synthetic construct
  source 1..80: mol_type = other DNA
acaagcacatgtgcaccgttgcccatagagtcgagtttaaacccgtaggaagagagaagtaccgccacccacctgaacat

SEQ ID NO: 30759 - DNA, 80 bp, synthetic construct
  source 1..80: mol_type = other DNA
ggcgttgagttaccctgtaccaaatacacgcacaaacgtgcagaccagggccattacgtcgaaatgcaccaaccggggtt

SEQ ID NO: 30760 - DNA, 80 bp, synthetic construct
  source 1..80: mol_type = other DNA
atcgatccctaatcttacatctgcacccggaacaccctacattactgacgaccagagcactgggaagtaacgcgaggccg

SEQ ID NO: 30761 - DNA, 80 bp, synthetic construct
  source 1..80: mol_type = other DNA
acaagacagtggattgaacaaccaaccacagtcaattttacagtaacaggagaaggttttgaatacacctggggcaatca

SEQ ID NO: 30762 - DNA, 80 bp, synthetic construct
  source 1..80: mol_type = other DNA
ccggtatccaatgaccaccgtcattggactgtgcacgtgcgcagccattatcatggtttcctgtgttacatctgtatggc

SEQ ID NO: 30763 - DNA, 80 bp, synthetic construct
  source 1..80: mol_type = other DNA
ttctctgccgcactcgcaatctttgcattacaccatacagattagcacccaacgcccaggtacccatcttattagcggtt

SEQ ID NO: 30764 - DNA, 80 bp, synthetic construct
  source 1..80: mol_type = other DNA
ctatgctgcgtgaaaccgaccagagcagatgatactttgcaggttttaaattatctgtggaataacaaccagaacttctt

SEQ ID NO: 30765 - DNA, 80 bp, synthetic construct
  source 1..80: mol_type = other DNA
ctactgcccattgtggctcaagcattctccagatgggcgcgggaatatcgcgccgacctggaggacgagaaagacctagg

SEQ ID NO: 30766 - DNA, 80 bp, synthetic construct
  source 1..80: mol_type = other DNA
cacccctcgccgcccaaattgaagatctgaggcgatctattgcgaacctcaccttcaaacaacgggccccgaatccaccg

SEQ ID NO: 30767 - DNA, 80 bp, synthetic construct
  source 1..80: mol_type = other DNA
atagggtatggtgtagaggcagccacccgatctatcctatccaaaatggagaaagtacacgtagacttagacgctgacag

SEQ ID NO: 30768 - DNA, 80 bp, synthetic construct
  source 1..80: mol_type = other DNA
tcatcccgtcagcaaacctggagtacatcacctgtaagtataagaccaaagtgccttcccctgtggtgaaatgttgcggc

SEQ ID NO: 30769 - DNA, 80 bp, synthetic construct
  source 1..80: mol_type = other DNA
tgtggggaggagcctattgcttctgcgatacggagaatacgcaaatgagcgaagcgtacattgaacgtgccgaggaatgc

SEQ ID NO: 30770 - DNA, 80 bp, synthetic construct
  source 1..80: mol_type = other DNA
tcagtagaccaggccaaagcatataaggtgcacacaggaacagtgcaagccgtcgttaacatcacctatggaagcgtcag

SEQ ID NO: 30771 - DNA, 80 bp, synthetic construct
  source 1..80: mol_type = other DNA
ctggagatccgctgatgtctatgttaacggcgaaactccagcaaagatcggtgacgccaaactaactatagggccgttgt

SEQ ID NO: 30772 - DNA, 80 bp, synthetic construct
  source 1..80: mol_type = other DNA
cttccgcctggactccattcgattctaaggtagtagtgtatggacacgaggtgtacaactacgactttcctgaatatggc

SEQ ID NO: 30773 - DNA, 80 bp, synthetic construct
  source 1..80: mol_type = other DNA
accggcaaggccggttcctttggagacctgcaatcccggacccttacaagcaacgacctgtacgccaacaccaatctgaa

SEQ ID NO: 30774 - DNA, 80 bp, synthetic construct
  source 1..80: mol_type = other DNA
ccacaaccgggggtggtgcatacaccctatacccaatcgccttcagggtttgaacgctggaagaaagaccgtggcgcacc

SEQ ID NO: 30775 - DNA, 80 bp, synthetic construct
  source 1..80: mol_type = other DNA
attgaacgacattgctccattcgggtgcacaatagccctggatcctctgcgtgcagagaactgcgcggtcggaaacattc

SEQ ID NO: 30776 - DNA, 80 bp, synthetic construct
  source 1..80: mol_type = other DNA
ccctttccatagacatccctgatgccgcgttcacgaggatctcggagacgccgactgtgtccgatctggaatgcaagatc

SEQ ID NO: 30777 - DNA, 80 bp, synthetic construct
  source 1..80: mol_type = other DNA
actgaatgcacctacgcgtctgattttggaggaatagccacagttgcctataaggcaagtaaagctggaaattgtcctat

SEQ ID NO: 30778 - DNA, 80 bp, synthetic construct
  source 1..80: mol_type = other DNA
ccattccccttcaggcatcgcagtgattaaagagaacgacgttacgttggcagacagcgggtcatttacattccatttct

SEQ ID NO: 30779 - DNA, 80 bp, synthetic construct
  source 1..80: mol_type = other DNA
ccacggccagtattcacccggcgttcaaaatgcaggtttgcaccagtgtagttacctgcaaaggggattgcaaaccaccc

SEQ ID NO: 30780 - DNA, 80 bp, synthetic construct
  source 1..80: mol_type = other DNA
tagtaggtagcacttcggcatttatagtcctagggctgatcgccacggcggtggtcgcactggtactatttacccacaaa

SEQ ID NO: 30781 - DNA, 80 bp, synthetic construct
  source 1..80: mol_type = other DNA
cactaaagtagatgctaccaacattattgtattatcgttgttcgatgtacttccgagcagcggcaaaggtggtgcataat

SEQ ID NO: 30782 - DNA, 80 bp, synthetic construct
  source 1..80: mol_type = other DNA
gccacctgcgcagtgcataatgctgcgaatatttagcctatcggcctatataatcacactacaggtagcttactaccatt

SEQ ID NO: 30783 - DNA, 80 bp, synthetic construct
  source 1..80: mol_type = other DNA
aataacactactggcagtgctaatactgccttttataacactattggcagtgcataatgctgccttttataacactattg

SEQ ID NO: 30784 - DNA, 80 bp, synthetic construct
  source 1..80: mol_type = other DNA
gcagtgctaatactgccttttataaaatcttttaaaatcatatacagtttttcttttatgttttattttgtttttaatat

SEQ ID NO: 30785 - DNA, 80 bp, synthetic construct
  source 1..80: mol_type = other DNA
tccagatgggcgcgggaataccgcgccgatctggaggacgagaaagaccttggtgtgcgggaacgctcccttgtaatggg

SEQ ID NO: 30786 - DNA, 80 bp, synthetic construct
  source 1..80: mol_type = other DNA
ctgctgttgggcttttaaaacacataaaattacctcgatttacaagaaaccaggtacacagaccatcaaaaaggtacctg

SEQ ID NO: 30787 - DNA, 80 bp, synthetic construct
  source 1..80: mol_type = other DNA
cggtcttcaactcctttgtcgtcccgcagctaactagctatggattagatattggattacgcaggagaatcaaaatgctt

SEQ ID NO: 30788 - DNA, 80 bp, synthetic construct
  source 1..80: mol_type = other DNA
ctggaagagaagaagaagccagcccctatcattaccgaagccgatgtggcccaccttaaaggtatgcaagaagaagcgga

SEQ ID NO: 30789 - DNA, 80 bp, synthetic construct
  source 1..80: mol_type = other DNA
ggcagtggctgaagcagaagccatacgagcggctttaccgccactgctgccagaagtggagagagaaaccgttgaagcgg

SEQ ID NO: 30790 - DNA, 80 bp, synthetic construct
  source 1..80: mol_type = other DNA
acatcgatttaataatgcaagaagcaggagcgggtagtgtcgaaacgcctaggcgacacattaaagttactacctaccct

SEQ ID NO: 30791 - DNA, 80 bp, synthetic construct
  source 1..80: mol_type = other DNA
ggggaagaaatgattgggtcatatgctgtgctatcgccgcaggcagtccttaacagcgaaaagttggcttgcatccatcc

SEQ ID NO: 30792 - DNA, 80 bp, synthetic construct
  source 1..80: mol_type = other DNA
gctggctgaacaggtgctagttatgacccacaaagggcgcgccggtaggtacaaagtagaaccctaccatggccgcgtca

SEQ ID NO: 30793 - DNA, 80 bp, synthetic construct
  source 1..80: mol_type = other DNA
ttgtccctagtggtaccgctattccaatcccggactttcaagcgctgagcgaaagcgcgactattgtctataatgaacgg

SEQ ID NO: 30794 - DNA, 80 bp, synthetic construct
  source 1..80: mol_type = other DNA
tttgttaatcgttatttacatcacatcgccatcaacggtggggctctaaacacagatgaagagtactacaaagtccttag

SEQ ID NO: 30795 - DNA, 80 bp, synthetic construct
  source 1..80: mol_type = other DNA
aagtggtgaagcggattcggagtacgtcttcgacatcgacgccaagaaatgtgttaaaaaggcggaggcagggccaatgt

SEQ ID NO: 30796 - DNA, 80 bp, synthetic construct
  source 1..80: mol_type = other DNA
gccttgttggtgatctagtggaccccccgttccacgagttcgcgtatgaaagtctgaagactcgccctgcagcaccacac

SEQ ID NO: 30797 - DNA, 80 bp, synthetic construct
  source 1..80: mol_type = other DNA
agtgcaaagaaggaaaactgcacagagatcatcaaagatgttaagcgtatgcgaggtatggatgttgcagcccgtacagt

SEQ ID NO: 30798 - DNA, 80 bp, synthetic construct
  source 1..80: mol_type = other DNA
agactccgtactattgaacggtgtcaaacatccggtggacacattgtacatcgatgaggcgttcgcatgccacgctggga

SEQ ID NO: 30799 - DNA, 80 bp, synthetic construct
  source 1..80: mol_type = other DNA
atgatgtgcctcaaggtgcacttcaaccatgaaatctgtaccgaagtgtaccacaagagtatctcacgcaggtgcacaag

SEQ ID NO: 30800 - DNA, 80 bp, synthetic construct
  source 1..80: mol_type = other DNA
aactgtcacggcaatagtttctacattgttctatgacaaacgaatgcgaacagtgaatccgtgcagcgataagatcatca

SEQ ID NO: 30801 - DNA, 80 bp, synthetic construct
  source 1..80: mol_type = other DNA
tagataccacgagcactacgaagccgctgaaagacgacatcatactgacgtgctttagggggtgggttaaacagctgcaa

SEQ ID NO: 30802 - DNA, 80 bp, synthetic construct
  source 1..80: mol_type = other DNA
cccagggattaacccgtaaaggtgtgtacgcggtcagatacaaggtcaacgaaaacccactttatgcacagacgtccgaa

SEQ ID NO: 30803 - DNA, 80 bp, synthetic construct
  source 1..80: mol_type = other DNA
catgtaaatgtccttttgacccgtaccgagaagcgtatcgtctggaaaactcttgcaggcgatccttggataaagacttt

SEQ ID NO: 30804 - DNA, 80 bp, synthetic construct
  source 1..80: mol_type = other DNA
gacagctcactatccgggggagttctcggctactttggaggaatggcaggctgagcatgacgccatcatgaagcgagtgt

SEQ ID NO: 30805 - DNA, 80 bp, synthetic construct
  source 1..80: mol_type = other DNA
tagaaactcccgccaatagcgacgtttaccagaacaaagtacacgtatgctgggcgaaggcactggaaccagtgttggct

SEQ ID NO: 30806 - DNA, 80 bp, synthetic construct
  source 1..80: mol_type = other DNA
accgccaacattactctcactcgttctcaatgggaaaccattcctgcttttaaggacgacaaagccttttcaccagaaat

SEQ ID NO: 30807 - DNA, 80 bp, synthetic construct
  source 1..80: mol_type = other DNA
tggggtagacattgatagcgggctgttctcagcgcctacagtgccattgacgtacaccaatgaacactgggataacagcc

SEQ ID NO: 30808 - DNA, 80 bp, synthetic construct
  source 1..80: mol_type = other DNA
cagatacggtctatgtatgcgcactgccaaggaactagcgcgacgttacccttgtatactaaaggccgtggacacagggc

SEQ ID NO: 30809 - DNA, 80 bp, synthetic construct
  source 1..80: mol_type = other DNA
gcgttgcggatgtgcgcactaataccattagagactacaaccctatgattaacgtagtccctctgaatcggcgacttcca

SEQ ID NO: 30810 - DNA, 80 bp, synthetic construct
  source 1..80: mol_type = other DNA
cattctctggtggtgtcacatagatacactggcgacggtaactattcgcaactgctgtcaaaattgaccggaaaaaccat

SEQ ID NO: 30811 - DNA, 80 bp, synthetic construct
  source 1..80: mol_type = other DNA
gacgtaacagataggttcatagcctccaaagctgcagatctactaacggtgatgtcaacaccggatgtagaaaccccgtc

SEQ ID NO: 30812 - DNA, 80 bp, synthetic construct
  source 1..80: mol_type = other DNA
cttggtgattggaacaccaatcaatgtcccaggcaaacgagtggagacattgggtccgggccctcaatgcacatacaaag

SEQ ID NO: 30813 - DNA, 80 bp, synthetic construct
  source 1..80: mol_type = other DNA
cagacctggaccttggcatccctagtatgatagggaaatatgacatcatatttgtcaatgtacgaacaccgtacaaacat

SEQ ID NO: 30814 - DNA, 80 bp, synthetic construct
  source 1..80: mol_type = other DNA
caccactatcagcagtgtgaagaccatgctattcaccacagcatgctcaccaggaaagccgtcgaccacttgaacaaagg

SEQ ID NO: 30815 - DNA, 80 bp, synthetic construct
  source 1..80: mol_type = other DNA
ggaaccacttacgcgatcaagatcaattaagtgtcgtgctgaacaacatctaccaaggttccacgcagtacgaagccggt

SEQ ID NO: 30816 - DNA, 80 bp, synthetic construct
  source 1..80: mol_type = other DNA
cgtgcaccagcatacagagtcattcgaggagacatatctaaaagcacagacgaagtcattgttaacgcggcgaataacaa

SEQ ID NO: 30817 - DNA, 80 bp, synthetic construct
  source 1..80: mol_type = other DNA
aggacaacccggtgcaggggtctgcggggcactgtataagaaatggcccggagcttttgataaggcgccgatcgcgacag

SEQ ID NO: 30818 - DNA, 80 bp, synthetic construct
  source 1..80: mol_type = other DNA
gcacagcacatttagtaaagcatacacccaacattatccatgcggtagggccgaatttttcccgcatgtcagaggtggaa

SEQ ID NO: 30819 - DNA, 80 bp, synthetic construct
  source 1..80: mol_type = other DNA
ggcaaccagaaactgtcagaagtttatatggatattgctaaggtcattaataaggagcggtacaacaaggtgtcaatacc

SEQ ID NO: 30820 - DNA, 80 bp, synthetic construct
  source 1..80: mol_type = other DNA
attatgcatgcacacagactccacttgtaggtaccaaggtaccgttgccgtataccaagacgtatacgcagtgcatgcac

SEQ ID NO: 30821 - DNA, 80 bp, synthetic construct
  source 1..80: mol_type = other DNA
attgctatcaacaggagtctatgccggaggcaaggaccgcgtcatgcagtcacttaatcacttgtttacagccatggaca

SEQ ID NO: 30822 - DNA, 80 bp, synthetic construct
  source 1..80: mol_type = other DNA
ctaccgacgctgacgtcaccatttactgtctggataaacagtgggaatcacggatcaaggatgccattgcccgaaaagaa

SEQ ID NO: 30823 - DNA, 80 bp, synthetic construct
  source 1..80: mol_type = other DNA
agcgttgaagagctcgtggaggatgacaaaccggtggatattgaattagtccgcgtgcacccactgagcagcctggtagg

SEQ ID NO: 30824 - DNA, 80 bp, synthetic construct
  source 1..80: mol_type = other DNA
gagacctgggtactctacgaatgaaggtaaagtacactcctacttggaagggacgcgatttcatcagacggcaaaagaca

SEQ ID NO: 30825 - DNA, 80 bp, synthetic construct
  source 1..80: mol_type = other DNA
tcgcagagatctacgccatgtggcccaacaagcaggaagccaatgagcaaatatgcctatacgtgctgggggagagtatg

SEQ ID NO: 30826 - DNA, 80 bp, synthetic construct
  source 1..80: mol_type = other DNA
accagtatccgctctaagtgccctgttgaggaatctgaagcatcctcaccaccgcatacaattccatgtctatgtaatta

SEQ ID NO: 30827 - DNA, 80 bp, synthetic construct
  source 1..80: mol_type = other DNA
agagagtctacagactgcgaatggcaaagaacgaacagtttgccgtgtgttcctcattccagctgcctaagtacagaata

SEQ ID NO: 30828 - DNA, 80 bp, synthetic construct
  source 1..80: mol_type = other DNA
acaggtgtgcagaagatccagtgcaacaaaccagtcatattctctggggttgtgccgccggcaatacacccacggaagtt

SEQ ID NO: 30829 - DNA, 80 bp, synthetic construct
  source 1..80: mol_type = other DNA
ctctactgtagaggaaacacaaccagcgactattgcagaacggcttattccaagacgcccagctccaccagtacccgtgc

SEQ ID NO: 30830 - DNA, 80 bp, synthetic construct
  source 1..80: mol_type = other DNA
ctgcacgcattccaagcccacgctgttcgcctgcagttagcatgcaatcactaggcggtagtagtacatcggaagtgatt

SEQ ID NO: 30831 - DNA, 80 bp, synthetic construct
  source 1..80: mol_type = other DNA
ctacctctatttatcaccaagcactaaaaggagtgcgcaccatctactggatagggtttgacaccaccccattcatgtat

SEQ ID NO: 30832 - DNA, 80 bp, synthetic construct
  source 1..80: mol_type = other DNA
atctccgaagctgaggtccatgactctgactcggattgtagcattccgccaatgccgtttgtcgtagaggcagaggttca

SEQ ID NO: 30833 - DNA, 80 bp, synthetic construct
  source 1..80: mol_type = other DNA
tgctagccaaggttcgcaatggagcattccaagcgcctcaggatttgaaatccgcgaaccactaaacgatcttggctcaa

SEQ ID NO: 30834 - DNA, 80 bp, synthetic construct
  source 1..80: mol_type = other DNA
ttactcgcacgccagcgatctctgaccattccgtagacttaatcactttcgatagtgtcactgacattttcgataacttc

SEQ ID NO: 30835 - DNA, 80 bp, synthetic construct
  source 1..80: mol_type = other DNA
aagcaggcaccgtttcagtttctatctgacatacgtccgattccagcgccacgtcgacggagggagccggagactgacat

SEQ ID NO: 30836 - DNA, 80 bp, synthetic construct
  source 1..80: mol_type = other DNA
tcaccgtttcgataaatcggaggagaaaccagttccgaaacctcgcacccgcacggctaagtacaaaaagccacctggcg

SEQ ID NO: 30837 - DNA, 80 bp, synthetic construct
  source 1..80: mol_type = other DNA
tagcaagatccatctcagaagccgaactggacgagttcatacgtcggcactctaactgacggtatgaagcgggtgcgtat

SEQ ID NO: 30838 - DNA, 80 bp, synthetic construct
  source 1..80: mol_type = other DNA
agcgctctgtccatgagaagttctacgccccgcgcctcgacctggaacgtgagaaattgctgcagagaaagctacaacta

SEQ ID NO: 30839 - DNA, 80 bp, synthetic construct
  source 1..80: mol_type = other DNA
tgtgcgtcagaagggaataggagtaggtatcaatcgcgtaaagtcgaaaacatgaaagcaatcacagcggaacgtttact

SEQ ID NO: 30840 - DNA, 80 bp, synthetic construct
  source 1..80: mol_type = other DNA
gcaagggataggggcttatctctcggctgaacctcagcctgtagagtgttataagatcaattaccctgtccctgtgtatt

SEQ ID NO: 30841 - DNA, 80 bp, synthetic construct
  source 1..80: mol_type = other DNA
aaaaatatggctggtgcgtatccgacttataacactaactgggctgacgaaagtgtgctagaggcaaggaacataggtct

SEQ ID NO: 30842 - DNA, 80 bp, synthetic construct
  source 1..80: mol_type = other DNA
ctgccactcgcagtaatagattctcttcggcagacgtcgcggtgagggtgtgtaacctggttatgcaggagaacttccca

SEQ ID NO: 30843 - DNA, 80 bp, synthetic construct
  source 1..80: mol_type = other DNA
accgtggctagctacacaatcacagacgagtatgatgcgtacttggacatggtcgacggggcatcctgctgtttagacac

SEQ ID NO: 30844 - DNA, 80 bp, synthetic construct
  source 1..80: mol_type = other DNA
cgccaccttctgccctgctaaactgcgtagcttcccgaagaaacatagctatttgaagcccgagatacgatcggccgtac

SEQ ID NO: 30845 - DNA, 80 bp, synthetic construct
  source 1..80: mol_type = other DNA
ccgcgtttaacgtagagtgttttaaaaaatatgcgtgtaacgatgaatactgggagacattcaagaacaaccccatcaga

SEQ ID NO: 30846 - DNA, 80 bp, synthetic construct
  source 1..80: mol_type = other DNA
ttgaccaccgaaaacgtcacgcagtacgtgaccaagctaaaaggtccaaaggctgcagccttgtttgcgaagactcacaa

SEQ ID NO: 30847 - DNA, 80 bp, synthetic construct
  source 1..80: mol_type = other DNA
ctacaacccttgcacgaaattccaatggatagattcgtgatggacctcaagcgtgacgtcaaagtgactccagggaccaa

SEQ ID NO: 30848 - DNA, 80 bp, synthetic construct
  source 1..80: mol_type = other DNA
acacactgaggaacggccaaaagtacaagtaatacaggcagcagacccgcttgcaaccgcatatttatgcgggatacata

SEQ ID NO: 30849 - DNA, 80 bp, synthetic construct
  source 1..80: mol_type = other DNA
gagagttggtcaggagactgaacgctgtactactgcctaacatccacacactttttgacatgtccgccgaagattttgat

SEQ ID NO: 30850 - DNA, 80 bp, synthetic construct
  source 1..80: mol_type = other DNA
gtgcagctcagacctccacgagcaacgatttggaaagatctcgatcatgaggaaaaagaaattgcaaccaaccaacaaag

SEQ ID NO: 30851 - DNA, 80 bp, synthetic construct
  source 1..80: mol_type = other DNA
gtgaagatgatgcaatagctatgtcggcgctcatgatccttgaggatctgggtgtcgaccaggcacttctggatctgata

SEQ ID NO: 30852 - DNA, 80 bp, synthetic construct
  source 1..80: mol_type = other DNA
gaagctgcctttggaaacatcacatctgttcacttacctacagggacacgcttcaaattcggagcgatgatgaagtcggg

SEQ ID NO: 30853 - DNA, 80 bp, synthetic construct
  source 1..80: mol_type = other DNA
tatgttcctgactctgtttattaatactgtcgtaaacatcatgattgctagccgtgtattgcgagagaggcttaccaatt

SEQ ID NO: 30854 - DNA, 80 bp, synthetic construct
  source 1..80: mol_type = other DNA
cgccatgcgctgcgttcatcggcgatgataacatcgtgaaaggcgtcaagtcggacgcactcatggccgagcgttgcgcc

SEQ ID NO: 30855 - DNA, 80 bp, synthetic construct
  source 1..80: mol_type = other DNA
acatggctgaacatggaggtaaagataatagatgccgtagtgggggtgaaggcaccgtacttctgcggaggcttcatcgt

SEQ ID NO: 30856 - DNA, 80 bp, synthetic construct
  source 1..80: mol_type = other DNA
tcgtggaccaaataattggcacagcctgcagagtggcagacccccttaagagactcttcaagctcggtaaacctttacct

SEQ ID NO: 30857 - DNA, 80 bp, synthetic construct
  source 1..80: mol_type = other DNA
ttggatgacgaccaagacggcgataggcgcagggcactgtatgatgaagcgctccgatggaacaggatcggtatcaccga

SEQ ID NO: 30858 - DNA, 80 bp, synthetic construct
  source 1..80: mol_type = other DNA
cgagttggttaaggcggtcgaatcgcgctatgaggtgttttacatctctttagtcatcacagccctgtccacccttgcag

SEQ ID NO: 30859 - DNA, 80 bp, synthetic construct
  source 1..80: mol_type = other DNA
ccacggtcagcaacttcaagcacataagaggaaaccccataaccctctacggctgacctaaataggttacgcagtagaag

SEQ ID NO: 30860 - DNA, 80 bp, synthetic construct
  source 1..80: mol_type = other DNA
gaagctaacctattattttaacactcagtgtgtatcgcaagcgcaatacagaaacgatgtttccgtatcctacactaaac

SEQ ID NO: 30861 - DNA, 80 bp, synthetic construct
  source 1..80: mol_type = other DNA
tcgtgttttccgtcggttcgacgatttacactgaggagagaatattattgcgcagctggcatctgccgaacgttttccac

SEQ ID NO: 30862 - DNA, 80 bp, synthetic construct
  source 1..80: mol_type = other DNA
tatccacccatggcgccggttaatccaatggcgtacagggatcccaacccgccaaggcgaaggtggaggccgttcaggcc

SEQ ID NO: 30863 - DNA, 80 bp, synthetic construct
  source 1..80: mol_type = other DNA
tgaagatttgaggcgctccattgcgaacctcaccttcaaacaacgggctccgaatccaccggcgggtccccccgcaaaac

SEQ ID NO: 30864 - DNA, 80 bp, synthetic construct
  source 1..80: mol_type = other DNA
gcaagaaaccggcaccaaagcctaaacctgcggcgccaaagaagaagcggcagccgcccccagctaagaagcagaaacgc

SEQ ID NO: 30865 - DNA, 80 bp, synthetic construct
  source 1..80: mol_type = other DNA
aagcagaagccaggtaaaagacaaaggatgtgtatgaaattggagtccgacaaaaccttccccatcttgctgaatgggca

SEQ ID NO: 30866 - DNA, 80 bp, synthetic construct
  source 1..80: mol_type = other DNA
ccgggttctacaactggcaccacggcgcagtgcaatacgaaaataacaggttcactgtcccacgaggagtaggcggtaaa

SEQ ID NO: 30867 - DNA, 80 bp, synthetic construct
  source 1..80: mol_type = other DNA
ggggacagtggtcgtccgattctggataaccggggtcgcgtggttgccattgtgctaggcggagcaaatgaagggtcgcg

SEQ ID NO: 30868 - DNA, 80 bp, synthetic construct
  source 1..80: mol_type = other DNA
cacagcattgtcagtggtcacctggaaccaaaaaggagttaccgtgaaggacactcccgaaggttctgaaccatggtcac

SEQ ID NO: 30869 - DNA, 80 bp, synthetic construct
  source 1..80: mol_type = other DNA
tgactacggttatgtgcgttttagccaacattaccttcccgtgcgatcagccgccttgcatgccttgctgctatgagaaa

SEQ ID NO: 30870 - DNA, 80 bp, synthetic construct
  source 1..80: mol_type = other DNA
aatcctcatgagacgcttactatgctggaacaaaactacgacagccaggcttacgaccaactattagaagcggctgtcaa

SEQ ID NO: 30871 - DNA, 80 bp, synthetic construct
  source 1..80: mol_type = other DNA
gtgcaatagcagacggacccgcagagatttggaaactcatttcacgcagtacaaacttgcccgcccatacatagccgact

SEQ ID NO: 30872 - DNA, 80 bp, synthetic construct
  source 1..80: mol_type = other DNA
gttctaattgcggccacggcagatgtgacagtccaattgccatcgaggacgtgcgcggagacgcgcatgccggttacatc

SEQ ID NO: 30873 - DNA, 80 bp, synthetic construct
  source 1..80: mol_type = other DNA
tgagctttatgaatgggaagactctgaaggccatcaaaattgaacacctgtacgttcgcacgtcagcaccgtgctccctg

SEQ ID NO: 30874 - DNA, 80 bp, synthetic construct
  source 1..80: mol_type = other DNA
gtgtcatatcatgggtactacctacttgctcagtgccctccaggggatacggtcacagtagggttccaagatggtgcgaa

SEQ ID NO: 30875 - DNA, 80 bp, synthetic construct
  source 1..80: mol_type = other DNA
taagcacatgtgcaccattgcccataaggtagaattcagaccagttgggagagaaaagtatcggcatccacccgcgcacg

SEQ ID NO: 30876 - DNA, 80 bp, synthetic construct
  source 1..80: mol_type = other DNA
gtgttgaattaccctgtaataagtacacgcacaaacgtgcagatcagggacactacgtagaaatgcaccagcctgggctg

SEQ ID NO: 30877 - DNA, 80 bp, synthetic construct
  source 1..80: mol_type = other DNA
gttgccgatcactcgctgctgagcctaagcagtacaaaagtaaagattaccgttccaagcggctctcaagtgaagtatta

SEQ ID NO: 30878 - DNA, 80 bp, synthetic construct
  source 1..80: mol_type = other DNA
ctgtaaatgcccagacgtacaggaaggaacagccagcggcgatcatacaaccacctgcacagatctgaagcagtgccgag

SEQ ID NO: 30879 - DNA, 80 bp, synthetic construct
  source 1..80: mol_type = other DNA
catatttaattgacaataagaaatgggtctttaactccgggaagttaccaagaggtgagggcgaaacttttaaagggaaa

SEQ ID NO: 30880 - DNA, 80 bp, synthetic construct
  source 1..80: mol_type = other DNA
ctccacgtgccgttcgtaccagttacatctaagtgcacggcaactctggcccccgagccattggtggagcataagcacag

SEQ ID NO: 30881 - DNA, 80 bp, synthetic construct
  source 1..80: mol_type = other DNA
atcgctgattttgcacctacacccagaacacccaacgctgctgacgactagagcactcggaaatgatgccagaccaacta

SEQ ID NO: 30882 - DNA, 80 bp, synthetic construct
  source 1..80: mol_type = other DNA
ggcaatgggtcgaccaaccaaccacagttaacttcacagtaactggagaagggttcgaatacacctggggcaaccaccct

SEQ ID NO: 30883 - DNA, 80 bp, synthetic construct
  source 1..80: mol_type = other DNA
ccaaaaagagtatgggcccaagaatcaggagaaggcaacccgcatggctggccgcacgaggtagtcatttattactacaa

SEQ ID NO: 30884 - DNA, 80 bp, synthetic construct
  source 1..80: mol_type = other DNA
ccggtacccgatgacgactatcgtgggactgtgtacgtgtgcggccattattatggtctcttgcatcacgtccgtatggc

SEQ ID NO: 30885 - DNA, 80 bp, synthetic construct
  source 1..80: mol_type = other DNA
tcctgtgccgcacccgcaatttgtgcatcactccatacagactggcaccaaatgcccaagtacctattctgctggcagtt

SEQ ID NO: 30886 - DNA, 80 bp, synthetic construct
  source 1..80: mol_type = other DNA
ttcttgagctgcaaggtgactgatacgctgcgcggggagagggtatcctttcccgtgtgcacgtacgtgcccgcgacact

SEQ ID NO: 30887 - DNA, 80 bp, synthetic construct
  source 1..80: mol_type = other DNA
ttgtgctgcgttaaacccaccagagcagatgacaccctgcaggtactaaattacctgtggaacaacaaccagaacttttt

SEQ ID NO: 30888 - DNA, 80 bp, synthetic construct
  source 1..80: mol_type = other DNA
ctggatgcaaaccctgatcccccttgctgccttaattgtatgcatgcgcatgctacgctgcttactgtgttgcgggccgg

SEQ ID NO: 30889 - DNA, 80 bp, synthetic construct
  source 1..80: mol_type = other DNA
ggggatcccttacaaagcactggttgaacgccccggatacgcgccagttcaccttcaaatccagctggtgaccacaaaaa

SEQ ID NO: 30890 - DNA, 80 bp, synthetic construct
  source 1..80: mol_type = other DNA
atgcagataagctaagaaagagtgacgtaactgataggttcatagcctccaaagctgcagatctactaacggtgatgtca

SEQ ID NO: 30891 - DNA, 80 bp, synthetic construct
  source 1..80: mol_type = other DNA
ccgcatacaaacatcagcaatgttcggcatgaagtcggacggagtcgacctggcgtatatgagctttatgaacgggaaga

SEQ ID NO: 30892 - DNA, 80 bp, synthetic construct
  source 1..80: mol_type = other DNA
gcccatacgtcaagtcgttgcaaaagtgctttccacattttgagatagaagccacgcaggtcactgacaatgaccatgct

SEQ ID NO: 30893 - DNA, 80 bp, synthetic construct
  source 1..80: mol_type = other DNA
tcgtcgattacccagcccaacatacagaaacattcacgtctgcagtatcggccacagcgtggtcatggctgaaggtgcta

SEQ ID NO: 30894 - DNA, 80 bp, synthetic construct
  source 1..80: mol_type = other DNA
tctatggcgtcccaggctcaggaaaatcgggtatcatcaagagtgcagtcacgaaacgagacctagtggtcagtgcaaag

SEQ ID NO: 30895 - DNA, 80 bp, synthetic construct
  source 1..80: mol_type = other DNA
acgctgcttgcgcttattgccattgtgaaacctaagaaggtagtgctgtgcggtgacccgaagcagtgcgggttcttcaa

SEQ ID NO: 30896 - DNA, 80 bp, synthetic construct
  source 1..80: mol_type = other DNA
gaggcacctgcgttgcgttgggttatggcaccgcagatagagcaaccgaaaatattatctcagcagtggcacgctccttt

SEQ ID NO: 30897 - DNA, 80 bp, synthetic construct
  source 1..80: mol_type = other DNA
agattctcacgtgtttgccagccaaaatgtgcctgggagaatacggaggttgccttcgtattctttggcaaggacaacgg

SEQ ID NO: 30898 - DNA, 80 bp, synthetic construct
  source 1..80: mol_type = other DNA
tcagagacagggcaagggcatctgcaacagaaatctaccaggcagtgcaaactccaacaccctattttggagcgctctgt

SEQ ID NO: 30899 - DNA, 80 bp, synthetic construct
  source 1..80: mol_type = other DNA
caaagcaagagatcaataacccatcatggattctgtgtacgtggatatagacgctgacagcgcctttttgaaggccctgc

SEQ ID NO: 30900 - DNA, 80 bp, synthetic construct
  source 1..80: mol_type = other DNA
aatagaaaaccataaacagaagtagttcaaagggctatgaaacccctgaatagtaacaaaatataaaactaataaaaatc

SEQ ID NO: 30901 - DNA, 80 bp, synthetic construct
  source 1..80: mol_type = other DNA
aataggtgctctacacgacacctattccaccatcataggtgctctacacgacacctattccaccatggacttcctaccaa

SEQ ID NO: 30902 - DNA, 80 bp, synthetic construct
  source 1..80: mol_type = other DNA
gcgagaccagactgtgaaggccggtcatccttttgacacctcaagtccagaggataacctcctcccggggaaaaaaacta

SEQ ID NO: 30903 - DNA, 80 bp, synthetic construct
  source 1..80: mol_type = other DNA
acacctctcgtacgattctgcagtttgctagcaggaccggtacataactataaagggctgggtcatctaagcatttcagt

SEQ ID NO: 30904 - DNA, 80 bp, synthetic construct
  source 1..80: mol_type = other DNA
cgagaaaaaaactgtataccaaaagaacaactaacaacacttctcatctcgagacccatatcaagatgctggatccggga

SEQ ID NO: 30905 - DNA, 80 bp, synthetic construct
  source 1..80: mol_type = other DNA
gaggtttatgatgaccctattgatccaattgagtcagaggctgaacccagaggaacccccactgtccccaacatcttgag

SEQ ID NO: 30906 - DNA, 80 bp, synthetic construct
  source 1..80: mol_type = other DNA
ccttggcgccagctttaactcgcatgctgctttcctgccagctctctcagactctactgccaccacctcaaggcctgtct

SEQ ID NO: 30907 - DNA, 80 bp, synthetic construct
  source 1..80: mol_type = other DNA
ttgtctcttcttccttctcttcttcttctacttccctctcttccttcttacagcatcttctctggtccacgtcgtagacg

SEQ ID NO: 30908 - DNA, 80 bp, synthetic construct
  source 1..80: mol_type = other DNA
aacctaggcaagtcacctcaaacgaccacgcaaatgccaaagcggcctcgcatctagctataaaactaatagaggaagaa

SEQ ID NO: 30909 - DNA, 80 bp, synthetic construct
  source 1..80: mol_type = other DNA
gtactggtcggtgacttaatcaaccctcctttccacatggcggacgtgtgacatcaccgttcgcctttcttggatccctt

SEQ ID NO: 30910 - DNA, 80 bp, synthetic construct
  source 1..80: mol_type = other DNA
gatgtgtagttcaaagggctataatacccctgatcagtaacaaaatataaaaataaaaacatgaagaaaagaacaaaccc

SEQ ID NO: 30911 - DNA, 80 bp, synthetic construct
  source 1..80: mol_type = other DNA
ggagaaagttcatgttgacttagacgcagacagcccattcgtcaagtcactacaaagatgctttccacattttgagatag

SEQ ID NO: 30912 - DNA, 80 bp, synthetic construct
  source 1..80: mol_type = other DNA
taccccatgtttgaggtggaaccaaggcaggtcacaccgaatgaccatgctaatgctagagcgttctcgcatctagctat

SEQ ID NO: 30913 - DNA, 80 bp, synthetic construct
  source 1..80: mol_type = other DNA
ctgaataataacaaaatataaaaaccaataaaaattataaaatagaaaaccacaaatagaagtagttcaaagggctataa

SEQ ID NO: 30914 - DNA, 80 bp, synthetic construct
  source 1..80: mol_type = other DNA
gtgccagaaatccatagattgtgtatatccatcatgaaaaaaactaacactcctgcaggatttgcggccgcttttccgcg

SEQ ID NO: 30915 - DNA, 80 bp, synthetic construct
  source 1..80: mol_type = other DNA
gattgtgtatatccatcatgaaaaaaactaacactcctcctttcgaaccatcccaagtatgagcaagatctttgttaatc

SEQ ID NO: 30916 - DNA, 80 bp, synthetic construct
  source 1..80: mol_type = other DNA
gagaccaggctgtgaacccggggaaaaaaactaacacctctcgtacgattctgcagtttgctagcaggaccggtacataa

SEQ ID NO: 30917 - DNA, 80 bp, synthetic construct
  source 1..80: mol_type = other DNA
ctataaagggctgggtcatctaagcatttcagtcgagaaaaaaactgtataccaaaagaacaactaacaacacttctcat

SEQ ID NO: 30918 - DNA, 80 bp, synthetic construct
  source 1..80: mol_type = other DNA
ctcgagacccatatcaagatgctggatccgggagaggtttatgatgaccctattgatccaattgagtcagaggctgaacc

SEQ ID NO: 30919 - DNA, 80 bp, synthetic construct
  source 1..80: mol_type = other DNA
cgcctcttataaacactacaggcagcgcataatgctgtcttttatatcaatttacaaaatcatattaatttttcttttat

SEQ ID NO: 30920 - DNA, 80 bp, synthetic construct
  source 1..80: mol_type = other DNA
ctatattaaccatttatttagcggacgccgaaactcaatgtatttctgaggaagcatggtgcataatgcatgcagcgtct

SEQ ID NO: 30921 - DNA, 80 bp, synthetic construct
  source 1..80: mol_type = other DNA
cacattatcactatattaaccatttatttagcggacgccgaaactcaatgtatttctgaggaagcatggtgcataatgcc

SEQ ID NO: 30922 - DNA, 80 bp, synthetic construct
  source 1..80: mol_type = other DNA
taagtactaaccaataagtagacaaatatatgctaaccatatatataaccagctacagtatactatatttagttaagcag

SEQ ID NO: 30923 - DNA, 80 bp, synthetic construct
  source 1..80: mol_type = other DNA
agataagtatagatcaaagggctgaacaaccccacatgaagtccgacgcttcgaagttcataaaaatcataaaatagaaa

SEQ ID NO: 30924 - DNA, 80 bp, synthetic construct
  source 1..80: mol_type = other DNA
cttgaccgcattgatgttgatgattttcttaatgacgtgttgtcgaagggccaatagagcagaatcagcacagcacagtc

SEQ ID NO: 30925 - DNA, 80 bp, synthetic construct
  source 1..80: mol_type = other DNA
atagaggactaagaattgccccagaaggggtgttaagttgtctcgagagagtcgactatgacaaggcatttgggaggtat

SEQ ID NO: 30926 - DNA, 80 bp, synthetic construct
  source 1..80: mol_type = other DNA
aagctcctagctaactatatcttgccccgctttgatgcactgactatgacagacaacctaaacaaggtgtttaagaagtt

SEQ ID NO: 30927 - DNA, 80 bp, synthetic construct
  source 1..80: mol_type = other DNA
aagggacgggccagccccaccatcttactcaaggatgcaatcagaaaagccctgtatgacgaagtagacaaagtggagaa

SEQ ID NO: 30928 - DNA, 80 bp, synthetic construct
  source 1..80: mol_type = other DNA
taagaattcccccagaaggggtgttaagctgtctcgagagagtcgactatgacaaggcatttgggaggtatcttgccaac

SEQ ID NO: 30929 - DNA, 80 bp, synthetic construct
  source 1..80: mol_type = other DNA
ttggagccgtatgtcgtgaacagtctggtacaaagggcagaaaagtttaggcctctcattcattcgttaggagactttcc

SEQ ID NO: 30930 - DNA, 80 bp, synthetic construct
  source 1..80: mol_type = other DNA
cacagatctttgagatccctgaatcaatggagccctcagagatacttgatgacaagtcacactctttcaccagaacaaga

SEQ ID NO: 30931 - DNA, 80 bp, synthetic construct
  source 1..80: mol_type = other DNA
agacccatagggataactttatacttttcttgaaatctgttgaacccctatttccccgatttctcagggagcttttcagc

SEQ ID NO: 30932 - DNA, 80 bp, synthetic construct
  source 1..80: mol_type = other DNA
tataactgacctggcccatttctactctaaatcttctcccatagagaagctgttaaattggacactaggaaacagaggac

SEQ ID NO: 30933 - DNA, 80 bp, synthetic construct
  source 1..80: mol_type = other DNA
ttataaaagataaggtgagtcaacttgaggggacattcggtcccagtgcaaaaaggttttttagggttttggatcaattt

SEQ ID NO: 30934 - DNA, 80 bp, synthetic construct
  source 1..80: mol_type = other DNA
catctgcaaagcaaaaatgtaacacccctacaatggatgccgacaagattgtatttaaagtccataatcaggtggtctct

SEQ ID NO: 30935 - DNA, 80 bp, synthetic construct
  source 1..80: mol_type = other DNA
atggacgaacgggaggatcccggcctattgttccaatcataccttgacaatgttggagtccaaatagtcaggcagatgag

SEQ ID NO: 30936 - DNA, 80 bp, synthetic construct
  source 1..80: mol_type = other DNA
cagagagagagccagtcctcgaaagcccgcatggcggcccaaaccgcctctggccctccagctctcgaatggtccgcgac

SEQ ID NO: 30937 - DNA, 80 bp, synthetic construct
  source 1..80: mol_type = other DNA
cgatatgctatggtgccattaaaccgctgcattttatcaaaatcagattaattaacttttcattttgagcctcttggatg

SEQ ID NO: 30938 - DNA, 80 bp, synthetic construct
  source 1..80: mol_type = other DNA
ccttaatgcaccccttggcagatccatcaacagtttttaaagatgatgacgaggcggaagattttgttgaggttcacctt

SEQ ID NO: 30939 - DNA, 80 bp, synthetic construct
  source 1..80: mol_type = other DNA
aggggacatctccggattcaacagtcctccttggacctattgtaacagggtagattcaagggtcataagaatttcatcaa

SEQ ID NO: 30940 - DNA, 80 bp, synthetic construct
  source 1..80: mol_type = other DNA
tcatctcaactgatcagacatggtcatgtagatccttataatacaagagaccttatagcaattccagtgaccaacggtgc

SEQ ID NO: 30941 - DNA, 80 bp, synthetic construct
  source 1..80: mol_type = other DNA
tgttaccctccaagaactgataccaaaggtggtggacgggctgagagacacttcaaacaatgttgtgttcgaacacagac

SEQ ID NO: 30942 - DNA, 80 bp, synthetic construct
  source 1..80: mol_type = other DNA
agagatagcagtgagtccccagatattatactgggtaagagttaattaagaaaggagactcatctcctatgaaggacgta

SEQ ID NO: 30943 - DNA, 80 bp, synthetic construct
  source 1..80: mol_type = other DNA
agcaatagatcaccatcatcttgcatcttagcaaaatgagtataattataaagggctgggtcattcatgattttcagtcg

SEQ ID NO: 30944 - DNA, 80 bp, synthetic construct
  source 1..80: mol_type = other DNA
tgtagacctgaagaacaactagcaacacttctcatcttgagactctcaccctcatgatcgatccaggtgaggtctatgat

SEQ ID NO: 30945 - DNA, 80 bp, synthetic construct
  source 1..80: mol_type = other DNA
gacccggttgatccgattgaaacggaagctgagcccagagggactcccactgtccccaacatattgaggaactctgacta

SEQ ID NO: 30946 - DNA, 80 bp, synthetic construct
  source 1..80: mol_type = other DNA
gtgggtggagctgcggcccagtcgatgatctccctctggttatacggtgcccactctgaatcaaccaggagccggaagtg

SEQ ID NO: 30947 - DNA, 80 bp, synthetic construct
  source 1..80: mol_type = other DNA
acctattcctcctatctgttcttccacgtgatcactctgtatatgaatgccttagactgggatgaagagaagaccatttt

SEQ ID NO: 30948 - DNA, 80 bp, synthetic construct
  source 1..80: mol_type = other DNA
ttcttttcacgaggtcctctaaaaggatacttaggatcatccacctccatgtcgacccagctgttccatgcttgggagaa

SEQ ID NO: 30949 - DNA, 80 bp, synthetic construct
  source 1..80: mol_type = other DNA
caagaaactcaaatttggcgcagactctaattagaaacatcatatccctgacaggccctgatttccctctagaagaggcc

SEQ ID NO: 30950 - DNA, 80 bp, synthetic construct
  source 1..80: mol_type = other DNA
taggggagagatattttctataccccaaaaagttccagctgcctacccgaccactatgaaggagggaaacagatctattt

SEQ ID NO: 30951 - DNA, 80 bp, synthetic construct
  source 1..80: mol_type = other DNA
ccctatttccccgatttctcagcgagctttttagctcatccttcttggggatccctgagtcaattattggattgatacaa

SEQ ID NO: 30952 - DNA, 80 bp, synthetic construct
  source 1..80: mol_type = other DNA
agaataatctatttagacccttccttaggaggagtgtctgggatgtccctgggaagattccacatacgtcaattctcaga

SEQ ID NO: 30953 - DNA, 80 bp, synthetic construct
  source 1..80: mol_type = other DNA
tctcaactgatcagacacggtcatgtagatccttacaatacaagagacattgtagcaactccagtgaccaacggtgctgt

SEQ ID NO: 30954 - DNA, 80 bp, synthetic construct
  source 1..80: mol_type = other DNA
ctgagaattcccccagaaggggtgttaagttgtctcgagagagtcgattatgacaaggcgttcgggaggtatctcgctaa

SEQ ID NO: 30955 - DNA, 80 bp, synthetic construct
  source 1..80: mol_type = other DNA
gctgtgtacactcgaattatgatgaacggaggtcgactaaagagatcacacataagaagatacgtgtccgtcagctccaa

SEQ ID NO: 30956 - DNA, 80 bp, synthetic construct
  source 1..80: mol_type = other DNA
acctcgacgacatagtcaaggagtcaaaaaatgtgccaggtgtgacccgtttagctcatgacggatcaaaacttcctcta

SEQ ID NO: 30957 - DNA, 80 bp, synthetic construct
  source 1..80: mol_type = other DNA
caactccagcttaagtctgtcctctcactggatcaggctggtttacaagatagtaaagaccactagactcatcggaagca

SEQ ID NO: 30958 - DNA, 80 bp, synthetic construct
  source 1..80: mol_type = other DNA
ttaacttagagatcaccgtcgtgtcgtcgcaggttttaccatctactaatcaagagtatatcacctgcaagtttactacg

SEQ ID NO: 30959 - DNA, 80 bp, synthetic construct
  source 1..80: mol_type = other DNA
gtagtcccctccccgaaagtcaaatgttgcggctccttggaatgtcagcccgccgctcacgccgactataactgcaaagt

SEQ ID NO: 30960 - DNA, 80 bp, synthetic construct
  source 1..80: mol_type = other DNA
aactacttaaatttaggtaccaaatgatgcccaccgaagccaataagagcaggtaccagtcccgtaaagttgaaaatcaa

SEQ ID NO: 30961 - DNA, 80 bp, synthetic construct
  source 1..80: mol_type = other DNA
aaagccgtcaccactgagcgtttgctttcagggttacggctatataactcggcaactgatcagcctgaatgttataaaat

SEQ ID NO: 30962 - DNA, 80 bp, synthetic construct
  source 1..80: mol_type = other DNA
aaacactacaggcagcgcataatgctgtcttttataccaatttacaaaatcatattaatttttcttttatgtttttattt

SEQ ID NO: 30963 - DNA, 80 bp, synthetic construct
  source 1..80: mol_type = other DNA
gaagtagttcaaagggctataaaacccctgaatagtaacaaaatataaaactaataaaaatcaaacgaataccataattg

SEQ ID NO: 30964 - DNA, 80 bp, synthetic construct
  source 1..80: mol_type = other DNA
aacccctgaatagtaacaaaacataaagttaataaaaattaaatgaataccataattggcaaaatcactatttgtgagaa

SEQ ID NO: 30965 - DNA, 80 bp, synthetic construct
  source 1..80: mol_type = other DNA
agttcaaagggctataaaacccctgaatagtaacaaaacataaagttaataaaaattaaatgaataccataattggcaaa

SEQ ID NO: 30966 - DNA, 80 bp, synthetic construct
  source 1..80: mol_type = other DNA
acatggaagacagtagcgaaggctcactcttttcgagctttagcggatcggacaactaccgaaggcaggtggtggtggct

SEQ ID NO: 30967 - DNA, 80 bp, synthetic construct
  source 1..80: mol_type = other DNA
gacgtccatgccgtccaagagcctgcccctgttccaccgccaaggctaaagaagatggcccgcctggcagcggcaagaat

SEQ ID NO: 30968 - DNA, 80 bp, synthetic construct
  source 1..80: mol_type = other DNA
ctggtacacagctacttcagctctagtgcgacacgtctcgtcggtgtggagacagaacgttggagattccagatcggggg

SEQ ID NO: 30969 - DNA, 80 bp, synthetic construct
  source 1..80: mol_type = other DNA
tcgaagggccatataaacccctgaatagtaataaaatataaaacctgattagtaacaaaatagaaaaccacaaaatatgt

SEQ ID NO: 30970 - DNA, 80 bp, synthetic construct
  source 1..80: mol_type = other DNA
cagttgcagtagtaagaatgtagttcaaagggctatacaacccctgaatagtaacaaaatacaaaaatactaataaaaat

SEQ ID NO: 30971 - DNA, 80 bp, synthetic construct
  source 1..80: mol_type = other DNA
gaaggcccttcagaaagcattcccggcttttgaggttgaatcacagcaggtcacacccaatgaccatgctaatgccagag

SEQ ID NO: 30972 - DNA, 80 bp, synthetic construct
  source 1..80: mol_type = other DNA
cctatccaaaatggagaaagttcatgttgacttagatgcagacagcccattcgtcaagtcactgcaaagatgctttccac

SEQ ID NO: 30973 - DNA, 80 bp, synthetic construct
  source 1..80: mol_type = other DNA
aaactggaggaatcggtaatctaccaattagaaactggaattttgattttggattacttggaacaactctactaaattta

SEQ ID NO: 30974 - DNA, 80 bp, synthetic construct
  source 1..80: mol_type = other DNA
gtgagtatgtagctacgtcaagctgcttgaactctgtaagtaaggatgcgtctacgtattcgctacacagagtaatcact

SEQ ID NO: 30975 - DNA, 80 bp, synthetic construct
  source 1..80: mol_type = other DNA
tgaaaatcaataaaagggctataaaacccctgaatagtaacaaaacataaagttaataaaaatcaaatgaataccataat

SEQ ID NO: 30976 - DNA, 80 bp, synthetic construct
  source 1..80: mol_type = other DNA
gtatatgtgtcccctaagagacacaccatatatagttcaaagggctataaaacccctgaatagtaacaaaatataaaact

SEQ ID NO: 30977 - DNA, 80 bp, synthetic construct
  source 1..80: mol_type = other DNA
tgtaggtacttaagcttcttaaaagcagccgaactcgctttgagatgtaggcgtagcacaccgaactcttccataattct

SEQ ID NO: 30978 - DNA, 80 bp, synthetic construct
  source 1..80: mol_type = other DNA
aacccatcatggattctgtgtacgtggatatagacgctgacagcgcctttttgaaggccctgcaacgtgcgtaccccatg

SEQ ID NO: 30979 - DNA, 80 bp, synthetic construct
  source 1..80: mol_type = other DNA
gtagttcaaagggctatacaacccctgaatagtaacaaaatacaaaatattaataaaaattttaaaatcataagaagttc

SEQ ID NO: 30980 - DNA, 80 bp, synthetic construct
  source 1..80: mol_type = other DNA
tgttaagcactaaccaacaagtagctaaccacatatataaccagctacagcatactatatttagctaagcaattgtagta

SEQ ID NO: 30981 - DNA, 80 bp, synthetic construct
  source 1..80: mol_type = other DNA
ctaagggcagtgcataatgctgctcctaagtaatcaggcataattgccgtatatacaattacactacaggtaatataccg

SEQ ID NO: 30982 - DNA, 80 bp, synthetic construct
  source 1..80: mol_type = other DNA
tactgggttcgatgtgcgtacctcctcatcgttgagtctggttgtcgaagcagagattcacgccagccaaggatcactgt

SEQ ID NO: 30983 - DNA, 80 bp, synthetic construct
  source 1..80: mol_type = other DNA
tttagttaagcagttgcagtagttaagaatgtagttcaaagggctatataacccctgaatagtaacaaaatacaaaaata

SEQ ID NO: 30984 - DNA, 80 bp, synthetic construct
  source 1..80: mol_type = other DNA
atagggtacggtgtagaggcaaccaccctatttccacctatccaaaatggagaaagttcatgttgacttagacgcagaca

SEQ ID NO: 30985 - DNA, 80 bp, synthetic construct
  source 1..80: mol_type = other DNA
tgtggggaggagcctactgcttctgcgacaccgaaaacacccagatgagcgaggcgtatgtagagcgctcggaagagtgc

SEQ ID NO: 30986 - DNA, 80 bp, synthetic construct
  source 1..80: mol_type = other DNA
aaggggcaccgttgaacgacgtagccccgtttggctgttcgattgccctggagccgctccgtgcagaaaattgtgcagtg

SEQ ID NO: 30987 - DNA, 80 bp, synthetic construct
  source 1..80: mol_type = other DNA
acggagtgtacttatgcctccgatttcggtggtatagccaccgttgcctacaaatccagtaaagcaggaaactgtccaat

SEQ ID NO: 30988 - DNA, 80 bp, synthetic construct
  source 1..80: mol_type = other DNA
gtaggaggaacatcagcatttattgttctggggcttattgctacggcagtggttgccctagttctgttcttccatagaca

SEQ ID NO: 30989 - DNA, 80 bp, synthetic construct
  source 1..80: mol_type = other DNA
gcataatgctgtcttttatatcaatttacaaaatcatattaaatttttcttttatgtttttattttgtttttaatatttc

SEQ ID NO: 30990 - DNA, 80 bp, synthetic construct
  source 1..80: mol_type = other DNA
ggtacgggaacgttccctagtcatgggctgctgctgggctttcaaaactcacaagatcacatccatttacaagagacctg

SEQ ID NO: 30991 - DNA, 80 bp, synthetic construct
  source 1..80: mol_type = other DNA
ttcgttaaccgttacttacaccacattgccgttaacggaggggcactgaatacagatgaagagtactacaaggttgtgaa

SEQ ID NO: 30992 - DNA, 80 bp, synthetic construct
  source 1..80: mol_type = other DNA
aggggatgccggaccaatgtgcctggtcggcgaattagtagacccgccattccacgaatttgcgtacgagagtttaaaaa

SEQ ID NO: 30993 - DNA, 80 bp, synthetic construct
  source 1..80: mol_type = other DNA
ggattcggtgctgctaaatggggtaaaacactccgtcgacacactgtacatagacgaggcattcgcttgccatgcaggga

SEQ ID NO: 30994 - DNA, 80 bp, synthetic construct
  source 1..80: mol_type = other DNA
cacaggggcttactagaaaaggggtatacgcagtgcgctacaaggtcaatgagaacccactatacgcacagacatctgag

SEQ ID NO: 30995 - DNA, 80 bp, synthetic construct
  source 1..80: mol_type = other DNA
tggcgtcgacatcgacagcgggttgttctccgcgccaactgttccgctgacttacaccaatgaacactgggataatagcc

SEQ ID NO: 30996 - DNA, 80 bp, synthetic construct
  source 1..80: mol_type = other DNA
cctagaggggactaggtttcatcaaactgccaaagacatagctgaaatttacgctatgtggcctaacaagcaagaagcaa

SEQ ID NO: 30997 - DNA, 80 bp, synthetic construct
  source 1..80: mol_type = other DNA
aaatacaggattacaggggttcagaaaattcaatgcagtaaacctgtgatattctctggcactgtacccccggccataca

SEQ ID NO: 30998 - DNA, 80 bp, synthetic construct
  source 1..80: mol_type = other DNA
gcaggggataggctcatacctctctgcagaaccgcaaccagttgaatgctacaaagtcacctatcctgctcccatgtatt

SEQ ID NO: 30999 - DNA, 80 bp, synthetic construct
  source 1..80: mol_type = other DNA
accgtagccagctataacataacggatgagtatgatgcctatcttgatatggtggacggagcatcctgctgtttagatac

SEQ ID NO: 31000 - DNA, 80 bp, synthetic construct
  source 1..80: mol_type = other DNA
ggggcaatgatgaaatccgggatgtttttgacactctttattaatactgttgtcaatatcatgatcgctagccgcgtgct

SEQ ID NO: 31001 - DNA, 80 bp, synthetic construct
  source 1..80: mol_type = other DNA
aggggttacatctgacgcgctgatggcagagcggtgcgccacgtggttgaacatggaagtgaagatcatcgatgcagtag

SEQ ID NO: 31002 - DNA, 80 bp, synthetic construct
  source 1..80: mol_type = other DNA
aaattacaacccaccaataaagtaatattttctgtggggtcaactatttatactgaagagagaatactgttacgcagttg

SEQ ID NO: 31003 - DNA, 80 bp, synthetic construct
  source 1..80: mol_type = other DNA
accacgaggggtcggtggaaagggcgacagcgggagacctattcttgacaacaaaggtagagtcgtcgcaattgtcctgg

SEQ ID NO: 31004 - DNA, 80 bp, synthetic construct
  source 1..80: mol_type = other DNA
caaaagggggttacagtcaaagatacaccagaggggtcagagccatggtcgctcgccactgtcatgtgcgtcctggccaa

SEQ ID NO: 31005 - DNA, 80 bp, synthetic construct
  source 1..80: mol_type = other DNA
caggggacacggttacagttgggtttcacgacgggcctaaccgccatacgtgcacagttgcccataaggtagaattcagg

SEQ ID NO: 31006 - DNA, 80 bp, synthetic construct
  source 1..80: mol_type = other DNA
atacctggggaaaccatccaccaaaaagagtatgggctcaagagtcaggagaagggaacccacatggatggccgcacgaa

SEQ ID NO: 31007 - DNA, 80 bp, synthetic construct
  source 1..80: mol_type = other DNA
ttcttaagttgcaaggttacagatacgttaagaggggagagggtctcttttcccgtgtgtacgtacgtgccagcgacact

SEQ ID NO: 31008 - DNA, 80 bp, synthetic construct
  source 1..80: mol_type = other DNA
atgagtacctcaccttagcatacagggtactaaactcatagcttaattgacagtataccttcatcataattagccaaggg

SEQ ID NO: 31009 - DNA, 80 bp, synthetic construct
  source 1..80: mol_type = other DNA
tactgtaattttatcataactacttgaacagaaaactggaaaacagaaaaagttagggtaggcaatgttagtatattata

SEQ ID NO: 31010 - DNA, 80 bp, synthetic construct
  source 1..80: mol_type = other DNA
cctctattataatcacttgaacgaaaactgaaaaacagaaaaagttagggtaagcaatggcattaatatagcaagaaaac

SEQ ID NO: 31011 - DNA, 80 bp, synthetic construct
  source 1..80: mol_type = other DNA
cgaaaatagaaaaagttagggtaggcaatggcattgatatagcaagaaaattgaaaacagaaaaagttagggtaagcaat

SEQ ID NO: 31012 - DNA, 80 bp, synthetic construct
  source 1..80: mol_type = other DNA
caatgtatttctgaggaagcatggtgcataatgccatgcagcgtctgcataactttttattatttcttttattaatcaac

SEQ ID NO: 31013 - DNA, 80 bp, synthetic construct
  source 1..80: mol_type = other DNA
tcttttatatcaatttacaaaatcatattaatttttcttttatgtttttattttgtttttaatatttcaaaaaaaaaaaa

SEQ ID NO: 31014 - DNA, 80 bp, synthetic construct
  source 1..80: mol_type = other DNA
gcgtagtacacactataaagaaccaagccgaccaattgcactaccatcatcatggagaaacctgtagttaacgttgacgt

SEQ ID NO: 31015 - DNA, 80 bp, synthetic construct
  source 1..80: mol_type = other DNA
agagagcgggatatgcgcctttgaacttggagattacagttatgtcctccgaattgatcccgtcgacgaacctggagtac

SEQ ID NO: 31016 - DNA, 80 bp, synthetic construct
  source 1..80: mol_type = other DNA
gtcacatgcaagtacacgactgtagttccatcacccaaagtgaagtgctgtggaacgctagagtgctcatctgcccgcca

SEQ ID NO: 31017 - DNA, 80 bp, synthetic construct
  source 1..80: mol_type = other DNA
tgccgactacaactgtaaggtgttcggaggagtgtacccattcatgtggggcggcgcacagtgtttctgcgatagcgaga

SEQ ID NO: 31018 - DNA, 80 bp, synthetic construct
  source 1..80: mol_type = other DNA
tttctgctgactgcgccgcagatcacgctcaggcagtgaaagtgcacacagcggcactgaaggtaggactgcgcgttgtg

SEQ ID NO: 31019 - DNA, 80 bp, synthetic construct
  source 1..80: mol_type = other DNA
tatggtaacaccaccagcatgctggacgtgtacgttaacggagtcacccctggcacttcgaaggatcttaaagtgatcgc

SEQ ID NO: 31020 - DNA, 80 bp, synthetic construct
  source 1..80: mol_type = other DNA
aggcccaatttcagcggcctatacaccattcgatcacaaagtcatcattcataaagggaaggtgtacaactacgactttc

SEQ ID NO: 31021 - DNA, 80 bp, synthetic construct
  source 1..80: mol_type = other DNA
tagccaacacggacatcaggctcctgaagccatcagcgaagaacgttcacgtgccgtacactcaagctgcatctggcttt

SEQ ID NO: 31022 - DNA, 80 bp, synthetic construct
  source 1..80: mol_type = other DNA
gagatgtggaagaacaattccggcagacctttgcaggagactgccccgtttgggtgccagattgccgtaaacccgctaag

SEQ ID NO: 31023 - DNA, 80 bp, synthetic construct
  source 1..80: mol_type = other DNA
ggcgatcgactgcgcgtacggcaacatcccgatctcgctggacatccctaacgcggcatttattcgcgtctccgacgcgc

SEQ ID NO: 31024 - DNA, 80 bp, synthetic construct
  source 1..80: mol_type = other DNA
cgcttgtatcgaccttgaagtgcgaggtcggtgaatgcgtctactcggccgacttcggcggaatagccaccctgcagtac

SEQ ID NO: 31025 - DNA, 80 bp, synthetic construct
  source 1..80: mol_type = other DNA
tcatcagacagagaaggacagtgtccagtgcactcccattccagcactgcaactctacaagagtctacagtgcatgtact

SEQ ID NO: 31026 - DNA, 80 bp, synthetic construct
  source 1..80: mol_type = other DNA
gcaaaaaggcggtgtcacgatccacttcagcaccgctagcccgcaggctaacttcatagtgtcactatgcggtaaaaaga

SEQ ID NO: 31027 - DNA, 80 bp, synthetic construct
  source 1..80: mol_type = other DNA
ccacatgcaatgccgaatgtaaaccaccggccgatcatatagtgaacgtaccacacaaaaacgaccaggagttccaggca

SEQ ID NO: 31028 - DNA, 80 bp, synthetic construct
  source 1..80: mol_type = other DNA
gccgtctcccaaacatcatggagctggctgtttgcactatttgggggagcttcatccctgttagttataggagtaatgat

SEQ ID NO: 31029 - DNA, 80 bp, synthetic construct
  source 1..80: mol_type = other DNA
tttcgcttgcagcgctttgctgacaagcacccgacgatgaccgctacgccccaatgacccgaccagcaaaaactcgatgt

SEQ ID NO: 31030 - DNA, 80 bp, synthetic construct
  source 1..80: mol_type = other DNA
ctaccgaggaaccgatgtgcataacgcatcgggctggtacattagatccccgtcatcagacgggctcatagcgacgctaa

SEQ ID NO: 31031 - DNA, 80 bp, synthetic construct
  source 1..80: mol_type = other DNA
aactcgacgtattcccgaggaagtgcagtgcataatgctgcacagcgtcgtcatatattcatttattattcaatatataa

SEQ ID NO: 31032 - DNA, 80 bp, synthetic construct
  source 1..80: mol_type = other DNA
tagacaccaaaactcaatgtatttctgaggaagcgtggtgcataatgccacgcagtgtctaactaatcaattcattattt

SEQ ID NO: 31033 - DNA, 80 bp, synthetic construct
  source 1..80: mol_type = other DNA
ggcgaaggagaggaaagaggacctagacaacgagaaaatgctaggcaccagagaaaggaaactgacgtttgggtgcctgt

SEQ ID NO: 31034 - DNA, 80 bp, synthetic construct
  source 1..80: mol_type = other DNA
gggcgtttcgcacaaaaaaagtgcactcattctatcgacccccgggcacacagacgattgctaaggttccctcagtcttt

SEQ ID NO: 31035 - DNA, 80 bp, synthetic construct
  source 1..80: mol_type = other DNA
agcgcgtttccgctgtcctccgtttggacaactacgttgccgatatcattccggcaacagattaaacttctcctccagcc

SEQ ID NO: 31036 - DNA, 80 bp, synthetic construct
  source 1..80: mol_type = other DNA
aaagaaggaagaagaattggtccaaatatctgaacagcaggtcgaagaagcgtcgtcagcgtatgcagaggcgaaagagg

SEQ ID NO: 31037 - DNA, 80 bp, synthetic construct
  source 1..80: mol_type = other DNA
gccacaccgaatgaccatgcaaatgccagagctttttcgcatctggccagcaaactgatcgagctggaggtcccgaccac

SEQ ID NO: 31038 - DNA, 80 bp, synthetic construct
  source 1..80: mol_type = other DNA
cggagcgcgcagagaagctaagagaggctttaccaccgctagttgcagataaagaggtagatgcagccgcggaagtgatt

SEQ ID NO: 31039 - DNA, 80 bp, synthetic construct
  source 1..80: mol_type = other DNA
tgcgaagttgaagggctacaagctgatgttggtgccgcgttggtagaaacgcctcgcgggcacgtgaggataattcccca

SEQ ID NO: 31040 - DNA, 80 bp, synthetic construct
  source 1..80: mol_type = other DNA
gcctggggacaggctgatcgggcagtacctggtcgtgtcaccgacctctgtactgaagaactccaagctggcaccagttc

SEQ ID NO: 31041 - DNA, 80 bp, synthetic construct
  source 1..80: mol_type = other DNA
atccactcgcagaacaggtcaaaatcattacccactcaggacgcacaggtaggtatgcagtcgagccgtatgatgcaaaa

SEQ ID NO: 31042 - DNA, 80 bp, synthetic construct
  source 1..80: mol_type = other DNA
gtcctattgccggcaggaggcgcggtaccgtggccagagttcctagctcttagcgagagcgcctctttggtctacaacga

SEQ ID NO: 31043 - DNA, 80 bp, synthetic construct
  source 1..80: mol_type = other DNA
atgtgaattcgtaaaccgcaaactttatcatatagcggtccacggcccggctaagaacaccgaggaggaacagtacaaga

SEQ ID NO: 31044 - DNA, 80 bp, synthetic construct
  source 1..80: mol_type = other DNA
ttaccaaagccgcgctggctgagacggaattcgtattcgacgttgacaagcgaaggtgcgtcaagaaagaagaggcttca

SEQ ID NO: 31045 - DNA, 80 bp, synthetic construct
  source 1..80: mol_type = other DNA
gggctggtcttgtcaggggaactgaccaatccaccttatcatgaaatggcattagagagtttacagacacggcccgcagt

SEQ ID NO: 31046 - DNA, 80 bp, synthetic construct
  source 1..80: mol_type = other DNA
tccttacaaagtggaaacaatcggagtcatcggcacgccgggctcgggtaaatcagctattatcaagtcaacagtcacag

SEQ ID NO: 31047 - DNA, 80 bp, synthetic construct
  source 1..80: mol_type = other DNA
ccaaagacctcgtcaccagcgggaagaaggagaactgtaaagaaattgaaactgatgtcttgaggatgcgaggaatgcaa

SEQ ID NO: 31048 - DNA, 80 bp, synthetic construct
  source 1..80: mol_type = other DNA
atcacctcacgaacggtcgactcagtcatgctcaatgggtgccacaaggcggtcgacgtcttgtacgtcgacgaggcctt

SEQ ID NO: 31049 - DNA, 80 bp, synthetic construct
  source 1..80: mol_type = other DNA
tgcttgccatgctggagcattgctggcacttattgcaatagtcagaccccgaaagaaagtagtgctgtgcggtgatccga

SEQ ID NO: 31050 - DNA, 80 bp, synthetic construct
  source 1..80: mol_type = other DNA
agcagtgtgggttcttcaacatgatgcagctcaaagtgcatttcaacaacccagagaaagacatctgcactaagacgttt

SEQ ID NO: 31051 - DNA, 80 bp, synthetic construct
  source 1..80: mol_type = other DNA
cggccattgtttccacgctgcactacgacggtaggatgaagacaactaacccttgtaaaaagagcgtggaaattgacatt

SEQ ID NO: 31052 - DNA, 80 bp, synthetic construct
  source 1..80: mol_type = other DNA
accggctcgaccaaaccaaaaccgggtgatatcgtgttgacttgcttccgcggatgggtcaaacagctgcagatcgaata

SEQ ID NO: 31053 - DNA, 80 bp, synthetic construct
  source 1..80: mol_type = other DNA
acgaaaatcccttgtacgcgataacttccgaacacgttaacgtattgctcacgcgtactgaagaccggctcgtttggaag

SEQ ID NO: 31054 - DNA, 80 bp, synthetic construct
  source 1..80: mol_type = other DNA
acccttcagggcgacccatggatcaaacagctcactaacatcccgaaggggaacttccaggctactatcgaagattggga

SEQ ID NO: 31055 - DNA, 80 bp, synthetic construct
  source 1..80: mol_type = other DNA
agcagagcacaggggcatcatcgcagcaattaacagcccagcacctagagtcgacccgttcagttgcaagactaacgttt

SEQ ID NO: 31056 - DNA, 80 bp, synthetic construct
  source 1..80: mol_type = other DNA
gctgggcgaaggccctagagcctatactagcgacggcaggtatatcactaacagggcgtcagtggagtgagttgttccca

SEQ ID NO: 31057 - DNA, 80 bp, synthetic construct
  source 1..80: mol_type = other DNA
caattcgcagatgacaagccccattcggccgtgtacgctttggacgttttgtgcataagattctttggagtcgacttgac

SEQ ID NO: 31058 - DNA, 80 bp, synthetic construct
  source 1..80: mol_type = other DNA
cagtggaatattctccaggcaaagcgtcccgctgacgtaccaccctgccgacgcttcaaggcaagtagcccattgggaca

SEQ ID NO: 31059 - DNA, 80 bp, synthetic construct
  source 1..80: mol_type = other DNA
acagtcccggttcacgtaagtatgggtatgatcaggcggttgccgcggagctatcacgtcgcttcccggtgttccagatg

SEQ ID NO: 31060 - DNA, 80 bp, synthetic construct
  source 1..80: mol_type = other DNA
gcaggcaaaggtactcaacttgacctgcaaactggtagaacaagggtagtatcaccgcagcacaacctcgttccggtcaa

SEQ ID NO: 31061 - DNA, 80 bp, synthetic construct
  source 1..80: mol_type = other DNA
ccgtaatctaccacactcgctcgtccctgaacacaagacacgtaaccccggtccggtggaaaagttcctgatgcagttta

SEQ ID NO: 31062 - DNA, 80 bp, synthetic construct
  source 1..80: mol_type = other DNA
tggtggagaagtcgtgcaagattacggacaagaacttgcacgaaaaaatcaaggacctccggacagtgctaagcacgccg

SEQ ID NO: 31063 - DNA, 80 bp, synthetic construct
  source 1..80: mol_type = other DNA
agcatcatacgatcttggtcgtttcagagaccaaggtcgacatgccccagaggagagtagagtggatagcgccgctcggc

SEQ ID NO: 31064 - DNA, 80 bp, synthetic construct
  source 1..80: mol_type = other DNA
accgccggagctgacaagacttacaacctcgcatttggattcccaccccaatcgaggtacgatttggtttttattaacat

SEQ ID NO: 31065 - DNA, 80 bp, synthetic construct
  source 1..80: mol_type = other DNA
tggcacaaagttcaggtatcaccacttccagcagtgcgaagaccacgcagctacactaaaaaccttgtctcgctcggcgt

SEQ ID NO: 31066 - DNA, 80 bp, synthetic construct
  source 1..80: mol_type = other DNA
tgaattgccttaatcctggtggtacactggtggtcaaagcttacggctacgcggacagaaatagcgaggacgtggtcacc

SEQ ID NO: 31067 - DNA, 80 bp, synthetic construct
  source 1..80: mol_type = other DNA
gccttagcgcgaaaatttgttcgcgtttcagcggcccgccccgattgcgtcaccagcaataccgagatgttcctaatctt

SEQ ID NO: 31068 - DNA, 80 bp, synthetic construct
  source 1..80: mol_type = other DNA
caggcaactggataacagtaggaccaggcagttcaccccgcaccatctgaattgtgttgtctcgtctgtatatgagggcc

SEQ ID NO: 31069 - DNA, 80 bp, synthetic construct
  source 1..80: mol_type = other DNA
ttcgtgacggtgtgggagctgctccggcctaccgctcgaaacgtgagaatatcgccgaatgccttgaagaggccgtagtt

SEQ ID NO: 31070 - DNA, 80 bp, synthetic construct
  source 1..80: mol_type = other DNA
aacgccgcgaacccactcggacgtccgggcgaaggggtgtgtaaagccatatataaaaaatggcccaatagttttgtcga

SEQ ID NO: 31071 - DNA, 80 bp, synthetic construct
  source 1..80: mol_type = other DNA
ttctgcgacagagactggaacagctaagctagtgtgctgtcaaggaaaaaagattatccatgccgtcggacccgacttcc

SEQ ID NO: 31072 - DNA, 80 bp, synthetic construct
  source 1..80: mol_type = other DNA
gtaaacaccccgaggcagaagcactgaagattctccagaacacataccacgccattgcagatttggttaacaaacatgga

SEQ ID NO: 31073 - DNA, 80 bp, synthetic construct
  source 1..80: mol_type = other DNA
gatgcggagacaccatcgctgtgtttccataatgacgttacctgcagcatgcaggctgaatactccgttatgcaggacgt

SEQ ID NO: 31074 - DNA, 80 bp, synthetic construct
  source 1..80: mol_type = other DNA
atcaagaccgtagcgattccgctcctatccaccgggatttacgcagcgggaaaagacagacttgaggtctccttaaactg

SEQ ID NO: 31075 - DNA, 80 bp, synthetic construct
  source 1..80: mol_type = other DNA
cctcactaccgccctggacagaacagacgcagacgtcacaatctactgccttgacaaaaaatggaaagaacggattgatg

SEQ ID NO: 31076 - DNA, 80 bp, synthetic construct
  source 1..80: mol_type = other DNA
cggttatacagttgaaggagtcggtgacggaactgaaggatgatgacatggagatcgacgacgaactagtatggatccac

SEQ ID NO: 31077 - DNA, 80 bp, synthetic construct
  source 1..80: mol_type = other DNA
ccggatagttgcctcaagggcaggaaagggtttagtacgacgaagggcaaactctactcgtactttgaggggactaaatt

SEQ ID NO: 31078 - DNA, 80 bp, synthetic construct
  source 1..80: mol_type = other DNA
tcatcaagcagcaaaagacatggctgagatcaaggtactttttcccgatgagcaagagtgcaacgagcaactgtgtgcat

SEQ ID NO: 31079 - DNA, 80 bp, synthetic construct
  source 1..80: mol_type = other DNA
catacattctaggcgaaaccatggaagccattagggaaaaatgcccagtggactttaatccgtcgtccagtccgccgaag

SEQ ID NO: 31080 - DNA, 80 bp, synthetic construct
  source 1..80: mol_type = other DNA
acgctcccctgtttgtgtatgtacgccatgacgcccgagagagtgcaccgcttgcgtagcaataacgtcaaatccatcac

SEQ ID NO: 31081 - DNA, 80 bp, synthetic construct
  source 1..80: mol_type = other DNA
agtatgctcgtcaaccccacttccgaagcacaaaattaagaacgttcagaaagtacagtgcacgaaagtagtcctattca

SEQ ID NO: 31082 - DNA, 80 bp, synthetic construct
  source 1..80: mol_type = other DNA
ccacaaacgcctgaattcgtccctgcccgcaagtacatagaaacacaaccgaaggacgacagccaaggggcggaagaaaa

SEQ ID NO: 31083 - DNA, 80 bp, synthetic construct
  source 1..80: mol_type = other DNA
ccctgccgcagccgataatacttcacgggatgtagcagacgtatctccagatgaggtgcactcagaggacaacacctccc

SEQ ID NO: 31084 - DNA, 80 bp, synthetic construct
  source 1..80: mol_type = other DNA
ctatatcaacgctccttctacgatctaccatcaagcaatgaaaggagtcagaacattgtactggatcgggttcgatacca

SEQ ID NO: 31085 - DNA, 80 bp, synthetic construct
  source 1..80: mol_type = other DNA
gagatgtaacagacatatctctagaccacgacagtgatagcgaggtgggctccattttctctgacctcagctgctccagt

SEQ ID NO: 31086 - DNA, 80 bp, synthetic construct
  source 1..80: mol_type = other DNA
cattccgtcaccagcatggacagctggtcctctggaccgagctcgatcatgctaaacgggaatcacaccatccaggtcac

SEQ ID NO: 31087 - DNA, 80 bp, synthetic construct
  source 1..80: mol_type = other DNA
ggcagagatacacaacgctcctgctgcaccgcccacaccaccaccacgcctcaagaaactggcgcgcttggcagctcaga

SEQ ID NO: 31088 - DNA, 80 bp, synthetic construct
  source 1..80: mol_type = other DNA
agcccgatccgccaactagcccgccctcaacggttgaggacgtgtcgatgcgtctgtcattccctgccatggtgtcgttc

SEQ ID NO: 31089 - DNA, 80 bp, synthetic construct
  source 1..80: mol_type = other DNA
ggatctttttctgacggcgaagtcgacgatcttagtcgcgaaaaagcggtgtcagaaccagtggtctttggtgctttcga

SEQ ID NO: 31090 - DNA, 80 bp, synthetic construct
  source 1..80: mol_type = other DNA
gccaggagaggtaacatctatcattgaatcaaggtctgtcgtgtcattccccgtgaataaacgccggcgcaggagacggg

SEQ ID NO: 31091 - DNA, 80 bp, synthetic construct
  source 1..80: mol_type = other DNA
gccaaaagaaaaccgaatattgactaaccggggtaggtgggtatatcttctcgactgacacgggaccgggtcacctccag

SEQ ID NO: 31092 - DNA, 80 bp, synthetic construct
  source 1..80: mol_type = other DNA
aagaagtcggttttacaaaaccagcttacggaaccgaccctcgagcgtaatcaattagaacgagtgtatgcacccagtct

SEQ ID NO: 31093 - DNA, 80 bp, synthetic construct
  source 1..80: mol_type = other DNA
tgatgccaagaaagaggaactcttgaaactcaagtaccaaatgatgcccaccgaagccaataaaagtaggtaccagtcca

SEQ ID NO: 31094 - DNA, 80 bp, synthetic construct
  source 1..80: mol_type = other DNA
aaaaagcggtaaccactgagaggttactgtcggggttgaagatgtacattcactcagacaaccaacccgagtgttacaag

SEQ ID NO: 31095 - DNA, 80 bp, synthetic construct
  source 1..80: mol_type = other DNA
cgcagttcatgttctcggccatggcagggtcatatcctgcgtataacaccaattgggccgatgagaaagtcctggaagcc

SEQ ID NO: 31096 - DNA, 80 bp, synthetic construct
  source 1..80: mol_type = other DNA
gtcacctatccgaaaccgtcgtactctagcagtgttccccttagttaccagagccccgaattcgccgtagccgtttgcaa

SEQ ID NO: 31097 - DNA, 80 bp, synthetic construct
  source 1..80: mol_type = other DNA
taattacctgcatgagaattacccaacggttgcctcttatcagattacggatgaatatgatgcctaccttgacatggtgg

SEQ ID NO: 31098 - DNA, 80 bp, synthetic construct
  source 1..80: mol_type = other DNA
ggcaccgtagcgtgtctcgacaccgctacattttgccccgcgaaattacgcagcttcccgaagaaacacgagtaccgagc

SEQ ID NO: 31099 - DNA, 80 bp, synthetic construct
  source 1..80: mol_type = other DNA
acctaacatcaggagcgccgtaccgtccgctatgcagaacactctacagaacgtcctgaacgcagcaacaaagaggaatt

SEQ ID NO: 31100 - DNA, 80 bp, synthetic construct
  source 1..80: mol_type = other DNA
gcaatgttactcagatgagagaactaccgactttagactccgcaacctttaatgtggaatgctttcgaaagtacgcgtgc

SEQ ID NO: 31101 - DNA, 80 bp, synthetic construct
  source 1..80: mol_type = other DNA
aacgacgagtattgggctgaattctccgaaaaaccaattaggatcaccacagagtttgtcacggcgtacgtggcgagatt

SEQ ID NO: 31102 - DNA, 80 bp, synthetic construct
  source 1..80: mol_type = other DNA
gaagggaccaaaggctgctgcactgtttgctaaaacgcataacctagtcccactgcaagaagtacctatggacaggtttg

SEQ ID NO: 31103 - DNA, 80 bp, synthetic construct
  source 1..80: mol_type = other DNA
tgaagcgagacgttaaggtgactccgggcacaaagcacaccgaagaaagacccaaagtgcaggtaatccaggcggcagaa

SEQ ID NO: 31104 - DNA, 80 bp, synthetic construct
  source 1..80: mol_type = other DNA
atgcggcatccaccgtgagcttgtacgcaggcttaccgcagtcctgcttccgaacgtacacaccctttttgatatgtctg

SEQ ID NO: 31105 - DNA, 80 bp, synthetic construct
  source 1..80: mol_type = other DNA
cggaagatttcgatgctatcattgccgagcactttcaccagggtgacgctgtgctcgagacagacatcgcgtcgttcgat

SEQ ID NO: 31106 - DNA, 80 bp, synthetic construct
  source 1..80: mol_type = other DNA
ctcggcgtcgaccagccattgctggaccttatcgagtgcgccttcggggaaatatcatctacgcacctgccgaccgggac

SEQ ID NO: 31107 - DNA, 80 bp, synthetic construct
  source 1..80: mol_type = other DNA
acggtttaagttcggctcaatgatgaaatccggaatgttcctcacgctcttcgtgaacaccatcttgaatgtcgtgatag

SEQ ID NO: 31108 - DNA, 80 bp, synthetic construct
  source 1..80: mol_type = other DNA
ctagtcgcgtgctcgagcacaggttagcagaatcacgatgcgccgcattcatcggagacgacaatattatccacggcgtg

SEQ ID NO: 31109 - DNA, 80 bp, synthetic construct
  source 1..80: mol_type = other DNA
gtatccgacaaagaaatggctgaaaggtgcgccacttggctgaatatggaggtaaaaattattgacgcagtaattggtga

SEQ ID NO: 31110 - DNA, 80 bp, synthetic construct
  source 1..80: mol_type = other DNA
aacgccctccgtacttttgtggcggctttatattgcaggactcagtcacccaaacagcctgccgagtggcagacccccta

SEQ ID NO: 31111 - DNA, 80 bp, synthetic construct
  source 1..80: mol_type = other DNA
aaaagattgttcaaattaggaaaaccattacctgcagatgatgaccaagatgaagacagaagaagggctctactggatga

SEQ ID NO: 31112 - DNA, 80 bp, synthetic construct
  source 1..80: mol_type = other DNA
gaccaaggcgtggtttagagtgggcataactgagacactggctactgcggtagcaacgcggtatgaagttgataacatca

SEQ ID NO: 31113 - DNA, 80 bp, synthetic construct
  source 1..80: mol_type = other DNA
caccggtcctgctggcactgaggacccttgcgcaaagcaagagatcttttcaggccataagaggggaaatgaagcatctc

SEQ ID NO: 31114 - DNA, 80 bp, synthetic construct
  source 1..80: mol_type = other DNA
gcgctgcgaccaggagcacgcgtctatttctccgttggttcgaccttataccctgagaacagagagagcctgcagagctg

SEQ ID NO: 31115 - DNA, 80 bp, synthetic construct
  source 1..80: mol_type = other DNA
acggtggtcctaaatagtcagtgtaacatacagtatctgactaaatcacatccaccgtaaacatgaatcgaggattcttt

SEQ ID NO: 31116 - DNA, 80 bp, synthetic construct
  source 1..80: mol_type = other DNA
caggaccggcccgtaatgggctggccacccaaatccaacaattgacctccgcagtaaatgcgctggtcatcgggcaggtg

SEQ ID NO: 31117 - DNA, 80 bp, synthetic construct
  source 1..80: mol_type = other DNA
tcgcgtcaacagcaaccgcgtcaacgccccgcaccgaaaccacgtagacaaccaccaaagcaacagcagcccaaatctaa

SEQ ID NO: 31118 - DNA, 80 bp, synthetic construct
  source 1..80: mol_type = other DNA
gaagaccaagaatccggagaaaccgaagcagaagcagccgaccaaatcgaaaccaggaaagagacaacggatggcgctaa

SEQ ID NO: 31119 - DNA, 80 bp, synthetic construct
  source 1..80: mol_type = other DNA
aactagaggcagaccgtctgtttgatgtgaagaatgaagcaggcgaagtgataggccacgccctggctatggaaggtaag

SEQ ID NO: 31120 - DNA, 80 bp, synthetic construct
  source 1..80: mol_type = other DNA
gtgatgaaaccgctccacgtaaaaggcactatagaccacccggtgctatcgaagctgaagttcaccaagtcatcggctta

SEQ ID NO: 31121 - DNA, 80 bp, synthetic construct
  source 1..80: mol_type = other DNA
ttgcgcagctccccaccaacatgcggagtgaggcgttctcctacaccagcgaacaccctgaagggttttataattggcac

SEQ ID NO: 31122 - DNA, 80 bp, synthetic construct
  source 1..80: mol_type = other DNA
catggcgctgttcaatacagcggtggaaggttcacagtgccgaaaggagcaggaggaaaaggggacagtggacgcccgat

SEQ ID NO: 31123 - DNA, 80 bp, synthetic construct
  source 1..80: mol_type = other DNA
tatggacaacacggggaaggttgtcgccatcgtcctcggtggtgccgacgaaggggcccgtactgccctatccgtggtca

SEQ ID NO: 31124 - DNA, 80 bp, synthetic construct
  source 1..80: mol_type = other DNA
gcacctaccgtcggtgttccacctgaaaggtaagcaatcgtacacttgccgctgtgatacagtggttagttgcgaaggct

SEQ ID NO: 31125 - DNA, 80 bp, synthetic construct
  source 1..80: mol_type = other DNA
cctggaatagcaagggaaagaccatcaagacgacgcctgaagggacagaggaatggtcagcagcacccctcgttgcagcc

SEQ ID NO: 31126 - DNA, 80 bp, synthetic construct
  source 1..80: mol_type = other DNA
gtgtatcctggggaatatgacgtttccgtgcgaccaaccaccgacatgctatagcagagaacccgcacgggcgctagaca

SEQ ID NO: 31127 - DNA, 80 bp, synthetic construct
  source 1..80: mol_type = other DNA
tcctggaagccaatgtagatagtgcggcctatgacgatctgatgcgggccgtgttacgttgcacgccaagcagccgcgca

SEQ ID NO: 31128 - DNA, 80 bp, synthetic construct
  source 1..80: mol_type = other DNA
aagcggagtattacagacgacttcacgcttaccagtccatatctgggaacgtgtccatattgccaccacaccgaaccgtg

SEQ ID NO: 31129 - DNA, 80 bp, synthetic construct
  source 1..80: mol_type = other DNA
cttcagcccgataaagatcgagcaggtgtgggacgaagcggacgataacactatccgcatacaaacgtcggcccagtttg

SEQ ID NO: 31130 - DNA, 80 bp, synthetic construct
  source 1..80: mol_type = other DNA
gttacgaccagagcggtgcagcaagcgttaataaataccggattatgtccctaaaacaagaccacacagtcgaagagggg

SEQ ID NO: 31131 - DNA, 80 bp, synthetic construct
  source 1..80: mol_type = other DNA
tccatggacgcaatcaagattagcacctcaggaccttgtcgaaggctcagtcacaaaggttacttcctactggcgaagtg

SEQ ID NO: 31132 - DNA, 80 bp, synthetic construct
  source 1..80: mol_type = other DNA
gcccgcccggcgacagtgttaccgtcagaatttcggccggcgattctgctacttcatgcacgctggcacgaaaaattaaa

SEQ ID NO: 31133 - DNA, 80 bp, synthetic construct
  source 1..80: mol_type = other DNA
ccaaaattcgttgggcgtgagaaatatgatctgcctccagttcacggcaagaagatcccatgctacatctatgatcgtct

SEQ ID NO: 31134 - DNA, 80 bp, synthetic construct
  source 1..80: mol_type = other DNA
aaggaaacatcagcaggctatatcactatgcaccgcccaggaccccacgcatacaccacttatctggaagagtcgtcagg

SEQ ID NO: 31135 - DNA, 80 bp, synthetic construct
  source 1..80: mol_type = other DNA
gaaagtgtatgcaaagccaccttctggaaagaacgtcacgtatgaatgcaaatgcggtgactacaagactgacacggtgt

SEQ ID NO: 31136 - DNA, 80 bp, synthetic construct
  source 1..80: mol_type = other DNA
cggcccgcacaaaaataaccgggtgtacggcactgaaacaatgcatcgcctacagaagtgaccagacgaagtgggtcttc

SEQ ID NO: 31137 - DNA, 80 bp, synthetic construct
  source 1..80: mol_type = other DNA
aactccccggatttaatcaggcatgctgatcacaccgcacaaggaaagatgcatcttccgttcaaattggtcccgagcac

SEQ ID NO: 31138 - DNA, 80 bp, synthetic construct
  source 1..80: mol_type = other DNA
gtgtttagtcccattggcacacgtccctcaggtggtgcatggcttcaaacacatcagtttacagctagacactgatcacc

SEQ ID NO: 31139 - DNA, 80 bp, synthetic construct
  source 1..80: mol_type = other DNA
tgacgttgctcacaaccaggaggctaggagaaaaaccagagccaacctctgagtggataatagggaagacagtgcggaat

SEQ ID NO: 31140 - DNA, 80 bp, synthetic construct
  source 1..80: mol_type = other DNA
ttctcagtgggcagagacggatttgagtacatatggggaaaccacgaaccagtcagagtgtgggcccaagagtcagcgcc

SEQ ID NO: 31141 - DNA, 80 bp, synthetic construct
  source 1..80: mol_type = other DNA
ccacacgagatcgtgcaacactattaccatcgccatccagtgtacactgtgatggtcctagtagccgcgactttagcgat

SEQ ID NO: 31142 - DNA, 80 bp, synthetic construct
  source 1..80: mol_type = other DNA
cgttctaggagttagtgttgcgagtgcgtgtgtgtgccgcgctaggcgcgagtgtttaaccccgtatgctctggccccga

SEQ ID NO: 31143 - DNA, 80 bp, synthetic construct
  source 1..80: mol_type = other DNA
atgccgtggtcccgacatcaatcgccctactgtgctgcatcagaccaaccagcgcggaaccgttttccgaaaccatgatg

SEQ ID NO: 31144 - DNA, 80 bp, synthetic construct
  source 1..80: mol_type = other DNA
tatttgtggacaaacagccagccatttttctgggcacagctatgcatccctctggccgcaatcatcgtactagttagatg

SEQ ID NO: 31145 - DNA, 80 bp, synthetic construct
  source 1..80: mol_type = other DNA
aatcaggtggtctctttgaagcctgagattatcgtggatcaatatgagtacaagtaccctgctatcaaggacttgaagaa

SEQ ID NO: 31146 - DNA, 80 bp, synthetic construct
  source 1..80: mol_type = other DNA
aagcatgaaggtatatgtgtcccctaagagacacaccgtatatagctaataatctataggtatacgtgtcccctaagaga

SEQ ID NO: 31147 - DNA, 80 bp, synthetic construct
  source 1..80: mol_type = other DNA
gtatccaggagaagaaatgatcggctcgtacgcagtgctttcaccacaagcggtccttaacagcgagaagctagcttgta

SEQ ID NO: 31148 - DNA, 80 bp, synthetic construct
  source 1..80: mol_type = other DNA
tttgaggtggaacctaggcaggtcacatcaaatgaccatgctaatgctagagcgttctcgcatctagccataaaactaat

SEQ ID NO: 31149 - DNA, 80 bp, synthetic construct
  source 1..80: mol_type = other DNA
cgtaggagatgttcaaagtgactataaaaaccctgaacagtaatcaaacataaaattaataatgagtaccataattggca

SEQ ID NO: 31150 - DNA, 80 bp, synthetic construct
  source 1..80: mol_type = other DNA
gacaccttcgtgggtacaacaggtggatcacccttgaagatatcagatgtagatcatctctacttgattacagctgcttg

SEQ ID NO: 31151 - DNA, 80 bp, synthetic construct
  source 1..80: mol_type = other DNA
tgttaagtactaaccaacaagtagataaatagacgctaaccacatatataatcagctacagcatactatatttagctaag

SEQ ID NO: 31152 - DNA, 80 bp, synthetic construct
  source 1..80: mol_type = other DNA
aaggaatatagttcaaagggctatacaacccctgaatagtaacaaaatacaaaaatattaataaaaattttaaaaatcac

SEQ ID NO: 31153 - DNA, 80 bp, synthetic construct
  source 1..80: mol_type = other DNA
acaccacggacgctgacgtagtcatctactgtcgcgacaaagcctgggagaagaaaatccaggaggctatcgaccgccgc

SEQ ID NO: 31154 - DNA, 80 bp, synthetic construct
  source 1..80: mol_type = other DNA
gtgtttgagagttggggagaggtgttatccccatgtgaacggggtgtttttcaatggtataatattagggtctgacggcc

SEQ ID NO: 31155 - DNA, 80 bp, synthetic construct
  source 1..80: mol_type = other DNA
tgagaatcccaccagaggaggtgttaagttgccttgagagggtcgattatgataaggcatttgggagggccaacacgtat

SEQ ID NO: 31156 - DNA, 80 bp, synthetic construct
  source 1..80: mol_type = other DNA
gcccgagtctcttgcatctctaacgaccaaatagtcaacctcgccaatataatgtctacagtatccacgctgacagtggc

SEQ ID NO: 31157 - DNA, 80 bp, synthetic construct
  source 1..80: mol_type = other DNA
atactatatttagttaagcagttgcagtagttaagaatgtagttcaaagggctatacaacccctgaatagtaacaaaata

SEQ ID NO: 31158 - DNA, 80 bp, synthetic construct
  source 1..80: mol_type = other DNA
tgggtacaacaggtggatcacccttgaagatatcagatgtagatcatctctacttgattacagctgcttgtgaactggac

SEQ ID NO: 31159 - DNA, 80 bp, synthetic construct
  source 1..80: mol_type = other DNA
cataattggcaaacggaagagatgtaggtacttaagcttcctaaaagcagccgaactcactttgagaagtaggcatagca

SEQ ID NO: 31160 - DNA, 80 bp, synthetic construct
  source 1..80: mol_type = other DNA
cttggcggcgtagtatacactattgaatcaaacagccgaccaattgcactaccatcacaatggagaagccagtagttaac

SEQ ID NO: 31161 - DNA, 80 bp, synthetic construct
  source 1..80: mol_type = other DNA
catcgttctaatgcgctgttgctcatgctgcctgccttttttagtggttgccggcgcctacctggcgaaggtagacgcct

SEQ ID NO: 31162 - DNA, 80 bp, synthetic construct
  source 1..80: mol_type = other DNA
tgcaaagttaccgatacagtaaaaggagaacgggtatcgttccccgtgtgcacgtatatcccggccaccatatgcgatca

SEQ ID NO: 31163 - DNA, 80 bp, synthetic construct
  source 1..80: mol_type = other DNA
acgaacatgcgaccactgttccaaatgtgccacagataccgtataaggcacttgttgaaagggcagggtacgccccgctc

SEQ ID NO: 31164 - DNA, 80 bp, synthetic construct
  source 1..80: mol_type = other DNA
aatttggagattactgtcatgtcctcggaggttttgccttccaccaaccaagagtacatcacctgcaaattcaccactgt

SEQ ID NO: 31165 - DNA, 80 bp, synthetic construct
  source 1..80: mol_type = other DNA
ggtcccctcccctaaagtcaaatgctgcggctccttggaatgtcagcccgccgctcacgcagactatacctgcaaggtct

SEQ ID NO: 31166 - DNA, 80 bp, synthetic construct
  source 1..80: mol_type = other DNA
ttggaggggtgtaccccttcatgtggggaggagcacaatgtttttgcgacagtgagaacagccagatgagtgaggcgtac

SEQ ID NO: 31167 - DNA, 80 bp, synthetic construct
  source 1..80: mol_type = other DNA
gtcgaattgtcagcagattgcgcgactgaccacgcgcaggcgattaaggtgcatactgccgcgatgaaagtaggactacg

SEQ ID NO: 31168 - DNA, 80 bp, synthetic construct
  source 1..80: mol_type = other DNA
tatagtgtacgggaacactaccagtttcctagatgtgtacgtgaacggagtcacaccaggaacgtctaaagacctgaaag

SEQ ID NO: 31169 - DNA, 80 bp, synthetic construct
  source 1..80: mol_type = other DNA
tcatagctggaccaatttcagcatcgtttacaccattcgatcacaaggtcgttatccatcgcggcctggtgtacaactat

SEQ ID NO: 31170 - DNA, 80 bp, synthetic construct
  source 1..80: mol_type = other DNA
gacttcccggaatacggagcgatgaaaccaggagcgtttggagacattcaagctacctccttgactagcaaagatctcat

SEQ ID NO: 31171 - DNA, 80 bp, synthetic construct
  source 1..80: mol_type = other DNA
cgccagcacagacattagactactcaagccttccgccaagaacgtgcatgtcccgtacacgcaggccgcatctggattcg

SEQ ID NO: 31172 - DNA, 80 bp, synthetic construct
  source 1..80: mol_type = other DNA
agatgtggaaaaacaactcaggccgcccactgcaggaaaccgcccctttcgggtgcaagattgcagtcaatccgcttcga

SEQ ID NO: 31173 - DNA, 80 bp, synthetic construct
  source 1..80: mol_type = other DNA
gatgaccggcataatggccacggatatctcacctgacgatgcacaaaaacttctggttgggctcaaccagcgaatcgtca

SEQ ID NO: 31174 - DNA, 80 bp, synthetic construct
  source 1..80: mol_type = other DNA
gcggtggactgctcatacgggaacattcccatctctatcgacatcccgaacgctgcctttatcaggacatcagatgcacc

SEQ ID NO: 31175 - DNA, 80 bp, synthetic construct
  source 1..80: mol_type = other DNA
actggtctcaacagtcaaatgtgatgtcagtgagtgcacttactcagcggacttcggcgggatggctaccctgcagtatg

SEQ ID NO: 31176 - DNA, 80 bp, synthetic construct
  source 1..80: mol_type = other DNA
tatccgaccgcgaaggacaatgccctgtacattcgcattcgagcacagcaaccctccaagagtcgacagttcatgtcctg

SEQ ID NO: 31177 - DNA, 80 bp, synthetic construct
  source 1..80: mol_type = other DNA
gagaaaggagcggtgacagtacacttcagcaccgcgagcccacaggcgaactttattgtatcgctgtgtggtaagaagac

SEQ ID NO: 31178 - DNA, 80 bp, synthetic construct
  source 1..80: mol_type = other DNA
aacatgcaatgcagaatgcaaaccaccagctgaccatatcgtgagcaccccgcacaaaaatgaccaagaattccaagccg

SEQ ID NO: 31179 - DNA, 80 bp, synthetic construct
  source 1..80: mol_type = other DNA
ccatctcaaaaacttcatggagttggctgtttgcccttttcggcggcgcctcgtcgctattaattataggacttatgatt

SEQ ID NO: 31180 - DNA, 80 bp, synthetic construct
  source 1..80: mol_type = other DNA
tttgcttgcagcatgatgctgactagcacacgaagatgaccgctacgccccaatgacccgaccagcaaaactcgatgtac

SEQ ID NO: 31181 - DNA, 80 bp, synthetic construct
  source 1..80: mol_type = other DNA
ttccgaggaactgatgtgcataatgcatcaggctggtatattagatccccgcttaccgcgggcaatatagcaacaccaaa

SEQ ID NO: 31182 - DNA, 80 bp, synthetic construct
  source 1..80: mol_type = other DNA
actcgacgtatttccgaggaagcgcagtgcataatgctgcgcagtgttgccaaataatcactatattaaccatttattta

SEQ ID NO: 31183 - DNA, 80 bp, synthetic construct
  source 1..80: mol_type = other DNA
gcggacgccaaaactcaatgtatttctgaggaagcatggtgcataatgccatgcagcgtctgcataactttttattattt

SEQ ID NO: 31184 - DNA, 80 bp, synthetic construct
  source 1..80: mol_type = other DNA
ggtgcataatgccatgcagcgtctgcataactttttattatttcttttattaatcaacaaaattttgtttttaacatttg

SEQ ID NO: 31185 - DNA, 80 bp, synthetic construct
  source 1..80: mol_type = other DNA
ttaacggtaagactaacaggaacaccaataccatgcaaaattaccttctgccaatcattgcacaagggttcagcaaatgg

SEQ ID NO: 31186 - DNA, 80 bp, synthetic construct
  source 1..80: mol_type = other DNA
gccaaggagcgcaaagaagaccttgacaatgaaaaaatgctgggtaccagagagcgcaagcttacatatggctgcttgtg

SEQ ID NO: 31187 - DNA, 80 bp, synthetic construct
  source 1..80: mol_type = other DNA
ggcgtttcgcactaagaaagtgcactcgttctatcgcccacctggaacgcagaccatcgtaaaagtcccagcctctttta

SEQ ID NO: 31188 - DNA, 80 bp, synthetic construct
  source 1..80: mol_type = other DNA
gcgctttccccatgtcatccgtatggactacctctttgcccatgtcgctgaggcagaagataaaattggcattacaacca

SEQ ID NO: 31189 - DNA, 80 bp, synthetic construct
  source 1..80: mol_type = other DNA
aagaaggaggaaaaactgctgcaagtcccggaggaattagtcatggaggccaaggctgctttcgaggatgctcaggagga

SEQ ID NO: 31190 - DNA, 80 bp, synthetic construct
  source 1..80: mol_type = other DNA
atccagagcggagaagctccgagaagcactcccaccattagtggcagacaaaggtatcgaggcagccgcggaagttgtct

SEQ ID NO: 31191 - DNA, 80 bp, synthetic construct
  source 1..80: mol_type = other DNA
gcgaagtggaggggctccaggcggacatcggagcagcactcgtcgaaaccccgcgcggtcatgtaaggataataccacaa

SEQ ID NO: 31192 - DNA, 80 bp, synthetic construct
  source 1..80: mol_type = other DNA
gcaaatgaccgtatgatcggacagtacatcgttgtctcgccaacctctgtgctgaagaacgctaaactcgcaccagcaca

SEQ ID NO: 31193 - DNA, 80 bp, synthetic construct
  source 1..80: mol_type = other DNA
cccgctagcagaccaggttaagatcataacgcactccggaagatcaggaaggtatgcagtcgaaccatacgacgctaaag

SEQ ID NO: 31194 - DNA, 80 bp, synthetic construct
  source 1..80: mol_type = other DNA
tactgatgccagcaggaagtgccgtaccatggccagaattcttagcactgagtgagagcgccacgctagtgtacaacgaa

SEQ ID NO: 31195 - DNA, 80 bp, synthetic construct
  source 1..80: mol_type = other DNA
agagagtttgtgaaccgcaagctgtaccatattgccatgcacggtcccgctaagaatacagaagaggagcagtacaaggt

SEQ ID NO: 31196 - DNA, 80 bp, synthetic construct
  source 1..80: mol_type = other DNA
ccagtaaactaatcgagctggaggttcctaccacagcgacgattttggacataggcagcgcaccggctcgtagaatgttt

SEQ ID NO: 31197 - DNA, 80 bp, synthetic construct
  source 1..80: mol_type = other DNA
tacaaaggcagagctcgcagaaacagagtacgtgtttgacgtggacaagaagcgatgcgtcaagaaggaagaagcctcag

SEQ ID NO: 31198 - DNA, 80 bp, synthetic construct
  source 1..80: mol_type = other DNA
gacttgtcctctcgggagaactgaccaacccgccctatcacgaactagctcttgagggactgaagactcgacccgtggtc

SEQ ID NO: 31199 - DNA, 80 bp, synthetic construct
  source 1..80: mol_type = other DNA
ccgtacaaggttgaaacaataggagtgataggcgcaccaggatcgggcaagtcggctatcatcaagtcaactgtcacggc

SEQ ID NO: 31200 - DNA, 80 bp, synthetic construct
  source 1..80: mol_type = other DNA
cgcgaaattcaggccgatgtgctacggctgaggggcatgcagatcacgtcgaagacagtggattcggttatgctcaacgg

SEQ ID NO: 31201 - DNA, 80 bp, synthetic construct
  source 1..80: mol_type = other DNA
atgccgcaaagccgtagaagtgctgtatgttgacgaagcgttcgcgtgccacgcaggagcactacttgccttgattgcaa

SEQ ID NO: 31202 - DNA, 80 bp, synthetic construct
  source 1..80: mol_type = other DNA
tcgtcagaccccgtcataaggtagtgctatgcggagaccctaagcaatgcggattcttcaacatgatgcaactaaaggta

SEQ ID NO: 31203 - DNA, 80 bp, synthetic construct
  source 1..80: mol_type = other DNA
tatttcaaccacccggaaaaagacatatgtaccaagacattctacaagtttatctcccgacgttgcacacagccagtcac

SEQ ID NO: 31204 - DNA, 80 bp, synthetic construct
  source 1..80: mol_type = other DNA
ggctattgtatcgacactgcattacgatggaaaaatgaaaaccacaaacccgtgcaagaagaacatcgaaatcgacatta

SEQ ID NO: 31205 - DNA, 80 bp, synthetic construct
  source 1..80: mol_type = other DNA
caggggccacgaagccgaagccaggggacatcatcctgacatgcttccgcgtgtgggttaagcaactgcaaatcgactat

SEQ ID NO: 31206 - DNA, 80 bp, synthetic construct
  source 1..80: mol_type = other DNA
cccggacatgaggtaatgacagccgcggcctcacaagggctaaccagaaaaggagtatatgccgtccggcaaaaagtcaa

SEQ ID NO: 31207 - DNA, 80 bp, synthetic construct
  source 1..80: mol_type = other DNA
tccgagcaccagtaccattgcgtttgccccatgcgtagtccagaagacccggaccgcatgatgaaatatgccagcaaact

SEQ ID NO: 31208 - DNA, 80 bp, synthetic construct
  source 1..80: mol_type = other DNA
atgaaaacccgctgtacgcgatcacatcagagcatgtgaacgtgctgctcacccgcactgaggacaggctagtatggaaa

SEQ ID NO: 31209 - DNA, 80 bp, synthetic construct
  source 1..80: mol_type = other DNA
actttacagggcgacccatggattaagcagctcactaacgtaccaaaaggaaattttcaagccaccatcgaggactggga

SEQ ID NO: 31210 - DNA, 80 bp, synthetic construct
  source 1..80: mol_type = other DNA
agctgaacacaagggaataattgctgcgataaacagtcccgctccccgtaccaatccgttcagctgcaagactaacgttt

SEQ ID NO: 31211 - DNA, 80 bp, synthetic construct
  source 1..80: mol_type = other DNA
gctgggcgaaacgactggaaccgatactggccacggccggtatcgtacttaccggttgccagtggagcgagctgttccca

SEQ ID NO: 31212 - DNA, 80 bp, synthetic construct
  source 1..80: mol_type = other DNA
cagtttgcagatgacaaaccacactcggccatctacgccctggacgtaatctgcattaagtttttcggcatggacttgac

SEQ ID NO: 31213 - DNA, 80 bp, synthetic construct
  source 1..80: mol_type = other DNA
aagcggactgttttccaaacagagcatcccgttaacgtaccatcctgccgattcagcgaggccagtagctcattgggaca

SEQ ID NO: 31214 - DNA, 80 bp, synthetic construct
  source 1..80: mol_type = other DNA
acagcccaggaacccgcaagtatgggtacgatcacgccgttgccgccgaactctcccgtagatttccggtgttccagcta

SEQ ID NO: 31215 - DNA, 80 bp, synthetic construct
  source 1..80: mol_type = other DNA
gctgggaaaggcacacagcttgatttgcagacgggcagaactagagttatctccgcacagcataacttggtcccagtgaa

SEQ ID NO: 31216 - DNA, 80 bp, synthetic construct
  source 1..80: mol_type = other DNA
ccgcaatctcccgcacgccttagtccccgagcacaaggagaaacaacccggcccggtcaaaaaattcttgagccagttca

SEQ ID NO: 31217 - DNA, 80 bp, synthetic construct
  source 1..80: mol_type = other DNA
aacaccactccgtacttgtggtctcagaggaaaaaattgaagctccccacaagagaatcgaatggatcgccccgattggc

SEQ ID NO: 31218 - DNA, 80 bp, synthetic construct
  source 1..80: mol_type = other DNA
ggcggaaaaagcatgcaagattacgaataagaacttgcatgagaagatcaaggacctccggaccgtacttgatacaccgg

SEQ ID NO: 31219 - DNA, 80 bp, synthetic construct
  source 1..80: mol_type = other DNA
atagccggcgctgataagaactacaacctggctttcgggtttccgccgcaggcacggtacgacctggtgtttatcaatat

SEQ ID NO: 31220 - DNA, 80 bp, synthetic construct
  source 1..80: mol_type = other DNA
tggaactaaatacagaaaccatcactttcagcagtgcgaagaccatgcggcgaccttgaaaaccctctcgcgttcggccc

SEQ ID NO: 31221 - DNA, 80 bp, synthetic construct
  source 1..80: mol_type = other DNA
tgaactgccttaaccccggaggcaccctcgtggtgaagtcctacggttacgccgaccgcaatagtgaggacgtagtcacc

SEQ ID NO: 31222 - DNA, 80 bp, synthetic construct
  source 1..80: mol_type = other DNA
gctcttgccagaaaatttgtcagagtgtctgcagcgaggccagagtgcgtctcaagcaatacagaaatgtacctgatctt

SEQ ID NO: 31223 - DNA, 80 bp, synthetic construct
  source 1..80: mol_type = other DNA
ccgacaactagacaacagccgcacacgacaattcaccccgcatcatctgaattgtgtgatttcgtccgtgtacgagggta

SEQ ID NO: 31224 - DNA, 80 bp, synthetic construct
  source 1..80: mol_type = other DNA
caagagacggagttggagccgcaccgtcataccgcactaaaagggagaacattgctgattgtcaagaggaagcagttgtc

SEQ ID NO: 31225 - DNA, 80 bp, synthetic construct
  source 1..80: mol_type = other DNA
aatgcagccaatccgctgggcagaccaggcgaaggagtctgccgtgccatctataaacgttggccgaacagtttcaccga

SEQ ID NO: 31226 - DNA, 80 bp, synthetic construct
  source 1..80: mol_type = other DNA
ttcagccacagagaccggcaccgcaaaactgactgtgtgccaaggaaagaaagtgatccacgcggttggccctgatttcc

SEQ ID NO: 31227 - DNA, 80 bp, synthetic construct
  source 1..80: mol_type = other DNA
ggaaacacccagaggcagaagccctgaaattgctgcaaaacgcctaccatgcagtggcagacttagtaaatgaacataat

SEQ ID NO: 31228 - DNA, 80 bp, synthetic construct
  source 1..80: mol_type = other DNA
atcaagtctgtcgccatcccactgctatctacaggcatttacgcagccggaaaagaccgccttgaagtatcacttaactg

SEQ ID NO: 31229 - DNA, 80 bp, synthetic construct
  source 1..80: mol_type = other DNA
atgctgaaacgccatcactctgcttccacaacgatgttacctgcaacacgcgtgccgagtactccgtcatgcaggacgtg

SEQ ID NO: 31230 - DNA, 80 bp, synthetic construct
  source 1..80: mol_type = other DNA
cttgacaaccgcgctagatagaactgatgcggacgtaaccatctactgcctggataagaagtggaaggaaagaatcgacg

SEQ ID NO: 31231 - DNA, 80 bp, synthetic construct
  source 1..80: mol_type = other DNA
cggtgctccaacttaaggagtctgtaatagagctgaaggatgaggatatggagatcgacgacgagttagtatggatccat

SEQ ID NO: 31232 - DNA, 80 bp, synthetic construct
  source 1..80: mol_type = other DNA
ccggacagttgcctgaagggaagaaagggattcagtactacaaaaggaaagttgtattcgtactttgaaggcaccaaatt

SEQ ID NO: 31233 - DNA, 80 bp, synthetic construct
  source 1..80: mol_type = other DNA
ccatcaagcagcaaaagatatggcggagataaaggtcctgttcccaaatgaccaggaaagcaacgagcaactgtgtgcct

SEQ ID NO: 31234 - DNA, 80 bp, synthetic construct
  source 1..80: mol_type = other DNA
acatattgggggagaccatggaagcaatccgcgaaaaatgcccggtcgaccacaacccgtcgtctagcccgccaaaaacg

SEQ ID NO: 31235 - DNA, 80 bp, synthetic construct
  source 1..80: mol_type = other DNA
ctgccgtgcctctgcatgtatgccatgacgccagaaagggtccacagactcagaagcaacaacgtcaaagaagttacagt

SEQ ID NO: 31236 - DNA, 80 bp, synthetic construct
  source 1..80: mol_type = other DNA
atgctcctccaccccccttccaaagtacaaaatcaagaacgttcagaaggttcagtgcacaaaagtagtcctgtttaacc

SEQ ID NO: 31237 - DNA, 80 bp, synthetic construct
  source 1..80: mol_type = other DNA
cgcatacccctgcattcgttcccgcccgtaagtacatagaagcgccagaacagcctgcagctccgcctgcacaggccgag

SEQ ID NO: 31238 - DNA, 80 bp, synthetic construct
  source 1..80: mol_type = other DNA
gaggcccccgaagttgcagcaacaccaacaccacctgcagctgataacacctcgcttgatgtcacggacatctcactgga

SEQ ID NO: 31239 - DNA, 80 bp, synthetic construct
  source 1..80: mol_type = other DNA
catggaagacagtagcgaaggctcactcttttcgagctttagcggatcggacaactctattactagtatggacagttggt

SEQ ID NO: 31240 - DNA, 80 bp, synthetic construct
  source 1..80: mol_type = other DNA
tacatcaacgctcccggaactatttaccatcaggctatgaaaggcgtgcggaccctgtactggattggcttcgataccac

SEQ ID NO: 31241 - DNA, 80 bp, synthetic construct
  source 1..80: mol_type = other DNA
cgtcaggacctagttcactagagatagtagaccgaaggcaggtggtggtggctgacgtccatgccgtccaagagcctgcc

SEQ ID NO: 31242 - DNA, 80 bp, synthetic construct
  source 1..80: mol_type = other DNA
cctgttccaccgccaaggctaaagaagatggcccgcctggcagcggcaagaatgcaggaagagccaactccaccggcaag

SEQ ID NO: 31243 - DNA, 80 bp, synthetic construct
  source 1..80: mol_type = other DNA
caccagctctgcggacgagtcccttcacctttcttttggtggggtatccatgtccttcggatcccttttcgacggagaga

SEQ ID NO: 31244 - DNA, 80 bp, synthetic construct
  source 1..80: mol_type = other DNA
tgggcgccttggcagcggcacaacccccggcaagtacatgccctacggatgtgcctatgtctttcggatcgttttccgac

SEQ ID NO: 31245 - DNA, 80 bp, synthetic construct
  source 1..80: mol_type = other DNA
ggagagattgaggagctgagccgcagagtaaccgagtctgagcccgtcctgtttgggtcatttgaaccgggcgaagtgaa

SEQ ID NO: 31246 - DNA, 80 bp, synthetic construct
  source 1..80: mol_type = other DNA
ctcaattatatcgtcccgatcagttgtatcttttccaccacgcaagcagagacgtagacgcaggagcaggaggaccgaat

SEQ ID NO: 31247 - DNA, 80 bp, synthetic construct
  source 1..80: mol_type = other DNA
actgactaaccggggtaggtgggtacatattttcgacggacacaggccctgggcacttgcaaatggagtccgttctgcag

SEQ ID NO: 31248 - DNA, 80 bp, synthetic construct
  source 1..80: mol_type = other DNA
aatcagcttacagaaccgaccttggagcgcaatgttctggaaagaatctacgccccggtgctcgacacgtcgaaagagga

SEQ ID NO: 31249 - DNA, 80 bp, synthetic construct
  source 1..80: mol_type = other DNA
acagctcaaactcaggtaccagatgatgcccaccgaagccaacaaaagcaggtaccagtctagaaaagtagaaaatcaga

SEQ ID NO: 31250 - DNA, 80 bp, synthetic construct
  source 1..80: mol_type = other DNA
aagccataaccactgagcgactgctttcagggctacgactgtataactctgccacagatcagccagaatgctataagatc

SEQ ID NO: 31251 - DNA, 80 bp, synthetic construct
  source 1..80: mol_type = other DNA
ccagttcatgttctcggctatggcaggttcgtaccctgcgtacaacaccaactgggccgacgaaaaagtcctcgaagcgc

SEQ ID NO: 31252 - DNA, 80 bp, synthetic construct
  source 1..80: mol_type = other DNA
acctacccgaaaccatcgtattccagcagtgtaccggcgaactactctgacccaaagtttgctgtagctgtttgcaacaa

SEQ ID NO: 31253 - DNA, 80 bp, synthetic construct
  source 1..80: mol_type = other DNA
ctatctgcatgagaattacccgacggtagcatcttatcagatcaccgacgagtacgatgcttacttggatatggtagacg

SEQ ID NO: 31254 - DNA, 80 bp, synthetic construct
  source 1..80: mol_type = other DNA
ggacagtcgcttgcctagatactgcaactttttgccccgccaagcttagaagttacccgaaaagacacgagtatagagcc

SEQ ID NO: 31255 - DNA, 80 bp, synthetic construct
  source 1..80: mol_type = other DNA
ccaaacactcgcagtgcggttccatcagcgatgcagaacacgttgcaaaacgtgctcattgccgcgactaaaagaaactg

SEQ ID NO: 31256 - DNA, 80 bp, synthetic construct
  source 1..80: mol_type = other DNA
caacgtcacacaaatgcgtgaattgccaacactggactcagcgacattcaacgttgaatgctttcgaaaatatgcatgta

SEQ ID NO: 31257 - DNA, 80 bp, synthetic construct
  source 1..80: mol_type = other DNA
atgacgagtattgggaggagtttgcccgaaagccaattaggatcactactgagttcgttaccgcatacgtggccagactg

SEQ ID NO: 31258 - DNA, 80 bp, synthetic construct
  source 1..80: mol_type = other DNA
aaaggccctaaggccgccgcactgttcgcaaagacgcataatttggtcccattgcaagaagtgcctatggataggttcgt

SEQ ID NO: 31259 - DNA, 80 bp, synthetic construct
  source 1..80: mol_type = other DNA
catggacatgaaaagagacgtgaaagttacacctggcacgaaacacacagaagaaagaccgaaagtacaagtgctacaag

SEQ ID NO: 31260 - DNA, 80 bp, synthetic construct
  source 1..80: mol_type = other DNA
ccgcagaacccctggcgaccgcttacctgtgcgggatccaccgggagttagtgcgcaggcttacagccgtcttgctaccc

SEQ ID NO: 31261 - DNA, 80 bp, synthetic construct
  source 1..80: mol_type = other DNA
aacattcacacgctttttgacatgtcggcggaggactttgatgcaatcatagcagaacacttcaagcaaggtgacccggt

SEQ ID NO: 31262 - DNA, 80 bp, synthetic construct
  source 1..80: mol_type = other DNA
gtaacatcggactctgcagcacaaagctgagtgaaggcaggacaggaaagttgtcgataatgaggaagaaggagttgaag

SEQ ID NO: 31263 - DNA, 80 bp, synthetic construct
  source 1..80: mol_type = other DNA
actggagacggatatcgcctcgttcgacaaaagccaagacgacgctatggcgttaactggcctgatgatcttggaagacc

SEQ ID NO: 31264 - DNA, 80 bp, synthetic construct
  source 1..80: mol_type = other DNA
tgggtgtggaccaaccactactcgacttgatcgagtgcgcctttggagaaatatcatccacccatctgcccacgggtacc

SEQ ID NO: 31265 - DNA, 80 bp, synthetic construct
  source 1..80: mol_type = other DNA
cgtttcaaattcggggcgatgatgaaatccggaatgttcctcacgctctttgtcaacacagttctgaatgtcgttatcgc

SEQ ID NO: 31266 - DNA, 80 bp, synthetic construct
  source 1..80: mol_type = other DNA
cagcagagtattggaggagcggcttaaaacgtccaaatgtgcagcatttatcggcgacgacaacatcatacacggagtag

SEQ ID NO: 31267 - DNA, 80 bp, synthetic construct
  source 1..80: mol_type = other DNA
tatctgacaaagaaatggctgagaggtgtgccacctggctcaacatggaggttaagatcattgacgcagtcatcggcgag

SEQ ID NO: 31268 - DNA, 80 bp, synthetic construct
  source 1..80: mol_type = other DNA
agaccgccttacttctgcggtggattcatcttgcaagattcggttacctccacagcgtgtcgcgtggcggaccccttgaa

SEQ ID NO: 31269 - DNA, 80 bp, synthetic construct
  source 1..80: mol_type = other DNA
aaggctgtttaagttgggtaaaccgctcccagccgacgacgagcaagacgaagacagaagacgcgctctgctagatgaaa

SEQ ID NO: 31270 - DNA, 80 bp, synthetic construct
  source 1..80: mol_type = other DNA
caaaggcgtggtttagagtaggtataacagacaccttagcagtggccgtggcaactcggtatgaggtagacaacatcaca

SEQ ID NO: 31271 - DNA, 80 bp, synthetic construct
  source 1..80: mol_type = other DNA
cctgtcctgctggcattgagaacttttgcccagagcaaaagagcatttcaagccatcagaggggaaataaagcatctcta

SEQ ID NO: 31272 - DNA, 80 bp, synthetic construct
  source 1..80: mol_type = other DNA
cggtggtcctaaatagtcagcatagcacatttcatctgactaataccacaacaccaccaccatgaatagaggattcttta

SEQ ID NO: 31273 - DNA, 80 bp, synthetic construct
  source 1..80: mol_type = other DNA
ttcatctgactaataccacaacaccaccaccatgaatagaggattctttaacatgctcggccgccgccccttcccggccc

SEQ ID NO: 31274 - DNA, 80 bp, synthetic construct
  source 1..80: mol_type = other DNA
cccgggtcacgggtttatttctccgttggatcgacactttacccagaacacagagccagcttgcagagctggcatcttcc

SEQ ID NO: 31275 - DNA, 80 bp, synthetic construct
  source 1..80: mol_type = other DNA
acatgctcggccgccgccccttcccggcccccactgccatgtggaggccgcggagaaggaggcaggcggccccgatgcct

SEQ ID NO: 31276 - DNA, 80 bp, synthetic construct
  source 1..80: mol_type = other DNA
gcccgcaatgggctggcttcccaaatccagcaactgaccacagccgtcagtgccctagtcattggacaggcaactagacc

SEQ ID NO: 31277 - DNA, 80 bp, synthetic construct
  source 1..80: mol_type = other DNA
tcaaaccccacgcccacgcccgccgccgcgccagaagaagcaggcgccaaagcaaccaccgaagccgaagaaaccaaaaa

SEQ ID NO: 31278 - DNA, 80 bp, synthetic construct
  source 1..80: mol_type = other DNA
cacaggagaagaagaagaagcaacctgcaaaacccaaacccggaaagagacaacgtatggcactcaagttggaggccgac

SEQ ID NO: 31279 - DNA, 80 bp, synthetic construct
  source 1..80: mol_type = other DNA
gtagacgtagacccgcagagtccgtttgtcgtgcaactgcaaaagagcttcccgcaatttgaggtagtagcacagcaggt

SEQ ID NO: 31280 - DNA, 80 bp, synthetic construct
  source 1..80: mol_type = other DNA
agactgttcgacgtcaaaaatgaggacggagatgtcatcgggcacgcactggccatggaaggaaaggtaatgaaaccact

SEQ ID NO: 31281 - DNA, 80 bp, synthetic construct
  source 1..80: mol_type = other DNA
ccacgtgaaaggaactattgaccaccctgtgctatcaaagctcaaattcaccaagtcgtcagcatacgacatggagttcg

SEQ ID NO: 31282 - DNA, 80 bp, synthetic construct
  source 1..80: mol_type = other DNA
cacagttgccggtcaacatgagaagtgaggcgttcacctacaccagcgaacaccctgaagggttttacaactggcaccac

SEQ ID NO: 31283 - DNA, 80 bp, synthetic construct
  source 1..80: mol_type = other DNA
ggagcggtgcagtatagtggaggtagatttaccatcccccgcggagtaggaggcagaggagacagtggtcgtccgattat

SEQ ID NO: 31284 - DNA, 80 bp, synthetic construct
  source 1..80: mol_type = other DNA
ggataactcaggccgggttgtcgcgatagtcctcggaggggctgatgagggaacaagaactgccctttcggtcgtcacct

SEQ ID NO: 31285 - DNA, 80 bp, synthetic construct
  source 1..80: mol_type = other DNA
ggaatagcaaagggaagacaatcaagacaaccccggaagggacagaagagtggtctgcagcaccactggtcacggccatg

SEQ ID NO: 31286 - DNA, 80 bp, synthetic construct
  source 1..80: mol_type = other DNA
atcggtgttccacctgaaaggaaagcagtcgtacacttgccgctgtgatacagtggtgagctgcgaaggctacgtagtga

SEQ ID NO: 31287 - DNA, 80 bp, synthetic construct
  source 1..80: mol_type = other DNA
tgcttgcttggaaacgtgagcttcccatgcaatcgcccgcccacatgctacacccgcgaaccatccagagctcttgacat

SEQ ID NO: 31288 - DNA, 80 bp, synthetic construct
  source 1..80: mol_type = other DNA
ccttgaagagaacgtgaaccacgaggcctacgacaccctgctcaacgccatattgcggtgcggatcgtccggcagaagca

SEQ ID NO: 31289 - DNA, 80 bp, synthetic construct
  source 1..80: mol_type = other DNA
aaagaagcgtcactgacgactttaccttgaccagcccgtacttgggcacatgctcgtactgtcaccatactgaaccgtgc

SEQ ID NO: 31290 - DNA, 80 bp, synthetic construct
  source 1..80: mol_type = other DNA
tttagcccgattaagatcgagcaggtctgggatgaagcggacgacaacaccatacgcatacagacttccgcccagtttgg

SEQ ID NO: 31291 - DNA, 80 bp, synthetic construct
  source 1..80: mol_type = other DNA
atacgaccaaagcggagcagcaagctcaaataagtaccgctacatgtcgctcgagcaggatcataccgtcaaagaaggca

SEQ ID NO: 31292 - DNA, 80 bp, synthetic construct
  source 1..80: mol_type = other DNA
ctatggatgacatcaagatcagcacctcaggaccgtgtagaaggcttagctacaaaggatactttctcctcgcgaagtgt

SEQ ID NO: 31293 - DNA, 80 bp, synthetic construct
  source 1..80: mol_type = other DNA
cctccaggggacagcgtaacggttagtatagcgagtagcaactcagcaacgtcatgcacaatggcccgcaagataaaacc

SEQ ID NO: 31294 - DNA, 80 bp, synthetic construct
  source 1..80: mol_type = other DNA
aaaattcgtgggacgggaaaaatatgacctacctcccgttcacggtaagaagattccttgcacagtgtacgaccgtctga

SEQ ID NO: 31295 - DNA, 80 bp, synthetic construct
  source 1..80: mol_type = other DNA
aagaaacaaccgccggctacatcactatgcacaggccgggaccgcacgcctatacgtcctatctggaggaatcatcaggg

SEQ ID NO: 31296 - DNA, 80 bp, synthetic construct
  source 1..80: mol_type = other DNA
aaagtctacgcgaagccaccatccggaaagaacattacgtacgagtgcaagtgcggcgattacaagaccggtaccgttac

SEQ ID NO: 31297 - DNA, 80 bp, synthetic construct
  source 1..80: mol_type = other DNA
agaaaatcaccatcagtcccgggatcacgggagaaaccgtgggatacgcggttacaaacaatagcgagggcttcttgcta

SEQ ID NO: 31298 - DNA, 80 bp, synthetic construct
  source 1..80: mol_type = other DNA
gacccgtaccgaaatcacgggctgcaccgccatcaagcagtgcgtcgcctataagagcgaccaaacgaagtgggtcttca

SEQ ID NO: 31299 - DNA, 80 bp, synthetic construct
  source 1..80: mol_type = other DNA
attcgccggacttgatcagacatgccgaccacacggcccaagggaaattgcatttacctttcaagctgatcccgagtacc

SEQ ID NO: 31300 - DNA, 80 bp, synthetic construct
  source 1..80: mol_type = other DNA
tgcatggtccctgttgcccacgcgccgaacgtagtacacggctttaaacacatcagcctccaattagacacagaccacct

SEQ ID NO: 31301 - DNA, 80 bp, synthetic construct
  source 1..80: mol_type = other DNA
gacattgctcaccaccaggagactaggggcaaatccggaaccaactactgaatggatcatcggaaagacggttagaaact

SEQ ID NO: 31302 - DNA, 80 bp, synthetic construct
  source 1..80: mol_type = other DNA
tcaccgtcgaccgagatggcctggaatacatatggggcaatcacgaaccggtaagggtctatgcccaagagtctgcacca

SEQ ID NO: 31303 - DNA, 80 bp, synthetic construct
  source 1..80: mol_type = other DNA
ggagaccctcacggatggccacacgaaatagtacagcattactaccatcgccatcctgtgtacaccatcttagccgtcgc

SEQ ID NO: 31304 - DNA, 80 bp, synthetic construct
  source 1..80: mol_type = other DNA
atcagctgctgtggcgatgatgattggcgtaactgttgcagcattatgtgcctgtaaagcgcgccgtgagtgcctgacgc

SEQ ID NO: 31305 - DNA, 80 bp, synthetic construct
  source 1..80: mol_type = other DNA
catatgccctggccccaaatgccgtgattccaacttcgctggcacttttgtgctgtgttaggtcggctaatgctgaaaca

SEQ ID NO: 31306 - DNA, 80 bp, synthetic construct
  source 1..80: mol_type = other DNA
ttcaccgagaccatgagttacctatggtcgaacagccagccattcttctgggtccagctgtgtatacccctggccgctgt

SEQ ID NO: 31307 - DNA, 80 bp, synthetic construct
  source 1..80: mol_type = other DNA
cgaactcactttgagatgtaggcatagcataccgaactcttccacgattctccgaacccgcagagatcggaagagcgtcg

SEQ ID NO: 31308 - DNA, 80 bp, synthetic construct
  source 1..80: mol_type = other DNA
ccagcaggagattaataacccatcatggatcctccggcgtacgtggacatagacgctgacagcgcctttttgaaggccct

SEQ ID NO: 31309 - DNA, 80 bp, synthetic construct
  source 1..80: mol_type = other DNA
taagcttcctaaaagcagccgaactcactttgagaagtaggcatagcataccgaactctcctacgattctccgaaccccc

SEQ ID NO: 31310 - DNA, 80 bp, synthetic construct
  source 1..80: mol_type = other DNA
tcggaagcatcgaagacttgtccggagaggtggagagacatcttcaggggtacaataggtggattacccttaaggacatc

SEQ ID NO: 31311 - DNA, 80 bp, synthetic construct
  source 1..80: mol_type = other DNA
atcttcaggggtacaataggtggattacccttaaggacatcaggtctagatcatctctattagactacagctgtttatga

SEQ ID NO: 31312 - DNA, 80 bp, synthetic construct
  source 1..80: mol_type = other DNA
tccagttggacgacggaaaaccatcggacctcagcgagatggccaaggcggtggaaagtaagtatcgggaggacttccag

SEQ ID NO: 31313 - DNA, 80 bp, synthetic construct
  source 1..80: mol_type = other DNA
catcgggaaggtcttctgaggataaatctacccagactactgggagagaactcaagaaggaaaccccatctgcctcttct

SEQ ID NO: 31314 - DNA, 80 bp, synthetic construct
  source 1..80: mol_type = other DNA
cctgctgacaatttttaaactcaggcctactaaataattgagcctgagctgttccgtattcaacatgaaaaaaacaagca

SEQ ID NO: 31315 - DNA, 80 bp, synthetic construct
  source 1..80: mol_type = other DNA
ctaaagggtgtttaagagtagggaggagatgtcaccctcatgtgaacggggtgttcttcaatggtatcatcttaggccct

SEQ ID NO: 31316 - DNA, 80 bp, synthetic construct
  source 1..80: mol_type = other DNA
gacggccatgtgctaatcccggagatgcagtcgtctctcctccagcagcatatggagttgttggaatcctcagtcatccc

SEQ ID NO: 31317 - DNA, 80 bp, synthetic construct
  source 1..80: mol_type = other DNA
gaccgcgctaatgttgatgattttcttaacgacgtgttgtagaagggccaatagagcagaatcagcacaacacagtcttg

SEQ ID NO: 31318 - DNA, 80 bp, synthetic construct
  source 1..80: mol_type = other DNA
gagagaaggggaggaaagtgtcggtaacctcccaaagcgggcgtgttatatcctcatgggagtcatacaaaagtggaggt

SEQ ID NO: 31319 - DNA, 80 bp, synthetic construct
  source 1..80: mol_type = other DNA
gagaccaagctgtaagagcatgtcatctcctctatatttgaagtcttgaagatcacatcccctcaaagtgaaggggatat

SEQ ID NO: 31320 - DNA, 80 bp, synthetic construct
  source 1..80: mol_type = other DNA
ctccgggttcaacagtcctccttggacctattgtaacagggtagattcaagggtcataagaatttcatcaatcatctcaa

SEQ ID NO: 31321 - DNA, 80 bp, synthetic construct
  source 1..80: mol_type = other DNA
ctgatcagacatggtcatgtagatccttataatacaagagaccttatagcaattccagtgaccaacggtgctgttaccct

SEQ ID NO: 31322 - DNA, 80 bp, synthetic construct
  source 1..80: mol_type = other DNA
ccaagaactgataccaaaggtggtggacaggctgagagacacttcaaacaatgttgtgttcgaacacagacagagatagc

SEQ ID NO: 31323 - DNA, 80 bp, synthetic construct
  source 1..80: mol_type = other DNA
agtgagtccccagatattatactgggtaagagttaattaggaaaggagactcatctcctatgaaggacgtaagcaataga

SEQ ID NO: 31324 - DNA, 80 bp, synthetic construct
  source 1..80: mol_type = other DNA
ataatctcaactctcctctcatagaagaccctgccaaactaatgttagagtggttaaagacaggaaatagaccctaccga

SEQ ID NO: 31325 - DNA, 80 bp, synthetic construct
  source 1..80: mol_type = other DNA
ttttagctctatggaaagatctgacgtcagttgatgttgggaaagacttagtcagattcaaagatcaaatatgggggcta

SEQ ID NO: 31326 - DNA, 80 bp, synthetic construct
  source 1..80: mol_type = other DNA
ctagttgtgacgaaggactttgtgtactctcaaagttctaatagtctctttgacaggaactatacacttatgctgaaaga

SEQ ID NO: 31327 - DNA, 80 bp, synthetic construct
  source 1..80: mol_type = other DNA
ggtgatagacaagtcctatcaagagtgcttggcgagcgacctggccagaaggatccttcgatggggatttgacaagtact

SEQ ID NO: 31328 - DNA, 80 bp, synthetic construct
  source 1..80: mol_type = other DNA
tggaacctaagattgtatttcgttatcaccgaaaagctcctagctaactatatcttgcccctctttgatgcactgactat

SEQ ID NO: 31329 - DNA, 80 bp, synthetic construct
  source 1..80: mol_type = other DNA
ttctgtgtccaacatatatgttatcacctgggctgtctagagaggggcttctatatgagctagagagcatatcgagaaat

SEQ ID NO: 31330 - DNA, 80 bp, synthetic construct
  source 1..80: mol_type = other DNA
acaacagttccccacccttctgagatgttgggaatggttcctaaatcctctatctcttgcacttgcggagcaacaggagg

SEQ ID NO: 31331 - DNA, 80 bp, synthetic construct
  source 1..80: mol_type = other DNA
ctatctcttgcacttgcggagcaacaggaggggggaatccgagagtctcggtgtctgtgctcccgtcctttgatcagtca

SEQ ID NO: 31332 - DNA, 80 bp, synthetic construct
  source 1..80: mol_type = other DNA
gatgtagcaggtgtgtaaggcctatcgatgatattacactggagacatctcagatctttgagtttccggatgtgtcaaaa

SEQ ID NO: 31333 - DNA, 80 bp, synthetic construct
  source 1..80: mol_type = other DNA
agaatatctaggatggtctctggagctgtgccacacttccaaaaacttcctgatatccatctgaaaccaggagactttga

SEQ ID NO: 31334 - DNA, 80 bp, synthetic construct
  source 1..80: mol_type = other DNA
aatctctaagtggtagggaaaaatctcgtcacataggctcagctcaggggctcttgtattcaatcctggttgcgatccat

SEQ ID NO: 31335 - DNA, 80 bp, synthetic construct
  source 1..80: mol_type = other DNA
acactttagaatccgacgacgacattcaaagattgctaaaagactctttgcggagaacaaggtgggtggatcaagaggtg

SEQ ID NO: 31336 - DNA, 80 bp, synthetic construct
  source 1..80: mol_type = other DNA
tgtagatcaaaagagcaactggcaacacttctcatcctgaaacctacgctaagatgttggatccgggagaagtctatgat

SEQ ID NO: 31337 - DNA, 80 bp, synthetic construct
  source 1..80: mol_type = other DNA
gaatctccagaatggtatctggggctgtaccccactttcagaagcttcctgacatccgtctgagatcaggtgattttgaa

SEQ ID NO: 31338 - DNA, 80 bp, synthetic construct
  source 1..80: mol_type = other DNA
catgcgtctttggtcggtcttctcttgagtttgtataggttgagcaagatatcaggacaaaacactggtaattataaaac

SEQ ID NO: 31339 - DNA, 80 bp, synthetic construct
  source 1..80: mol_type = other DNA
gccgtttatactcgaatcatgatgaatggaggtcgactaaagagatcgcatatacagagatatgtctcagtcagttcaaa

SEQ ID NO: 31340 - DNA, 80 bp, synthetic construct
  source 1..80: mol_type = other DNA
tgatcagactaggtcatgtagattctcataatacgggaagtcctctagcagcttcagtgaccaacggtgctttcatcttc

SEQ ID NO: 31341 - DNA, 80 bp, synthetic construct
  source 1..80: mol_type = other DNA
caacagaggatgtattctctgtcttggatcaggtatttggattgaagagagtgttttctagaacgcatgagttttttcag

SEQ ID NO: 31342 - DNA, 80 bp, synthetic construct
  source 1..80: mol_type = other DNA
gatgtccacaaacaggtctccggggttgacctgggtctcccaaactgggggaaatacgtattactgagtgcaggtgctct

SEQ ID NO: 31343 - DNA, 80 bp, synthetic construct
  source 1..80: mol_type = other DNA
caggaaccgataccaaaggttgcggacgggccaaaaggtgttttggatgactccgtgcttgggcacggacagaggtcata

SEQ ID NO: 31344 - DNA, 80 bp, synthetic construct
  source 1..80: mol_type = other DNA
tgactctgacagacaattgttccaggtcttacaaagttttgaaagattattttaagaaagtagacctaggatctctgaaa

SEQ ID NO: 31345 - DNA, 80 bp, synthetic construct
  source 1..80: mol_type = other DNA
cctgctaaccgagctttccgactcagtccctctagataataaaatctgagatgtcctagagtcgacatgaaaaaaacagg

SEQ ID NO: 31346 - DNA, 80 bp, synthetic construct
  source 1..80: mol_type = other DNA
gctctgattgccttgatgttgataatttttctaatgacgtgttgtaggagagtcaatcaaccagagtctacgcagcgcag

SEQ ID NO: 31347 - DNA, 80 bp, synthetic construct
  source 1..80: mol_type = other DNA
gaggacttatctggagaggtggaaagacaccttcacggatacaataggtggatcaccctagaggatatcagatctagatc

SEQ ID NO: 31348 - DNA, 80 bp, synthetic construct
  source 1..80: mol_type = other DNA
accttcacggatacaataggtggatcaccctagaggatatcagatctagatcatctctactagattacagctgcctgtaa

SEQ ID NO: 31349 - DNA, 80 bp, synthetic construct
  source 1..80: mol_type = other DNA
ctcccggaaggtcttcagaggataaatcaacccagactactggtagagagtctaagaaggagacaacgtccactccttct

SEQ ID NO: 31350 - DNA, 80 bp, synthetic construct
  source 1..80: mol_type = other DNA
gctctgattgctctgatgttgataattttcctcatgacctgttgtagaagagtcaatcgaccagaatctacgcaacgcaa

SEQ ID NO: 31351 - DNA, 80 bp, synthetic construct
  source 1..80: mol_type = other DNA
cagtgtgccagaaatctatcaattgtgtatgtctatcctgaaaaaaactaacacccctcctttcgaaccatcccgaacat

SEQ ID NO: 31352 - DNA, 80 bp, synthetic construct
  source 1..80: mol_type = other DNA
gccctgattgccttgatgttgataattttcctaatgacgtgttgtaggagagtcagtcgaccggaatctacgcacctcag

SEQ ID NO: 31353 - DNA, 80 bp, synthetic construct
  source 1..80: mol_type = other DNA
ctgatgtggcattggaagatgatgggactgtcaactctgacgatgaggactacttctccggtggaaccagaagtccagaa

SEQ ID NO: 31354 - DNA, 80 bp, synthetic construct
  source 1..80: mol_type = other DNA
cctgctaaccgagcttttaaactcgatccctctgaataataaaatctgagatgtcctagagtcgacatgaaaaaaacggg

SEQ ID NO: 31355 - DNA, 80 bp, synthetic construct
  source 1..80: mol_type = other DNA
aaaactattaacatccctcaaaagacttaagggaagatggttcctcaggttctttcgtttgtacccctcttagtttttcc

SEQ ID NO: 31356 - DNA, 80 bp, synthetic construct
  source 1..80: mol_type = other DNA
aaattaagcgtactgatgttgaaggaaattgggctctgacaggaggcatggaactgacaagggatcccactgtctctgaa

SEQ ID NO: 31357 - DNA, 80 bp, synthetic construct
  source 1..80: mol_type = other DNA
gcggagacttcacctggatgatggaaaatcgtccaaccttggtgagatggccaaagcaggggagggcaggcatcgagagg

SEQ ID NO: 31358 - DNA, 80 bp, synthetic construct
  source 1..80: mol_type = other DNA
aaccaggttttatgtccgacatatatgttgtcgccggggctgtctagagagggactcatctatgagttagagagcatatc

SEQ ID NO: 31359 - DNA, 80 bp, synthetic construct
  source 1..80: mol_type = other DNA
aaggaatgcactttcaatataccgagccatcgaagaaggggcatctaaactagggctgatcatcaagaaggaagagacca

SEQ ID NO: 31360 - DNA, 80 bp, synthetic construct
  source 1..80: mol_type = other DNA
ctgatgtgcacaaacaggtctcaggggttgaccttggccttccaaactggggtaagtatgtattgctaagtgtaggtgcc

SEQ ID NO: 31361 - DNA, 80 bp, synthetic construct
  source 1..80: mol_type = other DNA
ctctctccccctgagcccagatactcagacgatctgatatctcagctgtgccagctatacatcgccggggatcaggtctt

SEQ ID NO: 31362 - DNA, 80 bp, synthetic construct
  source 1..80: mol_type = other DNA
caaggaactggtactaaaggctgtggacgggtcgagaggtatttcggatgactccgcgctggggcacggacagaggtcat

SEQ ID NO: 31363 - DNA, 80 bp, synthetic construct
  source 1..80: mol_type = other DNA
agtgcgtcccgtgatagcggactcagcatgagtttattgagaaaagcaatctgccttccatgagggacataagcaatagc

SEQ ID NO: 31364 - DNA, 80 bp, synthetic construct
  source 1..80: mol_type = other DNA
aaccaggttctatgcccgacatatatgttgtcaccggggctgtctagagaagggcttttatatgagttagaaagcatatc

SEQ ID NO: 31365 - DNA, 80 bp, synthetic construct
  source 1..80: mol_type = other DNA
ttatggatggaacatgggtcgcgatgcaaacatcggatgagaccaaatggtgccctcctgaccagttggtgaatattcat

SEQ ID NO: 31366 - DNA, 80 bp, synthetic construct
  source 1..80: mol_type = other DNA
cagagagaaagccaatccccgaaagccaagatggtggctcaagctgcctctggccctccagctcttgactggtctgttac

SEQ ID NO: 31367 - DNA, 80 bp, synthetic construct
  source 1..80: mol_type = other DNA
ttcgtgggagtcatataagagtgggggtgagactaggctgtgaagactggtcgtcctttcgatgcttcaagtcctgaaga

SEQ ID NO: 31368 - DNA, 80 bp, synthetic construct
  source 1..80: mol_type = other DNA
gagactaggctgtgaagactggtcgtcctttcgatgcttcaagtcctgaagatcacctccccttggggttggggggaata

SEQ ID NO: 31369 - DNA, 80 bp, synthetic construct
  source 1..80: mol_type = other DNA
ttaacttggatgatgggaaatcgcccaaccttggtgagatagtcaaggcgggagaaggcaagtatcgagaggactttcaa

SEQ ID NO: 31370 - DNA, 80 bp, synthetic construct
  source 1..80: mol_type = other DNA
ttcatttggatgatggaaaatcgtccaacctcagtgagatggccaaaacgggagagggcaagtatcgagaggactttcag

SEQ ID NO: 31371 - DNA, 80 bp, synthetic construct
  source 1..80: mol_type = other DNA
cttcagggaggtcctcagaggacaaatcaacccaaactactagtcgagaacccaagaaggggacaacatccgctccttcc

SEQ ID NO: 31372 - DNA, 80 bp, synthetic construct
  source 1..80: mol_type = other DNA
ggaggatcctcagatggggattcgacaaatactccaagtggtatctggattcgcgattcctagcccgagatcaccccttg

SEQ ID NO: 31373 - DNA, 80 bp, synthetic construct
  source 1..80: mol_type = other DNA
cctgctaaccgaatttttaaactcggtccccctagataataaaatccgagatgccctagaatagacatgaaaaaaacagg

SEQ ID NO: 31374 - DNA, 80 bp, synthetic construct
  source 1..80: mol_type = other DNA
atcttcatgggtataacagatggatcaccctcgaggatatccgatctagatcatccctactagattacagttgtttgtaa

SEQ ID NO: 31375 - DNA, 80 bp, synthetic construct
  source 1..80: mol_type = other DNA
gtgccggaaatctatagattgtatatatccatcatgaaaaaaactaacactcctcctttaaaaccatcccaaatatgagc

SEQ ID NO: 31376 - DNA, 80 bp, synthetic construct
  source 1..80: mol_type = other DNA
aatccgggaccaaggacaccttgtgacatttttaccaatagcagagggaagagagcatccaaagggaacaagacttgcgg

SEQ ID NO: 31377 - DNA, 80 bp, synthetic construct
  source 1..80: mol_type = other DNA
cccaaggtgggaaggtcatatcttcatgggagtcatataagagtgggggtgagagtagactgtgaaggctggtcatcctt

SEQ ID NO: 31378 - DNA, 80 bp, synthetic construct
  source 1..80: mol_type = other DNA
gagagtagactgtgaaggctggtcatccttttaacgcttcaagtcctgaagatcacctcccctttgggttggggggaatc

SEQ ID NO: 31379 - DNA, 80 bp, synthetic construct
  source 1..80: mol_type = other DNA
gagcaaaatttttgtcaatccgagtgccatcagagccggtctagccgatcttgagatggctgaagagactgttgatctgg

SEQ ID NO: 31380 - DNA, 80 bp, synthetic construct
  source 1..80: mol_type = other DNA
atggatgccgataagattgtattcaaagtcaataatcaggtggtctccttgaagcctgagattatcgtggaccaatatga

SEQ ID NO: 31381 - DNA, 80 bp, synthetic construct
  source 1..80: mol_type = other DNA
atcttcgtgggtacaacaggtggattacccttgaagatgtcagatgtagatcttctctacttgattacagttgcttgtga

SEQ ID NO: 31382 - DNA, 80 bp, synthetic construct
  source 1..80: mol_type = other DNA
agggagaacccatagaggtggacaatctccctgaggacatgaggcggctccatctggacgacgagaagccttctggcctt

SEQ ID NO: 31383 - DNA, 80 bp, synthetic construct
  source 1..80: mol_type = other DNA
tccatctggacgacgagaagccttctggccttggggggatggctaaagcggaggaagtcaagtatcgggaagacttccag

SEQ ID NO: 31384 - DNA, 80 bp, synthetic construct
  source 1..80: mol_type = other DNA
ctagatgatctcaatgctttcccatccctctgtctggtagttggggacggttcaggaggaatctccagggccgtcctcaa

SEQ ID NO: 31385 - DNA, 80 bp, synthetic construct
  source 1..80: mol_type = other DNA
catgtttccggacgctaaacttgtatttaacagcctattggaggtgaatgatttgatggcttccggaacacatccgctgc

SEQ ID NO: 31386 - DNA, 80 bp, synthetic construct
  source 1..80: mol_type = other DNA
accttcatgggtacaacaggtggatcaccctcgaagatatcagatctagatcatccttactagactacagttgcttgtaa

SEQ ID NO: 31387 - DNA, 80 bp, synthetic construct
  source 1..80: mol_type = other DNA
tttcgaaccatcccaaatatgagcaagatctttgtcaatccgagtgcaataagagccggtctggctgatcttgagatggc

SEQ ID NO: 31388 - DNA, 80 bp, synthetic construct
  source 1..80: mol_type = other DNA
gccttgattgccttgatgttgataattttcttaattacatgttgcagaagagtcaatcgaccagagtatgcgcaacgcag

SEQ ID NO: 31389 - DNA, 80 bp, synthetic construct
  source 1..80: mol_type = other DNA
gagaccagactgtgaaagctgacaatcctctcgatgcttcaagtcttgaagataaaaacccccccttggggttgagggga

SEQ ID NO: 31390 - DNA, 80 bp, synthetic construct
  source 1..80: mol_type = other DNA
caagaactgataccaaaggctgtggacaggtcaaggggcatttcggacgaccccgcgcttgagcacggacagaggtcata

SEQ ID NO: 31391 - DNA, 80 bp, synthetic construct
  source 1..80: mol_type = other DNA
caatctcaactcccctttgatagaagaccctgccagactaatgttagaatggttgaaaacagggaatagaccttaccgaa

SEQ ID NO: 31392 - DNA, 80 bp, synthetic construct
  source 1..80: mol_type = other DNA
accttcatgggtacaacaggtggattaccctcgaagatatcagatgtagatcgtctctgcttgatcacagctgtttgtga

SEQ ID NO: 31393 - DNA, 80 bp, synthetic construct
  source 1..80: mol_type = other DNA
gaggtacagggaggaatgtgtcggtcacttcccaaagcgggaaggtgatatcttcatgggagtcatataagagcggtggt

SEQ ID NO: 31394 - DNA, 80 bp, synthetic construct
  source 1..80: mol_type = other DNA
tcatccagggatcgataccaaaggttgtggacaggtcgagggttacctcagatgactccgtgctcgggcatggatggagg

SEQ ID NO: 31395 - DNA, 80 bp, synthetic construct
  source 1..80: mol_type = other DNA
ttatagcgagtcccctgacagcaaactcgacatgagtcaactgagcagggcggtctgcctctcatgaaggacataagcaa

SEQ ID NO: 31396 - DNA, 80 bp, synthetic construct
  source 1..80: mol_type = other DNA
ggttgttctgatgttgacaattttcataatgacatgttgcagaagagtcaatcgaccccagtctacacaacacagtctcg

SEQ ID NO: 31397 - DNA, 80 bp, synthetic construct
  source 1..80: mol_type = other DNA
gagaccagactgtgaagaccggtcaccccttcaaagctctaagctctgaaaatcacctccccgtggggttaggggaaaat

SEQ ID NO: 31398 - DNA, 80 bp, synthetic construct
  source 1..80: mol_type = other DNA
tgatcagacatggtcgtgcagattcttaaaacacaagagatcttctagcagtttcattgaccaacggtgctttcatcatc

SEQ ID NO: 31399 - DNA, 80 bp, synthetic construct
  source 1..80: mol_type = other DNA
aatcctaggctggggacatcttgtgacatctttaccaacagtagagggaagagagcatctaaagggagcaaaacttgcgg

SEQ ID NO: 31400 - DNA, 80 bp, synthetic construct
  source 1..80: mol_type = other DNA
gagaccaaactgtgaagactggtcatcccttccaagctttaagttctgaaaatcacctccccgtggggttagggaaaaaa

SEQ ID NO: 31401 - DNA, 80 bp, synthetic construct
  source 1..80: mol_type = other DNA
atctctgggttcaatagttctccctaaactccgtgtaacagggtagacccaagagtcacgagaccttcattaatcatctc

SEQ ID NO: 31402 - DNA, 80 bp, synthetic construct
  source 1..80: mol_type = other DNA
gctctactctgcaaagcaagagattaataacccatcatggatcctgtgtacgtggacatagacgctgacagcgccttttt

SEQ ID NO: 31403 - DNA, 80 bp, synthetic construct
  source 1..80: mol_type = other DNA
cccgagagactcgccaattatgcgagaaagctagcatctgctgcaggaaaagtcctggacagaaacatctctggaaagat

SEQ ID NO: 31404 - DNA, 80 bp, synthetic construct
  source 1..80: mol_type = other DNA
ctacaatggatgccgacaagattgtattcaaagtcaataatcaggtggtctctttgaagcctgagattatcgtggatcaa

SEQ ID NO: 31405 - DNA, 80 bp, synthetic construct
  source 1..80: mol_type = other DNA
agctgcttgtaaaccggacatccccagaagcctgcacatcctaagacttttgtgtgatgtatcttgaaaaaaacaagatc

SEQ ID NO: 31406 - DNA, 80 bp, synthetic construct
  source 1..80: mol_type = other DNA
gatgtaggtacttaagcttcctaaaagcagccgaactcactttgagaagtaggcatagcataccgaactcttccacgatt

SEQ ID NO: 31407 - DNA, 80 bp, synthetic construct
  source 1..80: mol_type = other DNA
tattggctcaaggagacaaccaggttctgtgtccaacatatatgttatcacctgggctgtctagagaggggctcctatat

SEQ ID NO: 31408 - DNA, 80 bp, synthetic construct
  source 1..80: mol_type = other DNA
ggttgtcctgatgttgacaattttcataatgacatgttgtggaagagtccatcgacccaagtctacacaacgtggtctcg

SEQ ID NO: 31409 - DNA, 80 bp, synthetic construct
  source 1..80: mol_type = other DNA
gtactggctctgcggacgagtctctccacctttcattcggtggagtatctatgtctttcggatcaatttctgacggagaa

SEQ ID NO: 31410 - DNA, 80 bp, synthetic construct
  source 1..80: mol_type = other DNA
gcagctcgctttgcagcgctacaaaccccctcggtaagtacaggctccgcggacgagtccatccaccttccaaccggtgg

SEQ ID NO: 31411 - DNA, 80 bp, synthetic construct
  source 1..80: mol_type = other DNA
agtgtctatgtctttcggatcgttttccgagggtgagatcgaggagctgagccgcagagtaaccgagtcggaacctgtcc

SEQ ID NO: 31412 - DNA, 80 bp, synthetic construct
  source 1..80: mol_type = other DNA
cagcgcagaagatcccgagagacacacgtagcctatcagtttcttactgctctactctgcaaagcaagagattaataacc

SEQ ID NO: 31413 - DNA, 80 bp, synthetic construct
  source 1..80: mol_type = other DNA
gaacaacccctgaataataacaaaatacaaaaaccaataaaaatcataaaatagaaaaccacaaatagaagtagttcaaa

SEQ ID NO: 31414 - DNA, 80 bp, synthetic construct
  source 1..80: mol_type = other DNA
agagattaataacccatcatggatcctgtgtacgtggacatagacgctgacagcgcctttttgaaggccctgcaacgtgc

SEQ ID NO: 31415 - DNA, 80 bp, synthetic construct
  source 1..80: mol_type = other DNA
attttagtatacctgtgggtgcatggccagttatgaatggaggtgccgtttcgttgcatttcgctggtgttacattatct

SEQ ID NO: 31416 - DNA, 80 bp, synthetic construct
  source 1..80: mol_type = other DNA
atctaggcaatgaggggatggctgtgagcaaatcaaaagatccctgctgagctgacactttcagcaaaggtggatgacct

SEQ ID NO: 31417 - DNA, 80 bp, synthetic construct
  source 1..80: mol_type = other DNA
taaaccaaaatcagagtaagaaagtgaagcatttttaagaagggaaaaaaggggccgggcgcggtggctcacgcctgtaa

SEQ ID NO: 31418 - DNA, 80 bp, synthetic construct
  source 1..80: mol_type = other DNA
ctttccaataaagtgggttcaaggaaaggccctcactgagaagctaagacttgaggggctgtctcttatacacatatgac

SEQ ID NO: 31419 - DNA, 80 bp, synthetic construct
  source 1..80: mol_type = other DNA
cagacctgagggcgtcgacaacatggaagtacttccagtcagtccaaagaaaggttaacatgtcttatgacctcatcatt

SEQ ID NO: 31420 - DNA, 80 bp, synthetic construct
  source 1..80: mol_type = other DNA
ccttcaagggtataacaggtggattaccctcgaagacctcagatctagatcttctctactagactacagctgcttataaa

SEQ ID NO: 31421 - DNA, 80 bp, synthetic construct
  source 1..80: mol_type = other DNA
tataaataggtatacgtgtcccctaagagacacattgtatgtaggtgataagtatagatcaaagggccgaacaacccctg

SEQ ID NO: 31422 - DNA, 80 bp, synthetic construct
  source 1..80: mol_type = other DNA
caaccctcgcggtgacggtgtttgcaaggcagtatacaaaaaatggccggagtcctttaagaacagtgcaacaccagtgg

SEQ ID NO: 31423 - DNA, 80 bp, synthetic construct
  source 1..80: mol_type = other DNA
atactgcccgtcccgtcagacctggatgctgacgccccagccctagaaccagcccttgacgacggggcgatacacacgtt

SEQ ID NO: 31424 - DNA, 80 bp, synthetic construct
  source 1..80: mol_type = other DNA
gggcagagctgtgtccagtcgtacaagaaacagcggagacgcgtgacacagctatgtctcttcaggcaccgccgagtacc

SEQ ID NO: 31425 - DNA, 80 bp, synthetic construct
  source 1..80: mol_type = other DNA
aatcggacgacgacattcagaggctactgaaagactctctgcgcagaacgaggtgggtggatcaagaagtgcgccatgca

SEQ ID NO: 31426 - DNA, 80 bp, synthetic construct
  source 1..80: mol_type = other DNA
ctaagaagtttcagaatcctcttatctcaggcttgagagtggttcagtgggcaactggtgcccattataagctcaagccc

SEQ ID NO: 31427 - DNA, 80 bp, synthetic construct
  source 1..80: mol_type = other DNA
attctagatgatctcaatgttttcccatccctatgtctcgtggtcggggatggatcaggaggaatatctagagcagtgct

SEQ ID NO: 31428 - DNA, 80 bp, synthetic construct
  source 1..80: mol_type = other DNA
tcgagctatccaacacctgtcgagggcattcccctcagtcacaggatttataacccagatgacctcgtctttttcatctg

SEQ ID NO: 31429 - DNA, 80 bp, synthetic construct
  source 1..80: mol_type = other DNA
atactatattcaacaaaaccttgatggaggctgatgctcactacaaatcaatccggacgtggaatgaaatcatcccctcc

SEQ ID NO: 31430 - DNA, 80 bp, synthetic construct
  source 1..80: mol_type = other DNA
aactcgcggacaataagaagacagtttagaaaaagtctctcaagaactttagaggagtcattttacaattcggagattca

SEQ ID NO: 31431 - DNA, 80 bp, synthetic construct
  source 1..80: mol_type = other DNA
ctgactggttgtcgctgttgcagcactgatcctaatcgtggtgctatgcgtatcgttcagcaggcactaacttgacaact

SEQ ID NO: 31432 - DNA, 80 bp, synthetic construct
  source 1..80: mol_type = other DNA
gtggtcgtccgggttgtcaatccccttgaggactagaatcaaatggttgttaagcaaggtgccaaaaaccgacctgatcc

SEQ ID NO: 31433 - DNA, 80 bp, synthetic construct
  source 1..80: mol_type = other DNA
gcgcagaagatcccgagagactcgccaattatgcgagaaagctagcatctgctgcaggaaaagtcctggacagaaacatc

SEQ ID NO: 31434 - DNA, 80 bp, synthetic construct
  source 1..80: mol_type = other DNA
acaccagtgggaagcgcaaaaacagtcatgtgcggtacgtatccagtaatccacgccgttggaccgaacttctctaatta

SEQ ID NO: 31435 - DNA, 80 bp, synthetic construct
  source 1..80: mol_type = other DNA
acataacacccatggctagcgtccgattctttagggcagagctgcgtccggtcgtacaagaaacagcggagacgcgtgac

SEQ ID NO: 31436 - DNA, 80 bp, synthetic construct
  source 1..80: mol_type = other DNA
gaaaccagctcaaaagaaaaagaagccgggccgcagagagaggatgtgcatgaaaatcgaaaatgattgtatttttgaag

SEQ ID NO: 31437 - DNA, 80 bp, synthetic construct
  source 1..80: mol_type = other DNA
gaaatgaagcgacagacgggacgctgaaaatccaggtctccttgcaaatcggaataaagacggatgatagccacgattgg

SEQ ID NO: 31438 - DNA, 80 bp, synthetic construct
  source 1..80: mol_type = other DNA
ctccagagactaaagagaggctgtagactatacttaatgtcagagacctcaaaagtccctacttaccggaccacatatcc

SEQ ID NO: 31439 - DNA, 80 bp, synthetic construct
  source 1..80: mol_type = other DNA
ctacaaaaagtggcagtacaactcccctctggtcccgcgtaatgctgaacttggggaccgaaaaggaaaaatccacatcc

SEQ ID NO: 31440 - DNA, 80 bp, synthetic construct
  source 1..80: mol_type = other DNA
aggcaagccgggcaacttgcccagctgatctcagcagttaataaactgacaatgcgcgcggtaccccaacagaagccata

SEQ ID NO: 31441 - DNA, 80 bp, synthetic construct
  source 1..80: mol_type = other DNA
agatgcgctacttggatgaacatggaagtgaagatcatagatgcagttgtatccttgaaagccccttacttttgtggagg

SEQ ID NO: 31442 - DNA, 80 bp, synthetic construct
  source 1..80: mol_type = other DNA
cgggcaacttgcccagctgatctcagcagttaataaactgacaatgcgcgcggtaccccaacagaagccacgcaggaatc

SEQ ID NO: 31443 - DNA, 80 bp, synthetic construct
  source 1..80: mol_type = other DNA
aaagcagccgaactcgctttgagatgtaggcgtagcacaccgaactcttccataattctccgaacccacagggacgtagg

SEQ ID NO: 31444 - DNA, 80 bp, synthetic construct
  source 1..80: mol_type = other DNA
atggcagccagatgcgctacttggatgaacatggaagtgaagatcatagatgcagttgtatccttgaaagccccttactt

SEQ ID NO: 31445 - DNA, 80 bp, synthetic construct
  source 1..80: mol_type = other DNA
tgaatagtaacaaaatacaaaatcactaaaaattataaaaacagaaaaatacataaataggtatacgtgtcccctaagag

SEQ ID NO: 31446 - DNA, 80 bp, synthetic construct
  source 1..80: mol_type = other DNA
gtataagactctagtcaatagaccgggctacagtcccatggtattggagatggaactactgtcagtcactttggagccaa

SEQ ID NO: 31447 - DNA, 80 bp, synthetic construct
  source 1..80: mol_type = other DNA
cgccataaacagaagtagttcaaagggctatacaacccctgaatagtaacaaaacacaaaactaataaaaattaaatgaa

SEQ ID NO: 31448 - DNA, 80 bp, synthetic construct
  source 1..80: mol_type = other DNA
taatcggcagtgcaccagcaaggaggatgatgtcggacaggaagtaccactgcgtctgcccgatgcgcagcgcagaagat

SEQ ID NO: 31449 - DNA, 80 bp, synthetic construct
  source 1..80: mol_type = other DNA
gaccatctagcgacctccacttgacggcgtagtacacactattgaatcaaacagccgaccaattgcactaccatcacaat

SEQ ID NO: 31450 - DNA, 80 bp, synthetic construct
  source 1..80: mol_type = other DNA
agcggacgccgtggaggtcgctagatggtcaggaagcatggtgcataatgctatgcagcgtctgcataactttttattat

SEQ ID NO: 31451 - DNA, 80 bp, synthetic construct
  source 1..80: mol_type = other DNA
caagggtacaacaggtggatcacccttgaggacatcagatccagatcttctctactggactatagctgcttataaactga

SEQ ID NO: 31452 - DNA, 80 bp, synthetic construct
  source 1..80: mol_type = other DNA
ctgacatcgctttagctgatgacggaacagtcaattctgatgacgaggattacttctcaggtgaaaccaggagtcctgaa

SEQ ID NO: 31453 - DNA, 80 bp, synthetic construct
  source 1..80: mol_type = other DNA
ctccgcctgggaggtcttcagaggacaagtctactcaaactgccaaccgagaacctaagaaagagacaacatccatgtca

SEQ ID NO: 31454 - DNA, 80 bp, synthetic construct
  source 1..80: mol_type = other DNA
tctcaaaaagagagtcaaccttcaaaagccagaatggcggctcagactgcctctggaccgccagctctcgactggtctgc

SEQ ID NO: 31455 - DNA, 80 bp, synthetic construct
  source 1..80: mol_type = other DNA
ccaaggagtcccttgttataatatccccgagcgtggcggatttggacccttacgataaatcccttcactcgagagttttt

SEQ ID NO: 31456 - DNA, 80 bp, synthetic construct
  source 1..80: mol_type = other DNA
cccggtggaaagtgctcgggaataactgtatcttctacttactgctctaccaaccatgattacaccatctggctgcctga

SEQ ID NO: 31457 - DNA, 80 bp, synthetic construct
  source 1..80: mol_type = other DNA
cttgaaggggtggggaggaaagtgtctgtcacttcccagaacgggaaggtcatatcttcctgggagtcatataaaagctc

SEQ ID NO: 31458 - DNA, 80 bp, synthetic construct
  source 1..80: mol_type = other DNA
aggtgagaccaggctgtgatagcaggtcatctcttctatacttcaagtccggaggatcgccgccttttggggttagaggg

SEQ ID NO: 31459 - DNA, 80 bp, synthetic construct
  source 1..80: mol_type = other DNA
tccagactcaagagtcctccttgggctccttgcaacagggtagattcaagagtcacgagactttcatcaatcatctcaat

SEQ ID NO: 31460 - DNA, 80 bp, synthetic construct
  source 1..80: mol_type = other DNA
gagggatctgacctcagtggatatagggagagacttggttaagttcaaggatcagatatgggggctattgatcgtgacaa

SEQ ID NO: 31461 - DNA, 80 bp, synthetic construct
  source 1..80: mol_type = other DNA
tttgagattatattttgtcatcacagaaaagctcctggcaaattatatcttgccattgtttgatgcactgactatgaccg

SEQ ID NO: 31462 - DNA, 80 bp, synthetic construct
  source 1..80: mol_type = other DNA
gccagggtctcttgcatctctaatgaccaaatagtaaacctcgctaatataatgtcaacagtctctaccaatgctttaac

SEQ ID NO: 31463 - DNA, 80 bp, synthetic construct
  source 1..80: mol_type = other DNA
gatgcaacagatgtatcaggcctatagatgatattacattggagacctcccagattttcgagtttcctgatgtgtcaaaa

SEQ ID NO: 31464 - DNA, 80 bp, synthetic construct
  source 1..80: mol_type = other DNA
ccatgagaaaccagaggggtactacaactggcaccacggagcagtacagtactcaggaggccggttcaccatccccacag

SEQ ID NO: 31465 - DNA, 80 bp, synthetic construct
  source 1..80: mol_type = other DNA
agaacgcatcagaaatgaagcgacagacgggacgctgaaaatccaggtctccttgcaaatcggaataaagacggatgata

SEQ ID NO: 31466 - DNA, 80 bp, synthetic construct
  source 1..80: mol_type = other DNA
ctcaaaagaaaaagaagccgggccgcagagagaggatgtgcatgaaaatcgaaaatgattgtatttttgaagtcaagtat

SEQ ID NO: 31467 - DNA, 80 bp, synthetic construct
  source 1..80: mol_type = other DNA
ctacaggtgctggcaaaccaggggacagcggcagaccgatcttcgacaacaagggacgcgtggtggccatagtcttagga

SEQ ID NO: 31468 - DNA, 80 bp, synthetic construct
  source 1..80: mol_type = other DNA
tcttaccaggagaagtggatgacttgacagacagcgactggtccacgtgctcagacacggacgacgagttatgactagac

SEQ ID NO: 31469 - DNA, 80 bp, synthetic construct
  source 1..80: mol_type = other DNA
aaattttaaacctaaactttgatctagacatgtagacctctttttcctttatttgtagacgcgacgcttgaccagggata

SEQ ID NO: 31470 - DNA, 80 bp, synthetic construct
  source 1..80: mol_type = other DNA
cctctttttcctttatttgtagacgcgacgcttgaccagggataagtatttggattgaccaaccaaagtaataaaaaccc

SEQ ID NO: 31471 - DNA, 80 bp, synthetic construct
  source 1..80: mol_type = other DNA
ggatgaaggtggacgactggagagaggcatattataaagagcgatttccaaagagaatgacagcaacgactatggcatct

SEQ ID NO: 31472 - DNA, 80 bp, synthetic construct
  source 1..80: mol_type = other DNA
attttgaaattgaaaatctgcaactgaggaataaagcctgggctgaaggtgcagatcgcaaattcagattgttgtctagt

SEQ ID NO: 31473 - DNA, 80 bp, synthetic construct
  source 1..80: mol_type = other DNA
gaaataaagatgggcatactattctagttccaaagacgagaaatgctgaaatactcctagttaactctacatcagattta

SEQ ID NO: 31474 - DNA, 80 bp, synthetic construct
  source 1..80: mol_type = other DNA
caaacttctaaaccaactgcaattttatgtgaagctttggaaaacatgactgagaaaatgaaattggtcgaaagagaaaa

SEQ ID NO: 31475 - DNA, 80 bp, synthetic construct
  source 1..80: mol_type = other DNA
aataaaatgtttctcgagtgtagcagaattaatcagaggttaaaaaaacagattcagatgtgtgaggaagaagctactga

SEQ ID NO: 31476 - DNA, 80 bp, synthetic construct
  source 1..80: mol_type = other DNA
aaaagaacaaattgactctataggaaaagaactggatcacagcaatagaattatacgaggactggccaatagagctggac

SEQ ID NO: 31477 - DNA, 80 bp, synthetic construct
  source 1..80: mol_type = other DNA
tgaagtagattcaggtaatgagacgtctgaccagtcagatgaatctgatcatgatgatcatgaaaatagtgaatcagatt

SEQ ID NO: 31478 - DNA, 80 bp, synthetic construct
  source 1..80: mol_type = other DNA
ggggaggacgaacagattcctagaggaggcgaaaatcctagaagacaggccagaatgttagaaatgagagaagaaatgga

SEQ ID NO: 31479 - DNA, 80 bp, synthetic construct
  source 1..80: mol_type = other DNA
acccctgaataacaaaatataaaaatcaacaaaaatcataaaatagaaaactagaaatagaagtaggtaagaaggtatat

SEQ ID NO: 31480 - DNA, 80 bp, synthetic construct
  source 1..80: mol_type = other DNA
gtatatgtgtcccctaagagacacaccatatatagctaagaatcaaacgaataccataattggcaaatggaagagacgta

SEQ ID NO: 31481 - DNA, 80 bp, synthetic construct
  source 1..80: mol_type = other DNA
aaatctcttgggggaggaaagtagtgggtacaacagttccccatccttccgagatgttgggactagttcctaaatcctct

SEQ ID NO: 31482 - DNA, 80 bp, synthetic construct
  source 1..80: mol_type = other DNA
ggtgtagatcgtctcttcttgattacagctgtctgtgaactggacactctcagaggcttgtacaagatcagacgtttata

SEQ ID NO: 31483 - DNA, 80 bp, synthetic construct
  source 1..80: mol_type = other DNA
gtgaactggacactctcagaggcttgtacaagatcagacgtttatacgacataccttgaaaaaaacaagatcttggctct

SEQ ID NO: 31484 - DNA, 80 bp, synthetic construct
  source 1..80: mol_type = other DNA
cagggatcgataccaaaggttgtggacaggttgagggttacctcatatgactccgtgttcgggcacagacagaggttata

SEQ ID NO: 31485 - DNA, 80 bp, synthetic construct
  source 1..80: mol_type = other DNA
aaatccgcgtgcgcggccttcatcggcgacgacaacataatacatggagtcgtctccgatgaattgatggcagacagatg

SEQ ID NO: 31486 - DNA, 80 bp, synthetic construct
  source 1..80: mol_type = other DNA
ccgggtcccggaaacatattgatcgcatatatccgtcatgaaaaaaactaacacccctcctttcgaaccatctcaaatat

SEQ ID NO: 31487 - DNA, 80 bp, synthetic construct
  source 1..80: mol_type = other DNA
aatccgaggctagggacgtcctgtgacatttttatcaatagcagagggaagagagcatccaaagggagcaagacttgcgg

SEQ ID NO: 31488 - DNA, 80 bp, synthetic construct
  source 1..80: mol_type = other DNA
ctttgtagatgaaagaggcctgtataagtctctaaagggagcatgtaaactcaagttatgtggagtcctcggacttagac

SEQ ID NO: 31489 - DNA, 80 bp, synthetic construct
  source 1..80: mol_type = other DNA
gaggaacagggaggaaggtgtctgtcacttcccaaagcgggaaggttatatcttcatgggagtcatacaaaagtggaggc

SEQ ID NO: 31490 - DNA, 80 bp, synthetic construct
  source 1..80: mol_type = other DNA
cataatcattttgcatctccgtaaagtgtacataattataaagggctgggtcatccaagcatttcagtcaagaaaaaaac

SEQ ID NO: 31491 - DNA, 80 bp, synthetic construct
  source 1..80: mol_type = other DNA
tgttctctcgatttctcagtgagctcttcagatcatcttttttgggaatccccgagtcgatcatcggactgatacaaaat

SEQ ID NO: 31492 - DNA, 80 bp, synthetic construct
  source 1..80: mol_type = other DNA
ggggaactctgtccaaagtggctatcattatatccatcatgatcgttttttccaatagagctttcagtgtttccaaaccc

SEQ ID NO: 31493 - DNA, 80 bp, synthetic construct
  source 1..80: mol_type = other DNA
acctccatagctacaacagatggatcactctcgaggatatcagatctagatcatccctcctagactacagttgcttgtaa

SEQ ID NO: 31494 - DNA, 80 bp, synthetic construct
  source 1..80: mol_type = other DNA
ccgggtaccgggaacatattaattgcgtatatccgtcatgaaaaaaactaacacccctcctttcgaaccatcccaaggat

SEQ ID NO: 31495 - DNA, 80 bp, synthetic construct
  source 1..80: mol_type = other DNA
tcataagagacaaggtgaatcaacttgaggggaccttcggtcccagtgcaaaaaggttttttgtgattctagatcagttt

SEQ ID NO: 31496 - DNA, 80 bp, synthetic construct
  source 1..80: mol_type = other DNA
gagactagactgtgacaactggtcattccttcgactcttaaagtcccaaagatcgcctccccttggtggttgaggagaac

SEQ ID NO: 31497 - DNA, 80 bp, synthetic construct
  source 1..80: mol_type = other DNA
gtgggcggaactgctgcacaatcaatgatctctctctggctacatggtgctcactcggaatcaaatagaagccggagatg

SEQ ID NO: 31498 - DNA, 80 bp, synthetic construct
  source 1..80: mol_type = other DNA
ctagcgacctccacacacgtagcctaccagtttcttactgctctactctgcaaagcaagagattaagaacccatcatgga

SEQ ID NO: 31499 - DNA, 80 bp, synthetic construct
  source 1..80: mol_type = other DNA
tatgtggggcggagcctactgcttctgcgacgctgaaaacacgcaattgagcgaagcacacgtggagaagtccgagtcat

SEQ ID NO: 31500 - DNA, 80 bp, synthetic construct
  source 1..80: mol_type = other DNA
gaccatgccgtcacagttaaggacgccaaattcattgtggggccaatgtcttcagcctggacacctttcgacaacaaaat

SEQ ID NO: 31501 - DNA, 80 bp, synthetic construct
  source 1..80: mol_type = other DNA
aggggcgtcgctgcagcacacagcaccatttggctgccaaatagcaacaaacccggtaagagcggtgaattgcgccgtag

SEQ ID NO: 31502 - DNA, 80 bp, synthetic construct
  source 1..80: mol_type = other DNA
gatttcgggggcgtcgccattattaaatatgcagccagcaagaaaggcaagtgtgcggtgcattcgatgaccaacgccgt

SEQ ID NO: 31503 - DNA, 80 bp, synthetic construct
  source 1..80: mol_type = other DNA
ccggcgtcacataccaccctcggggtccaggacatttccgctacggcgctgtcatgggtgcagaagatcacgggaggcgt

SEQ ID NO: 31504 - DNA, 80 bp, synthetic construct
  source 1..80: mol_type = other DNA
gaagctgttggtggggctgaaccagagaatagtggttaacggcagaacgcaacggaatacgaacaccatgaaaaactatc

SEQ ID NO: 31505 - DNA, 80 bp, synthetic construct
  source 1..80: mol_type = other DNA
tgaaaatcaataaaaatcataagatagaaaaaccataaacagaagtagttcaaagggctatgcaacccctgaatagtaac

SEQ ID NO: 31506 - DNA, 80 bp, synthetic construct
  source 1..80: mol_type = other DNA
actcctgggggtcagagaaagaacactgacctgctgctgtctatgggcattcaagaagcagaaaacacacacggtttaca

SEQ ID NO: 31507 - DNA, 80 bp, synthetic construct
  source 1..80: mol_type = other DNA
atagcggggacgcccaagaagcccgggacgcagaaaaagaagcagaggaagaacgagaagcagaactgactcgtgaagcc

SEQ ID NO: 31508 - DNA, 80 bp, synthetic construct
  source 1..80: mol_type = other DNA
aaacagcggggataaaactaaatgataggcagtggtcccagataattcaagccttcaaagaagataaagcatactcacct

SEQ ID NO: 31509 - DNA, 80 bp, synthetic construct
  source 1..80: mol_type = other DNA
atgtatggggtggatttagacagtgggctattttctaaaccattggtgtctgtgtattacgcggataaccactgggataa

SEQ ID NO: 31510 - DNA, 80 bp, synthetic construct
  source 1..80: mol_type = other DNA
ggaaagaatggaatggctggttaataagataaacggccaccacgtgctcctggtcagtggctataatcttgtactgccta

SEQ ID NO: 31511 - DNA, 80 bp, synthetic construct
  source 1..80: mol_type = other DNA
tcgggggtgactcattgagactgctcaaaccgggtggctctctattgatcagagcatatggttacgcagatagaaccagt

SEQ ID NO: 31512 - DNA, 80 bp, synthetic construct
  source 1..80: mol_type = other DNA
cggggacttacaagcagtaatggccgtgccagacacggagacgccaacattctgcttgcacacagatgtctcatgtagac

SEQ ID NO: 31513 - DNA, 80 bp, synthetic construct
  source 1..80: mol_type = other DNA
ttggaatctgaaggggaccgggaattggcagctgcctatcgagaagtcgcaaaggaagtaactagactgggagtaaatag

SEQ ID NO: 31514 - DNA, 80 bp, synthetic construct
  source 1..80: mol_type = other DNA
tgccctgggggaaagtattgaatcgatcaggcagaaatgcccggtggatgatgcagatgcatcgtctcctccaaaaactg

SEQ ID NO: 31515 - DNA, 80 bp, synthetic construct
  source 1..80: mol_type = other DNA
ctagaaccagctctagacgacagggcgacacacacgttgccatccacaaccggaaaccttgcggtcgtgtctgactgggt

SEQ ID NO: 31516 - DNA, 80 bp, synthetic construct
  source 1..80: mol_type = other DNA
gacgttccccattacatttggggacttcaacgaaggagaaatcgaaagcttgtcttctgagctgctaactttcggagact

SEQ ID NO: 31517 - DNA, 80 bp, synthetic construct
  source 1..80: mol_type = other DNA
gattaaaggggtccgagtggcgtactgggtagggttcgacacaaccccgttcatgtacaatgccatggcgggtgcctacc

SEQ ID NO: 31518 - DNA, 80 bp, synthetic construct
  source 1..80: mol_type = other DNA
cagaagcgctgtaccgtccccattccagaacacactacagaatgtactggcagcagccacgaaaagaaactgcaacgtca

SEQ ID NO: 31519 - DNA, 80 bp, synthetic construct
  source 1..80: mol_type = other DNA
taaaagggccaaaagcagcagcgctatttgcaaaaacccacaatctgctgccactgcaggaagtaccaatggataggttc

SEQ ID NO: 31520 - DNA, 80 bp, synthetic construct
  source 1..80: mol_type = other DNA
tttaggggtggatcactccctgttggacttgatagaggccgcttttggagagatttccagctgtcatctaccgacaggta

SEQ ID NO: 31521 - DNA, 80 bp, synthetic construct
  source 1..80: mol_type = other DNA
gcggcaggtgacgaacaagatgaagatagaagacgagcgctggctgacgaagtgatcagatggcaacgaacagggctaat

SEQ ID NO: 31522 - DNA, 80 bp, synthetic construct
  source 1..80: mol_type = other DNA
gtgggggacaaagtaatgaaaccagcacacgtaaaggggaccatcgataacgcggacctggccaaactggcctttaagcg

SEQ ID NO: 31523 - DNA, 80 bp, synthetic construct
  source 1..80: mol_type = other DNA
cagaggggtactacaactggcaccacggagcagtacagtactcaggaggccggttcaccatccccacaggtgctggcaaa

SEQ ID NO: 31524 - DNA, 80 bp, synthetic construct
  source 1..80: mol_type = other DNA
ccaggggacagcggcagaccgatcttcgacaacaagggacgcgtggtggccatagtcttaggaggagctaatgaaggagc

SEQ ID NO: 31525 - DNA, 80 bp, synthetic construct
  source 1..80: mol_type = other DNA
cagcccccttgcattccctgctgctatgaaagggaaccagaggaaaccctacgcatgcttgaggacaacgtcatgagacc

SEQ ID NO: 31526 - DNA, 80 bp, synthetic construct
  source 1..80: mol_type = other DNA
accaagctgcgttacatggacaaccacacgccagcggacgcagagagggcggggctatttgtaagaacatcagcaccgtg

SEQ ID NO: 31527 - DNA, 80 bp, synthetic construct
  source 1..80: mol_type = other DNA
ggaacaatgggacacttcatcctgacccgatgtccgaaaggggaaactctgacggtgggattcactgacagtaggaagat

SEQ ID NO: 31528 - DNA, 80 bp, synthetic construct
  source 1..80: mol_type = other DNA
ttggggaccgaaaaggaaaaatccacatcccgtttccgctggcaaatgtaacatgcagggtgcctaaagcaaggaacccc

SEQ ID NO: 31529 - DNA, 80 bp, synthetic construct
  source 1..80: mol_type = other DNA
tcacgtggggtaacaacgagccgtataagtattggccgcagttatctacaaacggtacagcccatggccacccgcatgag

SEQ ID NO: 31530 - DNA, 80 bp, synthetic construct
  source 1..80: mol_type = other DNA
gcagtggggatgtgcatgtgtgcacgacgcagatgcatcacaccgtacgaactgacaccaggagctaccgtccctttcct

SEQ ID NO: 31531 - DNA, 80 bp, synthetic construct
  source 1..80: mol_type = other DNA
atgatctgatggcttcagggacacatccattacccccttcagcgatcatgagcggaggagatgacatcatctccagggta

SEQ ID NO: 31532 - DNA, 80 bp, synthetic construct
  source 1..80: mol_type = other DNA
ctccagggaggtcttcagaggataaatcaactcaaactactagccgagaaccaaagaaggatacaaaatctgcctcttct

SEQ ID NO: 31533 - DNA, 80 bp, synthetic construct
  source 1..80: mol_type = other DNA
cagcgagcaagtcaaccatcaaaagttaaaatggcagcccaaactgcctctggtcctcctgctttagagtggtctgtcgc

SEQ ID NO: 31534 - DNA, 80 bp, synthetic construct
  source 1..80: mol_type = other DNA
cagatgttcacaaacagatctcaggggttgaccttggtctcccgagttggaggaagtatgcattaatgagtataggggcc

SEQ ID NO: 31535 - DNA, 80 bp, synthetic construct
  source 1..80: mol_type = other DNA
gagactagactgtgacaactggtcatccctttgactcttaaagatcgaaagattgcctccccttgggggatgaggaggat

SEQ ID NO: 31536 - DNA, 80 bp, synthetic construct
  source 1..80: mol_type = other DNA
ttgatcagacatagttgtgtagattctcataagacaggaaatcttttgatagtatcattgactaatggtgctctcatccc

SEQ ID NO: 31537 - DNA, 80 bp, synthetic construct
  source 1..80: mol_type = other DNA
ccaaggactgataccaaaggttgtagacaggccaaggtgtgtctcggatgactttgtgcttgggcatggaacagaggtca

SEQ ID NO: 31538 - DNA, 80 bp, synthetic construct
  source 1..80: mol_type = other DNA
cagtgctctatctggcagcggattcaacatgagttagttgagaaagacaatttacctcctatgaaggacacaagcaatag

SEQ ID NO: 31539 - DNA, 80 bp, synthetic construct
  source 1..80: mol_type = other DNA
gtcacaatcatcctacatcttgacaagacatatacaattacagagggctgggtcatctaagcttttcagtcgagaaaaaa

SEQ ID NO: 31540 - DNA, 80 bp, synthetic construct
  source 1..80: mol_type = other DNA
caatctcaactctcctctaatagaggactcagcccagttgatgttggaatggttaaagacagggaataagcctcttcgga

SEQ ID NO: 31541 - DNA, 80 bp, synthetic construct
  source 1..80: mol_type = other DNA
gctcaggattggtgtcatattcagggtttataaagcagataaatcttactgcgagggaagcactattatatttcttccac

SEQ ID NO: 31542 - DNA, 80 bp, synthetic construct
  source 1..80: mol_type = other DNA
agaataatctatctagatccttctctgggaggagtgtctgggatgtctctcggaagattccatatacgtcagttctcaga

SEQ ID NO: 31543 - DNA, 80 bp, synthetic construct
  source 1..80: mol_type = other DNA
gcggaactatgattttatgttccaaccactaatgctttatgcacagacatggacatcagagctggtgcagagagacacaa

SEQ ID NO: 31544 - DNA, 80 bp, synthetic construct
  source 1..80: mol_type = other DNA
ggcagcatcgaggacttatctggagaggtagagaggcaccttcatgggtataacaggtggatcacactcaaggatatcag

SEQ ID NO: 31545 - DNA, 80 bp, synthetic construct
  source 1..80: mol_type = other DNA
cgggaactgataccaaaggttgtagaccggccaaggtgtgtttcagatgacttcttgcttgggcatgagcagaggtcata

SEQ ID NO: 31546 - DNA, 80 bp, synthetic construct
  source 1..80: mol_type = other DNA
gaccccgttgatccaattgaatcagaggctgaacccagaggagcatccactatccccaacatcctgaggaactctgacta

SEQ ID NO: 31547 - DNA, 80 bp, synthetic construct
  source 1..80: mol_type = other DNA
caccggggctgtctcgagagggactcctctatgagctagagagcatatcaaggaacgcactttcaatataccgagctatc

SEQ ID NO: 31548 - DNA, 80 bp, synthetic construct
  source 1..80: mol_type = other DNA
agactaccagacttgttggcagcatcgaggatctatcaggagaggtagaaaggcatcttcgtgggtataacaggtggatc

SEQ ID NO: 31549 - DNA, 80 bp, synthetic construct
  source 1..80: mol_type = other DNA
atcttcgtgggtataacaggtggatcacactcgaggatatcagatctagatcatccctcctagactacagttgcttgtga

SEQ ID NO: 31550 - DNA, 80 bp, synthetic construct
  source 1..80: mol_type = other DNA
actcataagcagttgaatatcaggacgccggagattgatagagtgtttatatccatcatgaaaaaaactaacacccctcc

SEQ ID NO: 31551 - DNA, 80 bp, synthetic construct
  source 1..80: mol_type = other DNA
tttcgaaccatcccagacatgagcaagatttttgtcaatccgagtgctatcagagccggtctggccgatctagaaatggc

SEQ ID NO: 31552 - DNA, 80 bp, synthetic construct
  source 1..80: mol_type = other DNA
ccccgctatcagagattcgaaaaagccctgtataattctggggaaagcccctgacttaaacaaagcatacaagtcagtct

SEQ ID NO: 31553 - DNA, 80 bp, synthetic construct
  source 1..80: mol_type = other DNA
agacagctccgcttggacgatggaaaatcgtctgaccttggtgagatagccaaggtgggggaaggcaagtatagagagga

SEQ ID NO: 31554 - DNA, 80 bp, synthetic construct
  source 1..80: mol_type = other DNA
ctccagggaggtcttcagaggacaaatcaactcaaactactagcagagagccaaagaaggagacaacatctactccttct

SEQ ID NO: 31555 - DNA, 80 bp, synthetic construct
  source 1..80: mol_type = other DNA
tatctggcatgaatgccgccaaacttgatcctgatgatgtatgttcctacctggcagccgcaatgcagttctttgaggga

SEQ ID NO: 31556 - DNA, 80 bp, synthetic construct
  source 1..80: mol_type = other DNA
cttgctaattgaatttttggattcaatccctagaaataagaaaatccgagatgtcctgaagtcgatatgaaaaaaacagg

SEQ ID NO: 31557 - DNA, 80 bp, synthetic construct
  source 1..80: mol_type = other DNA
catgccatggtgccattaaatcgctgcactctattaaagtcaggttgattacctttacattttgagcctcttagatgtga

SEQ ID NO: 31558 - DNA, 80 bp, synthetic construct
  source 1..80: mol_type = other DNA
tctctagagaaaagtgcctaggaatgacagtgtcttctacctactgctcaaccaaccatgattacaccatttggatgccc

SEQ ID NO: 31559 - DNA, 80 bp, synthetic construct
  source 1..80: mol_type = other DNA
gagaaccccagactggggacatcgtgtgacatttttaccaacagtaaagggaagagagcatctagagggagcaagacttg

SEQ ID NO: 31560 - DNA, 80 bp, synthetic construct
  source 1..80: mol_type = other DNA
ttgtggatggaacctggatcgcaatgcaagcatcagatgaggccaaatggtgcccttctgatcagttagttaatctgcac

SEQ ID NO: 31561 - DNA, 80 bp, synthetic construct
  source 1..80: mol_type = other DNA
ctgatatacacagacaggtctcaggggttgacttgggtcttcccaactgggggaagtatgcattaatgattatagaggcc

SEQ ID NO: 31562 - DNA, 80 bp, synthetic construct
  source 1..80: mol_type = other DNA
ctgattgccctaatgttgataatctccctaataacctgttgtagaggagtcaatcgaccagaatctatgaaacatgatct

SEQ ID NO: 31563 - DNA, 80 bp, synthetic construct
  source 1..80: mol_type = other DNA
tgaagggacaggaaagaaggtgtcggttacttcccaaagcgggaaggtcatatcctcatgggagtcatataaaagtggag

SEQ ID NO: 31564 - DNA, 80 bp, synthetic construct
  source 1..80: mol_type = other DNA
gagactagactgtgacgactggtctttcctttgactcttaaagtcctgaagatcgcctccccttgggggttgaggaggat

SEQ ID NO: 31565 - DNA, 80 bp, synthetic construct
  source 1..80: mol_type = other DNA
ctctaggttcaatgggcctccttgaacttcatataacagagtagattcaaaagtcatgagaatttcattaatcatcttag

SEQ ID NO: 31566 - DNA, 80 bp, synthetic construct
  source 1..80: mol_type = other DNA
ttgatccgacatagtagtgtagactctcataagacaggaaatcttctaatagtctcagtgaccgacggtgctttcattct

SEQ ID NO: 31567 - DNA, 80 bp, synthetic construct
  source 1..80: mol_type = other DNA
ccgggaactgataccaaaggttgtatacaggccaaggtgtgtgtcagatgactttgtgctcgggcatgaacagaggtcat

SEQ ID NO: 31568 - DNA, 80 bp, synthetic construct
  source 1..80: mol_type = other DNA
agtgctctatctgacagcggattcaacatgagttagtcgagaaaggtgatctgcctcccatgaagaacacaagcaatagc

SEQ ID NO: 31569 - DNA, 80 bp, synthetic construct
  source 1..80: mol_type = other DNA
tcataatcatcttgcatctcagcaacgtgcacatcacgacaaagggctgggtcatctaagcttttcagttgagaaaaaaa

SEQ ID NO: 31570 - DNA, 80 bp, synthetic construct
  source 1..80: mol_type = other DNA
tggaggccaacagggcaaccagcaacacttctcatcttgagaccgaagtcaagatgctagattcaggagaggtctatgat

SEQ ID NO: 31571 - DNA, 80 bp, synthetic construct
  source 1..80: mol_type = other DNA
cattgcagacttggcccatttctactccaagtcatcccctatagagaggctgttaaattgcacgttgggaaatagagggc

SEQ ID NO: 31572 - DNA, 80 bp, synthetic construct
  source 1..80: mol_type = other DNA
tgaagattccccctgagggggtgttaagctgccttgagagggttgattatgacaaggcatttgggaggtatctggctaac

SEQ ID NO: 31573 - DNA, 80 bp, synthetic construct
  source 1..80: mol_type = other DNA
tctcgggtggacagggaggagggtgtcgacaacttcccagagcgggaaggttatatcttcgtgggagtcatataagagtg

SEQ ID NO: 31574 - DNA, 80 bp, synthetic construct
  source 1..80: mol_type = other DNA
gttatatcttcgtgggagtcatataagagtgggggtgagactagactgtgagggctggtcatcctttcgacgcttcaggt

SEQ ID NO: 31575 - DNA, 80 bp, synthetic construct
  source 1..80: mol_type = other DNA
cagtgtactagagatctgtcgattgtgtatatccattatgaaaaaactaacacccctcctttcgaaccatcccaaatatg

SEQ ID NO: 31576 - DNA, 80 bp, synthetic construct
  source 1..80: mol_type = other DNA
ggtcctcttgaaggggaggagttggaatattcacaggagatcacttgggatgatgatactgagttcgtcggattgcaagt

SEQ ID NO: 31577 - DNA, 80 bp, synthetic construct
  source 1..80: mol_type = other DNA
ctgatgtgcacaaacaggtctcaggggttgacctgggcatcccaaactggaggaagtacgcattactgagtgcagggtcc

SEQ ID NO: 31578 - DNA, 80 bp, synthetic construct
  source 1..80: mol_type = other DNA
tgcttgtaaaccggatattcccggaagtccgcacaagctaatactcttgtgtgatgtgtcttgaaaaaaacaagatcttg

SEQ ID NO: 31579 - DNA, 80 bp, synthetic construct
  source 1..80: mol_type = other DNA
caacttcacctggatgatggaaagtcgtccaaccttggtgagatggccaaagtaggagaaggcaagtatcgagaggactt

SEQ ID NO: 31580 - DNA, 80 bp, synthetic construct
  source 1..80: mol_type = other DNA
gagactagactgtgaaggctggtcatcctttcgacgcttcaagttccgaagatcaccttccctttgggtttttgagggga

SEQ ID NO: 31581 - DNA, 80 bp, synthetic construct
  source 1..80: mol_type = other DNA
ttctctgggttcgatagtcctccttgaactccatgcaacaggttagattcaggggtcataagactttcattactcatctc

SEQ ID NO: 31582 - DNA, 80 bp, synthetic construct
  source 1..80: mol_type = other DNA
gtacgtcccctgatagcgggctcgacataagtcgattgagaaaagcaatctgcctcccatgaaggacataagcaatagct

SEQ ID NO: 31583 - DNA, 80 bp, synthetic construct
  source 1..80: mol_type = other DNA
gtgtaacaggtgtgtaaggcccattgacgatataacacttgagacttctcagatcttcgagttcccagatgtgtcaaaga

SEQ ID NO: 31584 - DNA, 80 bp, synthetic construct
  source 1..80: mol_type = other DNA
gaaagttcttccgagatgcagaacatctgacttcctctgctcttagagagatgagccttgtattgttcaactgtagcagt

SEQ ID NO: 31585 - DNA, 80 bp, synthetic construct
  source 1..80: mol_type = other DNA
tggggggacaggaaagaaggtatcggtaactccccaaaccagaaaggtcatatcctcatgggagtcatacaaaagtggag

SEQ ID NO: 31586 - DNA, 80 bp, synthetic construct
  source 1..80: mol_type = other DNA
cccaaaccagaaaggtcatatcctcatgggagtcatacaaaagtggaggtgagactagactgtgacgactggtcattcct

SEQ ID NO: 31587 - DNA, 80 bp, synthetic construct
  source 1..80: mol_type = other DNA
gtgagactagactgtgacgactggtcattccttcgactattaaagtcctgaaaatcgcctcccttttggggttgaggagg

SEQ ID NO: 31588 - DNA, 80 bp, synthetic construct
  source 1..80: mol_type = other DNA
aagaaggtcatattcagggcaggagactgctgttcctcattcctatttcatccattttcgttcgttgggcttgagtggga

SEQ ID NO: 31589 - DNA, 80 bp, synthetic construct
  source 1..80: mol_type = other DNA
agaatttctagaatggtttctggagccgtgcctcatttccgaaaactccctgacatccgtttgaaaccaggtgattttga

SEQ ID NO: 31590 - DNA, 80 bp, synthetic construct
  source 1..80: mol_type = other DNA
aatctccatactcatccaatgcagttggtcacgtgttcaacctcattcactttgttggatgttatatgggtcaggtgaga

SEQ ID NO: 31591 - DNA, 80 bp, synthetic construct
  source 1..80: mol_type = other DNA
cagccgaactcactttgagaagtaggcatagcataccgaactcttccacgattctccgaacccacagggacgtaggagat

SEQ ID NO: 31592 - DNA, 80 bp, synthetic construct
  source 1..80: mol_type = other DNA
tataaaccgagtactcccagaagcctgtacatgataagactcttgtgcgatgtatcttgaaaaaaacaagatcttgaatc

SEQ ID NO: 31593 - DNA, 80 bp, synthetic construct
  source 1..80: mol_type = other DNA
catgggtacaacaggtggatcaccctcgaggatatcagatctagatcatctctactagactacagctgcttgtaaaccga

SEQ ID NO: 31594 - DNA, 80 bp, synthetic construct
  source 1..80: mol_type = other DNA
gttacagagaggaaccctgtctaaagggcctatcattatagccatcatgatagttttctccaacagagtcctcaatgttt

SEQ ID NO: 31595 - DNA, 80 bp, synthetic construct
  source 1..80: mol_type = other DNA
ccaaacccttgactgaccccctgttctatccaccgtctgatcccaaaatcctgaggcacttcaacatttgttgcagtact

SEQ ID NO: 31596 - DNA, 80 bp, synthetic construct
  source 1..80: mol_type = other DNA
catggctacaacagatggatcaccctcgaggatatcagatctagatcatccctcctagactacagttgcttgtgaacggg

SEQ ID NO: 31597 - DNA, 80 bp, synthetic construct
  source 1..80: mol_type = other DNA
ctgatgtagcgctggcagatgatggaactgtcaactccgacgacgaggactatttctccggtgaaacaagaagtccagaa

SEQ ID NO: 31598 - DNA, 80 bp, synthetic construct
  source 1..80: mol_type = other DNA
agtcctccgggaaggtcttcggaggataaatcaactcagaccactggcagagagctcaagaaggagacgacatctaatca

SEQ ID NO: 31599 - DNA, 80 bp, synthetic construct
  source 1..80: mol_type = other DNA
ttctcagagagaaagccaaccctcgaaagcccggatggcagctcaatctgcctctggtcctccagcccttgaatggactg

SEQ ID NO: 31600 - DNA, 80 bp, synthetic construct
  source 1..80: mol_type = other DNA
ctgtctgatcgagcttttgaattcagtccccctagatgataaaaacagagatgttccggagtcaacatgaaaaaaacagg

SEQ ID NO: 31601 - DNA, 80 bp, synthetic construct
  source 1..80: mol_type = other DNA
tcctgattgccctgatgttggtaattttcctaatgacatgttgtagaagagtcactcgaccagaatctacgcaacgaagt

SEQ ID NO: 31602 - DNA, 80 bp, synthetic construct
  source 1..80: mol_type = other DNA
tgatcagacatggtcgtatagattctcataatacgggagatcttctagcagtttcagtgaccaacggtgctttcattttc

SEQ ID NO: 31603 - DNA, 80 bp, synthetic construct
  source 1..80: mol_type = other DNA
ttttcttgtctcgcttcaactctttaatgattttgctttctccccctgagcctcggtattcagatgacttaatatctcaa

SEQ ID NO: 31604 - DNA, 80 bp, synthetic construct
  source 1..80: mol_type = other DNA
ctgtgccagctatacatcgctggagatcaagtcctatccatgtgtgggaactccggctatgaggtcatcaagatattgga

SEQ ID NO: 31605 - DNA, 80 bp, synthetic construct
  source 1..80: mol_type = other DNA
atgtaacacccctacaatggatgccgacaagattgtattcaaagtcaacaatcaggtgatttctttgaagcctgagatta

SEQ ID NO: 31606 - DNA, 80 bp, synthetic construct
  source 1..80: mol_type = other DNA
tgagagtggttcagtgggcaactggcgcccattataaacttaagcccattctggatgatcttaacgttttcccatccctc

SEQ ID NO: 31607 - DNA, 80 bp, synthetic construct
  source 1..80: mol_type = other DNA
ctggatgatcttaacgttttcccatccctctgtcttgtagttggggacgggtcaggtgggatatcaagggcagttcttaa

SEQ ID NO: 31608 - DNA, 80 bp, synthetic construct
  source 1..80: mol_type = other DNA
tagactacagctgcttgtaaaccgagtactcccagaagcttgtacacgctaagactcttgtgcggtgtgtcttgaaaaaa

SEQ ID NO: 31609 - DNA, 80 bp, synthetic construct
  source 1..80: mol_type = other DNA
ggcagcatcgaggacttatctggagaggtggaaagacatctccgggggtacaacaggtggatcaccctcgaggatatcag

SEQ ID NO: 31610 - DNA, 80 bp, synthetic construct
  source 1..80: mol_type = other DNA
tagattacagctgcttgtaagccgagtactcccggaaggctgcacatgctaagactcttgtgcgatgtatcttgaaaaaa

SEQ ID NO: 31611 - DNA, 80 bp, synthetic construct
  source 1..80: mol_type = other DNA
ctccagggaggtcctcagaggacaaatctacccaaactgttggtagagaccccaaaaaggaaacaacatccaatccttct

SEQ ID NO: 31612 - DNA, 80 bp, synthetic construct
  source 1..80: mol_type = other DNA
aatctttaagtggtagagaaaagtcccgccatatagggtcggcccagggactcttatactcaatcctagtggcaattcac

SEQ ID NO: 31613 - DNA, 80 bp, synthetic construct
  source 1..80: mol_type = other DNA
gtcgggagagagattcctcaagatatggtcacagaccgtagaagagattatatcctatgttgcggtcaactttcccagtc

SEQ ID NO: 31614 - DNA, 80 bp, synthetic construct
  source 1..80: mol_type = other DNA
cctgctaaccggacttttaaatttttgtccctctagacaataaaatctgagatgccctagagtcgacatgaaaaaaacag

SEQ ID NO: 31615 - DNA, 80 bp, synthetic construct
  source 1..80: mol_type = other DNA
tataaacagagtgctcccgaaggcttgtacatgctaagacccttgtgcgatgtatcttgaaaaaaacaagatctcgaatc

SEQ ID NO: 31616 - DNA, 80 bp, synthetic construct
  source 1..80: mol_type = other DNA
atctgttgtcaattctattaatcatatgatatacgtggccgcagccattttacaggcatatggaagtcacaatgttccgt

SEQ ID NO: 31617 - DNA, 80 bp, synthetic construct
  source 1..80: mol_type = other DNA
cagtgtcatcaactcactcaaccacatgacttactttgcagctgcagtgctcaagccgtatgaacaacatggagcaccat

SEQ ID NO: 31618 - DNA, 80 bp, synthetic construct
  source 1..80: mol_type = other DNA
cagctgcagtgctcaagccgtatgaacaacatggagcaccatacacaggtaacgtgtttcaggttgaaactgttcacacc

SEQ ID NO: 31619 - DNA, 80 bp, synthetic construct
  source 1..80: mol_type = other DNA
cagtgttgtcaattcgctcaatcacatgacgtacttcgcggctgcagtgttgaaagcttacgagcagcacggagcaccct

SEQ ID NO: 31620 - DNA, 80 bp, synthetic construct
  source 1..80: mol_type = other DNA
cggctgcagtgttgaaagcttacgagcagcacggagcaccctacactggcaacgtgttccaggttgagaccgtccacact

SEQ ID NO: 31621 - DNA, 80 bp, synthetic construct
  source 1..80: mol_type = other DNA
aagtgtaatcaactcactcaatcacatgacctattttgcagcagcagtgctcaaggcttatgaacaacatggtgcccctt

SEQ ID NO: 31622 - DNA, 80 bp, synthetic construct
  source 1..80: mol_type = other DNA
ttcagtcatcaactcactaaaccatatgatctacattgctgcggcagtgctacaggcatatgaagagcaccatgtacctt

SEQ ID NO: 31623 - DNA, 80 bp, synthetic construct
  source 1..80: mol_type = other DNA
gttgaggtgctgaatgaatcacttaaaggcggggtactttactgccttgactacagcaaatgggactcaacacaacatcc

SEQ ID NO: 31624 - DNA, 80 bp, synthetic construct
  source 1..80: mol_type = other DNA
aacgcgccaagcgtccaacaccttccttggcgccattcatcttggtccacgcatcaatccctacaccgcacatctgagtg

SEQ ID NO: 31625 - DNA, 80 bp, synthetic construct
  source 1..80: mol_type = other DNA
tgtcctcccctgctagaggccatttgaatgacattgtgtttatcacaaaatctggtcttccatctggcatgccattcacc

SEQ ID NO: 31626 - DNA, 80 bp, synthetic construct
  source 1..80: mol_type = other DNA
cgccgttacggccgcctcacttgggattttggagagattgtctgaagccactcccatcacaacgtcagctgttgagctgc

SEQ ID NO: 31627 - DNA, 80 bp, synthetic construct
  source 1..80: mol_type = other DNA
ctaagagattccaaaaccctctaatctcgggcctgagggtggttcagtgggcaaccggcgcccattataagcttaaaccc

SEQ ID NO: 31628 - DNA, 80 bp, synthetic construct
  source 1..80: mol_type = other DNA
cctgctaaacgagcttctaaactcggtccctatagataataaaatctgagatgtcctagagtcaacatgaaaaaaacagg

SEQ ID NO: 31629 - DNA, 80 bp, synthetic construct
  source 1..80: mol_type = other DNA
atactttggagtcagacgacgacatccaacgattgctaaaagactccctgcgaaggacaaagtgggtggatcaagaggtg

SEQ ID NO: 31630 - DNA, 80 bp, synthetic construct
  source 1..80: mol_type = other DNA
aaccggatatccccagaagcccgcacgtcctaagacttttgtgtgatgcatcttgaaaaaaacaagatcttgaatcagag

SEQ ID NO: 31631 - DNA, 80 bp, synthetic construct
  source 1..80: mol_type = other DNA
ctaagagattacaaaaccctttgatctcaggcctgagagtggttcaatgggcaaccggcgctcattataagcttaagccc

SEQ ID NO: 31632 - DNA, 80 bp, synthetic construct
  source 1..80: mol_type = other DNA
ggcagcgtagaagacctctccggagaggtagagagacaccttcatggttataacaggtggatcacactcgaggacatcag

SEQ ID NO: 31633 - DNA, 80 bp, synthetic construct
  source 1..80: mol_type = other DNA
atctagatcatctctactagactacagcagcctatgatctggacattctcagaggacggcacataccaaggctcttatac

SEQ ID NO: 31634 - DNA, 80 bp, synthetic construct
  source 1..80: mol_type = other DNA
atctggacattctcagaggacggcacataccaaggctcttatactatgtgtcttgaaaaaaacaagatcttaagtctgag

SEQ ID NO: 31635 - DNA, 80 bp, synthetic construct
  source 1..80: mol_type = other DNA
tcatcaggctcgtcccaactcttttgccgagtttctaaacaaaacctattccaacgactcatgaagagttgagtggcagg

SEQ ID NO: 31636 - DNA, 80 bp, synthetic construct
  source 1..80: mol_type = other DNA
atgtcagacatctatagattatggatatatcgcatgaaaaaaactaacactcctcctttcgaaccatttcgaacatgagc

SEQ ID NO: 31637 - DNA, 80 bp, synthetic construct
  source 1..80: mol_type = other DNA
ttcacctggatgatgaaaaaccgtcggaccttgacgagatggccaagtcgggggaaggcaggtatcgggaggactttcag

SEQ ID NO: 31638 - DNA, 80 bp, synthetic construct
  source 1..80: mol_type = other DNA
atggatgaaggggaagatcctgtcctcttgctccagtcgtacctggacaatgttggagtccaggtagtcaggcaaatgag

SEQ ID NO: 31639 - DNA, 80 bp, synthetic construct
  source 1..80: mol_type = other DNA
ctccaggaaaatcttcggaggataagtccacccagaccactggccgagaacccaagaaggaaacagcatctgcttcttct

SEQ ID NO: 31640 - DNA, 80 bp, synthetic construct
  source 1..80: mol_type = other DNA
cttgctgaccgatttttaatcaccccgctagacaataaaatctaggatgtcccagactcaacatgaaaaaaacaggcaac

SEQ ID NO: 31641 - DNA, 80 bp, synthetic construct
  source 1..80: mol_type = other DNA
gatgtacacaaacaggtctcaggggttgacctgggtctcccaaactggggaaagtatattttggttagtgcaggagctct

SEQ ID NO: 31642 - DNA, 80 bp, synthetic construct
  source 1..80: mol_type = other DNA
gatcgccttgatgctgatgattttcctaatgacatgttgcagaatatcccgtcgaccaaaatctgcacaacacaatctcg

SEQ ID NO: 31643 - DNA, 80 bp, synthetic construct
  source 1..80: mol_type = other DNA
gaggaacaggtaggaaggtgtcagtcactccccaaagcgggaaggtcgtatcttcatgggagtcatataagaacggaggt

SEQ ID NO: 31644 - DNA, 80 bp, synthetic construct
  source 1..80: mol_type = other DNA
gagactagactgtgaaggccggtcatcctttcgacgctctaaatcctgaagatcgcctccatacgggattagagggaaat

SEQ ID NO: 31645 - DNA, 80 bp, synthetic construct
  source 1..80: mol_type = other DNA
ccccgagttcaacaggcctcctcaaacttaatatagcgagaggaattccagaatcacgaggttttcttccgtcatctcaa

SEQ ID NO: 31646 - DNA, 80 bp, synthetic construct
  source 1..80: mol_type = other DNA
ttgatcagacttggtcgtgtaaactcttataacacaagagatcttctggcagttgcagtgatcaacggtgctctctccgt

SEQ ID NO: 31647 - DNA, 80 bp, synthetic construct
  source 1..80: mol_type = other DNA
ccaggaacgaaggtcaaaggtcacggacaagccagggggtgttgcagatgattccgcgttcaggcacagacagaggttat

SEQ ID NO: 31648 - DNA, 80 bp, synthetic construct
  source 1..80: mol_type = other DNA
agcgcaccccctgatagcagactcaatacgagtcatctaaaaagggcacctcgccgcccgcgaggggcacaagccataga

SEQ ID NO: 31649 - DNA, 80 bp, synthetic construct
  source 1..80: mol_type = other DNA
tcacaatcatctggcatctcatcaaagtgtacataactacaaagggctgggtcgtctagatttttcaaccgagaaaaaaa

SEQ ID NO: 31650 - DNA, 80 bp, synthetic construct
  source 1..80: mol_type = other DNA
ttttgatcaaaggagcaattggcaacacttctcatcccgagacctgcatcaaaatgctcgatccaggagaggtctatgat

SEQ ID NO: 31651 - DNA, 80 bp, synthetic construct
  source 1..80: mol_type = other DNA
acctgagattgtatttcgtcatcactgagaagttattggccaactacattttaccactctttgatgcgttaactatgaca

SEQ ID NO: 31652 - DNA, 80 bp, synthetic construct
  source 1..80: mol_type = other DNA
atctcttgcgcttgcggaacagcaggaggaggcaaccctagagtttcagtatctgtactcccgtccttcgatcagtcctt

SEQ ID NO: 31653 - DNA, 80 bp, synthetic construct
  source 1..80: mol_type = other DNA
cgttgaaagagtctataaactggttcattgccagaaattccaacctcgctcaaactctaattaggaatatcatgtctcta

SEQ ID NO: 31654 - DNA, 80 bp, synthetic construct
  source 1..80: mol_type = other DNA
gtgcaaccggtgtgtgaggcctatcgaggagatcgtactggagactcctcagatctttgagtttccggatgtgtcaaaga

SEQ ID NO: 31655 - DNA, 80 bp, synthetic construct
  source 1..80: mol_type = other DNA
gaatatctagaatggtgtctggagctgtgcctcactttcagaaacttcctgatattcatctaaagccaggtgactttgaa

SEQ ID NO: 31656 - DNA, 80 bp, synthetic construct
  source 1..80: mol_type = other DNA
ctcgggatacaacgatgggaccatttttcctgtcaatatatacggcaaagtctcccccagggactatctgagagggttgg

SEQ ID NO: 31657 - DNA, 80 bp, synthetic construct
  source 1..80: mol_type = other DNA
aatcagacgatgatattcaaaggctgttgaaggactctctgcgtaggacaaggtgggttgaccaagaagtgcgccacgca

SEQ ID NO: 31658 - DNA, 80 bp, synthetic construct
  source 1..80: mol_type = other DNA
ttatggatggaacatgggccgcgatccagacatcagatgagaccaaatggtgccctcctgatcagttagtgaacctgcat

SEQ ID NO: 31659 - DNA, 80 bp, synthetic construct
  source 1..80: mol_type = other DNA
agctatacctccgattctctaagcgaggaaaattcttccgagatgctgaatatttgacatcctctacccttcgagagatg

SEQ ID NO: 31660 - DNA, 80 bp, synthetic construct
  source 1..80: mol_type = other DNA
ctgacgtagcactagcagatgacggaacggttaactctgatgatgaagattatttctccggtgaaaccaggagtcctgag

SEQ ID NO: 31661 - DNA, 80 bp, synthetic construct
  source 1..80: mol_type = other DNA
aggtctagatcatctctattagactacagctgcttatgaactgaacgcctctaggacttgtagatactaaagctcttaga

SEQ ID NO: 31662 - DNA, 80 bp, synthetic construct
  source 1..80: mol_type = other DNA
gaactgaacgcctctaggacttgtagatactaaagctcttagacgatacaccttgaaaaaaacaagatcctaaatcggag

SEQ ID NO: 31663 - DNA, 80 bp, synthetic construct
  source 1..80: mol_type = other DNA
caagatcgacgagaaccgacaaattgtgtatatcccacatgaaaaaaactaacacccctccttttgaaccatctccacca

SEQ ID NO: 31664 - DNA, 80 bp, synthetic construct
  source 1..80: mol_type = other DNA
aaccaggttctgtgtccaacatatatgttgtcacctgggctgtctagagaggggcttctatatgagctagagagcatatc

SEQ ID NO: 31665 - DNA, 80 bp, synthetic construct
  source 1..80: mol_type = other DNA
ttaacatgttcccagatgccaagcttgtattcaacagcttgcttgaggtgaacgacctgatggcgtccggaacacatcca

SEQ ID NO: 31666 - DNA, 80 bp, synthetic construct
  source 1..80: mol_type = other DNA
atctctggattcaacagtcctccttggacctattgcaacagggtagattcaagagtcataagacttccatctatcatctc

SEQ ID NO: 31667 - DNA, 80 bp, synthetic construct
  source 1..80: mol_type = other DNA
ctcccagaactgataccaaaggtggtggacaggctgagagacacttcagataacattgtgctcgaacacagacagagatt

SEQ ID NO: 31668 - DNA, 80 bp, synthetic construct
  source 1..80: mol_type = other DNA
gtagtggatccccagatattatactgggcaagagttaattaagaaaggagacttgtctcctatgaaggacgtaagcaata

SEQ ID NO: 31669 - DNA, 80 bp, synthetic construct
  source 1..80: mol_type = other DNA
caagcgacctggccagaaggatccttcggtgggggtttgacaagtactctaagtggtatatcgattcgcgacttctcccc

SEQ ID NO: 31670 - DNA, 80 bp, synthetic construct
  source 1..80: mol_type = other DNA
actctagcttaagtctgtcgtctcactggatcaggctgatctacaagatcgtgaagaccactagactcatcgggggcatt

SEQ ID NO: 31671 - DNA, 80 bp, synthetic construct
  source 1..80: mol_type = other DNA
gaagacttatctggagaggtggtgagacatcttcaagggtataacaggtggattaccctcgaggacatcagatctaggtc

SEQ ID NO: 31672 - DNA, 80 bp, synthetic construct
  source 1..80: mol_type = other DNA
atctctattagactacagctgcttatgagctgaacattattgaggcttgtaaatactgaggctcttagatggtgtaccct

SEQ ID NO: 31673 - DNA, 80 bp, synthetic construct
  source 1..80: mol_type = other DNA
gagctgaacattattgaggcttgtaaatactgaggctcttagatggtgtaccctgaaaaaaacaagatcccaaatcagaa

SEQ ID NO: 31674 - DNA, 80 bp, synthetic construct
  source 1..80: mol_type = other DNA
cagacgtggcgctagcagacgacggaacggtaaactctgatgacgaagattacttctccggagaaaccaggagtcctgag

SEQ ID NO: 31675 - DNA, 80 bp, synthetic construct
  source 1..80: mol_type = other DNA
aggtctcgatcatctctattagactacagctgcttatgaaccgagctcctttaggacttgtagatactagagctctcgga

SEQ ID NO: 31676 - DNA, 80 bp, synthetic construct
  source 1..80: mol_type = other DNA
gaaccgagctcctttaggacttgtagatactagagctctcggacggtacaccctgaaaaaaacaagatcccaaatcggaa

SEQ ID NO: 31677 - DNA, 80 bp, synthetic construct
  source 1..80: mol_type = other DNA
tcatcaagcccgtccaaactcattcgccgagtttctaaacaagacgtattctagtgattcgtaaagagtcaaacgacgag

SEQ ID NO: 31678 - DNA, 80 bp, synthetic construct
  source 1..80: mol_type = other DNA
attgacaagaaccgacaagttgtgtatatcccacatgaaaaaaactaacacccctccttttgaaccatctccaacatgag

SEQ ID NO: 31679 - DNA, 80 bp, synthetic construct
  source 1..80: mol_type = other DNA
ctgacatgtctcttcagacacaaaggtcggaggaggataaggactcctctctgctcctcgagtagtcagattgtgtccta

SEQ ID NO: 31680 - DNA, 80 bp, synthetic construct
  source 1..80: mol_type = other DNA
tttttttatcccgtttcaactctctaatgattttactttctccccctgaaccccggtactcagacgacctgatatctcaa

SEQ ID NO: 31681 - DNA, 80 bp, synthetic construct
  source 1..80: mol_type = other DNA
ctctgccaactttacattgccggagaccaagtattgtccatgtgcgggaactcgggttacgaggttattaagatattgga

SEQ ID NO: 31682 - DNA, 80 bp, synthetic construct
  source 1..80: mol_type = other DNA
gagaaatgcgctctcaatataccgagccatcgaggaaggagcatccaaattggggctgataatcaagaaggaagagacca

SEQ ID NO: 31683 - DNA, 80 bp, synthetic construct
  source 1..80: mol_type = other DNA
aagaggttgcaaaaccctctcgtctcaggcttaagagtggtccaatgggcaaccggcgcccattacaaactcaagcccat

SEQ ID NO: 31684 - DNA, 80 bp, synthetic construct
  source 1..80: mol_type = other DNA
agcatgagcaagatcttcgtcaatccaagtgcaatcagagccggcttggctgacctagagatggctgaggagactgttga

SEQ ID NO: 31685 - DNA, 80 bp, synthetic construct
  source 1..80: mol_type = other DNA
tctccaagaactgataccaaaggtgggggacaggatgagagacacttcgaacaacgttgtgctcgaacacagacagagat

SEQ ID NO: 31686 - DNA, 80 bp, synthetic construct
  source 1..80: mol_type = other DNA
agcagtgagtccccagatattatactgggtaagaattgatcaagaaaggggactcatctcctatgaaggacgtaagcaat

SEQ ID NO: 31687 - DNA, 80 bp, synthetic construct
  source 1..80: mol_type = other DNA
tgactctgacagacaactgttctaggtcttataaagttttgagagattacttcaagaagttagacttggggtccctcaag

SEQ ID NO: 31688 - DNA, 80 bp, synthetic construct
  source 1..80: mol_type = other DNA
gaaagatctgacgtcagttgatgttgggaaagacttagtcaggttcaaagatcaaatatggggactactagttgtgacga

SEQ ID NO: 31689 - DNA, 80 bp, synthetic construct
  source 1..80: mol_type = other DNA
gtgtgatctcatatattctcttgaggctggataaccatccatccttgtacataatgctcagagagccgtctctcagggga

SEQ ID NO: 31690 - DNA, 80 bp, synthetic construct
  source 1..80: mol_type = other DNA
ttatttcaagaagcaagttgttcgaggcaatatttatctgtcttggagttggtctgacgacacttcagtgttcaagaggg

SEQ ID NO: 31691 - DNA, 80 bp, synthetic construct
  source 1..80: mol_type = other DNA
ttgcctgtaattctagcttaagtctgtcctctcactggatcaggctggtttacaagatagtaaagaccactagacttatc

SEQ ID NO: 31692 - DNA, 80 bp, synthetic construct
  source 1..80: mol_type = other DNA
atttgtagatgagagaggcctatacaaatctctgaaaggagcatgcaaattgaaactatgtggggttctgggcctcagac

SEQ ID NO: 31693 - DNA, 80 bp, synthetic construct
  source 1..80: mol_type = other DNA
gaggggaaggaaagtgtcggtaacctcccaaagcgggcgtgtcatatcctcatgggagtcatacaaaagcggaggtgaga

SEQ ID NO: 31694 - DNA, 80 bp, synthetic construct
  source 1..80: mol_type = other DNA
ggattcaacagtcctccttggacctattgcaacagggtagattcaagagtcataagattttcatcaatcatctcaactga

SEQ ID NO: 31695 - DNA, 80 bp, synthetic construct
  source 1..80: mol_type = other DNA
gaactgataccaaaggtggtggacgggctgagagacacttcgaacaaagttgtgctcgaacacagacagagatagtagtg

SEQ ID NO: 31696 - DNA, 80 bp, synthetic construct
  source 1..80: mol_type = other DNA
catcatcttgcatcttagcaaaatgagtataattataaagggctgggtcattcatgattttcagtcgagaaaaaaactgt

SEQ ID NO: 31697 - DNA, 80 bp, synthetic construct
  source 1..80: mol_type = other DNA
ctaagaggctgcaaaaccctcttatctcaggtttaagagtggtccaatgggcaactggcgcccattataaactcaagccc

SEQ ID NO: 31698 - DNA, 80 bp, synthetic construct
  source 1..80: mol_type = other DNA
tgtgatgcagaggtcaccgacattgcatcgattaatcggataacactattgatgtcggacttcgcattgtctatagatgg

SEQ ID NO: 31699 - DNA, 80 bp, synthetic construct
  source 1..80: mol_type = other DNA
ggtctcgatcatctctattagactacagttgcttatgaactgtactcctttaggacttgtagatactaaaactcttggac

SEQ ID NO: 31700 - DNA, 80 bp, synthetic construct
  source 1..80: mol_type = other DNA
gaactgtactcctttaggacttgtagatactaaaactcttggacgatacaccctgaaaaaaacaagatcccaaatcagaa

SEQ ID NO: 31701 - DNA, 80 bp, synthetic construct
  source 1..80: mol_type = other DNA
ttcaattggatgatggaaaaccatcggacctcagcgaaatggcaaaggcgggggaaagcaagtatcgggaggacttccag

SEQ ID NO: 31702 - DNA, 80 bp, synthetic construct
  source 1..80: mol_type = other DNA
gtgagaccaagctgtaggggcatgtcgtctcctctatatttgaagtcttgaagatcacatcccctcgaggtgaaggggac

SEQ ID NO: 31703 - DNA, 80 bp, synthetic construct
  source 1..80: mol_type = other DNA
agtagtgggtccccagatattatactgggtaagaggtaattaagaaagagaaatcatctcctatgaaggacgtaagcaat

SEQ ID NO: 31704 - DNA, 80 bp, synthetic construct
  source 1..80: mol_type = other DNA
agatcatcatcatcttgcatcttagcaaaatgagtgtaattataaagggctgggtcattcatgattttcagtcgagaaaa

SEQ ID NO: 31705 - DNA, 80 bp, synthetic construct
  source 1..80: mol_type = other DNA
tgtatgactgacttggcccatttctactccaaatcctcccccatagagaagctgttaaattgcacactgggaaatagagg

SEQ ID NO: 31706 - DNA, 80 bp, synthetic construct
  source 1..80: mol_type = other DNA
gtccggagagagattcctcaagatttggtcacaaaccgtagaggagattatctcctatgtcgcgattaacttctcccacc

SEQ ID NO: 31707 - DNA, 80 bp, synthetic construct
  source 1..80: mol_type = other DNA
caatgaagaggacgatctgtctgtagaagcggagatcgctcaccagattgccgagagcttttccaaaaaatacaagttcc

SEQ ID NO: 31708 - DNA, 80 bp, synthetic construct
  source 1..80: mol_type = other DNA
ttcgtaaagagtcaaacgacgagattgacaagaaccgacaagttgtgtatatcccacatgaaaaaaactaacacccctcc

SEQ ID NO: 31709 - DNA, 80 bp, synthetic construct
  source 1..80: mol_type = other DNA
atctagatcatctttactagactacagctgcttgtaaaccgagcactcccggaaggctatacatgctaagactcttgtgc

SEQ ID NO: 31710 - DNA, 80 bp, synthetic construct
  source 1..80: mol_type = other DNA
tgactttgacagacaacggctccaggtcttacagagtgttgaaagattatttcaagaaaatagatttgggttctctgaaa

SEQ ID NO: 31711 - DNA, 80 bp, synthetic construct
  source 1..80: mol_type = other DNA
gtaagtcctatgacagcggactcagtatgagtttgttgagaaaggcactctgcctcccatgaaggacataagcaatagct

SEQ ID NO: 31712 - DNA, 80 bp, synthetic construct
  source 1..80: mol_type = other DNA
caggaaatggtaccaaaggttgtggacaagccgagaggtatttcagatgaatccgtgcctgggcatggacaggggtcata

SEQ ID NO: 31713 - DNA, 80 bp, synthetic construct
  source 1..80: mol_type = other DNA
tcggaactagtaccaaaggttgtggacgggccaagaggtatttcggatgactccgtgcctgggcaccgacaggggtaata

SEQ ID NO: 31714 - DNA, 80 bp, synthetic construct
  source 1..80: mol_type = other DNA
gattaatcggatgactcaaacgcctcaaagggtcgggagggtgtggccttgctcttcagagagggcagatttacttagtg

SEQ ID NO: 31715 - DNA, 80 bp, synthetic construct
  source 1..80: mol_type = other DNA
catgtttccagatgctaagctagtgttcaacagcctcttagaagtgaatgatctaatggcctccggaacacatccattac

SEQ ID NO: 31716 - DNA, 80 bp, synthetic construct
  source 1..80: mol_type = other DNA
aaccgagtactcccggaaggctgtacatgccaagactcttgtgtgatttatcttgaaaaaaacaagatcttgaatctgaa

SEQ ID NO: 31717 - DNA, 80 bp, synthetic construct
  source 1..80: mol_type = other DNA
ccggagctggtaccaaaggttgtggacgggccgagaggtatttcggatgactctatgcccaggcacaggcaggggtcata

SEQ ID NO: 31718 - DNA, 80 bp, synthetic construct
  source 1..80: mol_type = other DNA
atccagccatcaaagatttgaaaaagccatgtataaccctagggaaagcccccgacttaaacaaagcatacaagtcaatc

SEQ ID NO: 31719 - DNA, 80 bp, synthetic construct
  source 1..80: mol_type = other DNA
gccctgattgccttgatgttgataattttcacaatgacatgttgcagaagagtcaatcgacaaaaatctacgcagcgcag

SEQ ID NO: 31720 - DNA, 80 bp, synthetic construct
  source 1..80: mol_type = other DNA
aatcgagtactcccggaagcctgtacatgctaaggctcttgtgcaatgtatcttgaaaaaaacaagatcttgaatccgaa

SEQ ID NO: 31721 - DNA, 80 bp, synthetic construct
  source 1..80: mol_type = other DNA
gatgtgcataaacaggtctctgggattgacctgggcctcccaaactggaggaagtatgtattactgagtgcaggggccct

SEQ ID NO: 31722 - DNA, 80 bp, synthetic construct
  source 1..80: mol_type = other DNA
gagaggcagggaggaaggtgtcgatcacttcccaaagcgggaaggttatatcttcatgggagtcgtataagagtggtggt

SEQ ID NO: 31723 - DNA, 80 bp, synthetic construct
  source 1..80: mol_type = other DNA
ctagaactggtaccaaaggttgtagacgggccgcgaggtattgcggatgactccatgcctgggcacggacagaggtcata

SEQ ID NO: 31724 - DNA, 80 bp, synthetic construct
  source 1..80: mol_type = other DNA
gtgagtcccatgatagtggattcggcatgagtttatcgagagagtcagtctgcctcccatgaaggacataagcaatagct

SEQ ID NO: 31725 - DNA, 80 bp, synthetic construct
  source 1..80: mol_type = other DNA
cttgctaactgaacttttaaattcggtctccctagatgataaaatctgagatgtcttagagtcgacatgaaaaaaacagg

SEQ ID NO: 31726 - DNA, 80 bp, synthetic construct
  source 1..80: mol_type = other DNA
ccggaactgataccagaggttgtagacgggccgagagggatttcagatgactccagacctgggcatggacagaggtcata

SEQ ID NO: 31727 - DNA, 80 bp, synthetic construct
  source 1..80: mol_type = other DNA
atcgagatcatctctactagactacagctgcttgtaaaccgagtactcccagaagcttgtacacgctaagactcttgtgc

SEQ ID NO: 31728 - DNA, 80 bp, synthetic construct
  source 1..80: mol_type = other DNA
aaccgagtactcccagaagcttgtacacgctaagactcttgtgcggtgtgtcttgaaaaaaacaagatctggaatccgaa

SEQ ID NO: 31729 - DNA, 80 bp, synthetic construct
  source 1..80: mol_type = other DNA
caaaagggtgcttaagagttggagggagatgtcaccctcatgtgaacggggtgtttttcaatggcataatattagggcct

SEQ ID NO: 31730 - DNA, 80 bp, synthetic construct
  source 1..80: mol_type = other DNA
gccctgattgccttgatgttgatacttttcctacttacatgttgtagaagagtcagtcgaccagaatctacgcagcacag

SEQ ID NO: 31731 - DNA, 80 bp, synthetic construct
  source 1..80: mol_type = other DNA
gaaactagactgtaaaggctggtcatccttttgacgcttcaagtcttaaaggtcacctccccctggggttggggggaatc

SEQ ID NO: 31732 - DNA, 80 bp, synthetic construct
  source 1..80: mol_type = other DNA
accctcgaggatatcagatctagatcatctctactagactacagctgcttttagaccgagtgctcccggaggcctgtaca

SEQ ID NO: 31733 - DNA, 80 bp, synthetic construct
  source 1..80: mol_type = other DNA
gaccgagtgctcccggaggcctgtacatgctaaaactctcgtgtggtgtatcttgaaaaaaacaaggtcttgaatccgaa

SEQ ID NO: 31734 - DNA, 80 bp, synthetic construct
  source 1..80: mol_type = other DNA
ttcacctggatgatgggaaatcgtccaacctcggtgagatggccaaagcaggggaaggcaagtatcgagaggactttcag

SEQ ID NO: 31735 - DNA, 80 bp, synthetic construct
  source 1..80: mol_type = other DNA
cctgctgaccgaacttttaaattcggtccctctagataataaaaactgagatgtcctagagtcgacatgaaaaaaacagg

SEQ ID NO: 31736 - DNA, 80 bp, synthetic construct
  source 1..80: mol_type = other DNA
gatgtacacaaacaggtctcaggggttgacttgggcctcccaaactgggggaagtatgtgttgctgagtgcaggagcctt

SEQ ID NO: 31737 - DNA, 80 bp, synthetic construct
  source 1..80: mol_type = other DNA
gattgccttgatgttgataattttcctaatgacatgttgtagaagagtcaatcgaccagaatctacgcagcgcagtctag

SEQ ID NO: 31738 - DNA, 80 bp, synthetic construct
  source 1..80: mol_type = other DNA
caggaactggtaccaaaggttgtggacggggcgagaggtatttcagatgactccgtgcttgggcacggacagaggtcata

SEQ ID NO: 31739 - DNA, 80 bp, synthetic construct
  source 1..80: mol_type = other DNA
gtgagtcccatgatggcggactcagcatgagttaattgagaaaggcaatctgcctcccatgaaggacataagcaatagct

SEQ ID NO: 31740 - DNA, 80 bp, synthetic construct
  source 1..80: mol_type = other DNA
cgccggggctgtctagagaagggctcctatatgagctagagagcgtatccaggaatgcactttcaatataccgagccatc

SEQ ID NO: 31741 - DNA, 80 bp, synthetic construct
  source 1..80: mol_type = other DNA
agactaccagactcgttggccacatcggggacctatctggggaagtggaaagacaccttcatgggtacaacagatggatc

SEQ ID NO: 31742 - DNA, 80 bp, synthetic construct
  source 1..80: mol_type = other DNA
atctagatcatctctgctagactacagctgcttgtaaaccggaaactctcggaagcctgtatatgctgagacttttgtgt

SEQ ID NO: 31743 - DNA, 80 bp, synthetic construct
  source 1..80: mol_type = other DNA
actttcaaatggatgaaggggaggaccctagcctcctgttccaatcatacctggacaatgttggagtccaaatggtcaga

SEQ ID NO: 31744 - DNA, 80 bp, synthetic construct
  source 1..80: mol_type = other DNA
tgatcaaactagatcatatagattttcataatacgggaaatcttttagcggtttcagtgatcaacggtgctttcattctc

SEQ ID NO: 31745 - DNA, 80 bp, synthetic construct
  source 1..80: mol_type = other DNA
gtgcgtcccatgatagaggacttagcatgagtttattgagaaaggcaatctgccccccatgagggacataagcaatagat

SEQ ID NO: 31746 - DNA, 80 bp, synthetic construct
  source 1..80: mol_type = other DNA
gcggcaacttcacctggatgatggaaaatcgtccaacctcagtgagatggccaaagcgggagaaggcaagtatcgagagg

SEQ ID NO: 31747 - DNA, 80 bp, synthetic construct
  source 1..80: mol_type = other DNA
tgatcaaactagatcatgtagattctcataattcgggaaatcttctagcagtttcagtgaataacggtgctttcattccc

SEQ ID NO: 31748 - DNA, 80 bp, synthetic construct
  source 1..80: mol_type = other DNA
accctcgaggatatcagatccagatcatctctactagactacagctgcttgtaaaccggatactccaggaagcctgtata

SEQ ID NO: 31749 - DNA, 80 bp, synthetic construct
  source 1..80: mol_type = other DNA
aaccggatactccaggaagcctgtatatgctaagacttttgtgtggtgtatcctgaaaaaaacaagatcttgaatccgaa

SEQ ID NO: 31750 - DNA, 80 bp, synthetic construct
  source 1..80: mol_type = other DNA
accctcaaggatatcaaatctagatcgtctctattagactacagctgcttgtaaaccggacatccccagaagcctgcaca

SEQ ID NO: 31751 - DNA, 80 bp, synthetic construct
  source 1..80: mol_type = other DNA
cactgtgtttggtctttaaaacttacgggaccatgctagtaaacccggactataaggctatccagcatctgtcaagagcg

SEQ ID NO: 31752 - DNA, 80 bp, synthetic construct
  source 1..80: mol_type = other DNA
gagactagactgtaaaaactgatcatcctttcgacgcttcaaatcctgaaggtaacctccccttggggttggggggagtc

SEQ ID NO: 31753 - DNA, 80 bp, synthetic construct
  source 1..80: mol_type = other DNA
aaactgatcatcctttcgacgcttcaaatcctgaaggtaacctccccttggggttggggggagtctctgagttcaacagt

SEQ ID NO: 31754 - DNA, 80 bp, synthetic construct
  source 1..80: mol_type = other DNA
gactttaattaccttgatgttaataatattcttaatgacatgttgtagaagagtcaatcgaccagaatcttcgctgagca

SEQ ID NO: 31755 - DNA, 80 bp, synthetic construct
  source 1..80: mol_type = other DNA
gagactagactgtgaatgctggtcatccttttgatgcttcaaatcatgaagaccacctctccttggggttgggggaatct

SEQ ID NO: 31756 - DNA, 80 bp, synthetic construct
  source 1..80: mol_type = other DNA
aaccggatattctcggacgcctgcacatgctaagattcttgtatgatgtatcttgaaaaaaacaaaatctcgaatccgag

SEQ ID NO: 31757 - DNA, 80 bp, synthetic construct
  source 1..80: mol_type = other DNA
caggacccgataccaaaggtcatggatgggtcaagaggtatttcggatgactccgtgcttgggcacggacggaggtcgta

SEQ ID NO: 31758 - DNA, 80 bp, synthetic construct
  source 1..80: mol_type = other DNA
gtctgtcctatgatagcaggctcaacatgagtcaattgagaaaggcaatctgcctcccgggaaagacataagcaatagct

SEQ ID NO: 31759 - DNA, 80 bp, synthetic construct
  source 1..80: mol_type = other DNA
aaccggatactcctggaagcctgcacaagctaagactcttgtgtgatgtgtcttgaaaaaaacaagatcttaaatctgag

SEQ ID NO: 31760 - DNA, 80 bp, synthetic construct
  source 1..80: mol_type = other DNA
ttcacttggatgatgggaaattgtccaaccttggtgagatggccgaggtgggagaaggcaagtatcgggaggactttcaa

SEQ ID NO: 31761 - DNA, 80 bp, synthetic construct
  source 1..80: mol_type = other DNA
gccttgattgccttgatgttgacaattctcctaataacatgttgtagaagggttaatagaccagaacctacgcgacgcag

SEQ ID NO: 31762 - DNA, 80 bp, synthetic construct
  source 1..80: mol_type = other DNA
tctcgaagggaaagagaggaaagtatcggtcacctctcaaagcgggaaggtcatatcttcatgggagtcatataaaagtg

SEQ ID NO: 31763 - DNA, 80 bp, synthetic construct
  source 1..80: mol_type = other DNA
gattactcggatgacccagacccctcaaagggttgggagggtgtggccgtgctcttcagagagagcagatctacttagag

SEQ ID NO: 31764 - DNA, 80 bp, synthetic construct
  source 1..80: mol_type = other DNA
gattttcactcagatgagatcgaacatctcgttgtagaggagttggttaagaagagagaagagtgtctagatgcactaga

SEQ ID NO: 31765 - DNA, 80 bp, synthetic construct
  source 1..80: mol_type = other DNA
ataaccaggttctatgtccgacctatatgttgtcgccaggactgtcacaggaggggcttctctatgagttagaaagcata

SEQ ID NO: 31766 - DNA, 80 bp, synthetic construct
  source 1..80: mol_type = other DNA
gtcacaggatttataactcaaatgacgtcatctttttcctcagagatatacctccgattctctaaacggggaaaattttt

SEQ ID NO: 31767 - DNA, 80 bp, synthetic construct
  source 1..80: mol_type = other DNA
gatgtgagaccaggctgtgaaagccaaccatccctcctacacttcaagtcttgagggttgctttcccttggggttaggtg

SEQ ID NO: 31768 - DNA, 80 bp, synthetic construct
  source 1..80: mol_type = other DNA
ggaggatcctcaggtggggatttgacaagtactctaaatggtatcttgattcgcgatttcttgctagagaccaccccctg

SEQ ID NO: 31769 - DNA, 80 bp, synthetic construct
  source 1..80: mol_type = other DNA
aatgtgccaggggtgacccgtttagcccatgacgggtccaagctccctctaagatgtgtgcttggatgggtcgctttagc

SEQ ID NO: 31770 - DNA, 80 bp, synthetic construct
  source 1..80: mol_type = other DNA
taactccaagagattccagttgttagttgagcccgacaagctaaacaaagtcatgcaagatgatctaaatcgttatacat

SEQ ID NO: 31771 - DNA, 80 bp, synthetic construct
  source 1..80: mol_type = other DNA
ctaatgggaagtgctcggggataaccgtgtcctctacattttgccctaccaaccatgattacaccatctggatgccagag

SEQ ID NO: 31772 - DNA, 80 bp, synthetic construct
  source 1..80: mol_type = other DNA
gagaccaggctgtgagagccaaccatccctcctacacttcaggtcttgaaggccgctttcccttggggttaggtggaatc

SEQ ID NO: 31773 - DNA, 80 bp, synthetic construct
  source 1..80: mol_type = other DNA
catgactgacctgacccatttctattccaagtcttcccccatagagaagctgctaaattgtacacttgggaatagagggt

SEQ ID NO: 31774 - DNA, 80 bp, synthetic construct
  source 1..80: mol_type = other DNA
gcccgacctgctggaacggacaagatggcgggctagaaggtttacggcagaagggctggagtttggttagcttgttgatg

SEQ ID NO: 31775 - DNA, 80 bp, synthetic construct
  source 1..80: mol_type = other DNA
atagacagagaatctcaaaccaggaacacaagaactaagatattggcccaaggagataaccaggttctatgtcctacata

SEQ ID NO: 31776 - DNA, 80 bp, synthetic construct
  source 1..80: mol_type = other DNA
acctgggcgccttcaaaggccgatacatgctaagacccttatgagatgtaccctgaaaaaaacgagatcttaaatccgaa

SEQ ID NO: 31777 - DNA, 80 bp, synthetic construct
  source 1..80: mol_type = other DNA
tcatcaagcccgcccaaactcatttgctgagttcctaaacaaaacatattctagtgactcataaagagttgaatcatagg

SEQ ID NO: 31778 - DNA, 80 bp, synthetic construct
  source 1..80: mol_type = other DNA
caccaggcaaatccctggaagacaaatccactcaaactgccggtcgagagcttaagaaagaaacgactccctcttcttct

SEQ ID NO: 31779 - DNA, 80 bp, synthetic construct
  source 1..80: mol_type = other DNA
gtccgtcccctaatgtcggatcaaaaggggtttaattgaggaaggagatttgcctcctatgaaggacataagcaatagct

SEQ ID NO: 31780 - DNA, 80 bp, synthetic construct
  source 1..80: mol_type = other DNA
ttgggaccacaagacaaattggcaacacttctcatcctgagacgtccaccaagatgctcgatccaggggaggtctatgat

SEQ ID NO: 31781 - DNA, 80 bp, synthetic construct
  source 1..80: mol_type = other DNA
gaccccgttgacccaattgagtcagaggccgagtctagagggacttccacggtccccaacatcttgaggaattctgacta

SEQ ID NO: 31782 - DNA, 80 bp, synthetic construct
  source 1..80: mol_type = other DNA
ggagtttggttagcttgttgatgatagacagagaatctcaaaccaggaacacaagaactaagatattggcccaaggagat

SEQ ID NO: 31783 - DNA, 80 bp, synthetic construct
  source 1..80: mol_type = other DNA
cgagaataatctatctcgatccatcattagggggagtatcaggaatgtcgctcggaaggttccacatacgccagttctca

SEQ ID NO: 31784 - DNA, 80 bp, synthetic construct
  source 1..80: mol_type = other DNA
aactgagcaccttcaaaggcctacacatgctaagacccttatgaactgcaccctgaaaaaaacgagatcttaaatccgat

SEQ ID NO: 31785 - DNA, 80 bp, synthetic construct
  source 1..80: mol_type = other DNA
gatgtgcacaaacaaatctcaggggttgatttgggcctcccaaactgggggaaatatgttctaatgagtgcaggtgctct

SEQ ID NO: 31786 - DNA, 80 bp, synthetic construct
  source 1..80: mol_type = other DNA
gattgccctgatgctgataatcttcctaatgacatgttgtagaaaaattaagcgatcagaatccacacagcatagtctca

SEQ ID NO: 31787 - DNA, 80 bp, synthetic construct
  source 1..80: mol_type = other DNA
gttggaatggacaagatggcgggctagaaggtttacggcagaagggctggagtttggttagcttgttaatgatagataga

SEQ ID NO: 31788 - DNA, 80 bp, synthetic construct
  source 1..80: mol_type = other DNA
agctggagatttctgtggatctgtatatactaagattctcagacaatgtaccatgaaaaaaacgaagtctcaagtcagaa

SEQ ID NO: 31789 - DNA, 80 bp, synthetic construct
  source 1..80: mol_type = other DNA
ctgattgtactgatgttgatgattttcttaacgacatgctgcagaaaagccaatggagcagaatcaatacgacaccgtct

SEQ ID NO: 31790 - DNA, 80 bp, synthetic construct
  source 1..80: mol_type = other DNA
aaatactagatgacaagtcacactcctttaccagaacgaggctagcgtcctggttgtcagagaatagaggggggcccgtt

SEQ ID NO: 31791 - DNA, 80 bp, synthetic construct
  source 1..80: mol_type = other DNA
cctggttgtcagagaatagaggggggcccgttcccagtgaaaaagtcatcatcactgctctgtccaaaccacctgtaaat

SEQ ID NO: 31792 - DNA, 80 bp, synthetic construct
  source 1..80: mol_type = other DNA
ataaccaggttctatgtccgacatatatgttgtcacctgggctatccaaagagggacttctttatgagttggagagcata

SEQ ID NO: 31793 - DNA, 80 bp, synthetic construct
  source 1..80: mol_type = other DNA
tcaagaaatgcactttcaatataccgagctatcgaggaaggggcatccaaactagggttgattatcaagaaggaagagac

SEQ ID NO: 31794 - DNA, 80 bp, synthetic construct
  source 1..80: mol_type = other DNA
taagaattcccccagaaggggtgttgagttgccttgaaagaattgactatgacaaggcattcgggaggtatcttgccaat

SEQ ID NO: 31795 - DNA, 80 bp, synthetic construct
  source 1..80: mol_type = other DNA
catccttcttggggattcctgagtcaatcattgggttgatacaaaattctcggactataagaaggcagttcagaagaagt

SEQ ID NO: 31796 - DNA, 80 bp, synthetic construct
  source 1..80: mol_type = other DNA
ttcaccttgatgatggaaagtcgtccaacctcgatgagatggccaagacgggggagagcaagtatcgagaggactttcag

SEQ ID NO: 31797 - DNA, 80 bp, synthetic construct
  source 1..80: mol_type = other DNA
catatgtcgtaaacagtttagtccagagagcagagcagttcaggcctcttattcattccttgggagattttcctgtgttt

SEQ ID NO: 31798 - DNA, 80 bp, synthetic construct
  source 1..80: mol_type = other DNA
ataagagacaaggtgagtcagctcgaagggactttcggtcccagtgcaacaaggttttttagggttctagatcagttcaa

SEQ ID NO: 31799 - DNA, 80 bp, synthetic construct
  source 1..80: mol_type = other DNA
atggatgaagaggaggatcctagcctcctgtttcaatcttacctagacaatgttggagtccaaatagtcagacgaatgag

SEQ ID NO: 31800 - DNA, 80 bp, synthetic construct
  source 1..80: mol_type = other DNA
caattccaagaaattccaattgttagtagaggccgacaagctaagtaaaatcatgcaggatgatttgaatcgttatgcat

SEQ ID NO: 31801 - DNA, 80 bp, synthetic construct
  source 1..80: mol_type = other DNA
ccggaactggtactaaaggttgcagacggtccgagaggtatggcagatgaccccgtgcctgggcacagacagaggtcata

SEQ ID NO: 31802 - DNA, 80 bp, synthetic construct
  source 1..80: mol_type = other DNA
cactatcatcttgcatcttagcaaagtttgcataattataaagggctgggtcatctaagcttctcagtctagaaaaaaac

SEQ ID NO: 31803 - DNA, 80 bp, synthetic construct
  source 1..80: mol_type = other DNA
tcatcaagctcgtccaaactcattcgctgagtttctgaacaagacatattcgaacgactcataggaagttgaatagcagt

SEQ ID NO: 31804 - DNA, 80 bp, synthetic construct
  source 1..80: mol_type = other DNA
cttgtgtttcgggaagttccctatttacacgataccagacaaacttggtccttggagcccgattgatatacatcatctca

SEQ ID NO: 31805 - DNA, 80 bp, synthetic construct
  source 1..80: mol_type = other DNA
caacaccactgataaaatgaactttttacgcaagatagtgaaaaactgtagggatgaggaaccccgaaaaccctctcccg

SEQ ID NO: 31806 - DNA, 80 bp, synthetic construct
  source 1..80: mol_type = other DNA
gggagtcctatgatagctgactcagtatgaatttattgagaaaggcagtctgcctcctatgaaggacataagcaatagct

SEQ ID NO: 31807 - DNA, 80 bp, synthetic construct
  source 1..80: mol_type = other DNA
ccgacaagattgtattcaatcttattcactttgtcggatgctatatgggtcaagtcagatccctaaatgcaacagttatt

SEQ ID NO: 31808 - DNA, 80 bp, synthetic construct
  source 1..80: mol_type = other DNA
ataccttagagtccgacgacgacattcaaagattgctgaaagactccttgcggagaacaagatgggtagatcaggaggtg

SEQ ID NO: 31809 - DNA, 80 bp, synthetic construct
  source 1..80: mol_type = other DNA
ctagacgatctgaatgttttcccatccctatgtcttgtggttggggacgggtcgggagggatatcaagggcagttcttaa

SEQ ID NO: 31810 - DNA, 80 bp, synthetic construct
  source 1..80: mol_type = other DNA
cctgctaactaaacttttaaattcggcccctctagataataagatccgagatgttttagagtcgacatgaaaaaaacagg

SEQ ID NO: 31811 - DNA, 80 bp, synthetic construct
  source 1..80: mol_type = other DNA
ggttttgtagatgagagaggcctgtataagtcgctaaagggagcatgcaaactcaagttatgtggagttcttggacttcg

SEQ ID NO: 31812 - DNA, 80 bp, synthetic construct
  source 1..80: mol_type = other DNA
tcagagagaaagccaatcttcgaaagccaggatagcggctcaagctgcctccggccccacagcccttgaatggtctgctg

SEQ ID NO: 31813 - DNA, 80 bp, synthetic construct
  source 1..80: mol_type = other DNA
gaccccatcgatccggtcgagtcggaggctgagcccagaggagcccccactatccctaacatcttgagaaattctgacta

SEQ ID NO: 31814 - DNA, 80 bp, synthetic construct
  source 1..80: mol_type = other DNA
aaccggacaccaccgaaagcctgcacatgctaagactcttgtatgatgcatcttgaaaaaaacaagatcttgaatctgaa

SEQ ID NO: 31815 - DNA, 80 bp, synthetic construct
  source 1..80: mol_type = other DNA
caggaactgataccaaaggttgtggacaggccaaggggcgtttcggatgactcgatgcttgagcgcagacagaggtcgtg

SEQ ID NO: 31816 - DNA, 80 bp, synthetic construct
  source 1..80: mol_type = other DNA
tgtaaaccaaaagagcaactagcaacacttctcatcctgagacccgtatcaagatgctagatcccggggaagtctacgac

SEQ ID NO: 31817 - DNA, 80 bp, synthetic construct
  source 1..80: mol_type = other DNA
aaccggatactactgaaaatctgtacatgctaagactcttgtataatgcatcttgaaaaaaacaagatctagaatctgag

SEQ ID NO: 31818 - DNA, 80 bp, synthetic construct
  source 1..80: mol_type = other DNA
cagagagaaagccaaccctcgaaagtcaagatggcagctcaatccgcttctggtcctccagcccttgaatggactgccac

SEQ ID NO: 31819 - DNA, 80 bp, synthetic construct
  source 1..80: mol_type = other DNA
ttctgatttctctaatgttgataattttcctaatgacatgctgcagaggagtcaatcgaccagaatccacgcaacgaagt

SEQ ID NO: 31820 - DNA, 80 bp, synthetic construct
  source 1..80: mol_type = other DNA
ctcggagggacagggaggaaggtgtcggtcacttcccaaagcggaaaggtcatatcttcatgggagtcgtataaaagtgg

SEQ ID NO: 31821 - DNA, 80 bp, synthetic construct
  source 1..80: mol_type = other DNA
cccaaagcggaaaggtcatatcttcatgggagtcgtataaaagtggaggtgagaccaggctgtgagggctggtcattctt

SEQ ID NO: 31822 - DNA, 80 bp, synthetic construct
  source 1..80: mol_type = other DNA
gagaccaggctgtgagggctggtcattcttttgacgattcaagtcctgaagataacctcatctcggggttggtgggaatc

SEQ ID NO: 31823 - DNA, 80 bp, synthetic construct
  source 1..80: mol_type = other DNA
caggaactgataccaaaggttgtggacaggccaagtggtgtttcgaacaactctatggttgggcacagaaagaggtcgtg

SEQ ID NO: 31824 - DNA, 80 bp, synthetic construct
  source 1..80: mol_type = other DNA
gtgtaccccctgatagcagactctacatgagttgattgagagaggcaatctgcctcccatgaaggacataagcaatagct

SEQ ID NO: 31825 - DNA, 80 bp, synthetic construct
  source 1..80: mol_type = other DNA
tcataaaagacaaggtgaatcaacttgaggggactttcggtcccagtgcaaaacggtttttcagggtcctagatcagttt

SEQ ID NO: 31826 - DNA, 80 bp, synthetic construct
  source 1..80: mol_type = other DNA
gacaatatacatgacttagtttttgtgtatggctgttatagacattggggacacccctatatagattatcgaaagggtct

SEQ ID NO: 31827 - DNA, 80 bp, synthetic construct
  source 1..80: mol_type = other DNA
caatctcaattcccccttgatagaagaccctgcaagactaatgttggaatggttgaaaacaggaaatagaccctatcgga

SEQ ID NO: 31828 - DNA, 80 bp, synthetic construct
  source 1..80: mol_type = other DNA
tgtagatcagaggagcaactggcaacacttctcatcctgaagcctacatcaagatgctggatcccggagaggtctatgat

SEQ ID NO: 31829 - DNA, 80 bp, synthetic construct
  source 1..80: mol_type = other DNA
cctgttaactggactctcaaactcggtccctccaaacaacaaaatctgagatgtcctagagtcaacatgaaaaaaacagg

SEQ ID NO: 31830 - DNA, 80 bp, synthetic construct
  source 1..80: mol_type = other DNA
ggtccagatcgtctctattagactacagttgcttgtaaaccggatacccccagaagcctgcaaatcccaagactcttgtg

SEQ ID NO: 31831 - DNA, 80 bp, synthetic construct
  source 1..80: mol_type = other DNA
aaccggatacccccagaagcctgcaaatcccaagactcttgtgtgatgtatcttgaaaaaaacaagatcttgaatccgag

SEQ ID NO: 31832 - DNA, 80 bp, synthetic construct
  source 1..80: mol_type = other DNA
cctcaggaaggtcttcagaagataaatcgacacaaaccactggtcgagaacccaagaaggaaactacatccactccctct

SEQ ID NO: 31833 - DNA, 80 bp, synthetic construct
  source 1..80: mol_type = other DNA
ctgatgtgcacaaacaggtttcgggggttgacctgggtctcccgaactggaggaaatatgtattattgagtgcagggacc

SEQ ID NO: 31834 - DNA, 80 bp, synthetic construct
  source 1..80: mol_type = other DNA
ctgattgccttgatgttgataattttcctaatgacatgttgtagaaaattcaatcgaccagaatctacacaacacaatct

SEQ ID NO: 31835 - DNA, 80 bp, synthetic construct
  source 1..80: mol_type = other DNA
gtacgtcacatgatagcagactcaacatgagtcgattgagaaaggcaatctgcctccaatgaaggacataagcaatagtt

SEQ ID NO: 31836 - DNA, 80 bp, synthetic construct
  source 1..80: mol_type = other DNA
cacgttcatcttgcatctcagcagattgtgcataattataaagggctgggtcatctaagcttttcagtcgagaaaaaaac

SEQ ID NO: 31837 - DNA, 80 bp, synthetic construct
  source 1..80: mol_type = other DNA
aaccggataatcccggaagcctgtacatgctcagactcttgtgtgatgtatcttgaaaaaaacgagatcttgaatccgat

SEQ ID NO: 31838 - DNA, 80 bp, synthetic construct
  source 1..80: mol_type = other DNA
acaccttagaatcagatgacgacattcaacggttactaaaagactctttacgaaggacaaaatgggtggatcaggaggtg

SEQ ID NO: 31839 - DNA, 80 bp, synthetic construct
  source 1..80: mol_type = other DNA
cgccatgcagctagaaccatgaccggaaattacagccccaacaagaaagtgtctcgcaaggcaggatgttccgaatgggt

SEQ ID NO: 31840 - DNA, 80 bp, synthetic construct
  source 1..80: mol_type = other DNA
gaccggatactcccgggagcctgtacatactgagattcgtgtatgatgtatcttgaaaaaaacaagatcttgaatccgag

SEQ ID NO: 31841 - DNA, 80 bp, synthetic construct
  source 1..80: mol_type = other DNA
aatgtgccaggcgtaacccgtctggcccatgacggatccaaactccccctaagatgtgtactgggatgggtcgctttagc

SEQ ID NO: 31842 - DNA, 80 bp, synthetic construct
  source 1..80: mol_type = other DNA
cctgctaaccgagcctcagagctcagcccctccggataaccaaacaagggatgtcccagaatcgacatgaaaaaaacaga

SEQ ID NO: 31843 - DNA, 80 bp, synthetic construct
  source 1..80: mol_type = other DNA
ctctgggttcaatagttctcctcgaactccatgcaacaatgtggattcaggagtcatgagactttcattaatcatctcaa

SEQ ID NO: 31844 - DNA, 80 bp, synthetic construct
  source 1..80: mol_type = other DNA
tctaccagacatggtcatgtagattctcataatacgggaaatcttctagcagtttcagtgaccaacggtgctttcattct

SEQ ID NO: 31845 - DNA, 80 bp, synthetic construct
  source 1..80: mol_type = other DNA
ccggtgagaccaggagtcctgaagccgtttatactcggatcatgatgaacggagggcgactaaagagatctcacatcagg

SEQ ID NO: 31846 - DNA, 80 bp, synthetic construct
  source 1..80: mol_type = other DNA
cgccaggactttcacaggaggggcttctctatgagttagaaagcatatcaagaaatgcactctcgatataccgggctata

SEQ ID NO: 31847 - DNA, 80 bp, synthetic construct
  source 1..80: mol_type = other DNA
agatctacctccgattctccaaacgggggaaattttatcgagacgcggagtacttgacctcttccacccttcgggagatg

SEQ ID NO: 31848 - DNA, 80 bp, synthetic construct
  source 1..80: mol_type = other DNA
ccgatgtggcactggcagatgacggaaccgtcaattctgatgatgaggattacttctctggagaaaccaggagtcctgaa

SEQ ID NO: 31849 - DNA, 80 bp, synthetic construct
  source 1..80: mol_type = other DNA
atctagatcatctctactagactacagttgcttataaactgggcaccttcaagggcttgtatatgctgagacccctatga

SEQ ID NO: 31850 - DNA, 80 bp, synthetic construct
  source 1..80: mol_type = other DNA
aactgggcaccttcaagggcttgtatatgctgagacccctatgagctgcaccctgaaaaaaacgagatcttaaatctgat

SEQ ID NO: 31851 - DNA, 80 bp, synthetic construct
  source 1..80: mol_type = other DNA
gctgtttacactcggatcatgatgaacggagggcgactaaagagatctcacataaggagatacgtttcagtcagttccaa

SEQ ID NO: 31852 - DNA, 80 bp, synthetic construct
  source 1..80: mol_type = other DNA
tcatcaagcccgccccaactcgtttgccgagtttttgaacaaaacatattctagtgactcgtaaggagttgaataacagg

SEQ ID NO: 31853 - DNA, 80 bp, synthetic construct
  source 1..80: mol_type = other DNA
actttaggaaatgataaattgtgtacatcactcatgaaaaaaactaacacctctccctgcgaaccatcccaaatatgagc

SEQ ID NO: 31854 - DNA, 80 bp, synthetic construct
  source 1..80: mol_type = other DNA
ttcagctggaagaggggaaaccgtctagcttcagtgagatggccgaggtgggagagagcaagtgtcgagaagatttccag

SEQ ID NO: 31855 - DNA, 80 bp, synthetic construct
  source 1..80: mol_type = other DNA
cgccaggtaaatccctagaagacaaatccacccagactactggccgagagctcaagaaagaaacgacaccctcttcttct

SEQ ID NO: 31856 - DNA, 80 bp, synthetic construct
  source 1..80: mol_type = other DNA
cagagagaaaaccaatcctcaaaagccaagatggtggcccaaaccgcctctggtcctccagcccttgaatggtcagccac

SEQ ID NO: 31857 - DNA, 80 bp, synthetic construct
  source 1..80: mol_type = other DNA
agcctgctgaccaaactttcaaactcagctctgatagacaattaaatctgagctgctctaaattccacatgaaaaaaaca

SEQ ID NO: 31858 - DNA, 80 bp, synthetic construct
  source 1..80: mol_type = other DNA
ggcaacaccactgataaaatgaattttatacgcaagatagtgaaaaactgtagagatgaggacacccagaagccctctcc

SEQ ID NO: 31859 - DNA, 80 bp, synthetic construct
  source 1..80: mol_type = other DNA
tatcactgtgcaccgggaagttccccatttacacgataccagacaaacttggcccctggagccctattgacatacatcat

SEQ ID NO: 31860 - DNA, 80 bp, synthetic construct
  source 1..80: mol_type = other DNA
ctgatgtgcataaacaaatttcaggggttgacctgggtctcccaaactgggggaaatatgttctaatgagcgcaggtgct

SEQ ID NO: 31861 - DNA, 80 bp, synthetic construct
  source 1..80: mol_type = other DNA
ttgatcgtcctgatgctgataatcttcctaatgacttgttgtagaaaaattgagcgaccaggatcttcacagcatagtct

SEQ ID NO: 31862 - DNA, 80 bp, synthetic construct
  source 1..80: mol_type = other DNA
cagaggaacagggaggaaagtatctgtcacttctcaaaacgggaaggtaatatcttcatgggagtcatataagagcggag

SEQ ID NO: 31863 - DNA, 80 bp, synthetic construct
  source 1..80: mol_type = other DNA
ttggggtttgacagtccccctcaacctctgaacgacagggtaaatttcagagtcacgagactttcattagtcatctctat

SEQ ID NO: 31864 - DNA, 80 bp, synthetic construct
  source 1..80: mol_type = other DNA
tgatcagacacggtcatgtagatccctataatacaaggagtcctctagtagtttcagtgactaaaggtgctctcatcccc

SEQ ID NO: 31865 - DNA, 80 bp, synthetic construct
  source 1..80: mol_type = other DNA
ctggaaacgataccaaaggctggggacaagctaaggaatatcttggatgaccccgtgcttggacacggactgaggttatg

SEQ ID NO: 31866 - DNA, 80 bp, synthetic construct
  source 1..80: mol_type = other DNA
gtatgtctcctggtgtcggattagaaggggtttttactgaggagggcgatctgcctcctatgaaggatacaagcaatagc

SEQ ID NO: 31867 - DNA, 80 bp, synthetic construct
  source 1..80: mol_type = other DNA
tcacactcattttgcatttcagcaaagtatgtatgattataaagggctggatcatctatgcttatcagtcaagaaaaaaa

SEQ ID NO: 31868 - DNA, 80 bp, synthetic construct
  source 1..80: mol_type = other DNA
cataaaagacctgactcatttctattccaaatcttcccccatagagaagctgctgaattatactctcgggaatagagggc

SEQ ID NO: 31869 - DNA, 80 bp, synthetic construct
  source 1..80: mol_type = other DNA
tgagaatcccccctgagggggtgttaagttgccttgaaagggttgactatgataaggcatttggtaggtatttagccaac

SEQ ID NO: 31870 - DNA, 80 bp, synthetic construct
  source 1..80: mol_type = other DNA
ttgaacatctatattcggctatcagggtgggcacagttgtcactgcttatgaagattgctctgggctggtgtctttcaca

SEQ ID NO: 31871 - DNA, 80 bp, synthetic construct
  source 1..80: mol_type = other DNA
atttcttgcacttgcggagcggccggaggaggcaatccacgagtttcggtgtctgtactcccgtcctttgatcagtcatt

SEQ ID NO: 31872 - DNA, 80 bp, synthetic construct
  source 1..80: mol_type = other DNA
tttctcaagaggccccctaaaggggtacttgggctcgtctacttccatgtcgacccagctatttcacgcctgggaaaaag

SEQ ID NO: 31873 - DNA, 80 bp, synthetic construct
  source 1..80: mol_type = other DNA
gtgtaataagtgtgtaaggcctatcaatgatatcacactagagacttctcagatctttgagtttccggatgtgtcaaaaa

SEQ ID NO: 31874 - DNA, 80 bp, synthetic construct
  source 1..80: mol_type = other DNA
ggatatccagaatggtttccggagctgtgcctcactttcaaaagcttcctgatatccgtctgagaccgggtgattttgaa

SEQ ID NO: 31875 - DNA, 80 bp, synthetic construct
  source 1..80: mol_type = other DNA
cctgctgacagatatttaaactcagttttgttagataataaagcctgaactgttctggacccgacatgaaaaaaacagac

SEQ ID NO: 31876 - DNA, 80 bp, synthetic construct
  source 1..80: mol_type = other DNA
ccaaggagtctcttgttatcatatctccgagtgtgtcggacttagacccgtacgataaatctcttcattccagagttttt

SEQ ID NO: 31877 - DNA, 80 bp, synthetic construct
  source 1..80: mol_type = other DNA
atgattgcactgatgttgatgattttcctgacgacgtgttgcagaaaagctaacggagcagaaactatgcaacaccgtct

SEQ ID NO: 31878 - DNA, 80 bp, synthetic construct
  source 1..80: mol_type = other DNA
ctactcgggaaggtctctggaagataaatctacccagacctctgggagagaactcaagaaggaatcgccatctgcccctc

SEQ ID NO: 31879 - DNA, 80 bp, synthetic construct
  source 1..80: mol_type = other DNA
gtggatatccagatactagactggacaagggttgatcaagaaaggaaacttgcctcctatgaaggacagaagcaatagat

SEQ ID NO: 31880 - DNA, 80 bp, synthetic construct
  source 1..80: mol_type = other DNA
acactttagaatctgacgatgacattcaaaggctgttgaaggactctctgcgcagaacaaggtgggtggaccaagaagtg

SEQ ID NO: 31881 - DNA, 80 bp, synthetic construct
  source 1..80: mol_type = other DNA
aactggacccttttagaagtttgtaggtactaagacccttagacgatgaacctagaaaaaaacaagactctgaatcagaa

SEQ ID NO: 31882 - DNA, 80 bp, synthetic construct
  source 1..80: mol_type = other DNA
aattacagaggggaactctgtctaagatgtctatcattattgctatcatgatagtattctccaaccgagttttcaatgtc

SEQ ID NO: 31883 - DNA, 80 bp, synthetic construct
  source 1..80: mol_type = other DNA
tctaaaccgctaactgaccctttgttctacccgccatctgaccccaaaattttgaagcacttcaacatatgctgcagtac

SEQ ID NO: 31884 - DNA, 80 bp, synthetic construct
  source 1..80: mol_type = other DNA
aatgatgtatctatcgacggctttgggtgatgtacccagctttgcaagacttcatgacttatacaatagaccaataactt

SEQ ID NO: 31885 - DNA, 80 bp, synthetic construct
  source 1..80: mol_type = other DNA
atctagatcccctctactagactacagctgcttataagctggacacttttaagggtttgtaggtactaagactctcaaac

SEQ ID NO: 31886 - DNA, 80 bp, synthetic construct
  source 1..80: mol_type = other DNA
agctggacacttttaagggtttgtaggtactaagactctcaaacgatacaccctgaaaaaaacaagattctgaatcagaa

SEQ ID NO: 31887 - DNA, 80 bp, synthetic construct
  source 1..80: mol_type = other DNA
agcacgattgcgaaaaacctgtgtattgtgtacattccacatgaaaaaaactaacactcctcctttcgaaccatctcgaa

SEQ ID NO: 31888 - DNA, 80 bp, synthetic construct
  source 1..80: mol_type = other DNA
ttcagcttgatgacggaaaaccgtctggcgttaatgagatggccacggcaggagaaagcaaatatcgggaggacttccaa

SEQ ID NO: 31889 - DNA, 80 bp, synthetic construct
  source 1..80: mol_type = other DNA
cctcaggaaggccgtcagaggataaatccactcagaccgtcggcagagaactcaagaaggagacaccgtctgcttcttct

SEQ ID NO: 31890 - DNA, 80 bp, synthetic construct
  source 1..80: mol_type = other DNA
caaagagaaagtcaatcttcgaaggctagaatggtggctcaaactgcttctggtccccccgctctcgaatggtctgccac

SEQ ID NO: 31891 - DNA, 80 bp, synthetic construct
  source 1..80: mol_type = other DNA
cctgctgacccattttcactctcaggcccattaaacaattgagcctgagtcgttctgaatttaacatgaaaaaaacaggc

SEQ ID NO: 31892 - DNA, 80 bp, synthetic construct
  source 1..80: mol_type = other DNA
acttgccctgaggattggaccagttatggaatcttgattgcacgaaagggggataagatcactcccgattctcttgtcga

SEQ ID NO: 31893 - DNA, 80 bp, synthetic construct
  source 1..80: mol_type = other DNA
gataaaacgtaccgatgtagaagggagttgggccttgacgggaggtatggagttaacaagagaccccacagtctcggagc

SEQ ID NO: 31894 - DNA, 80 bp, synthetic construct
  source 1..80: mol_type = other DNA
aaaaccctagactggggacttcgtgtgacattttcaccaatagcagagggaagagggcatccaaggggagcaaaacttgt

SEQ ID NO: 31895 - DNA, 80 bp, synthetic construct
  source 1..80: mol_type = other DNA
ggatttgtagatgaaagaggcttgtacaagtctctaaaaggggcatgcaagctgaagctatgtggggttcttggacttag

SEQ ID NO: 31896 - DNA, 80 bp, synthetic construct
  source 1..80: mol_type = other DNA
ctgactgtgctgatgttgacgatcttcttagtgacgtgttgcagaaaaactaatagagcagaatcaatacaacacagttc

SEQ ID NO: 31897 - DNA, 80 bp, synthetic construct
  source 1..80: mol_type = other DNA
tggagagacggggaggaaagtgtcggtaacttctcaaaacggaagagtcatatcttcatgggaatcatataagagcggag

SEQ ID NO: 31898 - DNA, 80 bp, synthetic construct
  source 1..80: mol_type = other DNA
gtgagaccaagctgtgaggacaagtcatctcttctgtatttcgagtcccgaagatcacatcccctcggggtaaggggaac

SEQ ID NO: 31899 - DNA, 80 bp, synthetic construct
  source 1..80: mol_type = other DNA
caaccgatcggacatggtcacatagattcttataataagagaaatcttctagcagctccagtgactaacggtgcttttac

SEQ ID NO: 31900 - DNA, 80 bp, synthetic construct
  source 1..80: mol_type = other DNA
cctccaagaactgataccaaaggtggtggacaagccgatagacatctcaaatgatgttgtgctcgaacacagatggaagt

SEQ ID NO: 31901 - DNA, 80 bp, synthetic construct
  source 1..80: mol_type = other DNA
tgtggtgagtccccagatattagactgggtaagagtggattaagaagggagaccttcatcctatgaaggacataagcaat

SEQ ID NO: 31902 - DNA, 80 bp, synthetic construct
  source 1..80: mol_type = other DNA
agatcaccatcatcttgcatctcagcaaaatgtgtatacttataaagggctgggtcatctatgcttttcagtcgagaaaa

SEQ ID NO: 31903 - DNA, 80 bp, synthetic construct
  source 1..80: mol_type = other DNA
tgtaaaaccgaagaacaactagtaacacttctcatcttgagattgtcgccatgatgatcgatccaggagaggtttatgat

SEQ ID NO: 31904 - DNA, 80 bp, synthetic construct
  source 1..80: mol_type = other DNA
gtgggtggaactgcagcccagtcgatgatttctctttggttgtatggtgcccattctgaatcaaacaggagccggaggtg

SEQ ID NO: 31905 - DNA, 80 bp, synthetic construct
  source 1..80: mol_type = other DNA
tataactgacttggcccatttctactcgaagtcctcccccatagagaagttattaaactgtacacttgggaatagaggac

SEQ ID NO: 31906 - DNA, 80 bp, synthetic construct
  source 1..80: mol_type = other DNA
taagaatccctccggaaggggtgctgagttgccttgaaagagttgactatgacaaggcatttgggaggtacctagctaat

SEQ ID NO: 31907 - DNA, 80 bp, synthetic construct
  source 1..80: mol_type = other DNA
cgagactccttgcaagagaccaccccttgaatccctatatcaaaactcagacatggccacccaaacacatagtagattta

SEQ ID NO: 31908 - DNA, 80 bp, synthetic construct
  source 1..80: mol_type = other DNA
atactgtctggacatgtccaacggcccaacctgctggaatggccaagatggtgggctagaaggcttacggcaaaaaggct

SEQ ID NO: 31909 - DNA, 80 bp, synthetic construct
  source 1..80: mol_type = other DNA
aaccaggttctatgtccgacatatatgctgtcgcctgggctgtcaagagaggggcttctctacgagttggagagcatatc

SEQ ID NO: 31910 - DNA, 80 bp, synthetic construct
  source 1..80: mol_type = other DNA
gagaaatgcgctttctatatacagagctatcgaggaaggagcatccaaactaggactgattatcaagaaagaagagacca

SEQ ID NO: 31911 - DNA, 80 bp, synthetic construct
  source 1..80: mol_type = other DNA
aaccgagtgctcccgaaaggttgtacatgctaagactcttgcgcgatgcatcttgaaaaaaacaagatcttgaatccgaa

SEQ ID NO: 31912 - DNA, 80 bp, synthetic construct
  source 1..80: mol_type = other DNA
agtgagtcccgtgacaacggactcagtatgagtttattgagaaaggcaatttgcctcccatgaaggacataagcaatagc

SEQ ID NO: 31913 - DNA, 80 bp, synthetic construct
  source 1..80: mol_type = other DNA
cctgctagacgaaatttttagattcggtccctttagataataaaatctgagatgtcctagagtcaacatgaaaaaaacag

SEQ ID NO: 31914 - DNA, 80 bp, synthetic construct
  source 1..80: mol_type = other DNA
acaccttagactccgacgaagacatccaaagattattgaaagactctctgcgcagaactaggtgggtggatcaagaagtc

SEQ ID NO: 31915 - DNA, 80 bp, synthetic construct
  source 1..80: mol_type = other DNA
ctctttacctagtcttcaagacctacgggactatgctggttaacccagaatacagggcaatccagcatttgtccagggca

SEQ ID NO: 31916 - DNA, 80 bp, synthetic construct
  source 1..80: mol_type = other DNA
atccagatcatctctattggactatagctgcttgtaaactggataattttaagaaacttgtatataatgagactctcaga

SEQ ID NO: 31917 - DNA, 80 bp, synthetic construct
  source 1..80: mol_type = other DNA
actggataattttaagaaacttgtatataatgagactctcagatgatgcccctagaaaaaaacgagatcccaagtcagaa

SEQ ID NO: 31918 - DNA, 80 bp, synthetic construct
  source 1..80: mol_type = other DNA
actcataaggagttgaacgacaagattgtaaaaacctataaattgtatgtattcttcatgaaaaaaactaacacccctcc

SEQ ID NO: 31919 - DNA, 80 bp, synthetic construct
  source 1..80: mol_type = other DNA
ttttgaatcatcccagacatgagcaagatttttgtcaacccgggtgctctcagagccggtctggctgatcttgagatggc

SEQ ID NO: 31920 - DNA, 80 bp, synthetic construct
  source 1..80: mol_type = other DNA
ttcaactagatgatggtaaacagtctggcattagtgagatggctaaaacaggagaaagcaagtaccgggaggatttccaa

SEQ ID NO: 31921 - DNA, 80 bp, synthetic construct
  source 1..80: mol_type = other DNA
ccgagtccaccgggcaggtcctcagaggacaagtcgactcaaactactgccagagaactcaagaaagagaccacatcaat

SEQ ID NO: 31922 - DNA, 80 bp, synthetic construct
  source 1..80: mol_type = other DNA
gtcttctcaaagagaaagtcaaccctcaaaagccagaatggcagctcaggctgcatctggtcctccagccctcgaatggt

SEQ ID NO: 31923 - DNA, 80 bp, synthetic construct
  source 1..80: mol_type = other DNA
caattccaaaaagttccagttgttggtcgagcccgacaggttaaacaaagtcatgcaagatgatctgaaccgttatgcgt

SEQ ID NO: 31924 - DNA, 80 bp, synthetic construct
  source 1..80: mol_type = other DNA
cttgatgatcgaaccttcaagcgcagccctaccagacaatgaaatctgaactgttctagatccgacatgaaaaaaacagg

SEQ ID NO: 31925 - DNA, 80 bp, synthetic construct
  source 1..80: mol_type = other DNA
caacaccactgatgaaatgaactttttccgcaagatcgtgaaaaattgtagggatgaggacacccagaagccctcgcccg

SEQ ID NO: 31926 - DNA, 80 bp, synthetic construct
  source 1..80: mol_type = other DNA
tagtgttctctctgtgtttcgggaagttccccatctacacgataccagacaagcttggtccctggagtcctattgacata

SEQ ID NO: 31927 - DNA, 80 bp, synthetic construct
  source 1..80: mol_type = other DNA
atgattttcgctcagatgaaatcgagcatctagtcgtggaagaactggtcaagaaaagagaggagtgcttagatgcactg

SEQ ID NO: 31928 - DNA, 80 bp, synthetic construct
  source 1..80: mol_type = other DNA
gaatccatcatgactaccaagtcagtaagcttcagacgtctcagtcacttgaggaaacttgtccctgggtttgggaaagc

SEQ ID NO: 31929 - DNA, 80 bp, synthetic construct
  source 1..80: mol_type = other DNA
gtgtctaagagttgggaggagatgtcatcctcatgtgaatggggtgttctttaatggtataatattaggcccagacggcc

SEQ ID NO: 31930 - DNA, 80 bp, synthetic construct
  source 1..80: mol_type = other DNA
ggtgttctttaatggtataatattaggcccagacggccatgttctgatcccggagatgcaatcgtccctcctccaacaac

SEQ ID NO: 31931 - DNA, 80 bp, synthetic construct
  source 1..80: mol_type = other DNA
taacagcactgatgttgatgattttcttgatgacgtgttgcagaaggggtaatcaagcagggtcaaaacaacatggtctt

SEQ ID NO: 31932 - DNA, 80 bp, synthetic construct
  source 1..80: mol_type = other DNA
gaagggacagggaggaaagtgtctgtcacttcccagaatggaaaagtcatatcctcatgggagtcatataaaagcggagg

SEQ ID NO: 31933 - DNA, 80 bp, synthetic construct
  source 1..80: mol_type = other DNA
gagaccaggctgtgatgacaggtcatctcttctatacttcgagtctggaggattgccgcctcttgaggttggaggggacc

SEQ ID NO: 31934 - DNA, 80 bp, synthetic construct
  source 1..80: mol_type = other DNA
tgatcagacgtggtcaggtagattgtaatagtccggagaatcttctagcagtttcagtgaccaacggtgctttcatactc

SEQ ID NO: 31935 - DNA, 80 bp, synthetic construct
  source 1..80: mol_type = other DNA
caagaaacgatactaaaggttgtggacaagccgagggatatctcagatgactacttgtttgagcacgagtggaggctaca

SEQ ID NO: 31936 - DNA, 80 bp, synthetic construct
  source 1..80: mol_type = other DNA
gtatgccccctgacaccagaatgaacaggagtcaactgagaaaagcaatttacctcctatgaaggacataagcaatagat

SEQ ID NO: 31937 - DNA, 80 bp, synthetic construct
  source 1..80: mol_type = other DNA
gaccccgttgatccaattgagtcagaggctgagcctagaggagtttccactgtacctaacatattaaggaactctgacta

SEQ ID NO: 31938 - DNA, 80 bp, synthetic construct
  source 1..80: mol_type = other DNA
tggaatttaagattgtatttcgtcatcactgagaagctccttgccaattatatcctgccactatttgatgcactgacgat

SEQ ID NO: 31939 - DNA, 80 bp, synthetic construct
  source 1..80: mol_type = other DNA
tcctcttgaggctggacaaccacccatctttgtatataatgcttagagagccatctctcagaggagaaatattttctatc

SEQ ID NO: 31940 - DNA, 80 bp, synthetic construct
  source 1..80: mol_type = other DNA
cacgtgctcctggtcagtggctataaccttgcactgcctactaagagagtcacttgggtagcgccgttaggtgtccgcgg

SEQ ID NO: 31941 - DNA, 80 bp, synthetic construct
  source 1..80: mol_type = other DNA
gccctgatcaccttgatgttaataatcctcttaatgacatgttgtagaagagtcaatcgaccagagtctacgcggcgcag

SEQ ID NO: 31942 - DNA, 80 bp, synthetic construct
  source 1..80: mol_type = other DNA
ctaggaactggtaccaaaggttgtggacgggccgggaggtatttcggatgattccgtgcctgggcatggacatgggtcat

SEQ ID NO: 31943 - DNA, 80 bp, synthetic construct
  source 1..80: mol_type = other DNA
ttgcctgtaattctagcttgagtttgtcctcccactggatcaggttaatttacaaggtagtgaagactaccagactcgtt

SEQ ID NO: 31944 - DNA, 80 bp, synthetic construct
  source 1..80: mol_type = other DNA
tcatcaagctcgcccaaactcatttgctgagttcctaaacaagacatactctagtgactcatagagggctggatcacagg

SEQ ID NO: 31945 - DNA, 80 bp, synthetic construct
  source 1..80: mol_type = other DNA
cctgctgaccaaactttcaagctcagccctgatagacagttaaatctgagctgttctaaatccaacatgaaaaaaaaaca

SEQ ID NO: 31946 - DNA, 80 bp, synthetic construct
  source 1..80: mol_type = other DNA
atccagatcctctctattagactatagctgcttataaactggatgattttgagagacttgtacataatgagactcttaga

SEQ ID NO: 31947 - DNA, 80 bp, synthetic construct
  source 1..80: mol_type = other DNA
actggatgattttgagagacttgtacataatgagactcttagatgatgcacctagaaaaaaacacgatcccaagtcagaa

SEQ ID NO: 31948 - DNA, 80 bp, synthetic construct
  source 1..80: mol_type = other DNA
actgaaaaccctacaaattgtgtgtgttctccatgaaaaaaactaacacccctcctttcgaatcgttccaaacatgagca

SEQ ID NO: 31949 - DNA, 80 bp, synthetic construct
  source 1..80: mol_type = other DNA
tcaattttccaactccgcctgggaagtcttcagaggacaagtctactcaaactgccaaccgggaacctaagaaagagaca

SEQ ID NO: 31950 - DNA, 80 bp, synthetic construct
  source 1..80: mol_type = other DNA
acatccatgtcgtcccaaaaagagagtcaaccttcaaaaaccagaatggcggctcagactgcctctggaccgccagctct

SEQ ID NO: 31951 - DNA, 80 bp, synthetic construct
  source 1..80: mol_type = other DNA
cgactggtctgccaccaacgaagaggatgatctgtctgtggaggcagaaatcgctcaccagatcgctgagagcttttcta

SEQ ID NO: 31952 - DNA, 80 bp, synthetic construct
  source 1..80: mol_type = other DNA
cctgatgatcgagcctttaaactcagccctaccagacaacagaatctggaccgttctagagtcaacatgaaaaaaacagg

SEQ ID NO: 31953 - DNA, 80 bp, synthetic construct
  source 1..80: mol_type = other DNA
caacaccactgataacatgaatttcctccgcaagatcgtgaagaactgtagggatgaggacacccaaaagccctcgcttg

SEQ ID NO: 31954 - DNA, 80 bp, synthetic construct
  source 1..80: mol_type = other DNA
ttggttatgtcacaaccacattccgaagaaagcactttcgcccaacacccgatgcgtgtagggccgcgtacaactggaaa

SEQ ID NO: 31955 - DNA, 80 bp, synthetic construct
  source 1..80: mol_type = other DNA
ctggccggcgaccccagatatgaagagtccctgcacaatccataccctgactaccattggcttcggactgttaaaaccac

SEQ ID NO: 31956 - DNA, 80 bp, synthetic construct
  source 1..80: mol_type = other DNA
cttatggacggaacgtgggtcgcgattcagacgtcagatgagaccaaatggtgcccccctgatcagttagtgaatctaca

SEQ ID NO: 31957 - DNA, 80 bp, synthetic construct
  source 1..80: mol_type = other DNA
ttctgacagcactgatgttgatgattttcttgatgacgtgttgcaagaggagtaatcaagcagggtcaaaacaacctggg

SEQ ID NO: 31958 - DNA, 80 bp, synthetic construct
  source 1..80: mol_type = other DNA
ctcgaggggacagggaggaaggtatctgtcacttcccagaatgggaaggtcatatcttcctgggagtcatataaaagtgg

SEQ ID NO: 31959 - DNA, 80 bp, synthetic construct
  source 1..80: mol_type = other DNA
gagaccaggctgtgatggcaggtcatctcttctatacttcaagtccggaggatcgccgcctcttgggggttaaagtgaac

SEQ ID NO: 31960 - DNA, 80 bp, synthetic construct
  source 1..80: mol_type = other DNA
ctccagatttaacagtcctctttgggctccgtgcaacagggtagatccaagagtcacgagactttcattcatcatctcaa

SEQ ID NO: 31961 - DNA, 80 bp, synthetic construct
  source 1..80: mol_type = other DNA
ccaagaactgataccaaaggttgtggatatgccgagggatatctcggatgactacctgtttgaatgtgggtggaggctat

SEQ ID NO: 31962 - DNA, 80 bp, synthetic construct
  source 1..80: mol_type = other DNA
agcatgtcccctgatacaaaactgaacaggagtcgactgagagaagcaatttacctcctatgaaggacataagcaataga

SEQ ID NO: 31963 - DNA, 80 bp, synthetic construct
  source 1..80: mol_type = other DNA
tgcaaggcacaagggcagccagcaacacttctcatcttgagactttcaccatgatgcttgatccgggagaagtctatgat

SEQ ID NO: 31964 - DNA, 80 bp, synthetic construct
  source 1..80: mol_type = other DNA
gaccccgttgatccgattgagtcagaagctgagcctagagggacctccaccatacctaacatattgaggaattctgacta

SEQ ID NO: 31965 - DNA, 80 bp, synthetic construct
  source 1..80: mol_type = other DNA
cataactgacctggctcatttctattccaaatcttcccccatagagaagctgttgaattgtacacttggaaacagagggc

SEQ ID NO: 31966 - DNA, 80 bp, synthetic construct
  source 1..80: mol_type = other DNA
gtgccagttatacattgcaggagatcaggtcttgtccatgtgcggaaactcgggctatgaggtcatcaaaatcttggaac

SEQ ID NO: 31967 - DNA, 80 bp, synthetic construct
  source 1..80: mol_type = other DNA
catatgttgtgaacagcctagtccagagagcagaaaagtttaggcctctcatccactccttgggggatttccctgtattt

SEQ ID NO: 31968 - DNA, 80 bp, synthetic construct
  source 1..80: mol_type = other DNA
ataaccaagttctatgccccacatatatgttatcaccgggtttatctcaggaggggcttctttatgaattagagagtata

SEQ ID NO: 31969 - DNA, 80 bp, synthetic construct
  source 1..80: mol_type = other DNA
tcgagaaatgcgctctccatataccgagctattgaggagggagcatccaaactggggttgatcattaagaaggaggagac

SEQ ID NO: 31970 - DNA, 80 bp, synthetic construct
  source 1..80: mol_type = other DNA
gtgtttaagagtcgggtggagatgtcaccctcatgtgaacggggtgttcttcaatggtatcatcttaggccctgatggcc

SEQ ID NO: 31971 - DNA, 80 bp, synthetic construct
  source 1..80: mol_type = other DNA
ttcttcaatggtatcatcttaggccctgatggccatgtgctaatcccggagatgcagtcgtctctcctccagcagcatat

SEQ ID NO: 31972 - DNA, 80 bp, synthetic construct
  source 1..80: mol_type = other DNA
gaagagaagaccattttagctctatggaaagatctgacgtcagttgatgttgggaaagacttagtcagattcaaagatca

SEQ ID NO: 31973 - DNA, 80 bp, synthetic construct
  source 1..80: mol_type = other DNA
aatatgggggctactagttgtgacgaaggactttgtgtactctcaaagttctaatagtctctttgacaggaactatacac

SEQ ID NO: 31974 - DNA, 80 bp, synthetic construct
  source 1..80: mol_type = other DNA
cacctgggctgtctagagaggggcttctatatgagctagagagcatatcgagaaatgcgctctcaatataccgagccatc

SEQ ID NO: 31975 - DNA, 80 bp, synthetic construct
  source 1..80: mol_type = other DNA
ctcagggtacaatgacgggactatcttccctgtcaacatatatggtaaggtctcccctagagactatttaaggggacttg

SEQ ID NO: 31976 - DNA, 80 bp, synthetic construct
  source 1..80: mol_type = other DNA
atctagatcatctttattagactacagctgcttgtaaacctgatagtctcggaagtctgcacatgctaagagtcttgtgt

SEQ ID NO: 31977 - DNA, 80 bp, synthetic construct
  source 1..80: mol_type = other DNA
cctgataactaaacttttaaactcaatccctctagataataaaatctgagatgtcctagagtcgacatgaaaaaaacagg

SEQ ID NO: 31978 - DNA, 80 bp, synthetic construct
  source 1..80: mol_type = other DNA
aatccctaagtggtagagaaaagtctcgccatatagggtcagctcaaggactcttgtactcaatcttagtggcaattcac

SEQ ID NO: 31979 - DNA, 80 bp, synthetic construct
  source 1..80: mol_type = other DNA
atctagatcatctttattggactacagttgcttgtaaacctgatcttccaggaagtctgcctatgctaagagtcttgtgt

SEQ ID NO: 31980 - DNA, 80 bp, synthetic construct
  source 1..80: mol_type = other DNA
aacctgatcttccaggaagtctgcctatgctaagagtcttgtgtgatgtgtcttgaaaaaaacaagatcttgaatccgag

SEQ ID NO: 31981 - DNA, 80 bp, synthetic construct
  source 1..80: mol_type = other DNA
tcgatcaaccaaggtcatgtaggttttcataatgtgggacatcttctagcagtttcagtgaccaacggtgctttcattct

SEQ ID NO: 31982 - DNA, 80 bp, synthetic construct
  source 1..80: mol_type = other DNA
agtacgtcccatgatagcgaactcaatatgagtcgattgagaagggcaatctgactcccatgaaggacataagcaatagc

SEQ ID NO: 31983 - DNA, 80 bp, synthetic construct
  source 1..80: mol_type = other DNA
gatcaatcggatgacccagacacctcaacgagtcgggagagtgtggccttgctcctcagagagggcagatttacttaggg

SEQ ID NO: 31984 - DNA, 80 bp, synthetic construct
  source 1..80: mol_type = other DNA
cttgctaaccggacttttaaactcagtccttctagatagtaaaatctgagatgtcctatagttaacatgaaaaaaacagc

SEQ ID NO: 31985 - DNA, 80 bp, synthetic construct
  source 1..80: mol_type = other DNA
gtacgtcccatgataacggacttgacatgagtcagttaagaaaggcaatccgcctcccatgaaggacataagcaatagct

SEQ ID NO: 31986 - DNA, 80 bp, synthetic construct
  source 1..80: mol_type = other DNA
ctcgcgattccttgcccgagaccaccccttgaccccttatatcaaaactcaaacatggccacccaaacatatagtagacc

SEQ ID NO: 31987 - DNA, 80 bp, synthetic construct
  source 1..80: mol_type = other DNA
attctagcctgagtctgtcatctcactggatcaggctgatttacaaaatagtgaagactaccagactcgttggcagcatc

SEQ ID NO: 31988 - DNA, 80 bp, synthetic construct
  source 1..80: mol_type = other DNA
gaggacctatccggagaggtagaaagacaccttcatgggtacaacaggtggatcactctcaaggatatcagatctagatc

SEQ ID NO: 31989 - DNA, 80 bp, synthetic construct
  source 1..80: mol_type = other DNA
atctttactagaatacagttgcttgtagaccggataatcccgggagcccacacatactgagactcgtccatgatgtatct

SEQ ID NO: 31990 - DNA, 80 bp, synthetic construct
  source 1..80: mol_type = other DNA
gaccggataatcccgggagcccacacatactgagactcgtccatgatgtatcttgaaaaaaacaaggtcttgaatccgag

SEQ ID NO: 31991 - DNA, 80 bp, synthetic construct
  source 1..80: mol_type = other DNA
tgcgtcctgctaaccgagcttctaagcccagtttctccagacaatcaaatctgagatgtcctagagtctacatgaaaaaa

SEQ ID NO: 31992 - DNA, 80 bp, synthetic construct
  source 1..80: mol_type = other DNA
ccaaagagtctcttgttgtcatatctccaagtgtggcggatttggacctgtacgacaaatccctccactcaagggtcttc

SEQ ID NO: 31993 - DNA, 80 bp, synthetic construct
  source 1..80: mol_type = other DNA
cctagcgggaagtgctcaggaataacggtatcttccacctactgctcaactaaccatgattacaccatttggatgcccga

SEQ ID NO: 31994 - DNA, 80 bp, synthetic construct
  source 1..80: mol_type = other DNA
gcgagactagactgtgaggaccggttatccttttgacacctcaagtcctgaaaatcaccttccccctaggtttgaagtgg

SEQ ID NO: 31995 - DNA, 80 bp, synthetic construct
  source 1..80: mol_type = other DNA
caggaactgataccaaaggttgtgggcaggccaaggagtatttcggatgactccgtgcgtgtgctcggacagaggttata

SEQ ID NO: 31996 - DNA, 80 bp, synthetic construct
  source 1..80: mol_type = other DNA
aagtggtatctagattcgcgatccattgcccgagatcaccccttgactccttatatcaaaacccaaacatggccacccaa

SEQ ID NO: 31997 - DNA, 80 bp, synthetic construct
  source 1..80: mol_type = other DNA
tggcctgtaactccagcttgagtctttcgtctcactggatcaggttgatctacaagatagtaaagaccaccagactcgtt

SEQ ID NO: 31998 - DNA, 80 bp, synthetic construct
  source 1..80: mol_type = other DNA
ggcagggtggaggacctctccggagaggtcgagagacaccttcatggctacaacaggtggatcaccctcgaggatgtcag

SEQ ID NO: 31999 - DNA, 80 bp, synthetic construct
  source 1..80: mol_type = other DNA
atctagatcatctctcctagaatacagttgcttgtgagctggacaccctcagagggcagtacatgctaatactcttgtac

SEQ ID NO: 32000 - DNA, 80 bp, synthetic construct
  source 1..80: mol_type = other DNA
agctggacaccctcagagggcagtacatgctaatactcttgtactatgtgtcttgaaaaaaacgaagccttaagtctgag

SEQ ID NO: 32001 - DNA, 80 bp, synthetic construct
  source 1..80: mol_type = other DNA
ttcatgaagagttgaacggcgagataccagacatctattgactatagatatcccgcatgaaaaaaactaacacccctcct

SEQ ID NO: 32002 - DNA, 80 bp, synthetic construct
  source 1..80: mol_type = other DNA
cttgaaccatctcagatatgagtaaaatctttgtcaatccgagtgcaattagagccggtctggccgatctcgagatggcc

SEQ ID NO: 32003 - DNA, 80 bp, synthetic construct
  source 1..80: mol_type = other DNA
ttcacttggacgatagagaaccgtctgacttcagcgggatggtcaagtcgggagaaggcaagtatccggaggattttcaa

SEQ ID NO: 32004 - DNA, 80 bp, synthetic construct
  source 1..80: mol_type = other DNA
atggatgaaggtgaagatcctatcctcctgttccaatcgtacctggacactgttggggtccaaatggtcaggcaaatgag

SEQ ID NO: 32005 - DNA, 80 bp, synthetic construct
  source 1..80: mol_type = other DNA
tatcaggtatgaacgccgccaaactcgaccccgatgatgtatgttcctacctggcagcggccatgcagttttttgaggga

SEQ ID NO: 32006 - DNA, 80 bp, synthetic construct
  source 1..80: mol_type = other DNA
cgtccaggaaaatcttcggaggacaagttcacccagaccaccggtcaagaacccaagaaggaaacagcagccacttcttt

SEQ ID NO: 32007 - DNA, 80 bp, synthetic construct
  source 1..80: mol_type = other DNA
tcagagagaaaaacaatcttcaaaaaccagaatggctgctcaagcagcctctggtcctccagccctcgaatggtctgcta

SEQ ID NO: 32008 - DNA, 80 bp, synthetic construct
  source 1..80: mol_type = other DNA
cttgttgacaggttgttgaaaatcagctctgctaaactatagactctcagaggttctggattcgacatgaaaaaaacagg

SEQ ID NO: 32009 - DNA, 80 bp, synthetic construct
  source 1..80: mol_type = other DNA
caacaccactgataacatgaactttctacgaaagatagtaaaaaattgtagagaagaggacccccaaaagtcctcctatg

SEQ ID NO: 32010 - DNA, 80 bp, synthetic construct
  source 1..80: mol_type = other DNA
acatgtcctgaaaactggactagctacggaatattgattgcaaggaaaggagacaagatcaccccagattctattgtgga

SEQ ID NO: 32011 - DNA, 80 bp, synthetic construct
  source 1..80: mol_type = other DNA
tcggctatgtcaccactacgttcagaagaaagcatcttcgcccgacaccggatgcctgtagatccgcgtacaactggaag

SEQ ID NO: 32012 - DNA, 80 bp, synthetic construct
  source 1..80: mol_type = other DNA
atggccggtgaccccagatatgaagaatctctgcacaatccttaccctgactaccactggcttcgcaccgtaaaaaccac

SEQ ID NO: 32013 - DNA, 80 bp, synthetic construct
  source 1..80: mol_type = other DNA
aatccaagactggggacgtcttgtgacatctttaccaatagtcgaggaaagagagcatccagaggaaataagacttgcgg

SEQ ID NO: 32014 - DNA, 80 bp, synthetic construct
  source 1..80: mol_type = other DNA
atttgtggatgaaagaggcttgtataagtctctaaaaggagcatgcaaactcaaactgtgtggggttcatggactgagac

SEQ ID NO: 32015 - DNA, 80 bp, synthetic construct
  source 1..80: mol_type = other DNA
gatgtgcacaagcaggtctcggtggttgacctgggtcttccagactggggaaaatatattctggtgagtgcaggagccct

SEQ ID NO: 32016 - DNA, 80 bp, synthetic construct
  source 1..80: mol_type = other DNA
ggtcgccttgatgttgataattctcctaatgacatgttgcagaagagtccatcgacgggagtctaaacaacacagtctca

SEQ ID NO: 32017 - DNA, 80 bp, synthetic construct
  source 1..80: mol_type = other DNA
gagggacagagaggaaggtgtcggtcatctcccaaaacggaaaagccatatcctcatgggagtcatataagaacgggagt

SEQ ID NO: 32018 - DNA, 80 bp, synthetic construct
  source 1..80: mol_type = other DNA
ggaaaagccatatcctcatgggagtcatataagaacgggagtgacaccagaatgtgagggccggtccttctttcgatgct

SEQ ID NO: 32019 - DNA, 80 bp, synthetic construct
  source 1..80: mol_type = other DNA
gacaccagaatgtgagggccggtccttctttcgatgcttttattcttggaggtcatctccccctggggttaagggtggaa

SEQ ID NO: 32020 - DNA, 80 bp, synthetic construct
  source 1..80: mol_type = other DNA
tctcagagttcaataaacctcctcagacttcgtgtaacagggtagattccagagtcacgaagttttcttcaatcatccta

SEQ ID NO: 32021 - DNA, 80 bp, synthetic construct
  source 1..80: mol_type = other DNA
gttgatcagacaaggtcgtgtagattcttgtagtacgagaaatcttctggcagttgccgtgattaacggtgctttcattc

SEQ ID NO: 32022 - DNA, 80 bp, synthetic construct
  source 1..80: mol_type = other DNA
tataagaactaaggccaaaggttgtggacaaaccagggggtattgcagatgattcagcatttgggcacggacagaagtta

SEQ ID NO: 32023 - DNA, 80 bp, synthetic construct
  source 1..80: mol_type = other DNA
tagtgcaccccccgatagcggacttaacacaagtcagttgagaagggcaccctgcctcccgtgaaggacataagccatag

SEQ ID NO: 32024 - DNA, 80 bp, synthetic construct
  source 1..80: mol_type = other DNA
atcacaatcatcctgcatcttgttaaattgtgcacaactataaagggctgttccatctaaactcttcaatcgagaaaaaa

SEQ ID NO: 32025 - DNA, 80 bp, synthetic construct
  source 1..80: mol_type = other DNA
gtgggcggtactgctgcacaatcaatgatttctctctggctatatggcgcccattctgagtcgaacaggagcaggaggtg

SEQ ID NO: 32026 - DNA, 80 bp, synthetic construct
  source 1..80: mol_type = other DNA
tataactgatctagcccaattctattccaaatcttcccccatagagaagctgttgaactatacacttggaaatagagggt

SEQ ID NO: 32027 - DNA, 80 bp, synthetic construct
  source 1..80: mol_type = other DNA
ctatctcttgcacctgcggagtagcaggaggaggcaatcccagagtttcagtatctgtactcccatccttcgaccagtcc

SEQ ID NO: 32028 - DNA, 80 bp, synthetic construct
  source 1..80: mol_type = other DNA
gctgcaacaggtgtgtaaggcctatcgaggagatcatactggagacccctcaaattttcgagtttccagatgtgtcgaag

SEQ ID NO: 32029 - DNA, 80 bp, synthetic construct
  source 1..80: mol_type = other DNA
agaatatctagaatggtttctggagctgtacctcactttcagaaacttcctgatatccgtctgaggccaggtgattttga

SEQ ID NO: 32030 - DNA, 80 bp, synthetic construct
  source 1..80: mol_type = other DNA
aatccctaagtggtagagagaaatctcgtcatatagggtcggctcaggggctcctttattcgatcctggtggcaattcat

SEQ ID NO: 32031 - DNA, 80 bp, synthetic construct
  source 1..80: mol_type = other DNA
gattctggatacaacgacgggaccatcttccctgtcaacatatacggcagagtctccccaagagactatctgagaggact

SEQ ID NO: 32032 - DNA, 80 bp, synthetic construct
  source 1..80: mol_type = other DNA
gtgggtgggaccgctgcacaatcaatgatttccctttggttatatggtgcccattctgaatcaaacaggagccggagatg

SEQ ID NO: 32033 - DNA, 80 bp, synthetic construct
  source 1..80: mol_type = other DNA
aaccggatattcccggaagttagcacatgctaagactcttgtgtgatgtgtcttgaaaaaaacaagatattgaatccgag

SEQ ID NO: 32034 - DNA, 80 bp, synthetic construct
  source 1..80: mol_type = other DNA
cagggtgccggaaatttatcgattgtgtatatccatcatgaaaaaaactaacacccctcctttcgaaccatcccaaatat

SEQ ID NO: 32035 - DNA, 80 bp, synthetic construct
  source 1..80: mol_type = other DNA
gagcaagatcttcgtcaatccgagtgctatcagagccggcctggccgatcttgagatggctgaggagactgttgatctga

SEQ ID NO: 32036 - DNA, 80 bp, synthetic construct
  source 1..80: mol_type = other DNA
ttcatttggatgacgggaaatcgtccaaccttgatgagatggtcaaggcgggggaaggcaagtatcgagaggactttcag

SEQ ID NO: 32037 - DNA, 80 bp, synthetic construct
  source 1..80: mol_type = other DNA
gtcaattcaaagaaattccaattgttagtcgaagccgacaaactaaataagatcatgcaagatgatttgaatcgatatgt

SEQ ID NO: 32038 - DNA, 80 bp, synthetic construct
  source 1..80: mol_type = other DNA
atcctgataacctgacttcaaaactcagtccctctaggtaataaaatctgagatgtcctatagtcaacatgaaaaaaaca

SEQ ID NO: 32039 - DNA, 80 bp, synthetic construct
  source 1..80: mol_type = other DNA
tgatcaaataagatcatgtagattctcataatacgggagaatttttttagcagtttcggtgaccaacggtgctttcattc

SEQ ID NO: 32040 - DNA, 80 bp, synthetic construct
  source 1..80: mol_type = other DNA
cagcacgtcccatgatagcggacttaacgtgagtcgcttgagaagggcaatctgcctcccatgaaggacataagcaatag

SEQ ID NO: 32041 - DNA, 80 bp, synthetic construct
  source 1..80: mol_type = other DNA
tgtagatcagaggagcaacggacaacacctctcatcccgagacctgcatcaagatgcttgatccaggagaggtctatgat

SEQ ID NO: 32042 - DNA, 80 bp, synthetic construct
  source 1..80: mol_type = other DNA
gaccctgttgatccaatcgagccagaggctgaatctagaggggcccccaccgtccccaacattttgagaaactctgacta

SEQ ID NO: 32043 - DNA, 80 bp, synthetic construct
  source 1..80: mol_type = other DNA
gttatatgatcaagttcacattaagaaagtgatcgataagtcctaccaggagtgtttggcgagtgacctggccaggagga

SEQ ID NO: 32044 - DNA, 80 bp, synthetic construct
  source 1..80: mol_type = other DNA
agctggacaccctcagagagcagcacatgctaatactcttatactatgtgtctagaaaaaaacaaaaccataagtctgaa

SEQ ID NO: 32045 - DNA, 80 bp, synthetic construct
  source 1..80: mol_type = other DNA
cttgttgaccagttgttgaaaatcagccccgctaaattataggttctaagaggttctggattcgacatgaaaaaaacagg

SEQ ID NO: 32046 - DNA, 80 bp, synthetic construct
  source 1..80: mol_type = other DNA
gattaccttgattttgataattttcctaatgacatgttgcagaagagtccatcgacgagaatccaagcaacacagtctca

SEQ ID NO: 32047 - DNA, 80 bp, synthetic construct
  source 1..80: mol_type = other DNA
agctgaatactgctagaggtttataagtaccaaggctttcggacgatgcgccttgaaaaaaacgagatcccgaatcagaa

SEQ ID NO: 32048 - DNA, 80 bp, synthetic construct
  source 1..80: mol_type = other DNA
ccagattgaaaatgccccacaaattgtgtatattccacatgaaaaaaactaacacccctcctttcgaaccatcctaaaca

SEQ ID NO: 32049 - DNA, 80 bp, synthetic construct
  source 1..80: mol_type = other DNA
ctcataccgcatctgcatcagctaagctccgcgtcctttaccaaggaaataacatcactgtaactgcctatgcaaacggc

SEQ ID NO: 32050 - DNA, 80 bp, synthetic construct
  source 1..80: mol_type = other DNA
gaagcagaaaacacacacggtctacaagaggcctgatacccagtcaattcagaaggttcaggccgagtttgacagctttg

SEQ ID NO: 32051 - DNA, 80 bp, synthetic construct
  source 1..80: mol_type = other DNA
ggacgagcagggaggtatgcggtcgaagcgtacgacggccgagtcctagtgccctcaggctatgcaatctcgcctgaaga

SEQ ID NO: 32052 - DNA, 80 bp, synthetic construct
  source 1..80: mol_type = other DNA
cacgtcaacgtactcctaacgcgtacggaaggtaaactggtatggaagacactttccggcgacccgtggataaagacgct

SEQ ID NO: 32053 - DNA, 80 bp, synthetic construct
  source 1..80: mol_type = other DNA
ctaagagagtcacttgggtagcgccgttaggtgtccgcggagcggactacacatacaacctagagttgggtctgccagca

SEQ ID NO: 32054 - DNA, 80 bp, synthetic construct
  source 1..80: mol_type = other DNA
agacagagagcagacgtcgctatataccaagacgtctatgctgtacacgcacccacgtcgctataccaccaggcgattaa

SEQ ID NO: 32055 - DNA, 80 bp, synthetic construct
  source 1..80: mol_type = other DNA
ataattctgtattattatgagctgtaccctactatgactgtagtagttcggtcagtggccacgttcatactcctgtcgat

SEQ ID NO: 32056 - DNA, 80 bp, synthetic construct
  source 1..80: mol_type = other DNA
gtgtcgacctgggtctccccagctggggaaagtatgttttggtgagtgcaggggtcctggtcgtcctgatgttgacaatt

SEQ ID NO: 32057 - DNA, 80 bp, synthetic construct
  source 1..80: mol_type = other DNA
ttcataatgacatgttgcgggagagtccatcgacccaagtctacacaacacagtctcggagggaccgggaggaaggtgtc

SEQ ID NO: 32058 - DNA, 80 bp, synthetic construct
  source 1..80: mol_type = other DNA
atgtagatcttctctacttgattacagttgcttgtgaactggacactctcagaggcttgtaaaagctaagactcttatac

SEQ ID NO: 32059 - DNA, 80 bp, synthetic construct
  source 1..80: mol_type = other DNA
aactggacactctcagaggcttgtaaaagctaagactcttatacgatgcaccttgaaaaaaacaagatcttgactctgag

SEQ ID NO: 32060 - DNA, 80 bp, synthetic construct
  source 1..80: mol_type = other DNA
caggggtcgataccaaaggttgtggacaggtctagggttacctcagataactccgtgctcaggcacggacagaggttata

SEQ ID NO: 32061 - DNA, 80 bp, synthetic construct
  source 1..80: mol_type = other DNA
ggtctctttgaagcctgagattatcgtggatcaatatgagtacaagtaccctgctatcaaagatttgaaaaagccctgta

SEQ ID NO: 32062 - DNA, 80 bp, synthetic construct
  source 1..80: mol_type = other DNA
cacccttgaggatgtcagatctagatcatctttattagactacagctgcttgtaaaccggatattcccggaaatctgcac

SEQ ID NO: 32063 - DNA, 80 bp, synthetic construct
  source 1..80: mol_type = other DNA
aatcagagacttgggacatcttgtgacatttttgccaatagcagagggaagagagcgtccaaagggagtaaaacctgcgg

SEQ ID NO: 32064 - DNA, 80 bp, synthetic construct
  source 1..80: mol_type = other DNA
agaagaatgtttctcgagtgtgataaaaccaatcaaaggctaagaaaacagattcagatatgtgaggaagaagcgactga

SEQ ID NO: 32065 - DNA, 80 bp, synthetic construct
  source 1..80: mol_type = other DNA
atgatagtaaccatgaatggaaatgactttcaaactggaggaattggcaatttacctattagaaattggacatttgattt

SEQ ID NO: 32066 - DNA, 80 bp, synthetic construct
  source 1..80: mol_type = other DNA
gattacccttgaagatatcagatgtagatcatctctacttgattacagctgcttgtgaactggacactctcagaggcttg

SEQ ID NO: 32067 - DNA, 80 bp, synthetic construct
  source 1..80: mol_type = other DNA
ataacgtgccatcacgcgttagtccaagggtatataaatcgcctcaggagaccgcacaagaagtaagttcgaccacgtcg

SEQ ID NO: 32068 - DNA, 80 bp, synthetic construct
  source 1..80: mol_type = other DNA
agctgcgtgacacacacacgcagcttacgggtttcatactgctctactctgcattgcaagagattaaagtacccatcatg

SEQ ID NO: 32069 - DNA, 80 bp, synthetic construct
  source 1..80: mol_type = other DNA
tttagccgtcatgagcatcggtgcccgcactgtgtccgcgtacgagcacgcaacagtgatcccgaacacggtgggagtac

SEQ ID NO: 32070 - DNA, 80 bp, synthetic construct
  source 1..80: mol_type = other DNA
tcttgttagcagaccagggtatagccctatggtcttagaaatggagctacagtcggtcactctggaaccaacattgttct

SEQ ID NO: 32071 - DNA, 80 bp, synthetic construct
  source 1..80: mol_type = other DNA
tggactacatcacgtgtgagtataaaacaatcacaccgtccccgtacgtaaaatgctgtggtacagctgaatgtaaggcc

SEQ ID NO: 32072 - DNA, 80 bp, synthetic construct
  source 1..80: mol_type = other DNA
tatgtggggaggagcatattgcttctgtgacgcagagaacacacaactcagtgaggcacacgttgagaaatcagaatcat

SEQ ID NO: 32073 - DNA, 80 bp, synthetic construct
  source 1..80: mol_type = other DNA
cccacacagcttcagtatcagctaaactacgtgtcttttaccaagggaataatatcaccgtgtctgcatacgctaatggt

SEQ ID NO: 32074 - DNA, 80 bp, synthetic construct
  source 1..80: mol_type = other DNA
gatcacgcagtcacggtaaaagacgcgaagtttgttatcggtccactatcgtccgcctggtcaccatttgataataagat

SEQ ID NO: 32075 - DNA, 80 bp, synthetic construct
  source 1..80: mol_type = other DNA
gtgtgtacttacgtaccagctactatctgcgatcagatgactggaatccttgccactgaggtaaccccagaagacgcaca

SEQ ID NO: 32076 - DNA, 80 bp, synthetic construct
  source 1..80: mol_type = other DNA
agagccgcacgccagacagcaaggatgtctatgcgaatacgcagttaatactgcaaagaccagcggcaggagcaatacac

SEQ ID NO: 32077 - DNA, 80 bp, synthetic construct
  source 1..80: mol_type = other DNA
gtgccttactcccaggcaccttcgggctttaagtactggctcaaagaaaaaggggcatcattgcagcatacggcaccatt

SEQ ID NO: 32078 - DNA, 80 bp, synthetic construct
  source 1..80: mol_type = other DNA
tggctgtcagatagcaacaaacccggtaagagcagtgaactgtgcagtgggcaacataccagtctccattgacatcccag

SEQ ID NO: 32079 - DNA, 80 bp, synthetic construct
  source 1..80: mol_type = other DNA
atgcagctttcaccagggtcactgacgctccttccgtcacagacatgtcctgtgaagtggcttcgtgtacccattcatct

SEQ ID NO: 32080 - DNA, 80 bp, synthetic construct
  source 1..80: mol_type = other DNA
gattttggaggtgccgcagtcataaagtacacagctagtaaaaaggggaaatgcgctgtgcactctttaacaaacgcggt

SEQ ID NO: 32081 - DNA, 80 bp, synthetic construct
  source 1..80: mol_type = other DNA
cactatccgcgaacctaacgtagatgtcgagggaacagcacaactacagattgccttctcgaccgcactagctagtgcgg

SEQ ID NO: 32082 - DNA, 80 bp, synthetic construct
  source 1..80: mol_type = other DNA
aatttaaggtgcagatctgctccacacaggtacactgctcagcgacgtgccatcctcctaaagatcacatagtcaactac

SEQ ID NO: 32083 - DNA, 80 bp, synthetic construct
  source 1..80: mol_type = other DNA
ccgtcaccgcacaccacactaggagtgcaggacatctcaacgacagctatgtcttgggtccagaagattacaggaggagt

SEQ ID NO: 32084 - DNA, 80 bp, synthetic construct
  source 1..80: mol_type = other DNA
gggactcgtggttgctatagctgctttgatcttaattatagttctctgcgtatcgtttagcagacactaaagcatacatg

SEQ ID NO: 32085 - DNA, 80 bp, synthetic construct
  source 1..80: mol_type = other DNA
ccccaaagtaacatactatacaggtatacgtgctccctgagcagcacaatatatgtattatctataaaagaaaaacaaaa

SEQ ID NO: 32086 - DNA, 80 bp, synthetic construct
  source 1..80: mol_type = other DNA
gaaactactggttgggctaaaccaacggatagtggtcaatggcaggacgcaacgcaatacaaacaccatgaaaaattacc

SEQ ID NO: 32087 - DNA, 80 bp, synthetic construct
  source 1..80: mol_type = other DNA
atataaaaattataaaatacaaaagtataaaaacaggtatcagtacccccttagaggtacatcacttaaccaggtattag

SEQ ID NO: 32088 - DNA, 80 bp, synthetic construct
  source 1..80: mol_type = other DNA
tgcccccttagaggcacattatataaccaggtataggtgcccccttagaggcacactaacaataggtataagtgccccct

SEQ ID NO: 32089 - DNA, 80 bp, synthetic construct
  source 1..80: mol_type = other DNA
tagtggcacactaaccaccacaattggtaatatgaagagacgtaggtatgaagcttcataaaagctgccgaacttactct

SEQ ID NO: 32090 - DNA, 80 bp, synthetic construct
  source 1..80: mol_type = other DNA
tgctcccaacagttgctcaggccttcagcaagtgggccaaagaatgtcgaaaggacatggaggacgaaaaactcttgggt

SEQ ID NO: 32091 - DNA, 80 bp, synthetic construct
  source 1..80: mol_type = other DNA
gtccgagagaggaccttaacatgctgttgcctatgggcattcagaaagcacaagacgcatacggtgtacaaaagaccgga

SEQ ID NO: 32092 - DNA, 80 bp, synthetic construct
  source 1..80: mol_type = other DNA
gtcgtcaggtttatcaattccgctgagaaccagaatcaagtggcttttgagcaaagctccaaaacacgagcaactaccac

SEQ ID NO: 32093 - DNA, 80 bp, synthetic construct
  source 1..80: mol_type = other DNA
acagcggaaacgcagaggaagcagctcaggctgaaatggatgcggtggaagaacgggaggctgagctaacccgagaagct

SEQ ID NO: 32094 - DNA, 80 bp, synthetic construct
  source 1..80: mol_type = other DNA
atgccaccattgcaagcgacacaggatgacgttcaggtagaaattgatgtagagcaacttgaagaccgagcaggagcggg

SEQ ID NO: 32095 - DNA, 80 bp, synthetic construct
  source 1..80: mol_type = other DNA
catagtcgaaacaccaaggggagcaatcaaagtcacagcccaaccgtcagaccttgttgtcggagagtacttagtactga

SEQ ID NO: 32096 - DNA, 80 bp, synthetic construct
  source 1..80: mol_type = other DNA
caccgcaggcggtcctgcgcagccaaaaactcagtctgattcatgcgcttgcagagcaggtaaaaacgtgcacacatagt

SEQ ID NO: 32097 - DNA, 80 bp, synthetic construct
  source 1..80: mol_type = other DNA
gggcgagcaggcaggtacgcggttgaagcatacgacgggcgtgttctagtgccctcgggctacgcgataccccaggaaga

SEQ ID NO: 32098 - DNA, 80 bp, synthetic construct
  source 1..80: mol_type = other DNA
tttccagagcttaagcgaaagcgccactatggtatttaatgagcgagagtttgtgaaccggaagttgcaccacatcgcca

SEQ ID NO: 32099 - DNA, 80 bp, synthetic construct
  source 1..80: mol_type = other DNA
tgcacggcccagcgctgaacactgatgaagagtcatacgaactggtaagggttgagaaaacagaacacgagtacgtctat

SEQ ID NO: 32100 - DNA, 80 bp, synthetic construct
  source 1..80: mol_type = other DNA
atgacgttgatcagaagaaatgctgcaagagagaggaagcaacaggactagtgctagtaggcgacttaactagcccacca

SEQ ID NO: 32101 - DNA, 80 bp, synthetic construct
  source 1..80: mol_type = other DNA
taccatgagttcgcctacgaaggactaaaaatccgcccagcatgtccatacaaaacggcagttataggtgtcttcggagt

SEQ ID NO: 32102 - DNA, 80 bp, synthetic construct
  source 1..80: mol_type = other DNA
caagaaatctccaatgatgtaatgcggcaaaggaaattggagatatctgcacgtacagtcgactcactactcctgaatgg

SEQ ID NO: 32103 - DNA, 80 bp, synthetic construct
  source 1..80: mol_type = other DNA
atgtaacaagccagtggaagtactgtacgtggatgaggcatttgcttgtcattcgggaaccctgttggcactgatagcca

SEQ ID NO: 32104 - DNA, 80 bp, synthetic construct
  source 1..80: mol_type = other DNA
tggttagaccgcgtcagaaggtcgtactttgtggcgacccaaagcagtgcggattcttcaatatgatgcaaatgaaggtt

SEQ ID NO: 32105 - DNA, 80 bp, synthetic construct
  source 1..80: mol_type = other DNA
acgggcacaacaaaaccagaacccggggacttagtgttaacgtgtttccgtggatgggttaagcagttgcaaatagacta

SEQ ID NO: 32106 - DNA, 80 bp, synthetic construct
  source 1..80: mol_type = other DNA
ccgtggaaacgaagtcatgacagcagctgcttctcaggggctgactagaaaaggtgtttatgcagtaaggcagaaagtca

SEQ ID NO: 32107 - DNA, 80 bp, synthetic construct
  source 1..80: mol_type = other DNA
acgaaaaccctctgtatgcatcaacttcagaacacgttaacgtgttattgacacgcacagagggcaagttgatatggaaa

SEQ ID NO: 32108 - DNA, 80 bp, synthetic construct
  source 1..80: mol_type = other DNA
aggagtgggaagcagaacacgcctccatcatggcaggaatatgcaatcaccagatggcttttgacacatttcagaacaaa

SEQ ID NO: 32109 - DNA, 80 bp, synthetic construct
  source 1..80: mol_type = other DNA
gctaatgtatgctgggctaaatgcctggtccctattcttgacaccgctggaatcaaactaagtgacaggcagtggtctca

SEQ ID NO: 32110 - DNA, 80 bp, synthetic construct
  source 1..80: mol_type = other DNA
atatatggggtagatctggacagcggactattttcaaagccgctgatatccgtctactatgcagacaaccactgggacaa

SEQ ID NO: 32111 - DNA, 80 bp, synthetic construct
  source 1..80: mol_type = other DNA
tagaccaggaggaaaaatgttcgggttcaaccctgaggtggcacttatgcttgaaaagaaatatccctttacaaaaggta

SEQ ID NO: 32112 - DNA, 80 bp, synthetic construct
  source 1..80: mol_type = other DNA
agtggaacatcaacaagcagatatgtataactaccagaaaggttgacgaatttaaccccgaaaccaacataataccggcc

SEQ ID NO: 32113 - DNA, 80 bp, synthetic construct
  source 1..80: mol_type = other DNA
accctgagaggctcgcgaattacgcgagaaaacttgcatcagccgctggaaaggtgacagataaaaacatctccggaaaa

SEQ ID NO: 32114 - DNA, 80 bp, synthetic construct
  source 1..80: mol_type = other DNA
aaccgaagactgccgcactcactcgtggctgaacaccatacagtgagaggggaaagaatggaatggctggtaaacaaaat

SEQ ID NO: 32115 - DNA, 80 bp, synthetic construct
  source 1..80: mol_type = other DNA
caacggtcaccacatgttgttggttagtggttataatcttatattaccaacaaaaagagtcacctgggtagcaccgttag

SEQ ID NO: 32116 - DNA, 80 bp, synthetic construct
  source 1..80: mol_type = other DNA
gcaccagaggtgcagactacacatataacctggaacttggtctaccagccacactaggcagatatgacctggtagttatc

SEQ ID NO: 32117 - DNA, 80 bp, synthetic construct
  source 1..80: mol_type = other DNA
tagggagggactctctacggctgttaaagccgggaggttcacttctgattagagcttacgggtacgccgaccgaaccagt

SEQ ID NO: 32118 - DNA, 80 bp, synthetic construct
  source 1..80: mol_type = other DNA
tgttaaagccgggaggttcacttctgattagagcttacgggtacgccgaccgaaccagtgaaagggtcattagcgtattg

SEQ ID NO: 32119 - DNA, 80 bp, synthetic construct
  source 1..80: mol_type = other DNA
gaaagggtcattagcgtattgggacgcaagttcagatcgtccagggctctaaaacctcagtgcatcacgagcaatacaga

SEQ ID NO: 32120 - DNA, 80 bp, synthetic construct
  source 1..80: mol_type = other DNA
aatgttcttcctatttagccgattcgacaacggaagaaggaacttcaccacacatgttatgaacaaccagctgaatgcag

SEQ ID NO: 32121 - DNA, 80 bp, synthetic construct
  source 1..80: mol_type = other DNA
tgtatgcaggactggccactagagcgggctgtgctccgtcataccgtgtgaaacggatggacatcgcgaaaaacactgag

SEQ ID NO: 32122 - DNA, 80 bp, synthetic construct
  source 1..80: mol_type = other DNA
caatccacgcggagtaccaggcgatggagtatgtaaagccgtgtatagaaaatggccagaatcattcagaaacagtgcaa

SEQ ID NO: 32123 - DNA, 80 bp, synthetic construct
  source 1..80: mol_type = other DNA
attaatgatctacaagctgtgatggccgtaccgaatatggaaacatccacattctgcctacacactgatgctacatgcaa

SEQ ID NO: 32124 - DNA, 80 bp, synthetic construct
  source 1..80: mol_type = other DNA
caccagtggggactgcaaagacaatcatgtgcggccaataccccgtcatccacgcagtaggccctaacttctcaaattat

SEQ ID NO: 32125 - DNA, 80 bp, synthetic construct
  source 1..80: mol_type = other DNA
tctgaggctgaaggggatagggaattggcttcagtgtatagagaagtggcgaaagaagtgtctaggctaggagtgagcag

SEQ ID NO: 32126 - DNA, 80 bp, synthetic construct
  source 1..80: mol_type = other DNA
tgtagccatccctttgctttcaaccggtgtgtactcaggaggcaaagacagactgctgcaatcactaaaccatcttttca

SEQ ID NO: 32127 - DNA, 80 bp, synthetic construct
  source 1..80: mol_type = other DNA
cagcgatggattcgacagatgcagatgttgtcatctattgcagggacaaggaatgggagaagaagatcactgaagccata

SEQ ID NO: 32128 - DNA, 80 bp, synthetic construct
  source 1..80: mol_type = other DNA
tcattaagatcccaggtagaactactagatgatcacatctcagtggattgcgacattgtacgcgttcatccagacagcag

SEQ ID NO: 32129 - DNA, 80 bp, synthetic construct
  source 1..80: mol_type = other DNA
cttggcaggccgaaaggggtacagcacagtagagggagcactctactcgtacctagagggaacaagattccaccaaactg

SEQ ID NO: 32130 - DNA, 80 bp, synthetic construct
  source 1..80: mol_type = other DNA
tgctctgggggagagcatagagtccgtcaggcaaaaatgtcccgtagacgacgccgacgcctcattccctccgaaaacag

SEQ ID NO: 32131 - DNA, 80 bp, synthetic construct
  source 1..80: mol_type = other DNA
tcccgtgcctatgccgttatgccatgacgcctgaacgagttgcacgcctacgcatgaatcatactactagcatcatagtg

SEQ ID NO: 32132 - DNA, 80 bp, synthetic construct
  source 1..80: mol_type = other DNA
tgctcgtcttttccgctgccgaagtacaaaatcgagggcgtgcaaaaagtaaaatgttcaaaagcactcttgtttgatca

SEQ ID NO: 32133 - DNA, 80 bp, synthetic construct
  source 1..80: mol_type = other DNA
caacgtaccgtctcgagtgagcccgagaacgtacaggcctgcggacgaaatcatacagacacctcaaataccaactgaag

SEQ ID NO: 32134 - DNA, 80 bp, synthetic construct
  source 1..80: mol_type = other DNA
cgtgccaggacgcacaactcgtgcagtcaataaatgatgaagcagtgccagttccctcagacttagaggcttgtgacgca

SEQ ID NO: 32135 - DNA, 80 bp, synthetic construct
  source 1..80: mol_type = other DNA
actatggactggccctctatcggcaccgtaccaacaagacaaagacgcgactcatttgacagcgagtatagttccagaag

SEQ ID NO: 32136 - DNA, 80 bp, synthetic construct
  source 1..80: mol_type = other DNA
taacatacagctggtgacggcggacgtgcatgcaccaatgtacgcaaattcgctggcgtccagcggaggttcaatgctgt

SEQ ID NO: 32137 - DNA, 80 bp, synthetic construct
  source 1..80: mol_type = other DNA
cgctgtccagtgaaccagctcagaacggcataatgatactacctgattcagaagacacagatagtataagcagagtaagc

SEQ ID NO: 32138 - DNA, 80 bp, synthetic construct
  source 1..80: mol_type = other DNA
acaccgatcgccccacccaggagacgtttgggaaggaccataaatgtgacttgtgacgagcgggaagggaaaatactccc

SEQ ID NO: 32139 - DNA, 80 bp, synthetic construct
  source 1..80: mol_type = other DNA
tatggccagcgacaggctcttcactgctaagccatacactgtcgcactgggcgtatcaacagcagacataactgcgtacc

SEQ ID NO: 32140 - DNA, 80 bp, synthetic construct
  source 1..80: mol_type = other DNA
ccatccaggcaccgctaggattgacacaaccacctaccctcgaacagatcactttcggagatttcgccgaaggtgaaata

SEQ ID NO: 32141 - DNA, 80 bp, synthetic construct
  source 1..80: mol_type = other DNA
gacaacctcctgacaggggcattgacatttggggacttcgagccaggtgaagtggaagagctgacggatagcgagtggtc

SEQ ID NO: 32142 - DNA, 80 bp, synthetic construct
  source 1..80: mol_type = other DNA
aacatgctcggacacagatgaagagttatggctagacagagcagggggttacatattctcctctgacactggccaaggtc

SEQ ID NO: 32143 - DNA, 80 bp, synthetic construct
  source 1..80: mol_type = other DNA
gatcaaaggagtcagcgtggcatattggatagggttcgatacgacacctttcatgtacaatgcaatggctggcgcatacc

SEQ ID NO: 32144 - DNA, 80 bp, synthetic construct
  source 1..80: mol_type = other DNA
atctacagcaaaaatcagtacgtcaaacgacgctaccggtaaacattgctgaagaggtccacgaagagaaatgctaccca

SEQ ID NO: 32145 - DNA, 80 bp, synthetic construct
  source 1..80: mol_type = other DNA
cctaaattggatgagatcaaagagcaactcctacttaagagactccaggagagtgcttccacggctaaccggagtaggta

SEQ ID NO: 32146 - DNA, 80 bp, synthetic construct
  source 1..80: mol_type = other DNA
ccaatctagaaaagtggaaaacatgaaagccacgattatccacagactgaaagagggttgcaggctctacttggcgtcag

SEQ ID NO: 32147 - DNA, 80 bp, synthetic construct
  source 1..80: mol_type = other DNA
atacaccgagggtcccatcttaccgaatcacatacccggcgccagtctactcgccttcaatcagtatcaaattgaataac

SEQ ID NO: 32148 - DNA, 80 bp, synthetic construct
  source 1..80: mol_type = other DNA
ccagagactgcagtagcagtgtgtaatgagtttttggccagaaactatccaactgtggcatcctaccaagttactgacga

SEQ ID NO: 32149 - DNA, 80 bp, synthetic construct
  source 1..80: mol_type = other DNA
gtacgacgcgtacttggatatggtagacgggtccgaaagctgcctagacagagctacatttaacccgtctaaactcagga

SEQ ID NO: 32150 - DNA, 80 bp, synthetic construct
  source 1..80: mol_type = other DNA
cagaagtgcagtgccatcaccattccaaaatacgttgcagaatgtcttggcagcggccacaaaaagaaactgcaacgtaa

SEQ ID NO: 32151 - DNA, 80 bp, synthetic construct
  source 1..80: mol_type = other DNA
actatggactccgcagtgtttaacgtggagtgttttaagaagtacgcatgcaaccaagagtactggagagagttcgcctc

SEQ ID NO: 32152 - DNA, 80 bp, synthetic construct
  source 1..80: mol_type = other DNA
aagccctataagggtaacgacagagaatctgacaatgtatgtgacgaaactaaaggggcctaaagcggcggcactcttcg

SEQ ID NO: 32153 - DNA, 80 bp, synthetic construct
  source 1..80: mol_type = other DNA
catcatattcaacaaactgggctgatgagcaggtactgaaggctaagaatatagggctgtgttcaacagacctatctgag

SEQ ID NO: 32154 - DNA, 80 bp, synthetic construct
  source 1..80: mol_type = other DNA
caaaaacacacaacttgctgccgctacaagaggtaccaatggacaggtttacaatggacatgaaacgtgatgtaaaagtg

SEQ ID NO: 32155 - DNA, 80 bp, synthetic construct
  source 1..80: mol_type = other DNA
acaccaggtacaaagcacaccgaggaaaggccgaaagtacaggtcatacaggcggcagaaccgctggcaacagcatatct

SEQ ID NO: 32156 - DNA, 80 bp, synthetic construct
  source 1..80: mol_type = other DNA
tgtgtggcatacacagagagttggtaagaagactaaatgcagttctgctaccaaatgtccacacactgttcgatatgtca

SEQ ID NO: 32157 - DNA, 80 bp, synthetic construct
  source 1..80: mol_type = other DNA
gccgaagacttcgatgcaatcatatccacacatttcaaaccgggcgatgctgtactagaaaccgacatagcctcatttga

SEQ ID NO: 32158 - DNA, 80 bp, synthetic construct
  source 1..80: mol_type = other DNA
caagagtcaagacgattcgcttgcgctgaccgccatgatgctgctagaagaccttggggtagaccaacctatcctggacc

SEQ ID NO: 32159 - DNA, 80 bp, synthetic construct
  source 1..80: mol_type = other DNA
tgatagaagcagcattcggcgaaatatccagttgccatctaccgacgggcacgcggtttaagttcggcgcaatgatgaaa

SEQ ID NO: 32160 - DNA, 80 bp, synthetic construct
  source 1..80: mol_type = other DNA
caggcatgtttctaaccctgtttgtcaataccctcctgaacatcaccattgctagtcgggtgctagaggagcgattgact

SEQ ID NO: 32161 - DNA, 80 bp, synthetic construct
  source 1..80: mol_type = other DNA
acttcagcctgtgcagctttcattggggacgacaacataatacatggagttgtctctgacgcactaatggctgcacgttg

SEQ ID NO: 32162 - DNA, 80 bp, synthetic construct
  source 1..80: mol_type = other DNA
tgctacgtggatgaacatggaagtgaaaatcatcgatgcagtagtgtcagagaaggcgccatacttctgcgggggattta

SEQ ID NO: 32163 - DNA, 80 bp, synthetic construct
  source 1..80: mol_type = other DNA
ttttacacgacacggtgacaggcacgtcgtgcagagtagcagaccctttaaagagactgttcaagttaggcaaacctctg

SEQ ID NO: 32164 - DNA, 80 bp, synthetic construct
  source 1..80: mol_type = other DNA
gcagctggagacgaacaggatgaggacagaagacgtgctctggcagatgaggttactagatggcaaagaaccggcttaat

SEQ ID NO: 32165 - DNA, 80 bp, synthetic construct
  source 1..80: mol_type = other DNA
gcaaattatctatcatgagaggcaaaaaattgaagccatgcgaccgagtgctattctcggtcggctcaacactctaccct

SEQ ID NO: 32166 - DNA, 80 bp, synthetic construct
  source 1..80: mol_type = other DNA
cacagaattggaaaaagcagtatactcaaggtatgaagtacaaggaataacagccgtaataacatcaatggctacctttg

SEQ ID NO: 32167 - DNA, 80 bp, synthetic construct
  source 1..80: mol_type = other DNA
cgagtagcaaagaaaactttaaaaaactaagagggcccgtcgtaaccttgtacggcggacctaaataggtacgcactaca

SEQ ID NO: 32168 - DNA, 80 bp, synthetic construct
  source 1..80: mol_type = other DNA
ttgagacaaacatcgctaatagccatggagttcataccagcacaaacttattataatagaagataccagcctagaccttg

SEQ ID NO: 32169 - DNA, 80 bp, synthetic construct
  source 1..80: mol_type = other DNA
gacccaacgccctactatccaggtgatcaggccaaaaccacgccggagaaggcctgcaggacaactcgcacaactgatat

SEQ ID NO: 32170 - DNA, 80 bp, synthetic construct
  source 1..80: mol_type = other DNA
ccgcagtcagcagactagcactgcgtacagttccccagaaaccacgccggacccgaaaaactaagaagcaaaaacaagta

SEQ ID NO: 32171 - DNA, 80 bp, synthetic construct
  source 1..80: mol_type = other DNA
aagcaagaacaacagagcactaggaaccagaagaaaaaggcgccgaaacaaaagcagactcaaaagaaaaagagaccagg

SEQ ID NO: 32172 - DNA, 80 bp, synthetic construct
  source 1..80: mol_type = other DNA
gattcagtgtatgtagacatagatgctgacagcgcgtttctgaaggcgttgcagcgagcataccccatgtttgaggtgga

SEQ ID NO: 32173 - DNA, 80 bp, synthetic construct
  source 1..80: mol_type = other DNA
atgaaggaaaaataacggggtatgcatgcctagtaggtgataaggtaatgaaaccagcacatgtgaaagggattattgac

SEQ ID NO: 32174 - DNA, 80 bp, synthetic construct
  source 1..80: mol_type = other DNA
aatgcagacctagcgaagttggcgttcaaaagatcatccaaatatgatctagaatgcgcacagataccagtgcacatgaa

SEQ ID NO: 32175 - DNA, 80 bp, synthetic construct
  source 1..80: mol_type = other DNA
cagaaggctactacaactggcatcacggagcggtacagtattctggagggaggttcacaatccctacaggcgcgggaaag

SEQ ID NO: 32176 - DNA, 80 bp, synthetic construct
  source 1..80: mol_type = other DNA
gaaagtcgcaaacttttacaaagctggcatttaccatcggtatttcacctgaagggtaaactcagcttcacctgccgctg

SEQ ID NO: 32177 - DNA, 80 bp, synthetic construct
  source 1..80: mol_type = other DNA
cctggggacagcggaagaccaatctttgacaacaaggggcgcgtcgtggctattgttctaggcgtggcaaacgaaggaac

SEQ ID NO: 32178 - DNA, 80 bp, synthetic construct
  source 1..80: mol_type = other DNA
caggacagcactatctgtagtgacttggaataaagacatagtcacgaaaatcacaccggaggggtcagttgaatggagcc

SEQ ID NO: 32179 - DNA, 80 bp, synthetic construct
  source 1..80: mol_type = other DNA
ttgccctccctgtcatgtgcctgttggcaaacacaaccttcccatgttcccaaccgccttgcgcgccgtgctgctacgaa

SEQ ID NO: 32180 - DNA, 80 bp, synthetic construct
  source 1..80: mol_type = other DNA
aagaaaccggaagaaaccttgaggatgctggaggacaacgtcatgcaaccagggtactaccagttactcgattcagcatt

SEQ ID NO: 32181 - DNA, 80 bp, synthetic construct
  source 1..80: mol_type = other DNA
ggcctgctcacaacatcgtcaaagacgtaatgcaagagaaaacttcaatgtctacaaagtcactaggccgtacttagccc

SEQ ID NO: 32182 - DNA, 80 bp, synthetic construct
  source 1..80: mol_type = other DNA
actgccctgactgcggggagggacattcatgtcacagcccaatagcattagaacggatcagaagtgaggcaacagatggt

SEQ ID NO: 32183 - DNA, 80 bp, synthetic construct
  source 1..80: mol_type = other DNA
accttgaaaatccaggtatctctgcaaatcggaataaagacagacgacagccacgcttggacgaagctgcggtatatgga

SEQ ID NO: 32184 - DNA, 80 bp, synthetic construct
  source 1..80: mol_type = other DNA
tagccatacacctgtggatgcagaccgatctggtttgtttgtcagaacgtcagcaccgtgcaccatcacgggaacgatgg

SEQ ID NO: 32185 - DNA, 80 bp, synthetic construct
  source 1..80: mol_type = other DNA
gacatttcatactagcacgctgtccgaaaggagagacgctgacggtaggatttgtagacagtagaaggatcagtcacaca

SEQ ID NO: 32186 - DNA, 80 bp, synthetic construct
  source 1..80: mol_type = other DNA
tgcatgcacccgttccaccacgagccgccgctgatagggagagagaagtttcactcccgcccacagcatggcaaagaact

SEQ ID NO: 32187 - DNA, 80 bp, synthetic construct
  source 1..80: mol_type = other DNA
tgacacaatcgtctcatgcgaaggatacgtcgttaagagagtgacaatgagtccaggcatctacggaaagacatcggggt

SEQ ID NO: 32188 - DNA, 80 bp, synthetic construct
  source 1..80: mol_type = other DNA
accttgcagtacgtacgtccataccacagcggccactactgaggaaatagaagtgcatatgccgccagatacccctgact

SEQ ID NO: 32189 - DNA, 80 bp, synthetic construct
  source 1..80: mol_type = other DNA
acacgctaatgacacagcaagcgggaaacgttaagatcacagttgacggccagacggtacgatacaagtgcaaatgtgac

SEQ ID NO: 32190 - DNA, 80 bp, synthetic construct
  source 1..80: mol_type = other DNA
ggctccaatgaaggactaataaccactgacaaagtcataaataactgcaaagtagaccaatgccacacagcagttacaaa

SEQ ID NO: 32191 - DNA, 80 bp, synthetic construct
  source 1..80: mol_type = other DNA
ccacaagaaatggcaatacaactcaccgttgaccccgcggaactccgaacaaggagataggaaaggtaaaatccatatcc

SEQ ID NO: 32192 - DNA, 80 bp, synthetic construct
  source 1..80: mol_type = other DNA
catttccactggtaaacacaacctgcagggtaccaaaagcaagaaatccgactgtcacatacggtaaaaacagagtcact

SEQ ID NO: 32193 - DNA, 80 bp, synthetic construct
  source 1..80: mol_type = other DNA
ctgctgttgtatccagaccatccaacactcctttcgtatcgcgccatgggaaggatcccggattaccatgaagagtggat

SEQ ID NO: 32194 - DNA, 80 bp, synthetic construct
  source 1..80: mol_type = other DNA
aacaagtaagaaggaaataagtatcacagtaccagcagaaggtttagaggtcacatggggtaataatgacccatacaaat

SEQ ID NO: 32195 - DNA, 80 bp, synthetic construct
  source 1..80: mol_type = other DNA
attggccccaactgtctacaaatggtactgcgcacgggcacccacatgaaataatcctctattactatgagctgtaccca

SEQ ID NO: 32196 - DNA, 80 bp, synthetic construct
  source 1..80: mol_type = other DNA
actaccacaattgctgtactagctgctgcttctatcgtagtagcatctttggtaggtctatcattaggcatgtgcatatg

SEQ ID NO: 32197 - DNA, 80 bp, synthetic construct
  source 1..80: mol_type = other DNA
cgcgagacgcaggtgcatcacgccgtatgagctaactccaggagctaccatcccattcctcctaggtatactatgctgtg

SEQ ID NO: 32198 - DNA, 80 bp, synthetic construct
  source 1..80: mol_type = other DNA
atgctgtaactcatcatgccgacggcttcctgatgtgcaagacgacagatacagtagacggtgaaagggtatcattctcc

SEQ ID NO: 32199 - DNA, 80 bp, synthetic construct
  source 1..80: mol_type = other DNA
tcaagactgcaaaagcagcatcgtactacgaagctgcaacatacctctggaatgagcaacaaccattattttggttacag

SEQ ID NO: 32200 - DNA, 80 bp, synthetic construct
  source 1..80: mol_type = other DNA
cttttaatccctctgtcagctgcaattgttgtgtgtaattgcctaaaacttttaccatgctgctgcaaaacattgacttt

SEQ ID NO: 32201 - DNA, 80 bp, synthetic construct
  source 1..80: mol_type = other DNA
ccccgcagaccgtactacgtagccagaagctcagtctgattcacgctttggcggagcaagtgaagacgtgcacgcacaac

SEQ ID NO: 32202 - DNA, 80 bp, synthetic construct
  source 1..80: mol_type = other DNA
gacttccagagtcgaagcgaaagcgcaacgatggtgtataacgaaagagagttcgtaaacagaaagctacaccatattgc

SEQ ID NO: 32203 - DNA, 80 bp, synthetic construct
  source 1..80: mol_type = other DNA
caacttgcccagctgatctctcagttaataaactgacaatgcgcgcggtaccccaacagaagacacggaagaatcggaag

SEQ ID NO: 32204 - DNA, 80 bp, synthetic construct
  source 1..80: mol_type = other DNA
taccttgcagcacgtacgtgcagagcaccgccgcaactaccgaggagatagaggtacacatgcccccagacacccctgat

SEQ ID NO: 32205 - DNA, 80 bp, synthetic construct
  source 1..80: mol_type = other DNA
agataatcttgtattattatgagctgtaccctactatgactgtagtagttgtgcaagtggccacgttcatactcctgtcg

SEQ ID NO: 32206 - DNA, 80 bp, synthetic construct
  source 1..80: mol_type = other DNA
atagacaccacaggacagaccaagcccaagccaggaggcatcgtgttaacatgcttccgaggctgggtaaagcagctgca

SEQ ID NO: 32207 - DNA, 80 bp, synthetic construct
  source 1..80: mol_type = other DNA
tctagtcaatagacctggctacagccccatggatggagatggagctactgtctgtcacttgggccaacgctatcgctgga

SEQ ID NO: 32208 - DNA, 80 bp, synthetic construct
  source 1..80: mol_type = other DNA
tcaaagtcgcacacctgagagtgaagacgtctatgctaatacacaactggtactgcagagaccggctgcgggtacggtac

SEQ ID NO: 32209 - DNA, 80 bp, synthetic construct
  source 1..80: mol_type = other DNA
actaggcattctcgagggaatatacagactaagactctttgactgtgcaacctgaaaaaaacaagatcctgattcataac

SEQ ID NO: 32210 - DNA, 80 bp, synthetic construct
  source 1..80: mol_type = other DNA
cttcaattagacgatgaaaaaccatctggcctcggtgggatggccaaggtaggggagagcaagtgtcaggaagactttca

SEQ ID NO: 32211 - DNA, 80 bp, synthetic construct
  source 1..80: mol_type = other DNA
gacgggaatgtcctgatccctgagatgcaatcgtccctacttcaacaacatgtggagttgttggagtcctctgtaatccc

SEQ ID NO: 32212 - DNA, 80 bp, synthetic construct
  source 1..80: mol_type = other DNA
catcctaagccttttgtgtgatgtgtcttgaaaaaaacaggatcttgaatccgagcctctggctgtttgattgtttcttt

SEQ ID NO: 32213 - DNA, 80 bp, synthetic construct
  source 1..80: mol_type = other DNA
gagaccagactgtaaaaactggtcatcctttcgacacttcaggttctgatggtaacctccccttggggttggggggaatc

SEQ ID NO: 32214 - DNA, 80 bp, synthetic construct
  source 1..80: mol_type = other DNA
aaactggtcatcctttcgacacttcaggttctgatggtaacctccccttggggttggggggaatctctgagttcaacagc

SEQ ID NO: 32215 - DNA, 80 bp, synthetic construct
  source 1..80: mol_type = other DNA
ctgtgtcagctatacatagctggggaccaagtcttgtccatgtgtggaaactccggctatgaagtcatcaaaatattaga

SEQ ID NO: 32216 - DNA, 80 bp, synthetic construct
  source 1..80: mol_type = other DNA
agggcaggtgggtacatattctcatctgacaccggccccggccacctgcaacagaggtctgtccgtcagacagtactgcc

SEQ ID NO: 32217 - DNA, 80 bp, synthetic construct
  source 1..80: mol_type = other DNA
tcggggaccgtaaaggaaagattcacatcccattcccattggcaaacgtgacttgcagagtaccaaaagcaagaaacccc

SEQ ID NO: 32218 - DNA, 80 bp, synthetic construct
  source 1..80: mol_type = other DNA
tgatgcagaggtcactgacattgcatcaatcaaccgaataaccctgctaatgtctgattttgcatcggccaaaaattgcc

SEQ ID NO: 32219 - DNA, 80 bp, synthetic construct
  source 1..80: mol_type = other DNA
tccgacgcttcgaagttcataaaaatcataaaatagaaaaaccataaacagaagtagttcaaagggctgaacaacccctg

SEQ ID NO: 32220 - DNA, 80 bp, synthetic construct
  source 1..80: mol_type = other DNA
atttaacacctctacaatggatgccgacaagattgtattcaaagtcaataatcaggtggtctctctaaagcctgaaatta

SEQ ID NO: 32221 - DNA, 80 bp, synthetic construct
  source 1..80: mol_type = other DNA
cactctcaagggaatatacagaccaaaactcctggacagtacaccttgaaaaaaacaaggtccaaattcagaacctctgt

SEQ ID NO: 32222 - DNA, 80 bp, synthetic construct
  source 1..80: mol_type = other DNA
aggagagggagttaaagattgagggtagatttttcgctttgatgtcctggaatctgaggttgtattttgtcatcacagag

SEQ ID NO: 32223 - DNA, 80 bp, synthetic construct
  source 1..80: mol_type = other DNA
tctcctgagactggacaatcacccatctctttacataatgctcagagagccatctcttagaggagagatcttttctattc

SEQ ID NO: 32224 - DNA, 80 bp, synthetic construct
  source 1..80: mol_type = other DNA
cgaactcttccacgattctccgaacccacagggacgtaggagatgttattttgtttttaatatttcaaaaaaaaaaaaaa

SEQ ID NO: 32225 - DNA, 80 bp, synthetic construct
  source 1..80: mol_type = other DNA
gctttgcagagtagagcagtaagaaactggtaggctacgtgtgtccacgtagcctaccagtttcttactgctctactctg

SEQ ID NO: 32226 - DNA, 80 bp, synthetic construct
  source 1..80: mol_type = other DNA
gcctgcacatcctaagccttttgtgtgatgtatcttgaaaaaaacaagatcttgaatccgagcctctggctgtttgattg

SEQ ID NO: 32227 - DNA, 80 bp, synthetic construct
  source 1..80: mol_type = other DNA
ctcagagagacggccaatcttcgaaagccaggatggcggctcaagctgcctctggccctccggcccttgaatggtctgct

SEQ ID NO: 32228 - DNA, 80 bp, synthetic construct
  source 1..80: mol_type = other DNA
ctctccaagaaggtccttagaggacaagtcaacccaaactcctggtcgagagcccaagaaggagacaacgtccactcctt

SEQ ID NO: 32229 - DNA, 80 bp, synthetic construct
  source 1..80: mol_type = other DNA
aaaacataaagttaataaaaatcaaatgaataccataattggcaaacggaagagatgtaggtacttaagcttcctaaaag

SEQ ID NO: 32230 - DNA, 80 bp, synthetic construct
  source 1..80: mol_type = other DNA
tcttgtcaacagaccgggttacagccccatggtattggagatggagctacaatcagttaccttggaaccaacattgtcac

SEQ ID NO: 32231 - DNA, 80 bp, synthetic construct
  source 1..80: mol_type = other DNA
ttgactacatcacgtgcgagtacaaaactgtcatcccctccccgtacgtgaagtgctgtggtacagcagagtgcaaggac

SEQ ID NO: 32232 - DNA, 80 bp, synthetic construct
  source 1..80: mol_type = other DNA
aaagtcgtacaccggaaagtaaagacgtttatgccaacactcagttggtactacagaggccagcagcaggcacggtacat

SEQ ID NO: 32233 - DNA, 80 bp, synthetic construct
  source 1..80: mol_type = other DNA
gagaagtcgacgtagaagtagaggggaactcccagctgcaaatatccttctcaacagccctggcaagcgccgagtttcgc

SEQ ID NO: 32234 - DNA, 80 bp, synthetic construct
  source 1..80: mol_type = other DNA
taggattaattgttgctgttgctgccttaatcttaattgtggtgctatgcgtgtcgtttagcaggcactaaaccgatgat

SEQ ID NO: 32235 - DNA, 80 bp, synthetic construct
  source 1..80: mol_type = other DNA
aaggcacgaagtaactaaatagcaaaagtagaaagtacataatcaggtatatgtgccccctaagaggcacaatatatata

SEQ ID NO: 32236 - DNA, 80 bp, synthetic construct
  source 1..80: mol_type = other DNA
gctaagcactattagatcaaagggctatacaacccctgaatagtaacaaaacacaaaaatcaataaaaatcataaaaaga

SEQ ID NO: 32237 - DNA, 80 bp, synthetic construct
  source 1..80: mol_type = other DNA
aaatctcataaacaggtataagtgtcccctaagagacacattgtatgtaggtagtaagtatagatcaaagggctatatta

SEQ ID NO: 32238 - DNA, 80 bp, synthetic construct
  source 1..80: mol_type = other DNA
aatgtaataaaaattaagtgtgtacccgaaagaggtacagtaagaatcagtgaataccacaattggcgacgagaagagac

SEQ ID NO: 32239 - DNA, 80 bp, synthetic construct
  source 1..80: mol_type = other DNA
tcctaaaagcagccgaactcactttgagacgtaggcatagcataccgaactcttccactattctccgaacccatagggac

SEQ ID NO: 32240 - DNA, 80 bp, synthetic construct
  source 1..80: mol_type = other DNA
gtcatctggactgtcgatcccgctacggaccagaatcaagtggctgctaagcaaagtgccaaagactgatttgatccctt

SEQ ID NO: 32241 - DNA, 80 bp, synthetic construct
  source 1..80: mol_type = other DNA
acagcggtgacgccaaagaagcccgcgacgctgaaaaagaagcagaagaagaacgagaagcggagctaactcgcgaggca

SEQ ID NO: 32242 - DNA, 80 bp, synthetic construct
  source 1..80: mol_type = other DNA
gccaatgtctgctgggcgaagagcttagtccccatcctagaaacagcagggataaaactaaacgacaggcagtggtccca

SEQ ID NO: 32243 - DNA, 80 bp, synthetic construct
  source 1..80: mol_type = other DNA
ccactaagagagtcacctgggtggcgccgctgggcattcggggagctgactacacgtataacctagagttaggcctacca

SEQ ID NO: 32244 - DNA, 80 bp, synthetic construct
  source 1..80: mol_type = other DNA
ctgacagcagtctggcaggtagaaaagggtacagcactacagaaggttcactgtactcctacttggaagggacacggttc

SEQ ID NO: 32245 - DNA, 80 bp, synthetic construct
  source 1..80: mol_type = other DNA
catcagacggcagtggacatggcagaagtatacaccatgtggccaaagcagacggaggctaatgaacaagtttgcttgta

SEQ ID NO: 32246 - DNA, 80 bp, synthetic construct
  source 1..80: mol_type = other DNA
cgcattgggggaaagtatagaatcaatcaggcaaaagtgcccagtggatgacgcagatgcatcgtcgcccccaaaaacag

SEQ ID NO: 32247 - DNA, 80 bp, synthetic construct
  source 1..80: mol_type = other DNA
tgacgcacagccaattcgaccttagcgttgacggtgaggaactgcccgctccgtctgacttggaagctgatgctccaatt

SEQ ID NO: 32248 - DNA, 80 bp, synthetic construct
  source 1..80: mol_type = other DNA
ccggaaccaacaccagacgacagagcggtacttactttgcctcccacgattgaaaatttttcggctgtgtcagactgggt

SEQ ID NO: 32249 - DNA, 80 bp, synthetic construct
  source 1..80: mol_type = other DNA
aatgaataccgcgccagtcgcaccacccagaagaagacgtgggaaaaacctgaatgtcacctgcgacgagagagaaggga

SEQ ID NO: 32250 - DNA, 80 bp, synthetic construct
  source 1..80: mol_type = other DNA
acgtacttcccatggctagcgttcggtttttcagagcggacctgcactccatcgaacaggaaacggcagagatacgcgat

SEQ ID NO: 32251 - DNA, 80 bp, synthetic construct
  source 1..80: mol_type = other DNA
acggctgcgtccctccaggcgcccctgagtgtcgctacagaactaaatcaactgccgatctcattcggagcaccaaacga

SEQ ID NO: 32252 - DNA, 80 bp, synthetic construct
  source 1..80: mol_type = other DNA
ggcaccagtgtactcacccccaatcaatatccgactgtccaaccctgagtctgctgtggcagcgtgcaatgagttcctag

SEQ ID NO: 32253 - DNA, 80 bp, synthetic construct
  source 1..80: mol_type = other DNA
caaggaactacccgacagttgcgtcgtaccaaatcaccgatgagtacgatgcatacctggatatggtggacgggtcggaa

SEQ ID NO: 32254 - DNA, 80 bp, synthetic construct
  source 1..80: mol_type = other DNA
aaagttgccttgaccgggcgacgtttaatccatcaaagcttagaagttatccaaaacagcactcctaccatgcacctaca

SEQ ID NO: 32255 - DNA, 80 bp, synthetic construct
  source 1..80: mol_type = other DNA
atcagaagtgccgtaccttccccgttccagaacacgctgcagaacgtactggctgctgccacgaaaagaaattgcaacgt

SEQ ID NO: 32256 - DNA, 80 bp, synthetic construct
  source 1..80: mol_type = other DNA
tactgtatgacacagtagcaggcacggcctgcagagtggcagacccgttaaagcggctgttcaagctgggcaaaccgctg

SEQ ID NO: 32257 - DNA, 80 bp, synthetic construct
  source 1..80: mol_type = other DNA
tcgtcagaaaccaatcgcagctactcgcacacctaccagctacaatggagttcatcccgacgcaaactttctataacaga

SEQ ID NO: 32258 - DNA, 80 bp, synthetic construct
  source 1..80: mol_type = other DNA
aggtaccaaccccgaccctgggccccacgccctacaattcaagtaattagacctagaccacgtccacagaggcaggcagg

SEQ ID NO: 32259 - DNA, 80 bp, synthetic construct
  source 1..80: mol_type = other DNA
gcatgatcaccgggaccatgggacactttattctcgcccgatgcccgaaaggagagacgctgacagtgggatttacggac

SEQ ID NO: 32260 - DNA, 80 bp, synthetic construct
  source 1..80: mol_type = other DNA
tgcacacacccgttccatcatgaaccacctgtgataggtagggagaggttccactctcgaccacaacatggtaaagagtt

SEQ ID NO: 32261 - DNA, 80 bp, synthetic construct
  source 1..80: mol_type = other DNA
gcacgctgatgacacagcagtctggcaacgtgaagatcacagttaatgggcagacggtgcggtacaagtgcaactgcggt

SEQ ID NO: 32262 - DNA, 80 bp, synthetic construct
  source 1..80: mol_type = other DNA
ggctcaaacgagggactgacaaccacagacaaagtgatcaataattgcaaaattgatcagtgccatgctgcagtcactaa

SEQ ID NO: 32263 - DNA, 80 bp, synthetic construct
  source 1..80: mol_type = other DNA
aaggaggtcaccttgaccgtgcctactgagggtctggaggtcacttggggcaacaacgaaccatacaagtactggccgca

SEQ ID NO: 32264 - DNA, 80 bp, synthetic construct
  source 1..80: mol_type = other DNA
ctgctcagcctgctatgctgcgtcagaacgaccaaggcggccacatattacgaggctgcggcatacctatggaacgaaca

SEQ ID NO: 32265 - DNA, 80 bp, synthetic construct
  source 1..80: mol_type = other DNA
tgatcatttgcgaaacaaaaatgtaacacccctacaatggattctgataagattgtctttaaggtcaacaatcagttggt

SEQ ID NO: 32266 - DNA, 80 bp, synthetic construct
  source 1..80: mol_type = other DNA
attgggatccttcagcgttttctttgttgaaatcatgtttggtgcgagaggcttgaaaaaaacatatgcaagattcagaa

SEQ ID NO: 32267 - DNA, 80 bp, synthetic construct
  source 1..80: mol_type = other DNA
gatgtaggcgtccgaactctacggagatgtaggactaaattctgccgaaccccataacaccggggacgtaggcgtctaat

SEQ ID NO: 32268 - DNA, 80 bp, synthetic construct
  source 1..80: mol_type = other DNA
taagactctcgtgcgatgtatcttgaaaaaaacaagatcttgagtccgaacctctggctgtttgattttttttatcttat

SEQ ID NO: 32269 - DNA, 80 bp, synthetic construct
  source 1..80: mol_type = other DNA
cctgctgactgaactttcaaattcggtccctctatataacaggatctgagatgtcttagagtcaacatgaaaaaaacagg

SEQ ID NO: 32270 - DNA, 80 bp, synthetic construct
  source 1..80: mol_type = other DNA
tctctgaacacgcgtctttagtcggtcttctcttgagtctgtataggttgagcaaaatatcaggacaaaacactggtaac

SEQ ID NO: 32271 - DNA, 80 bp, synthetic construct
  source 1..80: mol_type = other DNA
tatcagaggggcagggaggaaggtgtcaatcacttcccaaagtgggaaggttatatcttcatgggagtcgtataagagtg

SEQ ID NO: 32272 - DNA, 80 bp, synthetic construct
  source 1..80: mol_type = other DNA
ttgagtcccatgatagcagattcagcatgagtttatcgaggaaggcagtctgcctcccatgaatgacataagcaatagct

SEQ ID NO: 32273 - DNA, 80 bp, synthetic construct
  source 1..80: mol_type = other DNA
tataacagacttggcccatttctattccaagtcatccccaatagagaagctgctaaattgcacgctgggaaatagagggc

SEQ ID NO: 32274 - DNA, 80 bp, synthetic construct
  source 1..80: mol_type = other DNA
taggggagaaatattttccatccctcagaaaatccccgccgcttatccaaccactatgaaagaaggcaatagatcgatct

SEQ ID NO: 32275 - DNA, 80 bp, synthetic construct
  source 1..80: mol_type = other DNA
cagctgcttgtgaaccgagtgctcccgaaagcttgtacatgctaagactcttgtacgatgtatcttgaaaaaaacaagat

SEQ ID NO: 32276 - DNA, 80 bp, synthetic construct
  source 1..80: mol_type = other DNA
agatgtaggcgtaccgaactcttcgacaattctccgaacccgcagggacgtaggagaagttattttgtttttaatatttc

SEQ ID NO: 32277 - DNA, 80 bp, synthetic construct
  source 1..80: mol_type = other DNA
agatagtgcaagcttttaaagaagatagggcctactatccagaagttgcaatgaatgaaatatgcactcgcagaaatggg

SEQ ID NO: 32278 - DNA, 80 bp, synthetic construct
  source 1..80: mol_type = other DNA
tatcaaatatccatactccattccgcatacatcattaccagcagtgtgtagatcacgcaatgaagctccagatgctaggg

SEQ ID NO: 32279 - DNA, 80 bp, synthetic construct
  source 1..80: mol_type = other DNA
gtgcctcatttattttacaccactcgattgcaagcacgtcgtgcagagtagcagaccctttaaagagactgttcaagcta

SEQ ID NO: 32280 - DNA, 80 bp, synthetic construct
  source 1..80: mol_type = other DNA
gcccccagtaaagaatagcaaagaaaacttaaagaaactaagccgtccccttttaaccttgtacggcggacctaaatagg

SEQ ID NO: 32281 - DNA, 80 bp, synthetic construct
  source 1..80: mol_type = other DNA
gacgaagggaaaggatgtgcatgaagattgaaaatgactgcatcttcgaagtcagacatgaaggaaaagtaacggggtat

SEQ ID NO: 32282 - DNA, 80 bp, synthetic construct
  source 1..80: mol_type = other DNA
ttattaattggctagccgaactctaaggagatgtaggcgtccgaactctacggagatgtaggactaaattctgccgaacc

SEQ ID NO: 32283 - DNA, 80 bp, synthetic construct
  source 1..80: mol_type = other DNA
tcttgtgcgatgtatcttgaaaaaaacaagatcttggatccgaacctctggctgtttgattgtttttatcttatgttttt

SEQ ID NO: 32284 - DNA, 80 bp, synthetic construct
  source 1..80: mol_type = other DNA
gtctgctctgcacagcaggttgcggtttcgacctcagcgaacccagcccctgtttcagagctggacgtcagagccctctc

SEQ ID NO: 32285 - DNA, 80 bp, synthetic construct
  source 1..80: mol_type = other DNA
atcccgatcatctctgttagattatagctgcttgtaagaccaagcactcccgagggaatgtacagactaagattatggga

SEQ ID NO: 32286 - DNA, 80 bp, synthetic construct
  source 1..80: mol_type = other DNA
acagactaagattatgggacggtgcaacctgaaaaaaacaagatcccgattcataacttctgtttacttgattgtttttc

SEQ ID NO: 32287 - DNA, 80 bp, synthetic construct
  source 1..80: mol_type = other DNA
tcatcaagctcgccctaattcgttcgctgagtttctaagtaaaacatactctagtgattcataaaggattgaacaacagg

SEQ ID NO: 32288 - DNA, 80 bp, synthetic construct
  source 1..80: mol_type = other DNA
taggaaaggacttggttaaatttaaggatcaaatatggggattgctaattgtgaccaaggattttgtgtactcacaaagt

SEQ ID NO: 32289 - DNA, 80 bp, synthetic construct
  source 1..80: mol_type = other DNA
acgacttagtctttgtatacggctgttataggcattggcggcatccttacatagattatagaaagggcttatcgaaacta

SEQ ID NO: 32290 - DNA, 80 bp, synthetic construct
  source 1..80: mol_type = other DNA
aaactcttggtttgtttgtatcgaagagacgacgaagaactaacaaacggctcacatttaaaacttgggttcttagtgaa

SEQ ID NO: 32291 - DNA, 80 bp, synthetic construct
  source 1..80: mol_type = other DNA
atgcaagcatgccaggtttcatcccaacaagccatgtacaatagtgtgcccctcgttaccaataccacctttactttact

SEQ ID NO: 32292 - DNA, 80 bp, synthetic construct
  source 1..80: mol_type = other DNA
gaggcaacagattttctttaatcatgttgaagactttatcagaaggtatggcatactaactctcggaaccttatctccct

SEQ ID NO: 32293 - DNA, 80 bp, synthetic construct
  source 1..80: mol_type = other DNA
aagattctgggacggtgcaacctgaaaaaaacaagatcccgattcataacttctgtttacttgattgtttttccatcttt

SEQ ID NO: 32294 - DNA, 80 bp, synthetic construct
  source 1..80: mol_type = other DNA
cttgaaccatctcagacatgagcaagatttttgttaacccaagtgcaattagggcaggcttggctgacctggagatggca

SEQ ID NO: 32295 - DNA, 80 bp, synthetic construct
  source 1..80: mol_type = other DNA
ttcagttagacgatgaaaaaccatctggcctcggcatgattgtcaaagcaggggagagcaaatgtcaggaagactttcag

SEQ ID NO: 32296 - DNA, 80 bp, synthetic construct
  source 1..80: mol_type = other DNA
atgtctgtttcttctcagcgagaaagcaaatcatccaaagctaaaatggcggcccaaactgcctccggtcctcctgctct

SEQ ID NO: 32297 - DNA, 80 bp, synthetic construct
  source 1..80: mol_type = other DNA
aaaaaaactatcaacatccctcaaaagacttaaggaaacatgatccctcaggctattctgtttgtgccttttctatttcc

SEQ ID NO: 32298 - DNA, 80 bp, synthetic construct
  source 1..80: mol_type = other DNA
cggacgttcacaagcaggtctcaggggtcgatcttggtctcccaaactgggggagatatgtgctgataagtgcaggtgtt

SEQ ID NO: 32299 - DNA, 80 bp, synthetic construct
  source 1..80: mol_type = other DNA
caatatacacgacttagtctttgtatacggctgttataggcattgggggcatccttacatagactatagaaagggcttat

SEQ ID NO: 32300 - DNA, 80 bp, synthetic construct
  source 1..80: mol_type = other DNA
aagaaacgctctctcgatatatcgtgccatcgaggaaggtgcatccaaactggggctcatcataaagaaggaagagacca

SEQ ID NO: 32301 - DNA, 80 bp, synthetic construct
  source 1..80: mol_type = other DNA
ggtggaagttacgattttagtatacctgtgggtgcatggccagttatgaatggaggtgccgtttcgttgcatttcgctgg

SEQ ID NO: 32302 - DNA, 80 bp, synthetic construct
  source 1..80: mol_type = other DNA
tgtgcgatgtatcttgaaaaaaacaagatcttgaatccgaacctctggctgtttgattgttttttttatctttattggtt

SEQ ID NO: 32303 - DNA, 80 bp, synthetic construct
  source 1..80: mol_type = other DNA
ggactctactaccgtgagtttggattctacagtatctacaggatctgcgtggtcattcccatctgaggccacgtatgaga

SEQ ID NO: 32304 - DNA, 80 bp, synthetic construct
  source 1..80: mol_type = other DNA
ttgtgaaccgagtgctcccgaaagcttgtacatactaagactcttgcgcgatgtatcttgaaaaaaacaagatcttgaat

SEQ ID NO: 32305 - DNA, 80 bp, synthetic construct
  source 1..80: mol_type = other DNA
cctgccaattgaacttttaaatgtggcccttctagataatgaaatctgagatgttctagagtcgacatgaaaaaaacagg

SEQ ID NO: 32306 - DNA, 80 bp, synthetic construct
  source 1..80: mol_type = other DNA
gactttccccataacgttcggggattttgatgaaggggagattgaaagcttgtcctctgagttactgacctttggtgact

SEQ ID NO: 32307 - DNA, 80 bp, synthetic construct
  source 1..80: mol_type = other DNA
tctcgccgggcgaagtggatgacctgacagacagcgactggtccacgtgttcagacacggacgacgaattatgactagat

SEQ ID NO: 32308 - DNA, 80 bp, synthetic construct
  source 1..80: mol_type = other DNA
tagtccaaaggctgaagggtggttgcaaactttatttaatgtcggagactccgaaagttcctacctaccgaactacatat

SEQ ID NO: 32309 - DNA, 80 bp, synthetic construct
  source 1..80: mol_type = other DNA
acacagatgagagaactgcctactttggattcagcggtatttaatgttgagtgctttaaaaaatttgcgtgcaatcaaga

SEQ ID NO: 32310 - DNA, 80 bp, synthetic construct
  source 1..80: mol_type = other DNA
gcagcccctgttctggttgcaggctcttatcccgctggccgccttgatcgtcctgtgcaactgtctgaaactcttgccat

SEQ ID NO: 32311 - DNA, 80 bp, synthetic construct
  source 1..80: mol_type = other DNA
atggctgcgtgagacacacgtagcttaccagtttcttactgctctactctgcaaagcaatgcaaagcaagagattaataa

SEQ ID NO: 32312 - DNA, 80 bp, synthetic construct
  source 1..80: mol_type = other DNA
gtcatcccagattcattattctcttttagacacactatggtgctattaagacgattatttccacaggattctatttcctc

SEQ ID NO: 32313 - DNA, 80 bp, synthetic construct
  source 1..80: mol_type = other DNA
catcctatagtagtagacaccgcaaaagaaagcagtcaatcagcaacatggggatatggaagtggctagtaatggccagt

SEQ ID NO: 32314 - DNA, 80 bp, synthetic construct
  source 1..80: mol_type = other DNA
gtgtccccacacagttagttttggagaaaacagtgttataggatatgttgaactgcctcctatgccactggctgacacaa

SEQ ID NO: 32315 - DNA, 80 bp, synthetic construct
  source 1..80: mol_type = other DNA
cacaaatggtgcgtgaacgctcttgcagcatggataatcaacactcattaaacacaatcacaaaatacacccaaataatc

SEQ ID NO: 32316 - DNA, 80 bp, synthetic construct
  source 1..80: mol_type = other DNA
gctttgttcctgaccagagtgtagttagtatcattaaacatgggatttttgatattgcaagtgtccacattgtttgcttt

SEQ ID NO: 32317 - DNA, 80 bp, synthetic construct
  source 1..80: mol_type = other DNA
tttgttgcagtcaaaggaaacacatacaagatctttgagcaggttaaaaagtcatttgaatctaactgtaatgacactga

SEQ ID NO: 32318 - DNA, 80 bp, synthetic construct
  source 1..80: mol_type = other DNA
gcaactggaaaaaaccttggaaaggaacaggatcccactggagtagaacctggagaccatctgaaagagagatcaatgct

SEQ ID NO: 32319 - DNA, 80 bp, synthetic construct
  source 1..80: mol_type = other DNA
aaataaagtgcaagggtactacatttgtattatagggggaaattcctcacccgtatatgtaccaacactggatgatttta

SEQ ID NO: 32320 - DNA, 80 bp, synthetic construct
  source 1..80: mol_type = other DNA
ggtcaatggaagcattctcaggaatttttagatcgccacatggagaagaccatgatctagctggagaagaggttgcatca

SEQ ID NO: 32321 - DNA, 80 bp, synthetic construct
  source 1..80: mol_type = other DNA
tattctattgttggacctgctaatgctaaggtgccccatagtgtcagctcagacacattaggattaattgcttattctgg

SEQ ID NO: 32322 - DNA, 80 bp, synthetic construct
  source 1..80: mol_type = other DNA
gctatacatccttgcacagttttctgtgtcttgtcaggtcccggggcttcatgtgaggcattttctgaaggtggaatcta

SEQ ID NO: 32323 - DNA, 80 bp, synthetic construct
  source 1..80: mol_type = other DNA
caatataacttctccaatgtgtctagtgtcaaagcagaatcgttttagactaacagaacaacaggtgaattttgtatgcc

SEQ ID NO: 32324 - DNA, 80 bp, synthetic construct
  source 1..80: mol_type = other DNA
agagggttgatgttgacattattgtctattgtaatggtcagagaaaagtaatattaacaaagactctggttattgggcaa

SEQ ID NO: 32325 - DNA, 80 bp, synthetic construct
  source 1..80: mol_type = other DNA
tgtatatatactataacgagcctattctcattattacctggggtagcacattcaattgcagttgaactgtgtgttcctgg

SEQ ID NO: 32326 - DNA, 80 bp, synthetic construct
  source 1..80: mol_type = other DNA
ataaagagctaaaggcacatggggtctcatgcccacaatcccaatgcccttattgtttcacccactgtgagcccacagaa

SEQ ID NO: 32327 - DNA, 80 bp, synthetic construct
  source 1..80: mol_type = other DNA
agaactttacacctggttgctatcgaacattgaatttattcagatataagagtaggtgttatatttttacaatgtgggtt

SEQ ID NO: 32328 - DNA, 80 bp, synthetic construct
  source 1..80: mol_type = other DNA
tttcttttagtcttagaatcaatcctatgggcagccagtgcatcagaaacacctttaaatccggtatggaacgacaatgc

SEQ ID NO: 32329 - DNA, 80 bp, synthetic construct
  source 1..80: mol_type = other DNA
catggggtaggttctatcccaatgcatacagacttggaattggacttttccttgacatcaagctcaaagtacacctaccg

SEQ ID NO: 32330 - DNA, 80 bp, synthetic construct
  source 1..80: mol_type = other DNA
aagaaagctaacaaacccacttgaagaatctcaggcaattgacctccatgtagaaatagaagagcaaacaattggtgtag

SEQ ID NO: 32331 - DNA, 80 bp, synthetic construct
  source 1..80: mol_type = other DNA
agatcattacaatacgatatagcagaagagtttgtgttcaatttggagaggaaaacctctgtaaaattatagatatgaat

SEQ ID NO: 32332 - DNA, 80 bp, synthetic construct
  source 1..80: mol_type = other DNA
aaaacgacgggaatatggtatcacgatataggagcgaattggcgacgatcgatgctcctcggtccgccaatgcgagcact

SEQ ID NO: 32333 - DNA, 80 bp, synthetic construct
  source 1..80: mol_type = other DNA
atgcattcgactgatgagaggatagaatggaaagaccctgatgggatgttaagggaccatattaatattctggtcacaaa

SEQ ID NO: 32334 - DNA, 80 bp, synthetic construct
  source 1..80: mol_type = other DNA
ccattgaaggggcatgggggtctggtgtaggctttacacttacatgtttgatatcactgacagaatgccctacattcttg

SEQ ID NO: 32335 - DNA, 80 bp, synthetic construct
  source 1..80: mol_type = other DNA
agggcgggcatagcggctcatccttcaaatgttgtcatggggaagaatgctcacagataggactccatgctgctgcacct

SEQ ID NO: 32336 - DNA, 80 bp, synthetic construct
  source 1..80: mol_type = other DNA
tgtttgatgatggggcaccacagtgtgggataaaatgctggtttgttaaatcaggggaatggatttctgggattttcagc

SEQ ID NO: 32337 - DNA, 80 bp, synthetic construct
  source 1..80: mol_type = other DNA
cataatcttaaaatttattaccatgttactgtgtatagctctaacatatacattaatttttatatttcattacattttat

SEQ ID NO: 32338 - DNA, 80 bp, synthetic construct
  source 1..80: mol_type = other DNA
gagtctactactatagtagtagactccggaagtgacaaattctgaaaagaatggataaatatagggaaattcacaataaa

SEQ ID NO: 32339 - DNA, 80 bp, synthetic construct
  source 1..80: mol_type = other DNA
acttttcattctttgaagtgaagggcactgcagtttttgactgctttaattcaaatgaaacaattcattgccaaaagtat

SEQ ID NO: 32340 - DNA, 80 bp, synthetic construct
  source 1..80: mol_type = other DNA
aagccagacaaatgattagccctgtcatgagtgtaatcggatttttggcactggcgaaagattggagtgaccgtattgaa

SEQ ID NO: 32341 - DNA, 80 bp, synthetic construct
  source 1..80: mol_type = other DNA
cagtggttaagtgaaccttgtaagctactcccggatacagcagcagtaagccttcatggaggccctgcaacaaacaggga

SEQ ID NO: 32342 - DNA, 80 bp, synthetic construct
  source 1..80: mol_type = other DNA
tattgaagctatccgttatctatccaattctaggcacaaccccagtcttttaaagttgtatgaagaaacaagagaacaaa

SEQ ID NO: 32343 - DNA, 80 bp, synthetic construct
  source 1..80: mol_type = other DNA
agaggcaaaagtcaatgctatacatcctgggcctatttaaattcttaatgaatttatctgatgagacattccagcatgag

SEQ ID NO: 32344 - DNA, 80 bp, synthetic construct
  source 1..80: mol_type = other DNA
atcgctgtccaccgacatgcttgttcattgcagggattgctgaacttggtgcattcttctccattctacaggacatgcga

SEQ ID NO: 32345 - DNA, 80 bp, synthetic construct
  source 1..80: mol_type = other DNA
gtacataatgctcagagagccatctcttagaggagaaatattttctatccctcagaaaatccccgctgcttatccaacca

SEQ ID NO: 32346 - DNA, 80 bp, synthetic construct
  source 1..80: mol_type = other DNA
gtgccgggaatctattgattgcgtatatctatcatgaaaaaaactaacacccctccttttgaaccatcccaaacatgagc

SEQ ID NO: 32347 - DNA, 80 bp, synthetic construct
  source 1..80: mol_type = other DNA
aaaaatgtaacacccctacaatggatgccgacaagattgtattcaaagttaataatcaggtggtctctttgaagcctgag

SEQ ID NO: 32348 - DNA, 80 bp, synthetic construct
  source 1..80: mol_type = other DNA
ggcaacgtcgaggacctatacggagaggtagaaagacaccttcatgggtacaacaggtggatcaccctcaaggatgtcag

SEQ ID NO: 32349 - DNA, 80 bp, synthetic construct
  source 1..80: mol_type = other DNA
atctagatcatctttattagactacagctgcttgtaaactgggtattcccagaaatctgcacatgctcagactgttgtgt

SEQ ID NO: 32350 - DNA, 80 bp, synthetic construct
  source 1..80: mol_type = other DNA
caggctgctggaaatctgtcgattgcatatatccatcatgaaaaaaactaacacccctcctttcgaatcatcctaaatat

SEQ ID NO: 32351 - DNA, 80 bp, synthetic construct
  source 1..80: mol_type = other DNA
caattcaaagaaattccaattgctagttgacgccgacaagctaaataaaatcatgcaagatgatttaaatcgctacgcat

SEQ ID NO: 32352 - DNA, 80 bp, synthetic construct
  source 1..80: mol_type = other DNA
gtctgacatgtctcttcagacacagaggtctgaagaggacaaagactcctctctgcttctagaatagtcagactataccc

SEQ ID NO: 32353 - DNA, 80 bp, synthetic construct
  source 1..80: mol_type = other DNA
ctgattgccttgatgttaataattttcctaatgacatgttgtagaagagtcaatcgatcaggacctacacaacgcagtct

SEQ ID NO: 32354 - DNA, 80 bp, synthetic construct
  source 1..80: mol_type = other DNA
caggaactgatatcaaaggtagtagacgggccaagaggtattccggacgactccatgcttgggcacagacagaggtcata

SEQ ID NO: 32355 - DNA, 80 bp, synthetic construct
  source 1..80: mol_type = other DNA
tgtagatcaaaagagaaactggcaacacttctcatcccgagacctgcatcaagatgctagatccaggagagatctatgac

SEQ ID NO: 32356 - DNA, 80 bp, synthetic construct
  source 1..80: mol_type = other DNA
aaaatctcataaacaggtatacgtgtcccctaagagacacattgtatgtaggtagtagagacacattgtatgtaggtagt

SEQ ID NO: 32357 - DNA, 80 bp, synthetic construct
  source 1..80: mol_type = other DNA
aagtatagatcaaagggctatattaacccctgaatagtaacaaaacacaaaaacaataaaaactacaaaatagaaaatct

SEQ ID NO: 32358 - DNA, 80 bp, synthetic construct
  source 1..80: mol_type = other DNA
atgctcagactcctgtgtaatttgtcttgaaaaaaacaagatcttgaatcagagcctctggctgtttgattgtttctttc

SEQ ID NO: 32359 - DNA, 80 bp, synthetic construct
  source 1..80: mol_type = other DNA
cttgggttcaatagccctccctgaactccatgcaacagggtagattcaagagtcgcgagactttcattaatcatctcagt

SEQ ID NO: 32360 - DNA, 80 bp, synthetic construct
  source 1..80: mol_type = other DNA
cgtaggagatgttaagccaggagacactgttttagaaacggacatagcctcctttgacaagagccaagatgactcacttg

SEQ ID NO: 32361 - DNA, 80 bp, synthetic construct
  source 1..80: mol_type = other DNA
aatctgagactgggaacgtcttgtgacatttttaccaatagtagagggaagagggcgtccaaggggagtaagacttgcgg

SEQ ID NO: 32362 - DNA, 80 bp, synthetic construct
  source 1..80: mol_type = other DNA
tcgctttgagatgtaggcgtagcacaccgaactcttccataattttggcaaacggaagagacgtaggtactaagcttcct

SEQ ID NO: 32363 - DNA, 80 bp, synthetic construct
  source 1..80: mol_type = other DNA
ggacactctcagaggcttgtacaagctaagacttctgtatgatgtaccttgaaaaaaacaagatcttgactccgagcctc

SEQ ID NO: 32364 - DNA, 80 bp, synthetic construct
  source 1..80: mol_type = other DNA
ttatagctgtttatgaactgtgcactctcaagggaatatacagaccaaaactcctggacagtacaccttgaaaaaaacaa

SEQ ID NO: 32365 - DNA, 80 bp, synthetic construct
  source 1..80: mol_type = other DNA
atggatgatgcagaggaccctgccctcttgttccagtcgtacctggacaatgttggaatccaaatcgtcagacagatgag

SEQ ID NO: 32366 - DNA, 80 bp, synthetic construct
  source 1..80: mol_type = other DNA
acacccctacaatggatgccgacaagattgtgtttaaggtcaataatcaggtggtctctctgaagcctgaaattataata

SEQ ID NO: 32367 - DNA, 80 bp, synthetic construct
  source 1..80: mol_type = other DNA
acaccttagagtcagacgaagacatccagaggctgttaagagactctctgcgtaggacaaggtgggtggaccaggaagtg

SEQ ID NO: 32368 - DNA, 80 bp, synthetic construct
  source 1..80: mol_type = other DNA
catttcctgcggtcactgggttcataactcagatgacctcgtccttctcatccgagctatatctcagattctcaaagcgg

SEQ ID NO: 32369 - DNA, 80 bp, synthetic construct
  source 1..80: mol_type = other DNA
ctgaaatagccttggcggatgacgggacagtcaattctgatgatgaggactacttctctggtgaaactaggagcccggag

SEQ ID NO: 32370 - DNA, 80 bp, synthetic construct
  source 1..80: mol_type = other DNA
acggtgcaacctgaaaaaaacaagatcccgattcataacttctatttacttgattgtttttccatctttattgttttttt

SEQ ID NO: 32371 - DNA, 80 bp, synthetic construct
  source 1..80: mol_type = other DNA
ttcataaagaattgaacaacaggattgtaaacattaacaaattgtgtacatccttcacgaaaaaaactaacacccctcct

SEQ ID NO: 32372 - DNA, 80 bp, synthetic construct
  source 1..80: mol_type = other DNA
gaggaaactgtagatctagttgccaagaacatcgaagataatcaagctcatctccaaggagaacccatagaggtggacag

SEQ ID NO: 32373 - DNA, 80 bp, synthetic construct
  source 1..80: mol_type = other DNA
tcaatttccccagtctgccaaggaaagcctcagaagacaaggctacccagactgccaaccaggaactcaagaaaaagaca

SEQ ID NO: 32374 - DNA, 80 bp, synthetic construct
  source 1..80: mol_type = other DNA
gtgggcggggctgcagcgcaatctatgatctccctttggttgcacggtgcccactctgaatcaaataggagccggaagtg

SEQ ID NO: 32375 - DNA, 80 bp, synthetic construct
  source 1..80: mol_type = other DNA
ttgaacatctgtattcagcaattagagtgggtacagttgtaacagcctacgaggactgctcagggttggtgtcgtttaca

SEQ ID NO: 32376 - DNA, 80 bp, synthetic construct
  source 1..80: mol_type = other DNA
gggtttattaagcaaataaatctcactgcaaaagaagcaatactatatttcttccacaagaacttcgaggaagagataag

SEQ ID NO: 32377 - DNA, 80 bp, synthetic construct
  source 1..80: mol_type = other DNA
catgtttccggatgctaagcttgtattcaatagcttgttggaagtcaacgacctgatggcatcaggaacacatccattac

SEQ ID NO: 32378 - DNA, 80 bp, synthetic construct
  source 1..80: mol_type = other DNA
tttgattccatctgggagaagccttccgacttgaggaacttgactacatggaagtacttccagtcagttcaagaacaggt

SEQ ID NO: 32379 - DNA, 80 bp, synthetic construct
  source 1..80: mol_type = other DNA
gattacagctgcttgtgaactgggcactctcagaggcttgtacaagctaagactcttatacgatataccttgaaaaaaac

SEQ ID NO: 32380 - DNA, 80 bp, synthetic construct
  source 1..80: mol_type = other DNA
gtaggtatttatgtgcaactgtctgaagctcttgccatgctgctgtaagcttcctaaaagcagccgaactcactttgaga

SEQ ID NO: 32381 - DNA, 80 bp, synthetic construct
  source 1..80: mol_type = other DNA
gctgtaagcttcctaaaagcagccgaactcactttgagacgtaggcatagtataccgaactcttccactattctccgaac

SEQ ID NO: 32382 - DNA, 80 bp, synthetic construct
  source 1..80: mol_type = other DNA
atctagatcatctctactagattacagctgcttgtaaacagagtgctcccgaaagcttgtacatgctaagactcttgtac

SEQ ID NO: 32383 - DNA, 80 bp, synthetic construct
  source 1..80: mol_type = other DNA
cgaaagcttgtacatgctaagactcttgtacgatgtatcttgaaaaaaacaagatcctgaatccgaacctctggctgttt

SEQ ID NO: 32384 - DNA, 80 bp, synthetic construct
  source 1..80: mol_type = other DNA
aaatctccccaaaagcatgaggatcagcctccgacagatgagttcactaatgagacaagtattaggtgggcatggtgagg

SEQ ID NO: 32385 - DNA, 80 bp, synthetic construct
  source 1..80: mol_type = other DNA
acactctggagtcagatgaagacattcaaaggctgttaaaagactctttacgtagaacaaggtgggtggatcaggaggtg

SEQ ID NO: 32386 - DNA, 80 bp, synthetic construct
  source 1..80: mol_type = other DNA
cgtcatgcagcaaggactatgaccggaggttacagtcccaacaagaaagtgtcgcgcaaagcagggtgttcagaatgggt

SEQ ID NO: 32387 - DNA, 80 bp, synthetic construct
  source 1..80: mol_type = other DNA
ctcgacaacctcaccgtgttcccctccctatgtcttgtcgtgggagatggatcagggggaatatcgagagcagtactcaa

SEQ ID NO: 32388 - DNA, 80 bp, synthetic construct
  source 1..80: mol_type = other DNA
ccccctcagcaattatgagtggaggagatgatgttatctcccgggtaattgactttgactctatatgggagaaaccctcg

SEQ ID NO: 32389 - DNA, 80 bp, synthetic construct
  source 1..80: mol_type = other DNA
gacctgaggaatttgaccacatggaggtattttcagtcagtccaagagcaattgaatatgtcctatgacctcatcatctg

SEQ ID NO: 32390 - DNA, 80 bp, synthetic construct
  source 1..80: mol_type = other DNA
ctgactttgctctatcaatagacggccccctttgtctggttttcaaaacttatggtaccatgcttgtaaactctgactac

SEQ ID NO: 32391 - DNA, 80 bp, synthetic construct
  source 1..80: mol_type = other DNA
ggaaagttctttcgagatgcagagtatttgacatcctctacccttagagaaatgagtcttgtgctgttcaactgtagcag

SEQ ID NO: 32392 - DNA, 80 bp, synthetic construct
  source 1..80: mol_type = other DNA
ctgagatcgccttggcggacgacggaaccgttaactctgacgacgaggattacttctctagtgagaccaggagtcctgaa

SEQ ID NO: 32393 - DNA, 80 bp, synthetic construct
  source 1..80: mol_type = other DNA
ggaagcataaatgacctgtctggggaagttgaaagacaccttcgagggtataatagatggatcaccctggatgatattag

SEQ ID NO: 32394 - DNA, 80 bp, synthetic construct
  source 1..80: mol_type = other DNA
atccagatcatctctcctggattacagttgtttgtagactaggcgcccttgagaagatgtattgaccaccattcttgtag

SEQ ID NO: 32395 - DNA, 80 bp, synthetic construct
  source 1..80: mol_type = other DNA
attcttgtagggtacaccctgaaaaaaacaagatctcaattcgcaacatctgcttgcttgattgtttttccatctttatt

SEQ ID NO: 32396 - DNA, 80 bp, synthetic construct
  source 1..80: mol_type = other DNA
ccctgctatcaaggatttgaagaagccgagcataaccttaggaaaatctcctgacttgaataaggcatataaatcgattt

SEQ ID NO: 32397 - DNA, 80 bp, synthetic construct
  source 1..80: mol_type = other DNA
caagattgtaaacacggatgaattgtatgcacccttcatgaaaaaaaccaacacccctcctgttgaaccacctcagacat

SEQ ID NO: 32398 - DNA, 80 bp, synthetic construct
  source 1..80: mol_type = other DNA
gagcaaaattttcgtaaacccaagtgcaattagggcgggcctggctgatctggaaatggcagaggagactgtagatctga

SEQ ID NO: 32399 - DNA, 80 bp, synthetic construct
  source 1..80: mol_type = other DNA
tccaattggacgatgagaagccatctggcttcggcggggtcaccaaagtagaggacagtatatttcaggaggactttcgg

SEQ ID NO: 32400 - DNA, 80 bp, synthetic construct
  source 1..80: mol_type = other DNA
atggacgaaggagaggacccagctctgttattccagctgtacctagacaatgttggagttcaaatggtaagacagatgag

SEQ ID NO: 32401 - DNA, 80 bp, synthetic construct
  source 1..80: mol_type = other DNA
atcaggagagaggtttctcaagatatggtctcgaaccgtcgaggagatcatatcctatgtcacggtcaacttccccaatc

SEQ ID NO: 32402 - DNA, 80 bp, synthetic construct
  source 1..80: mol_type = other DNA
catcgaggagatcttcagaggacaaagccacccagactgccggccgggagcacaagagagagatggggcccgcatcgtct

SEQ ID NO: 32403 - DNA, 80 bp, synthetic construct
  source 1..80: mol_type = other DNA
cagagagaaaaccagccttccaaagccaaaatggcggcccaaactgcctccggtccctctgctctagagtggtccgcggc

SEQ ID NO: 32404 - DNA, 80 bp, synthetic construct
  source 1..80: mol_type = other DNA
tgtctggcatgaatgcggctaagcttgatcctgatgatgtgtgctcctatttggccgccgcaatgcatctcttcgaggga

SEQ ID NO: 32405 - DNA, 80 bp, synthetic construct
  source 1..80: mol_type = other DNA
agtctaagaatgtgccaagtgtgacccgcctggcccacgatggatccaaaatccctctgagatgtgtgctagggtgggtt

SEQ ID NO: 32406 - DNA, 80 bp, synthetic construct
  source 1..80: mol_type = other DNA
gccctagccaaatccaagaagttccagctgttagttgaacccgacaagctgaataaaataatgcaggatgatctgaaccg

SEQ ID NO: 32407 - DNA, 80 bp, synthetic construct
  source 1..80: mol_type = other DNA
ttatgcatccctctaatcactcccctgacctcaattacgccatgcaagtgagtctgacttgctctaaattcagcgtgaaa

SEQ ID NO: 32408 - DNA, 80 bp, synthetic construct
  source 1..80: mol_type = other DNA
tgtcggctcctccagacgatgatgatttgtggttaccccccccagaatatgttccattgagagatctcacgggcaagaaa

SEQ ID NO: 32409 - DNA, 80 bp, synthetic construct
  source 1..80: mol_type = other DNA
aacatgagaaacttctgcatcaacggggaagtcaaggtgtgtagtccgaatggctattcattcaggattttgcggcacat

SEQ ID NO: 32410 - DNA, 80 bp, synthetic construct
  source 1..80: mol_type = other DNA
gagtgtgtcctgatgactggacgagctatggaatccttatagctcggagaggggacaaaatcactcccgactctcttgtg

SEQ ID NO: 32411 - DNA, 80 bp, synthetic construct
  source 1..80: mol_type = other DNA
agggctctgaggaggacaaagactcctcagtgctgctggaatagtcacactacatcctaaagattcctcaattacttacc

SEQ ID NO: 32412 - DNA, 80 bp, synthetic construct
  source 1..80: mol_type = other DNA
aaaactattaacatctctcaaaagatctaaggaaggatgattcctcagattcttctgtttgtgcttctcatgatcttctc

SEQ ID NO: 32413 - DNA, 80 bp, synthetic construct
  source 1..80: mol_type = other DNA
gccgtgttctgggaaattccccatctataccataccagataagctcggcccttggagtcccatcgacatacaccacctca

SEQ ID NO: 32414 - DNA, 80 bp, synthetic construct
  source 1..80: mol_type = other DNA
gctgtcccaataatttgctcgcggaggatgaagggtgtaccagtctatcggggttctcttatatggagctgaaggtggga

SEQ ID NO: 32415 - DNA, 80 bp, synthetic construct
  source 1..80: mol_type = other DNA
gatgtaaaacggactaatgtggaggggaattgggctctaacaggtggcatggagctgacgagagaccccactgttccaga

SEQ ID NO: 32416 - DNA, 80 bp, synthetic construct
  source 1..80: mol_type = other DNA
agatggccggagatcctagatatgaggagtctcttcaaaatccttatcccgattaccattggctgaggactgtaaaaaca

SEQ ID NO: 32417 - DNA, 80 bp, synthetic construct
  source 1..80: mol_type = other DNA
gctaaagagtccctcgttatcatatctccaagtgtggccgatctagacccatacgacaaatccctccattctagggtctt

SEQ ID NO: 32418 - DNA, 80 bp, synthetic construct
  source 1..80: mol_type = other DNA
ccaacgggaagtgtctgggaataacggtctcttccacttattgttcaaccaaccatggttataccatctggatgcctgaa

SEQ ID NO: 32419 - DNA, 80 bp, synthetic construct
  source 1..80: mol_type = other DNA
cttccacttattgttcaaccaaccatggttataccatctggatgcctgaagaggctagacttgggacatcctgtgacatt

SEQ ID NO: 32420 - DNA, 80 bp, synthetic construct
  source 1..80: mol_type = other DNA
gaggctagacttgggacatcctgtgacattttcgtccacagcaaaggaaaaagagcctctaaggggggccggacttgcgg

SEQ ID NO: 32421 - DNA, 80 bp, synthetic construct
  source 1..80: mol_type = other DNA
atttgtggatgaaaggggattgtacaagtctctgaagggggcgtgcaagctcaagctatgcggagttcctgggctcaggc

SEQ ID NO: 32422 - DNA, 80 bp, synthetic construct
  source 1..80: mol_type = other DNA
ctaaagggtgcttaaaagtagggggaagatgtcatccccatgtggacggagtgtttttcaatggtataattttgggtcca

SEQ ID NO: 32423 - DNA, 80 bp, synthetic construct
  source 1..80: mol_type = other DNA
cctaatacatcctttagccgatccgttaacagtcttcaaagatgatgatgaggcagaggactttgttgaggttcatctcc

SEQ ID NO: 32424 - DNA, 80 bp, synthetic construct
  source 1..80: mol_type = other DNA
ctgatattcacagccagatatcaggggttgaccttggtctcccaggatgggggaaatatgtactcatgagtgcaggtgtt

SEQ ID NO: 32425 - DNA, 80 bp, synthetic construct
  source 1..80: mol_type = other DNA
ctggtagcgctaataataacaatcttcttaatgacgtgttgcagaggagcggatagaacaaaatcaataccacgaggttt

SEQ ID NO: 32426 - DNA, 80 bp, synthetic construct
  source 1..80: mol_type = other DNA
tgaaggttctggaaagaaaatattggcaattccttcgagcgggaagaacatatcctcgtgggagatgtacaagaatggag

SEQ ID NO: 32427 - DNA, 80 bp, synthetic construct
  source 1..80: mol_type = other DNA
gagagaccaagttgtgagagcaagtcatccctaccataactagtgctcaaaaagttgcctctcttcaagatttgggggag

SEQ ID NO: 32428 - DNA, 80 bp, synthetic construct
  source 1..80: mol_type = other DNA
tctttttgacagtccctcatagactctgtgtagcagggtgaatcagcgggttgaggacctttcattaatcatcacaactg

SEQ ID NO: 32429 - DNA, 80 bp, synthetic construct
  source 1..80: mol_type = other DNA
ctcggacatagtcatgtagattctgataatgtgtgagaccttctggcggtgtcattgatcaacggtgctctcataccata

SEQ ID NO: 32430 - DNA, 80 bp, synthetic construct
  source 1..80: mol_type = other DNA
acgaccgataccaaaggttatatgtgaaccggataatgtctcagatagccctatggctgggcctgaacagaggctatagc

SEQ ID NO: 32431 - DNA, 80 bp, synthetic construct
  source 1..80: mol_type = other DNA
aagcttccccatattagaccaaatagaggtagataggaagaggccgcttgcctcctccgacggacccaaacaagagatca

SEQ ID NO: 32432 - DNA, 80 bp, synthetic construct
  source 1..80: mol_type = other DNA
cagtcatcttacatcctaataaggtgtccataactgcagagggctatgccatccaagctttccaatcgagaaaaaaacta

SEQ ID NO: 32433 - DNA, 80 bp, synthetic construct
  source 1..80: mol_type = other DNA
tagaacggaggagtaattgacaacacctcttatcccgagaacctcaccatgatgattgatccaggagacgtttatgatga

SEQ ID NO: 32434 - DNA, 80 bp, synthetic construct
  source 1..80: mol_type = other DNA
caacctaaactctcccctaatagaggatccagccaagttgatgctggaatggctgaaaacagggaatcgaccttctagaa

SEQ ID NO: 32435 - DNA, 80 bp, synthetic construct
  source 1..80: mol_type = other DNA
tgactctagtagacaattgtgccaggtcttacaaagttttgaaagattatttcaagaaagttgatctaggatctctcaag

SEQ ID NO: 32436 - DNA, 80 bp, synthetic construct
  source 1..80: mol_type = other DNA
gttgggggagccgcagcgcaatctatgatttccctttggttatgcaacgcccactctgaatcaaacaggagccggaaatg

SEQ ID NO: 32437 - DNA, 80 bp, synthetic construct
  source 1..80: mol_type = other DNA
tgaaaatcccccccgagggggtcttaagttgtctcgagagggtcgattatgataaagcattcgggcgatatctggccaac

SEQ ID NO: 32438 - DNA, 80 bp, synthetic construct
  source 1..80: mol_type = other DNA
gagggatttgacatcaatagatatcggaagagatttagtcaagtttaaggataaaatatgggggtcgctgattgtgacca

SEQ ID NO: 32439 - DNA, 80 bp, synthetic construct
  source 1..80: mol_type = other DNA
aggatttcgtgtactctcagagttcgggctgtttctttgatagaaattacacactcatgctgaaggatctttttctgtct

SEQ ID NO: 32440 - DNA, 80 bp, synthetic construct
  source 1..80: mol_type = other DNA
aggtttaactctctaatgattcttctttctcctccagaacccagatattcagatgacctgatatctcaactatgccaact

SEQ ID NO: 32441 - DNA, 80 bp, synthetic construct
  source 1..80: mol_type = other DNA
attagagataaggtaggtcagcttgaaggaacgtttggccctagtgcaaaaaggttcttcaaagttctagatcagtttga

SEQ ID NO: 32442 - DNA, 80 bp, synthetic construct
  source 1..80: mol_type = other DNA
aggtggggattcgacaaatactccaagtggtatcttgatttacggcttctctcgagggaccatcccttgattccctatat

SEQ ID NO: 32443 - DNA, 80 bp, synthetic construct
  source 1..80: mol_type = other DNA
ggctggagggtctgcggcagaaaggctggagtctggtcagcttgttgatgatagatcgtgagtcccagaccaggaacaca

SEQ ID NO: 32444 - DNA, 80 bp, synthetic construct
  source 1..80: mol_type = other DNA
cgctgtttccccgatttctcagtgaactcttcagctcatccttcttaggaatccctgagtctatcattgggttgatacaa

SEQ ID NO: 32445 - DNA, 80 bp, synthetic construct
  source 1..80: mol_type = other DNA
ctctcaagaacactagaagagtccttctataactctgaaatccacgggatcaaccggatgactcagactccccaaaaagt

SEQ ID NO: 32446 - DNA, 80 bp, synthetic construct
  source 1..80: mol_type = other DNA
caatttcatgcaattgcggatcgactagaggagggaatcctcgaatatcagtgtcagttctcccgtcttttgaccggtca

SEQ ID NO: 32447 - DNA, 80 bp, synthetic construct
  source 1..80: mol_type = other DNA
taatatctttgacgggcccggactttcctttggaagaagcccctgtcttcaagagaacagggtccgctctgcatagattc

SEQ ID NO: 32448 - DNA, 80 bp, synthetic construct
  source 1..80: mol_type = other DNA
agaatatctaggatggtctctggggctgtgcctcacttccggaaacttcctgatgttcgtttgaagtcgggtgacttcga

SEQ ID NO: 32449 - DNA, 80 bp, synthetic construct
  source 1..80: mol_type = other DNA
tcactgagcggtaaggagaggtcatgtcatatagggtcagcccaagggcttttatattctattctggttgcaactcatga

SEQ ID NO: 32450 - DNA, 80 bp, synthetic construct
  source 1..80: mol_type = other DNA
atctctggggtgatctcatacatcttattgagactggataaccatccatcattgtacataatgctcagggagccatctct

SEQ ID NO: 32451 - DNA, 80 bp, synthetic construct
  source 1..80: mol_type = other DNA
taggggagagatattttctattcctcagaaagttcctgctgcttacccgactacaatgaaagaaggcaacaggtccatct

SEQ ID NO: 32452 - DNA, 80 bp, synthetic construct
  source 1..80: mol_type = other DNA
tccttgaatgcgacagttatcgccacatgtgccccgcacgagatgtccgtccttgggggctatttaggcgaggagttttt

SEQ ID NO: 32453 - DNA, 80 bp, synthetic construct
  source 1..80: mol_type = other DNA
accctcaaggacatcagatctagatcatctttattagactacagctgcttgtaaaccaggcattcccagaggtctgcaca

SEQ ID NO: 32454 - DNA, 80 bp, synthetic construct
  source 1..80: mol_type = other DNA
gctgcttgtaaaccaggcattcccagaggtctgcacatgctgagactcttttgtgatgtgtctcgaaaaaaaaaaaaaaa

SEQ ID NO: 32455 - DNA, 80 bp, synthetic construct
  source 1..80: mol_type = other DNA
agccgacttcacttggatgatggaaaatcgtccgaccttggtaagatgtccaaggcgggggagggcaagcatcaagagga

SEQ ID NO: 32456 - DNA, 80 bp, synthetic construct
  source 1..80: mol_type = other DNA
cagagagaaagccagtcatcgaaatccaggacggcggctcaaactgcctctggccctccatcctttgaatggtctgctac

SEQ ID NO: 32457 - DNA, 80 bp, synthetic construct
  source 1..80: mol_type = other DNA
tgaatcctgctaaccgaactcttaaactcagtccctctagatgataaaacctgagatgttctaaagtcaacatgaaaaaa

SEQ ID NO: 32458 - DNA, 80 bp, synthetic construct
  source 1..80: mol_type = other DNA
acgagcaacaccactgacaaaatgaactttctgcggaagatagtgaaaaaacgtaaggatgaggacactcaaaaaccctc

SEQ ID NO: 32459 - DNA, 80 bp, synthetic construct
  source 1..80: mol_type = other DNA
cgggttcatcacttgtatacctctggaagagagaatatacgggcttaactccaaccgttgggggcaatagaacagaaata

SEQ ID NO: 32460 - DNA, 80 bp, synthetic construct
  source 1..80: mol_type = other DNA
ctgggcggaagtgctcaggaataacggtgtcttctacctactgctccactaaccacgattacaccgtttggatgcctgaa

SEQ ID NO: 32461 - DNA, 80 bp, synthetic construct
  source 1..80: mol_type = other DNA
attctgagactagggacatcttgtgatatttttaccaatagtagagggaagagagcatccaaggggagcaagacctgtgg

SEQ ID NO: 32462 - DNA, 80 bp, synthetic construct
  source 1..80: mol_type = other DNA
gataaagcgtacagatgtagaagggaattgggctctgacaggaggcatggaaatgacaagggaccccacgggctctgagc

SEQ ID NO: 32463 - DNA, 80 bp, synthetic construct
  source 1..80: mol_type = other DNA
gatgtgcacgaacaggtctcaggggttgacctgggtctcccgaactgggaggagtatgtattactgagcgcagggacctt

SEQ ID NO: 32464 - DNA, 80 bp, synthetic construct
  source 1..80: mol_type = other DNA
gggttgacctgggtctcccgaactggggggagtatgtattactgagcgcagggaccttaattgctttgatgttgataatt

SEQ ID NO: 32465 - DNA, 80 bp, synthetic construct
  source 1..80: mol_type = other DNA
aattgctttgatgttgataattttcctaataacatgttgtaaaagagtcgatcggccagaatctacgcaacgcagtctta

SEQ ID NO: 32466 - DNA, 80 bp, synthetic construct
  source 1..80: mol_type = other DNA
atacatctttggtcggtcttctcgtaagtctgtataggttgagcaaaatatcagggcaaaacactggtaactataaaaca

SEQ ID NO: 32467 - DNA, 80 bp, synthetic construct
  source 1..80: mol_type = other DNA
gagggacagggaggaatgtgtcagtcacctctcaaagcgggaaattcataccttcaagggagtcgtataaaagtggtggt

SEQ ID NO: 32468 - DNA, 80 bp, synthetic construct
  source 1..80: mol_type = other DNA
gagactggactgtgaagacttgtcatcctttcgacgcttcaagttctgaagatcacctcccctttaagtctggggggaat

SEQ ID NO: 32469 - DNA, 80 bp, synthetic construct
  source 1..80: mol_type = other DNA
gtacgtcccatgacagcggactcagcatgagtcgattgagaaaggcaatctgcctctcatgaaggacactggcaatagct

SEQ ID NO: 32470 - DNA, 80 bp, synthetic construct
  source 1..80: mol_type = other DNA
cgcaaatctttgagattcctgaatcaatggacccgtcggagatattggacgacaagtcacattctctcaccaggacgaga

SEQ ID NO: 32471 - DNA, 80 bp, synthetic construct
  source 1..80: mol_type = other DNA
taaagggaggtgccagtcctaccattctactaaaggatgcaatcaggaaggctttgtatgacgaggtggacaaagtaaag

SEQ ID NO: 32472 - DNA, 80 bp, synthetic construct
  source 1..80: mol_type = other DNA
tttagatgatcttaacgttttcccatccctatgcctcgtggttggggacgggtcaggaggaatatcgagagcagtactta

SEQ ID NO: 32473 - DNA, 80 bp, synthetic construct
  source 1..80: mol_type = other DNA
cctgctgaccgaatttttaaactcaggcctatgaaacaattgagcctgagctgttcagtattcaacatgaaaaaaacagg

SEQ ID NO: 32474 - DNA, 80 bp, synthetic construct
  source 1..80: mol_type = other DNA
aaaggtcggaggaggataaggactcctctctgctcctcgaatagtgagattgtatcctacagacttatcactcgtttacc

SEQ ID NO: 32475 - DNA, 80 bp, synthetic construct
  source 1..80: mol_type = other DNA
tctggaggagagaacatacgggcttaactccaacctttgggagcaatagaaccaaaccatatgctatggtgccattaaac

SEQ ID NO: 32476 - DNA, 80 bp, synthetic construct
  source 1..80: mol_type = other DNA
ttgaccgcactaatgttgatgattttcttaatgacgtgctgtagaagatccaatagagcagaatcagcacaacacaatct

SEQ ID NO: 32477 - DNA, 80 bp, synthetic construct
  source 1..80: mol_type = other DNA
gttaccctccaagaactgataccaaaggtggtggacaggctgagagatacttcagataacattgtgctagaacacagaca

SEQ ID NO: 32478 - DNA, 80 bp, synthetic construct
  source 1..80: mol_type = other DNA
acagcttggaatcagatgatgacattcaaaggctattgaaggactctctgcgtcggacaaggtgggtcgatcaagaagtg

SEQ ID NO: 32479 - DNA, 80 bp, synthetic construct
  source 1..80: mol_type = other DNA
aattgcagagagggactctgtccaaaatgtccatcattatagccattatgatagttttctccaatagagttttcaatgtc

SEQ ID NO: 32480 - DNA, 80 bp, synthetic construct
  source 1..80: mol_type = other DNA
agaccactagactcatcggaagcatcgaaaacttgtccggggaggtggagagacatcttcaggggtacaataggtggatt

SEQ ID NO: 32481 - DNA, 80 bp, synthetic construct
  source 1..80: mol_type = other DNA
acccttaaagacatcaggtctagatcatctctattagactacagctgcttatgaactgaatgcctctgtgaacttgtaga

SEQ ID NO: 32482 - DNA, 80 bp, synthetic construct
  source 1..80: mol_type = other DNA
tgtagatactaaagctcttggacgatataccctgaaaaaaacaagatcccaaatcggaacctctatctgtttgattactt

SEQ ID NO: 32483 - DNA, 80 bp, synthetic construct
  source 1..80: mol_type = other DNA
gcataagcaagtctcaggggtcgatctcggtctcccaagatgggggaagtatgtgttgatgagcgcaggcgtcttgaccg

SEQ ID NO: 32484 - DNA, 80 bp, synthetic construct
  source 1..80: mol_type = other DNA
cactaatgttgatgattttcttaatgacgtgttgtagaagatccaatagagcagaatcagcacaacacaatcttggagag

SEQ ID NO: 32485 - DNA, 80 bp, synthetic construct
  source 1..80: mol_type = other DNA
gacagacaacttaaacaaggtgtttaagaagttgattgatagagtaactgggcaagggcttttggattattcgagggtta

SEQ ID NO: 32486 - DNA, 80 bp, synthetic construct
  source 1..80: mol_type = other DNA
cagagttaaggaatttgaccacatggaagtacttccagtcagtccaaaaaaagatgaatatgttttatgacctaatcatt

SEQ ID NO: 32487 - DNA, 80 bp, synthetic construct
  source 1..80: mol_type = other DNA
aacacccctacaatggatgccgacaagattgtattcaaagtcaataaccaggtggtctctttgaagcctgagattatcgt

SEQ ID NO: 32488 - DNA, 80 bp, synthetic construct
  source 1..80: mol_type = other DNA
tgtacatgctaagactcttgtacgatgtatcttgaaaaaaacaagatcttaaatccgaacctctggctgtttgattgttt

SEQ ID NO: 32489 - DNA, 80 bp, synthetic construct
  source 1..80: mol_type = other DNA
ccgttcgcctttcttggatcccttgttactccacacagtgagagataaacaacccagaatgaaggtcactgtagatgttg

SEQ ID NO: 32490 - DNA, 80 bp, synthetic construct
  source 1..80: mol_type = other DNA
atcccctcaaaagggtgtttaagagttggagggaggtgtcaccctcatgtgaacggggtgtttttcaatggtataatatt

SEQ ID NO: 32491 - DNA, 80 bp, synthetic construct
  source 1..80: mol_type = other DNA
tcctcctgaggctggataatcacccctccttgtacataatgctcagagagccatctcttagaggagaaatattttctatc

SEQ ID NO: 32492 - DNA, 80 bp, synthetic construct
  source 1..80: mol_type = other DNA
acgcttaacaacaagactaagaaagagagcgacatcgtagcctacaagtccaaaaagtaacacccgtacaatggatgccg

SEQ ID NO: 32493 - DNA, 80 bp, synthetic construct
  source 1..80: mol_type = other DNA
gtccgacgtggcactggcagatgacggaaccgtcaactctgatgacgaggactatttctctggtgaaaccagaagtccag

SEQ ID NO: 32494 - DNA, 80 bp, synthetic construct
  source 1..80: mol_type = other DNA
tcatcaagcccgtccaaactcattcgccgaatttttaaacaagacgtattcgaatgactcataaggagttgattgacagg

SEQ ID NO: 32495 - DNA, 80 bp, synthetic construct
  source 1..80: mol_type = other DNA
ctccaagaaggtcttcggagaataaatcaacccagactactggcagagagctcaagaaggagacaacgtctgctttctct

SEQ ID NO: 32496 - DNA, 80 bp, synthetic construct
  source 1..80: mol_type = other DNA
aatgtaccgggcgtgacccgtctggcccatgatggatccaaaatccccctgagatgcgtactgggatacgtcgctttggc

SEQ ID NO: 32497 - DNA, 80 bp, synthetic construct
  source 1..80: mol_type = other DNA
taattccaaaaaattccaattactagtcgaggctgacaagctaagcaaaatcatgcaagatgatttgaatcgctatacat

SEQ ID NO: 32498 - DNA, 80 bp, synthetic construct
  source 1..80: mol_type = other DNA
cctgctaaccgagttttcgaactcagtccctccagataatgaaaactgagatgttatggagtagacatgaaaaaaacagg

SEQ ID NO: 32499 - DNA, 80 bp, synthetic construct
  source 1..80: mol_type = other DNA
gtgtttgaaagttggaggaaggtgccatcctcatgtgaacggggtgtttttcaatggtttaatattagggcctgacgacc

SEQ ID NO: 32500 - DNA, 80 bp, synthetic construct
  source 1..80: mol_type = other DNA
gccatgattggcctggtgttgatattttccctaatgacatggtgcagaagagccaatcgaccagaatcgaaacaacgcag

SEQ ID NO: 32501 - DNA, 80 bp, synthetic construct
  source 1..80: mol_type = other DNA
ttttggagggacaggggggaatgtgtcagtcacttcccaaagcggaaaagtcataccttcatgggaatcatataagagtg

SEQ ID NO: 32502 - DNA, 80 bp, synthetic construct
  source 1..80: mol_type = other DNA
ttcccaaagcggaaaagtcataccttcatgggaatcatataagagtggaggtgagatcagactgtgaaggccggtcatcc

SEQ ID NO: 32503 - DNA, 80 bp, synthetic construct
  source 1..80: mol_type = other DNA
agttatacctcagattctccaaacgagggaagttcttccgagatgcagaatatttgacttcttctgctcttagagaaatg

SEQ ID NO: 32504 - DNA, 80 bp, synthetic construct
  source 1..80: mol_type = other DNA
aaatggtagatgatttagaattacagcgaggtactttgtctaaagtttccattattatagctatcatgatagtcttctcc

SEQ ID NO: 32505 - DNA, 80 bp, synthetic construct
  source 1..80: mol_type = other DNA
aatagagtatttaatgtatcgaaaccgctgactgaccctttattctatcctccgtctgatcccaaaatcctgagacactt

SEQ ID NO: 32506 - DNA, 80 bp, synthetic construct
  source 1..80: mol_type = other DNA
atccagatcatctctgttagattacagctgcttgtaaactgagcgcccctgatagagtgtacagactgagactcttagac

SEQ ID NO: 32507 - DNA, 80 bp, synthetic construct
  source 1..80: mol_type = other DNA
agcgcccctgatagagtgtacagactgagactcttagacagtgcaccctgaaaaaaactggatcagaattccgaacctct

SEQ ID NO: 32508 - DNA, 80 bp, synthetic construct
  source 1..80: mol_type = other DNA
attgtaaacaccaacgagatgtgtacatctctcatgaaaaaaactaacacccctcctttcgaaccatctcagacatgagc

SEQ ID NO: 32509 - DNA, 80 bp, synthetic construct
  source 1..80: mol_type = other DNA
ttcaactagatgaagacaagccgtctggccttggcagtatagccaaaacaggggaaagtaaatgtcaggaagactttcaa

SEQ ID NO: 32510 - DNA, 80 bp, synthetic construct
  source 1..80: mol_type = other DNA
ttatgcgtctctctgaccacacctccaggctctgccacactatgcagtcagatctgatttgcatcaagtctaccatgaaa

SEQ ID NO: 32511 - DNA, 80 bp, synthetic construct
  source 1..80: mol_type = other DNA
cttatggacgggacctgggtttcaattcaaacatctgacgatgccaaatggtgctctccggatcaattggtgaatctaca

SEQ ID NO: 32512 - DNA, 80 bp, synthetic construct
  source 1..80: mol_type = other DNA
tcactcagacgaaatagagcatctcgtcgtggaggagttggtcaaaaagagggaagagtgcttggacgcattggagtcca

SEQ ID NO: 32513 - DNA, 80 bp, synthetic construct
  source 1..80: mol_type = other DNA
cttaatgcatcccttggcggatccgtcaacagtcttcaaggaaggggatgaagctgaggactttgttgaagttcacctcc

SEQ ID NO: 32514 - DNA, 80 bp, synthetic construct
  source 1..80: mol_type = other DNA
ctggcgacactagttctgataatcttcttgatggcatgttgtaggagagccaagcgaacagagtcaagacgacggggctc

SEQ ID NO: 32515 - DNA, 80 bp, synthetic construct
  source 1..80: mol_type = other DNA
aggagattcagagaagaagatatcagcaaccccccagactaggaaggtcgtatcttcatgggagttgtacaagagtgaag

SEQ ID NO: 32516 - DNA, 80 bp, synthetic construct
  source 1..80: mol_type = other DNA
gcgatgccaggctctgagggcgggccatctcctttatatcttacgatcagaatactgcctatctttgagatctgagggac

SEQ ID NO: 32517 - DNA, 80 bp, synthetic construct
  source 1..80: mol_type = other DNA
actcaaggattgataccaaaggtggtggacagaccaattgccatctcaaacaactctatgattgagtccaagcagagacc

SEQ ID NO: 32518 - DNA, 80 bp, synthetic construct
  source 1..80: mol_type = other DNA
gatcataatcatcttacatcctgataaggtgcaaataactacaaagggatggaccatccaagcctttcaatcgagaaaaa

SEQ ID NO: 32519 - DNA, 80 bp, synthetic construct
  source 1..80: mol_type = other DNA
aactgtggactgtaggggtaatgagcaacacttctcatccccagaactgcaccatgatgattgatcctggagaggttttt

SEQ ID NO: 32520 - DNA, 80 bp, synthetic construct
  source 1..80: mol_type = other DNA
gtataacagacttggccctgttctactccaagtcttcccccatagaaaagctattaaactacacactcggaaatagaggg

SEQ ID NO: 32521 - DNA, 80 bp, synthetic construct
  source 1..80: mol_type = other DNA
aagattttgtgtattcccaaagttctggttgcctctttgatagaaactatacacttatgttaaaagacctttttttgtct

SEQ ID NO: 32522 - DNA, 80 bp, synthetic construct
  source 1..80: mol_type = other DNA
tatatatcgccggagatcatgtcttgtccgtgtgcgggaattctggatatgaggtcatcaaaatattggagccttatgtt

SEQ ID NO: 32523 - DNA, 80 bp, synthetic construct
  source 1..80: mol_type = other DNA
gccctatcctgaagggcagagtttacaagatcttgagtgcagaaggagacaactttcttctggctatgtctagaatcgtt

SEQ ID NO: 32524 - DNA, 80 bp, synthetic construct
  source 1..80: mol_type = other DNA
catactaagactcttgcgcgatgtatcttgaaaaaaacaagatcttgaatccgaacctctggttgtttgattgttttttt

SEQ ID NO: 32525 - DNA, 80 bp, synthetic construct
  source 1..80: mol_type = other DNA
acgcttaacaacaaaatcaaagaagacatagacagtaccaatgacctggacaaaatgtaacactcctacaatggagtcag

SEQ ID NO: 32526 - DNA, 80 bp, synthetic construct
  source 1..80: mol_type = other DNA
ttcctccaggaaatgacctcttgtggatcttttctgactttaggagtataaagatgacttacctgacactgataaccttt

SEQ ID NO: 32527 - DNA, 80 bp, synthetic construct
  source 1..80: mol_type = other DNA
caggcatacttgtggctgcagagggtagaaaagagtttgcccaaacaggtgagggtcagattacgacagctgaactctct

SEQ ID NO: 32528 - DNA, 80 bp, synthetic construct
  source 1..80: mol_type = other DNA
catgagacaggttttgggtggccatggagaggacaccattgactcagatgatgaaatattatccctgcttaaagaagcgt

SEQ ID NO: 32529 - DNA, 80 bp, synthetic construct
  source 1..80: mol_type = other DNA
tgagaaggacaagatgggtagatcaagaagtccgccatgcagcaaagtcaatgactccagaccccaaccctgttccgaag

SEQ ID NO: 32530 - DNA, 80 bp, synthetic construct
  source 1..80: mol_type = other DNA
atctctcgcagaatagggtcttctgagtggatttgctctgcacaacaaatagctatctccacctctctgaatccagcctc

SEQ ID NO: 32531 - DNA, 80 bp, synthetic construct
  source 1..80: mol_type = other DNA
ctttaaatgcaacagtgatccaaacatgtgcacctcacgagatgtcagtcttagggggatatcttggggaagaattcttt

SEQ ID NO: 32532 - DNA, 80 bp, synthetic construct
  source 1..80: mol_type = other DNA
cgcttcggacattgacatgaggtcgctgtcacgtcaatatcagaatcctctcatatctggcctaagggtggtgcaatggg

SEQ ID NO: 32533 - DNA, 80 bp, synthetic construct
  source 1..80: mol_type = other DNA
ccaccggggcccactacaaaatcaagccaatcttaaacgacttggatgtatgcccttgtttgtccctggtcataggagat

SEQ ID NO: 32534 - DNA, 80 bp, synthetic construct
  source 1..80: mol_type = other DNA
ggatcaggaggcatttcaagggttgttctgagcatgttccctgactccaagctggtgtttaacagcctgttggaggtgaa

SEQ ID NO: 32535 - DNA, 80 bp, synthetic construct
  source 1..80: mol_type = other DNA
cgaccttatggcatcaggcactcaccctttaccgccttcagcccttatgagagggggtgacgatatcacatctagggtaa

SEQ ID NO: 32536 - DNA, 80 bp, synthetic construct
  source 1..80: mol_type = other DNA
tagatttcgattcaatatgggaaaagccgtctgatttgaggaatccactcacgtggaagtatttccactcaatacaatct

SEQ ID NO: 32537 - DNA, 80 bp, synthetic construct
  source 1..80: mol_type = other DNA
aagttgaaatcacagtttgacttaatagtctgtgacgctgaggtgacagacatagaatctgttaacaagattaccctgtt

SEQ ID NO: 32538 - DNA, 80 bp, synthetic construct
  source 1..80: mol_type = other DNA
actgtctgatttctcgatgtcaattaagggccccctatacttaatctttaagacctacgggaccatgctcgtgaatccgg

SEQ ID NO: 32539 - DNA, 80 bp, synthetic construct
  source 1..80: mol_type = other DNA
attataaggcgatacaccacctatcgagagcattccccaatgtaaccgggtttgtcactcaactgacatcatctttctcc

SEQ ID NO: 32540 - DNA, 80 bp, synthetic construct
  source 1..80: mol_type = other DNA
tcagagatctaccttaggttctcaaaaacaggatatttcttcagagaccatgagctgctgacagcatctacaatcagaga

SEQ ID NO: 32541 - DNA, 80 bp, synthetic construct
  source 1..80: mol_type = other DNA
aatgagtctagtattattcaattgcagcaatcccaagagcgagatgctgagggctaggaccttaaattaccaggatctga

SEQ ID NO: 32542 - DNA, 80 bp, synthetic construct
  source 1..80: mol_type = other DNA
gggaagggcacattcgagaggaggttcttcagggatgaaaaagaaatgcaggattatgcagagctagaggaggccagagt

SEQ ID NO: 32543 - DNA, 80 bp, synthetic construct
  source 1..80: mol_type = other DNA
taaggggttttccccctgagatcatctccaacccgtacaatgagatgatcattaccctgattgacagtgaggtagaatcg

SEQ ID NO: 32544 - DNA, 80 bp, synthetic construct
  source 1..80: mol_type = other DNA
ttcttagtccacaaagtggttgatgacttggagctcaagagaggatccccgtccaagatggctataataatttccattgc

SEQ ID NO: 32545 - DNA, 80 bp, synthetic construct
  source 1..80: mol_type = other DNA
cattctattctctaacagtgtcttcaatgtgtctaagtcgttgaatgaacccaaattcttccccccatcagatccaaagt

SEQ ID NO: 32546 - DNA, 80 bp, synthetic construct
  source 1..80: mol_type = other DNA
tgttgaggcacttcaacatatgctctagtacacttctattcttgtctacagcgatgggagatttgtcaaacttcacaagg

SEQ ID NO: 32547 - DNA, 80 bp, synthetic construct
  source 1..80: mol_type = other DNA
attcatgagctatacaactctcctgtgacctattactttggaaagcagacagtcaaagggagaagatatttgtcatggag

SEQ ID NO: 32548 - DNA, 80 bp, synthetic construct
  source 1..80: mol_type = other DNA
ctgggcctctccaagcccaatcttcaaaaaggtggcatgcaactcctccatcagtctgtcctcccactggatacgaatga

SEQ ID NO: 32549 - DNA, 80 bp, synthetic construct
  source 1..80: mol_type = other DNA
tatataagatagtcaagaccactcgcctgaactgctctcctagggaaatgttaagagagacagaagcctgccttagaacc

SEQ ID NO: 32550 - DNA, 80 bp, synthetic construct
  source 1..80: mol_type = other DNA
tacaacaaatggataaacataagggacatacgatccagaacctccttactagaatactgctgtctttaatcccctcgatg

SEQ ID NO: 32551 - DNA, 80 bp, synthetic construct
  source 1..80: mol_type = other DNA
atccagaacctccttactagaatactgctgtctttaatcccctcgatgttgacagactgggagctaagttttgaaaaaaa

SEQ ID NO: 32552 - DNA, 80 bp, synthetic construct
  source 1..80: mol_type = other DNA
ggaagcctcacttgctgatgacgggactgtagactcagatgaggaagatttcttttctggagaaactagaagtcctgaag

SEQ ID NO: 32553 - DNA, 80 bp, synthetic construct
  source 1..80: mol_type = other DNA
cagtctacagtaggataatgatgaacggtggcaagttgaagaaagttcatatacgtagatatatagcggtgagctcaaat

SEQ ID NO: 32554 - DNA, 80 bp, synthetic construct
  source 1..80: mol_type = other DNA
caccaagctaggccaaactcttttgcagaattcttgaataaagtatatgcagacggatcataatcctagagctccattgc

SEQ ID NO: 32555 - DNA, 80 bp, synthetic construct
  source 1..80: mol_type = other DNA
aaaggagggtctatagatgactgatattgcgagataaattcaagaaaaaaacataacaccactactcgattcgtggtgtc

SEQ ID NO: 32556 - DNA, 80 bp, synthetic construct
  source 1..80: mol_type = other DNA
aaaatgagcaaagatttagtacaccctagccttatcagagcagggatagtagacttggaaatggctgaagagactactga

SEQ ID NO: 32557 - DNA, 80 bp, synthetic construct
  source 1..80: mol_type = other DNA
cccgctatcttagacgggaagaagccagggataactttagggaaggcacccgatctgaacactgcctacaagtccatctt

SEQ ID NO: 32558 - DNA, 80 bp, synthetic construct
  source 1..80: mol_type = other DNA
tctaatcaatcgaaccatcgagggcaatcaagctcaccttcagggggagccttttgatgttgattccttgccagaagata

SEQ ID NO: 32559 - DNA, 80 bp, synthetic construct
  source 1..80: mol_type = other DNA
tgagcagattaaaaataaggggcgaatctggtaaggctaaaacagaagaggaagagagagatgaggggagctctgaggaa

SEQ ID NO: 32560 - DNA, 80 bp, synthetic construct
  source 1..80: mol_type = other DNA
gatgactatctgtctgagagacaaaacccattggtcttatttcagaatttccttgacgaaatcggggccaaggcggtcaa

SEQ ID NO: 32561 - DNA, 80 bp, synthetic construct
  source 1..80: mol_type = other DNA
gaaattaaagaccggtgagggattcttcagaatgtggtctgctctgtcagatgatataaaggggtacgtgtcgaccaacc

SEQ ID NO: 32562 - DNA, 80 bp, synthetic construct
  source 1..80: mol_type = other DNA
tattgccatctcatgcgagaaagacaaagagtgtacaaactcaaacagaaccgactgcattatctagttttgcaagtgag

SEQ ID NO: 32563 - DNA, 80 bp, synthetic construct
  source 1..80: mol_type = other DNA
agtcggccagattcatggtgtatgcaagaccaaaaagacaaggaagaccatactactgaccacgatatggtctcggatgt

SEQ ID NO: 32564 - DNA, 80 bp, synthetic construct
  source 1..80: mol_type = other DNA
tgaatcagctactgagaaagaagagatcagagatatagaaggagaggttgctcaccaggttgcagaaagcttctcaaaga

SEQ ID NO: 32565 - DNA, 80 bp, synthetic construct
  source 1..80: mol_type = other DNA
agtacaaatttccttctagatcctcaggaatatttttatggaactttgagcagctcaaaatgaatttggacgacattgta

SEQ ID NO: 32566 - DNA, 80 bp, synthetic construct
  source 1..80: mol_type = other DNA
aaggcagccatgaatgtaccggaggttgatatgatcgctgaaaaaggagggaagctccccttaagatgcattttgggatt

SEQ ID NO: 32567 - DNA, 80 bp, synthetic construct
  source 1..80: mol_type = other DNA
tgtagcgttagactattcaaagagatttaggctcctcgcaaacaacgacaaagtggccagactcatacaagatgatatca

SEQ ID NO: 32568 - DNA, 80 bp, synthetic construct
  source 1..80: mol_type = other DNA
atcaggtatgaaagccgctaagctcgaccccgacgatgtttgctcttacttggcagctgccatgcctctcttcgagggtg

SEQ ID NO: 32569 - DNA, 80 bp, synthetic construct
  source 1..80: mol_type = other DNA
acagttacatggcccggctggaggaggccgattagaggttataaggacccataacacaatcaataactgggcagtcctgt

SEQ ID NO: 32570 - DNA, 80 bp, synthetic construct
  source 1..80: mol_type = other DNA
cttaaaatgaaaaaaacatttaacatccctaaaaaaatgaatttcctaaagagaatggttaaaagctgcaaagaggaaga

SEQ ID NO: 32571 - DNA, 80 bp, synthetic construct
  source 1..80: mol_type = other DNA
gtcccctaagtatccatcagcttctgcgccgccggatgacgatgatctttggatgcctcctcctgagtatgtccctttga

SEQ ID NO: 32572 - DNA, 80 bp, synthetic construct
  source 1..80: mol_type = other DNA
ctcagattacaggtaaggccagagtgagaaacttttgtatcagtggggaggttaagatatgtagtccaaacgggtactct

SEQ ID NO: 32573 - DNA, 80 bp, synthetic construct
  source 1..80: mol_type = other DNA
ttcaagatactccggcatattttgaagtcattagacagtgcttactctgggaacaggaggatgacagggttagtcaaagt

SEQ ID NO: 32574 - DNA, 80 bp, synthetic construct
  source 1..80: mol_type = other DNA
tgtcatagggcttgtactctctggatctccagtcccggaaggcatgaactgggtttataaacttcgcagaacattaatct

SEQ ID NO: 32575 - DNA, 80 bp, synthetic construct
  source 1..80: mol_type = other DNA
ttcagtgggcagagtcatatggaccattagaaggagaagagctcgagtactcccaagaaattacatgggatgacgaggca

SEQ ID NO: 32576 - DNA, 80 bp, synthetic construct
  source 1..80: mol_type = other DNA
gaatttgttggcttgcaaatccgagtgagtgcaagacaatgtcacatccagggtcgtctctggtgtataaatatgaactc

SEQ ID NO: 32577 - DNA, 80 bp, synthetic construct
  source 1..80: mol_type = other DNA
aagggcatgtcagctatgggctgatatgaccttgaagacccaacagtccccggatgatgaaaacacctcactcttactag

SEQ ID NO: 32578 - DNA, 80 bp, synthetic construct
  source 1..80: mol_type = other DNA
agtagactctagcctgtggctgtgtatctcagttgttacctctgtctggagtagagtaaaaccgcgagcaatagaacaat

SEQ ID NO: 32579 - DNA, 80 bp, synthetic construct
  source 1..80: mol_type = other DNA
tttgtcctgaggactgggtcagttatgggattgtcattgcaaagaggggggacaaaatcaaccctagcgtaatcgttgac

SEQ ID NO: 32580 - DNA, 80 bp, synthetic construct
  source 1..80: mol_type = other DNA
caccgcaatggtgcccgctttcagcacaacatatataacctaataactggtttgtcttcctattcagggttgagcaaaaa

SEQ ID NO: 32581 - DNA, 80 bp, synthetic construct
  source 1..80: mol_type = other DNA
cgtgaaaaaaactaaggggaaaggcacaacagccctctcactgccatcatgaatgtactctgccttgctataatccttgg

SEQ ID NO: 32582 - DNA, 80 bp, synthetic construct
  source 1..80: mol_type = other DNA
cttcacaactacatattctcttggggaatttcctttgtacacaattcccgagaagatagagaaatggaccccaatcgata

SEQ ID NO: 32583 - DNA, 80 bp, synthetic construct
  source 1..80: mol_type = other DNA
tgatccatctaagctgccccaacaacttgttatccgaggaggaaggttgcaatacagagtcgcccctcacctacttcgag

SEQ ID NO: 32584 - DNA, 80 bp, synthetic construct
  source 1..80: mol_type = other DNA
ctcaagagtggttacttagctcaccagaaagttccggggtttacttgtaccggggtagtgaatgaggcggagacatacac

SEQ ID NO: 32585 - DNA, 80 bp, synthetic construct
  source 1..80: mol_type = other DNA
aaattttgtcgggtatgtcaccacaaccttcaaaagaaaacactttaggcctacagtctccgcctgtcgtgatgcctaca

SEQ ID NO: 32586 - DNA, 80 bp, synthetic construct
  source 1..80: mol_type = other DNA
actggaaagtgtccggggaccccaggtatgaggagtcactgcacactccttaccctgacagcagctggttgaggactgta

SEQ ID NO: 32587 - DNA, 80 bp, synthetic construct
  source 1..80: mol_type = other DNA
gggacaaaatcaaccctagcgtaatcgttgacatagttcgaacaaacgtggagggaaattgggctcaagcaggagggaca

SEQ ID NO: 32588 - DNA, 80 bp, synthetic construct
  source 1..80: mol_type = other DNA
accaccaccaaagaatcccttcttataatatcgcctagcatcgtggagatggatgtatatggtaggactctccattcccc

SEQ ID NO: 32589 - DNA, 80 bp, synthetic construct
  source 1..80: mol_type = other DNA
catgttcccttcaggaatatgttctaagctctatccctctgttccatcctgtaaaaccaaccatgattacacattgtggc

SEQ ID NO: 32590 - DNA, 80 bp, synthetic construct
  source 1..80: mol_type = other DNA
tgccagaagatcctagtttgagcttaatctgtgatatcttcacttctggcagcggaaggaaggccatgaatgggtcccgc

SEQ ID NO: 32591 - DNA, 80 bp, synthetic construct
  source 1..80: mol_type = other DNA
atagttcgaacaaacgtggagggaaattgggctcaagcaggagggacagatgtgatcagagaccctacaactgcagagca

SEQ ID NO: 32592 - DNA, 80 bp, synthetic construct
  source 1..80: mol_type = other DNA
atctgcggattcaaggatgaaaggggattttacagatctttgaaaggcgcttgtaagctgacattgtgcgggaagcctgg

SEQ ID NO: 32593 - DNA, 80 bp, synthetic construct
  source 1..80: mol_type = other DNA
gatcagattatttgacggaacttgggtctcttttacaaggccagaagttcacgtgtggtgcacccctaaccaattggtca

SEQ ID NO: 32594 - DNA, 80 bp, synthetic construct
  source 1..80: mol_type = other DNA
atatgcacaatgatagaatagatgagatcgagcacctgattgttgaagacattgtcaaaagaagagaggagtgtttagac

SEQ ID NO: 32595 - DNA, 80 bp, synthetic construct
  source 1..80: mol_type = other DNA
actctagagacagtattcatgtctcaatcaattagttttaggaggttgagccactttcggaaattggttccagggtatgg

SEQ ID NO: 32596 - DNA, 80 bp, synthetic construct
  source 1..80: mol_type = other DNA
gaaagcttacaccattttgaatggtagcctgatggaagcaaatgtctactataaaagagttgacaggtgggcggacattt

SEQ ID NO: 32597 - DNA, 80 bp, synthetic construct
  source 1..80: mol_type = other DNA
taccctctaagggatgtctgaaagtcgggcaacaatgtatggaccctgtcaacggagtccttttcaatgggattatcaaa

SEQ ID NO: 32598 - DNA, 80 bp, synthetic construct
  source 1..80: mol_type = other DNA
ggtccggatggccagatcctgatccctgaaatgcagtcagagcagctcaagcagcatatggacttattaaaggcagcagt

SEQ ID NO: 32599 - DNA, 80 bp, synthetic construct
  source 1..80: mol_type = other DNA
gttccctctcagacatcctttaatcagccaaaacgccgtctttaagaaagacggggaggcagatgattttgtggacctcc

SEQ ID NO: 32600 - DNA, 80 bp, synthetic construct
  source 1..80: mol_type = other DNA
atatgccagatgtacacaaatctgtatcagatgtcgacttgggtttgcctcactgggggttctggctgttgataggagca

SEQ ID NO: 32601 - DNA, 80 bp, synthetic construct
  source 1..80: mol_type = other DNA
actgtagtggcatttttggtcttggtgtgtctgctccgtgtttgctgtaagagagtgaggaggggaggttcacgacgtac

SEQ ID NO: 32602 - DNA, 80 bp, synthetic construct
  source 1..80: mol_type = other DNA
tgcatcattggttggactgttgctgtgtttgtatcggttgagcaagatagttggccagaacacagcaaactataaaacta

SEQ ID NO: 32603 - DNA, 80 bp, synthetic construct
  source 1..80: mol_type = other DNA
aactcaggagatccccctcagcgtttcctctgtctccgtccctcgggccacagtggtgtcatcatgggagtcttataaag

SEQ ID NO: 32604 - DNA, 80 bp, synthetic construct
  source 1..80: mol_type = other DNA
ggctcccaggcacctgaaacatccaattgcttggaacactgctcacaaccggaacacctgcctcggcacgacaaaaccta

SEQ ID NO: 32605 - DNA, 80 bp, synthetic construct
  source 1..80: mol_type = other DNA
accacatggtatcaaatctccgttcttactctccaatgtataataattagaggagggttgcctgtcaatcgaagggaatg

SEQ ID NO: 32606 - DNA, 80 bp, synthetic construct
  source 1..80: mol_type = other DNA
ctttctcacacattctgttacctgtgatttataatccttcctctcccattgtctaaatccttctgaatacaatcaatata

SEQ ID NO: 32607 - DNA, 80 bp, synthetic construct
  source 1..80: mol_type = other DNA
cgactgggtcttcgggtttctacaaagagttgccttctaacttggggtggttcacttaatgcttgattgggccttcaatc

SEQ ID NO: 32608 - DNA, 80 bp, synthetic construct
  source 1..80: mol_type = other DNA
attctgaggtgcggcaatattagcctgaactaacctcaagggttaagtgctcctgtttcctaataatatcacaggagtat

SEQ ID NO: 32609 - DNA, 80 bp, synthetic construct
  source 1..80: mol_type = other DNA
gtcattgttctgtgtgataacaggacacaatatgatgtttcttagtattgtagagttctgatttgtcaaattgtgaccct

SEQ ID NO: 32610 - DNA, 80 bp, synthetic construct
  source 1..80: mol_type = other DNA
agaatgttccatgtatttgtgtgaaaaaaacatgcccctgggccagagtatacacttcaacactcctcctatttgctttg

SEQ ID NO: 32611 - DNA, 80 bp, synthetic construct
  source 1..80: mol_type = other DNA
caatcatgatggaaatcaatgaggtgtatgatgatccgatagatcctgttgaaccggaaggagagtggaacagcagcccc

SEQ ID NO: 32612 - DNA, 80 bp, synthetic construct
  source 1..80: mol_type = other DNA
gtggtccccaatattctgcgaaactctgactataatctaaactcccctttgctagaagactctgccaatttgatgattca

SEQ ID NO: 32613 - DNA, 80 bp, synthetic construct
  source 1..80: mol_type = other DNA
atgtagctgataggatggagcaaatatttgaaacagccccttttgcgaaagtggtggaacatcacactttaatgactgct

SEQ ID NO: 32614 - DNA, 80 bp, synthetic construct
  source 1..80: mol_type = other DNA
atggataacatcaggaaacagaccctcgagaatgaatgtcacagagaacataacccggtcttacaaagttctgaaggtgc

SEQ ID NO: 32615 - DNA, 80 bp, synthetic construct
  source 1..80: mol_type = other DNA
ttttcaaagggacagatgtatcatcagtgagaatagggggtgtcggggctcaggcaatgatgagtttgtgggtcttggtg

SEQ ID NO: 32616 - DNA, 80 bp, synthetic construct
  source 1..80: mol_type = other DNA
tcccactcagaatcatccagaagccgaaagtgtttagctgagttgtctgccttttatcaaaggaccctgcctatagagtc

SEQ ID NO: 32617 - DNA, 80 bp, synthetic construct
  source 1..80: mol_type = other DNA
gatattgaatcacacactgatgaacagaggattacagacccccaaagaaggagtgttatctgggctgaatagagtcagct

SEQ ID NO: 32618 - DNA, 80 bp, synthetic construct
  source 1..80: mol_type = other DNA
atgatcagtccttcggacggtatttgggtaatttgtattcctcctatctcctatttcatgtcataatcttgtacatgaat

SEQ ID NO: 32619 - DNA, 80 bp, synthetic construct
  source 1..80: mol_type = other DNA
gcactagactgggaagaagaaaaaaccattctggctttgtggaaagacataacatctatagatgtcaaaaatgacagggt

SEQ ID NO: 32620 - DNA, 80 bp, synthetic construct
  source 1..80: mol_type = other DNA
ctctttcagagaccccttgtgggggaagctttcagtgacaaaggacttcgtctatgcacacaatagcaacagtttgttcg

SEQ ID NO: 32621 - DNA, 80 bp, synthetic construct
  source 1..80: mol_type = other DNA
ataaaaactacacactgatgttgaaagatttgttcctgtcgagattcaattctttgctcatacttgtttccccgccggac

SEQ ID NO: 32622 - DNA, 80 bp, synthetic construct
  source 1..80: mol_type = other DNA
tcccgttactcggaagatctggccgccaacctgtgtcgactttacatctctggtgataggcttctctctaattgcggaaa

SEQ ID NO: 32623 - DNA, 80 bp, synthetic construct
  source 1..80: mol_type = other DNA
tgctggatatgatgtgatcaaaatgttggagccttgtgtggtgaatctcctagtgaaaagagctgagacattccgtccgt

SEQ ID NO: 32624 - DNA, 80 bp, synthetic construct
  source 1..80: mol_type = other DNA
cacaaaatgtgtgctaactggagcactatacccaacttcagattcttggtgggtacatatgatatgttttttgcaagagt

SEQ ID NO: 32625 - DNA, 80 bp, synthetic construct
  source 1..80: mol_type = other DNA
taattcactctctgggggaattccctgccttcataaatgacaaaacaactcagctgataggaatcttcggaccatgcgca

SEQ ID NO: 32626 - DNA, 80 bp, synthetic construct
  source 1..80: mol_type = other DNA
tcccagttcttctcaatgcttcaccaattcgacaatatccatgatttggtattcatttacggatgttacaggcactgggg

SEQ ID NO: 32627 - DNA, 80 bp, synthetic construct
  source 1..80: mol_type = other DNA
tcatccttacatagactatagaaaaggacttaccaagcttttcgatcaagttcacatgaagaagactatagaccatcagt

SEQ ID NO: 32628 - DNA, 80 bp, synthetic construct
  source 1..80: mol_type = other DNA
atcaagagcgtttggccagcgatttagccagaaagattcttcgttggggatttgataagtactccaaatggtatctagac

SEQ ID NO: 32629 - DNA, 80 bp, synthetic construct
  source 1..80: mol_type = other DNA
actggtgtcattcctaaagaccatcccttggcaccctacatcgcgacacaaacatggccccccaaacatgtggtagacct

SEQ ID NO: 32630 - DNA, 80 bp, synthetic construct
  source 1..80: mol_type = other DNA
cctgggggactcatggcacactctcccaatgactcaaatttttgaggttcctgaatctatggacccttctgagattctag

SEQ ID NO: 32631 - DNA, 80 bp, synthetic construct
  source 1..80: mol_type = other DNA
acgacaaatctcactcatttacccggacaaaactgtcaagctggttgtctgaacacagaggtggacccgtaccaagtgag

SEQ ID NO: 32632 - DNA, 80 bp, synthetic construct
  source 1..80: mol_type = other DNA
aaagtgatcataacagctctatccagacctccggtaaatcccagagagtttctcaagtccatagaccaaggagggttgcc

SEQ ID NO: 32633 - DNA, 80 bp, synthetic construct
  source 1..80: mol_type = other DNA
tgatgatgatcttattattggactcaaaccaaaagaaagagagttgaagatagatgggcgattttttgctttgatgtctt

SEQ ID NO: 32634 - DNA, 80 bp, synthetic construct
  source 1..80: mol_type = other DNA
ggaacctgaggttatacttcgtaatcaccgagaagctgttagccaaccacatcatccctcttttcgatgcacttacaatg

SEQ ID NO: 32635 - DNA, 80 bp, synthetic construct
  source 1..80: mol_type = other DNA
tgagcatatatactcggctcttagagtaggaacagtggtgacagcgtatgaggattgctctgggttggtctccttcaccg

SEQ ID NO: 32636 - DNA, 80 bp, synthetic construct
  source 1..80: mol_type = other DNA
acagacaatcttaacaaagtgttcaaaaagctgatagacagagtgaccggacaaggactcaaagactattctcgcgtcac

SEQ ID NO: 32637 - DNA, 80 bp, synthetic construct
  source 1..80: mol_type = other DNA
ctatgctttccacttagactatgaaaaatggaacaaccaccaaagactagagtcaacaaaggacgtgttctctgttctcg

SEQ ID NO: 32638 - DNA, 80 bp, synthetic construct
  source 1..80: mol_type = other DNA
acagagcattcggaatgaaaagggtattctctaggacacatgagttttttcagaagtcttggatatattactcagataga

SEQ ID NO: 32639 - DNA, 80 bp, synthetic construct
  source 1..80: mol_type = other DNA
tcagatcttatagggatttggaacaaccagatctattgtcttgacatgactgaaggccctacttgctggaatgggcaaga

SEQ ID NO: 32640 - DNA, 80 bp, synthetic construct
  source 1..80: mol_type = other DNA
cggaggtttggagggtctgcgacaaaaagggtggagtttggtgagcctcctgatgattgagagggagtcgaaaactagga

SEQ ID NO: 32641 - DNA, 80 bp, synthetic construct
  source 1..80: mol_type = other DNA
atacccgaaccaagatcttagctcagggagataatcaggtgctgtgtcccacttacatgttatcttctggtctcaacaat

SEQ ID NO: 32642 - DNA, 80 bp, synthetic construct
  source 1..80: mol_type = other DNA
gaaggactcttgtatgaattggaaaacatctctaagaatgcgatgtctatatatcgtgctattgaagagggagcttcgaa

SEQ ID NO: 32643 - DNA, 80 bp, synthetic construct
  source 1..80: mol_type = other DNA
gcttgggctgataatcaagaaggaagaaacgatgtgtagctttgactttttgatatacgggaagacacctctttttagag

SEQ ID NO: 32644 - DNA, 80 bp, synthetic construct
  source 1..80: mol_type = other DNA
gtaacatattggtccctgaatcgaagcggtgggctagagtttcatgtatctccaatgatcagattgttaacctggctaac

SEQ ID NO: 32645 - DNA, 80 bp, synthetic construct
  source 1..80: mol_type = other DNA
attatgtcaacagtctccaccaatgccttaactgttgcccaacactctcaatccctggtgaagcccatgcgggacttcct

SEQ ID NO: 32646 - DNA, 80 bp, synthetic construct
  source 1..80: mol_type = other DNA
ataagattgtattcaaggtgaacaaccaagttgtttctttgaagcctgaggtcatatcagatcaatatgagtataaatat

SEQ ID NO: 32647 - DNA, 80 bp, synthetic construct
  source 1..80: mol_type = other DNA
ggtttattaaacagatcaatctatcccccagagatgcactgctatatttcttccataaaaactttgagggagagatcaag

SEQ ID NO: 32648 - DNA, 80 bp, synthetic construct
  source 1..80: mol_type = other DNA
tctaatgtctgtccaggcaatctatcattatctgttgttcagccctattataaaagatcgcgtttacaaggtgctgaact

SEQ ID NO: 32649 - DNA, 80 bp, synthetic construct
  source 1..80: mol_type = other DNA
caaggaatgaggactttctcctagccatgtctcgaatcatatatctagatccttcccttggtggggtatcagggatgtct

SEQ ID NO: 32650 - DNA, 80 bp, synthetic construct
  source 1..80: mol_type = other DNA
ttaggaagatttcacatcagacagttctcagatcctgtatcagagggactaaccttctggaaagagatatggctgagttc

SEQ ID NO: 32651 - DNA, 80 bp, synthetic construct
  source 1..80: mol_type = other DNA
atcagagacttggattcatcatctatgtcaagaagctgggaacccagacttgggggatagaagtttagagagttttacac

SEQ ID NO: 32652 - DNA, 80 bp, synthetic construct
  source 1..80: mol_type = other DNA
gtctcttagaagatcccactacattgaacataagagggggggctagtcccacgatcctcttgaaggaagccatcaggaaa

SEQ ID NO: 32653 - DNA, 80 bp, synthetic construct
  source 1..80: mol_type = other DNA
gggctagtcccacgatcctcttgaaggaagccatcaggaaagctttatatgatgaagtagatagggtggagaattctgaa

SEQ ID NO: 32654 - DNA, 80 bp, synthetic construct
  source 1..80: mol_type = other DNA
gctttatatgatgaagtagatagggtggagaattctgaattcagggaggctattatattgtctaagactcaccgtgacaa

SEQ ID NO: 32655 - DNA, 80 bp, synthetic construct
  source 1..80: mol_type = other DNA
ctttatattgtttttgaagtctatagagcctctcttccctcgtttcttgagtgagctttttagctcttcctttctaggta

SEQ ID NO: 32656 - DNA, 80 bp, synthetic construct
  source 1..80: mol_type = other DNA
ttccagaatctataatcggactcatacagaactccagaactgtcagaagacagtttaggaagagcctctcgaaaacttta

SEQ ID NO: 32657 - DNA, 80 bp, synthetic construct
  source 1..80: mol_type = other DNA
gaagagtcttttcttcactcagaaatccatggaattaatcgggtaacacagacccctcaacgactcgggagagtctgggc

SEQ ID NO: 32658 - DNA, 80 bp, synthetic construct
  source 1..80: mol_type = other DNA
gtgctctgctgagagggcggatcagttaagagagatatcatggggaagaaaagttgtcggcacaaccgttcctcatccct

SEQ ID NO: 32659 - DNA, 80 bp, synthetic construct
  source 1..80: mol_type = other DNA
agaatgtttgagccagggcaggaaacagcagtcccccactcatacttcattcatttccgagcacttggtttgagtggcaa

SEQ ID NO: 32660 - DNA, 80 bp, synthetic construct
  source 1..80: mol_type = other DNA
ctgagatgttgacattaattcccaagtcctctgtggcttgtggatgttatacaagagaatctggaaaccctcgaatttct

SEQ ID NO: 32661 - DNA, 80 bp, synthetic construct
  source 1..80: mol_type = other DNA
gtatcggtgttgccttcatttgacccttctttcctctcaaggggcccccttaaggggtatttgggatcttccacatccat

SEQ ID NO: 32662 - DNA, 80 bp, synthetic construct
  source 1..80: mol_type = other DNA
gtccacccagttgttccattcatgggagaaggtcacaaatgttcatgtagtcaagagggctctatctctcaaggaatcca

SEQ ID NO: 32663 - DNA, 80 bp, synthetic construct
  source 1..80: mol_type = other DNA
tcaactggtttgtttctcgggagtctaacttggccaagactctgatagggaacatactgtccctaacagggccctccttt

SEQ ID NO: 32664 - DNA, 80 bp, synthetic construct
  source 1..80: mol_type = other DNA
cctattgaagaggctccggtcttcaagaggacagggtcagccttacatcgattcaaatcagctaggtatagtgaaggtgg

SEQ ID NO: 32665 - DNA, 80 bp, synthetic construct
  source 1..80: mol_type = other DNA
ttattcagctgtttgtcctaacctgctgtctcatatctcggtaagcactgatactatgtctgatttgacccaagacggga

SEQ ID NO: 32666 - DNA, 80 bp, synthetic construct
  source 1..80: mol_type = other DNA
caaatttcgacttcatgttccagcctctgatgttgtattcccaaacctggacatctgagctggtccaaaaggacattaga

SEQ ID NO: 32667 - DNA, 80 bp, synthetic construct
  source 1..80: mol_type = other DNA
ttggctgattctacttttcattggcatttaaggtgccaaaaatgtatccgggcaatagaagaagtcactctggatgctcc

SEQ ID NO: 32668 - DNA, 80 bp, synthetic construct
  source 1..80: mol_type = other DNA
ccaactttttgccttcccggacatatcttctagaatctcccgaatggtctccggggcggtccctcaattcagaaagttgc

SEQ ID NO: 32669 - DNA, 80 bp, synthetic construct
  source 1..80: mol_type = other DNA
cagaggtagggcttaaggcaggagacttgacggccctaggcagcagcgagaggtcctatcatataggaaccgcccaagga

SEQ ID NO: 32670 - DNA, 80 bp, synthetic construct
  source 1..80: mol_type = other DNA
atctccttactcgtccaatgctgtaggtcacactttcaatctaattcactttgtgggatgctatatgggtcagatcaggt

SEQ ID NO: 32671 - DNA, 80 bp, synthetic construct
  source 1..80: mol_type = other DNA
ctgctatattccatcctggtggccgtccatgacccagggtacaatgataattccctatttcctgttaacatttatagcaa

SEQ ID NO: 32672 - DNA, 80 bp, synthetic construct
  source 1..80: mol_type = other DNA
agtgtcggctagaggttatttaagagggcttgcgagggggattctgataggatcctctatatgttttctgacaagaatga

SEQ ID NO: 32673 - DNA, 80 bp, synthetic construct
  source 1..80: mol_type = other DNA
ccaacataaacattaatcgcccccttgagttgatttctggagtgatctcttacatattgctaaagcttgacaaccatcca

SEQ ID NO: 32674 - DNA, 80 bp, synthetic construct
  source 1..80: mol_type = other DNA
tctctttacattatgctgaaagaacctgagctaagggcagagatattctccattcctcaaaaagtgcctgcagcctaccc

SEQ ID NO: 32675 - DNA, 80 bp, synthetic construct
  source 1..80: mol_type = other DNA
cactaccatggaagaaggcaacagatctgtcttgtgttatctccaacaagtcctcaggtatgagagggacagtatgtctt

SEQ ID NO: 32676 - DNA, 80 bp, synthetic construct
  source 1..80: mol_type = other DNA
ctcccggaagcctgtacatgctaagactcttgtgcgatgtatcttgaaaaaaacaagatcttaaatcagaacctctggct

SEQ ID NO: 32677 - DNA, 80 bp, synthetic construct
  source 1..80: mol_type = other DNA
cttgttaaccgaatttttaaatttggcccttctagataataaaatctgagatgtcctagagtcgacatgaaaaaaacagg

SEQ ID NO: 32678 - DNA, 80 bp, synthetic construct
  source 1..80: mol_type = other DNA
caattcaaagaaattccaactgttagtcgaagctgacaaactgaacaaaatcatgcaagacgatttgaaccgctatacat

SEQ ID NO: 32679 - DNA, 80 bp, synthetic construct
  source 1..80: mol_type = other DNA
tgagaatccccccagaggtggtgttaagttgccttgagagggtcgattatgataaggcgtttgggaggtatctggccaac

SEQ ID NO: 32680 - DNA, 80 bp, synthetic construct
  source 1..80: mol_type = other DNA
gagctttactcgccttctagaagatcctaccaccttaaatataaaaggaggtgccagtcccaccattctactaaaggatg

SEQ ID NO: 32681 - DNA, 80 bp, synthetic construct
  source 1..80: mol_type = other DNA
aagaatgttcgagccagggcaggaaacagctgtccctcactcctatttcattcacttccgttcactaggcttgagtggga

SEQ ID NO: 32682 - DNA, 80 bp, synthetic construct
  source 1..80: mol_type = other DNA
ctcccggacgataagaaggcagtttagaaaaagtctctcaagaactttggaagaatccttttacaattcagagatccacg

SEQ ID NO: 32683 - DNA, 80 bp, synthetic construct
  source 1..80: mol_type = other DNA
ggctcaaactctgattaggaacattatgtctctgacaggccctgacttccctctagaggaggcccctgtcttcaaaagga

SEQ ID NO: 32684 - DNA, 80 bp, synthetic construct
  source 1..80: mol_type = other DNA
taacacccctacaatggatgttaacaaggttgtttttaaggtccataatcagctggtctcggtgagacctgaggtgattt

SEQ ID NO: 32685 - DNA, 80 bp, synthetic construct
  source 1..80: mol_type = other DNA
catctcttgcttcaaaggattgataggaatttgtccaaacagatgagggttcgattgagacaactgaactccctgatgcg

SEQ ID NO: 32686 - DNA, 80 bp, synthetic construct
  source 1..80: mol_type = other DNA
gcaggtcttaggaggtcatggagaagggacattagattcagatgaggatatccaagggctactgagagacgctttacaga

SEQ ID NO: 32687 - DNA, 80 bp, synthetic construct
  source 1..80: mol_type = other DNA
ggacgagatgggtggatcaagaggtccgtcatgccgcgaaaacgatgaagtgtgattatagtccaagtaagagagtgtca

SEQ ID NO: 32688 - DNA, 80 bp, synthetic construct
  source 1..80: mol_type = other DNA
cggaaggcaggttgttcggaatggatatgctctgcacaacaagttgcggtgtccacctcatctaaccccgcacccatctc

SEQ ID NO: 32689 - DNA, 80 bp, synthetic construct
  source 1..80: mol_type = other DNA
agagattgacatcagggcattgtccaagaagttgcagaatccactgatatctggtctcagggttgtccaatgggcaactg

SEQ ID NO: 32690 - DNA, 80 bp, synthetic construct
  source 1..80: mol_type = other DNA
gttatctaggggaggagtttttcgggaagggaacatttgagaggcggttcttcagagatgagaaagagctacaggattac

SEQ ID NO: 32691 - DNA, 80 bp, synthetic construct
  source 1..80: mol_type = other DNA
gagctcattacaagttgaagccgatactcaacgatcttgaagcataccccacattgtgtttagtggtaggagatggctca

SEQ ID NO: 32692 - DNA, 80 bp, synthetic construct
  source 1..80: mol_type = other DNA
ggaggaatatccagagctgtactaagtatgtttcctgatgctaaattggtgtttaacagtctcttggaggtcaatgatct

SEQ ID NO: 32693 - DNA, 80 bp, synthetic construct
  source 1..80: mol_type = other DNA
tatggcatctggaacacatcccctacctccttccgcattgatgagtggtggggaggatatagtatcaagagtaattgact

SEQ ID NO: 32694 - DNA, 80 bp, synthetic construct
  source 1..80: mol_type = other DNA
ttaactccatctgggagaaaccctctgatctgaggaatccatctacctggaggtatttccagaccgtccagagtgcagcc

SEQ ID NO: 32695 - DNA, 80 bp, synthetic construct
  source 1..80: mol_type = other DNA
aacatgtcctacgacttaataatctgtgatgcggaagtgaccgacatcccatcaataaacaaaataactctgttaatgtc

SEQ ID NO: 32696 - DNA, 80 bp, synthetic construct
  source 1..80: mol_type = other DNA
agacttctctctgtccatcaatggccctctcagtctgatcttcaaaacttatgggaccatgctggtcaatccagattata

SEQ ID NO: 32697 - DNA, 80 bp, synthetic construct
  source 1..80: mol_type = other DNA
aagcagttcagcatctctccagggcttttccttcagttacagggtatataactcagatgacctcatccttttcatcagaa

SEQ ID NO: 32698 - DNA, 80 bp, synthetic construct
  source 1..80: mol_type = other DNA
ctctatttgaaattctccaagagggggaagttcttcagagactcggagtatttgacatcatccactttaagggaaatgag

SEQ ID NO: 32699 - DNA, 80 bp, synthetic construct
  source 1..80: mol_type = other DNA
tttggtgcttttcaactgcagcagttctaaaagtgaaatgctaagagccagatcattaaattatcaagaccttgtaagag

SEQ ID NO: 32700 - DNA, 80 bp, synthetic construct
  source 1..80: mol_type = other DNA
ggtttccagaggaaataatctctaatccatataatgaaatgattataactctcatagacaatgatgtagagtcctttctc

SEQ ID NO: 32701 - DNA, 80 bp, synthetic construct
  source 1..80: mol_type = other DNA
gaggcagcagaaagtactaaggttgatgtagcattggcagatgatgggacagtgaattcggatgatgaagacttcttttc

SEQ ID NO: 32702 - DNA, 80 bp, synthetic construct
  source 1..80: mol_type = other DNA
gtccacaagatggttgatgacctcgagcttaggcagggagcattctcaaagatgtcaatcatattgacaattatgatggt

SEQ ID NO: 32703 - DNA, 80 bp, synthetic construct
  source 1..80: mol_type = other DNA
gttttccaacagagtgttcaatgtgtcaaagcctctgaacgaccctaaattttaccctccgtcagaccccaaaattttga

SEQ ID NO: 32704 - DNA, 80 bp, synthetic construct
  source 1..80: mol_type = other DNA
ggcactttaatatttgctgtggtaccctaatatatctatcagcagccttaggagatgtgctgaactttgccagactccat

SEQ ID NO: 32705 - DNA, 80 bp, synthetic construct
  source 1..80: mol_type = other DNA
ggagatgtgctgaactttgccagactccatgagctgtacaacaatcctgtgacctattacttcaagaagcagacattggg

SEQ ID NO: 32706 - DNA, 80 bp, synthetic construct
  source 1..80: mol_type = other DNA
gagctgtacaacaatcctgtgacctattacttcaagaagcagacattggggggaagaatgtacttggcatggagttggac

SEQ ID NO: 32707 - DNA, 80 bp, synthetic construct
  source 1..80: mol_type = other DNA
agacaacactccagtattcaaaagagttgcctgtaactccagtttgagcttgtcgtcacactggataaggctgatttata

SEQ ID NO: 32708 - DNA, 80 bp, synthetic construct
  source 1..80: mol_type = other DNA
tggcagatgatgggacagtgaattcggatgatgaagacttcttttcgggagacacgagaagcccagaggcagtatacacc

SEQ ID NO: 32709 - DNA, 80 bp, synthetic construct
  source 1..80: mol_type = other DNA
aaattgtgaagactacaaggcttgtggggagtgctaaagatctctcccaagaggttgaaaaacaccttaaaagctacaat

SEQ ID NO: 32710 - DNA, 80 bp, synthetic construct
  source 1..80: mol_type = other DNA
cggtggatcaatttcagtgatttgagatccagatcctccctattggattacagttgcttgtgatcccatctgtcaacatg

SEQ ID NO: 32711 - DNA, 80 bp, synthetic construct
  source 1..80: mol_type = other DNA
cttttcacactgtggcctagtcgagccaagagatgtgaaaaaaacatctccttcatcctggtcttttacatttttggctc

SEQ ID NO: 32712 - DNA, 80 bp, synthetic construct
  source 1..80: mol_type = other DNA
gtgaaaaaaacatctccttcatcctggtcttttacatttttggctcattctctgttttttttgttttttttgttaagcgt

SEQ ID NO: 32713 - DNA, 80 bp, synthetic construct
  source 1..80: mol_type = other DNA
gggagacacgagaagcccagaggcagtatacaccaggattatgatgaacggggggagattaaaaaggtctcacataaaga

SEQ ID NO: 32714 - DNA, 80 bp, synthetic construct
  source 1..80: mol_type = other DNA
gatatgtctcagtgagtgcaaaccatcaggccaggcctaattcctttgcagagtttctcaacaagacgtattctagtgat

SEQ ID NO: 32715 - DNA, 80 bp, synthetic construct
  source 1..80: mol_type = other DNA
cccagataatcccctgattagataatggatcatgatgtgattaaataatccaattggaaagaaaaaaactaacaccactc

SEQ ID NO: 32716 - DNA, 80 bp, synthetic construct
  source 1..80: mol_type = other DNA
cgctggttccatcatcatcatgagcaagatctttgtcaaccctagtgcacttagatccggcttggctgacttggagatgg

SEQ ID NO: 32717 - DNA, 80 bp, synthetic construct
  source 1..80: mol_type = other DNA
ctgaggagacagtggatttggtgaataaaaacatggaggatagtcaagcccaccttcaaggaattcctatagacgtggaa

SEQ ID NO: 32718 - DNA, 80 bp, synthetic construct
  source 1..80: mol_type = other DNA
aaaacagcctacaaatctatcttgtcagggatgaatgctgctaaattagacccagatgacgtctgctcttatttagctgg

SEQ ID NO: 32719 - DNA, 80 bp, synthetic construct
  source 1..80: mol_type = other DNA
acacttcctgaggatattaagaggctcagaatagcagactacaaacaggggcaacaggaggaggatgcttcgagacaaga

SEQ ID NO: 32720 - DNA, 80 bp, synthetic construct
  source 1..80: mol_type = other DNA
agagggtgaggatgaggacttctacatgaccgagagtgaaaactcatacgtccctctccagtcttatcttgatgctgtgg

SEQ ID NO: 32721 - DNA, 80 bp, synthetic construct
  source 1..80: mol_type = other DNA
gaatgcagattgtcagaaagatgaagaccggggatggattcttcaagatatgggcacaagcagtggaggacatcgtatct

SEQ ID NO: 32722 - DNA, 80 bp, synthetic construct
  source 1..80: mol_type = other DNA
tatgtggccaccaacttccccgcccctgtcaacaagctccaggccgacaagtcaactcagaccacactggagaaggtcaa

SEQ ID NO: 32723 - DNA, 80 bp, synthetic construct
  source 1..80: mol_type = other DNA
gcaagccgcctcctcttctgcccctagcaagagggagggaccatcctcaaacatgaaccttgactcccaggagtcatcag

SEQ ID NO: 32724 - DNA, 80 bp, synthetic construct
  source 1..80: mol_type = other DNA
gtcctccaggattagactgggctgccagcaatgatgaggatgatggatctattgaggcagagattgctcatcagatagcc

SEQ ID NO: 32725 - DNA, 80 bp, synthetic construct
  source 1..80: mol_type = other DNA
gagagcttttccaagaagtataagttcccttctcgatcatccgggatattcctttggaattttgagcaactgaaaatgaa

SEQ ID NO: 32726 - DNA, 80 bp, synthetic construct
  source 1..80: mol_type = other DNA
ggtgcatgctggggggtgtggcatccaatcattccaaaaggttccaaattctagtcaattcggcgaaactgggcaaactc

SEQ ID NO: 32727 - DNA, 80 bp, synthetic construct
  source 1..80: mol_type = other DNA
ggttccaaattctagtcaattcggcgaaactgggcaaactcatgcaggatgacctaaacagatatcttgcgtattgatct

SEQ ID NO: 32728 - DNA, 80 bp, synthetic construct
  source 1..80: mol_type = other DNA
atgcaggatgacctaaacagatatcttgcgtattgatctaaaattggccactgtcacaccaggacaaataaattgactgt

SEQ ID NO: 32729 - DNA, 80 bp, synthetic construct
  source 1..80: mol_type = other DNA
agccatggtcttgtttgagggcatctgcccggaagattggactagttacggaatcaacattgctaagaaaggtgacaaga

SEQ ID NO: 32730 - DNA, 80 bp, synthetic construct
  source 1..80: mol_type = other DNA
tatcaaatcatgaaaagaacatgtaacaccactggcaagatgaatatcattcggaaaattgttaagagctgtaaggatga

SEQ ID NO: 32731 - DNA, 80 bp, synthetic construct
  source 1..80: mol_type = other DNA
tgagatgcaaaagcccaacccagtctctgcccctcctgacgacgatgacctatggcttccccctcctgaatatgtcccgc

SEQ ID NO: 32732 - DNA, 80 bp, synthetic construct
  source 1..80: mol_type = other DNA
tgtcagagatgactgggaagaagaacatgaggaacttttgtatcaatggggaagtcaaagtgtgcagcccaaatggatat

SEQ ID NO: 32733 - DNA, 80 bp, synthetic construct
  source 1..80: mol_type = other DNA
tcattcaggatcatcagacatatcttgagctccttcgaaggggtgtattctgggaatagaaggatgatagggctggtgaa

SEQ ID NO: 32734 - DNA, 80 bp, synthetic construct
  source 1..80: mol_type = other DNA
ggttgtcattgggttggcactgtccggggctcctgtcccagatggaatgaattgggtttacaagatcaggcgcaccctta

SEQ ID NO: 32735 - DNA, 80 bp, synthetic construct
  source 1..80: mol_type = other DNA
tattccagtgggctgagtcatcgggccccctggatggggaggagttagaatactctcaggagattacatgggatgatgat

SEQ ID NO: 32736 - DNA, 80 bp, synthetic construct
  source 1..80: mol_type = other DNA
tctgagtttgtcggcttgcagatgagggtgagtgcaagacagtgtcatattcaggggagactctggtgtatcaacatgaa

SEQ ID NO: 32737 - DNA, 80 bp, synthetic construct
  source 1..80: mol_type = other DNA
ctccagagcatgtcagctgtggtctgacatgtctctaaaaactcagcagtctgacgaagacaagaacacttccttgctcc

SEQ ID NO: 32738 - DNA, 80 bp, synthetic construct
  source 1..80: mol_type = other DNA
tcgaatgaccatcactccaagccactgctcaatcagttacctccacatgacgatatatacaaccacactcttccgtcctt

SEQ ID NO: 32739 - DNA, 80 bp, synthetic construct
  source 1..80: mol_type = other DNA
ccgcgagcaatagaacaacgtatgttatggtgccacacaatagctgcatactcttaatatatattatccaataccttcac

SEQ ID NO: 32740 - DNA, 80 bp, synthetic construct
  source 1..80: mol_type = other DNA
taacacctgctacgttagtggacattcacaggacgaacactgagggcaactgggctcaaacaggaggtcaagatctcact

SEQ ID NO: 32741 - DNA, 80 bp, synthetic construct
  source 1..80: mol_type = other DNA
atgtgaaaacgctgcaatgtgaaaaaaacaaataacatccctcgaaagattcaaaagccatgttactctctaccgccata

SEQ ID NO: 32742 - DNA, 80 bp, synthetic construct
  source 1..80: mol_type = other DNA
ttcgcctttttcttgaactgtgctccttgtctggcaaagttcccaatctacaccatcccggataagattggaccgtggag

SEQ ID NO: 32743 - DNA, 80 bp, synthetic construct
  source 1..80: mol_type = other DNA
tcctattgacataaaccatctccgctgcccgaacaacttgatcgtggaagacgagggatgcacgactctcaccccattct

SEQ ID NO: 32744 - DNA, 80 bp, synthetic construct
  source 1..80: mol_type = other DNA
cgtacatggaactgaaagtgggatatataacaacaataaaaatagaaggatttacatgcactggtgtaataacagaggca

SEQ ID NO: 32745 - DNA, 80 bp, synthetic construct
  source 1..80: mol_type = other DNA
gagacctacacaaactttgtagggtatgtgactacaaccttcaagaggaaacatttccggccaactgtgagcgcctgtag

SEQ ID NO: 32746 - DNA, 80 bp, synthetic construct
  source 1..80: mol_type = other DNA
agatgcctacaactggaagattactggtgatccgagatatgaagagtcactgcacaatccttaccctgactctcattggt

SEQ ID NO: 32747 - DNA, 80 bp, synthetic construct
  source 1..80: mol_type = other DNA
tgagaactgtgaagaccaccaaggagtctcttctgatcatctctcctagtgtagtcgacatggacgcatatgacaaaaac

SEQ ID NO: 32748 - DNA, 80 bp, synthetic construct
  source 1..80: mol_type = other DNA
ctctactccaaaatgttccctaatggtaaatgtctggcttcacccccgagtgccatatgttgtccgacaaatcatgatta

SEQ ID NO: 32749 - DNA, 80 bp, synthetic construct
  source 1..80: mol_type = other DNA
caccatttggattccagagaatcctaaacccgggctgtcttgtgatatattcacaactagcaaaggaaagaaagcaacca

SEQ ID NO: 32750 - DNA, 80 bp, synthetic construct
  source 1..80: mol_type = other DNA
aagacgggaggctgtgtggatttgtggatgagagaggattgtacaaatccttgaagggggcttgcaagctgagactctgt

SEQ ID NO: 32751 - DNA, 80 bp, synthetic construct
  source 1..80: mol_type = other DNA
cgggaccctacgacacctgaacatgcatctctggttggacttcttctctgtctttataggctcagtaagatagtaggaca

SEQ ID NO: 32752 - DNA, 80 bp, synthetic construct
  source 1..80: mol_type = other DNA
ggggtccctggcatgagattgatggatggatcatgggtatctcttcagaaaactgaagctccggaatggtgctctccaga

SEQ ID NO: 32753 - DNA, 80 bp, synthetic construct
  source 1..80: mol_type = other DNA
tcagcttgttaatgtccatgatttccatacagatgaaattgaacaccttgtggttgaagagttggtgaagaagagggaag

SEQ ID NO: 32754 - DNA, 80 bp, synthetic construct
  source 1..80: mol_type = other DNA
agtgtttggatgctttagaaactatcatcacaaccaagtctatcagtttcagacgtctcagtcatttcaggaaactggtt

SEQ ID NO: 32755 - DNA, 80 bp, synthetic construct
  source 1..80: mol_type = other DNA
gaaagaagtgatcccatctaaagggtgtctgatggcaggggggagatgccatcctcactacagtggtatattcttcaatg

SEQ ID NO: 32756 - DNA, 80 bp, synthetic construct
  source 1..80: mol_type = other DNA
ggatcatactgagtccagggggtgatgtactcattccggagatgcagtcagccttgttacagcagcacattgagctgcta

SEQ ID NO: 32757 - DNA, 80 bp, synthetic construct
  source 1..80: mol_type = other DNA
gaatcctcgatgattcctctcagacatcccttggctgacccttccacggtgttcaagagagatgatgaggcagaggattt

SEQ ID NO: 32758 - DNA, 80 bp, synthetic construct
  source 1..80: mol_type = other DNA
cgttgaggttcaccttccagacacccaaaaactcatatcaggcatagatctgggttttcccgaatggaagcgttactttc

SEQ ID NO: 32759 - DNA, 80 bp, synthetic construct
  source 1..80: mol_type = other DNA
ttataggaatatctgtgcttgcccttcttgccttagcaataattactgcagcatgttgcaaaaggttcaagaggagaagg

SEQ ID NO: 32760 - DNA, 80 bp, synthetic construct
  source 1..80: mol_type = other DNA
aggcctaagccaaacccaatagagttgatcaggaaagtttctgtaacctctcaaagtggaagggcaattccatcttggga

SEQ ID NO: 32761 - DNA, 80 bp, synthetic construct
  source 1..80: mol_type = other DNA
gaatacggggaactataagaccaatgtggcagatagaatggaacagatctttgagactgccccatttgtcaagattgtgg

SEQ ID NO: 32762 - DNA, 80 bp, synthetic construct
  source 1..80: mol_type = other DNA
gttgtacaaagtgggggccactggtgagtcataagcatgtcttgtccatagatcatgtgacaacagaggcaactatgcga

SEQ ID NO: 32763 - DNA, 80 bp, synthetic construct
  source 1..80: mol_type = other DNA
tggatctgatgaaagctttaaaaatcacctcatttaatcattatatgaactactgcctttgcatattgaaccgggcgatg

SEQ ID NO: 32764 - DNA, 80 bp, synthetic construct
  source 1..80: mol_type = other DNA
gattgagattagaaaggtcatctaaggagtatcttcccatatatggccagctgacatgatccttttgattcatgcttgag

SEQ ID NO: 32765 - DNA, 80 bp, synthetic construct
  source 1..80: mol_type = other DNA
aattcttgagtttaatttacatctatctgagatgttggtgctttaattagcctaattagatgttagcaggctacttgaaa

SEQ ID NO: 32766 - DNA, 80 bp, synthetic construct
  source 1..80: mol_type = other DNA
gatagaaacaataacaagacaatcatagtcaatagtgtacactaactacatcggtatgcttggcataacccccgctttta

SEQ ID NO: 32767 - DNA, 80 bp, synthetic construct
  source 1..80: mol_type = other DNA
gtataagctcagagccttgccacgctctttacccatttataagaatagtgaaaggggattacagacaaagagcctcctaa

SEQ ID NO: 32768 - DNA, 80 bp, synthetic construct
  source 1..80: mol_type = other DNA
ccaagattgtgtactcctgaaaaaaacattaatatgcaagaggagccaacacccctcctcatagatcttcaaatgcaaaa

SEQ ID NO: 32769 - DNA, 80 bp, synthetic construct
  source 1..80: mol_type = other DNA
tgattgactctaccgaggtttacgatgatccggtggatcctgttgagccagaagcagacctgagaggcaattcagttgtg

SEQ ID NO: 32770 - DNA, 80 bp, synthetic construct
  source 1..80: mol_type = other DNA
ccaaacatcttaagaaactcagattataatctgaattccccacttttggaagatccttcaagattaatgatcgaatggtt

SEQ ID NO: 32771 - DNA, 80 bp, synthetic construct
  source 1..80: mol_type = other DNA
aacgacggggaacaggcccagccgactaaatttgacagacaacttgctcagatcctacaaggttctgagaggctatttta

SEQ ID NO: 32772 - DNA, 80 bp, synthetic construct
  source 1..80: mol_type = other DNA
aacaccacacattgatgaccacccacaagatgtgtgccaactggagcactatacctaattttagattcttggcaggggct

SEQ ID NO: 32773 - DNA, 80 bp, synthetic construct
  source 1..80: mol_type = other DNA
agaagttagatgtcgggtcaatgcgggcaggaggtctaggcgcacaagccatgataaccctgtggctacatgggtcccac

SEQ ID NO: 32774 - DNA, 80 bp, synthetic construct
  source 1..80: mol_type = other DNA
tctgagtctacgcgtagtagaaagtgtctcacagaactctcacagttctacaagaagtcatcccctatagagaagttgtt

SEQ ID NO: 32775 - DNA, 80 bp, synthetic construct
  source 1..80: mol_type = other DNA
aaactatactctagagaacagaggactgaagactccgacagagggggtgctatctagcatcaacaaagtccagtatgacc

SEQ ID NO: 32776 - DNA, 80 bp, synthetic construct
  source 1..80: mol_type = other DNA
aggcattcggtaggtatctaggcaatacttattcctcttacttgtttttccatgtaataattctgtatatgaacgccctt

SEQ ID NO: 32777 - DNA, 80 bp, synthetic construct
  source 1..80: mol_type = other DNA
gactgggatgaagagaaaaccatcttggccttatggaaagagattgcctccatagacgtgaagagcgatttggtaaagtt

SEQ ID NO: 32778 - DNA, 80 bp, synthetic construct
  source 1..80: mol_type = other DNA
cagggatcagatatgggggtctcttgtcataactaaagactttgtatactctcaaagtgcaaattgtctgttcgatagaa

SEQ ID NO: 32779 - DNA, 80 bp, synthetic construct
  source 1..80: mol_type = other DNA
actataccctaatgcttaaggacttgtttttgtcaagattcaactcacttttaatcttaatctctcccccggaatcaaga

SEQ ID NO: 32780 - DNA, 80 bp, synthetic construct
  source 1..80: mol_type = other DNA
tattcagatgacttggtgtctaatttatgtcaactctacatcgcgggagacaaggtattgtctgcatgtggaaactccgg

SEQ ID NO: 32781 - DNA, 80 bp, synthetic construct
  source 1..80: mol_type = other DNA
atacgacgtgataaagctgctggaaccttatatcgtgaataagttggtacagaaagcagagaggtttagacctttaattc

SEQ ID NO: 32782 - DNA, 80 bp, synthetic construct
  source 1..80: mol_type = other DNA
actccttgggagatttccctcagttcattcgtgacaaaactaatcagctagaagggacttttgggcccagtgccagagag

SEQ ID NO: 32783 - DNA, 80 bp, synthetic construct
  source 1..80: mol_type = other DNA
tatgacatgttttttgccagaattgagcacttgtattctgcaattcgggttgggacagtggttactgcttatgaggattg

SEQ ID NO: 32784 - DNA, 80 bp, synthetic construct
  source 1..80: mol_type = other DNA
ttttttcagactatggacttgttagataacatacatgacttggtgttcgtttacggctgctatagacattggggtcatcc

SEQ ID NO: 32785 - DNA, 80 bp, synthetic construct
  source 1..80: mol_type = other DNA
ttatattgactacagaaaggggttgtccaagttgtatgatcaggtccacgtcaagaaaatcatagacaggaattatcaag

SEQ ID NO: 32786 - DNA, 80 bp, synthetic construct
  source 1..80: mol_type = other DNA
agtgtctggcgagcgatttggctaagaggatacttaggtggggatttgacaaatattcccgctggtatctagactctaat

SEQ ID NO: 32787 - DNA, 80 bp, synthetic construct
  source 1..80: mol_type = other DNA
ttgctgccgggtgatcaccccttgtctccttatgtgaaaacccagacttggcctccaaaacatgtggttgacatggttgg

SEQ ID NO: 32788 - DNA, 80 bp, synthetic construct
  source 1..80: mol_type = other DNA
ggacacttggcatagcctccccataacccaaatctttgaaatcccggagtccatggatccttcagaaattctggatgaca

SEQ ID NO: 32789 - DNA, 80 bp, synthetic construct
  source 1..80: mol_type = other DNA
aatctcactcgttcactaggactaggctggcctcatggctttcggagaatagaggcggaccagtccctagtgagaaagtg

SEQ ID NO: 32790 - DNA, 80 bp, synthetic construct
  source 1..80: mol_type = other DNA
atcattacagcactctccagacctccagtcaatcctcgagagttcctccggtcaattgatgtgggaggactaccggatga

SEQ ID NO: 32791 - DNA, 80 bp, synthetic construct
  source 1..80: mol_type = other DNA
tgacttgataatcggtctgaagccaaaagaacgagagcttaagatagagggaagattcttcgcactgatgtcttggaatc

SEQ ID NO: 32792 - DNA, 80 bp, synthetic construct
  source 1..80: mol_type = other DNA
taaggctttattttgtcataacagagaaactgttggctacatatatcttgcccctgtttgacgccttgacgatgactgac

SEQ ID NO: 32793 - DNA, 80 bp, synthetic construct
  source 1..80: mol_type = other DNA
aatttgaacaaggtgtttaaaaagttgattgatcgagtcacagggcagggcttattagattattcccgggtgacttatgc

SEQ ID NO: 32794 - DNA, 80 bp, synthetic construct
  source 1..80: mol_type = other DNA
ttcggggttggtgtctttcacagggttcatcaagcaaatcaatttgacagccagggaggccatattatacttcttccaca

SEQ ID NO: 32795 - DNA, 80 bp, synthetic construct
  source 1..80: mol_type = other DNA
attccacctagattatgaaaagtggaacaaccatcaacgactagagtcgacaaaagatgtgttttctgtcttggacaagg

SEQ ID NO: 32796 - DNA, 80 bp, synthetic construct
  source 1..80: mol_type = other DNA
tgttcggcctcaagaaagtattctctcggacacacgagttcttccaaaaatcgtgggtttactattcagatagatctgac

SEQ ID NO: 32797 - DNA, 80 bp, synthetic construct
  source 1..80: mol_type = other DNA
ttaattggattgtggagggatcaaatatactgcctggatatgaccaatggccctacctgttggaacggccaggacgggtg

SEQ ID NO: 32798 - DNA, 80 bp, synthetic construct
  source 1..80: mol_type = other DNA
acttgaagggttgagacagaaagggtggagtttggtcagtcttctaatgatagacagagagtcacagactagaaacacta

SEQ ID NO: 32799 - DNA, 80 bp, synthetic construct
  source 1..80: mol_type = other DNA
ggacgaaaatcctagcgcaggaggacaatcaagtcttgtgcccgacttacatgctgtcgtccggattgaacaaggagggc

SEQ ID NO: 32800 - DNA, 80 bp, synthetic construct
  source 1..80: mol_type = other DNA
ttgctatatgagttggacagtatatcaaggaatgccatctcgatctatagagctattgaagatggggcttccaagttggg

SEQ ID NO: 32801 - DNA, 80 bp, synthetic construct
  source 1..80: mol_type = other DNA
gcttatcattaagaaagaagagactatgtgcagttatgactttctcatatacgggaaaactccattgtttaggggcaata

SEQ ID NO: 32802 - DNA, 80 bp, synthetic construct
  source 1..80: mol_type = other DNA
tcctggttccggagtctaagagatgggccagagtctcatgtatatccaatgaccagatagtcaacctagcaaacattatg

SEQ ID NO: 32803 - DNA, 80 bp, synthetic construct
  source 1..80: mol_type = other DNA
tcgactgtgtcaactaatgccttgacagtagctcaacactcacaatccttgatcaagcccatgagagactttctcctgat

SEQ ID NO: 32804 - DNA, 80 bp, synthetic construct
  source 1..80: mol_type = other DNA
gtctgtccaggcagtgtaccattaccttctgttcagccctatcttgaaggatagagtttacaagatattggttgctgatg

SEQ ID NO: 32805 - DNA, 80 bp, synthetic construct
  source 1..80: mol_type = other DNA
ctgatcagtatgagtataagtaccctgctattaaagacaagaagaaaccaagcatcactctcgggaaagatcccgatttg

SEQ ID NO: 32806 - DNA, 80 bp, synthetic construct
  source 1..80: mol_type = other DNA
agaacttcgaggaagagatcaagagaatgtttgagccagggcaagaaacagctgttccgcactcgtatttcatccacttc

SEQ ID NO: 32807 - DNA, 80 bp, synthetic construct
  source 1..80: mol_type = other DNA
gaactgagtttctgttggcaatgtcaaggataatttatctggacccgtctcttggtggagtctcagggatgtccttggga

SEQ ID NO: 32808 - DNA, 80 bp, synthetic construct
  source 1..80: mol_type = other DNA
cgattccatattcgtcagttttcggacccagtctctgagggattatctttctggagggagatctggctgagctcctcaga

SEQ ID NO: 32809 - DNA, 80 bp, synthetic construct
  source 1..80: mol_type = other DNA
atcatggattcatgcgctatgccaagaagcaggaaaccctgacctgggggacagaagcctagagagcttcaccaggctgc

SEQ ID NO: 32810 - DNA, 80 bp, synthetic construct
  source 1..80: mol_type = other DNA
tggaagaccccacaacattgaacataagaggaggagcaagcccgaccatcctgttaaaggaagctattcggaaggccttg

SEQ ID NO: 32811 - DNA, 80 bp, synthetic construct
  source 1..80: mol_type = other DNA
tatgatgaggttgacaaggtagaaaattctgaatttcgggaggccatattattgtccaagacacacagagacaactttat

SEQ ID NO: 32812 - DNA, 80 bp, synthetic construct
  source 1..80: mol_type = other DNA
attgtttctgagatctgtagagcctttattccctcgatttctcagtgaattgttcagctcctcattccttggaattcctg

SEQ ID NO: 32813 - DNA, 80 bp, synthetic construct
  source 1..80: mol_type = other DNA
aatcaatcatcggattaatccaaaactcccgaaccatccgacgccaattcaggagaagcttgtcaagaaccctagaggag

SEQ ID NO: 32814 - DNA, 80 bp, synthetic construct
  source 1..80: mol_type = other DNA
tcgttttttaactctgaaatccacggaatcagcaggatgactcaggttcctcagagaatagggagggtgtggagctgttc

SEQ ID NO: 32815 - DNA, 80 bp, synthetic construct
  source 1..80: mol_type = other DNA
cgcagagcgagcagatcagttgagagagatatcatggggcaggaaggtagtgggcacaactgtcccccacccatctgaga

SEQ ID NO: 32816 - DNA, 80 bp, synthetic construct
  source 1..80: mol_type = other DNA
tgttggccctaattcccaagtcatcgatttcctgcacctgtggacagtcaggggaggacagcccaagaatatctgtgtca

SEQ ID NO: 32817 - DNA, 80 bp, synthetic construct
  source 1..80: mol_type = other DNA
agatcacttggactcagtgggaagtctccttattcatccaatgcggttgggcatgtgtttaacctgattcactttgtggg

SEQ ID NO: 32818 - DNA, 80 bp, synthetic construct
  source 1..80: mol_type = other DNA
gttctcccgtctctcgaccagtccttcttctccagaggtcccctcaagggatacctgggatcttccacctcaatgtctac

SEQ ID NO: 32819 - DNA, 80 bp, synthetic construct
  source 1..80: mol_type = other DNA
tcagttgttccatgcttgggagaaagtaaccaatgttcatgtcgtcaagagggccttgtccctcaaggaatccatcaatt

SEQ ID NO: 32820 - DNA, 80 bp, synthetic construct
  source 1..80: mol_type = other DNA
ggttcatcacgagagactcgaaccttgctcagaccttgatccgaaacatagtgtcgttgacaggccctttcttcccccta

SEQ ID NO: 32821 - DNA, 80 bp, synthetic construct
  source 1..80: mol_type = other DNA
tttcttccccctagaggaagctcctgtgtttaagagaactggatctgccctccaccgcttcaaatcagcaagatacagcg

SEQ ID NO: 32822 - DNA, 80 bp, synthetic construct
  source 1..80: mol_type = other DNA
gaggaagctcctgtgtttaagagaactggatctgccctccaccgcttcaaatcagcaagatacagcgaggggggttactc

SEQ ID NO: 32823 - DNA, 80 bp, synthetic construct
  source 1..80: mol_type = other DNA
ttccatatgccccaacctgttgtctcatatctctgtgagtacagatacaatgtctgacctcactcaagatggaacaaact

SEQ ID NO: 32824 - DNA, 80 bp, synthetic construct
  source 1..80: mol_type = other DNA
tcgacttcatgtttcagcctctcatgctctatgctcaaacttggacttcagaactggttcagaaagaccttcgattaaga

SEQ ID NO: 32825 - DNA, 80 bp, synthetic construct
  source 1..80: mol_type = other DNA
gactccacctttcattggcaccttagatgtctcaaatgtatccgaccgatagatgatatcaccttggaagccccaaaaat

SEQ ID NO: 32826 - DNA, 80 bp, synthetic construct
  source 1..80: mol_type = other DNA
cttctcctttcccgacgtatcaaagagaatatcaaggatggtgtcaggagcagtgcctcagttcagaaagctgcctgaga

SEQ ID NO: 32827 - DNA, 80 bp, synthetic construct
  source 1..80: mol_type = other DNA
taggactgaagccagggaagtttgactcattgaaggaaaaagacaaatccagacatatagggactgctcaggggctcctg

SEQ ID NO: 32828 - DNA, 80 bp, synthetic construct
  source 1..80: mol_type = other DNA
tactccattttggttgctactcacgattcagggtacaatgacggaaccatcttcccggtaaatatctacggaaaagtctc

SEQ ID NO: 32829 - DNA, 80 bp, synthetic construct
  source 1..80: mol_type = other DNA
ttgttacatgggccaaatcagatctttaaatgccactgtcattcagagttgtgcaccccatgaaatgtcagttttggtgg

SEQ ID NO: 32830 - DNA, 80 bp, synthetic construct
  source 1..80: mol_type = other DNA
tcctagagactatctaagagggttggccaggggagtattgataggctcttctatttgctttctgaccagaatgaccaata

SEQ ID NO: 32831 - DNA, 80 bp, synthetic construct
  source 1..80: mol_type = other DNA
tcaacatcaatcgccccttggagttgatttctggagtcatttcttatatacttctgaggcttgacaatcacccctcattg

SEQ ID NO: 32832 - DNA, 80 bp, synthetic construct
  source 1..80: mol_type = other DNA
tatgtcatgctaaaagagccatctctgagatccgagatattctccatccctcagaaaatacctgctgcctatcccaccac

SEQ ID NO: 32833 - DNA, 80 bp, synthetic construct
  source 1..80: mol_type = other DNA
catgaaggagggcaacagatctgttttatgttatttgcagcatgtgcttcgctatgagcgagaagccataacaacatccc

SEQ ID NO: 32834 - DNA, 80 bp, synthetic construct
  source 1..80: mol_type = other DNA
cggagaatgactggctttggatattctcggacttcaggagtataaagatgacctatctaactttaataacttatcagtcc

SEQ ID NO: 32835 - DNA, 80 bp, synthetic construct
  source 1..80: mol_type = other DNA
gctccagtagtggttccttgtcctcatcaaactatggactttttaagaaaccttgactggactcaggtgattgatggtca

SEQ ID NO: 32836 - DNA, 80 bp, synthetic construct
  source 1..80: mol_type = other DNA
ttcacctggatgatggaaaatcgtcccgccccagtgagatggccaaagtgggagaaggcaagtatcgagaggactttcag

SEQ ID NO: 32837 - DNA, 80 bp, synthetic construct
  source 1..80: mol_type = other DNA
cagagagaaagccaatcttcgaaagcaaggatggcggctcaagccgcttctggccctcctgcccttgaatggtctgctat

SEQ ID NO: 32838 - DNA, 80 bp, synthetic construct
  source 1..80: mol_type = other DNA
cacaatcatatcgcatctcagcaaagtgtgcacaattgtaaagggctaggtcatctaagcttttcagtcgagaaaaaaac

SEQ ID NO: 32839 - DNA, 80 bp, synthetic construct
  source 1..80: mol_type = other DNA
atgtcggacaggaagtaccactgcgtctgcccgatgcgcagcgcagaagatcccgagagactcgctaattatgcgagaaa

SEQ ID NO: 32840 - DNA, 80 bp, synthetic construct
  source 1..80: mol_type = other DNA
taaaaaccaataaaaatcataaaatagaaaatcaacaaaaatcataaaatagaaaactagaaatagaagtaggtaagaag

SEQ ID NO: 32841 - DNA, 80 bp, synthetic construct
  source 1..80: mol_type = other DNA
aaattcttgtatgatgcatcttgaaaaaacaagatcttgaatccggacctctggttgtttgattgttttttcatctttat

SEQ ID NO: 32842 - DNA, 80 bp, synthetic construct
  source 1..80: mol_type = other DNA
actcattcgccgaatttttaaacaagacgtattcgaatgactcataaggagttgattgacagggtgccggaaatctatag

SEQ ID NO: 32843 - DNA, 80 bp, synthetic construct
  source 1..80: mol_type = other DNA
gtgggcacggggaagacaccctcgagtcagacgaagacattcagaggctgttaaaagactctctgcgcaggacaaggtgg

SEQ ID NO: 32844 - DNA, 80 bp, synthetic construct
  source 1..80: mol_type = other DNA
gtggatcaagaggtgcgtcatgcggcgagaagtatgacggacagttacagccccaacaagaggatgtcacgcaaagcggg

SEQ ID NO: 32845 - DNA, 80 bp, synthetic construct
  source 1..80: mol_type = other DNA
gtgttcagagtgggtctgctctgctcaacaagtcgcggtttcaacctcgtcgaacccggcccctgcctccgagcttgaca

SEQ ID NO: 32846 - DNA, 80 bp, synthetic construct
  source 1..80: mol_type = other DNA
cactccacctggttttcaaaacttatggtaccatgcttgtaaatccggactatagagcaattcagcatctgtccagagcg

SEQ ID NO: 32847 - DNA, 80 bp, synthetic construct
  source 1..80: mol_type = other DNA
ctgaagcagctttagcagacgatggaactgtcaactctgatgacgaagactacttctccaatgagaccaggagtccagag

SEQ ID NO: 32848 - DNA, 80 bp, synthetic construct
  source 1..80: mol_type = other DNA
gcggtttacactagaatcatgatgaatggaggcagactgaaaagatcacatgtaaggaggtacgtctcagtcagttccaa

SEQ ID NO: 32849 - DNA, 80 bp, synthetic construct
  source 1..80: mol_type = other DNA
tcatcaggctcgccctaactcattcgctgagtttttgagcaagacctactctagtgatcaataaagagctgactggcggg

SEQ ID NO: 32850 - DNA, 80 bp, synthetic construct
  source 1..80: mol_type = other DNA
atggtagacatcaataaattgtgtacatcctccagaaaaaaactaacacccctcctttcgaaccatcccagacatgagta

SEQ ID NO: 32851 - DNA, 80 bp, synthetic construct
  source 1..80: mol_type = other DNA
aaatctttgttaacccgagtgcgatcagggcaggcttagctgacttggagatggcagaagaaactgtagatctaattgct

SEQ ID NO: 32852 - DNA, 80 bp, synthetic construct
  source 1..80: mol_type = other DNA
aagaacctcgaggacaatcaggctcatctccaaggagaacccatagaggtggacagtctccctgaagacataagacaact

SEQ ID NO: 32853 - DNA, 80 bp, synthetic construct
  source 1..80: mol_type = other DNA
ccaattagacgatagaaaaccatctggccccagagagactgccacggagagggagatcaagtctcaggaggactatcaga

SEQ ID NO: 32854 - DNA, 80 bp, synthetic construct
  source 1..80: mol_type = other DNA
tcgggggagagattccttaagatatggtctcagaccgttgaagagatcatatcctatgttactgtcaacttctccaatct

SEQ ID NO: 32855 - DNA, 80 bp, synthetic construct
  source 1..80: mol_type = other DNA
gccggggaagtcatcagaaaacaaagccacacaaacaactggctggaaattccggcaggagacggtgtctgcttcctctc

SEQ ID NO: 32856 - DNA, 80 bp, synthetic construct
  source 1..80: mol_type = other DNA
aacgaagtaatccttcatccaaggccccgataacaactcagacagcctctggtcctccttctctggagtggtcaaccacc

SEQ ID NO: 32857 - DNA, 80 bp, synthetic construct
  source 1..80: mol_type = other DNA
aatgaaaaggatgacccgtctgtagaggcggagattgcccaccagatcgccgagagcttttcgaaaaaatacaaatttcc

SEQ ID NO: 32858 - DNA, 80 bp, synthetic construct
  source 1..80: mol_type = other DNA
gatgggacttgggtctcaatccaaacaccagatgagacgaaatggtgtcctcctgaccaagtagtgaatctgcatgactt

SEQ ID NO: 32859 - DNA, 80 bp, synthetic construct
  source 1..80: mol_type = other DNA
ccactcagatgaaatagagcaccttgtcgtagaggagttgatcaagaaaagggaggaatgtctagatgcactggaatcta

SEQ ID NO: 32860 - DNA, 80 bp, synthetic construct
  source 1..80: mol_type = other DNA
cacgcatcgttgattggtctcctcttgagcctgtataggttgagcaagatctctggacagaacaccggcaattacaagac

SEQ ID NO: 32861 - DNA, 80 bp, synthetic construct
  source 1..80: mol_type = other DNA
gagggatatgacatcgatagataccgggaaggacttggtcaagtttagagataaaatatggggattgctgatcgtgacta

SEQ ID NO: 32862 - DNA, 80 bp, synthetic construct
  source 1..80: mol_type = other DNA
cggtttaactcattgatgattctcctttctcccccggaacccagatactcagatgacctaatatctcagctgtgtcaatt

SEQ ID NO: 32863 - DNA, 80 bp, synthetic construct
  source 1..80: mol_type = other DNA
gtatattgccggagatcatatcttgtccatgtgcgggaactctggttatgaggtcatcaaaatattggagccgtacgtgg

SEQ ID NO: 32864 - DNA, 80 bp, synthetic construct
  source 1..80: mol_type = other DNA
tgaacagcttagtccatagggcggaaaagtttaggcctctcattcactccctaggagatttccccacattcataagagat

SEQ ID NO: 32865 - DNA, 80 bp, synthetic construct
  source 1..80: mol_type = other DNA
aaggtgggtcaacttgagggtacattcggtcccagtgcaaaaatgttcttcaaggttctggaccaattcgacaacataca

SEQ ID NO: 32866 - DNA, 80 bp, synthetic construct
  source 1..80: mol_type = other DNA
cctttactaggacgaaattagcatcatggttgtcagagaacagaggaggaccggtcccaagtgaaaaagtcatcatcaca

SEQ ID NO: 32867 - DNA, 80 bp, synthetic construct
  source 1..80: mol_type = other DNA
atactgtttagacatgtctgatggcccgacatgctggaatggacaagatggcggtcttgaaggtctgcgacaaaagggtt

SEQ ID NO: 32868 - DNA, 80 bp, synthetic construct
  source 1..80: mol_type = other DNA
cttattgttcagccccattctaaaaagcagagtctacaagatactgagtgcagaaggggacaattttctcctagctatgt

SEQ ID NO: 32869 - DNA, 80 bp, synthetic construct
  source 1..80: mol_type = other DNA
ctcggatcatatatttggacccctctctgggaggagtatctgggatgtccctcggaaggttccacatacgtcagttctca

SEQ ID NO: 32870 - DNA, 80 bp, synthetic construct
  source 1..80: mol_type = other DNA
cacgaaactcaaatctggcccaaacgttgattaggaacattaggtccctgacgggccctgactttccactggaagaggcc

SEQ ID NO: 32871 - DNA, 80 bp, synthetic construct
  source 1..80: mol_type = other DNA
gttactcttctgtttgcccgaacctcttatctcacatctctgtcagcacagacacgatgtctgatttgactcacgatggg

SEQ ID NO: 32872 - DNA, 80 bp, synthetic construct
  source 1..80: mol_type = other DNA
tctctaagtggcaaggagaaatcttgccatataggctctgcccaaggactcttgtattcaatcctggttgcgattcatga

SEQ ID NO: 32873 - DNA, 80 bp, synthetic construct
  source 1..80: mol_type = other DNA
aagaagtagaccatatcgtcgacaaagtaaaaatgtaacacccctacaatggatgccgataggattgtattcagagtcaa

SEQ ID NO: 32874 - DNA, 80 bp, synthetic construct
  source 1..80: mol_type = other DNA
ataccctagagtcagacgaagacattcagaggctgttaaaagactctctgcgcagaacaaggtgggtggatcaagaggtg

SEQ ID NO: 32875 - DNA, 80 bp, synthetic construct
  source 1..80: mol_type = other DNA
cgccatgctgcgcgaaatatgacaggaagttacagccccaataagagaatgtcacgcaaagccgggtgctcagaatgggt

SEQ ID NO: 32876 - DNA, 80 bp, synthetic construct
  source 1..80: mol_type = other DNA
gtgctcagctcagcaagttgcggtttcaacctcgtcaaatccggcccctgcctctgagcttgacattagaaccctctcca

SEQ ID NO: 32877 - DNA, 80 bp, synthetic construct
  source 1..80: mol_type = other DNA
ctattctagacggtctcaacatattcccatccctatgccttgttgtcggggatggatctggggggatatcaagagcagtg

SEQ ID NO: 32878 - DNA, 80 bp, synthetic construct
  source 1..80: mol_type = other DNA
gggatggatctggggggatatcaagagcagtgcttaacatgtttccagatgctaggcttgtgttcaacagcttattagag

SEQ ID NO: 32879 - DNA, 80 bp, synthetic construct
  source 1..80: mol_type = other DNA
cttaacatgtttccagatgctaggcttgtgttcaacagcttattagaggtgaacgacttaatggcgtccgggacacatcc

SEQ ID NO: 32880 - DNA, 80 bp, synthetic construct
  source 1..80: mol_type = other DNA
ccccttccgcaatcatgagtggcggagatgacatcatctcccgggtgattgactttgactccatctgggagaaaccctct

SEQ ID NO: 32881 - DNA, 80 bp, synthetic construct
  source 1..80: mol_type = other DNA
gacctgaggaacctgaccacatggaggtactttcagtcggtccaagaacgggtgaatatgctctatgacctcatcatttg

SEQ ID NO: 32882 - DNA, 80 bp, synthetic construct
  source 1..80: mol_type = other DNA
tgacgcagaggtcacagacattgcctcaatcaacagaataaccctgcttatgtccgattttgctttgtctatagacggcc

SEQ ID NO: 32883 - DNA, 80 bp, synthetic construct
  source 1..80: mol_type = other DNA
cacttcacctagtcttcaaaacttatggcactatgcttgtaaatccagactatagagcgattcagcacctgtccagagca

SEQ ID NO: 32884 - DNA, 80 bp, synthetic construct
  source 1..80: mol_type = other DNA
ttccctgcagtcactggattcataacccagatgacttcatccttctcatctgagttatatctccgattctcaaaacgggg

SEQ ID NO: 32885 - DNA, 80 bp, synthetic construct
  source 1..80: mol_type = other DNA
aaagttctttcgggatgcagaatatttgacctcctccactcttcgggaaatgagccttgtattattcaactgcagtagcc

SEQ ID NO: 32886 - DNA, 80 bp, synthetic construct
  source 1..80: mol_type = other DNA
aggaaccttgtcgaaggtttctattattatagccatcgtgatagttttctccaatcgggtgttcaacgtctcgaaaccaa

SEQ ID NO: 32887 - DNA, 80 bp, synthetic construct
  source 1..80: mol_type = other DNA
tggcatgcaattctggcttaagtctatcatctcactggatcaggctgatctacaaagtagtgaagaccaccagacttgta

SEQ ID NO: 32888 - DNA, 80 bp, synthetic construct
  source 1..80: mol_type = other DNA
ggaggcatggaagatctatctagggagatagagaaacacctccgaggatacaacaggtggatcactctcaatgacgtcag

SEQ ID NO: 32889 - DNA, 80 bp, synthetic construct
  source 1..80: mol_type = other DNA
atccagatcatctcttttggattatagctgtctgtaagttgggcaccctcaagagggtgtacagattaagacttctgaaa

SEQ ID NO: 32890 - DNA, 80 bp, synthetic construct
  source 1..80: mol_type = other DNA
ctgaagcagcattggcagacgatgggaccgttgattctgatgatgaagactacttctctagtgaaaccaggagtccggag

SEQ ID NO: 32891 - DNA, 80 bp, synthetic construct
  source 1..80: mol_type = other DNA
taagacttctgaaagaagcgacctgaaaaaaacaaaatcccaattcataacctttgttcctttgattgtttttctttctt

SEQ ID NO: 32892 - DNA, 80 bp, synthetic construct
  source 1..80: mol_type = other DNA
tcatcaagctcgccctaattcattcgctgagtttctgagcaagacctactctagtgattcatgaagagctaaatgacagg

SEQ ID NO: 32893 - DNA, 80 bp, synthetic construct
  source 1..80: mol_type = other DNA
cccggccatcaaagattcaaggaaacctagtataaccttaggaaaagcccccgacctgaacaaggcatacaagtcgattt

SEQ ID NO: 32894 - DNA, 80 bp, synthetic construct
  source 1..80: mol_type = other DNA
atggcatacattattgggttgtggacatcctccagaaaaaaactaacacccctccttctgaaccatcccagacatgagta

SEQ ID NO: 32895 - DNA, 80 bp, synthetic construct
  source 1..80: mol_type = other DNA
tccagttagataatagaaaaccgtctgacctcgatgggattgcagcagcgggggagatcaagtgtcaggaggactttcaa

SEQ ID NO: 32896 - DNA, 80 bp, synthetic construct
  source 1..80: mol_type = other DNA
atggatgaggcagaagaccctggcctcttgttccagtcttatctggacaacgtagggattcaaatggtcagacaaatgaa

SEQ ID NO: 32897 - DNA, 80 bp, synthetic construct
  source 1..80: mol_type = other DNA
gtcaggggagagattcctcaagatatggtctcggaccgttgaagagatcatatcttatgtcacggtcaatttccctagtc

SEQ ID NO: 32898 - DNA, 80 bp, synthetic construct
  source 1..80: mol_type = other DNA
agtctgccggggaagtcttcggaagacaaagccacacagactactagctggaaactcaaacaggaagccgtgtccgtttc

SEQ ID NO: 32899 - DNA, 80 bp, synthetic construct
  source 1..80: mol_type = other DNA
ctctcgacgagacagtcaaccatctaaggccacgatggcggctcagaccgcctccggtcctctcgctctggaatggtccg

SEQ ID NO: 32900 - DNA, 80 bp, synthetic construct
  source 1..80: mol_type = other DNA
ccaccaacgaagaggatgacccatctgttgaggcggagatcgctcaccagattgctgagagcttttctaaaaaatacaaa

SEQ ID NO: 32901 - DNA, 80 bp, synthetic construct
  source 1..80: mol_type = other DNA
tgtcaggcatgaatgcagccaagcttgatcctgatgatgtgtgctcttatctggcagccgccatgcacttctttgagggg

SEQ ID NO: 32902 - DNA, 80 bp, synthetic construct
  source 1..80: mol_type = other DNA
agtcgaaaaatgtgccaagcgtaactcgtctggcccacgatggatccaagcttcctctgagatgtgtgcttgggtgggtt

SEQ ID NO: 32903 - DNA, 80 bp, synthetic construct
  source 1..80: mol_type = other DNA
gccttagctaaatccaaaaagtttcagctattggttgagccagacaagctaaataaaatcatgcaagacgacctgaaccg

SEQ ID NO: 32904 - DNA, 80 bp, synthetic construct
  source 1..80: mol_type = other DNA
ttatgtgtctctctgaccaagtcatcgagttcagccatacggtgcaatcaggcccaacctgatccaaattcgacatgaaa

SEQ ID NO: 32905 - DNA, 80 bp, synthetic construct
  source 1..80: mol_type = other DNA
aaaacaaacaacaccactgatgaaatgaactttctacgcaagatagtgaagaattgtagagatgaggacacccagaagtc

SEQ ID NO: 32906 - DNA, 80 bp, synthetic construct
  source 1..80: mol_type = other DNA
ctgacatgtcccttcagacacaaaggtctgaggaggaccaggactcttcagtgcttctagaatagttgaactacacccta

SEQ ID NO: 32907 - DNA, 80 bp, synthetic construct
  source 1..80: mol_type = other DNA
aaaactcctcaattgtttacctctggaggagagagcaaatgggcttgactccaaccttcgggagcaatagaacaacaata

SEQ ID NO: 32908 - DNA, 80 bp, synthetic construct
  source 1..80: mol_type = other DNA
gaaaaaaactattaacatccctcaaaaaatccgaggaaagatgatccccctggatcttctgctcggcctactccttgctt

SEQ ID NO: 32909 - DNA, 80 bp, synthetic construct
  source 1..80: mol_type = other DNA
cctcactgtgtttcgggaaattccccatctacacgataccagacaagctgggtccgtggagtcccatcgacatacaccat

SEQ ID NO: 32910 - DNA, 80 bp, synthetic construct
  source 1..80: mol_type = other DNA
ttggctacgtcaccaccacattcaaaaggaaacactttcgtccgatgccggatgcttgtagggctgcacatgaatggaag

SEQ ID NO: 32911 - DNA, 80 bp, synthetic construct
  source 1..80: mol_type = other DNA
acagctggtgatcctagatatgaagactctcttcaaaacccttatcctgattaccactggttacggactgtaaagaccac

SEQ ID NO: 32912 - DNA, 80 bp, synthetic construct
  source 1..80: mol_type = other DNA
caaggagtctcttgttattatatctccgagtgttgctgacttggacccatatgacaagtcccttcattcaagggtgttcc

SEQ ID NO: 32913 - DNA, 80 bp, synthetic construct
  source 1..80: mol_type = other DNA
acatcagacgtactaatgtggagtggaattgggctttgacagggggcatggaattgacaagggatcccaccgtttcagag

SEQ ID NO: 32914 - DNA, 80 bp, synthetic construct
  source 1..80: mol_type = other DNA
ctcctctacctactgctcaaccaaccatgattacaccatatggatgcccgaagaagcaggactcggaacatcttgtgaca

SEQ ID NO: 32915 - DNA, 80 bp, synthetic construct
  source 1..80: mol_type = other DNA
aagaagcaggactcggaacatcttgtgacatttttactaatagcagagggaagagagcatctaagggggggaggatctgc

SEQ ID NO: 32916 - DNA, 80 bp, synthetic construct
  source 1..80: mol_type = other DNA
ggatttgtggacgaaaggggcctgtacaagtctctgaaggtggcctgtaagctcaagttgtgtggagttcccgggcttag

SEQ ID NO: 32917 - DNA, 80 bp, synthetic construct
  source 1..80: mol_type = other DNA
tcatggatgggacctgggtctcaattcaggcaccagatgagacaaaatggtgtccccctgaccaagtggtgaatctgcat

SEQ ID NO: 32918 - DNA, 80 bp, synthetic construct
  source 1..80: mol_type = other DNA
gacttccactcagatgagatagagcacctcgttgtggaggagttgatcaagaagagggaggaatgtctggatgcactaga

SEQ ID NO: 32919 - DNA, 80 bp, synthetic construct
  source 1..80: mol_type = other DNA
cggtaacgtcctgatccctgagatgcaatcatccctgcttcagcaacatatggagctgttggagtcctctgtaatccccc

SEQ ID NO: 32920 - DNA, 80 bp, synthetic construct
  source 1..80: mol_type = other DNA
tgatgcatcctttggcagacccatcgacaatcttcaaggacagtgatgaagcagaagattttgtggacgtccaccttcca

SEQ ID NO: 32921 - DNA, 80 bp, synthetic construct
  source 1..80: mol_type = other DNA
catgcatctttgatcggtcttctcttgagcctatataggttgagcaaaatatctggacagaacaccggcaattataagac

SEQ ID NO: 32922 - DNA, 80 bp, synthetic construct
  source 1..80: mol_type = other DNA
cagatgtccataagcaggtctctggagttgatctcggtctcccgagctggtggaagtatctgttgatgagtgcaggggct

SEQ ID NO: 32923 - DNA, 80 bp, synthetic construct
  source 1..80: mol_type = other DNA
ctggcaacactaatgtcagcaattttcttagtgacatgctgcaagaaggtcaagagggcagagccagcacatcacggtcc

SEQ ID NO: 32924 - DNA, 80 bp, synthetic construct
  source 1..80: mol_type = other DNA
taaggagtcaggaagaaaaatctcagtaactcctcaaaacgggaaagttatatcttcatgggaggtatacaagagtggaa

SEQ ID NO: 32925 - DNA, 80 bp, synthetic construct
  source 1..80: mol_type = other DNA
atgagccagggctgtgagggcgagttgtcccctccatacttgtcgtctagaagattgttctcttttgagatcctggggaa

SEQ ID NO: 32926 - DNA, 80 bp, synthetic construct
  source 1..80: mol_type = other DNA
tatctcatcctggcggttgctcacggactccgtgcaacagaaaggattcagaagtcaagaaactctcattaatcatctta

SEQ ID NO: 32927 - DNA, 80 bp, synthetic construct
  source 1..80: mol_type = other DNA
gctgatcagacacaattgtgtagactctgatgatgtgtgatgtctcctgaccatatcattgatcaatggtgctctcttcc

SEQ ID NO: 32928 - DNA, 80 bp, synthetic construct
  source 1..80: mol_type = other DNA
tctaaggaatggtaccaaagtttgtagataggccagtcgatgtctcggataaacatatgcctggtctcgggtagggacca

SEQ ID NO: 32929 - DNA, 80 bp, synthetic construct
  source 1..80: mol_type = other DNA
taacaatttcccccacatcgaaatggatagggatttgtcgagaggagagatttgcctcttatgaagtacacaagcaatag

SEQ ID NO: 32930 - DNA, 80 bp, synthetic construct
  source 1..80: mol_type = other DNA
gccataaccatcttacatcttagtaaggtgtgtacattcaaaaagggctgggccatccgagcattcccgtcaagaaaaaa

SEQ ID NO: 32931 - DNA, 80 bp, synthetic construct
  source 1..80: mol_type = other DNA
tgtggagtggaggagtaatcgacaacacctctcatcgtgaagatagtaccacgatgattgacccaggggaagtttatgat

SEQ ID NO: 32932 - DNA, 80 bp, synthetic construct
  source 1..80: mol_type = other DNA
gaccccattgatccgattgagtctgaggctgagccaagagggaatcccaccattcccaacatcttaagaaactctgatta

SEQ ID NO: 32933 - DNA, 80 bp, synthetic construct
  source 1..80: mol_type = other DNA
gaacaggcctctccggatgactttgacagacaattgctccaggtcttacaaagtcctgaaagattatttcaagagagtgg

SEQ ID NO: 32934 - DNA, 80 bp, synthetic construct
  source 1..80: mol_type = other DNA
gtaggtggagctgccgcgcagtctatgatctctctctggctttatggtgctcactccgaatcaaacaggagccggaagtg

SEQ ID NO: 32935 - DNA, 80 bp, synthetic construct
  source 1..80: mol_type = other DNA
tataaccgacttggctcaattttattccaagtcttcccctgtagaaaagctgttaaattacactctcgggaatagaggac

SEQ ID NO: 32936 - DNA, 80 bp, synthetic construct
  source 1..80: mol_type = other DNA
taaaaatcccctcagagggagtcctaagttgtcttgagaaagtagattacgacaaggccttcgggcggtatctggcaaac

SEQ ID NO: 32937 - DNA, 80 bp, synthetic construct
  source 1..80: mol_type = other DNA
atatactcttcttatttattctttcacgtgattaccctttacatgaatgccttggactgggatgaggagaagactatctt

SEQ ID NO: 32938 - DNA, 80 bp, synthetic construct
  source 1..80: mol_type = other DNA
ggcactatggagagatatgacatcaatagatactggaaaggacttagtcaagtttagggatcaaatatggggattgctga

SEQ ID NO: 32939 - DNA, 80 bp, synthetic construct
  source 1..80: mol_type = other DNA
ttgtgactaaagattttgtgtactcccaaaattcgagttgcctttttgatagaaactatacactcatgctgaaagatctt

SEQ ID NO: 32940 - DNA, 80 bp, synthetic construct
  source 1..80: mol_type = other DNA
ttcttgtctcggttcaactcattgatgatccttctatcccccccagagcccagatactcagatgacctaatctctcagct

SEQ ID NO: 32941 - DNA, 80 bp, synthetic construct
  source 1..80: mol_type = other DNA
atgtcaattgtatatcgccggagatcacatcttgtccatgtgtggaaactctggttatgaggtcatcaagatattggaac

SEQ ID NO: 32942 - DNA, 80 bp, synthetic construct
  source 1..80: mol_type = other DNA
ctgctctctcaaaaccccctgttaaccctagagagttcttaaagtctatagacctaggaggattgccagacgaggatttg

SEQ ID NO: 32943 - DNA, 80 bp, synthetic construct
  source 1..80: mol_type = other DNA
gtctgcgacaaaaaggttggagtctggttagtttattaatgatagaccgggagtctcagaccaggaacacaagaactaag

SEQ ID NO: 32944 - DNA, 80 bp, synthetic construct
  source 1..80: mol_type = other DNA
aaccaagttctgtgtccaacttatatgttgtcaccgggtctctcgagggaggggcttctctatgaattggagagtatatc

SEQ ID NO: 32945 - DNA, 80 bp, synthetic construct
  source 1..80: mol_type = other DNA
ttttactgatgtcagtgcaagctgtcttccattacttgctgtttagccccatcctaaaaagcagggtttacaagatcctg

SEQ ID NO: 32946 - DNA, 80 bp, synthetic construct
  source 1..80: mol_type = other DNA
ctttcaagagcattagaagaatccttttacagctcagagatccatgggatcaaccggatgactcagaccccgcaaaaagt

SEQ ID NO: 32947 - DNA, 80 bp, synthetic construct
  source 1..80: mol_type = other DNA
cggaagggtgtggcaatgttcctctgagagagcagatcttctgagagagatttcgtgggggaggaaagtggtcggcacaa

SEQ ID NO: 32948 - DNA, 80 bp, synthetic construct
  source 1..80: mol_type = other DNA
caatttcctgcacttgtggagtgactggagggggaagtcctagaatatctgtgtctgtgcttccatcttttgatcagtca

SEQ ID NO: 32949 - DNA, 80 bp, synthetic construct
  source 1..80: mol_type = other DNA
tttttttcgcgaggtcctttgaagggatacttgggctcatccacctccatgtccacccagctattccacgcctgggagaa

SEQ ID NO: 32950 - DNA, 80 bp, synthetic construct
  source 1..80: mol_type = other DNA
gtgtaacaactgtataaggcccatcgatgatgtcaccctcgagacccctcaggtctttgagttcccggatgtctcaagaa

SEQ ID NO: 32951 - DNA, 80 bp, synthetic construct
  source 1..80: mol_type = other DNA
gaatatctaggatggtttccggggccgtgcctcacttccgaagactgcctgatattcgtttgagaccgggtgactttgaa

SEQ ID NO: 32952 - DNA, 80 bp, synthetic construct
  source 1..80: mol_type = other DNA
tccctcagcggcaaagaaaagtcttgccacataggctccgcccaagggctcttgtattcaatcctggttgcgatccatga

SEQ ID NO: 32953 - DNA, 80 bp, synthetic construct
  source 1..80: mol_type = other DNA
ttctgggtataatgatgggaccatttttcctgtcaatatatacagcaaggtctgccctagagactatttaagagggctgg

SEQ ID NO: 32954 - DNA, 80 bp, synthetic construct
  source 1..80: mol_type = other DNA
gtgatatcatatatcctcttgagactggacaatcacccatctttgtacataatgctccgagagccatctcttagaggaga

SEQ ID NO: 32955 - DNA, 80 bp, synthetic construct
  source 1..80: mol_type = other DNA
gtcagttgtaaagcaaaaatgtaacacccctacaatggatgccgacaagattgtattcaaagtcaataaccaggtggtct

SEQ ID NO: 32956 - DNA, 80 bp, synthetic construct
  source 1..80: mol_type = other DNA
aagtctagatcgtctttattagactacagctgcttgtaaaccggacatccccagaagcctgcacatcctaaaacttttgt

SEQ ID NO: 32957 - DNA, 80 bp, synthetic construct
  source 1..80: mol_type = other DNA
aaatctctccaaaagcatgaaagccgatctgcgacaaatgggctctctaatgaggcaagtgctgggtgtgcacggggaag

SEQ ID NO: 32958 - DNA, 80 bp, synthetic construct
  source 1..80: mol_type = other DNA
cgtcatgcggcgaaaaatatgacgggaagttacagccccaacaagaggatgtcacgcaaagcggggtgttcagagtgggt

SEQ ID NO: 32959 - DNA, 80 bp, synthetic construct
  source 1..80: mol_type = other DNA
ctgctctgctcaacaagtcgcggtttcaacctcgtcgaacccggcccctgcctccgagcttgacataagaaccctctcca

SEQ ID NO: 32960 - DNA, 80 bp, synthetic construct
  source 1..80: mol_type = other DNA
ccattttagacggtctcaatgtattcccctccctgtgtctcgttgtcggggacggatcggggggaatatctaggacagtg

SEQ ID NO: 32961 - DNA, 80 bp, synthetic construct
  source 1..80: mol_type = other DNA
gggacggatcggggggaatatctaggacagtgcttaacatgtttcctgatgcaaagcttgtattcaacagcttattggag

SEQ ID NO: 32962 - DNA, 80 bp, synthetic construct
  source 1..80: mol_type = other DNA
cttaacatgtttcctgatgcaaagcttgtattcaacagcttattggaggtgaacgacctaatggcgtctggaacacaccc

SEQ ID NO: 32963 - DNA, 80 bp, synthetic construct
  source 1..80: mol_type = other DNA
caatcatgagtggcggagatgacatcacctcccgggtgatagactttgatacaatctgggagaaaccctctgacctgagg

SEQ ID NO: 32964 - DNA, 80 bp, synthetic construct
  source 1..80: mol_type = other DNA
aacttgaccacatggaggtacttccagtcaatccaagaacgggtgaatatgttctatgacctcatcatctgtgacgcaga

SEQ ID NO: 32965 - DNA, 80 bp, synthetic construct
  source 1..80: mol_type = other DNA
ttcccaacagtcaccggattcataacccagatgacctcctccttctcatctgagttatacctcagattctcgaaacgggg

SEQ ID NO: 32966 - DNA, 80 bp, synthetic construct
  source 1..80: mol_type = other DNA
gaagttcttccgggatgcagaatatttgacctcctccactcttcgagaaatgagccttgttttgtttaactgtagcagcc

SEQ ID NO: 32967 - DNA, 80 bp, synthetic construct
  source 1..80: mol_type = other DNA
tgacagatcctttattctacccgccgtctgatccaaaaatcttgagacactttaacatatgctgcagcactatgatgtac

SEQ ID NO: 32968 - DNA, 80 bp, synthetic construct
  source 1..80: mol_type = other DNA
tggcttgcaattctggcttaagtctctcatctcattggattaggctaatctataaagtggtgaagaccaccagacttgtt

SEQ ID NO: 32969 - DNA, 80 bp, synthetic construct
  source 1..80: mol_type = other DNA
agagatgacgaaagctgaagcagctttagcagacgatggaactgtcaactctgatgacgaagactacttctccaatgaga

SEQ ID NO: 32970 - DNA, 80 bp, synthetic construct
  source 1..80: mol_type = other DNA
gggagtacggagagtttatctggagaaatagagaagcacctcagaggatacaacaggtggatcactctgggcgatgtcaa

SEQ ID NO: 32971 - DNA, 80 bp, synthetic construct
  source 1..80: mol_type = other DNA
atccagatcgtctcttttagattatagttgcttataaattgcgcaccctcaagagagcatatagactaggacctctgaaa

SEQ ID NO: 32972 - DNA, 80 bp, synthetic construct
  source 1..80: mol_type = other DNA
taggacctctgaaagaagcaacccgaaaaaaacagaatcccaattcgcaacctctattcgcttgattgttttttcctctt

SEQ ID NO: 32973 - DNA, 80 bp, synthetic construct
  source 1..80: mol_type = other DNA
ccaggagtccagaggcggtttacactagaatcatgatgaatggaggcagactgaagagatcacatgtaaagaggtacgtc

SEQ ID NO: 32974 - DNA, 80 bp, synthetic construct
  source 1..80: mol_type = other DNA
tcagtcagctctaatcatcaggctcgccctaactcattcgctgagtttttgagcaagacctactctagtgattgataaag

SEQ ID NO: 32975 - DNA, 80 bp, synthetic construct
  source 1..80: mol_type = other DNA
agctgactggcgggatggtagacattaataaattgtgtacatcctccagaaaaaaactaacacccctcctttcgaaccat

SEQ ID NO: 32976 - DNA, 80 bp, synthetic construct
  source 1..80: mol_type = other DNA
cccagacatgagtaaaatctttgttaacccgagtgcgatcagggcaggcttagctgacttggagatggcagaagaaactg

SEQ ID NO: 32977 - DNA, 80 bp, synthetic construct
  source 1..80: mol_type = other DNA
tagatctaattgctaagaacctcgaggacaatcaggctcatcttcaaggagaacccatagaggtggacagtctccctgaa

SEQ ID NO: 32978 - DNA, 80 bp, synthetic construct
  source 1..80: mol_type = other DNA
gacataagacagctccaattagacgatagaaaaccatctggccctagcgagactgctacggagagggagatcaagtctca

SEQ ID NO: 32979 - DNA, 80 bp, synthetic construct
  source 1..80: mol_type = other DNA
ggaggactatcagatggatgaggcagaggaccctgccctcttattccagtcttatctagacaatgtcgggattcaaatgg

SEQ ID NO: 32980 - DNA, 80 bp, synthetic construct
  source 1..80: mol_type = other DNA
tcagacaaatgaagtcgggggagagattccttaagatatggtctcagaccgttgaagagatcatatcttatgttactgtc

SEQ ID NO: 32981 - DNA, 80 bp, synthetic construct
  source 1..80: mol_type = other DNA
aacttctccaatctgccggggaagtcttcagaaaacaaagccacacaaacgactggctggaaattccggcaggagacggt

SEQ ID NO: 32982 - DNA, 80 bp, synthetic construct
  source 1..80: mol_type = other DNA
gtctgcttcctctcaacgaagtaatccttcatccaaggccccgataacaactcagacagcctctggtcctccttctctgg

SEQ ID NO: 32983 - DNA, 80 bp, synthetic construct
  source 1..80: mol_type = other DNA
agtggtcaaccaccaatgagaaggatgacccgtctgtagaggcggagattgcccaccagatcgccgagagcttttcgaaa

SEQ ID NO: 32984 - DNA, 80 bp, synthetic construct
  source 1..80: mol_type = other DNA
aacgtgccaagcataacccgtttagcccaagatgggtccaaacttcctctaagatgtgtgctggggtgggttgccctagc

SEQ ID NO: 32985 - DNA, 80 bp, synthetic construct
  source 1..80: mol_type = other DNA
caaatccaaaaagtttcagctattagttgagccagacaagctaaataaaataatgcaagacgacctgaatcgttatgcgg

SEQ ID NO: 32986 - DNA, 80 bp, synthetic construct
  source 1..80: mol_type = other DNA
tcctttgactgagtccctgagctcagctacaccatgcaatcaagccaaacttgactcaagttcgacatgaaaaaaacaga

SEQ ID NO: 32987 - DNA, 80 bp, synthetic construct
  source 1..80: mol_type = other DNA
taacaccactgataaaatgaactttctgcgcaagatagtgaaaaactgtagagatgaggacacccagaaatcctctttgg

SEQ ID NO: 32988 - DNA, 80 bp, synthetic construct
  source 1..80: mol_type = other DNA
gtgtgtcccgatgactggatcagctatggaatcctgatagcacgaagaggagataagatcaccccagattctcttgtgga

SEQ ID NO: 32989 - DNA, 80 bp, synthetic construct
  source 1..80: mol_type = other DNA
ccgacatgtcccttcagacacagaggtctgaggaagaccaggactcttcagtgcttttagaatagcttaaccacatccta

SEQ ID NO: 32990 - DNA, 80 bp, synthetic construct
  source 1..80: mol_type = other DNA
atacgttatggtgccgttgaactgctgcattttatcagagtcaaatctattatctttacattttaagcttcttggatgtg

SEQ ID NO: 32991 - DNA, 80 bp, synthetic construct
  source 1..80: mol_type = other DNA
aaaaaaactattaacatccctcgaaagatccaaagaaagatgatcccccggaatcctttgctcgggcttctcctggtttc

SEQ ID NO: 32992 - DNA, 80 bp, synthetic construct
  source 1..80: mol_type = other DNA
ctcactgtgttttgggaaattccccatctacacaataccagacaagctgggcccttggagcccaattgacatacaccacc

SEQ ID NO: 32993 - DNA, 80 bp, synthetic construct
  source 1..80: mol_type = other DNA
tcggctacgtcaccactacgttcaaaagaagacactttcgcccgatgccagatgcttgcagagctgcacacaactggaag

SEQ ID NO: 32994 - DNA, 80 bp, synthetic construct
  source 1..80: mol_type = other DNA
atagccggtgatcctagatatgaggattctcttcaaaacccttaccctgattaccattggctgcggactgtaaagaccac

SEQ ID NO: 32995 - DNA, 80 bp, synthetic construct
  source 1..80: mol_type = other DNA
acataagacgtactaatgtggagaggaactgggctttgaccgggggtatggagttgacaagggatcctacagtttcggag

SEQ ID NO: 32996 - DNA, 80 bp, synthetic construct
  source 1..80: mol_type = other DNA
aagaagcaggactcgggacctcttgtgatattttcaccaacagcagggggaagagagcatctaaaggtggaaaaacctgc

SEQ ID NO: 32997 - DNA, 80 bp, synthetic construct
  source 1..80: mol_type = other DNA
ggattcgtggacgagaggggcttgtacaagtctctgaaaggatcatgcaagctcaagttgtgcggagtccctggtcttcg

SEQ ID NO: 32998 - DNA, 80 bp, synthetic construct
  source 1..80: mol_type = other DNA
actcatagatgggacttgggtctcaatccaaacaccagatgagacgaaatggtgccctcctgaccaagtagtgaatctgc

SEQ ID NO: 32999 - DNA, 80 bp, synthetic construct
  source 1..80: mol_type = other DNA
atgacttccactcagatgaaatagagcaccttgtcgtagaggagttgatcaagaaaagggaggagtgtctagatgcactg

SEQ ID NO: 33000 - DNA, 80 bp, synthetic construct
  source 1..80: mol_type = other DNA
caaaggggtgcctaagagtcgggaggaggtgtcatcctaatgtggacggtgtgttcttcaatggtataattttgggccca

SEQ ID NO: 33001 - DNA, 80 bp, synthetic construct
  source 1..80: mol_type = other DNA
gggaggtgtcatcctaatgtggacggtgtgttcttcaatggtataattttgggcccagacgggaatgtcctgatccctga

SEQ ID NO: 33002 - DNA, 80 bp, synthetic construct
  source 1..80: mol_type = other DNA
gacgggaatgtcctgatccctgagatgcaatcatccttgcttcaacaacacatggagctactggagtcatctgtgatccc

SEQ ID NO: 33003 - DNA, 80 bp, synthetic construct
  source 1..80: mol_type = other DNA
cctgatgcatcctctggcagacccatcaacaatcttcaaggacagtgatgaagcagaggacttcgttgacgttcaccttc

SEQ ID NO: 33004 - DNA, 80 bp, synthetic construct
  source 1..80: mol_type = other DNA
cggatgttcacaagaagatctccggggttgacctcggtctcccaagttggtggaagtatttgttgatgagtgcgggtgct

SEQ ID NO: 33005 - DNA, 80 bp, synthetic construct
  source 1..80: mol_type = other DNA
ctggctgcactaatgctgaccactctcttaataacatgttgcaggaaggtcaatagggcagagccaaaacagcaaggtcc

SEQ ID NO: 33006 - DNA, 80 bp, synthetic construct
  source 1..80: mol_type = other DNA
tagggagtcaggaaggacaatctcagtaactcctcaaaatgggagagtcatatcttcatgggagttatacaaaagtggaa

SEQ ID NO: 33007 - DNA, 80 bp, synthetic construct
  source 1..80: mol_type = other DNA
gcgagactgggctgtgagagaaattcttctcctccacacttgtcatctagaaaattgtccttttccaagattctgggaga

SEQ ID NO: 33008 - DNA, 80 bp, synthetic construct
  source 1..80: mol_type = other DNA
tgtctcctcctgatagttattcgtgagctccatgtaaccggattggattggaagtcgaaaaactttcattaatcatctca

SEQ ID NO: 33009 - DNA, 80 bp, synthetic construct
  source 1..80: mol_type = other DNA
gctgatcagacatgattgtgcagattctggtgatgtgtgacgtctcttgacaatatcattgactaatggtgctttcatcc

SEQ ID NO: 33010 - DNA, 80 bp, synthetic construct
  source 1..80: mol_type = other DNA
tctaaggagtgataccaaagtttgtagaccggccagctggtgtctcagacagatgtatgcctgatctcaggcagagacca

SEQ ID NO: 33011 - DNA, 80 bp, synthetic construct
  source 1..80: mol_type = other DNA
tagcaatttcccctacattagacctaatagggattaatcaagagaggaagcctgcctctcatgaagtacacaagcaatag

SEQ ID NO: 33012 - DNA, 80 bp, synthetic construct
  source 1..80: mol_type = other DNA
gccataaccatcttacatcccagtaaggtgtgtacaacggaagagggctaggccatacaagctttccaatcaagaaaaaa

SEQ ID NO: 33013 - DNA, 80 bp, synthetic construct
  source 1..80: mol_type = other DNA
aactgtggagtggaggagtaatccacaacacttctcatcctgaggatagcaatatgatgattgacccgggggaagtttat

SEQ ID NO: 33014 - DNA, 80 bp, synthetic construct
  source 1..80: mol_type = other DNA
aaacatagcagatagaatagagcaaatttttgaaacggccccttttgtgaagattgtagaacatcatactttgatgacaa

SEQ ID NO: 33015 - DNA, 80 bp, synthetic construct
  source 1..80: mol_type = other DNA
gatgaccccgttgacccgattgagtctgagtctgaaccgagggggaaccccaccattcccaacatcttgagaaattccga

SEQ ID NO: 33016 - DNA, 80 bp, synthetic construct
  source 1..80: mol_type = other DNA
ttataaccttaattccccattgatcgaggatccagccaagttgatgttagaatggttgaggactgggaacagacctctcc

SEQ ID NO: 33017 - DNA, 80 bp, synthetic construct
  source 1..80: mol_type = other DNA
tatgactgacctggcccagttctattccaggtcctctcctgttgaaaagctgttaaattacactctcgaaaacagagggt

SEQ ID NO: 33018 - DNA, 80 bp, synthetic construct
  source 1..80: mol_type = other DNA
tgaaaatcccaccagagggggtcctaaattgtctcgagagggttgattacgacaaagcattcgggcggtatctggctaac

SEQ ID NO: 33019 - DNA, 80 bp, synthetic construct
  source 1..80: mol_type = other DNA
atatactcctcttatttatttttccatgtagttaccctttacatgaacgccctagactgggatgaggagaagaccatctt

SEQ ID NO: 33020 - DNA, 80 bp, synthetic construct
  source 1..80: mol_type = other DNA
tcgtaactaaagatttcgtatactcccaaaattctggctgcctttttgatagaaactatacacttatgctgaaagacctc

SEQ ID NO: 33021 - DNA, 80 bp, synthetic construct
  source 1..80: mol_type = other DNA
cgtacgtggtgaacagcttagtccatagggcggaaaagtttaggcctctcattcactccctaggagatttccccacattc

SEQ ID NO: 33022 - DNA, 80 bp, synthetic construct
  source 1..80: mol_type = other DNA
ataagagataaggtgggtcaacttgagggtacattcggtcccagtgcaaaaatgttcttcaaggttctggaccaattcga

SEQ ID NO: 33023 - DNA, 80 bp, synthetic construct
  source 1..80: mol_type = other DNA
ggttgtcgaagctatatgatcaagtccatatcaagaaggagatagataaatcttatcaggaatgtttagcaagtgacctg

SEQ ID NO: 33024 - DNA, 80 bp, synthetic construct
  source 1..80: mol_type = other DNA
aagtggtatctagactcacgacttctttcaaaggaccaccctttaaccccttatatcaaaacccagacatggcctcctaa

SEQ ID NO: 33025 - DNA, 80 bp, synthetic construct
  source 1..80: mol_type = other DNA
acaatcatcagaggctggaatcaacggaggatgtattttctgtgcttgatcgagtgtttggactaaagagggtgttctca

SEQ ID NO: 33026 - DNA, 80 bp, synthetic construct
  source 1..80: mol_type = other DNA
tctgtttcccaggtttctcagtgaactctttagttcttctttcttaggaatccctgagtcaatcattgggttaatacaaa

SEQ ID NO: 33027 - DNA, 80 bp, synthetic construct
  source 1..80: mol_type = other DNA
gatcaaccggatgacccagattccccaaaaagtcggaagagtttggcagtgctcctctgagagagcagatcttctgagag

SEQ ID NO: 33028 - DNA, 80 bp, synthetic construct
  source 1..80: mol_type = other DNA
aaatttcgtgggggaggaaagtggtcggcacaacagtccctcacccctctgagatgttgggattgctcccgaagtcctca

SEQ ID NO: 33029 - DNA, 80 bp, synthetic construct
  source 1..80: mol_type = other DNA
ttcttctcacgaggccctctgaagggatacttgggttcatccacttccatgtcaacccagctattccatgcctgggagaa

SEQ ID NO: 33030 - DNA, 80 bp, synthetic construct
  source 1..80: mol_type = other DNA
gcccaaacgctgattaggaacattatgtccctgacgggccctgactttccactggaagaggcccccgtcttcaagaggac

SEQ ID NO: 33031 - DNA, 80 bp, synthetic construct
  source 1..80: mol_type = other DNA
cgctgatgctctatgcgcaaacatggacatcagaactggtgcaaaaagacacaaggctgagagattctacctttcattgg

SEQ ID NO: 33032 - DNA, 80 bp, synthetic construct
  source 1..80: mol_type = other DNA
tgtgatgcagaggttacagacatcgcatctattaaccggataaccctgctgatgtctgattttgcattatccatagatgg

SEQ ID NO: 33033 - DNA, 80 bp, synthetic construct
  source 1..80: mol_type = other DNA
attctagcttaagtctctcatctcactggatcaggctgatttacaaaatagtgaaaaccaccagacttgttggaaaagta

SEQ ID NO: 33034 - DNA, 80 bp, synthetic construct
  source 1..80: mol_type = other DNA
gaagacttatctagagaaatagagaggcaccttcgagggtacaacaggtggattacacttgaggacgttagatccagatc

SEQ ID NO: 33035 - DNA, 80 bp, synthetic construct
  source 1..80: mol_type = other DNA
atctcttttagattacagctgcttataaaccgggcattcttaagaaaatgtacaggctaagactcttggatagcgcaccc

SEQ ID NO: 33036 - DNA, 80 bp, synthetic construct
  source 1..80: mol_type = other DNA
ccccgctatcagagacctgaagaagcccagtataaccttggggaaagctcctgatttgaacaaagcatacaagtcaatcc

SEQ ID NO: 33037 - DNA, 80 bp, synthetic construct
  source 1..80: mol_type = other DNA
atcgtaaacactcatgaatggcgtacgtcattcatgaaaaaaactaacacccctccttttgaaccatctcagacatgagc

SEQ ID NO: 33038 - DNA, 80 bp, synthetic construct
  source 1..80: mol_type = other DNA
atggatgaggaggaggaccccgccctcttgttccaatcttacctggacaatatcggagttcaaatagttagacaaatgag

SEQ ID NO: 33039 - DNA, 80 bp, synthetic construct
  source 1..80: mol_type = other DNA
gttaggggagagattcctcaagatatggtctcagactgtcgaggagatcctatcctatgtaacagtcaatttccccagtt

SEQ ID NO: 33040 - DNA, 80 bp, synthetic construct
  source 1..80: mol_type = other DNA
tgccagggaagtcttcagaagacaaagccacccagactgcctaccgagaacctaagaaggagactgtgtctacttctgct

SEQ ID NO: 33041 - DNA, 80 bp, synthetic construct
  source 1..80: mol_type = other DNA
cagcgagaaagtcagtcatctaaagccaaaatggtggctcaaactgcctccggccctcctgctctagactggtctgccac

SEQ ID NO: 33042 - DNA, 80 bp, synthetic construct
  source 1..80: mol_type = other DNA
tatctggcatgaatgcagccaagcttgaccctgatgatgtatgctcttacttagctgccgcaatgcagtttttcgaagga

SEQ ID NO: 33043 - DNA, 80 bp, synthetic construct
  source 1..80: mol_type = other DNA
cttgctgaccccaccctcaatttcagtctcattctgtaatcaagtctgacctgccccaaatctaacatgaaaaaaacagg

SEQ ID NO: 33044 - DNA, 80 bp, synthetic construct
  source 1..80: mol_type = other DNA
agtctcttattatcatatcaccgagtgtggctgatttggacccgtacgacaaatctcttcattcaagagttttccctagt

SEQ ID NO: 33045 - DNA, 80 bp, synthetic construct
  source 1..80: mol_type = other DNA
aaaaagcaagactagggacctcttgtgacattttcaccaatagcaaagggaagaaggcatctaagggaggcaaggtttgt

SEQ ID NO: 33046 - DNA, 80 bp, synthetic construct
  source 1..80: mol_type = other DNA
ctggcgatactgatcctgacaatctttctaatgatatgttgcagaagggtcaatagaaaagactcgagccgatcaagtct

SEQ ID NO: 33047 - DNA, 80 bp, synthetic construct
  source 1..80: mol_type = other DNA
gcgagacccgactgtgaaggcagttcatatcctccctacctcgcatttagaagattgtctctctgcgagatacgggggaa

SEQ ID NO: 33048 - DNA, 80 bp, synthetic construct
  source 1..80: mol_type = other DNA
cctcctgttttaacagtttttagtgaactctgtgtggcagggtgagttcaggagtcaagaaatcttcattaatcatctta

SEQ ID NO: 33049 - DNA, 80 bp, synthetic construct
  source 1..80: mol_type = other DNA
atcgatcagacacagtcatgcagatcttgataatgtatgataccttctaacattatcagtgaccaatggggctttcatcc

SEQ ID NO: 33050 - DNA, 80 bp, synthetic construct
  source 1..80: mol_type = other DNA
tccggagaccgataccaaaggttatggataagccaactgatatcccggatgactctgtgcttgagtttgagcagaggcca

SEQ ID NO: 33051 - DNA, 80 bp, synthetic construct
  source 1..80: mol_type = other DNA
tagcgagttaccctatatgagattaaacaggggtcagctgatagaagcaatgtgcctcatatgaaggatataagcaatag

SEQ ID NO: 33052 - DNA, 80 bp, synthetic construct
  source 1..80: mol_type = other DNA
atgaccccattgatccgatcgagtcggaggctgagccgagagggaaccctgccatccccaacattttaagaaactctgac

SEQ ID NO: 33053 - DNA, 80 bp, synthetic construct
  source 1..80: mol_type = other DNA
tgcataaccgacttggctcagttctattccaagtcatcccccatagaaaagttgttaaactgtacgctcggaaatagagg

SEQ ID NO: 33054 - DNA, 80 bp, synthetic construct
  source 1..80: mol_type = other DNA
tgaaaatccctccagagggggttctaaattgtcttgaaagggttgattatgatacagcatttgggaggtatttggctaat

SEQ ID NO: 33055 - DNA, 80 bp, synthetic construct
  source 1..80: mol_type = other DNA
aaagtgttcaagaaactgatcgatagagtcactggacaggggcttttagactattcaagggtcacatacgcctttcacct

SEQ ID NO: 33056 - DNA, 80 bp, synthetic construct
  source 1..80: mol_type = other DNA
acaaccatcagaggctagaatcgacaatggatgtattttctgtacttgatctagtgtttgggttaaagagagtgttctct

SEQ ID NO: 33057 - DNA, 80 bp, synthetic construct
  source 1..80: mol_type = other DNA
agaactcatgagttttttcaaaagtcttggatctattattcggataggtctgaccttattgggttatgggaggatcaaat

SEQ ID NO: 33058 - DNA, 80 bp, synthetic construct
  source 1..80: mol_type = other DNA
gctcgagtttcctgcatctccaacgaccaaatagtcaaccttgccaacataatgtcaacagtatctaccaatgcattaac

SEQ ID NO: 33059 - DNA, 80 bp, synthetic construct
  source 1..80: mol_type = other DNA
tggctaagttctagtgagtcttggatccatgcgctgtgtcaagaagcaggaaacccggatctgggagaaagaacgctaga

SEQ ID NO: 33060 - DNA, 80 bp, synthetic construct
  source 1..80: mol_type = other DNA
tcctgacaagaatgacaaacattaacatcaatagacctctagaactgatctcaggagtgatttcatatatcctcctgaga

SEQ ID NO: 33061 - DNA, 80 bp, synthetic construct
  source 1..80: mol_type = other DNA
cttgacaatcacccatctttgtatataatgctcagagagccatctcttagaggagagatattttctattccccagaaagt

SEQ ID NO: 33062 - DNA, 80 bp, synthetic construct
  source 1..80: mol_type = other DNA
ccgacatgtctcttcaaacgcaaaaatctgaggaggataaagattcttcagtgcttctggaatagtctaattgcatcata

SEQ ID NO: 33063 - DNA, 80 bp, synthetic construct
  source 1..80: mol_type = other DNA
aagaagcgaggctcgggacatcttgtgacatctttaccagcagcaaagggaagaaagcctctaaagggggcaagacttgc

SEQ ID NO: 33064 - DNA, 80 bp, synthetic construct
  source 1..80: mol_type = other DNA
ggattcgtagatgaaaggggcctgtataagtctttaaaaggagcatgtaaactcaaactgtgcggagttcccggacttag

SEQ ID NO: 33065 - DNA, 80 bp, synthetic construct
  source 1..80: mol_type = other DNA
caacctcaactctcctctaatagaggatccagccaaattgatgttagagtggctgagaacagggaataggcctcttcgga

SEQ ID NO: 33066 - DNA, 80 bp, synthetic construct
  source 1..80: mol_type = other DNA
tgagaatccccccagagggggtcctaagctgtctcgaaagggtcgattacgataaggcatttgggcggtatctggctaac

SEQ ID NO: 33067 - DNA, 80 bp, synthetic construct
  source 1..80: mol_type = other DNA
ctcagatcttcgagatccccgaatcaatggacccgtccgagatactcgatgataaatcacactccttcactagaacaaaa

SEQ ID NO: 33068 - DNA, 80 bp, synthetic construct
  source 1..80: mol_type = other DNA
cgaccgaggatgtcttctctgtactcgatcaagtgttcggtttaaagagagtattttccagaactcatgagttttttcaa

SEQ ID NO: 33069 - DNA, 80 bp, synthetic construct
  source 1..80: mol_type = other DNA
ctgaaatggccttggcagatgacggaacagtcaattctgatgacgaagataacttctctagtgaaaccaggagtccggaa

SEQ ID NO: 33070 - DNA, 80 bp, synthetic construct
  source 1..80: mol_type = other DNA
caaaactcctggacagtacaccttgaaaaaaacaaggtccaaattcagaacctctgtctgattgactgtttttccatctt

SEQ ID NO: 33071 - DNA, 80 bp, synthetic construct
  source 1..80: mol_type = other DNA
gaaaaaaactattaacatccctcaaaaaacctaaggaaagatgatccttcaggctcttctgtttgtgcctctcctgattt

SEQ ID NO: 33072 - DNA, 80 bp, synthetic construct
  source 1..80: mol_type = other DNA
cttcattgtgtttcgggaagttccccatctacacaataccagacaagctcggcccttggagtcccatcgacatacatcat

SEQ ID NO: 33073 - DNA, 80 bp, synthetic construct
  source 1..80: mol_type = other DNA
tgactctgacagacaattgttctaggtcatacagagttttgaaagattacttcaagaaggtggatctaggatctatcaaa

SEQ ID NO: 33074 - DNA, 80 bp, synthetic construct
  source 1..80: mol_type = other DNA
atactgtctggacatgtcaggcggcccgacatgctggaacggccaagatggtggcctagagggtctgcgtcaaaagggct

SEQ ID NO: 33075 - DNA, 80 bp, synthetic construct
  source 1..80: mol_type = other DNA
tgctgttcagccctatcctgaaaggcagagtttacaaaatcttgagtgcagagggagacaattttcttctagctatgtct

SEQ ID NO: 33076 - DNA, 80 bp, synthetic construct
  source 1..80: mol_type = other DNA
caagaaactcaaatcttgctcaaactctcattagaaacataatgtctctgacaggtccagactttccgctagaagaggcc

SEQ ID NO: 33077 - DNA, 80 bp, synthetic construct
  source 1..80: mol_type = other DNA
atactttagagtcagatgaagacattcagagactgctgaaagactctttgcgtaggactaggtgggtagaccaggaagta

SEQ ID NO: 33078 - DNA, 80 bp, synthetic construct
  source 1..80: mol_type = other DNA
aggtggggatttgacaagtactctaagtggtatcttgattcgcgacttctttcaagggatcaccccctgactccttatat

SEQ ID NO: 33079 - DNA, 80 bp, synthetic construct
  source 1..80: mol_type = other DNA
tggaatttgaggttgtactttgtcatcacagagaagctcctcgccaattatatcttgccactctttgacgcattgactat

SEQ ID NO: 33080 - DNA, 80 bp, synthetic construct
  source 1..80: mol_type = other DNA
aggtactttgtctaaagtttccattattatagctatcatgatagtcttctccaatagggtgttcaacgtattgaagccgc

SEQ ID NO: 33081 - DNA, 80 bp, synthetic construct
  source 1..80: mol_type = other DNA
cagatccagatcatctctgttggattatagctgcttataaactaagtgcccctgatagaatgtacagactgatactccta

SEQ ID NO: 33082 - DNA, 80 bp, synthetic construct
  source 1..80: mol_type = other DNA
tgatactcctagacggtgcaccctgaaaaaaactggatcagaattccgaacctctgtcggcttgattgtttttccatctt

SEQ ID NO: 33083 - DNA, 80 bp, synthetic construct
  source 1..80: mol_type = other DNA
tcaacttttctggtgcgccggggaagtccttaaaagacaaggctactcagactgtcggccgcgaagtcgcgaaggagaca

SEQ ID NO: 33084 - DNA, 80 bp, synthetic construct
  source 1..80: mol_type = other DNA
aagtctgcctcttctcagcgagcaagtcaaccctcaaaagttaaaatggcagctcaaactgtctctggtcctcctgcttt

SEQ ID NO: 33085 - DNA, 80 bp, synthetic construct
  source 1..80: mol_type = other DNA
agaatggtctgtcgccaacgaagaggatgacccatccgtcgaggctgagattgctcaccagattgctgagagtttttcca

SEQ ID NO: 33086 - DNA, 80 bp, synthetic construct
  source 1..80: mol_type = other DNA
gtcataatcatcttacatcctgataaggtgcacataacgacaaatggatgaaccatccaagcctttcagtcaagaaaaaa

SEQ ID NO: 33087 - DNA, 80 bp, synthetic construct
  source 1..80: mol_type = other DNA
agaagcagacagcgtcaattgcaaagcaaaaatgtaacacccctacaatggatgccgacaagattgtgttcaaggtcaat

SEQ ID NO: 33088 - DNA, 80 bp, synthetic construct
  source 1..80: mol_type = other DNA
aagctaagactcttacacgatatcccttgaaaaaaacaaaatcttgactctgagcctctggttgcttgattgtttttttt

SEQ ID NO: 33089 - DNA, 80 bp, synthetic construct
  source 1..80: mol_type = other DNA
caagaggacataacccgccatgaacaacaacttgttgttgccaggcaaaagctcagggatgcagaaaaagcagtggaaat

SEQ ID NO: 33090 - DNA, 80 bp, synthetic construct
  source 1..80: mol_type = other DNA
ccccttcagcgatcatgagtggaggagatgacatcatatccagagtaattgacttcaactctatctgggagaaaccctct

SEQ ID NO: 33091 - DNA, 80 bp, synthetic construct
  source 1..80: mol_type = other DNA
tcgccagaaacatcgaagataatcaggcccatcttcaaggagatcccatagaggtggacggtctccccgaagacctgaga

SEQ ID NO: 33092 - DNA, 80 bp, synthetic construct
  source 1..80: mol_type = other DNA
cggcttcaactggatgatgaaaaaccatctggcctcaatgagatggccaaagcaggggagagtaagtgtcaagaagactt

SEQ ID NO: 33093 - DNA, 80 bp, synthetic construct
  source 1..80: mol_type = other DNA
ttctgctcagcgagaaagtcagtcatctaaagccaaaatggtggctcaaactgcctccggccctcctgctctagattggt

SEQ ID NO: 33094 - DNA, 80 bp, synthetic construct
  source 1..80: mol_type = other DNA
ctgccaccaatgaagagaatgacctatcggtggatgctgaaatagctcatcagattgctgagagcttctctaagaaatac

SEQ ID NO: 33095 - DNA, 80 bp, synthetic construct
  source 1..80: mol_type = other DNA
aaaacatgagaaacttttgcgttaatggggaagtcaaggtgtgtagtccaaacggatattcatttagagtcctgcgacac

SEQ ID NO: 33096 - DNA, 80 bp, synthetic construct
  source 1..80: mol_type = other DNA
acataaaacgtactaatgtggaagggaactgggctttgacagggggtatggagttggcgagggaccctacagtccctgaa

SEQ ID NO: 33097 - DNA, 80 bp, synthetic construct
  source 1..80: mol_type = other DNA
catgcatctttggttggtctcctcctgagtctgtataggttaagcaaaatatctggacagaataccggcaactacaagac

SEQ ID NO: 33098 - DNA, 80 bp, synthetic construct
  source 1..80: mol_type = other DNA
acatcttggaatcagacgatgacattcagagactgttaaaagactctttacgcaggacaaggtgggtagatcaggaagtg

SEQ ID NO: 33099 - DNA, 80 bp, synthetic construct
  source 1..80: mol_type = other DNA
cgccatgcagcaagaaatatgacagggggttatagccccaacaagaagatgtcacgcaaagcagggtgttcagaatgggt

SEQ ID NO: 33100 - DNA, 80 bp, synthetic construct
  source 1..80: mol_type = other DNA
ggtaagttctttcgggatgcagaatatttgacctcttcgacctttcgagaaatgagccttgtattgttcaactgtagtag

SEQ ID NO: 33101 - DNA, 80 bp, synthetic construct
  source 1..80: mol_type = other DNA
tttagagttacagcgaggaactctgtctaaggtctctatcatcatagccatcatgatagtcttctctaatagggtgttca

SEQ ID NO: 33102 - DNA, 80 bp, synthetic construct
  source 1..80: mol_type = other DNA
ttgtaggaaaagtagaagacttatatggggaggtagagaagcatcttcgagggtacaacaggtggatcaccctcgaggac

SEQ ID NO: 33103 - DNA, 80 bp, synthetic construct
  source 1..80: mol_type = other DNA
gttagatccagatcatctctgctagattacagctgcttataagctgaacatccttgagagaatgtgcagactaagaccct

SEQ ID NO: 33104 - DNA, 80 bp, synthetic construct
  source 1..80: mol_type = other DNA
ctgaggcagccttggcagatgatgcaacggtcaattctgatgacgaggactacttctctagtgagaccaggagtccggag

SEQ ID NO: 33105 - DNA, 80 bp, synthetic construct
  source 1..80: mol_type = other DNA
taagacccttggataatgcaccctgaaaaaaacaagatcttgattcataacctctgtttgcttgatcgtttttccatctt

SEQ ID NO: 33106 - DNA, 80 bp, synthetic construct
  source 1..80: mol_type = other DNA
gcagtttatactcggatcatgatgaatggaggtagactaaaaagattgcacatacggagatatgtctcggtcagctccaa

SEQ ID NO: 33107 - DNA, 80 bp, synthetic construct
  source 1..80: mol_type = other DNA
ttcgtgaaaggtcgaacaacaaaattgtaaacactcatgaatggcgtatgtccgtcatgaaaaaaactaacacccctcct

SEQ ID NO: 33108 - DNA, 80 bp, synthetic construct
  source 1..80: mol_type = other DNA
ttcgaaccatcccagacatgagcaagatctttgtcagcccaagtgcgatcagggcgggcctggctgatctagaaatggca

SEQ ID NO: 33109 - DNA, 80 bp, synthetic construct
  source 1..80: mol_type = other DNA
ttcaattggacgacgaaaaaccatctggtcccaatgagatggccaaagcaggggagagcaagggtcaagaagacttccag

SEQ ID NO: 33110 - DNA, 80 bp, synthetic construct
  source 1..80: mol_type = other DNA
tcaacttccccagtttgccaggaaagtcctcggaagacaaagctacccagactgcctaccgagaacccaagaaggagact

SEQ ID NO: 33111 - DNA, 80 bp, synthetic construct
  source 1..80: mol_type = other DNA
gcgtctgtttctgctcagcgagaaagtcaatcatccaaagccaaaatggtggctcaaactgcctccggccctcctgctct

SEQ ID NO: 33112 - DNA, 80 bp, synthetic construct
  source 1..80: mol_type = other DNA
catgctgactgcaccatcaatttcattcccactatgcaatcaaatctgacctgccccaaatttaacatgaaaaaaacagg

SEQ ID NO: 33113 - DNA, 80 bp, synthetic construct
  source 1..80: mol_type = other DNA
taacaccactgataagatgaactttctacgtaagatagtgaagaactgtagagacgaggacaatcagaagccttctcttg

SEQ ID NO: 33114 - DNA, 80 bp, synthetic construct
  source 1..80: mol_type = other DNA
aacatgagaaacttttgcgttaacggggaagtcaaagtgtgtagtccaaacggctattcatttcgagtcttgcgacatat

SEQ ID NO: 33115 - DNA, 80 bp, synthetic construct
  source 1..80: mol_type = other DNA
ctgacatgtccctccagacacaaaggtccgaggaggataagaactcttcagtgcttctggaatagtcaaattacatccta

SEQ ID NO: 33116 - DNA, 80 bp, synthetic construct
  source 1..80: mol_type = other DNA
caagttcttcaattatttacctctggaggagagaacatatgggcttaactccaaccttcaggagcaatagaacaaaaacc

SEQ ID NO: 33117 - DNA, 80 bp, synthetic construct
  source 1..80: mol_type = other DNA
acctgttatggtgccgttgaattgctgcattttatcagagtcaaatcaatcacctttacatcttaagcttctcggatgtg

SEQ ID NO: 33118 - DNA, 80 bp, synthetic construct
  source 1..80: mol_type = other DNA
acataaagcgtactaatgtggaggggaactgggctctaacaggtggtatggagttgacgagagaccctacaattcctgaa

SEQ ID NO: 33119 - DNA, 80 bp, synthetic construct
  source 1..80: mol_type = other DNA
tcttctacctactgctcaactaaccatgattataccatctggatgccagaagaaccaagattaaggacttcttgtgacat

SEQ ID NO: 33120 - DNA, 80 bp, synthetic construct
  source 1..80: mol_type = other DNA
aagaaccaagattaaggacttcttgtgacattttcaccaatagcaaagggaagagagcatctaaggggggcaagatgtgc

SEQ ID NO: 33121 - DNA, 80 bp, synthetic construct
  source 1..80: mol_type = other DNA
ggatttgtggatgaacggggcttgtataagtctctaaagggggcatgtaaacttaagctatgcggagttcctggacttag

SEQ ID NO: 33122 - DNA, 80 bp, synthetic construct
  source 1..80: mol_type = other DNA
tcatggatggaacctgggtctcagttcagacaccagatgagaccaagtggtgctctcctgaccagctggtgaatctacat

SEQ ID NO: 33123 - DNA, 80 bp, synthetic construct
  source 1..80: mol_type = other DNA
gactttcactcagatgagatagaacaccttgttgtagaggagctagtcaagaagagggaggaatgtctggatacattgga

SEQ ID NO: 33124 - DNA, 80 bp, synthetic construct
  source 1..80: mol_type = other DNA
caaaagggtgtttgaaagtcgggaggaggtgtcatcctcatgtgaacggggtgtttttgaatggtataattctgggtccg

SEQ ID NO: 33125 - DNA, 80 bp, synthetic construct
  source 1..80: mol_type = other DNA
ggtgtttttgaatggtataattctgggtccggacgggaatgtcctgatcccagaaatgcagtcatccttactccaacaac

SEQ ID NO: 33126 - DNA, 80 bp, synthetic construct
  source 1..80: mol_type = other DNA
gacgggaatgtcctgatcccagaaatgcagtcatccttactccaacaacatatggagctgttggagtcctctgtgatccc

SEQ ID NO: 33127 - DNA, 80 bp, synthetic construct
  source 1..80: mol_type = other DNA
cagatgttcacaaacaggtctcgggggttgactttgggctcccaaattggaggagatatgtgctgatgagtgcaggtgct

SEQ ID NO: 33128 - DNA, 80 bp, synthetic construct
  source 1..80: mol_type = other DNA
ctggcgatactaatgctgacaatctttttaatgatatgctgcagaaaggtcaagagaacagactcgagccaatcaagtct

SEQ ID NO: 33129 - DNA, 80 bp, synthetic construct
  source 1..80: mol_type = other DNA
tgaggaattgagaaggaaagtatcggtcactccacaaaacgggaaagttatatcttcatgggagtcgtataagagtgaag

SEQ ID NO: 33130 - DNA, 80 bp, synthetic construct
  source 1..80: mol_type = other DNA
gcgagacccggctgtgaaggcaggtcacatcctctttaccttgcatccggatgactgtctctctacgagatacgagggaa

SEQ ID NO: 33131 - DNA, 80 bp, synthetic construct
  source 1..80: mol_type = other DNA
gcatccggatgactgtctctctacgagatacgagggaatctcatgtttcaaaagtccttgatgaactctgtgcggcaggg

SEQ ID NO: 33132 - DNA, 80 bp, synthetic construct
  source 1..80: mol_type = other DNA
tctcatgtttcaaaagtccttgatgaactctgtgcggcagggggggtttcaggaatcaagaaatcttcattaatcatctc

SEQ ID NO: 33133 - DNA, 80 bp, synthetic construct
  source 1..80: mol_type = other DNA
aatcgatcagacatagtcatgcagattttgataatgtatgatatcctctaacagtatcagtgaccaatggtgctttaatc

SEQ ID NO: 33134 - DNA, 80 bp, synthetic construct
  source 1..80: mol_type = other DNA
tcccagggactgataccaaaggttatggacaagctaaccgatatctcagatgactctgtgcttgggcctgggcagaggca

SEQ ID NO: 33135 - DNA, 80 bp, synthetic construct
  source 1..80: mol_type = other DNA
ttagtgagttaccctgcattagactaaacagggattagctgagagaagcaatttgcctcctatgaaggatataagcaata

SEQ ID NO: 33136 - DNA, 80 bp, synthetic construct
  source 1..80: mol_type = other DNA
gaccacaatcatcctacatcctgacaaggcgtgcatcgctactaagggctgggccatccaagcttctcggtcaagaaaaa

SEQ ID NO: 33137 - DNA, 80 bp, synthetic construct
  source 1..80: mol_type = other DNA
aactgtaggatagaggagtaattgacaacacccctcatcctgagaactgcaccatgatgattgacccaggggatgtttat

SEQ ID NO: 33138 - DNA, 80 bp, synthetic construct
  source 1..80: mol_type = other DNA
ctacaacctaaactctcctctaatagaggatccagccgatttgatgttggaatggttgaaaacgggaaataggcctcttc

SEQ ID NO: 33139 - DNA, 80 bp, synthetic construct
  source 1..80: mol_type = other DNA
ggatgactctaacggacaattgctctaggtcttacaaagtcttgagggattacttcaaaaaagtagatctagggtctctt

SEQ ID NO: 33140 - DNA, 80 bp, synthetic construct
  source 1..80: mol_type = other DNA
gtggggggagctgcagcacaatctatgatctccctttggctgtacaatgcccactcagaatcaaacaggagccgaaagtg

SEQ ID NO: 33141 - DNA, 80 bp, synthetic construct
  source 1..80: mol_type = other DNA
tctccctttggctgtacaatgcccactcagaatcaaacaggagccgaaagtgcataaccgacttggctcagttctattcc

SEQ ID NO: 33142 - DNA, 80 bp, synthetic construct
  source 1..80: mol_type = other DNA
gaaggatttaacgtcaatagatattgggaatgacctggtcaagtttaaagatcaaatatggggatttctagttgtaacta

SEQ ID NO: 33143 - DNA, 80 bp, synthetic construct
  source 1..80: mol_type = other DNA
aggattttgtgtattcccgaagttctaactgcctctttgatagaaactatacactcatgctgaaagacctttttttatcc

SEQ ID NO: 33144 - DNA, 80 bp, synthetic construct
  source 1..80: mol_type = other DNA
cgcttcaactctctaatgattcttctttcccctccagaacccagatattcagatgacctgatatctcagctgtgtcagct

SEQ ID NO: 33145 - DNA, 80 bp, synthetic construct
  source 1..80: mol_type = other DNA
caacaaaggacgtcttctctgtgcttgatctagtgtttgggttaaagagagtattctccagaactcatgagttttttcag

SEQ ID NO: 33146 - DNA, 80 bp, synthetic construct
  source 1..80: mol_type = other DNA
caaatatactgtctggatatgtcagacggcccgacatgctggaacggccaagatggcgggctggagggtctgcgacagaa

SEQ ID NO: 33147 - DNA, 80 bp, synthetic construct
  source 1..80: mol_type = other DNA
aggctggagtctggttagcttattgatgatagatcgagagtctcaaaccaggaacacaaagactaagatattagcccagg

SEQ ID NO: 33148 - DNA, 80 bp, synthetic construct
  source 1..80: mol_type = other DNA
aaccaagtcttatgtccgacatacatgttgtcacctgggctttctcaagaggggcttctctacgagttggagagcatatc

SEQ ID NO: 33149 - DNA, 80 bp, synthetic construct
  source 1..80: mol_type = other DNA
gccccattttgaaaagcagagtttataggatcttgaatgctgaaggggacaattttcttctgactatgtctaggataatc

SEQ ID NO: 33150 - DNA, 80 bp, synthetic construct
  source 1..80: mol_type = other DNA
ctctcgaggaccttagaagagtccttttataactcagagattcatggaatcaatcgcatgactcagactccccaaagggt

SEQ ID NO: 33151 - DNA, 80 bp, synthetic construct
  source 1..80: mol_type = other DNA
cgatttcctgtacctgcggagtaacaggagggggaaatcctcgcatatccgtatctgtgcttccatcttttgatcaatca

SEQ ID NO: 33152 - DNA, 80 bp, synthetic construct
  source 1..80: mol_type = other DNA
tttttctcgagaggccccttgaagggttacctgggctcgtccacctccatgtcgactcagctgttccacgcctgggagaa

SEQ ID NO: 33153 - DNA, 80 bp, synthetic construct
  source 1..80: mol_type = other DNA
tgatgctctatgcgcaaacatggacgtcagaattggtgcaaaaggacacgcgactgaaagactccacctttcactggcat

SEQ ID NO: 33154 - DNA, 80 bp, synthetic construct
  source 1..80: mol_type = other DNA
cttcgatgcaacaagtgcataaggcctattgatgatattaccctcgaaacttctcaggtcttcgagtttccagatgtttc

SEQ ID NO: 33155 - DNA, 80 bp, synthetic construct
  source 1..80: mol_type = other DNA
aaaaaggatatctaggatggtctctggagctgtgcctcattttcgaaaacttcccgatattcgtttaagaccaggtgact

SEQ ID NO: 33156 - DNA, 80 bp, synthetic construct
  source 1..80: mol_type = other DNA
tctgattttaggagctccaagatgacatatttgactctaatcacttatcagtctcatcttttacttcagaaagttgagaa

SEQ ID NO: 33157 - DNA, 80 bp, synthetic construct
  source 1..80: mol_type = other DNA
attccagaacaataagaaggcagtttaggagaagtctctcgagaacgttagaagaatcattttatcactcagagatccat

SEQ ID NO: 33158 - DNA, 80 bp, synthetic construct
  source 1..80: mol_type = other DNA
ggaatcaaccggatgacccagactccccaaagagtcggaagggtttggccttgctcttctgaaagggcagatctcctaag

SEQ ID NO: 33159 - DNA, 80 bp, synthetic construct
  source 1..80: mol_type = other DNA
tgcgccatgcagcgaggactatgacagggggttacagccctaacaagaagacttcccgcaaagcagggtgttcagaatgg

SEQ ID NO: 33160 - DNA, 80 bp, synthetic construct
  source 1..80: mol_type = other DNA
gtctgttctgctcagcaggttgctgtttcaacttcagcgaacccggcacctgtatccgagctggatataagggccctttc

SEQ ID NO: 33161 - DNA, 80 bp, synthetic construct
  source 1..80: mol_type = other DNA
cgattatgagtggaggagatgacatcatatccagagtaattgactttgattccatctgggagaagccttccgacttgagg

SEQ ID NO: 33162 - DNA, 80 bp, synthetic construct
  source 1..80: mol_type = other DNA
aacctaaccacatggaggtactttcagtcagtccaagaacaagtaaatatgtcatatgacctcatcatttgtgatgcaga

SEQ ID NO: 33163 - DNA, 80 bp, synthetic construct
  source 1..80: mol_type = other DNA
cattccctgcagtcactggattcataacccagatgacctcgtctttctcatccgagctatacctgagattctcaaaacgg

SEQ ID NO: 33164 - DNA, 80 bp, synthetic construct
  source 1..80: mol_type = other DNA
actccagcctgagtctctcatcacactggattaggctgatttacaaaatagtaaagaccaccagacttgtcggaaggata

SEQ ID NO: 33165 - DNA, 80 bp, synthetic construct
  source 1..80: mol_type = other DNA
gaggacttgtccggggaagtcgagaggcaccttcgagggtacaacaggtggatcaccctcgaggacatcagatccagatc

SEQ ID NO: 33166 - DNA, 80 bp, synthetic construct
  source 1..80: mol_type = other DNA
atcccttttagattatagctgcttgtaaactagacgctctcctgggagtgtatagactaaaactcttggacaatgcaccc

SEQ ID NO: 33167 - DNA, 80 bp, synthetic construct
  source 1..80: mol_type = other DNA
gcagtttacactcgaatcatgatgaatggaggtagactgaaaagactacacataaggagatatgtctcagtcagctctaa

SEQ ID NO: 33168 - DNA, 80 bp, synthetic construct
  source 1..80: mol_type = other DNA
tcatcaatctcgccccaattcatttgctgagtttctaagcaagacatattcgagtgactcgtgaagagtcaaacaacgag

SEQ ID NO: 33169 - DNA, 80 bp, synthetic construct
  source 1..80: mol_type = other DNA
attgtaaacacccagaaattgagtacatcattcatgaaaaaaactaacatccctcctttcgaatcatctcagatatgagc

SEQ ID NO: 33170 - DNA, 80 bp, synthetic construct
  source 1..80: mol_type = other DNA
ttcaactggaagatgaaaaaccatctggcctcaatgagatggccaaagccggagagaacaagtgtcaggaagatttccag

SEQ ID NO: 33171 - DNA, 80 bp, synthetic construct
  source 1..80: mol_type = other DNA
caagtctgccggggaagccttcaaaagacaaagctacccaaacttctcaccatgaacccaagaaggagacaacgtctgct

SEQ ID NO: 33172 - DNA, 80 bp, synthetic construct
  source 1..80: mol_type = other DNA
tcttctcagcgggggagtcaatcatctaaagccagaatggcggctcaaactgcctcaggtcctcctgctctagactggtc

SEQ ID NO: 33173 - DNA, 80 bp, synthetic construct
  source 1..80: mol_type = other DNA
caattccaaaaaattccagctgctggtcgagtctgacaaactgaacaaaataatgcaagacgacctgaaccgttatgtgt

SEQ ID NO: 33174 - DNA, 80 bp, synthetic construct
  source 1..80: mol_type = other DNA
cttgctaaccacaccctcaatctaatccctactttgcaatcaaatctgatctgctccaaatctaacatgaaaaaaacagg

SEQ ID NO: 33175 - DNA, 80 bp, synthetic construct
  source 1..80: mol_type = other DNA
atcttgaaatctttcgatgagatctattctggaaatcaaagaatgatcgggttagtcaaagttgttgtagggctggcgtt

SEQ ID NO: 33176 - DNA, 80 bp, synthetic construct
  source 1..80: mol_type = other DNA
acacacgttatggtgccgttgaattgctgcattttatcagaatcaaatcaattacctttacattttgagcttcttagatg

SEQ ID NO: 33177 - DNA, 80 bp, synthetic construct
  source 1..80: mol_type = other DNA
tgaaaaaaactattaacacccctcaaaagacctacaaaaagatgatccctcaggctcttttgtttgtgcctctcctaata

SEQ ID NO: 33178 - DNA, 80 bp, synthetic construct
  source 1..80: mol_type = other DNA
tcttcatcgtgttttgggaaattccccgtctacacgataccagaaaagctcggcccttggagtcccatcgatatacatca

SEQ ID NO: 33179 - DNA, 80 bp, synthetic construct
  source 1..80: mol_type = other DNA
tctcagctgtcctaataatctggctgtggaggatgaggggtgcaacagtctgtcggggttttcttacatggaactgaaag

SEQ ID NO: 33180 - DNA, 80 bp, synthetic construct
  source 1..80: mol_type = other DNA
atggctggtgatcctagatacgaagaatctcttcataatccttatccagattaccattggctacggactgtgactactac

SEQ ID NO: 33181 - DNA, 80 bp, synthetic construct
  source 1..80: mol_type = other DNA
caaagagtcccttattatcatatcgccaagtgtagccaatttggatccctacgacaaatcccttcattcaagagttttcc

SEQ ID NO: 33182 - DNA, 80 bp, synthetic construct
  source 1..80: mol_type = other DNA
ccggtgggaagtgtatgggaataacagtctcttctacattctgttcaactaatcatgattacaccatctggatgccagaa

SEQ ID NO: 33183 - DNA, 80 bp, synthetic construct
  source 1..80: mol_type = other DNA
aacgcaagactcgggacttcttgcgacatttttactaccagcaaagggaagaaggcatctaagggaggcaagatttgcgg

SEQ ID NO: 33184 - DNA, 80 bp, synthetic construct
  source 1..80: mol_type = other DNA
atttgtggacgagaggggcttgtataagtctctaaaaggagcatgtaaacttaaactgtgcggagtttctggacttagac

SEQ ID NO: 33185 - DNA, 80 bp, synthetic construct
  source 1..80: mol_type = other DNA
ttctagatgggacttgggtcacaattcagacatcagatgagatcaagtggtgccctcctgacaagctggtgaatctacat

SEQ ID NO: 33186 - DNA, 80 bp, synthetic construct
  source 1..80: mol_type = other DNA
gactttcattcagatgagatagaacatctcgttgtagaggagttagtcaggaagagggaagaatgtctggacacactgga

SEQ ID NO: 33187 - DNA, 80 bp, synthetic construct
  source 1..80: mol_type = other DNA
gatgggcatgtcctaatcccggagatgcaatcgtctttactccaacagcatatggagctgttggagtcttctgtaatccc

SEQ ID NO: 33188 - DNA, 80 bp, synthetic construct
  source 1..80: mol_type = other DNA
cggatgtccataagcaggtctcagggattgacctgggtctcccgaactgggggaaatatgtgctgataagcgcaggtttt

SEQ ID NO: 33189 - DNA, 80 bp, synthetic construct
  source 1..80: mol_type = other DNA
ctggtgacactattgctgataatcttcttaatgatatgttgcagacgggctaatagaagagtatcaacacaacaaagtct

SEQ ID NO: 33190 - DNA, 80 bp, synthetic construct
  source 1..80: mol_type = other DNA
tggagagtcaggaaagaaagtgttcgttattccccaaaacgggaaagtcatatcttcatgggaatcatataagaatggag

SEQ ID NO: 33191 - DNA, 80 bp, synthetic construct
  source 1..80: mol_type = other DNA
ttcatgggaatcatataagaatggagccgagaccaggctgtgagggcgggtcatctcctctataccttgctctcagagaa

SEQ ID NO: 33192 - DNA, 80 bp, synthetic construct
  source 1..80: mol_type = other DNA
ccgagaccaggctgtgagagcgggtcatctcctctataccttgctctcagagaatcgcctatcttcaagatccgggggga

SEQ ID NO: 33193 - DNA, 80 bp, synthetic construct
  source 1..80: mol_type = other DNA
tctcttgtcttaactatcctgagttgactccgtatgacagggtggattcaagagtcgagaaactttcattaatcatctca

SEQ ID NO: 33194 - DNA, 80 bp, synthetic construct
  source 1..80: mol_type = other DNA
actgatcagactcagtcgcgtagaccccaatgatatatgatatcttctgacagtatcagtaaccaatggtgctcttatcc

SEQ ID NO: 33195 - DNA, 80 bp, synthetic construct
  source 1..80: mol_type = other DNA
ccctgggactgataccaaaggttatagacaagccaaatgatatttcagatgactctgtggtctatctagggcagaggcca

SEQ ID NO: 33196 - DNA, 80 bp, synthetic construct
  source 1..80: mol_type = other DNA
tagcgagttcctctatactagactggaaattggtttttgctgagagaagtaacttgcctcctatgaaggacacaagcaat

SEQ ID NO: 33197 - DNA, 80 bp, synthetic construct
  source 1..80: mol_type = other DNA
agatcataatcatcccacatcccgacactttgtgcataaatccaaagggctgggccatccaaacttctcagtcaagaaaa

SEQ ID NO: 33198 - DNA, 80 bp, synthetic construct
  source 1..80: mol_type = other DNA
aaactgtcgaatggaggagtaattaacaacacttctcatcttgagaacttcaccatgatgattgatccaggggaggttta

SEQ ID NO: 33199 - DNA, 80 bp, synthetic construct
  source 1..80: mol_type = other DNA
tgatgaccccatcgaccctgttgagtcagattctgagccgagagggaacctcaccattcccaacatcttgaggaactcag

SEQ ID NO: 33200 - DNA, 80 bp, synthetic construct
  source 1..80: mol_type = other DNA
actacaatctcaactctcctctaataaaggatccagctgagttgatgttggaatggctgagaacaggaaataggcctctc

SEQ ID NO: 33201 - DNA, 80 bp, synthetic construct
  source 1..80: mol_type = other DNA
cggatgactatgacagacaattgctctaggtcttacaaagttttgagggattactttaagaaagtggatctaggatccat

SEQ ID NO: 33202 - DNA, 80 bp, synthetic construct
  source 1..80: mol_type = other DNA
caaagtgggaggggctgcagcacaatctatgatctccctctggctgcacggtgcccactctgaatcaaacaggagccgga

SEQ ID NO: 33203 - DNA, 80 bp, synthetic construct
  source 1..80: mol_type = other DNA
gatgtatcgccgatttggctcagttttattccaagtcgtcccctatagaaaaactgctaaactgcacactcggaaataga

SEQ ID NO: 33204 - DNA, 80 bp, synthetic construct
  source 1..80: mol_type = other DNA
gggctgagaatcccttcagaggtggtcctaagttgtcttgatagggtcgattatgacaaagcatttgggcggtatttggc

SEQ ID NO: 33205 - DNA, 80 bp, synthetic construct
  source 1..80: mol_type = other DNA
caatatatactcctcttatctgttctttcatgtgatcacactttacatgaatgccttggactgggatgaggagaaaacta

SEQ ID NO: 33206 - DNA, 80 bp, synthetic construct
  source 1..80: mol_type = other DNA
gaaggatttgacatccgtagatattgggaaagacttggtcaagtttaaggatcaaatatggggattgctgattgtgacca

SEQ ID NO: 33207 - DNA, 80 bp, synthetic construct
  source 1..80: mol_type = other DNA
catacattgtgaacagcctagttcagagggcagaaaaatttaggcctctcattcattccttaggggacttccctgcattt

SEQ ID NO: 33208 - DNA, 80 bp, synthetic construct
  source 1..80: mol_type = other DNA
ataaaagataaagtagatcaacttgaggggacttttggtcctagtgcaaaaaggttttttaaggctctagatcaattcga

SEQ ID NO: 33209 - DNA, 80 bp, synthetic construct
  source 1..80: mol_type = other DNA
tctgtttccccgatttctcagtgaactctttagctcgtctttcttggggattcctgagtcgatcattgggttgatacaaa

SEQ ID NO: 33210 - DNA, 80 bp, synthetic construct
  source 1..80: mol_type = other DNA
ctctcgagaacgttagaagaatcattttatcactcagagatccatggaatcaaccggatgacccagactccccaaagagt

SEQ ID NO: 33211 - DNA, 80 bp, synthetic construct
  source 1..80: mol_type = other DNA
cgatctcttgcacttgtggagtaacaggagggggaaatcctcgaatctctgtgtctgtactcccatcttttgatcagtca

SEQ ID NO: 33212 - DNA, 80 bp, synthetic construct
  source 1..80: mol_type = other DNA
gcccaaactttgatcaagaacataatgtctctgacgggcccggactttcctctggaagaggcccctatcttcaagaggac

SEQ ID NO: 33213 - DNA, 80 bp, synthetic construct
  source 1..80: mol_type = other DNA
ggatatctaggatggtttctggggctgtgcctcattttcggaaacttcctgacatccatttgagaccgggtgactttgaa

SEQ ID NO: 33214 - DNA, 80 bp, synthetic construct
  source 1..80: mol_type = other DNA
tctctgagtggtaaggagaagtcacgccacatagggtcggcccaagggctcttgtactcaatcctggttgcaattcatga

SEQ ID NO: 33215 - DNA, 80 bp, synthetic construct
  source 1..80: mol_type = other DNA
gtgatttcatacattctcttaaggctggacaatcacccgtctctgtacataatgctcagggagccatctcttagaggaga

SEQ ID NO: 33216 - DNA, 80 bp, synthetic construct
  source 1..80: mol_type = other DNA
ccccctcagcgattatgagtggaggggatgacatcatatccagagtaattgactttgattccatctgggagaagccttct

SEQ ID NO: 33217 - DNA, 80 bp, synthetic construct
  source 1..80: mol_type = other DNA
gacttgaggaacctaaccacatggaggtactttcagtcagtccaagaacaagtaaatatgtcatatgacctcatcatttg

SEQ ID NO: 33218 - DNA, 80 bp, synthetic construct
  source 1..80: mol_type = other DNA
ttgtcggaaggatagaggaattgtccggggaggtcgagaggcaccttcgagggtacaacaggtggatcaccctcgaggac

SEQ ID NO: 33219 - DNA, 80 bp, synthetic construct
  source 1..80: mol_type = other DNA
atcagatccagatcatcccttttagattatagctgcttgtaaactagacgctctcctgggagtgtatagactaaagctct

SEQ ID NO: 33220 - DNA, 80 bp, synthetic construct
  source 1..80: mol_type = other DNA
taaagctcttggacaatgtaccctgaaaaaaacaagatcttggttcataacctctgtttgcttgattgcttttccatttt

SEQ ID NO: 33221 - DNA, 80 bp, synthetic construct
  source 1..80: mol_type = other DNA
gtcaggagaaagatttctcaagatatggtcccataccgtcgaggagatcatatcttatgtcactgttaacttcccaagtc

SEQ ID NO: 33222 - DNA, 80 bp, synthetic construct
  source 1..80: mol_type = other DNA
aaagtgccaggcgtagcccacttggcccatgacgggtccaaacttcctctgagatgtatgctggggtgggttgctctggc

SEQ ID NO: 33223 - DNA, 80 bp, synthetic construct
  source 1..80: mol_type = other DNA
tgtcggctcctccagacgacgatgacctgtggttgccccccccggaatatgtcccattgaaggagctcgcgggcaagaaa

SEQ ID NO: 33224 - DNA, 80 bp, synthetic construct
  source 1..80: mol_type = other DNA
gctacggactgtgacgactaccaaagagtcccttattatcatatcgccaagtgtagccaatctggacccctacgacaaat

SEQ ID NO: 33225 - DNA, 80 bp, synthetic construct
  source 1..80: mol_type = other DNA
tttttttatcccggttcaactctctaatgattcttctttcccctccagaacccaggtattctgatgacctgatacctcag

SEQ ID NO: 33226 - DNA, 80 bp, synthetic construct
  source 1..80: mol_type = other DNA
ttgtgtcaactgtatatcgccggagatcacgtcctgtccatgtgtggaaactctggttacgaagtcatcaagatattgga

SEQ ID NO: 33227 - DNA, 80 bp, synthetic construct
  source 1..80: mol_type = other DNA
acaaccatcagaggttggagtcgactgaagatgtgttctccgtgcttgatctagtgttcggattgaagagggtattctcc

SEQ ID NO: 33228 - DNA, 80 bp, synthetic construct
  source 1..80: mol_type = other DNA
tctctctgcaagagaggcattactgtacttctttcacaagaactttgaagaagagattagaagaatgtttgaaccagggc

SEQ ID NO: 33229 - DNA, 80 bp, synthetic construct
  source 1..80: mol_type = other DNA
acgactcgtgtatgatgtatcttgaaaaaaacaagatcttgaatctgagcctctggttgcttgattgttttttttatctt

SEQ ID NO: 33230 - DNA, 80 bp, synthetic construct
  source 1..80: mol_type = other DNA
caatctcaactctcctttaatagaagaccctgctaggctgatgttagattggttgaaaacagggaataggcctcacagga

SEQ ID NO: 33231 - DNA, 80 bp, synthetic construct
  source 1..80: mol_type = other DNA
tgaccctgacagacaattgctctaggtcttacaaggttttgaaggattacttcaagaaagtggatttgggttccctcaaa

SEQ ID NO: 33232 - DNA, 80 bp, synthetic construct
  source 1..80: mol_type = other DNA
ctgtgccagttgtacattgccggggatcaagtcctgtccatgtgcggaaattccggctatgaagtcatcaaaatactaga

SEQ ID NO: 33233 - DNA, 80 bp, synthetic construct
  source 1..80: mol_type = other DNA
aagaagtagacagtgtcgtctacaaagccaaaatgtaacacccctacaatggatgccgacaagattgtattcaaagtcaa

SEQ ID NO: 33234 - DNA, 80 bp, synthetic construct
  source 1..80: mol_type = other DNA
acacattagaatcagacgaggacattcagaggctgttaaaagactctctgcgcaggacgaagtgggtagatcaagaagtg

SEQ ID NO: 33235 - DNA, 80 bp, synthetic construct
  source 1..80: mol_type = other DNA
cgtcatgcagcgagaactatgacagggagttacagccccaataagaaaatgtcgcgcaaagcagggtgctcagagtgggt

SEQ ID NO: 33236 - DNA, 80 bp, synthetic construct
  source 1..80: mol_type = other DNA
ttgctctgcccaacaggttgcagtctcaacctcatcaaatccagcccctgcctcagagttagacatcagggccctctcca

SEQ ID NO: 33237 - DNA, 80 bp, synthetic construct
  source 1..80: mol_type = other DNA
tttggatgatctcaatgtatttccctccttatgtcttgtggtcggggatggatcagggggaatatcaagagcggtactaa

SEQ ID NO: 33238 - DNA, 80 bp, synthetic construct
  source 1..80: mol_type = other DNA
acatgtttccagatgccaaactcgtgttcaatagcttgttagaagtgaacgacctaatggcgtcaggaacacacccattg

SEQ ID NO: 33239 - DNA, 80 bp, synthetic construct
  source 1..80: mol_type = other DNA
gacttgaggaacttgaccacatggagatacttccagtccgtccaagaacatgtaaatatgtcatacgatctcatcatttg

SEQ ID NO: 33240 - DNA, 80 bp, synthetic construct
  source 1..80: mol_type = other DNA
catttccctcggtcactggattcataactcagacaacctcgtccttctcatccgagctgtacctcagattctcaaaacga

SEQ ID NO: 33241 - DNA, 80 bp, synthetic construct
  source 1..80: mol_type = other DNA
gggaagttctttcgagatgcagagtatttgacctcatctactctcagagaaatgagccttgtattgttcaactgtagcag

SEQ ID NO: 33242 - DNA, 80 bp, synthetic construct
  source 1..80: mol_type = other DNA
ggtcggaaacatagacgacctgcaaaaggaggtagagaagcaccttcgagggtacaacaggtggattaccctcgatgaca

SEQ ID NO: 33243 - DNA, 80 bp, synthetic construct
  source 1..80: mol_type = other DNA
ttagatccagatcatctctattagattatagctgcttataaaccaagcactcttgagggaatctgacgactaatactctt

SEQ ID NO: 33244 - DNA, 80 bp, synthetic construct
  source 1..80: mol_type = other DNA
ctgaattggccttggcagatgatggaaccgtcaattcggatgacgaggactacttttctagtgagaccaggagtcctgag

SEQ ID NO: 33245 - DNA, 80 bp, synthetic construct
  source 1..80: mol_type = other DNA
tactcttgtacggtgcaccatgaaaaaaacgagatctcagttcataacctctatttgcctgattgtttttctgtcttcat

SEQ ID NO: 33246 - DNA, 80 bp, synthetic construct
  source 1..80: mol_type = other DNA
tcatcaagctcgccctaattcattcgctgagtttttaaacaagacatactcgagtgattcgtaaagagttgaacaacaag

SEQ ID NO: 33247 - DNA, 80 bp, synthetic construct
  source 1..80: mol_type = other DNA
actgtaaacaccaataaattgcatacatccttcatgaaaaaaactaacacccctcctttcgaaccatcccagacatgagc

SEQ ID NO: 33248 - DNA, 80 bp, synthetic construct
  source 1..80: mol_type = other DNA
aagatcttcgtcaatccaagtgctatcagggcaggtctggctgacctagagatggcagaggaaacggtggatctcatttc

SEQ ID NO: 33249 - DNA, 80 bp, synthetic construct
  source 1..80: mol_type = other DNA
taggaacatcgaagataatcaggcccatctccaaggagatcccatagaggtggacgacctccccgaagacatgaaacggc

SEQ ID NO: 33250 - DNA, 80 bp, synthetic construct
  source 1..80: mol_type = other DNA
tcaacttccccagtccgccggggaagtcttcaaaggacaaagctacccagacttccaaccgggaacccaaaaaggagaca

SEQ ID NO: 33251 - DNA, 80 bp, synthetic construct
  source 1..80: mol_type = other DNA
gtgtccgcttcttctcagagagagagtcaaccgtctaaagccaaaatggctgctcaaactgcctctggtcctcctgctat

SEQ ID NO: 33252 - DNA, 80 bp, synthetic construct
  source 1..80: mol_type = other DNA
agaatggtccgccgctaatgatgaggatgacccatctgtagatgctgaaatcgctcaccagattgctgagagcttctcca

SEQ ID NO: 33253 - DNA, 80 bp, synthetic construct
  source 1..80: mol_type = other DNA
tcttctgatcacacccccaatctcaactgaactatgcaatcaaatctgacctgatccaaatctgacatgagaaaaacaag

SEQ ID NO: 33254 - DNA, 80 bp, synthetic construct
  source 1..80: mol_type = other DNA
caacaccactgataagatgaactttctacgcaagatagtaaagaattgtagagatgaaaacacccagaagccttctctcg

SEQ ID NO: 33255 - DNA, 80 bp, synthetic construct
  source 1..80: mol_type = other DNA
aaaactattaacatctctcaaaagacctaaggaaagatgatccatcaagctcttctgcttgtgcctctcatgatctcctc

SEQ ID NO: 33256 - DNA, 80 bp, synthetic construct
  source 1..80: mol_type = other DNA
acagtgtcttgggaaattccctatctacactataccagacaagctaggcccttggagtcccatcgacatacatcatctca

SEQ ID NO: 33257 - DNA, 80 bp, synthetic construct
  source 1..80: mol_type = other DNA
acataagacgtactaatgttgaagggaattgggctctaactgggggtatggagttgacaagggatcctaccgtcgcggag

SEQ ID NO: 33258 - DNA, 80 bp, synthetic construct
  source 1..80: mol_type = other DNA
aagaagcaagacttgggacatcttgtgacatctttaccaacagcaaagggaagagagcatctaagggaggcaagatctgt

SEQ ID NO: 33259 - DNA, 80 bp, synthetic construct
  source 1..80: mol_type = other DNA
gggttcgtggatgaaaggggattgtataaatctctgaaaggagcatgcaagcttaagctatgcggagtttctggacttag

SEQ ID NO: 33260 - DNA, 80 bp, synthetic construct
  source 1..80: mol_type = other DNA
gatggaacctgggtctcgattcagattccagatgagataaaatggtgcccttccgatcaattggtgaatctacatgactt

SEQ ID NO: 33261 - DNA, 80 bp, synthetic construct
  source 1..80: mol_type = other DNA
tcactcagatgagatagagcatctcgttgtagaggagttggttaagaagagggaagaatgtctggacgcattggagtcca

SEQ ID NO: 33262 - DNA, 80 bp, synthetic construct
  source 1..80: mol_type = other DNA
cgggagtgtcttgatccctgagatgcaatcatccctactccaacaacatatggagctgttggagtcctctgtaatcccct

SEQ ID NO: 33263 - DNA, 80 bp, synthetic construct
  source 1..80: mol_type = other DNA
taatgcatcccttggcagacccatcaacagtcttcaaggacgatgatgaagcagaaaacttcgttgaggttcacctgccg

SEQ ID NO: 33264 - DNA, 80 bp, synthetic construct
  source 1..80: mol_type = other DNA
cggatattcacaaacaggtctcagggattgatcttggtctcccggactggggaaagtacttgttgatgagtacgggtgct

SEQ ID NO: 33265 - DNA, 80 bp, synthetic construct
  source 1..80: mol_type = other DNA
ctggcagcattaatactgacaatcttcttgattctatgctgcaggaaggtcaatagaaaagaatcgatacaacgaagtct

SEQ ID NO: 33266 - DNA, 80 bp, synthetic construct
  source 1..80: mol_type = other DNA
tgaggagtcaggaaggaaagtacctgtaaccccccagaacgggaaagtcatatcttcatgggagctgtacaagaatggag

SEQ ID NO: 33267 - DNA, 80 bp, synthetic construct
  source 1..80: mol_type = other DNA
gtgagaccaagctgtgagggcatgtcatctcctccataacctatgtgcagaggattgcctttctttgagatctgggggaa

SEQ ID NO: 33268 - DNA, 80 bp, synthetic construct
  source 1..80: mol_type = other DNA
tctctcgttttgactgtccttcatggattctgtgcatcagggtgaatttaagagtcaagaaaccttcattaatcatctca

SEQ ID NO: 33269 - DNA, 80 bp, synthetic construct
  source 1..80: mol_type = other DNA
actgatcagacacaatcatgttgactctgataacggatgatgtcttatgacagtgtcactggctaatggtgctctcatcc

SEQ ID NO: 33270 - DNA, 80 bp, synthetic construct
  source 1..80: mol_type = other DNA
cccaagggttgataccaaaggttgtggacaaaccaactgatatttcatataaccctatgcttgtgcccaggcagaggcca

SEQ ID NO: 33271 - DNA, 80 bp, synthetic construct
  source 1..80: mol_type = other DNA
tagcaggtcctcctatattagactaaacaggggtcagttgagggaagtgacctgcctcctatgcaggatacaagcaatag

SEQ ID NO: 33272 - DNA, 80 bp, synthetic construct
  source 1..80: mol_type = other DNA
gtcataatcatcttacatcctgataaggtgtgcttgactacaacgggctgggccatccaagcctctcagtcaagaaaaaa

SEQ ID NO: 33273 - DNA, 80 bp, synthetic construct
  source 1..80: mol_type = other DNA
actgtggaacggaggagtaattaacaacacttctcatcttgagaactgcatcattatgattgatccaggggatgtttatg

SEQ ID NO: 33274 - DNA, 80 bp, synthetic construct
  source 1..80: mol_type = other DNA
caacctcaactcccctctaatagaggaccccgccaaattgatgttggaatggttgaaaacaggaaataggcctcccagga

SEQ ID NO: 33275 - DNA, 80 bp, synthetic construct
  source 1..80: mol_type = other DNA
taactctgacagacaattgctctagatcttataaggtcttgaaagattacttcaagaaagtggatctcgggtctctcaag

SEQ ID NO: 33276 - DNA, 80 bp, synthetic construct
  source 1..80: mol_type = other DNA
aggtgggcggagctgcagcacaatctatgatttctctttggatctacggtgcccactctgagtcaaacaggagccggaag

SEQ ID NO: 33277 - DNA, 80 bp, synthetic construct
  source 1..80: mol_type = other DNA
tgtataactgacttggctcaattttattctaagtcttcccccatagaaaaactgttaaactgcacactcgggaacagagg

SEQ ID NO: 33278 - DNA, 80 bp, synthetic construct
  source 1..80: mol_type = other DNA
ccatcttagcactatggaaggatttaacctcagcagacattgggaaggacctggtcaagtttaaagatcaaatatgggga

SEQ ID NO: 33279 - DNA, 80 bp, synthetic construct
  source 1..80: mol_type = other DNA
ttggtgattgtgaccaaggattttgtgtactcccaacgctctggctgtctctttgatagaaactatacactcatgctgaa

SEQ ID NO: 33280 - DNA, 80 bp, synthetic construct
  source 1..80: mol_type = other DNA
agatctttttttgtctcggttcaactctctaatgattcttctctctcctccggagcccaggtattcagacgatctgatat

SEQ ID NO: 33281 - DNA, 80 bp, synthetic construct
  source 1..80: mol_type = other DNA
ctcagctgtgtcaactgtatatcgcaggagatcatgtcttgtccatgtgcgggaactctggttatgaagtcatcaaaata

SEQ ID NO: 33282 - DNA, 80 bp, synthetic construct
  source 1..80: mol_type = other DNA
attcacggctcctgtcgagagaccaccccctgattccttacataaaaacccaaacatggcctcccaaacatatagtagat

SEQ ID NO: 33283 - DNA, 80 bp, synthetic construct
  source 1..80: mol_type = other DNA
ggctagcatcatggttatcagagaacagaggagggccggtccccagcgagaaggtcatcatcacggctctctccaaacct

SEQ ID NO: 33284 - DNA, 80 bp, synthetic construct
  source 1..80: mol_type = other DNA
ggacatgtcaaacggcccgacgtgctggaacggccaagatggcgggctagagggcctgagacagaaaggctggagtctag

SEQ ID NO: 33285 - DNA, 80 bp, synthetic construct
  source 1..80: mol_type = other DNA
ctatttcctgcacttgtggagcaacaggaggggagaatcctcgaatatctgtgtccgtgctcccgtcttttgatcagtca

SEQ ID NO: 33286 - DNA, 80 bp, synthetic construct
  source 1..80: mol_type = other DNA
gcacagactttgattaggaatataatggctctaacaggcccagactttcctctggaagaagcccctgtcttcaagagaac

SEQ ID NO: 33287 - DNA, 80 bp, synthetic construct
  source 1..80: mol_type = other DNA
gatgtaacaaatgcataaggcccattgatgatgttacccttgaaacttctcaagtcttcgagttcccggatgtttcaaga

SEQ ID NO: 33288 - DNA, 80 bp, synthetic construct
  source 1..80: mol_type = other DNA
agaatatctagaatggtttctggagctgtgcctcattttcgaaaactacctgatgttcgtttaagaccaggtgacttcga

SEQ ID NO: 33289 - DNA, 80 bp, synthetic construct
  source 1..80: mol_type = other DNA
aatctctaagtgggaaggagaaatcgcgccatatagggtcggcccaagggctcttgtattcaatcttagttgcaattcac

SEQ ID NO: 33290 - DNA, 80 bp, synthetic construct
  source 1..80: mol_type = other DNA
attagatccagatcatctcttttagattatagctgcttataaactgagcactctcgaaggaatgtgaagactaagactct

SEQ ID NO: 33291 - DNA, 80 bp, synthetic construct
  source 1..80: mol_type = other DNA
tgcgccatgcagcgagaactatgacaggaggttacagccccagtaagaagatgtcgcgcaaagcagggtgttcagagtgg

SEQ ID NO: 33292 - DNA, 80 bp, synthetic construct
  source 1..80: mol_type = other DNA
gtcgggagagagattcctcaagatatggtctcaagcagttgaggaaatcatatcctatgtcacggccaacttccccagtc

SEQ ID NO: 33293 - DNA, 80 bp, synthetic construct
  source 1..80: mol_type = other DNA
ggattcgtggatgaaagaggattgtataagtctctaaaaggagcatgtaggcttaagttgtgcggagtttctggacttag

SEQ ID NO: 33294 - DNA, 80 bp, synthetic construct
  source 1..80: mol_type = other DNA
tgggcgacaggggcccattataagctcaaacctattctggatgacctcaatgtatttccgtccttgtgtcttgtggtcgg

SEQ ID NO: 33295 - DNA, 80 bp, synthetic construct
  source 1..80: mol_type = other DNA
ctggatgacctcaatgtatttccgtccttgtgtcttgtggtcggggacgggtcaggggggatatcaagagcagtactaaa

SEQ ID NO: 33296 - DNA, 80 bp, synthetic construct
  source 1..80: mol_type = other DNA
catgtttccggatgccaagctcgtgttcaacagtttattggaagtgaacgacttaatggcatcaggaacacacccattgc

SEQ ID NO: 33297 - DNA, 80 bp, synthetic construct
  source 1..80: mol_type = other DNA
tgatgcagaggtcacagacattgcatcaatcaaccgaataaccctattaatgtccgactttgtgatgtccatagatggtc

SEQ ID NO: 33298 - DNA, 80 bp, synthetic construct
  source 1..80: mol_type = other DNA
ctctctatctggtttttaaaacttatggcaccatgcttgtaaatccggactacagagcgattcaacatctatccagagcg

SEQ ID NO: 33299 - DNA, 80 bp, synthetic construct
  source 1..80: mol_type = other DNA
gaagatctgcccaaggaggtagagaagcaccttcgagggtacaatagatggatcaccctcgatgacattagatccagatc

SEQ ID NO: 33300 - DNA, 80 bp, synthetic construct
  source 1..80: mol_type = other DNA
atctcttttagattatagctgcttataaactgagcactctcgaaggaatgtgaagactaagactctcggacgatgcaccc

SEQ ID NO: 33301 - DNA, 80 bp, synthetic construct
  source 1..80: mol_type = other DNA
taagactctcggacgatgcaccctgaaaaaaacgagatcttgattcataacctctggttgcttgattatttttctgtctt

SEQ ID NO: 33302 - DNA, 80 bp, synthetic construct
  source 1..80: mol_type = other DNA
gcggtttacactaggatcatgatgaatgggggtagactgaagagatcacacataaggagatatgtctcggtaagttccaa

SEQ ID NO: 33303 - DNA, 80 bp, synthetic construct
  source 1..80: mol_type = other DNA
atggatgaggcggaggaccccgctctcttgttccagtcgtacctggataatgttggagttcaaatggtcagacgaatgag

SEQ ID NO: 33304 - DNA, 80 bp, synthetic construct
  source 1..80: mol_type = other DNA
ccagtccgtcagggaagccctcaaaagacaaagccacccagactgccacccgggaactcaagaaggagacagtatccgcc

SEQ ID NO: 33305 - DNA, 80 bp, synthetic construct
  source 1..80: mol_type = other DNA
ccttctcagagagagaaccaaccatccaaaaccaacatggcggctcaaaccgcctccggtccttccgctctagagtggtc

SEQ ID NO: 33306 - DNA, 80 bp, synthetic construct
  source 1..80: mol_type = other DNA
tgccgccaacgaagaggacgacccatctgtagatgctgaaatcgctcatcagattgctgagagtttctccaagaagtaca

SEQ ID NO: 33307 - DNA, 80 bp, synthetic construct
  source 1..80: mol_type = other DNA
aatgtaccaagcgtaatccgcttggcccacgatgggtccagactccctctgagatgtgtgctgggatgggttgctctagc

SEQ ID NO: 33308 - DNA, 80 bp, synthetic construct
  source 1..80: mol_type = other DNA
tcctctgatcacactctccatcttaattacactatgcaatcaaatctgacttgctccaaatccgacatgaaaaaaacaga

SEQ ID NO: 33309 - DNA, 80 bp, synthetic construct
  source 1..80: mol_type = other DNA
aaaactgttaacatccctcaaaagacctaaggaaagatgatccctcaggctcttctactggtgcctcttgtgatctcctc

SEQ ID NO: 33310 - DNA, 80 bp, synthetic construct
  source 1..80: mol_type = other DNA
ccaaagagtcgcttattatcatatctccaagtgtggctgacctggatccctacgacaaatccctgcggtcaagaattttc

SEQ ID NO: 33311 - DNA, 80 bp, synthetic construct
  source 1..80: mol_type = other DNA
acataagacgaactaacgtggaagggaattgggctctaacagggggtatggagttgacaagggatcccactgtttcggaa

SEQ ID NO: 33312 - DNA, 80 bp, synthetic construct
  source 1..80: mol_type = other DNA
cctggagggaagtgcttgggaataacagtctcttctacctactgctcaactaaccatgattacactatctggatgccaga

SEQ ID NO: 33313 - DNA, 80 bp, synthetic construct
  source 1..80: mol_type = other DNA
acttatggatggaacctgggtcgcgattcagacgtcagaggagaccaaatggtgcccttctgatcaattggtgaatctac

SEQ ID NO: 33314 - DNA, 80 bp, synthetic construct
  source 1..80: mol_type = other DNA
atgactttcactcagatgagatagaacatcttgtcgtggaggagttggtcaagaagagggaagaatgtctggacacactg

SEQ ID NO: 33315 - DNA, 80 bp, synthetic construct
  source 1..80: mol_type = other DNA
gtgtctaaaagtcggagggagatgtcatcctcatgtggacggagtgtttttcaatggtataattcttggtccagacggga

SEQ ID NO: 33316 - DNA, 80 bp, synthetic construct
  source 1..80: mol_type = other DNA
catcccttggcagacccatcaactgtcttcaaggaaggcgatgaggcagagaactttgttgaggttcacttgccggatat

SEQ ID NO: 33317 - DNA, 80 bp, synthetic construct
  source 1..80: mol_type = other DNA
tcacaaacaggtctccgggattgaccttggtctcccaaactgggggaaatatttgctgatgagtgcaggtgctctggcag

SEQ ID NO: 33318 - DNA, 80 bp, synthetic construct
  source 1..80: mol_type = other DNA
cactaattctgacaatcttcttaattacctgttgcagaagggtcaatagaacagaatcaataaagcgaggtcctgaggag

SEQ ID NO: 33319 - DNA, 80 bp, synthetic construct
  source 1..80: mol_type = other DNA
tcaagaaggaaagtatctgtaactccccaaaacgggaaagtcatatcttcatgggagctgtacaaaaatggaggagagac

SEQ ID NO: 33320 - DNA, 80 bp, synthetic construct
  source 1..80: mol_type = other DNA
caagctgtgagggcatgtcatctcctccatagcctgtgctcaggagattgcctctcttctagatttgggggaatttctcg

SEQ ID NO: 33321 - DNA, 80 bp, synthetic construct
  source 1..80: mol_type = other DNA
ttttaattgtccttcatggattctgtgcaccatgacaaattcaagagtcaagagactttcattaatcatctcaactgatc

SEQ ID NO: 33322 - DNA, 80 bp, synthetic construct
  source 1..80: mol_type = other DNA
agacacagtcatgtaatttatgataatgtatgatgttttctgacagtatcactgaccaatggtgctctcatcccctaagg

SEQ ID NO: 33323 - DNA, 80 bp, synthetic construct
  source 1..80: mol_type = other DNA
attgataccaaaggttgtggacaagccaactgatatttcagatagccctatgcttgagcccgggcaaaagccacagcaag

SEQ ID NO: 33324 - DNA, 80 bp, synthetic construct
  source 1..80: mol_type = other DNA
tccccctacattagaataagtaggggttggttgaggaaaataacttgtttcctatgaaggacacaagcaataggtcataa

SEQ ID NO: 33325 - DNA, 80 bp, synthetic construct
  source 1..80: mol_type = other DNA
tgcggaatggaggagtaatcagcaacacttctcatcttgagaactgcatcatgatgattgatccaggagatgtttatgat

SEQ ID NO: 33326 - DNA, 80 bp, synthetic construct
  source 1..80: mol_type = other DNA
gaccccatcgatcctattgagtcagagactgagacaagagggaaccctaccattcccaacatcttaagaaactctgacta

SEQ ID NO: 33327 - DNA, 80 bp, synthetic construct
  source 1..80: mol_type = other DNA
tgtatggtcgatttggctcagttctattccaagtcttcccccatagaaaaactgttaaactgcacactcgggaatagagg

SEQ ID NO: 33328 - DNA, 80 bp, synthetic construct
  source 1..80: mol_type = other DNA
gcttagaatccccccaaatggggtcctaagttgtcttgaaagggttgattacgatggggcatttgggcgatatctggcta

SEQ ID NO: 33329 - DNA, 80 bp, synthetic construct
  source 1..80: mol_type = other DNA
atatactcctcttatctgttctttcatgtgatcaccctctatatgaacgccttggattgggatgaggagaggactattct

SEQ ID NO: 33330 - DNA, 80 bp, synthetic construct
  source 1..80: mol_type = other DNA
agcactatggagggatttaacctcaacagacgttggaaaggacttggtcaagtttaaagatcaaatatggggatcgatga

SEQ ID NO: 33331 - DNA, 80 bp, synthetic construct
  source 1..80: mol_type = other DNA
ttgtgaccaaggattttgtgtactcccaacgctctggctgtctctttgatagaaactatacactcatgctaaaggatctc

SEQ ID NO: 33332 - DNA, 80 bp, synthetic construct
  source 1..80: mol_type = other DNA
ttcttgtctcggttcaactctctaatgattcttctttctcctccagaacccaggtattcagatgacctgatatctcagct

SEQ ID NO: 33333 - DNA, 80 bp, synthetic construct
  source 1..80: mol_type = other DNA
aagtggtatctcgattcacgactcctttcgaaagaccaccccctgattccttatatcaagacccaaacatggcctcccaa

SEQ ID NO: 33334 - DNA, 80 bp, synthetic construct
  source 1..80: mol_type = other DNA
gtctggacatgtcaaacggcccgacatgctggaacggccaggatggcgggctagagggtttgcgacagaaaggctggagt

SEQ ID NO: 33335 - DNA, 80 bp, synthetic construct
  source 1..80: mol_type = other DNA
cttgctattcagccctatcttgaaaggtagagtttacaagatcctgagtgccgaaggggacaattttcttctagccatgt

SEQ ID NO: 33336 - DNA, 80 bp, synthetic construct
  source 1..80: mol_type = other DNA
caatttcttgcgcttgtggaacagccgaaggagagaatcctcggatatcagtgtccgtgcttccatcttttgatccgtca

SEQ ID NO: 33337 - DNA, 80 bp, synthetic construct
  source 1..80: mol_type = other DNA
caagaaactcgaacctggcccaaactttgattagaaacataatggctctgacaggcccggactttcctctggaagaagcc

SEQ ID NO: 33338 - DNA, 80 bp, synthetic construct
  source 1..80: mol_type = other DNA
caacaccactgataagatgaactttctatgcaagatagtaaagaactgtagagatgaagacactcaaaagccctccttcg

SEQ ID NO: 33339 - DNA, 80 bp, synthetic construct
  source 1..80: mol_type = other DNA
tcatctcacattctgataaggtgtgcttcactacaaagggctgggccatccaggctgttctgtcaagaaaaaaactgcgg

SEQ ID NO: 33340 - DNA, 80 bp, synthetic construct
  source 1..80: mol_type = other DNA
tcaactcccctctaatagaggattcagctaaactaatgttggaatggttgaaaacaggaaataggcctccccggatgact

SEQ ID NO: 33341 - DNA, 80 bp, synthetic construct
  source 1..80: mol_type = other DNA
ctaggataatctatttagacccttcattgggaggggtatcgggaatgtctcttggaaggttccacatacgtcaattctca

SEQ ID NO: 33342 - DNA, 80 bp, synthetic construct
  source 1..80: mol_type = other DNA
ttatacgatatcccttgaaaaaacaagatcttgactctgatcctctggttgcttgattgtttttttatctttattgtttt

SEQ ID NO: 33343 - DNA, 80 bp, synthetic construct
  source 1..80: mol_type = other DNA
ccagctaactaagcttttaaactctgtcccgacagacaatagaatctgagatgctctgaattcgacatgaaaaaacaggc

SEQ ID NO: 33344 - DNA, 80 bp, synthetic construct
  source 1..80: mol_type = other DNA
gacagtgtcatttgcaaagcaaaaatgtaacacccctacaatggatgccgacaagattgtattcaaagtcaataatcagg

SEQ ID NO: 33345 - DNA, 80 bp, synthetic construct
  source 1..80: mol_type = other DNA
acttttgtgtgatgtatcttgaaaaaaacaagatcttgaatctgagcctctggctgtttgattgtttttttcatctttat

SEQ ID NO: 33346 - DNA, 80 bp, synthetic construct
  source 1..80: mol_type = other DNA
accctcgaggatatccgatctagatcatccctactagactacagttgtttgtaagccggacattaatgaaagcctgtaca

SEQ ID NO: 33347 - DNA, 80 bp, synthetic construct
  source 1..80: mol_type = other DNA
atgctaaaattcttgtatgatgcatcttgaaaaaaacaagatcttgaatccgaacctctggttgtttgattgtttttttt

SEQ ID NO: 33348 - DNA, 80 bp, synthetic construct
  source 1..80: mol_type = other DNA
caaagagaaagccaaccttcaaaagccggaatggtggctcaagttgcctctggccctccatcccttgaatggtctgccac

SEQ ID NO: 33349 - DNA, 80 bp, synthetic construct
  source 1..80: mol_type = other DNA
catgctaaccgagtcttcgaattcattccctctagataatgaaaactgagatgtcatggagtcgatatgaaaaaaacagg

SEQ ID NO: 33350 - DNA, 80 bp, synthetic construct
  source 1..80: mol_type = other DNA
gtttgccccttgatagcggattcaacatgaattaactaagaaaggcgatctgcctcccatgaaggacataagcaatagtt

SEQ ID NO: 33351 - DNA, 80 bp, synthetic construct
  source 1..80: mol_type = other DNA
ttcaacgggaaagaaagttgagtgttgttcaacgtagcctcgtttgcatcatttgtgatattgcgacttttgaatttaac

SEQ ID NO: 33352 - DNA, 80 bp, synthetic construct
  source 1..80: mol_type = other DNA
taaagctgtatgatgtgaccgagtgaactggaaaaaacgctggccaacatcaaagctacgcgaatgcagaaaaacctgac

SEQ ID NO: 33353 - DNA, 80 bp, synthetic construct
  source 1..80: mol_type = other DNA
ctggtttccgtttggctagcggttagctccttttaatgtatggtattgaatataccacagttttaacctttttgatatca

SEQ ID NO: 33354 - DNA, 80 bp, synthetic construct
  source 1..80: mol_type = other DNA
aagcagaaagtgtcagttgtaaagcaaaaatgtaacacccctacaatggatgccgacaagattgtattcaaagtcaataa

SEQ ID NO: 33355 - DNA, 80 bp, synthetic construct
  source 1..80: mol_type = other DNA
aaatctagatcatctctattagactacagctgcttgtaaaccgggtgtccccagaagcctgcacatactaagacttttgt

SEQ ID NO: 33356 - DNA, 80 bp, synthetic construct
  source 1..80: mol_type = other DNA
ttcacttggatgatggaaaaccgtccaacctcggtgagatgtccgagacgggggaaggcaagtatcgggaggactttcag

SEQ ID NO: 33357 - DNA, 80 bp, synthetic construct
  source 1..80: mol_type = other DNA
aatccgagactagggacgtcctgcaacatttttgccaatagtaaggggaagagagcatccaaaggtggtaagacctgcgg

SEQ ID NO: 33358 - DNA, 80 bp, synthetic construct
  source 1..80: mol_type = other DNA
tctgagttcaacaatcctccttgaactccatgcaacagggtagattcaagagtcatgagactttcattaatcatttcagt

SEQ ID NO: 33359 - DNA, 80 bp, synthetic construct
  source 1..80: mol_type = other DNA
catggcggacgtgtgacatcaccgttcgcctttcttggatcccttgttactccaccgtagtgagagataaacaacccaga

SEQ ID NO: 33360 - DNA, 80 bp, synthetic construct
  source 1..80: mol_type = other DNA
agtgttactgagcctgggagcctccgcaaaagcttacgagcacacagccacaattccgaatgtggtggggttcccgtata

SEQ ID NO: 33361 - DNA, 80 bp, synthetic construct
  source 1..80: mol_type = other DNA
aggctcacattgaaaggaatggcttctcgcccatgactctgcagcttgaagtggtggagacaagcttggaacccacactt

SEQ ID NO: 33362 - DNA, 80 bp, synthetic construct
  source 1..80: mol_type = other DNA
aacctggagtacattacctgcgaatacaagacggtggtcccttcgccattcatcaaatgttgcggaacatcagaatgctc

SEQ ID NO: 33363 - DNA, 80 bp, synthetic construct
  source 1..80: mol_type = other DNA
atccaaggagcagccagactaccaatgcaaggtgtacacgggtgtatacccattcatgtggggtggagcctactgtttct

SEQ ID NO: 33364 - DNA, 80 bp, synthetic construct
  source 1..80: mol_type = other DNA
gcgactccgagaacacgcagctcagcgaggcctatgtcgacaggtcagacgtttgcaaacatgatcacgcatcggcctac

SEQ ID NO: 33365 - DNA, 80 bp, synthetic construct
  source 1..80: mol_type = other DNA
gcgcggggagagagtatcattcccggtatgcacttatgtgcctgcaaccatttgcgatcagatgacaggaatcctggcta

SEQ ID NO: 33366 - DNA, 80 bp, synthetic construct
  source 1..80: mol_type = other DNA
aaggcacacacggcctctctaaaagcaacaatcaggatcagttatggcaccatcaaccagaccaccgaggccttcgttaa

SEQ ID NO: 33367 - DNA, 80 bp, synthetic construct
  source 1..80: mol_type = other DNA
tggtgaacacgcggtcaacgtgggcggaagcaagttcatctttggaccgatctcaacagcttggtcaccgttcgacaata

SEQ ID NO: 33368 - DNA, 80 bp, synthetic construct
  source 1..80: mol_type = other DNA
aaattgtcgtgtataaagatgatgtctacaaccaggacttcccaccctacggatcaggccagccgggtagattcggagac

SEQ ID NO: 33369 - DNA, 80 bp, synthetic construct
  source 1..80: mol_type = other DNA
attcagagcaggacagtggagagcaaagacttgtatgccaacacggccctaaaactctcaagaccatcacccggggttgt

SEQ ID NO: 33370 - DNA, 80 bp, synthetic construct
  source 1..80: mol_type = other DNA
gcatgtgccatacacgcagacaccatccggatttaaatattggctgaaggagaaaggatcttcattgaatacaaaggccc

SEQ ID NO: 33371 - DNA, 80 bp, synthetic construct
  source 1..80: mol_type = other DNA
cttttggctgcaagataaagaccaatccagtcagagccatggattgtgcagttggcagtatacctgtgtcgatggacata

SEQ ID NO: 33372 - DNA, 80 bp, synthetic construct
  source 1..80: mol_type = other DNA
cctgacagtgcattcacacgagtggtagatgccccggctgtaacagacctgagctgccaggtagtggtctgtacacactc

SEQ ID NO: 33373 - DNA, 80 bp, synthetic construct
  source 1..80: mol_type = other DNA
ctccgatttcggaggagttgccacattgtcttacaaaacggacaaacccggcaagtgcgctgtccactcacattccaacg

SEQ ID NO: 33374 - DNA, 80 bp, synthetic construct
  source 1..80: mol_type = other DNA
tcgcaacgttgcaagaggcgacggtggatgtcaaggaggatggcaaggtcacagtgcacttttccacggcgtccgcctcc

SEQ ID NO: 33375 - DNA, 80 bp, synthetic construct
  source 1..80: mol_type = other DNA
ccggccttcaaagtgtccgtctgtgacgcaaaaacaacgtgcacggcggcgtgcgagcctccaaaagaccacatcgtccc

SEQ ID NO: 33376 - DNA, 80 bp, synthetic construct
  source 1..80: mol_type = other DNA
ccgacgtcacacccgaagatgcgcagaaactcctggtggggttgaaccaacgtatagttgtgaacggcagaacccaaaga

SEQ ID NO: 33377 - DNA, 80 bp, synthetic construct
  source 1..80: mol_type = other DNA
ttatggggcgagccataacaaccaggtctttccggacatgtcaggaactgcgatgacgtgggtgcagaggctggccagtg

SEQ ID NO: 33378 - DNA, 80 bp, synthetic construct
  source 1..80: mol_type = other DNA
ggttaggtgggctggctctcatcgcggtggttgtgctggtcttggtaacctgcataacaatgcgtcggtaagctttagtt

SEQ ID NO: 33379 - DNA, 80 bp, synthetic construct
  source 1..80: mol_type = other DNA
caaagggccatataaacccctgaatagtaacaaaatataaaaattacaaaatatgtagttcaaagggctatactacccct

SEQ ID NO: 33380 - DNA, 80 bp, synthetic construct
  source 1..80: mol_type = other DNA
gattagtaacaaaatagaaaaccacaaaatatgtagttaagtattataagatgtgtagttcaaagggctatatcacccct

SEQ ID NO: 33381 - DNA, 80 bp, synthetic construct
  source 1..80: mol_type = other DNA
gattagtaacaaaatataaaaacaaaaatatgtagttaagtactaaccaacaagtagacaaatagatgctaaccatatat

SEQ ID NO: 33382 - DNA, 80 bp, synthetic construct
  source 1..80: mol_type = other DNA
ataaccagctatagtatactatatttagctaagcagttgcagtagtaagaatgtagttcaaagggctatacaacccctga

SEQ ID NO: 33383 - DNA, 80 bp, synthetic construct
  source 1..80: mol_type = other DNA
atagtaacaaaatacaaaaatactaataaaaatttaaaaatcactagaaatccaatcattaaattattaattggctagcc

SEQ ID NO: 33384 - DNA, 80 bp, synthetic construct
  source 1..80: mol_type = other DNA
gaactctaaagagatgtaggcgtccgaactctgcggagatgtaggactaaattctgccgaaccccataacaccggggacg

SEQ ID NO: 33385 - DNA, 80 bp, synthetic construct
  source 1..80: mol_type = other DNA
gcggagatgtaggactaaattctgccgaaccccataacaccggggacgtaggcgtctaatttgtttttttaatattttac

SEQ ID NO: 33386 - DNA, 80 bp, synthetic construct
  source 1..80: mol_type = other DNA
aataccaacacaatgaaaaactacctattgccggtagtggcccaagctttcagcaagtgggcacgagaagcaaaagcaga

SEQ ID NO: 33387 - DNA, 80 bp, synthetic construct
  source 1..80: mol_type = other DNA
catggaggatgagaaacctctgggaaccagagaaagaaccctgacgtgctgttgcctgtgggcattcaagagccacaaga

SEQ ID NO: 33388 - DNA, 80 bp, synthetic construct
  source 1..80: mol_type = other DNA
tacccaaactatagtcaaggtgccatctacttttgactcgtttgtgattccaagcctgtggtcatccagcctatccatag

SEQ ID NO: 33389 - DNA, 80 bp, synthetic construct
  source 1..80: mol_type = other DNA
gcctacggcaaagaataaaactgctattaggcccaaaactctcgcgggacctcccgtactctggagaccgaaacgaagcg

SEQ ID NO: 33390 - DNA, 80 bp, synthetic construct
  source 1..80: mol_type = other DNA
cgagaagcagagaaggaagccgaagagaccaaggaagcagaattgacacgggaagcactgccaccattggtgggaagcaa

SEQ ID NO: 33391 - DNA, 80 bp, synthetic construct
  source 1..80: mol_type = other DNA
aatcacagcaggtcacacccaatgaccatgctaatgccagagctttttcgcatctggccacaaagttaattgaacaagag

SEQ ID NO: 33392 - DNA, 80 bp, synthetic construct
  source 1..80: mol_type = other DNA
ctgcgctgatgacgtcgatcgggtagatgtggaagagctgacgtaccgcgccggagcaggggtagtggagacacccagga

SEQ ID NO: 33393 - DNA, 80 bp, synthetic construct
  source 1..80: mol_type = other DNA
atgcgctcagagtgacaccacaagagcgcgatcagctgatcggcgcgtacctgatcttgtctccgcaagcagtactgaag

SEQ ID NO: 33394 - DNA, 80 bp, synthetic construct
  source 1..80: mol_type = other DNA
agtgaaaaactcacaccgatacatccactggctgagcaagtgacaatcatgacgcactctggaagatctggcagataccc

SEQ ID NO: 33395 - DNA, 80 bp, synthetic construct
  source 1..80: mol_type = other DNA
ggttgaccgctacgacggacgggtgttggtcccgacgggcgcagcgatccccgtcagcgaatttcaagcactcagtgaga

SEQ ID NO: 33396 - DNA, 80 bp, synthetic construct
  source 1..80: mol_type = other DNA
gtgctactatggtctacaacgaacgtgagttcatcaatcgcaagttgcaccatatagcactctacggccccgccctaaac

SEQ ID NO: 33397 - DNA, 80 bp, synthetic construct
  source 1..80: mol_type = other DNA
actgaggaggagaactacgaaaaagtaagggcagagagagccgaagctgaatacgtgtttgacgttgacaagaggatgtg

SEQ ID NO: 33398 - DNA, 80 bp, synthetic construct
  source 1..80: mol_type = other DNA
cgtgaagagagaagaagcatcaggccttgtactggttggtgacttaatcaacccacccttccatgagttcgcgtatgaag

SEQ ID NO: 33399 - DNA, 80 bp, synthetic construct
  source 1..80: mol_type = other DNA
gactgaagatacggcccgcaacgcctttccaaaccacggtcattggcgtcttcggggtacctggttcgggcaagtcagcc

SEQ ID NO: 33400 - DNA, 80 bp, synthetic construct
  source 1..80: mol_type = other DNA
ataatcaagagtgtggtgactacgagggacctggtcgccagtgggaagaaggagaactgccaggagatagttaatgatgt

SEQ ID NO: 33401 - DNA, 80 bp, synthetic construct
  source 1..80: mol_type = other DNA
caaaaagcagagaggactggatgtaacagccaggactgttgactctatcctgttgaacgggtgcagaagaggagtagaga

SEQ ID NO: 33402 - DNA, 80 bp, synthetic construct
  source 1..80: mol_type = other DNA
gttccaaccaacatcaccatcctggatgtgggcagcgcgcccgcaaggaggttgatgtctgatcacagctaccactgcat

SEQ ID NO: 33403 - DNA, 80 bp, synthetic construct
  source 1..80: mol_type = other DNA
acctatacgtggacgaagcatttgcctgtcattcaggtacactgttggctcttattgccatggtgaaaccaactggcaag

SEQ ID NO: 33404 - DNA, 80 bp, synthetic construct
  source 1..80: mol_type = other DNA
gtgatcctatgcggagacccaaaacagtgtggattttttaacctgatgcaactgaaggtgaacttcaaccacgatatctg

SEQ ID NO: 33405 - DNA, 80 bp, synthetic construct
  source 1..80: mol_type = other DNA
cacacaagtgctccacaaaagcatatccagaagatgcaccctcccgatcacggctatcgtctcgaccctacactatcagg

SEQ ID NO: 33406 - DNA, 80 bp, synthetic construct
  source 1..80: mol_type = other DNA
gtaagatgagaaccacgaacttatgtagtgcacccatccagatagacacaacaggtaccactaaaccagccaaaggagac

SEQ ID NO: 33407 - DNA, 80 bp, synthetic construct
  source 1..80: mol_type = other DNA
atcgtgttaacatgcttccgcggttgggtaaagcaactgcagatagactaccgtggacacgaagtcatgacagcagctgc

SEQ ID NO: 33408 - DNA, 80 bp, synthetic construct
  source 1..80: mol_type = other DNA
atgaaaacccgctttatgccccttcatcagaacatgtcaacgtattgctgactagaactgaaaaccggctggtgtggaaa

SEQ ID NO: 33409 - DNA, 80 bp, synthetic construct
  source 1..80: mol_type = other DNA
acactgtcgggagacccgtggataaaggtgttaaccaatatccccaagggcgatttcagcgctacgttggaggagtggca

SEQ ID NO: 33410 - DNA, 80 bp, synthetic construct
  source 1..80: mol_type = other DNA
agaggagcatgacaacatcatgaacgcccttcgcgagaggtcgacagcagtagacccgttccagaacaaagccaaagtct

SEQ ID NO: 33411 - DNA, 80 bp, synthetic construct
  source 1..80: mol_type = other DNA
gctgggcaaagtgcctcgtgcaggtcctagaaacggctgggatacgcatgacggcagaggagtgggatacagtgttggct

SEQ ID NO: 33412 - DNA, 80 bp, synthetic construct
  source 1..80: mol_type = other DNA
ttccgcgaagacagggcgtactcacccgaagtggctctgaacgagatctgtaccaagtattacggcgttgacttagacag

SEQ ID NO: 33413 - DNA, 80 bp, synthetic construct
  source 1..80: mol_type = other DNA
ttgtcccatgaagagtgcggaagacccagagagattagcgaactatgcccggaaactggcaaaagcagcaggggaagtgc

SEQ ID NO: 33414 - DNA, 80 bp, synthetic construct
  source 1..80: mol_type = other DNA
cggattgttctccgcccaatcggtctcattgtactatgaaaacaaccactgggacaatagaccgggcggccggatgtatg

SEQ ID NO: 33415 - DNA, 80 bp, synthetic construct
  source 1..80: mol_type = other DNA
gattcaaccgcgaagtcgcccgtaagtttgagcaacgctacccattcctgagaggcaagatggactcggggctacaagtt

SEQ ID NO: 33416 - DNA, 80 bp, synthetic construct
  source 1..80: mol_type = other DNA
aatgttccagagagaaaagtacagccattcaatgcggaatgtaatatattaccatcaaacaggcgacttccgcacgccct

SEQ ID NO: 33417 - DNA, 80 bp, synthetic construct
  source 1..80: mol_type = other DNA
cgtcaccagctaccagcagtgccagggcgagagggtagaatggcttttgaagaagcttcccggataccatttattgctgg

SEQ ID NO: 33418 - DNA, 80 bp, synthetic construct
  source 1..80: mol_type = other DNA
taagcgagtacaatctggcgctgccccataaaagagtcttttggattgcaccaccccatgtgtctggtgcagatcgtatt

SEQ ID NO: 33419 - DNA, 80 bp, synthetic construct
  source 1..80: mol_type = other DNA
tatgatcttgacctaggattacccctgaatgcaggccgttacgacttggtatttgtgaacatacacactgagtacaggac

SEQ ID NO: 33420 - DNA, 80 bp, synthetic construct
  source 1..80: mol_type = other DNA
gcaccactaccaacagtgcgtcgaccactctatgaagttacagatgttgggcggtgactccttacatctattgaaaccag

SEQ ID NO: 33421 - DNA, 80 bp, synthetic construct
  source 1..80: mol_type = other DNA
gcggctcactgcttatccgtgcttacgggtacgccgacagagtcagcgaaatggtggtcactgcattagctaggaagttt

SEQ ID NO: 33422 - DNA, 80 bp, synthetic construct
  source 1..80: mol_type = other DNA
tccgccttcagagtcttgagaccagcatgtgtaacaagtaacactgaagtctttctgttgttcaccaattttgataacgg

SEQ ID NO: 33423 - DNA, 80 bp, synthetic construct
  source 1..80: mol_type = other DNA
cagaagggctgtgactcttcaccaggccaatcagaggctcagctccatgtttgcatgcaacgggctacacacagccggat

SEQ ID NO: 33424 - DNA, 80 bp, synthetic construct
  source 1..80: mol_type = other DNA
tagacaaaaatgtgtccggtaagatcacggacctgcaggacgtcatggcaacccccgatctggaatctccaacgttctgt

SEQ ID NO: 33425 - DNA, 80 bp, synthetic construct
  source 1..80: mol_type = other DNA
gcgcaccctcataccgtgtgcgtaggaccgacatttccgggcacgctgaagaggcggttgttaatgccgccaacgcgaag

SEQ ID NO: 33426 - DNA, 80 bp, synthetic construct
  source 1..80: mol_type = other DNA
ggcacagtcggcgatggggtttgcagagcggtggcgagaaaatggccagactccttcaaaggtgccgcgactcccgtggg

SEQ ID NO: 33427 - DNA, 80 bp, synthetic construct
  source 1..80: mol_type = other DNA
tacggctaagttggtacaggccaacggtatgaatgtcatccacgcggtaggcccgaatttctccacggtgaccgaggcag

SEQ ID NO: 33428 - DNA, 80 bp, synthetic construct
  source 1..80: mol_type = other DNA
agggcgacagagagttggccgccgcataccgtgccgtggcgggtattatcaatgctagtaacattaagagtgtagccatc

SEQ ID NO: 33429 - DNA, 80 bp, synthetic construct
  source 1..80: mol_type = other DNA
cctctgttgtcgacgggagtgttctccggaggtaaagatagagtcatgcagtcactaaatcacctgtttaccgcaatgga

SEQ ID NO: 33430 - DNA, 80 bp, synthetic construct
  source 1..80: mol_type = other DNA
tccaggaggctatcgatcgccgcaccgccgtggaattggtatctgaagacatctcactcgagtctgacttgatacgggta

SEQ ID NO: 33431 - DNA, 80 bp, synthetic construct
  source 1..80: mol_type = other DNA
cacccagatagttgcttggtaggcagaaaaggttacagcataacagatgggaagctgcattcatacctggaaggtacccg

SEQ ID NO: 33432 - DNA, 80 bp, synthetic construct
  source 1..80: mol_type = other DNA
ctttcatcagactgcggtggacatggctgagatatctaccttgtggccgaaacttcaggacgcaaacgaacaaatatgct

SEQ ID NO: 33433 - DNA, 80 bp, synthetic construct
  source 1..80: mol_type = other DNA
tgtatgcattgggtgagagtatggacagcatcagaacgaaatgccctgttgaggacgccgattcgtccacgcctccgaaa

SEQ ID NO: 33434 - DNA, 80 bp, synthetic construct
  source 1..80: mol_type = other DNA
ctccacaccgacgagacgtgtcgcactagagctgaagtagctgtgtaccaggacgtgtacgcggtgcacgcaccgacctc

SEQ ID NO: 33435 - DNA, 80 bp, synthetic construct
  source 1..80: mol_type = other DNA
acagttccgtgtctgtgtaggtacgctatgactgctgagagagtggcaagacttcggatgaacaacactaaggccataat

SEQ ID NO: 33436 - DNA, 80 bp, synthetic construct
  source 1..80: mol_type = other DNA
tgtgtgctcctccttccctttaccgaagtacaggattgaaggcgtccagaaggtcaagtgcgaccgagtgctgatttttg

SEQ ID NO: 33437 - DNA, 80 bp, synthetic construct
  source 1..80: mol_type = other DNA
accagacggtgccatctctggttagtccaaggaagtacataccagccgccgcctctacgcacgcagataccgtgagcttg

SEQ ID NO: 33438 - DNA, 80 bp, synthetic construct
  source 1..80: mol_type = other DNA
gattctacagtatcgcacgcagataccgtgagcttggattctacagtatccacaggatccgcgtggtcattcccatctga

SEQ ID NO: 33439 - DNA, 80 bp, synthetic construct
  source 1..80: mol_type = other DNA
ggccacgtatgagaccatggaagtagtagcagaggtgcaccactcggaaccaccagtcccgccaccgcgcaggcgtcgtg

SEQ ID NO: 33440 - DNA, 80 bp, synthetic construct
  source 1..80: mol_type = other DNA
cgcaggtgacgatgcaccaccaggagctgttggaagtctctgacatgcacaccccgattgcggcaagggtcgagatcccc

SEQ ID NO: 33441 - DNA, 80 bp, synthetic construct
  source 1..80: mol_type = other DNA
gtgtacgataccgctgttgtagtggagagagtggcaattccttgcacaagcgagtatgcaaaacccataccagcaccacg

SEQ ID NO: 33442 - DNA, 80 bp, synthetic construct
  source 1..80: mol_type = other DNA
ggcagcaagggtcgtacccgtgccggcaccacgcattcagcgagcgtcgacgtacagagtctctcctacacccacgcctc

SEQ ID NO: 33443 - DNA, 80 bp, synthetic construct
  source 1..80: mol_type = other DNA
gcgttctgagagcctcggtatgcagtgtgaccactagcgctggggtagagttcccttgggcgcctgaagatctggaggta

SEQ ID NO: 33444 - DNA, 80 bp, synthetic construct
  source 1..80: mol_type = other DNA
ctcaccgagcctgtgcactgcaaaatgcgcgagccggttgagttaccgtgggagcctgaggacgttgatatccagttcgg

SEQ ID NO: 33445 - DNA, 80 bp, synthetic construct
  source 1..80: mol_type = other DNA
gctttatcatcaagcgatgaaaggggtcaggacagtatactggataggatttgacaccaccccattcatgttcgaggttt

SEQ ID NO: 33446 - DNA, 80 bp, synthetic construct
  source 1..80: mol_type = other DNA
agattttgaaacatccgacaaaatccaattcggcgatattgattttgaccaattctgactaggcagagcgggggcgtaca

SEQ ID NO: 33447 - DNA, 80 bp, synthetic construct
  source 1..80: mol_type = other DNA
tcttctcgtctgataccggaccagggcacttacaacagaagtcagtacggcaacacgcactaccgtgcgaaatgctatac

SEQ ID NO: 33448 - DNA, 80 bp, synthetic construct
  source 1..80: mol_type = other DNA
gtccacgaggaagaacggacgtacccccccgcactggatgaggccagggagaaactgctgcaggcaaaaatgcagatggc

SEQ ID NO: 33449 - DNA, 80 bp, synthetic construct
  source 1..80: mol_type = other DNA
acctacggaagcaaacaagagcaggtaccaatcaaggaaggttgaaaacatgaaggcagtgatcatagataggctgaagg

SEQ ID NO: 33450 - DNA, 80 bp, synthetic construct
  source 1..80: mol_type = other DNA
atggagcaagaacctacctgacagaacagtcagagaagattccaacctatgttagtaagtacccgcggccagtttactcg

SEQ ID NO: 33451 - DNA, 80 bp, synthetic construct
  source 1..80: mol_type = other DNA
ccgtcggtagaggatagcttgcagaatcccgaggtcgctgtggcggcctgcaatgctttcctggaagccaattacccgac

SEQ ID NO: 33452 - DNA, 80 bp, synthetic construct
  source 1..80: mol_type = other DNA
agtggctagttaccagatcacggacgagtatgatgcctacttggatatggttgatgggtcagagagttgtttagaccggg

SEQ ID NO: 33453 - DNA, 80 bp, synthetic construct
  source 1..80: mol_type = other DNA
caaccttctgcccggcaaaattacgctgctacccaaagcatcatgcttaccaccaaccgcaggttaggagcgcggtccca

SEQ ID NO: 33454 - DNA, 80 bp, synthetic construct
  source 1..80: mol_type = other DNA
tcaccatttcaaaacaccctgcagaatgtgctagcagcagccacgaagagaaactgcaatgttacacagatgagagagct

SEQ ID NO: 33455 - DNA, 80 bp, synthetic construct
  source 1..80: mol_type = other DNA
actctagactcagccgtgcttaacgtggaatgcttcaaaaaattcgcatgcaacggagaatactggcaggaattcaaaga

SEQ ID NO: 33456 - DNA, 80 bp, synthetic construct
  source 1..80: mol_type = other DNA
tggctggcgcatacccaacgtattccacgaattgggcggacgagcaggtcctgcaggcacgtaacatcggcctatgtgcg

SEQ ID NO: 33457 - DNA, 80 bp, synthetic construct
  source 1..80: mol_type = other DNA
caacccaataagaataactacagagaacataacaacttatgttactaggcttaagggccctaaagcagcggcgctgtttg

SEQ ID NO: 33458 - DNA, 80 bp, synthetic construct
  source 1..80: mol_type = other DNA
caaagactcacaatctagtcccgctgcaggaggtgcccatggaccggtttgtggtagatatgaagagagacgtgaaagtt

SEQ ID NO: 33459 - DNA, 80 bp, synthetic construct
  source 1..80: mol_type = other DNA
acccctggcaccaaacataccgaggaacgcccaaaggtgcaagtcatccaggccgccgaacctttagctacagcttattt

SEQ ID NO: 33460 - DNA, 80 bp, synthetic construct
  source 1..80: mol_type = other DNA
atgtggcattcacagggagttagtccgccgcctgaaggccgtcctggccccgaacatacatacattgttcgatatgtcgg

SEQ ID NO: 33461 - DNA, 80 bp, synthetic construct
  source 1..80: mol_type = other DNA
cagaagattttgatgccatcatagctgcacatttccaaccaggcgacgcagttttggaaacggacatagcctcctttgac

SEQ ID NO: 33462 - DNA, 80 bp, synthetic construct
  source 1..80: mol_type = other DNA
acctcggggttgaccaagaactactagacttgatagaggcagcgttcggggaaattaccagcgtccacctgccaacaggt

SEQ ID NO: 33463 - DNA, 80 bp, synthetic construct
  source 1..80: mol_type = other DNA
ccggaatgttcctgacactgtttgtaaataccctgttaaacattgtcatagcatgccgtgtactgcgtgagaagctgaca

SEQ ID NO: 33464 - DNA, 80 bp, synthetic construct
  source 1..80: mol_type = other DNA
aactccgtctgcgccgcgtttatcggggatgacaacatagtgcacggggtaagatccgacccgttgatggctgaaaggtg

SEQ ID NO: 33465 - DNA, 80 bp, synthetic construct
  source 1..80: mol_type = other DNA
cgccagctgggttaatatggaggtaaagataattgacgctaccatgtgcgagaaaccaccatatttctgcggcgggttta

SEQ ID NO: 33466 - DNA, 80 bp, synthetic construct
  source 1..80: mol_type = other DNA
accagtctcagcgaaggacatcgaggaaaactctctattatgaggaagaaacgcctaaggccaagcgacagggtcatgtt

SEQ ID NO: 33467 - DNA, 80 bp, synthetic construct
  source 1..80: mol_type = other DNA
tattgtatgacaaagtcaccggatcggcgtgccgagtggccgaccctctgaaaaggttatttaaactaggtaaaccttta

SEQ ID NO: 33468 - DNA, 80 bp, synthetic construct
  source 1..80: mol_type = other DNA
cccgccggagacacccaagatgaagatcgtaggcgtgcattgaaggatgagacggataggtgggcacgagtagggctgaa

SEQ ID NO: 33469 - DNA, 80 bp, synthetic construct
  source 1..80: mol_type = other DNA
gtctgaactggaaatagcactaagttctcggtatgaggtgaacgggaccggcaacatagtgcgagcaatggccacactgg

SEQ ID NO: 33470 - DNA, 80 bp, synthetic construct
  source 1..80: mol_type = other DNA
ccaagagcctgaagaattttaaaaagctgcgtggacccatcgtacacctctacggcggtcctaaatagatgcagagacac

SEQ ID NO: 33471 - DNA, 80 bp, synthetic construct
  source 1..80: mol_type = other DNA
accttcatctacagctcacaacagtaaacatgaattacataccaacccagactttttacggacgccgttggcggcctcgc

SEQ ID NO: 33472 - DNA, 80 bp, synthetic construct
  source 1..80: mol_type = other DNA
ccggcgttccgtccatggcaggtgccgatgcagccgacacctactatggttacacccatgctgcaagcaccagacctaca

SEQ ID NO: 33473 - DNA, 80 bp, synthetic construct
  source 1..80: mol_type = other DNA
ggcccaacagatgcaacaactgatcagcgctgtctctgcattaaccaccaaacagaatgtaaaagcaccaaaagggcaac

SEQ ID NO: 33474 - DNA, 80 bp, synthetic construct
  source 1..80: mol_type = other DNA
ggaagaagaaacagcagaaaccaaaggaaaagaaggaaaaccagaagaaaaagccgacgcaaaagaagaagcagcagcag

SEQ ID NO: 33475 - DNA, 80 bp, synthetic construct
  source 1..80: mol_type = other DNA
aaaccaaaaccacaggctaagaagaagaaaccagggagaagagaaagaatgtgcatgaagatcgagaatgactgcatatt

SEQ ID NO: 33476 - DNA, 80 bp, synthetic construct
  source 1..80: mol_type = other DNA
cgaggtcaaactggatggcaaggttaccggttatgcgtgcctagtcggagacaaggtcatgaagccggctcacgttaaag

SEQ ID NO: 33477 - DNA, 80 bp, synthetic construct
  source 1..80: mol_type = other DNA
aatgaaggtcactgtagatgttgaggctgatagcccatttttgaaggcccttcagaaagcattcccggcttttgaggttg

SEQ ID NO: 33478 - DNA, 80 bp, synthetic construct
  source 1..80: mol_type = other DNA
ctcggttgggtcaacgctatatatagaaagtagacgccttcttaagagttggcatcttccctccgtgttccacctgaaag

SEQ ID NO: 33479 - DNA, 80 bp, synthetic construct
  source 1..80: mol_type = other DNA
gcacaattgataacccagaccttgcgaagctgacttacaagaaatccagtaagtatgacctcgaatgcgcccagatacca

SEQ ID NO: 33480 - DNA, 80 bp, synthetic construct
  source 1..80: mol_type = other DNA
ccgaaggtcattacaattggcaccatggagcagtgcagtacagcggaggaaggtttaccatccccacaggcgccggcaaa

SEQ ID NO: 33481 - DNA, 80 bp, synthetic construct
  source 1..80: mol_type = other DNA
ccgggagatagcggtaggcctatttttgacaacaaagggcgagtagtggccatcgtgttaggcgaggccaacgaaggtgc

SEQ ID NO: 33482 - DNA, 80 bp, synthetic construct
  source 1..80: mol_type = other DNA
tcgcactgcgctgtctgtggtgacgtggacaaaagacatggtcactcgggtaacgccagaaggaactgaagagtggtctg

SEQ ID NO: 33483 - DNA, 80 bp, synthetic construct
  source 1..80: mol_type = other DNA
ccgcgctgatgatgtgtatccttgccaacacctctttcccctgctcatcacctccctgctacccctgctgctacgaaaaa

SEQ ID NO: 33484 - DNA, 80 bp, synthetic construct
  source 1..80: mol_type = other DNA
cagccagaacagacactgcggatgctggaagacaatgtgaatagaccagggtactatgagctactggaagcgtccatgac

SEQ ID NO: 33485 - DNA, 80 bp, synthetic construct
  source 1..80: mol_type = other DNA
atgcagaaacagatcacgccaccgccgtagtgtaacagagcacttcaatgtgtataaggctactagaccgtacttagcgt

SEQ ID NO: 33486 - DNA, 80 bp, synthetic construct
  source 1..80: mol_type = other DNA
attgcgctgactgtggggacgggtacttctgctatagcccagttgctatcgagaagatccgagatgaggcgtctgacggc

SEQ ID NO: 33487 - DNA, 80 bp, synthetic construct
  source 1..80: mol_type = other DNA
atgctcaagatccaagtctccgcccaaataggtctggacaaggcaggtacccacgcccacacgaagatccgatatatggc

SEQ ID NO: 33488 - DNA, 80 bp, synthetic construct
  source 1..80: mol_type = other DNA
gcaagaatagctttacttgcaggtgcgacacaatagtttcatgcgagggctacgttgttaaaaagatcacaatgagccca

SEQ ID NO: 33489 - DNA, 80 bp, synthetic construct
  source 1..80: mol_type = other DNA
tggtcatgatgttcaggaatctaagagagattccttgagggtgtacacgtccgcagcgtgctctatacatgggacgatgg

SEQ ID NO: 33490 - DNA, 80 bp, synthetic construct
  source 1..80: mol_type = other DNA
gacacttcatcgtcgcacattgtccgccaggcgactacctcaaggtttcgttcgaggacgcagattcacacgtgaaggca

SEQ ID NO: 33491 - DNA, 80 bp, synthetic construct
  source 1..80: mol_type = other DNA
tgtaaggtccaatacaagcacgacccattgccggtgggtagagagaagttcgtggttagaccccactttggcgtagagct

SEQ ID NO: 33492 - DNA, 80 bp, synthetic construct
  source 1..80: mol_type = other DNA
gccatgcacctcataccagctgacaacagctcccaccgacgaggagatcgacatgcacacaccgccagatataccggatc

SEQ ID NO: 33493 - DNA, 80 bp, synthetic construct
  source 1..80: mol_type = other DNA
gcaccctgctatcacagacggcgggcaacgtcaaaataacagcaggcggcaggactatcaggtacaattgtacctgtggc

SEQ ID NO: 33494 - DNA, 80 bp, synthetic construct
  source 1..80: mol_type = other DNA
cgtgacaacgtaggcactaccagtactgacaagaccatcaacacatgcaagattgaccaatgccatgctgccgttaccag

SEQ ID NO: 33495 - DNA, 80 bp, synthetic construct
  source 1..80: mol_type = other DNA
ccatgacaaatggcaatttacctctccatttgttcccagggctgatcagacagctaggaggggcaaagtgcatgttccat

SEQ ID NO: 33496 - DNA, 80 bp, synthetic construct
  source 1..80: mol_type = other DNA
tccctttgactaacgtcacctgccgagtgccgttggcgcgagcgccggatgtcacctatggtaagaaggaggtgaccctg

SEQ ID NO: 33497 - DNA, 80 bp, synthetic construct
  source 1..80: mol_type = other DNA
agattacacccagatcatccgacgctcttctcctataggagtttaggagccgaaccgcacccgtacgaggagtgggttga

SEQ ID NO: 33498 - DNA, 80 bp, synthetic construct
  source 1..80: mol_type = other DNA
caagttctctgagcgcatcatcccagtgacggaagaagggattgagtaccagtggggcaacaacccgccggtccgcctat

SEQ ID NO: 33499 - DNA, 80 bp, synthetic construct
  source 1..80: mol_type = other DNA
gggacgttcgggaagacggtcggatacgccgttacgcatcatgcagaaggtttcctaatgtgcaaggtgacggacactgt

SEQ ID NO: 33500 - DNA, 80 bp, synthetic construct
  source 1..80: mol_type = other DNA
gggcgcaactgacgaccgagggcaaaccccatggctggccacatgaaatcattcagtactattatggactataccccgcc

SEQ ID NO: 33501 - DNA, 80 bp, synthetic construct
  source 1..80: mol_type = other DNA
gccaccattgccgcagtatccggggcgagtctgatggccctcctaactctagcggccacatgctgcatgctggccaccgc

SEQ ID NO: 33502 - DNA, 80 bp, synthetic construct
  source 1..80: mol_type = other DNA
gaggagaaagtgcctaacaccatacgccttgacgccaggagcggtggtaccgttgacactggggctgctttgctgcgcac

SEQ ID NO: 33503 - DNA, 80 bp, synthetic construct
  source 1..80: mol_type = other DNA
cgagggcgaacgcagcatcattcgctgagactatggcatatctgtgggacgagaacaaaaccctcttttggatggaattc

SEQ ID NO: 33504 - DNA, 80 bp, synthetic construct
  source 1..80: mol_type = other DNA
gcggccccagccgcagcgcttgctttgctggcatgctgtatcaaaagcctgatctgctgttgtaagccattttctttttt

SEQ ID NO: 33505 - DNA, 80 bp, synthetic construct
  source 1..80: mol_type = other DNA
acaagctaaaactcttgtattatgtaccttgaaaaaaacgagatcttgactccgagcctctgattgtttgattatttttc

SEQ ID NO: 33506 - DNA, 80 bp, synthetic construct
  source 1..80: mol_type = other DNA
cactctgcttggtcttcaaaacttatgggactatgctagtaaatccaaactacaaggctattcaacacctgtcaagagcg

SEQ ID NO: 33507 - DNA, 80 bp, synthetic construct
  source 1..80: mol_type = other DNA
ttcccttcggtcacagggtttatcacccaagtaacttcgtctttttcatctgagctctacctccgattctccaaacgagg

SEQ ID NO: 33508 - DNA, 80 bp, synthetic construct
  source 1..80: mol_type = other DNA
ggcagcatcaaggatctatccagagaagtggaaagacaccttcataggtacaacaggtggatcaccctagagggtatcag

SEQ ID NO: 33509 - DNA, 80 bp, synthetic construct
  source 1..80: mol_type = other DNA
ctggaagcctgcccatgctaagactcttgtgtgatgtatcttgaaaaaaacaagatcctaaatctgaacctctggctttt

SEQ ID NO: 33510 - DNA, 80 bp, synthetic construct
  source 1..80: mol_type = other DNA
caaaatgccggaaatctacggattgtgtgtatccatcatgaaaaaaactaacacccctcctttctaaccatcccaaacat

SEQ ID NO: 33511 - DNA, 80 bp, synthetic construct
  source 1..80: mol_type = other DNA
cagagagaaagcaaatcatcgaaagccaggatggcggctcaaactgcttctggccctccagcccttgaatggtcggccac

SEQ ID NO: 33512 - DNA, 80 bp, synthetic construct
  source 1..80: mol_type = other DNA
cacaatcatcttgcatctcagcgaagtatgcataattataaagtgctgggtcctctaagcttttcagtcgagaaaaaaac

SEQ ID NO: 33513 - DNA, 80 bp, synthetic construct
  source 1..80: mol_type = other DNA
tcgaccaggtatggttgggtagattctcataatgcaagagatcttctagcagttccaatgaccaacggtgcttttaccct

SEQ ID NO: 33514 - DNA, 80 bp, synthetic construct
  source 1..80: mol_type = other DNA
ccaagaactgataccgagggtggtggataggtcgatagacatttcagacaatgttgtgtttgaacacaaacagagatcgt

SEQ ID NO: 33515 - DNA, 80 bp, synthetic construct
  source 1..80: mol_type = other DNA
agtggatatccaggcactagactgggtgagagttgataaagaaaggaaacttgcctcctatgaaggacagaagcaataga

SEQ ID NO: 33516 - DNA, 80 bp, synthetic construct
  source 1..80: mol_type = other DNA
tcctcttaagattggataatcacccatctttatacataatgctcagagagccatcacttagaggagagatattctcaata

SEQ ID NO: 33517 - DNA, 80 bp, synthetic construct
  source 1..80: mol_type = other DNA
tttttaatatttcaccgaactcactttgagatgtaggcatagcataccgaactcttccacgattctccgaacccacaggg

SEQ ID NO: 33518 - DNA, 80 bp, synthetic construct
  source 1..80: mol_type = other DNA
gactcttgtgtgatgtgtctcgaaaaaaacaagatcttgaatctggacctctggctgtttgattgtttcttttgtctttg

SEQ ID NO: 33519 - DNA, 80 bp, synthetic construct
  source 1..80: mol_type = other DNA
ataccttggagtcagatgaggatattcagaggctgctaaaagactccttgcgtaggactaggtgggtagaccaggaagtg

SEQ ID NO: 33520 - DNA, 80 bp, synthetic construct
  source 1..80: mol_type = other DNA
cgccatgccgcgaggaccatggtaggatgttatagccccagcaggaggatgtcacgcaaagccgggtgttcagaatgggt

SEQ ID NO: 33521 - DNA, 80 bp, synthetic construct
  source 1..80: mol_type = other DNA
ctgttctgctcagcaggttgcggtttcgacctcagcaaacccagcccctgcttctgagctggacatcagaaccctctcta

SEQ ID NO: 33522 - DNA, 80 bp, synthetic construct
  source 1..80: mol_type = other DNA
catgtttccggatgccaggcttgtattcaatagcctattagaggtgaatgatctaatggcatcagggacacatccattac

SEQ ID NO: 33523 - DNA, 80 bp, synthetic construct
  source 1..80: mol_type = other DNA
ccccttcagcaatcatgagcggaggagatgacatcatctccagggtaattgactttgactctatctgggaaaaaccttct

SEQ ID NO: 33524 - DNA, 80 bp, synthetic construct
  source 1..80: mol_type = other DNA
ctgacttaagaaacttgacaacatggaggtacttccagtcagtccaagagcaggtgaatatgtcttatgacctcatcatt

SEQ ID NO: 33525 - DNA, 80 bp, synthetic construct
  source 1..80: mol_type = other DNA
tgtgatgcagaggtcactgacattgcatcaatcaaccgaataaccttgctaatgtctgattttgcattgtctatagacgg

SEQ ID NO: 33526 - DNA, 80 bp, synthetic construct
  source 1..80: mol_type = other DNA
tttcctgtagtcaccgggtttataactcaggtgacttcatctttttcatccgagttgtacctcagattctccaaacgggg

SEQ ID NO: 33527 - DNA, 80 bp, synthetic construct
  source 1..80: mol_type = other DNA
gaagttcttccgagatgcagaatatttgacctcctctgctcttagagaaatgagtcttgtgttgttcaactgtagcagtc

SEQ ID NO: 33528 - DNA, 80 bp, synthetic construct
  source 1..80: mol_type = other DNA
tggcttgcaactccagcttgagtctttcatctcactggatcaggctgatctacaaaatagtaaagaccaccagacttagg

SEQ ID NO: 33529 - DNA, 80 bp, synthetic construct
  source 1..80: mol_type = other DNA
ggaagtatagaagatctgtccaaggaggtggaaaagcaccttcgaaggtacaacaggtggatcaccctcagagacatcag

SEQ ID NO: 33530 - DNA, 80 bp, synthetic construct
  source 1..80: mol_type = other DNA
atccagatcatctctgttagattatagctgcttataagctaagtgccctcgatggaatgtacaaactgagactcctagac

SEQ ID NO: 33531 - DNA, 80 bp, synthetic construct
  source 1..80: mol_type = other DNA
tgtgcatcctgaaaaaaacaggatcagagttccgaacctctgtcggcttgattgtttttccatctttattgtttttttgt

SEQ ID NO: 33532 - DNA, 80 bp, synthetic construct
  source 1..80: mol_type = other DNA
tcatcaaactcgccctaactcgtttgctgaatttttaaacaagacatactcgagtgactcgtgaggaactgaacaacaag

SEQ ID NO: 33533 - DNA, 80 bp, synthetic construct
  source 1..80: mol_type = other DNA
attgcaaacaccaaagaagtgtatacacctctcatgaaaaaaactaacacccctcctttcaaaccatcccagacatgagc

SEQ ID NO: 33534 - DNA, 80 bp, synthetic construct
  source 1..80: mol_type = other DNA
aagatttttgtcaacccaagtgcgatcagggccggcttggctgatctagagatggctgaagagactgtagatctcatcac

SEQ ID NO: 33535 - DNA, 80 bp, synthetic construct
  source 1..80: mol_type = other DNA
ttcaactagatgatgacaaaccgtctggccttggcagtatcgccgaaggaggggaaagcaaatgtcaggaagacttccaa

SEQ ID NO: 33536 - DNA, 80 bp, synthetic construct
  source 1..80: mol_type = other DNA
atggatgaggcagaggatcctgccctcttattacagtcgtacctggacaatgttggaattcaaatagtcagacaaatgaa

SEQ ID NO: 33537 - DNA, 80 bp, synthetic construct
  source 1..80: mol_type = other DNA
aagtcaggggggagattcctgaaaatatggtctcagaccgtcgaggagatcatatcctatgtcacagtcaacttctctgg

SEQ ID NO: 33538 - DNA, 80 bp, synthetic construct
  source 1..80: mol_type = other DNA
gggagattcctgaaaatatggtctcagaccgtcgaggagatcatatcctatgtcacagtcaacttctctggtgcgccggg

SEQ ID NO: 33539 - DNA, 80 bp, synthetic construct
  source 1..80: mol_type = other DNA
tgcgccggggaggtccgtaaaagacaaggctactcagactgtgggccgtgaactcgcgaaagagacaaagtctgcttctt

SEQ ID NO: 33540 - DNA, 80 bp, synthetic construct
  source 1..80: mol_type = other DNA
ctcagcgagcaggtcaatcctcaaaagtcaaaatggcagcccaaactgtctccggtcctcctgctttagagtggtctgtc

SEQ ID NO: 33541 - DNA, 80 bp, synthetic construct
  source 1..80: mol_type = other DNA
gccaacgaggaggatgatccatctgtcgaggctgagattgctcatcagattgctgagagcttctctaagaagtacaaatt

SEQ ID NO: 33542 - DNA, 80 bp, synthetic construct
  source 1..80: mol_type = other DNA
ctctctaatcacaccctcaggctctgccacactatgcagtcagatctgatctgctccaagtctgccatgaaaaaaacaag

SEQ ID NO: 33543 - DNA, 80 bp, synthetic construct
  source 1..80: mol_type = other DNA
taacaccactgataaaatgaactttctacgtaaaatagtaaagaactgtagagatgaggacacccagaagccctccctta

SEQ ID NO: 33544 - DNA, 80 bp, synthetic construct
  source 1..80: mol_type = other DNA
ctgacctatccctccaaacacagaggtctgatgaagataaagattcttcagtgcttctggaatagtctaattacatctca

SEQ ID NO: 33545 - DNA, 80 bp, synthetic construct
  source 1..80: mol_type = other DNA
aaacatcctcaattgtttacctctagaggagagagcacacgggcttgaccccaactttcaggagcaatagaacaaaaata

SEQ ID NO: 33546 - DNA, 80 bp, synthetic construct
  source 1..80: mol_type = other DNA
tgtcatggtgccgtcgagtcgctgcattttgtcagagtaggctctgttacttttacatcctaagcttctctgatgtgaaa

SEQ ID NO: 33547 - DNA, 80 bp, synthetic construct
  source 1..80: mol_type = other DNA
aaaactattaacatccctcaaaagacgtaaggaaagatgatctttcaggctcttccgtttgtgcctctcctaatctcttc

SEQ ID NO: 33548 - DNA, 80 bp, synthetic construct
  source 1..80: mol_type = other DNA
gttgtgtctcgggaagttccccatctacacgataccagacaagctcggtccctggagccctatcgacatacatcacctca

SEQ ID NO: 33549 - DNA, 80 bp, synthetic construct
  source 1..80: mol_type = other DNA
ggaaccgagacttgggacatcttgtgacatttttaccagcagcaagggaaagaaggcatctaaaggaggcaagacttgtg

SEQ ID NO: 33550 - DNA, 80 bp, synthetic construct
  source 1..80: mol_type = other DNA
ggtttgtggatgaaaggggcttgtacaagtctctaaaaggagcatgtaagctcaagctgtgcggagttctcggacttaga

SEQ ID NO: 33551 - DNA, 80 bp, synthetic construct
  source 1..80: mol_type = other DNA
ttatggatggaacctgggtttcaattcaaacgtcagacgatactaaatggtgccctccggatcaattggtgaatctacat

SEQ ID NO: 33552 - DNA, 80 bp, synthetic construct
  source 1..80: mol_type = other DNA
gactttcactcagacgaaatagagcatctcgtcgtggaggagttggtcaaaaagagagaagagtgtctggacgcattgga

SEQ ID NO: 33553 - DNA, 80 bp, synthetic construct
  source 1..80: mol_type = other DNA
caaaagggtgtttgaaagtcagagagaggtgtcatcctcctgtggacggagtgttcttcaatggcataattctgggtccg

SEQ ID NO: 33554 - DNA, 80 bp, synthetic construct
  source 1..80: mol_type = other DNA
gacgggaacgtcttgatacctgagatgcaatcgtctctacttcagcaacatatggagctgttggagtcctctgtgatccc

SEQ ID NO: 33555 - DNA, 80 bp, synthetic construct
  source 1..80: mol_type = other DNA
cagatgttcacaaacaaatctcaggggttgaccttggtctcccgagttgggggaaatatctcctgatgatcgcaggtggc

SEQ ID NO: 33556 - DNA, 80 bp, synthetic construct
  source 1..80: mol_type = other DNA
ctagcgacactagctctgataatcttctcgatggcatgttgtagaagggccaagcgaacagagccaggacgacgaggctc

SEQ ID NO: 33557 - DNA, 80 bp, synthetic construct
  source 1..80: mol_type = other DNA
tggagagtcaggaaagagggtaccggcaaccccccagacgagaaaagtcgtatcttcatgggagttgtacaagagtgaag

SEQ ID NO: 33558 - DNA, 80 bp, synthetic construct
  source 1..80: mol_type = other DNA
gcgatgccaggctgtgagggcaggccatctcctttgtatcttccgatcagaaaattggctatcttggaggtctgagggac

SEQ ID NO: 33559 - DNA, 80 bp, synthetic construct
  source 1..80: mol_type = other DNA
tctctcattctgaaggcccttcacagacttcatgtaacaagataagttcaggagtcggaaaacattcattagccatctcc

SEQ ID NO: 33560 - DNA, 80 bp, synthetic construct
  source 1..80: mol_type = other DNA
actgatcaaaaatagtcatgtagatttttatgatgtattatgtattttgacagtgtcattgactaatggtgctcccgtcc

SEQ ID NO: 33561 - DNA, 80 bp, synthetic construct
  source 1..80: mol_type = other DNA
ctcaaggactgatatcaaaggtggtggacagaccaactgccatccgagccgaggtcatcgtgagttccactaaattagac

SEQ ID NO: 33562 - DNA, 80 bp, synthetic construct
  source 1..80: mol_type = other DNA
caggtagagattagttgagagagacgacttacatcctatgaaggacacaagcaataggtcacaatcatcttacatcctga

SEQ ID NO: 33563 - DNA, 80 bp, synthetic construct
  source 1..80: mol_type = other DNA
tgtatgatgacggggcaatcaacaacacttctcctcccaagaactgcactatgatgattgatccgggagaggtttttgac

SEQ ID NO: 33564 - DNA, 80 bp, synthetic construct
  source 1..80: mol_type = other DNA
gaccccatcgatccgatcgagtcggaggccgagtcaagagggaaccccaccatccccaacatcttaagaaactctgacta

SEQ ID NO: 33565 - DNA, 80 bp, synthetic construct
  source 1..80: mol_type = other DNA
caacctcaactctcctctaatagaagactcagccaaattgatgttggaatggttgaaaacagggaacaggcctcttcgga

SEQ ID NO: 33566 - DNA, 80 bp, synthetic construct
  source 1..80: mol_type = other DNA
tgactctgacagacaattgctctaggtcttacaaagtcttgaaagattatttcaaaaaggtggacttgggatctatcaaa

SEQ ID NO: 33567 - DNA, 80 bp, synthetic construct
  source 1..80: mol_type = other DNA
gtataacagacttggcccagttctactccaagtcttcccccatagaaaaactcttaaactgtacgctcgagaacagaggg

SEQ ID NO: 33568 - DNA, 80 bp, synthetic construct
  source 1..80: mol_type = other DNA
ctgagaattcccccagaaggggtcctaagttgtcttgagagggtcgattacgataaagcatttgggcggtatttggctaa

SEQ ID NO: 33569 - DNA, 80 bp, synthetic construct
  source 1..80: mol_type = other DNA
gaaagatttgacatcaatcgatgttggaagggacttggtcaagtttaaagataaaatatggggattgctgattgtgacca

SEQ ID NO: 33570 - DNA, 80 bp, synthetic construct
  source 1..80: mol_type = other DNA
caatatacatgacttagtctttgtgtacggttgttacaggcattggggacatccttacatagattatagaaagggtttgt

SEQ ID NO: 33571 - DNA, 80 bp, synthetic construct
  source 1..80: mol_type = other DNA
attagcgtcatggttgtcagagaacaggggagggccagtccccagtgaaaaggtcattattacagccctttccaaacccc

SEQ ID NO: 33572 - DNA, 80 bp, synthetic construct
  source 1..80: mol_type = other DNA
ctgttaatcccagggaattcctgaaatctatagatcttggaggattgcctgatgaagatttgataattggtctcaaacct

SEQ ID NO: 33573 - DNA, 80 bp, synthetic construct
  source 1..80: mol_type = other DNA
cgaccgaggatgtattctcagtgctcgatcaagtgtttggactgaggagggtgttttccagaactcatgagttttttcag

SEQ ID NO: 33574 - DNA, 80 bp, synthetic construct
  source 1..80: mol_type = other DNA
cagcgattagagtgggcacagttgtcactgcttatgaggattgctcaggactagtgtcatttacagggtttataaagcaa

SEQ ID NO: 33575 - DNA, 80 bp, synthetic construct
  source 1..80: mol_type = other DNA
atattgtctggacatgtcaggcggtccgacatgttggaatggtcaagatggcgggctagagggtttgagacaaaagggct

SEQ ID NO: 33576 - DNA, 80 bp, synthetic construct
  source 1..80: mol_type = other DNA
tattggctcaaggggacaatcaggttctttgcccgacgtacatgttgtcgccggggctttccagagagtggcttctctac

SEQ ID NO: 33577 - DNA, 80 bp, synthetic construct
  source 1..80: mol_type = other DNA
gagctggagagcatatcgagaaatgctctctcgatataccgtgccatcgaggagggggcgtccaaactggggctcattat

SEQ ID NO: 33578 - DNA, 80 bp, synthetic construct
  source 1..80: mol_type = other DNA
ctcgaatcgtttatctagacccctctttagggggagtatctggaatgtctttaggaaggttccacatacgtcagttctct

SEQ ID NO: 33579 - DNA, 80 bp, synthetic construct
  source 1..80: mol_type = other DNA
cgatctcttgctcctgtggggtgactggaagcggaaatcctcggatatcagtgtcagtgcttccgtcttttgaccagtca

SEQ ID NO: 33580 - DNA, 80 bp, synthetic construct
  source 1..80: mol_type = other DNA
tcagcacagacacaatggcggatttgactcatgatggaagaaactatgacttcatgttccaaccattgatgctctatgca

SEQ ID NO: 33581 - DNA, 80 bp, synthetic construct
  source 1..80: mol_type = other DNA
agaatttccagaatggtttctggagccgtgcctcatttccgcaaactccctgatatccgtttaagaccgggcgactttga

SEQ ID NO: 33582 - DNA, 80 bp, synthetic construct
  source 1..80: mol_type = other DNA
atctctaagtggaaaggagaagtctcgccatataggatcagcccaggggctcctgtattcaatcttggttgcgatccatg

SEQ ID NO: 33583 - DNA, 80 bp, synthetic construct
  source 1..80: mol_type = other DNA
tctcttgcgactagacaatcacccatccttgtatattatgctcagagagccatctcttcgaggagagatattctctattc

SEQ ID NO: 33584 - DNA, 80 bp, synthetic construct
  source 1..80: mol_type = other DNA
ttcagtgggcaactggcgcccattataagcttaagcccattctagacgacctcaatgttttcccgtccctctgccttgca

SEQ ID NO: 33585 - DNA, 80 bp, synthetic construct
  source 1..80: mol_type = other DNA
ctagacgacctcaatgttttcccgtccctctgccttgcagtcggggacgggtcgggtggaatatcaagggcagttctcaa

SEQ ID NO: 33586 - DNA, 80 bp, synthetic construct
  source 1..80: mol_type = other DNA
ttcatgaggagctgaataacacggtgccgggaatctattgattgtgcatatccatcatgaaaaaaactaacacccctcct

SEQ ID NO: 33587 - DNA, 80 bp, synthetic construct
  source 1..80: mol_type = other DNA
tcatcacatgaggtgagcttatgaaacttttatgaaacaacgattaacaaaaatggattccctaactgaaccttcacact

SEQ ID NO: 33588 - DNA, 80 bp, synthetic construct
  source 1..80: mol_type = other DNA
acgattaacaaaaatggattccctaactgaaccttcacactacaggctaaaccacaaaatactacagcgtagttgtcacg

SEQ ID NO: 33589 - DNA, 80 bp, synthetic construct
  source 1..80: mol_type = other DNA
caattaggtatgaaggcatacgcgtccctaaagagacacaccacatatagctaagaatcaatagataagtatagaaacga

SEQ ID NO: 33590 - DNA, 80 bp, synthetic construct
  source 1..80: mol_type = other DNA
ctagaaccggccctagacgacggggcgatcggaaaccttgcggccgtgtctgactgctcagacacggacgacgtgccatc

SEQ ID NO: 33591 - DNA, 80 bp, synthetic construct
  source 1..80: mol_type = other DNA
cacggacttatcacctgtttacctctggaggagagaacatacgggcttaactccaacctttgggagcaatagaacaaaca

SEQ ID NO: 33592 - DNA, 80 bp, synthetic construct
  source 1..80: mol_type = other DNA
tctaagaggaacagggaggaaagtgtcggtcacttcccaaaacgggaaggtaatatcttcatgggaatcatataagagcg

SEQ ID NO: 33593 - DNA, 80 bp, synthetic construct
  source 1..80: mol_type = other DNA
taggaactgataccgaaggttgggaacaggccgagggatatcttggatgaccccgtgcctggacacggaccgaggctgta

SEQ ID NO: 33594 - DNA, 80 bp, synthetic construct
  source 1..80: mol_type = other DNA
ctccaggaaggtcttcggaggataaatcaacccaaactactggccgggagctcaagaaggagactacatccattctttct

SEQ ID NO: 33595 - DNA, 80 bp, synthetic construct
  source 1..80: mol_type = other DNA
aaaatcaaagaagaagtatacagcgtcatttgcaaagcaaaaatgtaacacctctacaatggatgccgacaggattgtat

SEQ ID NO: 33596 - DNA, 80 bp, synthetic construct
  source 1..80: mol_type = other DNA
cagagagaaagccagtccctgaaatccaggacgacggcccaaactgcctctggccctccatcccctgaacggcccgccac

SEQ ID NO: 33597 - DNA, 80 bp, synthetic construct
  source 1..80: mol_type = other DNA
agagaagaagcggaaagtgtcagttgtaaagcaaaaatgtaacacccctacaatggatgccgacaagattgtattcaaag

SEQ ID NO: 33598 - DNA, 80 bp, synthetic construct
  source 1..80: mol_type = other DNA
ggcagcataaaagacctatcagaagaggtaaaacgacatcttcatgggtacaacagatggatcaccttcgaggatatccg

SEQ ID NO: 33599 - DNA, 80 bp, synthetic construct
  source 1..80: mol_type = other DNA
atccagatcatccctactagattacagttgtttgtaagccggatgttacagaaggcctgtgcatgctaaaattcttgtat

SEQ ID NO: 33600 - DNA, 80 bp, synthetic construct
  source 1..80: mol_type = other DNA
ttcacctggacgatgaaaaatcgtccaaccttggtgagatggttagggtgggggaatgcaagtatcgagaggactttcgg

SEQ ID NO: 33601 - DNA, 80 bp, synthetic construct
  source 1..80: mol_type = other DNA
gccttgattgccctgatgttgataatttccctaatgacatggtgcagaagagtcaatcgaccagaatctacgcgacgcag

SEQ ID NO: 33602 - DNA, 80 bp, synthetic construct
  source 1..80: mol_type = other DNA
ttttggagagacagagaagaaggtgtcagtcactccccaaagcggaaaagtcataccttcatgggagtcatataagagcg

SEQ ID NO: 33603 - DNA, 80 bp, synthetic construct
  source 1..80: mol_type = other DNA
tttggatccagtagtcctccttgaactccatccaacagggtagattcaagagtcatgagactttcatcagtcatctcagt

SEQ ID NO: 33604 - DNA, 80 bp, synthetic construct
  source 1..80: mol_type = other DNA
caggaactgataccaaaggttgtggacgggccaaggggtacttcggatgactctgtgcttgggcacagaaagaggtcgtg

SEQ ID NO: 33605 - DNA, 80 bp, synthetic construct
  source 1..80: mol_type = other DNA
gtgtgccccccgatagcggactcgacgtgaatcaactaaaaaaggcaatctgcctcccatgagggacacaagcaatagtt

SEQ ID NO: 33606 - DNA, 80 bp, synthetic construct
  source 1..80: mol_type = other DNA
tgtagaccaaaaaaacaacaactagcaacacttctcatcctgagacccatatcaagatgctagatccgggagaggtttat

SEQ ID NO: 33607 - DNA, 80 bp, synthetic construct
  source 1..80: mol_type = other DNA
catatgtcgtgaacagtttggtccagagggcagagaagtttaggcctctcatccaccccttgggagactttcctatgttc

SEQ ID NO: 33608 - DNA, 80 bp, synthetic construct
  source 1..80: mol_type = other DNA
ataaaagacaaggtggatcaacttgaagggaccttcggtcccagtgcaaagaggttttttagggttctagatcaattcga

SEQ ID NO: 33609 - DNA, 80 bp, synthetic construct
  source 1..80: mol_type = other DNA
tcttgacacgaatgacaaatattaacattaacagacctcttgaattgatctcaggggtaatttcctatattctcctgagg

SEQ ID NO: 33610 - DNA, 80 bp, synthetic construct
  source 1..80: mol_type = other DNA
gtggaccaagaagtgcgccatgcagccagaaccatgacagggggttacagtcctaacaagaaggtgtcgcgcaaggcgtg

SEQ ID NO: 33611 - DNA, 80 bp, synthetic construct
  source 1..80: mol_type = other DNA
cccagccatcaaggacttgaagaaacctagtataactctagggaaggctcctgacctgaataaagcatacaagtcagtcc

SEQ ID NO: 33612 - DNA, 80 bp, synthetic construct
  source 1..80: mol_type = other DNA
gagactaagctgtaaaaacaggccatctcctctagatcttacattccaaaaatcatatccccttgtgatgaaggggacat

SEQ ID NO: 33613 - DNA, 80 bp, synthetic construct
  source 1..80: mol_type = other DNA
agaccactagattcatcggaagcattgaagacctacctggggaagtagcgagacacctccaggggtataacaggtggatc

SEQ ID NO: 33614 - DNA, 80 bp, synthetic construct
  source 1..80: mol_type = other DNA
acccttgaggacatcaggtccagatcatctctgctagactacagttgcttatgagctggagatttctgtggatctgtata

SEQ ID NO: 33615 - DNA, 80 bp, synthetic construct
  source 1..80: mol_type = other DNA
tactaagattctcagacagtgtaccgtgaaaaaaacgaaatctcaagtcagaacctctagctgtttgattattttttcca

SEQ ID NO: 33616 - DNA, 80 bp, synthetic construct
  source 1..80: mol_type = other DNA
atacattggagtcggatgacgacattcaaagactcttgaaggactctctacgaagaacaaggtgggtggatcaagaagtg

SEQ ID NO: 33617 - DNA, 80 bp, synthetic construct
  source 1..80: mol_type = other DNA
agatatacctccgattctctaaacggggaaaatttttccgagatgcggagtacctgacctcctccacccttcgggagatg

SEQ ID NO: 33618 - DNA, 80 bp, synthetic construct
  source 1..80: mol_type = other DNA
ttatgaggtgcaccctgaaaaaaacgaggtcttaaatccgatcctctggctgtttgattgttttttccatctttgttgtt

SEQ ID NO: 33619 - DNA, 80 bp, synthetic construct
  source 1..80: mol_type = other DNA
ctgatgtggcactggcagacgacggaaccgtcaactctgatgatgaggattacttttccggtgaaaccaggagtccggag

SEQ ID NO: 33620 - DNA, 80 bp, synthetic construct
  source 1..80: mol_type = other DNA
ggattctaggaacagacaacttgtgtacatccttcatgaaaaaaactaacacctctccttgcgaaccatcccagatatga

SEQ ID NO: 33621 - DNA, 80 bp, synthetic construct
  source 1..80: mol_type = other DNA
ttcagctggaagacgggaaacagtctaactttggtgaaatagctgaggtgggagaaagcaagtatcgagaagatttccaa

SEQ ID NO: 33622 - DNA, 80 bp, synthetic construct
  source 1..80: mol_type = other DNA
cgccaggcaaatccctggaagacaaatctacccagactgccgggcgagatctcaagaaagagacgacactcccttcttct

SEQ ID NO: 33623 - DNA, 80 bp, synthetic construct
  source 1..80: mol_type = other DNA
cagagggaaagtcaatcctcgaaagccaggatggtggcccaaactgcctctggtcctccagcccttgagtggtcagctac

SEQ ID NO: 33624 - DNA, 80 bp, synthetic construct
  source 1..80: mol_type = other DNA
cctgctaaccaaactttcaaactcagccctgatagacagttaaatctgagctgttctgaattcgacatgaaaaaaacagc

SEQ ID NO: 33625 - DNA, 80 bp, synthetic construct
  source 1..80: mol_type = other DNA
ttatggatgggacatgggtcgcaatgcgaacgtcggacgagaccaaatggtgccctcctgaccaattagtgaacatacat

SEQ ID NO: 33626 - DNA, 80 bp, synthetic construct
  source 1..80: mol_type = other DNA
gctctgatcgccctgatactgataatcttcctaatgacatgttgtaggaaaattaagcgaccagaatccacacagcatag

SEQ ID NO: 33627 - DNA, 80 bp, synthetic construct
  source 1..80: mol_type = other DNA
gagaccaggctgtgaaagccagtcatcccttctacacttcaagtcttgaaggtcgctttcccttggtgataggggttagg

SEQ ID NO: 33628 - DNA, 80 bp, synthetic construct
  source 1..80: mol_type = other DNA
gggaatctttggacttgacagtccccctcaaactctggatgacagggtagatttaagagtcacaggactttcattaatca

SEQ ID NO: 33629 - DNA, 80 bp, synthetic construct
  source 1..80: mol_type = other DNA
tctctattgatcagacatggtcatgtagatccttataatacaggaaatcttctagcagtttcagtgaccaaaggtgctct

SEQ ID NO: 33630 - DNA, 80 bp, synthetic construct
  source 1..80: mol_type = other DNA
caggaactgataccaaaggttgggaacagaccaagggatgtcttagatgaccccgtgcctggacacggactgaggttgta

SEQ ID NO: 33631 - DNA, 80 bp, synthetic construct
  source 1..80: mol_type = other DNA
gtccgtcccctgatgtcggatcagaaagggttcaattgaggagggcaattagcctcctatgaaggacataagcaatagct

SEQ ID NO: 33632 - DNA, 80 bp, synthetic construct
  source 1..80: mol_type = other DNA
cacaatcatcttgcatcttagcaaagtacgtatgattataaagggctggatcatctacgcttttcagtcaagaaaaaaac

SEQ ID NO: 33633 - DNA, 80 bp, synthetic construct
  source 1..80: mol_type = other DNA
atctcaggggtaatttcatatatcctcctgaggttggatgatcacccatctttgtatataatgctaagagagccatctct

SEQ ID NO: 33634 - DNA, 80 bp, synthetic construct
  source 1..80: mol_type = other DNA
taggggggagatcttttctattccccagaaaatcccagctgcttacccgactacaatgaaagaagggaacagatcaattt

SEQ ID NO: 33635 - DNA, 80 bp, synthetic construct
  source 1..80: mol_type = other DNA
cccagctgcttacccgactacaatgaaagaagggaacagatcaattttatgttatctacagcacgtgctgcgctatgagc

SEQ ID NO: 33636 - DNA, 80 bp, synthetic construct
  source 1..80: mol_type = other DNA
catgtttccggatgccaaacttgtattcaacagtttgttggaggtaaatgacctgatggcgtctgggacacatcctttac

SEQ ID NO: 33637 - DNA, 80 bp, synthetic construct
  source 1..80: mol_type = other DNA
ccccatcagcaatcatgagtggcggagatgacattatctccagagtagtggactttgactcaatctgggaaaagccgtca

SEQ ID NO: 33638 - DNA, 80 bp, synthetic construct
  source 1..80: mol_type = other DNA
ctgattgcactgatggtgatgattttcttgatgacgtgttgcaggaaagctaatggagtagaatcaatgcgacaccgtct

SEQ ID NO: 33639 - DNA, 80 bp, synthetic construct
  source 1..80: mol_type = other DNA
gatgcgccttgaaaaaacgagatcccgaatcagaacctctggttgtttgattattttttttatctttattgtttttttgt

SEQ ID NO: 33640 - DNA, 80 bp, synthetic construct
  source 1..80: mol_type = other DNA
ttcagttggatgacggaaaatcgtctagcctcaatgagatggccacggcaggagaaagcaaatatcgggaggacttcctg

SEQ ID NO: 33641 - DNA, 80 bp, synthetic construct
  source 1..80: mol_type = other DNA
catcaggaaggccttcagaggacaaatctacccagactgctggcagagaactcaagaaggagacaccgcctgcgtcttct

SEQ ID NO: 33642 - DNA, 80 bp, synthetic construct
  source 1..80: mol_type = other DNA
caatgaagaagatgacttatctgtcgaggcggagattgctcaccaaattgctgaaagtttttctaagaagtacaagttcc

SEQ ID NO: 33643 - DNA, 80 bp, synthetic construct
  source 1..80: mol_type = other DNA
tgatgcagaggtcactgacattgcgtcagttaatcggataacacttctgatgtctgactttgcactgtccatagaaggcc

SEQ ID NO: 33644 - DNA, 80 bp, synthetic construct
  source 1..80: mol_type = other DNA
cgctttatctggtcttcaaaacttacggaactatgctagtaaatccagaatacagagccattcaacacctatcgagagca

SEQ ID NO: 33645 - DNA, 80 bp, synthetic construct
  source 1..80: mol_type = other DNA
atctagatcatctctactggactacagctgcttataagctgaacactgctagaggtttataagtaccaaggctttcggac

SEQ ID NO: 33646 - DNA, 80 bp, synthetic construct
  source 1..80: mol_type = other DNA
ctgatgtggcattggctgatgatgggaccgtcaattctgatgacgaggactatttctccggtgagaccaggagccctgag

SEQ ID NO: 33647 - DNA, 80 bp, synthetic construct
  source 1..80: mol_type = other DNA
ccagattgtgtatattccacatgaaaaaaactaacacccctcctttcgaaccatcctaaacatgagcaagatcttcgtca

SEQ ID NO: 33648 - DNA, 80 bp, synthetic construct
  source 1..80: mol_type = other DNA
cccagccatcaaagatttgaagaagcccagcattaccttggggaaggctccagacttaaacaaggcttacaagtcggtcc

SEQ ID NO: 33649 - DNA, 80 bp, synthetic construct
  source 1..80: mol_type = other DNA
cagagagaaagccaattttcgaaggctcgaatgatggctcaaactgcctctggtcctccagctctcgaatggtctgcgac

SEQ ID NO: 33650 - DNA, 80 bp, synthetic construct
  source 1..80: mol_type = other DNA
cctgctgaccaatttttacactcaggctcactagacatttgagcctgagtcgttctgaactcgacatgaaaaaaacaggc

SEQ ID NO: 33651 - DNA, 80 bp, synthetic construct
  source 1..80: mol_type = other DNA
tttctggcatgaatgctgctaagcttgatcctgatgatgtgtgttcttacttagcagccgcaatgcaattttttgaggga

SEQ ID NO: 33652 - DNA, 80 bp, synthetic construct
  source 1..80: mol_type = other DNA
tagtcttctcgttgtgtttcgggaaattccccatctacacgataccagacaaactcggtccatggagtcccattgacata

SEQ ID NO: 33653 - DNA, 80 bp, synthetic construct
  source 1..80: mol_type = other DNA
aatcccagactggggacttcttgtgacattttcgtcaatagcagagggaagagagcatcaaaagggagcaagacttgtgg

SEQ ID NO: 33654 - DNA, 80 bp, synthetic construct
  source 1..80: mol_type = other DNA
gtttgtggatgagagaggcctgtacaagtctctaaaaggggcatgcaaactaaaactatgtggggttcttgggcttagac

SEQ ID NO: 33655 - DNA, 80 bp, synthetic construct
  source 1..80: mol_type = other DNA
cggacgtgcacaagcaggtctcgggggtcgatctcggtctcccaaactggaggaagtatgtgctaatgagcgcaggtgct

SEQ ID NO: 33656 - DNA, 80 bp, synthetic construct
  source 1..80: mol_type = other DNA
ctgattgcattgatgttgatgattttcttaatgacgtgttgcaggaagactgatagaacaggatcaacacaccacagtcc

SEQ ID NO: 33657 - DNA, 80 bp, synthetic construct
  source 1..80: mol_type = other DNA
tgggagtcatacaagagcggaggtgaaaccaggctgtgagggcaagtcatctcttctatacttcgagtcccaaagatcac

SEQ ID NO: 33658 - DNA, 80 bp, synthetic construct
  source 1..80: mol_type = other DNA
gtgaaaccaggctgtgaaggcaagtcatctcttctatacttcgagtcgcaaagatcacaccccttttggggggaggggga

SEQ ID NO: 33659 - DNA, 80 bp, synthetic construct
  source 1..80: mol_type = other DNA
cctccacgaaccgatgccaaaggtggtagacaagccaagaggtacttcaaatgatattgtgcttgaacacagacagagct

SEQ ID NO: 33660 - DNA, 80 bp, synthetic construct
  source 1..80: mol_type = other DNA
tgtattgggtccccagatatcagactgggtaagagtggattgagaaaggagacttacttcctataaaggacataagcaat

SEQ ID NO: 33661 - DNA, 80 bp, synthetic construct
  source 1..80: mol_type = other DNA
tgtggaactgaagaacaattagcaacacttctcatcttgagattttcatcatgatgatcgattcaggggaggtttatgat

SEQ ID NO: 33662 - DNA, 80 bp, synthetic construct
  source 1..80: mol_type = other DNA
gacccagttgatccgattgaatcagaagccgagcctagagggactccgactgttcccaacatcttgaggaactctgacta

SEQ ID NO: 33663 - DNA, 80 bp, synthetic construct
  source 1..80: mol_type = other DNA
accttatatcaaaactcaaacatggccacccaaacatatagtagatctggtaggggatacatggcataagctcccgatca

SEQ ID NO: 33664 - DNA, 80 bp, synthetic construct
  source 1..80: mol_type = other DNA
aaactcctagcaaattatatcttgccactctttgatgctctgactatgacagacaacctgaacaaggtattcaagaagct

SEQ ID NO: 33665 - DNA, 80 bp, synthetic construct
  source 1..80: mol_type = other DNA
cgacagttcctcacccttctgagatgttgggactgattcccaagtcttccatctcctgtacttgtggaatgacaggaggg

SEQ ID NO: 33666 - DNA, 80 bp, synthetic construct
  source 1..80: mol_type = other DNA
atctcctgtacttgtggaatgacaggaggggggaatcccagagtctcagtatctgtactcccatcctttgatcaatcatt

SEQ ID NO: 33667 - DNA, 80 bp, synthetic construct
  source 1..80: mol_type = other DNA
acatcttagagtcagatgatgacattcagcgattactaagagactctttgcgaaggaccaggtgggtggatcaagaggtg

SEQ ID NO: 33668 - DNA, 80 bp, synthetic construct
  source 1..80: mol_type = other DNA
ctaagagatttcaaaaccctttaatctctggactgagagtggttcagtgggcaaccggcgcccattacaaacttaagcct

SEQ ID NO: 33669 - DNA, 80 bp, synthetic construct
  source 1..80: mol_type = other DNA
attctagatgatctccacgttttcccatccctctgtcttgtagttggggacggctcaggaggaatctcaagggcagttct

SEQ ID NO: 33670 - DNA, 80 bp, synthetic construct
  source 1..80: mol_type = other DNA
aaacatgtttccagatgctaagcttgttttcaacagcctattagaagtgaatgatctgatggcttccggaacacacccac

SEQ ID NO: 33671 - DNA, 80 bp, synthetic construct
  source 1..80: mol_type = other DNA
atctagatcatccctactagactacagttgcttataaacctgatactccaggaggcctgtacatgatgaggctcttgtac

SEQ ID NO: 33672 - DNA, 80 bp, synthetic construct
  source 1..80: mol_type = other DNA
gacgtcacttggacgatggaaagtcgtccaaccttggtgagatgaccgagaagggggaaagcaagtatcgagaggacttt

SEQ ID NO: 33673 - DNA, 80 bp, synthetic construct
  source 1..80: mol_type = other DNA
cagatggatgaaggagagaatcctagtctcctgttccagtcttacctggacaacgttggggtccaaatagtcagacaaat

SEQ ID NO: 33674 - DNA, 80 bp, synthetic construct
  source 1..80: mol_type = other DNA
cttcaggaaggtctttggaggacaaatcaacccagactactggccgagagcccaagaaagagacaatatctactcattcc

SEQ ID NO: 33675 - DNA, 80 bp, synthetic construct
  source 1..80: mol_type = other DNA
cttgctaaccgagcttctaaactcagtccttctagacaatgaaatctgagatgtcctagagtcaacatgaaaaaaacaca

SEQ ID NO: 33676 - DNA, 80 bp, synthetic construct
  source 1..80: mol_type = other DNA
gataaagcgcactgatgtagaagggaattgggccttgacaggaggcatggaactgacaagggatcccaccatctctgagc

SEQ ID NO: 33677 - DNA, 80 bp, synthetic construct
  source 1..80: mol_type = other DNA
gatgtgcacaaccaggtctcaggggttgacttgggtctcccgaactgggggaagtatatattagtgagtgctggtgctct

SEQ ID NO: 33678 - DNA, 80 bp, synthetic construct
  source 1..80: mol_type = other DNA
atgcgtctttagtcggtcttctcttgagtttgtataggttgagcaaaatatcagggcaaaacaccggcaactataagaca

SEQ ID NO: 33679 - DNA, 80 bp, synthetic construct
  source 1..80: mol_type = other DNA
gattgccttgatgttgataatcttcctaataacatgtttcagaggatttaatctaccaaaatctacacaacgcagccttg

SEQ ID NO: 33680 - DNA, 80 bp, synthetic construct
  source 1..80: mol_type = other DNA
gagaaacagggagaaagatgtcagtcactccccaaagcgggaagatcatatcttcctgggagtcatataaaagtggaggt

SEQ ID NO: 33681 - DNA, 80 bp, synthetic construct
  source 1..80: mol_type = other DNA
gtcatataaaagtggaggtgagaccatactgtgagagctggtcttcttgtagactcctcaagccctgaagatcacctccc

SEQ ID NO: 33682 - DNA, 80 bp, synthetic construct
  source 1..80: mol_type = other DNA
gagaccatactgtgagagctggtcttcttgtagactcctcaagccctgaagatcacctccccctggggttggggggaatc

SEQ ID NO: 33683 - DNA, 80 bp, synthetic construct
  source 1..80: mol_type = other DNA
caagagctaataccaaaggttgtggactggccagagggtgtttcggatgactccgtacccgggcatagacagaggtcata

SEQ ID NO: 33684 - DNA, 80 bp, synthetic construct
  source 1..80: mol_type = other DNA
gtgcatcccctgatagtggactcaacgcgagttgattgagaaaggcaacttgcctcccatgaaggacataagcaatagct

SEQ ID NO: 33685 - DNA, 80 bp, synthetic construct
  source 1..80: mol_type = other DNA
cacaatcatctagcatctcagcaaagtgtacatacctacaaagggctgggtcatccaagcttttcagtcgagaaaaaaac

SEQ ID NO: 33686 - DNA, 80 bp, synthetic construct
  source 1..80: mol_type = other DNA
tgttcttgtctcgcttcaactccttaatgattttgctttctcctcctgagccccgatactcagatgacttggtatctcaa

SEQ ID NO: 33687 - DNA, 80 bp, synthetic construct
  source 1..80: mol_type = other DNA
atgagccaactcaaagaaatacaggaggagatcacccgccatgaacagcagattgtcattgctcggcaaaaactcaaaga

SEQ ID NO: 33688 - DNA, 80 bp, synthetic construct
  source 1..80: mol_type = other DNA
aatcaatgggaatccaactggaccaaaggattatcttgctgttcatgatggagtggggttctgatattgtcaaccatttc

SEQ ID NO: 33689 - DNA, 80 bp, synthetic construct
  source 1..80: mol_type = other DNA
gtaatgatgcatatttacttgggagggaaaaagcactcagggaatcacatctggctgagattgatgacttgattgatctt

SEQ ID NO: 33690 - DNA, 80 bp, synthetic construct
  source 1..80: mol_type = other DNA
gctgactcaggagacccgacaccgcctgattccatcaagtccccgcaagcaccatgggtgtttgcctgtgcgcctgatcg

SEQ ID NO: 33691 - DNA, 80 bp, synthetic construct
  source 1..80: mol_type = other DNA
tccttaaatgcaacggttattgccacatgtgccccgcatgaaatgtctgttcttgggggttatttaggagaggagttttt

SEQ ID NO: 33692 - DNA, 80 bp, synthetic construct
  source 1..80: mol_type = other DNA
cgctttatttggttttcaaaacttatggcaccatgctggtaaatcctgaatacagagcaattcaacatctatccagagca

SEQ ID NO: 33693 - DNA, 80 bp, synthetic construct
  source 1..80: mol_type = other DNA
tttcctgcggtcactggattcataactcaggtgacttcgtctttctcatccgagttataccttcgattctcaaaacgggg

SEQ ID NO: 33694 - DNA, 80 bp, synthetic construct
  source 1..80: mol_type = other DNA
ccaagagtgagatgcaaagagcccgctctctgaactaccaagatcttgtgagaggatttccagatgaaataatatccaat

SEQ ID NO: 33695 - DNA, 80 bp, synthetic construct
  source 1..80: mol_type = other DNA
ttatttcaggaagcaagtcatccgtggaggtgtttatctgtcctggagttggtccgatgacacttcagtattcaaaaggg

SEQ ID NO: 33696 - DNA, 80 bp, synthetic construct
  source 1..80: mol_type = other DNA
ttgtcggaaacatagaagatctgtctagggaggtcgagaagcaccttcgagggtacaaccggtggattaccctcgatgac

SEQ ID NO: 33697 - DNA, 80 bp, synthetic construct
  source 1..80: mol_type = other DNA
attaggtccagatcatctcttctggattatagctgcttatgaactaggctttctcgagggaatgtaatgaccaagactca

SEQ ID NO: 33698 - DNA, 80 bp, synthetic construct
  source 1..80: mol_type = other DNA
gggatgatgtaccctgaaaaaaacgagatcccaattcatgacctctgttttttagactgtttttcccatctttattgttt

SEQ ID NO: 33699 - DNA, 80 bp, synthetic construct
  source 1..80: mol_type = other DNA
tcatcaagctcgccctaattcattcgctgagtttttaaacaagacatactcgagtgattcttaaggagcagaacattaga

SEQ ID NO: 33700 - DNA, 80 bp, synthetic construct
  source 1..80: mol_type = other DNA
attgtggaccccaatccttcatgaaaaaaactaacacccctcctcttgaaccacttcagaaatgagcaagatttttgtca

SEQ ID NO: 33701 - DNA, 80 bp, synthetic construct
  source 1..80: mol_type = other DNA
tcgctcggaacatcgaggacaaccaggctcatctccaaggagaacccatagaggtggacagtctccctgaagacatgaga

SEQ ID NO: 33702 - DNA, 80 bp, synthetic construct
  source 1..80: mol_type = other DNA
cgactccaattgggagatgaaaagccgtctggcatcagcgagctggccaaagctggggagagcaagtgtcaggaagactt

SEQ ID NO: 33703 - DNA, 80 bp, synthetic construct
  source 1..80: mol_type = other DNA
tcagatggatgagggggaggaccccatcttcttgttccaatcctatctggacaatattggagttcagatagtcagacaaa

SEQ ID NO: 33704 - DNA, 80 bp, synthetic construct
  source 1..80: mol_type = other DNA
agttcgccggggaagtcttcagaggacaaggccacccagacttccaaccgagaactcaagaaggagacagtgtcagcttc

SEQ ID NO: 33705 - DNA, 80 bp, synthetic construct
  source 1..80: mol_type = other DNA
cgctcagcgagaaagtcaatcatctaaggccaaagctgctgcccagaccgcctctggtcctcctgctctagagtggtcca

SEQ ID NO: 33706 - DNA, 80 bp, synthetic construct
  source 1..80: mol_type = other DNA
ctgccaacgaagaggatgacatgtctgtggaggctgaaatcgctcaccagattgccgagagcttttccaagaagtataag

SEQ ID NO: 33707 - DNA, 80 bp, synthetic construct
  source 1..80: mol_type = other DNA
cccattgactgatctctcaaactcggtcccactatacaatcaaattcgaactgttttaaatccaacatgaaaaaaacagg

SEQ ID NO: 33708 - DNA, 80 bp, synthetic construct
  source 1..80: mol_type = other DNA
caacatcactgatagaatgaactttctacgcaagatagtgaagaactgtagagatgaggacacgcagaagtcccctctcg

SEQ ID NO: 33709 - DNA, 80 bp, synthetic construct
  source 1..80: mol_type = other DNA
acatgttatggtgccgttgaatcgctgcattttattatagtcaaatcaataacctttgcattttgagcctctcggatgtg

SEQ ID NO: 33710 - DNA, 80 bp, synthetic construct
  source 1..80: mol_type = other DNA
aaaaaaactattaacatccctcgaaagatctaaagaaagatgatccttcaggctcttctatttgtgcctatccttatttc

SEQ ID NO: 33711 - DNA, 80 bp, synthetic construct
  source 1..80: mol_type = other DNA
ctcgttttgtttcggggacttccccatctacacgataccagagaaacttggcccttggagtcccatcgacatacatcatc

SEQ ID NO: 33712 - DNA, 80 bp, synthetic construct
  source 1..80: mol_type = other DNA
tggaagatgagggatgcagcagtctgtcagggttttcttacatggagctgaaggtgggatacatctctgccataaaggtg

SEQ ID NO: 33713 - DNA, 80 bp, synthetic construct
  source 1..80: mol_type = other DNA
ccaaagagtctctcgttatcatatcaccaagtgtggctgatttggatccctacgataaatcccttcattcaagagtcttc

SEQ ID NO: 33714 - DNA, 80 bp, synthetic construct
  source 1..80: mol_type = other DNA
tcagatgggaagtgtttgggaataacaatctcttctacctactgctccactaatcatgattacactatctggatgcccga

SEQ ID NO: 33715 - DNA, 80 bp, synthetic construct
  source 1..80: mol_type = other DNA
ggaagcaagacttggaacgtcttgtgacatcttcacaaccagcagagggaagagagcctctaaagggggcaagacttgcg

SEQ ID NO: 33716 - DNA, 80 bp, synthetic construct
  source 1..80: mol_type = other DNA
gattcgttgatgaaaggggtttatataagtctctcaaaggggcatgtaagctcaaactgtgcggagtttctgggcttaga

SEQ ID NO: 33717 - DNA, 80 bp, synthetic construct
  source 1..80: mol_type = other DNA
ttatggatggaacctgggtatcaattcaggcaccagacgaggccaaatggtgctctactgatcaactggtgaatatacat

SEQ ID NO: 33718 - DNA, 80 bp, synthetic construct
  source 1..80: mol_type = other DNA
gatattcgctcggatgagatagaacatcttgttgtagaggagttggtcaagaagagggaagagtgtctggatgcattgga

SEQ ID NO: 33719 - DNA, 80 bp, synthetic construct
  source 1..80: mol_type = other DNA
gtctattatgaccaccaaatcggtaagcttcaggcgtctcagccacttgagaaaacttgttcctgggttcggaaaggcat

SEQ ID NO: 33720 - DNA, 80 bp, synthetic construct
  source 1..80: mol_type = other DNA
taatccccctaatgcatcccttggcaaacccatcaacggtcttcaaggatggtgacgaggcggaggactttgttgaagtt

SEQ ID NO: 33721 - DNA, 80 bp, synthetic construct
  source 1..80: mol_type = other DNA
ctggcgatcctaatgctgacaatcttcttgatgacatgttgcagaagagctaatagaacaagatcaacacaacgagatct

SEQ ID NO: 33722 - DNA, 80 bp, synthetic construct
  source 1..80: mol_type = other DNA
tggggggttagaaaggaaagtatcggttcctcccaaagatgggagagtcatgtcttcatgggagtcatacaaaagtggag

SEQ ID NO: 33723 - DNA, 80 bp, synthetic construct
  source 1..80: mol_type = other DNA
ttcctcccaaagatgggagagtcatgtcttcatgggagtcatacaaaagtggaggtgagactagtctgtaagggcgtgtc

SEQ ID NO: 33724 - DNA, 80 bp, synthetic construct
  source 1..80: mol_type = other DNA
gtgagactagtctgtaagggcgggtcatcccctccatgccttgcctccataagatagcctcttttcgagatcaggtggaa

SEQ ID NO: 33725 - DNA, 80 bp, synthetic construct
  source 1..80: mol_type = other DNA
tctcttgctttgacagttcttcctggaatctgtgcaacagggtagattcaagggtcaagatactttcatcaatcatctca

SEQ ID NO: 33726 - DNA, 80 bp, synthetic construct
  source 1..80: mol_type = other DNA
actgatcagctacagtgaagtagactctgataatacatgacatcttctgacggtatcagtgaccaatggtgctctcaccc

SEQ ID NO: 33727 - DNA, 80 bp, synthetic construct
  source 1..80: mol_type = other DNA
cccagggactaatgccaaaggttgtggacaatccaactgatatctcagacgactctgtgcttacgcttgggtaaaggcca

SEQ ID NO: 33728 - DNA, 80 bp, synthetic construct
  source 1..80: mol_type = other DNA
tagcaaggtcctctgcaatagatcgggtgggggttgactgagagaagtgatttgcctcctatgaaggatacaagcaatat

SEQ ID NO: 33729 - DNA, 80 bp, synthetic construct
  source 1..80: mol_type = other DNA
atcacaaccatcttgcatccagatggggtgtgcataactacaaagggctgggccatcaaagctttccagtcaagaaaaaa

SEQ ID NO: 33730 - DNA, 80 bp, synthetic construct
  source 1..80: mol_type = other DNA
tatggaggggagaaggaattggcaacacttctcatcctgattactgcatcatgatgattgatccaggggaagtttatgac

SEQ ID NO: 33731 - DNA, 80 bp, synthetic construct
  source 1..80: mol_type = other DNA
gaccccattgatccaattgagtcagaggctgagccgagagggaaccccaccactcccaatatcttgagaaactctgacta

SEQ ID NO: 33732 - DNA, 80 bp, synthetic construct
  source 1..80: mol_type = other DNA
ctgtgccagctatacattgccggagatcaggtcctgtccatgtgcggaaattctggctatgaagtcattaaaatattgga

SEQ ID NO: 33733 - DNA, 80 bp, synthetic construct
  source 1..80: mol_type = other DNA
aagctcctagccaattatatcttgccactcttcgatgcattgactatgacagataacttgaacaaagtgttcaaaaagct

SEQ ID NO: 33734 - DNA, 80 bp, synthetic construct
  source 1..80: mol_type = other DNA
aagccgttttccattacttgttgtttagtcccattttaaagggcagagtttacaagatcttgggtgctgaaggggacaat

SEQ ID NO: 33735 - DNA, 80 bp, synthetic construct
  source 1..80: mol_type = other DNA
caatttcctgtacttgcggagtgacaggaggtggaaatcctagaatatcagtgtctgtgctcccatcttttgatcattca

SEQ ID NO: 33736 - DNA, 80 bp, synthetic construct
  source 1..80: mol_type = other DNA
ttcttttcaagaggctcattgaaaggatatttgggctcatcaacttccatgtcgacccagctgttccatgcctgggagaa

SEQ ID NO: 33737 - DNA, 80 bp, synthetic construct
  source 1..80: mol_type = other DNA
gatgcggaaagtgtataaggcccattgatgatatcacccttgagacgtctcagatattcgagtttccagatgtctcaaag

SEQ ID NO: 33738 - DNA, 80 bp, synthetic construct
  source 1..80: mol_type = other DNA
aatctctaagtggcaaggagagatcacgccatatagggtcagctcaagggctcctgtattcaatcttggttgcgattcat

SEQ ID NO: 33739 - DNA, 80 bp, synthetic construct
  source 1..80: mol_type = other DNA
aactgatctccggggtgatttcatacatcctcttgagattggacaatcacccatccttgtacataatgctcagagagcca

SEQ ID NO: 33740 - DNA, 80 bp, synthetic construct
  source 1..80: mol_type = other DNA
gctcttagaggagagatattttctattccccagaaggtccccgctgcttacccgaccacgatgaaggagggcaacagatc

SEQ ID NO: 33741 - DNA, 80 bp, synthetic construct
  source 1..80: mol_type = other DNA
acgcttaacgacaaaaccagagaaggagtagacatgatcattcgcgaagcaaaaatgtaacacccctacaatggattctg

SEQ ID NO: 33742 - DNA, 80 bp, synthetic construct
  source 1..80: mol_type = other DNA
gaagcacaaaaatgacttatctgaccttaatcacataccagtctcacatcctccttcagaggatagagagaagcttgtcc

SEQ ID NO: 33743 - DNA, 80 bp, synthetic construct
  source 1..80: mol_type = other DNA
aagaaaatgagagctgatctcaggcagttgagttcactgatgaggcaagtcctaggaggtcacggggaagattctttgga

SEQ ID NO: 33744 - DNA, 80 bp, synthetic construct
  source 1..80: mol_type = other DNA
ctcaggagaggatatccagagattgttaagagatgctcttcagaggacaagatgggtagaccaggaagtccgccatgccg

SEQ ID NO: 33745 - DNA, 80 bp, synthetic construct
  source 1..80: mol_type = other DNA
ccaagacaatgacaggtgaccatagcccttccaagaagacatctcggaaggctggttgttctgagtggatatgttcagcc

SEQ ID NO: 33746 - DNA, 80 bp, synthetic construct
  source 1..80: mol_type = other DNA
cagcaggtagcaatatccacctcttcaaatccagctccagtttcagagatggatataagaaccctttcccggaaacttca

SEQ ID NO: 33747 - DNA, 80 bp, synthetic construct
  source 1..80: mol_type = other DNA
ctttaaatgcgactgtcatatccacctgtgctcctcatgagatgtctgttttgggaggctaccttggggaggagtttttc

SEQ ID NO: 33748 - DNA, 80 bp, synthetic construct
  source 1..80: mol_type = other DNA
aaatcctctcatttcaggtctaagggtggtccaatgggcaactggcgcacactacaaactcaagccaatccttgatgacc

SEQ ID NO: 33749 - DNA, 80 bp, synthetic construct
  source 1..80: mol_type = other DNA
tcaatgcttacccatctttctgtttggtggtcggtgacggctcaggaggaatttcgagaactgtattaaacatgtttcct

SEQ ID NO: 33750 - DNA, 80 bp, synthetic construct
  source 1..80: mol_type = other DNA
gatgccaagttagtcttcaacagcttactagaggtgagtgacctcatggcctcgggaactcaccccctacctccgtcagc

SEQ ID NO: 33751 - DNA, 80 bp, synthetic construct
  source 1..80: mol_type = other DNA
cattatgagcgggggtgatgacatcgtgtctagggtcgttgattttgagtcaatttgggagaagccgtctgatctgagaa

SEQ ID NO: 33752 - DNA, 80 bp, synthetic construct
  source 1..80: mol_type = other DNA
acctgtctacatggagatattttcaatcagtccagagtaaattgaacatgtcatatgacttgataatatgtgacgcagag

SEQ ID NO: 33753 - DNA, 80 bp, synthetic construct
  source 1..80: mol_type = other DNA
gtcacagacataatatcagtgaacaagataacattgctcatgtcagactttgttttgtcgatagatgggcccctagatct

SEQ ID NO: 33754 - DNA, 80 bp, synthetic construct
  source 1..80: mol_type = other DNA
gatattcaaatcctatgggaccatgctggtgaatccagactataaggcaattcaacatctctccagggcgttccctaagg

SEQ ID NO: 33755 - DNA, 80 bp, synthetic construct
  source 1..80: mol_type = other DNA
caactggatacatcacccaactgacatcctctttctcatcagagttgtatctgaggttttctaaaagaggcaagtttttt

SEQ ID NO: 33756 - DNA, 80 bp, synthetic construct
  source 1..80: mol_type = other DNA
agagatgtggaatacctgacttcttccaccttaagggaaatgagtcttgtactgttcaattgtagtagtccaaaaagtga

SEQ ID NO: 33757 - DNA, 80 bp, synthetic construct
  source 1..80: mol_type = other DNA
gttgcagagagcccgctcattgaactatcaagatcttataagaggctttcctgaggagattgtgtccaacccatacaatg

SEQ ID NO: 33758 - DNA, 80 bp, synthetic construct
  source 1..80: mol_type = other DNA
gggaaggggacgtttgaacggagattcttcagagatgagaaagaactgcaagattatgaggcagcagagtctatgaaaac

SEQ ID NO: 33759 - DNA, 80 bp, synthetic construct
  source 1..80: mol_type = other DNA
aaatgataataacactgatagacagtgaagttgagtcttttctggttcacaagatggtagatgacttggagctacaaaga

SEQ ID NO: 33760 - DNA, 80 bp, synthetic construct
  source 1..80: mol_type = other DNA
ggaactctgtcgaaaatgtccatcatcatcgccattgtgatagtgtactctaatagggtgtttaatgtgtccaagccact

SEQ ID NO: 33761 - DNA, 80 bp, synthetic construct
  source 1..80: mol_type = other DNA
tagcgatcctgttttttaccccccttctgacccaaagattctaaggcatttcaacatatgctgcagtacaatgatgtact

SEQ ID NO: 33762 - DNA, 80 bp, synthetic construct
  source 1..80: mol_type = other DNA
tatcaactgttttgggagacgttcccaactttgctaggttgcatgaattgtataacagcccaatcacttattatttcaaa

SEQ ID NO: 33763 - DNA, 80 bp, synthetic construct
  source 1..80: mol_type = other DNA
aagcagataatcagagggagcatatatctttcttggagttggtcagatgacacttcagtgttcaaaagggtgtcttgcaa

SEQ ID NO: 33764 - DNA, 80 bp, synthetic construct
  source 1..80: mol_type = other DNA
ctcaaatctcagcttgtcatcccattggattcgattaatttacaaaataatcaagacaacccgttttacaggaagtcacg

SEQ ID NO: 33765 - DNA, 80 bp, synthetic construct
  source 1..80: mol_type = other DNA
ttgacctatctaaggaagtcgaaaagcgcctgaaaggatataataggtggataaccttcagtgatgtaagatctagatca

SEQ ID NO: 33766 - DNA, 80 bp, synthetic construct
  source 1..80: mol_type = other DNA
tctctcttggattatagttgtctctgattgggatccttcagcgtcttctctgttgaaatcatgtttggtacgagaggctc

SEQ ID NO: 33767 - DNA, 80 bp, synthetic construct
  source 1..80: mol_type = other DNA
agaggctcgaaaaaaacatatgcaagattcagaacctgtacttgtttgaatgtttttattacttgttggttttttttgtt

SEQ ID NO: 33768 - DNA, 80 bp, synthetic construct
  source 1..80: mol_type = other DNA
agacattgctttggcagatgatgcaaccgtcaactcagatgatgaggattacttttcaggagaaacaagaagtccagagg

SEQ ID NO: 33769 - DNA, 80 bp, synthetic construct
  source 1..80: mol_type = other DNA
cagtttatacaagaataatgatgaatgggggtcgacttaaaaggtcacacattaggagatacatctcagtcagctccaac

SEQ ID NO: 33770 - DNA, 80 bp, synthetic construct
  source 1..80: mol_type = other DNA
catcagtcccgaccgaactcatttgcggagtttctcaataagacatattcaagtgactcgtaatcagatgtgtcaggtct

SEQ ID NO: 33771 - DNA, 80 bp, synthetic construct
  source 1..80: mol_type = other DNA
tacccctaaattattgagaacatcatctcatcttacaagaaaaaaactaacacccctcctttcgatccatcttcgctatg

SEQ ID NO: 33772 - DNA, 80 bp, synthetic construct
  source 1..80: mol_type = other DNA
agcaagatctttgtcaatccgagtgcgatcagggcaggcatggccgacctggaaatggcagaggagactgttgatttgat

SEQ ID NO: 33773 - DNA, 80 bp, synthetic construct
  source 1..80: mol_type = other DNA
cccgctattaaagaccaaaagaagcctagtataactcttgggaaggctccagatttaaataaggcatataagtccatatt

SEQ ID NO: 33774 - DNA, 80 bp, synthetic construct
  source 1..80: mol_type = other DNA
aaacagaaacattgaggataatcaggcacatctccagggggagcctatagaggttgacagtctccctgaggatatcaaaa

SEQ ID NO: 33775 - DNA, 80 bp, synthetic construct
  source 1..80: mol_type = other DNA
agcttgatattagtgaaggaagatctaagagttcagcggataatcctcaggatgttgattgcaggatgagagaggacttc

SEQ ID NO: 33776 - DNA, 80 bp, synthetic construct
  source 1..80: mol_type = other DNA
caaatggacgacgttgaagacccgaacatccaatttcagtcttacttggacaatataggaatccagatcgtcagaaagat

SEQ ID NO: 33777 - DNA, 80 bp, synthetic construct
  source 1..80: mol_type = other DNA
gagaactggggagcgattcttcaaaatctggtcccaaactgtagaggagatcatttcttatgtggtggtcaactttccca

SEQ ID NO: 33778 - DNA, 80 bp, synthetic construct
  source 1..80: mol_type = other DNA
accaatcagggaagacaaccgagaataaatccactcagacaacccccaagaaagtcaaaactgagccctcctcaactcca

SEQ ID NO: 33779 - DNA, 80 bp, synthetic construct
  source 1..80: mol_type = other DNA
gccaaaagatcagatcaactgtccaaaactgagatggctgccaagacagcctctggcccccctgccttagaatggtctac

SEQ ID NO: 33780 - DNA, 80 bp, synthetic construct
  source 1..80: mol_type = other DNA
aaccaatgatgaggatgatgtctccgtggaggccgaaattgcacatcaaattgcagagagcttctcaaagaagtacaagt

SEQ ID NO: 33781 - DNA, 80 bp, synthetic construct
  source 1..80: mol_type = other DNA
ttccctccagatcatctggaatattcttgtacaacttcgagcaattgaaaatgaatctcgatgatatagtgaaagaagcc

SEQ ID NO: 33782 - DNA, 80 bp, synthetic construct
  source 1..80: mol_type = other DNA
aagagtgtgcctggtgttaccagccttgccagagatggtctccggcttcctcttaggtgtatacttggatgggttggatc

SEQ ID NO: 33783 - DNA, 80 bp, synthetic construct
  source 1..80: mol_type = other DNA
ttctcactccaaaaagtttcaactactggtcgggtcagaaaaattgaacaagattatgcaggatgatctgaaccgttaca

SEQ ID NO: 33784 - DNA, 80 bp, synthetic construct
  source 1..80: mol_type = other DNA
gtcgggaatgaatgctgcaaagctggaccccgatgatgtatgttcttacttagctgcagctatggagttatttgaggtgg

SEQ ID NO: 33785 - DNA, 80 bp, synthetic construct
  source 1..80: mol_type = other DNA
tgtcatgttagtccgtcctgttacacagctcaaactttcaggtggatatccactgtttgaggtaattcatgaaaaaaact

SEQ ID NO: 33786 - DNA, 80 bp, synthetic construct
  source 1..80: mol_type = other DNA
gtcaacaccactgataaaatgaactttctccgcaagatagtcaggaattgtaaggatgaggatgatcagaagcccccact

SEQ ID NO: 33787 - DNA, 80 bp, synthetic construct
  source 1..80: mol_type = other DNA
ggtatccgctccaccagatgatgatgatctatggcttcctcctccagagtatgttcctctgaccgagatcactggcaaga

SEQ ID NO: 33788 - DNA, 80 bp, synthetic construct
  source 1..80: mol_type = other DNA
ggaacatgcgaaatttttgtatcaatggagaggtcaaagtctgtagtcctaatggttattcctttaggattttaagacac

SEQ ID NO: 33789 - DNA, 80 bp, synthetic construct
  source 1..80: mol_type = other DNA
attttgaaatcgtttgacgagatttactctggaaaccatagaatgatcgggctggtcaaggtggtcataggtctggctct

SEQ ID NO: 33790 - DNA, 80 bp, synthetic construct
  source 1..80: mol_type = other DNA
gtctggagctcccgttccggaaggaatgaattgggtctacaaattgaggagaaccctgatatttcaatgggctgaatctc

SEQ ID NO: 33791 - DNA, 80 bp, synthetic construct
  source 1..80: mol_type = other DNA
gtgggccgctagacggggaagaattggaatattctcaagagataacatgggatgatgactcagagtttataggcctgcag

SEQ ID NO: 33792 - DNA, 80 bp, synthetic construct
  source 1..80: mol_type = other DNA
ataagagtgagtgcgaggcaatgccatattcagggccggatttggtgcatcaatatgaactcccgggcatgccagctatg

SEQ ID NO: 33793 - DNA, 80 bp, synthetic construct
  source 1..80: mol_type = other DNA
gtctgacatgtctctcaagactcagcagtctgaagaggacaagaacagttctctactgttagagtagtgatttccccctc

SEQ ID NO: 33794 - DNA, 80 bp, synthetic construct
  source 1..80: mol_type = other DNA
atgtctactcactgatttacctctgagatggagaatgcacagttttatcttcaacttcctgtgagcaatagaacaaaaac

SEQ ID NO: 33795 - DNA, 80 bp, synthetic construct
  source 1..80: mol_type = other DNA
tctgcccagaagattggacgagttatgggattttgattgccagaaaaggagataaaattacaccagccacccttgttgac

SEQ ID NO: 33796 - DNA, 80 bp, synthetic construct
  source 1..80: mol_type = other DNA
atgttatggtgccatacaatcgctgcattttatcaagatacctgattacatttacatgtgaaacctcccagatgtgaaaa

SEQ ID NO: 33797 - DNA, 80 bp, synthetic construct
  source 1..80: mol_type = other DNA
aaacagttaacacccctcgaacattctaagaaagatgctccttcaaattgtcctccttatgtccctgatggtcttctcac

SEQ ID NO: 33798 - DNA, 80 bp, synthetic construct
  source 1..80: mol_type = other DNA
catgccctgggaaattccctctctacacaatacccgacaaattgggcccttggagcccgatagatattcatcatttgagc

SEQ ID NO: 33799 - DNA, 80 bp, synthetic construct
  source 1..80: mol_type = other DNA
tgtccaaacaacctgattgttgaggatgagggatgtacaagcctgtccgggttctcatatatggagctaaaagttgggtt

SEQ ID NO: 33800 - DNA, 80 bp, synthetic construct
  source 1..80: mol_type = other DNA
tataaccactataaaggttagcgggtttacctgcactggagttgtgactgagtcagagacctacactaacttctttgggt

SEQ ID NO: 33801 - DNA, 80 bp, synthetic construct
  source 1..80: mol_type = other DNA
atgtcacgactactttcaagaggaaacactttcgtcctaccccggagttttgtaggaatgcatacaactggaaagttgca

SEQ ID NO: 33802 - DNA, 80 bp, synthetic construct
  source 1..80: mol_type = other DNA
ggtgaccccaggtatgaggagtctttgcacaacccttatccagactatcactggttgagaacagttacaaccactaagga

SEQ ID NO: 33803 - DNA, 80 bp, synthetic construct
  source 1..80: mol_type = other DNA
gtctctcttgatcatatcacccagtgtagtcgacatggacccctatgacaaatccttgcattcgaaaatgttccctaaag

SEQ ID NO: 33804 - DNA, 80 bp, synthetic construct
  source 1..80: mol_type = other DNA
gcacatgctcgggagcctcggtcccttcgattttctgctccactaatcatgattacacattgtggatgcctgagaatcct

SEQ ID NO: 33805 - DNA, 80 bp, synthetic construct
  source 1..80: mol_type = other DNA
aaaccaggaatgtcatgtgacatctttacaacaagcaaaggaaagaaagcatcgaagggaggaaaggtgtgcgggtttgt

SEQ ID NO: 33806 - DNA, 80 bp, synthetic construct
  source 1..80: mol_type = other DNA
ataaagagaacagacattgagggcaactgggcattgacgggaggacaagacttgaccagggatcccacagtagcagaaca

SEQ ID NO: 33807 - DNA, 80 bp, synthetic construct
  source 1..80: mol_type = other DNA
tgacgaacgtggattgtacaaatctctgaagggagcatgcaaacttaagttgtgcggaatctccggtctcaggctcatgg

SEQ ID NO: 33808 - DNA, 80 bp, synthetic construct
  source 1..80: mol_type = other DNA
acgggtcttgggtttccatccaaaatcatgaggaggccaaatggtgctctcctgatcagttggtaaatattcatgatttt

SEQ ID NO: 33809 - DNA, 80 bp, synthetic construct
  source 1..80: mol_type = other DNA
cattcagacgagatagaacacttaattgtagaggaactggtcaggaagagagaagaatgtttggatgcactggagtcaat

SEQ ID NO: 33810 - DNA, 80 bp, synthetic construct
  source 1..80: mol_type = other DNA
aatgactaccaaatcagtcagttttagacgtctcagccacctaaggaagcttgtgccaggattcgggaaggcttatacca

SEQ ID NO: 33811 - DNA, 80 bp, synthetic construct
  source 1..80: mol_type = other DNA
ttgtcaacaaaacactcatggaggctgatgcacactataaatcagtcagaacatggaatgagatcataccatctaaaggg

SEQ ID NO: 33812 - DNA, 80 bp, synthetic construct
  source 1..80: mol_type = other DNA
tgtctaaaggttagagagaggtgtcatcctccttataacggggtgttctttaacgggatcattttgagtccagacggaca

SEQ ID NO: 33813 - DNA, 80 bp, synthetic construct
  source 1..80: mol_type = other DNA
tgtcttaattccggagatgcagtcctccttgctacagcagcacattgagctacttgaatcatcagtaatacctcttatcc

SEQ ID NO: 33814 - DNA, 80 bp, synthetic construct
  source 1..80: mol_type = other DNA
atcctctggcagatccgtctactgtctttaaaagagatgatgaggcagaagacttcatagaagtccaccttcccgatgtc

SEQ ID NO: 33815 - DNA, 80 bp, synthetic construct
  source 1..80: mol_type = other DNA
caaaagcaggtctccgggatcgacttgggtctctcggagtgggagagatatctgatcatcggggcttctgctgtaatctt

SEQ ID NO: 33816 - DNA, 80 bp, synthetic construct
  source 1..80: mol_type = other DNA
gtttgctctggcaataatttttgcagtttgttgcagaaggtgtaagagacggaaaaaggccagaactgatcgtatagagt

SEQ ID NO: 33817 - DNA, 80 bp, synthetic construct
  source 1..80: mol_type = other DNA
cgcttctttagtaggtcttctcctaagcctttataggttaagcaagatatcaggccagaacacaggaaattataagacca

SEQ ID NO: 33818 - DNA, 80 bp, synthetic construct
  source 1..80: mol_type = other DNA
tagaccgtaaggtgtcagtaacatctcaaagtgggaaagtgatcccttcttgggaatcctacaaaattgaagccggaggt

SEQ ID NO: 33819 - DNA, 80 bp, synthetic construct
  source 1..80: mol_type = other DNA
catttcaggtcgtgagatactggtttcaggtcaatttttaggacaatcaactctcctcataacagtggagagcagtccaa

SEQ ID NO: 33820 - DNA, 80 bp, synthetic construct
  source 1..80: mol_type = other DNA
ctcattgattgttcatgagccatatgcaatactgagatctacaatactgtgtggctcccatacatcatccctattaatca

SEQ ID NO: 33821 - DNA, 80 bp, synthetic construct
  source 1..80: mol_type = other DNA
gataagattgatttgggtgtaacggtacatagggtcctgcagcaatttcaatgatctatggtgctttagcagaataagag

SEQ ID NO: 33822 - DNA, 80 bp, synthetic construct
  source 1..80: mol_type = other DNA
caattaaaatggactaatcaagcagaggagaatactagagaactgcctaattttcccttccccttgtaaatatgcctatc

SEQ ID NO: 33823 - DNA, 80 bp, synthetic construct
  source 1..80: mol_type = other DNA
tgtttcagtgtgctacccattttatcaaagaaaggaaattttccttctctgggggatagtatctatgcaatccccgttga

SEQ ID NO: 33824 - DNA, 80 bp, synthetic construct
  source 1..80: mol_type = other DNA
ttacataaaataagagtcaaatgtacataccagcaacgggtcgaatcatcctaatcatgtaaccatgaaaaaaacattgc

SEQ ID NO: 33825 - DNA, 80 bp, synthetic construct
  source 1..80: mol_type = other DNA
ctcagtaaggaataacattcctcctcagaaacatcattccaaaatgattgaccctggtgaggtgtatgacgatccaatcg

SEQ ID NO: 33826 - DNA, 80 bp, synthetic construct
  source 1..80: mol_type = other DNA
accccgtcgagcctgaacctgaactaaaaaacaacacagtgattcctaacatcctccggaactctgattacaatcttaac

SEQ ID NO: 33827 - DNA, 80 bp, synthetic construct
  source 1..80: mol_type = other DNA
tcccccttgatcgaagactcggcaaggctcatgttggagtggctaaccaccggaaacaagcctggacgactgaccctcac

SEQ ID NO: 33828 - DNA, 80 bp, synthetic construct
  source 1..80: mol_type = other DNA
acattgcagataggatagaacagatttttgaaactgccccttttgcaaagattgtggaacatcacacgttaatgactact

SEQ ID NO: 33829 - DNA, 80 bp, synthetic construct
  source 1..80: mol_type = other DNA
tgacaactgcataagatcctataagacattaaagtgttacttccgaaaggtcgacgttgggtctttgaaagtcgggggtc

SEQ ID NO: 33830 - DNA, 80 bp, synthetic construct
  source 1..80: mol_type = other DNA
ttgcagcacaagccatgatatcgctgtggctccatggagagcactctgagtcgaacagaagcagaaaatgtctctcagat

SEQ ID NO: 33831 - DNA, 80 bp, synthetic construct
  source 1..80: mol_type = other DNA
ctcacccaattttatcaaaaatcttcccctattgagaaacttctgaattacacactaggaaacagaggcctcaggatacc

SEQ ID NO: 33832 - DNA, 80 bp, synthetic construct
  source 1..80: mol_type = other DNA
accagaaggagtccttttctgtctaaagaaggtagattatgacagggcctttgggaggtacttagcaaacatttatgcct

SEQ ID NO: 33833 - DNA, 80 bp, synthetic construct
  source 1..80: mol_type = other DNA
cttatctgtttttccatgttatcattctgtacatgaatgccctagactgggatgaggagaagactatccttgccttgtgg

SEQ ID NO: 33834 - DNA, 80 bp, synthetic construct
  source 1..80: mol_type = other DNA
aaagatttgagctctgtagatatcaagaaagaccaggtaaaatttagagacccaatatggggctctttgatagtcacaaa

SEQ ID NO: 33835 - DNA, 80 bp, synthetic construct
  source 1..80: mol_type = other DNA
agactttgtatactctcaaaatgccaattgtctgtttgatagaaattacactttgatgctaaaagacctctttctatcca

SEQ ID NO: 33836 - DNA, 80 bp, synthetic construct
  source 1..80: mol_type = other DNA
gattcaactccctactcatattactttctcctccagagcctaggtactctgatgatttaatatcccagctgtgccagctt

SEQ ID NO: 33837 - DNA, 80 bp, synthetic construct
  source 1..80: mol_type = other DNA
tatattgcaggagataacgttttgtcaatgtgtggaaactcggggtatgatgttattaagatgctagagccttatgtagt

SEQ ID NO: 33838 - DNA, 80 bp, synthetic construct
  source 1..80: mol_type = other DNA
gaacagtctggttcagagagctgagggtttcagaccgttgatccattctttaggtgacttccctctattcatcagggaca

SEQ ID NO: 33839 - DNA, 80 bp, synthetic construct
  source 1..80: mol_type = other DNA
cataagatgtgtgcaaactggagtacgatcccaaattttagatttttggctggaacttatgacatgttcttttctcgagt

SEQ ID NO: 33840 - DNA, 80 bp, synthetic construct
  source 1..80: mol_type = other DNA
aggtgggtcaacttgaaggtacattcggtccgagcgccaggaaattcttccaggttctagaccaattcgacaacatacat

SEQ ID NO: 33841 - DNA, 80 bp, synthetic construct
  source 1..80: mol_type = other DNA
gatctggtgtttgtgtatggttgttacagacattggggtcatccctatatagactatagaaaaggcttatcaaagctgta

SEQ ID NO: 33842 - DNA, 80 bp, synthetic construct
  source 1..80: mol_type = other DNA
tgaccaagtccatatcaagaaggtgatagatgggacttatcaagaatgtctagcgagtgatctggccaaaagggttctca

SEQ ID NO: 33843 - DNA, 80 bp, synthetic construct
  source 1..80: mol_type = other DNA
ggtgggggtttgacaaatactctaagtggtatctagatcccaaactgttggctcaagatcaccctttgactccctatata

SEQ ID NO: 33844 - DNA, 80 bp, synthetic construct
  source 1..80: mol_type = other DNA
aagacacagacatggcctccaaaacacatagttgatcttgttggaaatacctggcataggcttcctattacccagatttt

SEQ ID NO: 33845 - DNA, 80 bp, synthetic construct
  source 1..80: mol_type = other DNA
cgagataccagagtccatggatccatctgaaatcctagatgataagtcacactctttaaccaggacgaagttggcgtctt

SEQ ID NO: 33846 - DNA, 80 bp, synthetic construct
  source 1..80: mol_type = other DNA
ggcttgccgagaatagaggaggtcctgttcctagtgagaaggtgatcataacagcactctctaaacccccagtgaacccg

SEQ ID NO: 33847 - DNA, 80 bp, synthetic construct
  source 1..80: mol_type = other DNA
agagaatttctaaagtcgatagatctcggaggtctacccgatgatgacctgataataggcttaaaaccaaaggaaagaga

SEQ ID NO: 33848 - DNA, 80 bp, synthetic construct
  source 1..80: mol_type = other DNA
attgaagatagagggtcgattttttgcccttatgtcctggaatctaagactctactttgtcatcacagaaaagcttttag

SEQ ID NO: 33849 - DNA, 80 bp, synthetic construct
  source 1..80: mol_type = other DNA
ccaattacatattacctctctttgatgccttgaccatgacagacaacttgaacaaagtgtttaaaaagctgatagatcga

SEQ ID NO: 33850 - DNA, 80 bp, synthetic construct
  source 1..80: mol_type = other DNA
tgagcacttgtactctgcaattcgagtagggacggtagtaaccgcttatgaagattgttctggacttgtctcgtttacag

SEQ ID NO: 33851 - DNA, 80 bp, synthetic construct
  source 1..80: mol_type = other DNA
gtgacgggacagggattacaggattactccagggttacatatgcattccatctagattatgaaaaatggaataaccatca

SEQ ID NO: 33852 - DNA, 80 bp, synthetic construct
  source 1..80: mol_type = other DNA
aaggttggaatcaaccaaagatgtcttttctgtactagatcaggtgtttggacttaagaaagtcttctcaaggacccatg

SEQ ID NO: 33853 - DNA, 80 bp, synthetic construct
  source 1..80: mol_type = other DNA
agttctttcagaaatcctgggtgtattattcagatagatcagaccttattgggttgtgggaagatcagatctactgcttg

SEQ ID NO: 33854 - DNA, 80 bp, synthetic construct
  source 1..80: mol_type = other DNA
gacatgtcggatggacccacctgttggaatggtcaagacgggggcttggagggtctcagacagaaaggttggagcctagt

SEQ ID NO: 33855 - DNA, 80 bp, synthetic construct
  source 1..80: mol_type = other DNA
aagtctactgatgatagacagggagtctcaaactcgaaatacaaggacaaaaatcttggcccaaggtgacaatcaggtgt

SEQ ID NO: 33856 - DNA, 80 bp, synthetic construct
  source 1..80: mol_type = other DNA
tatgtccaacctacatgttgtcatccggactctctcaggaagggcttctatatgagcttgaaagtatctcaagaaacgct

SEQ ID NO: 33857 - DNA, 80 bp, synthetic construct
  source 1..80: mol_type = other DNA
ctctcgatctacagagctatcgaggatggggcttcaaaattgggtctcatcatcaagaaagaggagacaatgtgtagtta

SEQ ID NO: 33858 - DNA, 80 bp, synthetic construct
  source 1..80: mol_type = other DNA
cgacttccttatctacgggaagacacccctttttagaggaaacatactggttccagagtcaaagaggtgggctcgtgtat

SEQ ID NO: 33859 - DNA, 80 bp, synthetic construct
  source 1..80: mol_type = other DNA
cttgtatctctaatgatcagatagtcaatcttgccaacatcatgtcaacggtttccactaacgctctgaccgtggctcaa

SEQ ID NO: 33860 - DNA, 80 bp, synthetic construct
  source 1..80: mol_type = other DNA
cactcccagtctctaattaaaccaatgagagacttcctgctcatgtcagttcaagcggtgtttcactatctgctgtttag

SEQ ID NO: 33861 - DNA, 80 bp, synthetic construct
  source 1..80: mol_type = other DNA
ataagattgtctttaaggtcaacaatcagttggtgtctgttaagccggaggtgatagtagatcagtatgagtacaaatat

SEQ ID NO: 33862 - DNA, 80 bp, synthetic construct
  source 1..80: mol_type = other DNA
ggtttatcaaacagatcaacctcactgctagggaagcgatactatatttcttccataagaacttcgaagaagaaattaga

SEQ ID NO: 33863 - DNA, 80 bp, synthetic construct
  source 1..80: mol_type = other DNA
ccctatcctgaaaggaagagtttacaagattctaagtgctgacggagatgactttctccttgctatgtcccgcattattt

SEQ ID NO: 33864 - DNA, 80 bp, synthetic construct
  source 1..80: mol_type = other DNA
acttggacccatccctcgggggagtctcggggatgtcattgggaagatttcacattcgtcaattctccgaccctgtatcc

SEQ ID NO: 33865 - DNA, 80 bp, synthetic construct
  source 1..80: mol_type = other DNA
gagggtttgtccttctggaaagaaatctggtccagttcatcggagccgtggattcattctctatgtcaagaggctggtaa

SEQ ID NO: 33866 - DNA, 80 bp, synthetic construct
  source 1..80: mol_type = other DNA
cccggacttgggagacagaagcttagagagtttcactcgtttgttggaagacccgactactctgaacatcagaggaggtg

SEQ ID NO: 33867 - DNA, 80 bp, synthetic construct
  source 1..80: mol_type = other DNA
ctagtcctacaatccttctaaaggatgctatcaggaaagccttgtatgatgaagttgataaggttgagaattcggaattc

SEQ ID NO: 33868 - DNA, 80 bp, synthetic construct
  source 1..80: mol_type = other DNA
agagaggcgatcctgttatcaaagacccatagggacaactttattcttttcctaaagtcaatcgaacctttattcccgag

SEQ ID NO: 33869 - DNA, 80 bp, synthetic construct
  source 1..80: mol_type = other DNA
atttctcagtgagctcttcagttcttcctttcttggtatacctgagtccataattggactcattcaaaattcacgaacaa

SEQ ID NO: 33870 - DNA, 80 bp, synthetic construct
  source 1..80: mol_type = other DNA
tcagacgacaattcagacggagcctttccaggtccttagaggagtctttttataactctgagattcacggaattaacagg

SEQ ID NO: 33871 - DNA, 80 bp, synthetic construct
  source 1..80: mol_type = other DNA
atgacccaggttccacagaggataggaagggtgtggtcttgctcttcagagagggctgacttgttgagagagatctcttg

SEQ ID NO: 33872 - DNA, 80 bp, synthetic construct
  source 1..80: mol_type = other DNA
ggggagaaaagtggttggaactaccgttccacatccatcagaaatgctgaccttattgccaaaatcttccatttcttgcg

SEQ ID NO: 33873 - DNA, 80 bp, synthetic construct
  source 1..80: mol_type = other DNA
agaatgtttgaacccggacaagagactgcagttcctcactcttatttcatccatttcagatctctaggacttagcggaaa

SEQ ID NO: 33874 - DNA, 80 bp, synthetic construct
  source 1..80: mol_type = other DNA
tctgtggcccaacagggagtgagaacccgagagtgtcagtgtctgtgttaccttcatttgaccagtcatttttctctcga

SEQ ID NO: 33875 - DNA, 80 bp, synthetic construct
  source 1..80: mol_type = other DNA
ggccccttaaaaggatacctagggtcctcgacatctatgtcaacccagctgtttcatgcttgggagaaagtgaccaatgt

SEQ ID NO: 33876 - DNA, 80 bp, synthetic construct
  source 1..80: mol_type = other DNA
ccatgtggtcaagagggccttgtcactcaaggaatccatcaactggtttatagccagagattctaatcttgcccagaccc

SEQ ID NO: 33877 - DNA, 80 bp, synthetic construct
  source 1..80: mol_type = other DNA
tgattaaaaacataatctccctaacgggtcctcagtttcctctcgaggaagccccagtgtttaagagaaccgggtcagca

SEQ ID NO: 33878 - DNA, 80 bp, synthetic construct
  source 1..80: mol_type = other DNA
ttgcacagattcaagtctgctagatacagtgaagggggttactcgtcaatctgtccaaatttattgtctcacatttctgt

SEQ ID NO: 33879 - DNA, 80 bp, synthetic construct
  source 1..80: mol_type = other DNA
cagcacagacaccatgtcagaccttacgcaagatggcaggaattttgatttcatgtttcaacctctgatgctttatgctc

SEQ ID NO: 33880 - DNA, 80 bp, synthetic construct
  source 1..80: mol_type = other DNA
aaacatggacttcagagcttgttcaaaaggacatcagactgaaggattccactttccattggcatcttcgttgtcagaaa

SEQ ID NO: 33881 - DNA, 80 bp, synthetic construct
  source 1..80: mol_type = other DNA
tgtatcagatcaatagatgatatcaccttggacacttctcaggttttcgagtttcccgatgtctccaagagaatttctag

SEQ ID NO: 33882 - DNA, 80 bp, synthetic construct
  source 1..80: mol_type = other DNA
gatggtgtctggtgccgtacctcagtttcagaaacttcccgaggtctacttgaagccaggtcactttgattctctctgcg

SEQ ID NO: 33883 - DNA, 80 bp, synthetic construct
  source 1..80: mol_type = other DNA
gaaaggacaaatctagacatatcggttcagcccaagggttgttgtattctattcttgttgctactcatgatcctgggtat

SEQ ID NO: 33884 - DNA, 80 bp, synthetic construct
  source 1..80: mol_type = other DNA
gtccccttactcctccaatgcagttggccatgtgttcaatctcatccatttcgtgggatgttacatgggccagataagat

SEQ ID NO: 33885 - DNA, 80 bp, synthetic construct
  source 1..80: mol_type = other DNA
aatgatgggactatatttccagtaaacatttacagcaagatatctccgaaagattatcttcgaggactagcaaggggtgt

SEQ ID NO: 33886 - DNA, 80 bp, synthetic construct
  source 1..80: mol_type = other DNA
attgattggctcatccatttgcttcttgaccaggatgacaaacatcaacataaatagacccctggagttaatctccggag

SEQ ID NO: 33887 - DNA, 80 bp, synthetic construct
  source 1..80: mol_type = other DNA
ttatttcttatatactcttaaggcttgacaaccatccatctctgtatgtcatgctcagggaaccatctctcagatcagag

SEQ ID NO: 33888 - DNA, 80 bp, synthetic construct
  source 1..80: mol_type = other DNA
atcttctcaatccctcaaaaaatcccagcagcatatccaaccacaatgaaggagggtaatagatctgtgctatgttacct

SEQ ID NO: 33889 - DNA, 80 bp, synthetic construct
  source 1..80: mol_type = other DNA
acaacatgtgcttcgttatgaaagagatataatcacatcatcaccggagaacgactggctttggatcttctctgacttcc

SEQ ID NO: 33890 - DNA, 80 bp, synthetic construct
  source 1..80: mol_type = other DNA
aaatctctccaaaagtatgagaaccaatttgcggcaaatgagctctctaatgaggcaagttttgggtgggcatggagaag

SEQ ID NO: 33891 - DNA, 80 bp, synthetic construct
  source 1..80: mol_type = other DNA
gttacagcgagggactttgtctaaagtttccattattatagccatcatgatagtcttctccaatagagtattcaacgtat

SEQ ID NO: 33892 - DNA, 80 bp, synthetic construct
  source 1..80: mol_type = other DNA
ttatttcatgaaacaagtcattcgggggaatacttatctgtcctggagttggtccgatgacgccgcagtgtttaaaaggg

SEQ ID NO: 33893 - DNA, 80 bp, synthetic construct
  source 1..80: mol_type = other DNA
aagctgaaacggccctggcagatgacggaacagtcaactctgatgatgaggactatttctccagtgaaaccaggagtcca

SEQ ID NO: 33894 - DNA, 80 bp, synthetic construct
  source 1..80: mol_type = other DNA
gaagcagtttacacacgaatcatgatgaatggaggtagactaaaaagatcacacataaggaggtatgtctcagtcagctc

SEQ ID NO: 33895 - DNA, 80 bp, synthetic construct
  source 1..80: mol_type = other DNA
tcatcaaactcgccctaattcttttgcggagtttttaaacaaaacatactcgagtgactcgtgaggagttgggcaacagg

SEQ ID NO: 33896 - DNA, 80 bp, synthetic construct
  source 1..80: mol_type = other DNA
tggtgcgccagggaagtccttaaaagataaggctactcagactgtcggccgcgaagtcgcgaaggagacaaagtctgcat

SEQ ID NO: 33897 - DNA, 80 bp, synthetic construct
  source 1..80: mol_type = other DNA
cttctcagcgagcaagtcaaccctcaaaagttaaaatagcagctcaaactgtctctggtcctcctgctttagaatggtct

SEQ ID NO: 33898 - DNA, 80 bp, synthetic construct
  source 1..80: mol_type = other DNA
gccttagcaaattccaaaaaattccagctgttggttgagcccgacaagctaaacaaaataatgcaagatgacctgaaccg

SEQ ID NO: 33899 - DNA, 80 bp, synthetic construct
  source 1..80: mol_type = other DNA
ttattcgtctctttgaccacacctccgggctcagccacactatgcaatcagatctgatttgcttcaagtctaccgtggaa

SEQ ID NO: 33900 - DNA, 80 bp, synthetic construct
  source 1..80: mol_type = other DNA
aaaggtctgatgaggataaggattcttcagtgcttctggaatagtccaattacatcccaaaacatcctcaattgtttacc

SEQ ID NO: 33901 - DNA, 80 bp, synthetic construct
  source 1..80: mol_type = other DNA
tctggaggagagagcacacgggcttgaccccaactttcaggagcaatagaacaaaaatatgtcatggtgccgttgaatcg

SEQ ID NO: 33902 - DNA, 80 bp, synthetic construct
  source 1..80: mol_type = other DNA
ctgcattttgtcagagtagactctattacttttacattctaagcttctctgatgtgaaaaaaactatcaacattcctcaa

SEQ ID NO: 33903 - DNA, 80 bp, synthetic construct
  source 1..80: mol_type = other DNA
aagacctaaggaaagatgatccttcaggcccttctgtttgtgcctctcctaatctcttcgttgtgtctcgggaaattccc

SEQ ID NO: 33904 - DNA, 80 bp, synthetic construct
  source 1..80: mol_type = other DNA
ggaaccaagattcgggacatcttgcgacatttttaccagcagcaaggggaaaaaggcatctaagggaggcaagacttgcg

SEQ ID NO: 33905 - DNA, 80 bp, synthetic construct
  source 1..80: mol_type = other DNA
gtccatcatgaccaccaaatctgtaagttttagacgtctcagctacttgagaaaacttgtccctgggtttggaaaggcat

SEQ ID NO: 33906 - DNA, 80 bp, synthetic construct
  source 1..80: mol_type = other DNA
ggtctggcgacactagttctgataatctgctcgatggcatgctgtagaagagccaagcgaacagagtcaagaagacgagg

SEQ ID NO: 33907 - DNA, 80 bp, synthetic construct
  source 1..80: mol_type = other DNA
ctctggagagtcagaaaagaaggtaactgcaaccccccagactaggaaagtcgtatcttcatgggagttgtacaagagtg

SEQ ID NO: 33908 - DNA, 80 bp, synthetic construct
  source 1..80: mol_type = other DNA
aaggcgatgccaggctgtgatggcgggctatatccttaatatcttgcgatcagaagactgcctacctttgagatctaggg

SEQ ID NO: 33909 - DNA, 80 bp, synthetic construct
  source 1..80: mol_type = other DNA
gactctctcatcttgaaggcccttcacatacttcatgtaacaaaataaattcaagagtcagaaaacattcattagccatc

SEQ ID NO: 33910 - DNA, 80 bp, synthetic construct
  source 1..80: mol_type = other DNA
tcagccgatcaaaaacagtcatgtagatttttatgatgtatgatgtattttgacagtgtcattgactaatggtgctctca

SEQ ID NO: 33911 - DNA, 80 bp, synthetic construct
  source 1..80: mol_type = other DNA
tccctcaaggacagataccaaaggtgatggacagaccaactgccatctcaaacaactctatgattgagtccaagcagagg

SEQ ID NO: 33912 - DNA, 80 bp, synthetic construct
  source 1..80: mol_type = other DNA
ccatcgagagttccactgcattagaccgggtagagattagttgagaaagacgatttgcctcctatgaaggacacaagcaa

SEQ ID NO: 33913 - DNA, 80 bp, synthetic construct
  source 1..80: mol_type = other DNA
taggtcacaatcatcttatatcttgataaggtgcacataactacaaaggtatggaccatccaagcctttcagtcaagaaa

SEQ ID NO: 33914 - DNA, 80 bp, synthetic construct
  source 1..80: mol_type = other DNA
aaaactatgaaatgtaggagcaatcagcaacacttctcatcctaagaactgcaccatgatgattgatccgggagaggtct

SEQ ID NO: 33915 - DNA, 80 bp, synthetic construct
  source 1..80: mol_type = other DNA
ttgacgaccccattgatccgatcgagtcggaggccgagtcgagagggaaccccaccattcccaatatcttaagaaattct

SEQ ID NO: 33916 - DNA, 80 bp, synthetic construct
  source 1..80: mol_type = other DNA
gactacaacctcaactctcctctgatagaagactcggccaaattgatgttggaatggttgaaaacagggaataaacctct

SEQ ID NO: 33917 - DNA, 80 bp, synthetic construct
  source 1..80: mol_type = other DNA
tagcgctatggaaagatttaacatcaattgatgttggaagggacttggtcaagtttaaagataaaatatgggggttgctg

SEQ ID NO: 33918 - DNA, 80 bp, synthetic construct
  source 1..80: mol_type = other DNA
attgtgaccaaagattttgtatattcccaaagttctggttgcctctttgatagaaactatacacttatgttaaaagacct

SEQ ID NO: 33919 - DNA, 80 bp, synthetic construct
  source 1..80: mol_type = other DNA
tttttttgtctcggttcaactccctaatgattcttctttctcctccggagcccagatattcggatgatctgatatctcag

SEQ ID NO: 33920 - DNA, 80 bp, synthetic construct
  source 1..80: mol_type = other DNA
accttatgttgtgaacagcttagtccagagggcagaaaggttcaggcctctcattcattccttaggagatttccccgcat

SEQ ID NO: 33921 - DNA, 80 bp, synthetic construct
  source 1..80: mol_type = other DNA
attcgcggcttctttcaagggatcaccccctgactccttatatcaaaactcagacatggcctcccaaacatatagtggat

SEQ ID NO: 33922 - DNA, 80 bp, synthetic construct
  source 1..80: mol_type = other DNA
tgctatttagccccatactgaagggcagagtttataagatcttgggtgcagagggggacaactttcttctagctatgtct

SEQ ID NO: 33923 - DNA, 80 bp, synthetic construct
  source 1..80: mol_type = other DNA
catcattcttggggattcctgagtcaattatagggttaatacaaaattccagaacaataagacgacagttcagaaggagt

SEQ ID NO: 33924 - DNA, 80 bp, synthetic construct
  source 1..80: mol_type = other DNA
atatgttatggtgccatcaaaccgctgcattttatcaaaatctgattaattaatcagcctcttggatgtgaaaaaaactt

SEQ ID NO: 33925 - DNA, 80 bp, synthetic construct
  source 1..80: mol_type = other DNA
aatctctgagttcaatagtcctccttgaactctgtgcaacagggtagattcaagagtcatgagaccttcattaatcatct

SEQ ID NO: 33926 - DNA, 80 bp, synthetic construct
  source 1..80: mol_type = other DNA
acacacaccatgtacaaaaggccggatacccaaactatagtcgaggtgccatctacttttgactcgtttgtgatcccaag

SEQ ID NO: 33927 - DNA, 80 bp, synthetic construct
  source 1..80: mol_type = other DNA
ccatcttctacttcagagggtcgaaagaaatctgtcgaagagtatgagagctaacctgcgacagatgagttccttgatga

SEQ ID NO: 33928 - DNA, 80 bp, synthetic construct
  source 1..80: mol_type = other DNA
atggatgaaggggaagaccctggcctcttgttccagtcatacctggaaaatgttggagtccaaatagtcagacagatgag

SEQ ID NO: 33929 - DNA, 80 bp, synthetic construct
  source 1..80: mol_type = other DNA
gtctgttctgctcaacaggttgcggtttcaacctcagcgaatccagcccctgcctcagagctggatatcaggactctctc

SEQ ID NO: 33930 - DNA, 80 bp, synthetic construct
  source 1..80: mol_type = other DNA
ccccctcggcaattatgagtggtggagatgacatcatctccagggtggttgactttaactccatctgggagaaaccttct

SEQ ID NO: 33931 - DNA, 80 bp, synthetic construct
  source 1..80: mol_type = other DNA
gagcatttcctgcagtcactggattcataactcagatgacctcgtctttctcatctgagttatacctcagattctcaaaa

SEQ ID NO: 33932 - DNA, 80 bp, synthetic construct
  source 1..80: mol_type = other DNA
cgagggaagttctttcgggatgcagaatatttgacctcttctactattcgagagatgagtcttgtattattcaactgtag

SEQ ID NO: 33933 - DNA, 80 bp, synthetic construct
  source 1..80: mol_type = other DNA
tttagagttgaagagaggaactttgtctaaagtttctattattatagccattgtgatagtcttctccaatagggtgttca

SEQ ID NO: 33934 - DNA, 80 bp, synthetic construct
  source 1..80: mol_type = other DNA
atctagatcatcccttttagattatagttgcctatgaatggggcactctcgagagaatgtacagactaaaattcctgaat

SEQ ID NO: 33935 - DNA, 80 bp, synthetic construct
  source 1..80: mol_type = other DNA
ggtgcaccatgaaaaaaacaagatccaaattcgtaaccgctatttgtttgattacttttcatctttattgtttttttgtt

SEQ ID NO: 33936 - DNA, 80 bp, synthetic construct
  source 1..80: mol_type = other DNA
tcatcaagctcgtcccaattcattcgctgagttcttgaacaagacatactcgagtgattcataaggagctgaaccaccgg

SEQ ID NO: 33937 - DNA, 80 bp, synthetic construct
  source 1..80: mol_type = other DNA
attgtgaacatcgttaacttgtgtacatctttcatgaaaaaaactaacacccctcctttcgtcccatctcagacatgagc

SEQ ID NO: 33938 - DNA, 80 bp, synthetic construct
  source 1..80: mol_type = other DNA
aagatttttgtcaaccccagtgcgatcagagcaggtcttgctgatctagagatggcagaagaaactgtggatctaattgc

SEQ ID NO: 33939 - DNA, 80 bp, synthetic construct
  source 1..80: mol_type = other DNA
ttcaattagatgacacaaaaccatctggccccggtgggaatgccaccgcaggagaaagcaagtgtcaggaagattttcag

SEQ ID NO: 33940 - DNA, 80 bp, synthetic construct
  source 1..80: mol_type = other DNA
atggatgaggcggaggaccccgcactcttgttccagtcatacctagacaatgttggaattcaaatagtcagacagatgaa

SEQ ID NO: 33941 - DNA, 80 bp, synthetic construct
  source 1..80: mol_type = other DNA
tcaacttcccctgtctgccggggaagtctacagaagacaaagctacccagactgccaatagagagctcaagaaagagact

SEQ ID NO: 33942 - DNA, 80 bp, synthetic construct
  source 1..80: mol_type = other DNA
gtgtctgctccctctcagcgagatagcctatcatccaaaaccaagatggcagctcagactgcctccggtccttctgctct

SEQ ID NO: 33943 - DNA, 80 bp, synthetic construct
  source 1..80: mol_type = other DNA
agagtggtccacagctaacgaagaggaagacccatccgtggaggctgaaattgctcatcagattgctgagagcttttcta

SEQ ID NO: 33944 - DNA, 80 bp, synthetic construct
  source 1..80: mol_type = other DNA
aatgtaccaagcgtgatccgtttggcccatgatggatccaaactccccctgagatgtatgctggggtgggttgccctagc

SEQ ID NO: 33945 - DNA, 80 bp, synthetic construct
  source 1..80: mol_type = other DNA
tcctctgaccacaccccggagctcggtcacaccttgcaatcaaatctgacctgtcccaaatctcacatgaaaaaaacagg

SEQ ID NO: 33946 - DNA, 80 bp, synthetic construct
  source 1..80: mol_type = other DNA
tgtcagctcctccagatgatgatgacctgtggttaccccctccggagtatattccgttgaaggagctcacgggtaagaaa

SEQ ID NO: 33947 - DNA, 80 bp, synthetic construct
  source 1..80: mol_type = other DNA
aacatgagaaacttttgcatcaacggagaagtcaaggtgtgcagtcctaacggctattcatttaggatcctgcggcatat

SEQ ID NO: 33948 - DNA, 80 bp, synthetic construct
  source 1..80: mol_type = other DNA
aagaagcaagactcgggacatcgtgtgatatttttaccaatagcagagggaagagagcatctaaagggggcaagatctgc

SEQ ID NO: 33949 - DNA, 80 bp, synthetic construct
  source 1..80: mol_type = other DNA
acattggacgtaccaatgttgaagggaattgggctctaacaggaggtatggagttgacgagggatcccactgttccggag

SEQ ID NO: 33950 - DNA, 80 bp, synthetic construct
  source 1..80: mol_type = other DNA
gggttcgtggatgaaaggggcttgtacaagtctctgaaaggagcatgcagactcaagctgtgcggagtctccggactcag

SEQ ID NO: 33951 - DNA, 80 bp, synthetic construct
  source 1..80: mol_type = other DNA
caaaagggtgcttaaaggtcggagggatgtgtcatcctcatttagacggagtattttttaatggcataattctgggtcca

SEQ ID NO: 33952 - DNA, 80 bp, synthetic construct
  source 1..80: mol_type = other DNA
ctggcaacactgatgctgacaatcttcttaatgatatgttgcagaaggaccaataggacagaatcaacacagcaaggtca

SEQ ID NO: 33953 - DNA, 80 bp, synthetic construct
  source 1..80: mol_type = other DNA
tagggagtcagggaggaaagtctcggtaactcctcagaacgggaaagtcatatcctcttgggagttgtataaaagtggaa

SEQ ID NO: 33954 - DNA, 80 bp, synthetic construct
  source 1..80: mol_type = other DNA
gtgagaccgggctgtgagggtgagttgtcccctccttactatgtgtttaggaaattgcctctctttgagatccgagggat

SEQ ID NO: 33955 - DNA, 80 bp, synthetic construct
  source 1..80: mol_type = other DNA
cctctcattttgaccgtccttcatggactctgttcaacagggtggactcgagagtcaggaaactttcatcaatcatctca

SEQ ID NO: 33956 - DNA, 80 bp, synthetic construct
  source 1..80: mol_type = other DNA
cccaaggactgataccaaaggttgagaacaagccaactgataacccagatgactctatggctgagtttaggcagaggcca

SEQ ID NO: 33957 - DNA, 80 bp, synthetic construct
  source 1..80: mol_type = other DNA
tagcacgatcccctacattagaccaaataggggctgattaaaagaaataacctgcatcctatggaggactcaagcaatag

SEQ ID NO: 33958 - DNA, 80 bp, synthetic construct
  source 1..80: mol_type = other DNA
tgtgaaatggaggagtaatcaacaacacttctcctcctgagaacagcaccatgatgatcgatccaggggaggtttatgat

SEQ ID NO: 33959 - DNA, 80 bp, synthetic construct
  source 1..80: mol_type = other DNA
aggttcaactctctgatgattcttctttctcctccggagccaagatattcagatgacctgatatctcagctgtgccagct

SEQ ID NO: 33960 - DNA, 80 bp, synthetic construct
  source 1..80: mol_type = other DNA
cgatttcctgtgcttgtggagctacaggaggtggaaaccctcggatatcagtgtctgtgcttccatcttttgatcaatca

SEQ ID NO: 33961 - DNA, 80 bp, synthetic construct
  source 1..80: mol_type = other DNA
ttcttttcgagaggccctctaaaggggtacctgggctcatccacttccatgtcgactcagctattccatgcctgggaaaa

SEQ ID NO: 33962 - DNA, 80 bp, synthetic construct
  source 1..80: mol_type = other DNA
catgaaaaaaacaagatccaaattcgtaaccgctatttgtttgattacttttcatctttgttgttttttttgttaagcgt

SEQ ID NO: 33963 - DNA, 80 bp, synthetic construct
  source 1..80: mol_type = other DNA
gaaaaaactattaacatccctcaaaagacctaaggaaaaatgatcccccaagctcttctgtttgtacctctcctgatttc

SEQ ID NO: 33964 - DNA, 80 bp, synthetic construct
  source 1..80: mol_type = other DNA
gagggacataacatcaatagataccggaaaggacttggtcaagttcaaagatcagatatggggattgttgattgtgacta

SEQ ID NO: 33965 - DNA, 80 bp, synthetic construct
  source 1..80: mol_type = other DNA
cggattggccttgtctggagccccagtccccgagggcatgaactgggtttacaaactaaggaggacccttattttccaat

SEQ ID NO: 33966 - DNA, 80 bp, synthetic construct
  source 1..80: mol_type = other DNA
gttgtgcataactacaaagggctgggccatctaatctcctcaatcaagaaaaaaactgtgagacagagaaatcctcaaca

SEQ ID NO: 33967 - DNA, 80 bp, synthetic construct
  source 1..80: mol_type = other DNA
acacttctcatcctgaacactgcaccatgatgattgatccaggggaggtttatgatgaccccattgatccagtcgagtct

SEQ ID NO: 33968 - DNA, 80 bp, synthetic construct
  source 1..80: mol_type = other DNA
gagagtgagccaagaggaaactccaatatccccaacatcttgcgaaattctgactacaatctcaactcccctctgatcga

SEQ ID NO: 33969 - DNA, 80 bp, synthetic construct
  source 1..80: mol_type = other DNA
ggattcagccaagctgatgttagaatggctgaaaacaggaaatagacctctccggatgaccctgaccgacaattgctctc

SEQ ID NO: 33970 - DNA, 80 bp, synthetic construct
  source 1..80: mol_type = other DNA
ttttttgctttaatgtcttggaatttaaggctatacttcgttattacagagaagctcctggccaattatatattaccact

SEQ ID NO: 33971 - DNA, 80 bp, synthetic construct
  source 1..80: mol_type = other DNA
tcatgatcaatgggggccgactcaaaagatcacatataagaaggtatgtatcagtcagttccaatcatcaagctcgcccc

SEQ ID NO: 33972 - DNA, 80 bp, synthetic construct
  source 1..80: mol_type = other DNA
aattcatttgctgaatttctaaacaagacatattctaacgacccgtagggagtcgaacttcaagattgtcaacaataata

SEQ ID NO: 33973 - DNA, 80 bp, synthetic construct
  source 1..80: mol_type = other DNA
aattgtttaactcctccacgaaaaaaactaacacccctccttttgaaccatcccaagcatgagcaagatttttgtcaacc

SEQ ID NO: 33974 - DNA, 80 bp, synthetic construct
  source 1..80: mol_type = other DNA
atatattcctcctatttgttctttcatgtgattaccctttacatgaatgccctagattgggatgaggagaagactatctt

SEQ ID NO: 33975 - DNA, 80 bp, synthetic construct
  source 1..80: mol_type = other DNA
cttaacaacaaaatcagagaagaagtagacagtatcatctacaaaaagaaaatgtaacacctctacaatggatactgaca

SEQ ID NO: 33976 - DNA, 80 bp, synthetic construct
  source 1..80: mol_type = other DNA
tgacgcagaggtcactgacatcgcatcaattaatcgaataactctactaatgtctgattttgcattgtcaatagacggcc

SEQ ID NO: 33977 - DNA, 80 bp, synthetic construct
  source 1..80: mol_type = other DNA
tcaaggagtcgagaaatgtgccaggtgtgactcgtttggcccatgacggatccaaaatccctctgagatgtgtgctggga

SEQ ID NO: 33978 - DNA, 80 bp, synthetic construct
  source 1..80: mol_type = other DNA
aatggggaagtcaaagtgtgtagtccaaacggctactcatttaggatcttgcggcacattttgagatcattcaatgagct

SEQ ID NO: 33979 - DNA, 80 bp, synthetic construct
  source 1..80: mol_type = other DNA
actgtgaaccgtaggggcaatcagcaacacttctcatcccaagagctgcaccatgatgattgatccgggagaggtttttg

SEQ ID NO: 33980 - DNA, 80 bp, synthetic construct
  source 1..80: mol_type = other DNA
caaagttatatgatcaggttcatatcaagaaggtgatagacaagtcctaccaggagtgtttggcgagcgacctggcccgg

SEQ ID NO: 33981 - DNA, 80 bp, synthetic construct
  source 1..80: mol_type = other DNA
aggatccttaggtggggatttgacaagtactctaaatggtatattgattcgcgacttctccccagagaccaccccttgac

SEQ ID NO: 33982 - DNA, 80 bp, synthetic construct
  source 1..80: mol_type = other DNA
tccaccaacgctttaactgtggcacaacactctctatctttgatcaaggagatgagggactttctgcttatgtcagtgca

SEQ ID NO: 33983 - DNA, 80 bp, synthetic construct
  source 1..80: mol_type = other DNA
agaccactagactcagcgggagcattgacaggttatctggagaggtggtgagacatcttcgaggatataacaggtggatt

SEQ ID NO: 33984 - DNA, 80 bp, synthetic construct
  source 1..80: mol_type = other DNA
accctcgaggacatcaaatctagatcatctctactggactacagttgcttatgaactgaacattattggggcttgtaaat

SEQ ID NO: 33985 - DNA, 80 bp, synthetic construct
  source 1..80: mol_type = other DNA
actgaagctcttagacgatataccctgaaaaaaacgagatcccaaatcagaacctctggttgcttgattgtttttttcat

SEQ ID NO: 33986 - DNA, 80 bp, synthetic construct
  source 1..80: mol_type = other DNA
cctgctgacaattttcaaactcaggcctaccagacaatagggcctgagctgttctggattcgacgtgaaaaaaacaggca

SEQ ID NO: 33987 - DNA, 80 bp, synthetic construct
  source 1..80: mol_type = other DNA
gactttcattcggatgagattgaacatcttgttgtggaggagttggtcaagaaaagagaagagtgtctagatgcactgga

SEQ ID NO: 33988 - DNA, 80 bp, synthetic construct
  source 1..80: mol_type = other DNA
caccgtcatcttgcatttcagcaaattttgcataattataaagggctgggtcattcgtgattttcagtcgagaaaaaaac

SEQ ID NO: 33989 - DNA, 80 bp, synthetic construct
  source 1..80: mol_type = other DNA
ataatctcaactctcctctaatagaggatcccgccaagttaatgttggaatggttaaagacaggaaatagaccttaccga

SEQ ID NO: 33990 - DNA, 80 bp, synthetic construct
  source 1..80: mol_type = other DNA
atgaccctgacagacaactgctctaggtcttacaaggtcctgaaagattacttcaaaaagttagatctgggttccctcaa

SEQ ID NO: 33991 - DNA, 80 bp, synthetic construct
  source 1..80: mol_type = other DNA
gttacaacgaggaactttgtctaaagtttctattattatagccatcgtaatagtcttctccaatagggtgttcaatgtct

SEQ ID NO: 33992 - DNA, 80 bp, synthetic construct
  source 1..80: mol_type = other DNA
aaaggaggggccagccctaccattcttcttaaagatgcaattagaaaagccctatatgatgaggtagacaaagtggagaa

SEQ ID NO: 33993 - DNA, 80 bp, synthetic construct
  source 1..80: mol_type = other DNA
tagaggagagatattttctattccccaaaaagttcccgccgcttatccgaccacgatgaaagagggcaacaggtctattc

SEQ ID NO: 33994 - DNA, 80 bp, synthetic construct
  source 1..80: mol_type = other DNA
tgtgctacctccaacacgtgttgcgctacgaacgggaggcaatcacagcgtctccggagaatgactggttgtggatcttc

SEQ ID NO: 33995 - DNA, 80 bp, synthetic construct
  source 1..80: mol_type = other DNA
gtggccatggcgaagataccttggagtcagatgaagacattcagaggctgttgaaagactctttgcgtaggactcggtgg

SEQ ID NO: 33996 - DNA, 80 bp, synthetic construct
  source 1..80: mol_type = other DNA
gtagaccaggaagtgcgccatgcagcgaggaccatgacaggatgttatagccccaacaagaggatgtctcgcaaggctgg

SEQ ID NO: 33997 - DNA, 80 bp, synthetic construct
  source 1..80: mol_type = other DNA
gtgttcagaatggatctgctctgctcagcaggtagcggtttctacctcagcgaacccggcccctgcttccgagctggaca

SEQ ID NO: 33998 - DNA, 80 bp, synthetic construct
  source 1..80: mol_type = other DNA
tttcctgtagtcactgggttcataactcagatgacatcatctttctcatccgagctatacctcagattctccaaacaggg

SEQ ID NO: 33999 - DNA, 80 bp, synthetic construct
  source 1..80: mol_type = other DNA
caaagccgctgactgatcctttattctatcctccatctgaccccaaaatcctgagacacttcaacatatgctgcagtacc

SEQ ID NO: 34000 - DNA, 80 bp, synthetic construct
  source 1..80: mol_type = other DNA
atgatgtacttatcaactgccttaggggatgtgcctagctttgcaagacttcatgatctatataacagacccataactta

SEQ ID NO: 34001 - DNA, 80 bp, synthetic construct
  source 1..80: mol_type = other DNA
ttatttcatgaaacaagtcatacgaggaaaaacttatctgtcctggagttggtctgatgatgctgtagtatttaagaggg

SEQ ID NO: 34002 - DNA, 80 bp, synthetic construct
  source 1..80: mol_type = other DNA
ttagaggaagtatagaggatctgtctaaggaggtagagaagcaccttcgaagatacaacaggtggatcaccctcaaagac

SEQ ID NO: 34003 - DNA, 80 bp, synthetic construct
  source 1..80: mol_type = other DNA
atcagatccagatcatctctgttggattatagctgcttataaactaatcacccccgagagaatgtacaaactgatactct

SEQ ID NO: 34004 - DNA, 80 bp, synthetic construct
  source 1..80: mol_type = other DNA
tggacggtgcaccctgaaaaaaactggaccaaaattccgaacctctgtcgtcttgattgtttttccatctttattgtttt

SEQ ID NO: 34005 - DNA, 80 bp, synthetic construct
  source 1..80: mol_type = other DNA
gatggtaagcaccaaagagatgtatacatccctcatgaaaaaaactaacacccctcctttcgaaccgtcccagacatgag

SEQ ID NO: 34006 - DNA, 80 bp, synthetic construct
  source 1..80: mol_type = other DNA
ctaggaacatcgaggacaatcaggctcatctccaaggagatcccatagaggtggacaatcttcctgaagacatgagacgg

SEQ ID NO: 34007 - DNA, 80 bp, synthetic construct
  source 1..80: mol_type = other DNA
ttcaactagatgacgacaaaccgtctgactttggcagtatcgccaaagtaggggaaagcaggtgtcaggaagactttcaa

SEQ ID NO: 34008 - DNA, 80 bp, synthetic construct
  source 1..80: mol_type = other DNA
atggatgatgcagaagatcctgccattttgttccaatcgtacctggacaatgttggtattcaaatagtcagacaaatgaa

SEQ ID NO: 34009 - DNA, 80 bp, synthetic construct
  source 1..80: mol_type = other DNA
ccggtgctccggggaagtccttaaaagaccaggctactcagactgctggccgtgaactctcgaaggagacaaagtctgct

SEQ ID NO: 34010 - DNA, 80 bp, synthetic construct
  source 1..80: mol_type = other DNA
tcttctcagcgagcaagtcaaccattaaaagtcaagatggcagcccagaatgcctctggtcctcctgctctagagtggtc

SEQ ID NO: 34011 - DNA, 80 bp, synthetic construct
  source 1..80: mol_type = other DNA
cgtcaccaatgaagaggatgacccgtctgtcgaggctgagattgctcaccagattgctgagagcttttctaagaagtaca

SEQ ID NO: 34012 - DNA, 80 bp, synthetic construct
  source 1..80: mol_type = other DNA
caaattccaaaaagttccagctgttggttgagcctgacaagctaaacaagataatgcaagatgacctgaaccgctatgtg

SEQ ID NO: 34013 - DNA, 80 bp, synthetic construct
  source 1..80: mol_type = other DNA
tatctggcatgaatgcagccaaactcgaccctgatgatgtatgctcctatctggctgctgccatgcagttctttgaggga

SEQ ID NO: 34014 - DNA, 80 bp, synthetic construct
  source 1..80: mol_type = other DNA
tctctctgatcacaccccccggctctgccacactatgcaatcggatcggattcgctccaagtccaccatgaaaaaaacaa

SEQ ID NO: 34015 - DNA, 80 bp, synthetic construct
  source 1..80: mol_type = other DNA
ttcttctacctactgctccaccaaccatgattacactatctggatgcctgaagaaccaagactcgggacatcttgtgaca

SEQ ID NO: 34016 - DNA, 80 bp, synthetic construct
  source 1..80: mol_type = other DNA
aagaaccaagactcgggacatcttgtgacatttttactaatagcaaagggaaaaaggcatctaaggggggcaaggtttgc

SEQ ID NO: 34017 - DNA, 80 bp, synthetic construct
  source 1..80: mol_type = other DNA
gactttcactcagatgaaatagagcatctcgtcgtggaggaattggttaagaagagggaggagtgtttggatgcattaga

SEQ ID NO: 34018 - DNA, 80 bp, synthetic construct
  source 1..80: mol_type = other DNA
cttgatgcatcccttggcagacccatcaacagtattcaaggatggagacgaagcggaggactttgttgaagttcacctcc

SEQ ID NO: 34019 - DNA, 80 bp, synthetic construct
  source 1..80: mol_type = other DNA
ggtctagcgacactagttctgataatcttcttgatggcatgttgtagaagaaccaagagaacagaatcaagacggcgagg

SEQ ID NO: 34020 - DNA, 80 bp, synthetic construct
  source 1..80: mol_type = other DNA
atgcatctctggttggccttctcttgagtttatataggttgagcaaaatttctggacagaataccggcaattacaagaca

SEQ ID NO: 34021 - DNA, 80 bp, synthetic construct
  source 1..80: mol_type = other DNA
ctctggggaatcaggagagaaggtattggcaactccccaacccaagaaagtcgtatcttcatgggagttgtacaagagag

SEQ ID NO: 34022 - DNA, 80 bp, synthetic construct
  source 1..80: mol_type = other DNA
aaggcgatgccaggctgtgagggcgggccatctcctttatatcttgcaatcaggagattgcccatctttgagacccgaga

SEQ ID NO: 34023 - DNA, 80 bp, synthetic construct
  source 1..80: mol_type = other DNA
gactctcccattttgaaagtcattcaaagacctcatgtaacaagacaaattcatgagttgaaaaacattcattagccatc

SEQ ID NO: 34024 - DNA, 80 bp, synthetic construct
  source 1..80: mol_type = other DNA
tcaactgatcagacacagtcatgtagatttttatgaggtgtgatgtcttctgatagtatcattgactaatggtgctctca

SEQ ID NO: 34025 - DNA, 80 bp, synthetic construct
  source 1..80: mol_type = other DNA
tcctccaaggaccgatgctaaaggtggtggacagaacaactgctatctcaaacaactctatgaccgagcccaagcagagg

SEQ ID NO: 34026 - DNA, 80 bp, synthetic construct
  source 1..80: mol_type = other DNA
ctatcatgagttccactgcattggaccaagtagagattatttgaaaaagacgatttgcctcctatgaaggacataagcaa

SEQ ID NO: 34027 - DNA, 80 bp, synthetic construct
  source 1..80: mol_type = other DNA
taggtcacaatcatcctacatcccaacaaggcgtatataactacaaagggatggaccatccaggcctttcagtcaagaaa

SEQ ID NO: 34028 - DNA, 80 bp, synthetic construct
  source 1..80: mol_type = other DNA
aaaactgtagaatatatgggcaatcaacaacacttctcatcccaagaactgcaccatgatgattgatccgggagaggttt

SEQ ID NO: 34029 - DNA, 80 bp, synthetic construct
  source 1..80: mol_type = other DNA
ttgacgaccccgtagatccgattgagttggaggccgagtcgagagggaaccccgccatccccaacatcttaagaaactct

SEQ ID NO: 34030 - DNA, 80 bp, synthetic construct
  source 1..80: mol_type = other DNA
gactacaatctcaactctcctctaatagaggactcggcccaattgatgttagaatggttgaagacagggaataggcctct

SEQ ID NO: 34031 - DNA, 80 bp, synthetic construct
  source 1..80: mol_type = other DNA
aacatcgcggatagaatagagcaaattttcgagacagctccctttacaaagatcgtagaacatcatactctgatgacgac

SEQ ID NO: 34032 - DNA, 80 bp, synthetic construct
  source 1..80: mol_type = other DNA
ccggatgactctgacagacaactgctctaggtcttacaaagtcctgaaagattatttcaagaaggtagacctaggatcta

SEQ ID NO: 34033 - DNA, 80 bp, synthetic construct
  source 1..80: mol_type = other DNA
gtgggtggaactgctgcacaatctatgatctccctttggctgcacggtgcatattctgaatcgaacagaagccgaaagtg

SEQ ID NO: 34034 - DNA, 80 bp, synthetic construct
  source 1..80: mol_type = other DNA
tataacagacttggctcagttctactccagatcttctcccatagagaagctattaaactacacactagagaatagagggc

SEQ ID NO: 34035 - DNA, 80 bp, synthetic construct
  source 1..80: mol_type = other DNA
tttgacaaagctatatgatcaagtccatatcaagaaagtaatagataaatcctatcaagaatgcttggcaagtgacttgg

SEQ ID NO: 34036 - DNA, 80 bp, synthetic construct
  source 1..80: mol_type = other DNA
gtctagacatgtcagtcggtccgacatgttggaacggccaagatggcgggctagagggtttgagacaaaagggctggagt

SEQ ID NO: 34037 - DNA, 80 bp, synthetic construct
  source 1..80: mol_type = other DNA
tatctagacccctctttggggggagtatctggaatgtctctcggaaggttccacatacgtcaattctcagatcctgtctc

SEQ ID NO: 34038 - DNA, 80 bp, synthetic construct
  source 1..80: mol_type = other DNA
tgtctctcggaaggttccacatacgtcaattctcagatcctgtctcagaagggctgtccttttggagagagatctggctg

SEQ ID NO: 34039 - DNA, 80 bp, synthetic construct
  source 1..80: mol_type = other DNA
cgatctcctgcccctgtggggtgacaggaaggggaactcctcgaatatcagtgtctgtgcttccgtcttttgatcagtca

SEQ ID NO: 34040 - DNA, 80 bp, synthetic construct
  source 1..80: mol_type = other DNA
ctcagctattccacgcatgggagaaggtcaccaatgttcacgttgtgaaaagagccttgtctcttaaagagtctataaac

SEQ ID NO: 34041 - DNA, 80 bp, synthetic construct
  source 1..80: mol_type = other DNA
tggttcattacaaggaactcaaatctggcccaaaccctagttagaaacataatgtccctgacaggtccagattttccgct

SEQ ID NO: 34042 - DNA, 80 bp, synthetic construct
  source 1..80: mol_type = other DNA
gcccaaactttgatcaggaacataatgtctttaacaggcccagacttcccgctggaagaggcccctgtcttcaagaggac

SEQ ID NO: 34043 - DNA, 80 bp, synthetic construct
  source 1..80: mol_type = other DNA
atccagatcatctcttttagattatagctgcttataaactatgcattctcgaggggatatacagactaagactctttgac

SEQ ID NO: 34044 - DNA, 80 bp, synthetic construct
  source 1..80: mol_type = other DNA
agctgaaaattgaaggtcggtttttcgccttaatgtcctggaatctgaggttgtattttgtcatcacagagaagctccta

SEQ ID NO: 34045 - DNA, 80 bp, synthetic construct
  source 1..80: mol_type = other DNA
gaggccatggtgaggacaccttagagtcagacgaagacattcagaggctgttaaaagactctttgcgcaggacaaggtgg

SEQ ID NO: 34046 - DNA, 80 bp, synthetic construct
  source 1..80: mol_type = other DNA
aaaattctttcgggatgcagaatatttgacatcctctactcttcgagaaatgagcctagtactgttcaactgtagcagcc

SEQ ID NO: 34047 - DNA, 80 bp, synthetic construct
  source 1..80: mol_type = other DNA
gatgggtgaagcggaggaccccgcactcttgttccagtcttacctggacaacgttggaattcaaatggtcagacaaatga

SEQ ID NO: 34048 - DNA, 80 bp, synthetic construct
  source 1..80: mol_type = other DNA
acataagacgcaccgatgtggaagggaattgggctctaacaggaggtatggagttaacgagagaccccactgtttcggag

SEQ ID NO: 34049 - DNA, 80 bp, synthetic construct
  source 1..80: mol_type = other DNA
gatggaacctgggtcacaattcagacatcagatgaaaccaaatggtgcccttctgatcaattggtaaatctacatgactt

SEQ ID NO: 34050 - DNA, 80 bp, synthetic construct
  source 1..80: mol_type = other DNA
ctggcaacactaatgctgataatcttcttaatggcatgttgcagaagagctaatcgaacagaatcaatacaacgagatcc

SEQ ID NO: 34051 - DNA, 80 bp, synthetic construct
  source 1..80: mol_type = other DNA
tctctcctttcaacagtccttcatggactccgtgcaacaggatggactcaagagtcaagaaactctcatcaatcatctca

SEQ ID NO: 34052 - DNA, 80 bp, synthetic construct
  source 1..80: mol_type = other DNA
cctaaggactgataccaaaggttgtggacaagccaactgatatcccagataactctatgcttgaatttgagtagaggcta

SEQ ID NO: 34053 - DNA, 80 bp, synthetic construct
  source 1..80: mol_type = other DNA
cagcaagttcccttacattagaccaaataggagttatttgagagaagttgtttgcctcctatgaaggacatgagcaatag

SEQ ID NO: 34054 - DNA, 80 bp, synthetic construct
  source 1..80: mol_type = other DNA
tgtggaatggaggagtaattaccaacacttctcatcctgagaactgaaccatgatgattgatcccggggaggtttatgat

SEQ ID NO: 34055 - DNA, 80 bp, synthetic construct
  source 1..80: mol_type = other DNA
gagggatttagtgtcaatagatactggaaaggatttggtcaagtttaaagatcaaatatggggattgctgattgtgacca

SEQ ID NO: 34056 - DNA, 80 bp, synthetic construct
  source 1..80: mol_type = other DNA
cagggtctgccctacataggttcaagtccgccaggtacagtgaagggggatactcttctgtttgtccaaatctcctctct

SEQ ID NO: 34057 - DNA, 80 bp, synthetic construct
  source 1..80: mol_type = other DNA
catgtttccggatgccaggcttgtattcaatagcttgttagaagtaaatgacctgatggcgtcagggacacatccgttgc

SEQ ID NO: 34058 - DNA, 80 bp, synthetic construct
  source 1..80: mol_type = other DNA
atcatcaagctcgccccaactcatttgccgagtttttaaacaagacatactcgagtgattcttaaaaagttgaataccaa

SEQ ID NO: 34059 - DNA, 80 bp, synthetic construct
  source 1..80: mol_type = other DNA
tttgaagtcattcgacgagatctattctggaaatcaaagaatgatcgggttggtcaaagttgtcgtcggattggcgttgt

SEQ ID NO: 34060 - DNA, 80 bp, synthetic construct
  source 1..80: mol_type = other DNA
cggctctttccaaacctcctgtcaaccccagagagttcctgaaatctatagaccttggaggactgccggacgaagatttg

SEQ ID NO: 34061 - DNA, 80 bp, synthetic construct
  source 1..80: mol_type = other DNA
ggaaggatagaagacctgtctggggaggtagagaggcaccttcgagggtacaataggtggatcaccctagaggacattag

SEQ ID NO: 34062 - DNA, 80 bp, synthetic construct
  source 1..80: mol_type = other DNA
ggtgcaacctgaaaaaaacaagatcctgattcatgacctctgcttgcttgattgtttttccatctttattgtttttttgt

SEQ ID NO: 34063 - DNA, 80 bp, synthetic construct
  source 1..80: mol_type = other DNA
tgtcagctcccccagatgatgatgatttgtggttaccccctccagaatatgttccgttgaaggagcttacgggcaagaaa

SEQ ID NO: 34064 - DNA, 80 bp, synthetic construct
  source 1..80: mol_type = other DNA
ttatggatggaacctgggtcacaattcagacttcaaacgaaaccaaatggtgcccttctgatcaattggtaaatctacat

SEQ ID NO: 34065 - DNA, 80 bp, synthetic construct
  source 1..80: mol_type = other DNA
ctggctacactaatgctgacgatcttcttaataacatgttgcagaagagtcgatagaacagaatcaatacaacgaggtcc

SEQ ID NO: 34066 - DNA, 80 bp, synthetic construct
  source 1..80: mol_type = other DNA
tctctattctcaacagtccctcacggactccgtacaacaggatggaatcaagagtcaagaaactttcattaatcatctca

SEQ ID NO: 34067 - DNA, 80 bp, synthetic construct
  source 1..80: mol_type = other DNA
gtcacaatcatcttacatcccaataaggcgtacaaaactacaaagggctgggccatccaagcttctcagtcaagaaaaaa

SEQ ID NO: 34068 - DNA, 80 bp, synthetic construct
  source 1..80: mol_type = other DNA
agaatatctagaatggtctctggggcggtgcctcattttcgaaaactccctgatattcgcttaagaccgggtgatttcga

SEQ ID NO: 34069 - DNA, 80 bp, synthetic construct
  source 1..80: mol_type = other DNA
gatattttctattccccaaaaagttcccgctgcctatccgaccacgatgaaagagggcaataggtctattctgtgctacc

SEQ ID NO: 34070 - DNA, 80 bp, synthetic construct
  source 1..80: mol_type = other DNA
tttcctgcggtcactggatttataactcagatgacttcttctttctcatccgagctatacctcagattctcgaaacgagg

SEQ ID NO: 34071 - DNA, 80 bp, synthetic construct
  source 1..80: mol_type = other DNA
cggggagtcagggaggaaagtatcgataacttccccagatgggaaagtcatatcttcatgggagttgtacaagagtggag

SEQ ID NO: 34072 - DNA, 80 bp, synthetic construct
  source 1..80: mol_type = other DNA
ttggttatgtcaccactacattcaagagaaaacactttcgccctatgccagacgcatgcagagctgcatacaattggaag

SEQ ID NO: 34073 - DNA, 80 bp, synthetic construct
  source 1..80: mol_type = other DNA
aacaaatgctctgttaatataccgtggtattgtggagggggcatccaaactggggcttatcataaagaaggaagagacca

SEQ ID NO: 34074 - DNA, 80 bp, synthetic construct
  source 1..80: mol_type = other DNA
tgtgtagctatgactttctcatctatggaaaaacccctctgtttcgaggtaacattttggtgcctgagtccaaaagatgg

SEQ ID NO: 34075 - DNA, 80 bp, synthetic construct
  source 1..80: mol_type = other DNA
gggcgacaggggcccattataaacttaaacctattctggatggtctcaatgtattcccttccctatgtcttgtggtaggg

SEQ ID NO: 34076 - DNA, 80 bp, synthetic construct
  source 1..80: mol_type = other DNA
ctggatggtctcaatgtattcccttccctatgtcttgtggtaggggatggatcaggggggatatcaagagcggtactcaa

SEQ ID NO: 34077 - DNA, 80 bp, synthetic construct
  source 1..80: mol_type = other DNA
atccagatcatctcttttagattatagttgcttgtaaaccaggcattctcgagggaatgtacagattaaaactctttgac

SEQ ID NO: 34078 - DNA, 80 bp, synthetic construct
  source 1..80: mol_type = other DNA
cctgaaaaaaacaagatcctgattcataacctctgcttgcttgattgtttttccatctttattgtttttttgttaagcgt

SEQ ID NO: 34079 - DNA, 80 bp, synthetic construct
  source 1..80: mol_type = other DNA
ctgaagtagccttggcggatgacggaaccgtcaattctgatgatgaggattatttctctagtgagaccaggagtccggag

SEQ ID NO: 34080 - DNA, 80 bp, synthetic construct
  source 1..80: mol_type = other DNA
tgccgaggaagtcttcagaagataaagctacccagactgccaaccgggaactcaagaaagagacagtgtctgcatcttct

SEQ ID NO: 34081 - DNA, 80 bp, synthetic construct
  source 1..80: mol_type = other DNA
cagcgagaaagtcaatcatctaaagccaagatggcggctcaaaccgcctccggtccttctgctctggaatggtccgccgc

SEQ ID NO: 34082 - DNA, 80 bp, synthetic construct
  source 1..80: mol_type = other DNA
aatgtgccaggggtagcccgcttggctcacgacgggtccaaactccccctgagatgtatgctggcgtgggttgctctagc

SEQ ID NO: 34083 - DNA, 80 bp, synthetic construct
  source 1..80: mol_type = other DNA
tcttctgaccacaccctcgagctcagtcatactatgcaatcaaatctgacctgctccaagtccaacatgaaaaaaacgag

SEQ ID NO: 34084 - DNA, 80 bp, synthetic construct
  source 1..80: mol_type = other DNA
caacaccactgataaaatgaactttctgcgcaagatagtgaagaactgtagagatgagaatactcagaagccctctctcg

SEQ ID NO: 34085 - DNA, 80 bp, synthetic construct
  source 1..80: mol_type = other DNA
gttgtgtttcgggggattccccatctacacgataccagacaagctcggaccttggagtcccatcgatatccatcatctca

SEQ ID NO: 34086 - DNA, 80 bp, synthetic construct
  source 1..80: mol_type = other DNA
ctagcaacactaatactgactatcttcctagtgacatgttgcagaagagttgatagaacaagatcaatacaacgaggttc

SEQ ID NO: 34087 - DNA, 80 bp, synthetic construct
  source 1..80: mol_type = other DNA
cggggagtcaggaaggaaagtgtcggtgacttcccaaaacgggaaagtcatctcttcatgggagttgtacaagagtggag

SEQ ID NO: 34088 - DNA, 80 bp, synthetic construct
  source 1..80: mol_type = other DNA
gcgagaccaggctgtgagggcaggtcatcccctccataccttgccttcagaagattgcctctttttgagatctgagggaa

SEQ ID NO: 34089 - DNA, 80 bp, synthetic construct
  source 1..80: mol_type = other DNA
tctctctcttcaacggtccttcatggactccgtgcaacagagtgaaatcaagagtcgagaaactttcattaatcatctca

SEQ ID NO: 34090 - DNA, 80 bp, synthetic construct
  source 1..80: mol_type = other DNA
actgatcatacacagtcatgtagattttgataaagtatgatgtcttctggcagtatcattgattaatggtgctctcatcc

SEQ ID NO: 34091 - DNA, 80 bp, synthetic construct
  source 1..80: mol_type = other DNA
ctcaaggactgatatcagaggttgtggacaagccaactgatatcttagataactctacgcttgagcttgagcagaggcca

SEQ ID NO: 34092 - DNA, 80 bp, synthetic construct
  source 1..80: mol_type = other DNA
tagcaagttccactacattagaccaaatgggatttagttgagagaagtgatttgcctcctatgaaggacataagcaatag

SEQ ID NO: 34093 - DNA, 80 bp, synthetic construct
  source 1..80: mol_type = other DNA
ctagcgtcatggctctcagagaacagaggagggccggtccccagcgagaaggtcattattacggctctttccaaacctcc

SEQ ID NO: 34094 - DNA, 80 bp, synthetic construct
  source 1..80: mol_type = other DNA
tctcttagaggagagatattctctattccccaaaaagttcctgctgcttacccgaccacgatgaaagagggtaacagatc

SEQ ID NO: 34095 - DNA, 80 bp, synthetic construct
  source 1..80: mol_type = other DNA
acctaaggaaagggagctgaaaattgaaggtcggtttttcgccttaatgtcctggaatctgaggttgtattttgtcatca

SEQ ID NO: 34096 - DNA, 80 bp, synthetic construct
  source 1..80: mol_type = other DNA
aaaaatctctccaaaagtatgaggaccaacttacgacaaatgagctctctaatgaggcaagtactgggaggccatggtga

SEQ ID NO: 34097 - DNA, 80 bp, synthetic construct
  source 1..80: mol_type = other DNA
tgagaaagcttcaattagacgatgaaaaaccatctggcctcggtgggatggccaaggtaggggagagcaagtgtcaggaa

SEQ ID NO: 34098 - DNA, 80 bp, synthetic construct
  source 1..80: mol_type = other DNA
gactttcagatgggcgaagcggaggaccccgcactcttgttccagtcttacctggacaatgttggaattcaaatggtcag

SEQ ID NO: 34099 - DNA, 80 bp, synthetic construct
  source 1..80: mol_type = other DNA
acaaatgaggtcaggagagagattcctcaagatatggtctcagaccgtcgaagagatcatatcctatgtcatggtcaact

SEQ ID NO: 34100 - DNA, 80 bp, synthetic construct
  source 1..80: mol_type = other DNA
tccccagtctgccggggaagtcttcagaagataaagctactcagactgcaaaccgggaactcaagaaggagacagtgtct

SEQ ID NO: 34101 - DNA, 80 bp, synthetic construct
  source 1..80: mol_type = other DNA
gcttcttctcagcgagagagtcaatcatctaaagccaaaatggcggctcaaaccgcttccggtccttctgctctagagtg

SEQ ID NO: 34102 - DNA, 80 bp, synthetic construct
  source 1..80: mol_type = other DNA
gtccgctgccaacgaggaggatgacccatctgtggaggctgaaattgctcaccagattgctgagagtttttccaagaagt

SEQ ID NO: 34103 - DNA, 80 bp, synthetic construct
  source 1..80: mol_type = other DNA
ttcatctgaccacacccccgagctcagccccaccatgcaatcaaatctgacctgctccaaatccaacatgaaaaaaacag

SEQ ID NO: 34104 - DNA, 80 bp, synthetic construct
  source 1..80: mol_type = other DNA
ctgacatgtcccttcgaacacaaaggtctgaggaggataaagattcttcagtgcttctggaatagtctaattacatccta

SEQ ID NO: 34105 - DNA, 80 bp, synthetic construct
  source 1..80: mol_type = other DNA
aaaactattaacatccctcaaaggacccaaaggaagatgatccctcaggctcttctgtatgtgcctctcctgatcccctc

SEQ ID NO: 34106 - DNA, 80 bp, synthetic construct
  source 1..80: mol_type = other DNA
gcgaggctaggctgtgagggcaggtcatcccctccataccttgcgttcagaaagttgactctctttgagacctgagggaa

SEQ ID NO: 34107 - DNA, 80 bp, synthetic construct
  source 1..80: mol_type = other DNA
catacgttgtgaacagcttggtccagagggcagaaaagtttaggcctctcattcattccctaggggatttccctgtgttt

SEQ ID NO: 34108 - DNA, 80 bp, synthetic construct
  source 1..80: mol_type = other DNA
cggaaccgtcaattctgatgatgaggactacttctctagtgagaccaggagtccggaggcagtctacactcgaatcatga

SEQ ID NO: 34109 - DNA, 80 bp, synthetic construct
  source 1..80: mol_type = other DNA
acaccttagagtcggacgaagacatacagaggctgttgaaagactctttgcgcaggacaaggtgggtagatcaagaagtg

SEQ ID NO: 34110 - DNA, 80 bp, synthetic construct
  source 1..80: mol_type = other DNA
ggagacttcagaacccgttgatctcaggattgagagtggtccagtgggcgacaggggctcactataagctcaaacctatt

SEQ ID NO: 34111 - DNA, 80 bp, synthetic construct
  source 1..80: mol_type = other DNA
tatgttcccggatgctaggcttgtattcaacagcttattagaagtaaatgacctgatggcttcaggaacacatccattgc

SEQ ID NO: 34112 - DNA, 80 bp, synthetic construct
  source 1..80: mol_type = other DNA
gacctgaggaatttgaccacatggaaatacttccagtcagtccaagaacaagtaaatatgtcttatgacctcatcatttg

SEQ ID NO: 34113 - DNA, 80 bp, synthetic construct
  source 1..80: mol_type = other DNA
agcgaggaactttgtccaaagtttctattattatagccatcatgatagtcttctccaacagggtgttcaatgtctcaaaa

SEQ ID NO: 34114 - DNA, 80 bp, synthetic construct
  source 1..80: mol_type = other DNA
tggcttgcaactctaacttgagtctctcatctcactggattaggctaatttacaagatagtaaagacaactagacttgtc

SEQ ID NO: 34115 - DNA, 80 bp, synthetic construct
  source 1..80: mol_type = other DNA
ggaaacatagaagacctgtccggggaggtggagaggcaccttcgagggtacaacaggtggattaccctcgatgacattcg

SEQ ID NO: 34116 - DNA, 80 bp, synthetic construct
  source 1..80: mol_type = other DNA
ggtgtatcctgaaaaaaacaggatcctaattcataacctctttttacttgattgtttttccatctttattgtttttttgt

SEQ ID NO: 34117 - DNA, 80 bp, synthetic construct
  source 1..80: mol_type = other DNA
ttcgtaaggagctaaacaacagaattttaaacactaataaatcatgtacatccttcacgaaaaaaactaacacccctcct

SEQ ID NO: 34118 - DNA, 80 bp, synthetic construct
  source 1..80: mol_type = other DNA
ttcaattagacgatgcaaaatcatctggccctggcgagatggccaaagcaggggaaagcaagtttcaggaagattttcaa

SEQ ID NO: 34119 - DNA, 80 bp, synthetic construct
  source 1..80: mol_type = other DNA
tgatctgtcggggaagtcttcagaagacaaagcaacccagactgcaaaccgagaactcaagaaggagacagtgtctgcct

SEQ ID NO: 34120 - DNA, 80 bp, synthetic construct
  source 1..80: mol_type = other DNA
cttctcagcgagaaagtcaatcacctaaaaccaaaatggcggcccaaaccgcctccggtcctcctgctctagagtggtcc

SEQ ID NO: 34121 - DNA, 80 bp, synthetic construct
  source 1..80: mol_type = other DNA
gccaccaacgaagaggctgacctatctgtggaggccgaaattgctcatcagattgctgagagcttttccaagaagtacaa

SEQ ID NO: 34122 - DNA, 80 bp, synthetic construct
  source 1..80: mol_type = other DNA
cacactgatcaacctctcaaattcagtcccaccgtgcaatcagatccggactgcttcaaatctggcgtgaaaaaaacagg

SEQ ID NO: 34123 - DNA, 80 bp, synthetic construct
  source 1..80: mol_type = other DNA
tcgcatcggctcctccagatgatgatgatctgtggttaccccctccagaatatgttccgttgaaggagctaacgggcaaa

SEQ ID NO: 34124 - DNA, 80 bp, synthetic construct
  source 1..80: mol_type = other DNA
aaaaacatgagaaacttttgcgttaatggagaagttaaggtgtgtagtccaaacggctattcattcaggatcctgcggca

SEQ ID NO: 34125 - DNA, 80 bp, synthetic construct
  source 1..80: mol_type = other DNA
aaagatctgatgagaataaagactcttcaatgctgctggaatagtcaaattacatcttactgattcctcaatcatttacc

SEQ ID NO: 34126 - DNA, 80 bp, synthetic construct
  source 1..80: mol_type = other DNA
tctggaggagagaacacatgggcttaactccaaccttcgggagcaatagaacaaaaacatgttatggtgccgttgaatcg

SEQ ID NO: 34127 - DNA, 80 bp, synthetic construct
  source 1..80: mol_type = other DNA
gtggaggatgagggatgcaacagtctgtcggggttttcttacatggaactgaaagtgggatacatctcttccataaaagt

SEQ ID NO: 34128 - DNA, 80 bp, synthetic construct
  source 1..80: mol_type = other DNA
ctcttccacctactgctccactaaccatgattacaccatctggatgcccgaagaagcaagacttgggacctcttgtgaca

SEQ ID NO: 34129 - DNA, 80 bp, synthetic construct
  source 1..80: mol_type = other DNA
aagaagcaagacttgggacctcttgtgacatttttaccaacagcaaagggaagaaggcatctaaggggggcaggacttgc

SEQ ID NO: 34130 - DNA, 80 bp, synthetic construct
  source 1..80: mol_type = other DNA
gattttcgctcagatgagatagaacatctcgtagtggaggagttggtcaagaagagggaagaatgcctggatgcactgga

SEQ ID NO: 34131 - DNA, 80 bp, synthetic construct
  source 1..80: mol_type = other DNA
gtgcctaagcgtcggagggaggtgccatcctcatgtggacggagtgttcttcaatggtataattctgggtccggatggaa

SEQ ID NO: 34132 - DNA, 80 bp, synthetic construct
  source 1..80: mol_type = other DNA
gtgtcctgatccctgagatgcaatcatccctacttcaacagcatatggagctgttggagtcctctgtaatccccctaatg

SEQ ID NO: 34133 - DNA, 80 bp, synthetic construct
  source 1..80: mol_type = other DNA
gcgaaaccggcctgtgagggcaggtcatctcctctataccctgcattcagaagatagtctctcttcgaggtcaggggaga

SEQ ID NO: 34134 - DNA, 80 bp, synthetic construct
  source 1..80: mol_type = other DNA
tctcttgacttaacagtccttcatggactccatgtaacagggtagatttaaaagtcgagaaacttccattaatcatctca

SEQ ID NO: 34135 - DNA, 80 bp, synthetic construct
  source 1..80: mol_type = other DNA
actgatcggacacatttatgtagattctgataatgtatgatatcttccgacggtatcagtgatcaatggtgctctcatat

SEQ ID NO: 34136 - DNA, 80 bp, synthetic construct
  source 1..80: mol_type = other DNA
atcataatcatcttacatcccgataaagtgtgcataactaaaaggggccgggccatccaagcctttcagtcaagaaaaaa

SEQ ID NO: 34137 - DNA, 80 bp, synthetic construct
  source 1..80: mol_type = other DNA
ataagagataaagtgggtcaacttgaaggaacatttggtcctagtgcaaagaggttcttcaaggctctagatcaattcga

SEQ ID NO: 34138 - DNA, 80 bp, synthetic construct
  source 1..80: mol_type = other DNA
atttgagactccttgcgagagaccaccccctgattccttatatcaaaacccagacatggcctccaaaacacatagtagat

SEQ ID NO: 34139 - DNA, 80 bp, synthetic construct
  source 1..80: mol_type = other DNA
cgatttcctgcacttgtggggtaacaggaggtggaaatcctagaatatcagtgtctgtgcttccttctttcgatcattca

SEQ ID NO: 34140 - DNA, 80 bp, synthetic construct
  source 1..80: mol_type = other DNA
ttcttttcgagaggctctctgaagggatacctgggctcctcaacttccatgtcaacccagctgttccacgcctgggagaa

SEQ ID NO: 34141 - DNA, 80 bp, synthetic construct
  source 1..80: mol_type = other DNA
caggatccgccctgcataggtttaagtcagccagatatagtgagggggggtactcttctgtatgtccgaatctcctctct

SEQ ID NO: 34142 - DNA, 80 bp, synthetic construct
  source 1..80: mol_type = other DNA
ggtactcttctgtatgtccgaatctcctctctcacatctctgtcagtacagacacgatgtctgacttgactcatgatggg

SEQ ID NO: 34143 - DNA, 80 bp, synthetic construct
  source 1..80: mol_type = other DNA
cacatctctgtcagtacagacacgatgtctgacttgactcatgatgggagaaactatgactttatgttccaaccgttgat

SEQ ID NO: 34144 - DNA, 80 bp, synthetic construct
  source 1..80: mol_type = other DNA
gatgcaacaagtgcataaggcctatcgatgacattactcttgagacttctcaggtcttcgagttcccggatgtttcaaga

SEQ ID NO: 34145 - DNA, 80 bp, synthetic construct
  source 1..80: mol_type = other DNA
aggatatccaggatggtttctggagctgtgcctcacttccgaaaacttcctgatattcgtttaaaacctggtgacttcga

SEQ ID NO: 34146 - DNA, 80 bp, synthetic construct
  source 1..80: mol_type = other DNA
tgacttgcaactctagcttgagtctctcatctcactggatcaggctgatctacaaaatagtgaaaaccaccagacttgtt

SEQ ID NO: 34147 - DNA, 80 bp, synthetic construct
  source 1..80: mol_type = other DNA
aaaggtctgaggaggataaagattcttcagtgcttctggaatagttttattacatcctaaaaattcctcaattgtttacc

SEQ ID NO: 34148 - DNA, 80 bp, synthetic construct
  source 1..80: mol_type = other DNA
ttatttcaagaaacaagtcattcgggggaatatttatctgtcctggagttggtctgaagacacctcagtgtttaagagag

SEQ ID NO: 34149 - DNA, 80 bp, synthetic construct
  source 1..80: mol_type = other DNA
acaccttggagtcagatgaggacattcagaggctgttgaaggactctttgcgtaggactagatgggtagaccaggaagta

SEQ ID NO: 34150 - DNA, 80 bp, synthetic construct
  source 1..80: mol_type = other DNA
ttgctctgctcagcaggtagcggtttcgacctcggcgaacccggcccctgcttccgagctggacatcaggaccctctcta

SEQ ID NO: 34151 - DNA, 80 bp, synthetic construct
  source 1..80: mol_type = other DNA
agctgtacctcagattctccaaacggggaaagttcttccgagatgcagaacatctgacttcctctgctcttagagagatg

SEQ ID NO: 34152 - DNA, 80 bp, synthetic construct
  source 1..80: mol_type = other DNA
agccttgtattgttcaactgtagcagtcccaaaagcgagatgcagagagcccgctccttaaattaccaggaccttgtaag

SEQ ID NO: 34153 - DNA, 80 bp, synthetic construct
  source 1..80: mol_type = other DNA
gttaggtccagatcatctctgttggattatagctgcttgtgagctaatcacccctgagagaacatacaaactgatactct

SEQ ID NO: 34154 - DNA, 80 bp, synthetic construct
  source 1..80: mol_type = other DNA
aagctgacacagccttggcagatgacggaacagtcaattccgacgatgaggactacttctccaatgaaactaggagtcca

SEQ ID NO: 34155 - DNA, 80 bp, synthetic construct
  source 1..80: mol_type = other DNA
tcatcaaactcgtcccaactcgtttgccgaatttttaaacaagacatattcgagtgactcgtgaagagccgaacagcgag

SEQ ID NO: 34156 - DNA, 80 bp, synthetic construct
  source 1..80: mol_type = other DNA
tctcattgctaggaacattgaggacaatcaggctcatctccaaggagatcccatagaggtggacaatctccctgaagaca

SEQ ID NO: 34157 - DNA, 80 bp, synthetic construct
  source 1..80: mol_type = other DNA
ttcaactagatgacgacaaaccgtctgacctcggcagtatggccaaagtgggggagagcaagggtcaggaagacgttcaa

SEQ ID NO: 34158 - DNA, 80 bp, synthetic construct
  source 1..80: mol_type = other DNA
tgtgccgggaaagtccttaagagaccaagcaacgcagactgtcgatcgtgaactctcaaaggatacaaaatctgcctctt

SEQ ID NO: 34159 - DNA, 80 bp, synthetic construct
  source 1..80: mol_type = other DNA
gccaacgaagaggatgacccgtccgttgaggctgagattgctcaccagattgctgagagcttttccaagaagtacaaatt

SEQ ID NO: 34160 - DNA, 80 bp, synthetic construct
  source 1..80: mol_type = other DNA
aatgtgccaggagtggcccgcttggcccatgacggatccaagctccctctgagatgtgtgctgggatgggttgccctagc

SEQ ID NO: 34161 - DNA, 80 bp, synthetic construct
  source 1..80: mol_type = other DNA
ctctctgaccacaccccatggctctgccacactgttgaatcagatctgatttgccacaagtctatcatgaaaaaaacgag

SEQ ID NO: 34162 - DNA, 80 bp, synthetic construct
  source 1..80: mol_type = other DNA
ctgacctgtccctccaaacacaaaggtctgatgaggataaagattcctcagtgcttctggaatagtctaactgcacccca

SEQ ID NO: 34163 - DNA, 80 bp, synthetic construct
  source 1..80: mol_type = other DNA
aaacgtcctcaattctatacctccggaggagagagcacacgggtctgaccccaactatcaggagcaatagaacaaaaata

SEQ ID NO: 34164 - DNA, 80 bp, synthetic construct
  source 1..80: mol_type = other DNA
tgtcatggtgccgttgaatcgctgcattttgtcagagttgaatctattacttttacaatttaagcttctctgatgtgaaa

SEQ ID NO: 34165 - DNA, 80 bp, synthetic construct
  source 1..80: mol_type = other DNA
gctgtgtctcgggaaattccctatctacacgataccggacaagcttggtccttggagccctattgacatacatcacctta

SEQ ID NO: 34166 - DNA, 80 bp, synthetic construct
  source 1..80: mol_type = other DNA
accttagctgtccaaacaatctggttgtggaggacgaggggtgcactagtctgtcagggttttcttatatggaactaaag

SEQ ID NO: 34167 - DNA, 80 bp, synthetic construct
  source 1..80: mol_type = other DNA
gtaggatacatctcttccataaaggtgaacgggttcacttgtacgggtgttgtgacagaagctgagacctataccaactt

SEQ ID NO: 34168 - DNA, 80 bp, synthetic construct
  source 1..80: mol_type = other DNA
acataaaacgtactaatgtggaaggaaattgggccctaacagggggcatggagttgacaagggaccctactgttgcagaa

SEQ ID NO: 34169 - DNA, 80 bp, synthetic construct
  source 1..80: mol_type = other DNA
ttatggatggaacctgggttacaattcagacatcagaagaggtcaaatggtgccctgcagatcaattggtgaatctacat

SEQ ID NO: 34170 - DNA, 80 bp, synthetic construct
  source 1..80: mol_type = other DNA
ggtctggcagcactggttctgataatctttttgatggtatgttgtagaaggaccaagagaacggagtcaagacgacgggg

SEQ ID NO: 34171 - DNA, 80 bp, synthetic construct
  source 1..80: mol_type = other DNA
ctctggggaatcaggaaagaaggtatcggtaactccccagaccagaaaggttgtatcttcatgggagttgtacaagagtg

SEQ ID NO: 34172 - DNA, 80 bp, synthetic construct
  source 1..80: mol_type = other DNA
aaggcgatgccaggctgtgagggcaggccacctcctttatatcttgcgatcgaaagattgcctatcctagagatctgaga

SEQ ID NO: 34173 - DNA, 80 bp, synthetic construct
  source 1..80: mol_type = other DNA
gattctctcattttggaagtccttcaaagacctcatgtaccaagatgaattcaagagatgaagaatgttcattaaccatc

SEQ ID NO: 34174 - DNA, 80 bp, synthetic construct
  source 1..80: mol_type = other DNA
tcccccaaggactgataccaaaggtgatgggcagaataaccgatatctcaaacaactctatgactgagtccaagaagagg

SEQ ID NO: 34175 - DNA, 80 bp, synthetic construct
  source 1..80: mol_type = other DNA
atatcatgagttccactgcattgggccaagtagagattagttgagaaagacaatttacctcctatgaaggacacaaacaa

SEQ ID NO: 34176 - DNA, 80 bp, synthetic construct
  source 1..80: mol_type = other DNA
taggtcacaatcatcctacatcctgacaagacatatacaattacagagggatggaccatccaagcatttcagtcaagaaa

SEQ ID NO: 34177 - DNA, 80 bp, synthetic construct
  source 1..80: mol_type = other DNA
aaaactgtgggatggaggggccatcaacaacacctctcatcccaagaaccgtaccatgatgattgatccggtggaggttt

SEQ ID NO: 34178 - DNA, 80 bp, synthetic construct
  source 1..80: mol_type = other DNA
gtataacagacttggcccagttctactccaagtcttcccctgtggagaagttattaaactacacgctcgagaatagaggg

SEQ ID NO: 34179 - DNA, 80 bp, synthetic construct
  source 1..80: mol_type = other DNA
gaaagacttagcatcaatcgatgttgggaaggacttggtcaagtttagagacaagatatggggattgctgattgtgacca

SEQ ID NO: 34180 - DNA, 80 bp, synthetic construct
  source 1..80: mol_type = other DNA
ctggcgtcgtggctatcagagaacagaggagggccggtccccagtgaaaaggtcattattacggccctttctaaaccccc

SEQ ID NO: 34181 - DNA, 80 bp, synthetic construct
  source 1..80: mol_type = other DNA
tgttgtttagtcctatcctgaagggcagagtttacaagatcctgagtgcagagggtgacaactttcttctagctatgtct

SEQ ID NO: 34182 - DNA, 80 bp, synthetic construct
  source 1..80: mol_type = other DNA
aagcgggaaacccagatctaggagagaggacactggagagttttactcgtctgctcgaagatcctaccactctgaacata

SEQ ID NO: 34183 - DNA, 80 bp, synthetic construct
  source 1..80: mol_type = other DNA
agaggaggagccagtcccaccattcttctcaaggatgcgatcagaaaagccctgtatgaggaagtagacaaagtagagaa

SEQ ID NO: 34184 - DNA, 80 bp, synthetic construct
  source 1..80: mol_type = other DNA
ctcggagtttagagaagcgatcctcctgtccaagactcatagagataactttatcctcttcttaaagtccgttgaaccgt

SEQ ID NO: 34185 - DNA, 80 bp, synthetic construct
  source 1..80: mol_type = other DNA
tgtttcccagatttctcagtgaactattcagctcatcattcttggggattcctgagtcaattatcgggctaatacagaat

SEQ ID NO: 34186 - DNA, 80 bp, synthetic construct
  source 1..80: mol_type = other DNA
tccagaacaataaggagacagttcagaaagagtctttcaagaacactggaagagtctttttataactcagagatccatgg

SEQ ID NO: 34187 - DNA, 80 bp, synthetic construct
  source 1..80: mol_type = other DNA
gcccaaaccttagtccggaacataatgtccctgacaggtccagattttccgctggaagaggctcctgttttcaagagaac

SEQ ID NO: 34188 - DNA, 80 bp, synthetic construct
  source 1..80: mol_type = other DNA
tcagtacagacacaatgtctgacttgactcatgatgggcgaaactatgactttatgttccaaccactgatgctttatgca

SEQ ID NO: 34189 - DNA, 80 bp, synthetic construct
  source 1..80: mol_type = other DNA
gatgtaacaagtgtataaggcccattgatgacatcactcttgagacttctcaggtttttgatttcccggacgtatcaaga

SEQ ID NO: 34190 - DNA, 80 bp, synthetic construct
  source 1..80: mol_type = other DNA
aatctctaagcgaaaaggaaaaatctcgccatatagggtcagcccaagggctcttgtattcaatcttagtggcaatccat

SEQ ID NO: 34191 - DNA, 80 bp, synthetic construct
  source 1..80: mol_type = other DNA
ttcaattagacgatgaaaaaccatctggccccgacgggacaaccaaggtagaggagagcaagtgtcaggaagactttcag

SEQ ID NO: 34192 - DNA, 80 bp, synthetic construct
  source 1..80: mol_type = other DNA
caactccaaaaaattccagctgttagtggagcctgacaagctaaataaaataatgcaagacgacttgaaccgttatgcat

SEQ ID NO: 34193 - DNA, 80 bp, synthetic construct
  source 1..80: mol_type = other DNA
cccaaggactgacaccaaaggttgcagacaagccaactgatatctcaaatcactctatgcttgagtttgagcagaggcca

SEQ ID NO: 34194 - DNA, 80 bp, synthetic construct
  source 1..80: mol_type = other DNA
attcgagacttctctcgagggaccaccccctaactccttatattaaaacccagacatggcctccaaaacatatagtagat

SEQ ID NO: 34195 - DNA, 80 bp, synthetic construct
  source 1..80: mol_type = other DNA
ggagtctggttagcttattaatgatagatcgtgagtctcagactaggaacacgaggactaagatactagcccagggagat

SEQ ID NO: 34196 - DNA, 80 bp, synthetic construct
  source 1..80: mol_type = other DNA
tgtctagaatcgtctatttagacccctcgttgggaggagtatctggaatgtctcttggaaggttccacatacgtcagttc

SEQ ID NO: 34197 - DNA, 80 bp, synthetic construct
  source 1..80: mol_type = other DNA
ctggatgatctcaatgtttttccatccttatgtcttgtggtcggagacgggtcagggggaatatcgcgagcagtgctcaa

SEQ ID NO: 34198 - DNA, 80 bp, synthetic construct
  source 1..80: mol_type = other DNA
tgtgatgcagaagtcactgacatagcatccattaatcggataacactgttgatgtccgatttcgcattgtccatagatgg

SEQ ID NO: 34199 - DNA, 80 bp, synthetic construct
  source 1..80: mol_type = other DNA
aaatctagatcatctctactggactacagctgcttatgaactgaacattattggggcttgtaaatactgaagctcttaga

SEQ ID NO: 34200 - DNA, 80 bp, synthetic construct
  source 1..80: mol_type = other DNA
cgtcgggaaggtcttcagaggataggtcaacccagactactgggagggagcttaggaaggaaaccccttcggcttcttct

SEQ ID NO: 34201 - DNA, 80 bp, synthetic construct
  source 1..80: mol_type = other DNA
caacgaagaggacgatttatctgtggaggcagagattgcccaccagattgctgagagcttctccaagaaatacaaattcc

SEQ ID NO: 34202 - DNA, 80 bp, synthetic construct
  source 1..80: mol_type = other DNA
tcaaagagtcaaaaaatgtcccaggtgtgacccgtttagctcatgatggatccaaactccctctaagatgtgtactgggg

SEQ ID NO: 34203 - DNA, 80 bp, synthetic construct
  source 1..80: mol_type = other DNA
acatgccctgaagactggaatagttacgggatcttgattgcacgaaaaggagacaaaatcacccctgactctcttgtaga

SEQ ID NO: 34204 - DNA, 80 bp, synthetic construct
  source 1..80: mol_type = other DNA
agtcctttgttatcatatctccaagtgtggcagatctagacccgtacgataagtcccttcattcgagagtttttcctaga

SEQ ID NO: 34205 - DNA, 80 bp, synthetic construct
  source 1..80: mol_type = other DNA
aatcccagactggggacctcttgtgatattttcaccaatagccgagggaagagagcattcaaagggagcaagacctgtgg

SEQ ID NO: 34206 - DNA, 80 bp, synthetic construct
  source 1..80: mol_type = other DNA
atttgtagatgagagaggcttgtacaaatctctaaaaggagcatgcaaactgaagctttgcggggttcttggactcagac

SEQ ID NO: 34207 - DNA, 80 bp, synthetic construct
  source 1..80: mol_type = other DNA
gtgagaccaagctgtaaagacaggtcatctcccctatatttcaggtcccgaagatctcacccccttgagataagggggac

SEQ ID NO: 34208 - DNA, 80 bp, synthetic construct
  source 1..80: mol_type = other DNA
atctctggattcgatggtcctccttggactccttgcaacagggtagattcgagaatcttgagacctccattaatcatctc

SEQ ID NO: 34209 - DNA, 80 bp, synthetic construct
  source 1..80: mol_type = other DNA
aaccgatcaaacatggtcatgtagattcttataacacaagaaatcttctagcagttccagtgaccaacggtgcttttatc

SEQ ID NO: 34210 - DNA, 80 bp, synthetic construct
  source 1..80: mol_type = other DNA
caagaactgatactgaaggtgatggacaggccttgaaatatctcagataacgttgtgctcaaacacagacatatattatg

SEQ ID NO: 34211 - DNA, 80 bp, synthetic construct
  source 1..80: mol_type = other DNA
tatgactgacctggcccatttctattccaagtcttctcccatagagaagctgttgaattgcacactcggaaatagaggac

SEQ ID NO: 34212 - DNA, 80 bp, synthetic construct
  source 1..80: mol_type = other DNA
taagaatccctcctgaaggggtgttgagttgtcttgaaagagttgactatgataaggcatttgggagatatctcgccaat

SEQ ID NO: 34213 - DNA, 80 bp, synthetic construct
  source 1..80: mol_type = other DNA
tcatagaggacaaggtgagtcaactcgaggggacattcggtcccagtgcaaaaaggttctttcgggttttggatcagttc

SEQ ID NO: 34214 - DNA, 80 bp, synthetic construct
  source 1..80: mol_type = other DNA
gacaacatccaggatctagttttcgtgtacggctgttataggcattgggggcatccttatatagattatagaaagggtct

SEQ ID NO: 34215 - DNA, 80 bp, synthetic construct
  source 1..80: mol_type = other DNA
ataaccaggttctatgtccgacatacatgctatcgcctgggctgtcgagagaggggcttctttatgaactggaaagtata

SEQ ID NO: 34216 - DNA, 80 bp, synthetic construct
  source 1..80: mol_type = other DNA
tcggacttcagaagctctaagatgacgtacctaactctcatcacctatcagtctcatcttctacttcagaggattgaaag

SEQ ID NO: 34217 - DNA, 80 bp, synthetic construct
  source 1..80: mol_type = other DNA
cctgaaaaaaactggatcagaattccgaacctctgtcggcttgattgtttttctatctttattgtttttttgttaagcgt

SEQ ID NO: 34218 - DNA, 80 bp, synthetic construct
  source 1..80: mol_type = other DNA
gcgatgccaggctgtgagggcgggccatctccttaatatcctgcgatctgaagactgcctactattgagatctgggagac

SEQ ID NO: 34219 - DNA, 80 bp, synthetic construct
  source 1..80: mol_type = other DNA
atccagatcatctctgttagattatagctgcttataaactaagttcctctgatagaatgtacagactgagactcctggac

SEQ ID NO: 34220 - DNA, 80 bp, synthetic construct
  source 1..80: mol_type = other DNA
aaaacaagcaacaccactgataaaatgaacttcctacgtaagatggtaaagaactgtagagatgaggacacccagaagcc

SEQ ID NO: 34221 - DNA, 80 bp, synthetic construct
  source 1..80: mol_type = other DNA
tacaacctcaactctcccctgatagaagactcggccaaattgatgctggaatggttgaaaacagggaatagaccttcccg

SEQ ID NO: 34222 - DNA, 80 bp, synthetic construct
  source 1..80: mol_type = other DNA
tatttccccgatttcttagtgaactcttcagttcatcattcttggggattcctgagtcaattattgggttaatacaaaat

SEQ ID NO: 34223 - DNA, 80 bp, synthetic construct
  source 1..80: mol_type = other DNA
ctgcctaatcgagcttttgagttcagtccctatagatgataaaaactgagatgtcctggagtcaacatgaaaaaaacagg

SEQ ID NO: 34224 - DNA, 80 bp, synthetic construct
  source 1..80: mol_type = other DNA
ccctgccatcaaagattcgaaaaagccctgtataaccctagggaaggcccccgacctaaacaaagcatacaaatcagttc

SEQ ID NO: 34225 - DNA, 80 bp, synthetic construct
  source 1..80: mol_type = other DNA
accctcgaggatattagatcaagatcatctctactagactacagctgcttgtaacccgagtactcccggaagcttgtaca

SEQ ID NO: 34226 - DNA, 80 bp, synthetic construct
  source 1..80: mol_type = other DNA
atggaacggtcaactctgacgatgaggactacttctccggtgaaaccagaagtccagaagctgtttatactcgaatcatg

SEQ ID NO: 34227 - DNA, 80 bp, synthetic construct
  source 1..80: mol_type = other DNA
tgtggatcaaaagagcaattggcaacacttctcatcctgaaacctacatcaagatgctagatccaggagaagtctatgat

SEQ ID NO: 34228 - DNA, 80 bp, synthetic construct
  source 1..80: mol_type = other DNA
gaccccattgatccagtcgagtcagagcctgaacccagaggagcccccactgttcctaacatcttgagaaactctgacta

SEQ ID NO: 34229 - DNA, 80 bp, synthetic construct
  source 1..80: mol_type = other DNA
ctgaaaaaaacaagatcctaaatcggaacctctggctgttcgattgtttttttcatctttattggttttttgttaagcgt

SEQ ID NO: 34230 - DNA, 80 bp, synthetic construct
  source 1..80: mol_type = other DNA
ctacaaacttgtcactcgtttacctctggaggagagaacatacgggcttaactccaacctttgggagcaatagaacaaat

SEQ ID NO: 34231 - DNA, 80 bp, synthetic construct
  source 1..80: mol_type = other DNA
accctcgaagatatcagatctagatcatctttactagactacagctgcttgtaaactgagtactcccggaaggctgtaca

SEQ ID NO: 34232 - DNA, 80 bp, synthetic construct
  source 1..80: mol_type = other DNA
tcatcaagctcgtccaaactcatttgctgattttctaaacaagacatattcgaacgactcatgaggggttgaattacagt

SEQ ID NO: 34233 - DNA, 80 bp, synthetic construct
  source 1..80: mol_type = other DNA
gccctgattgccttgatgttgataatctttttaatgacatgttgtagaagagtcaatagaccagagtccacgcagcccag

SEQ ID NO: 34234 - DNA, 80 bp, synthetic construct
  source 1..80: mol_type = other DNA
tttcagagggacagagaggaaggtgtcgatcactccccaaagcgggaaggtcatatcttcatgggagtcatataagagtg

SEQ ID NO: 34235 - DNA, 80 bp, synthetic construct
  source 1..80: mol_type = other DNA
attcgcgattccttgcccgggatcaccccttgactccttatatcaaaacccagacatggccacccaaacatatagtggac

SEQ ID NO: 34236 - DNA, 80 bp, synthetic construct
  source 1..80: mol_type = other DNA
agaataatctatctagatccatctttagggggagtgtcggggatgtcgctcgggaggttccacatacgccagttctcaga

SEQ ID NO: 34237 - DNA, 80 bp, synthetic construct
  source 1..80: mol_type = other DNA
ttcatgtagtgaaacgggccttgtcattaaaggagtctataaactggttcatcacgaggaattccaacctggctcagact

SEQ ID NO: 34238 - DNA, 80 bp, synthetic construct
  source 1..80: mol_type = other DNA
atccagccatcaaagacctgaagaaacccagtatcactctagggaaagctcctgacttaaacaaagcatacaagtcagtc

SEQ ID NO: 34239 - DNA, 80 bp, synthetic construct
  source 1..80: mol_type = other DNA
ggatcctacggcatattcttagatcatttgatgagatatattctggaaatcacagaatgatcggattagtcaaggtggtc

SEQ ID NO: 34240 - DNA, 80 bp, synthetic construct
  source 1..80: mol_type = other DNA
gaggtcctctcgaaggggaggaattggagtactctcaagagatcacctgggatgacgataccgagtttgtcggattgcag

SEQ ID NO: 34241 - DNA, 80 bp, synthetic construct
  source 1..80: mol_type = other DNA
tatagaactgaagaacaactggcaacacttctcaacttgagactatcaccatgatgattgatccaggagaggtttacgat

SEQ ID NO: 34242 - DNA, 80 bp, synthetic construct
  source 1..80: mol_type = other DNA
caaaagggtgcctaaaagtcggagggaggtgtcatcctcatgtggacggagtgttcttcaatggaataattcttggtccg

SEQ ID NO: 34243 - DNA, 80 bp, synthetic construct
  source 1..80: mol_type = other DNA
caacctcaactcccctctaatagaggatccagccagattgatgttagaatggctgaaaacaggaaataggtctctccgaa

SEQ ID NO: 34244 - DNA, 80 bp, synthetic construct
  source 1..80: mol_type = other DNA
ttccaaagtcctcgatctcatgcacttgtggagtagcagacggggggaatcctcgaatatcagtgtctgtgctcccatct

SEQ ID NO: 34245 - DNA, 80 bp, synthetic construct
  source 1..80: mol_type = other DNA
cgatctcatgcacttgtggagtagcagacggggggaatcctcgaatatcagtgtctgtgctcccatcttttgatcagtca

SEQ ID NO: 34246 - DNA, 80 bp, synthetic construct
  source 1..80: mol_type = other DNA
atctagatcatctctactagactacagctgcttgtaagctggacgctctcagagggtagcgcatgctgaggctcttagac

SEQ ID NO: 34247 - DNA, 80 bp, synthetic construct
  source 1..80: mol_type = other DNA
tcatcaagcccgtcctaactcttttgccgagtttttgaacaaaacctattctaatgactcatgaagagttaagtggcggg

SEQ ID NO: 34248 - DNA, 80 bp, synthetic construct
  source 1..80: mol_type = other DNA
ctgccagatatctatcgactatggatatcccgcatgaaaaaaactaacacccctccttctgaaccatccccaatatgagc

SEQ ID NO: 34249 - DNA, 80 bp, synthetic construct
  source 1..80: mol_type = other DNA
ttcacctggacgatagggagccatctgatcttagtgggatggttaaattgggagaaggcaagcctcgggaggattttcag

SEQ ID NO: 34250 - DNA, 80 bp, synthetic construct
  source 1..80: mol_type = other DNA
atggatgagggggaagatcctatcctcctgttccaatcataccttgacaatgtgggtgtccagattgtcaggcaaatgag

SEQ ID NO: 34251 - DNA, 80 bp, synthetic construct
  source 1..80: mol_type = other DNA
ctccaggaaggtcttcggaggacaaattcacccagaccactgaccgagaacctaagaaggaatcaccatctgcttcttct

SEQ ID NO: 34252 - DNA, 80 bp, synthetic construct
  source 1..80: mol_type = other DNA
cagagagaaagccagtccctgaaagtcagaatggcggctcaagctgcctctggtcccccagccctcgaatggtctgctac

SEQ ID NO: 34253 - DNA, 80 bp, synthetic construct
  source 1..80: mol_type = other DNA
cttgctgaccgaccgtcaagacttagccccgatagacagaagagtctaatgggttctggaatcgacatgaaaaaaacagg

SEQ ID NO: 34254 - DNA, 80 bp, synthetic construct
  source 1..80: mol_type = other DNA
caacaccactgataaaatgaacttcttacgcaagatagtaaaaaactgtagagaagaggacactcagaagtccccctctg

SEQ ID NO: 34255 - DNA, 80 bp, synthetic construct
  source 1..80: mol_type = other DNA
gaccagctatgggatcttgattgcaaggaaaggagacaagataaccccagattccattgttgacataaaacgtacggata

SEQ ID NO: 34256 - DNA, 80 bp, synthetic construct
  source 1..80: mol_type = other DNA
tagaagggaattgggctctgacaggaggcatggagctgacaagggaccccactgtgtctgaacatgcgtccttagtcggc

SEQ ID NO: 34257 - DNA, 80 bp, synthetic construct
  source 1..80: mol_type = other DNA
gatgtacacaagcaggtttcaggggttgacttgggtctcccaagctggggaaagtatattcttgtgagttcaggagccct

SEQ ID NO: 34258 - DNA, 80 bp, synthetic construct
  source 1..80: mol_type = other DNA
cattgccttagtgttggtaattttcctaatgacatgttgtagaaaagtcaatcgaccagaatccacacaacacagtctca

SEQ ID NO: 34259 - DNA, 80 bp, synthetic construct
  source 1..80: mol_type = other DNA
ggggaacagggatgaaggtgtcaatcacctctcaaagtggaaaggccataccttcatgggagtcatataagagcgaaaat

SEQ ID NO: 34260 - DNA, 80 bp, synthetic construct
  source 1..80: mol_type = other DNA
gagaccaaaatgtgaggaccaatcctcctttcgacgctttaagtcctggagatcacctccctattgggttaaggggaatc

SEQ ID NO: 34261 - DNA, 80 bp, synthetic construct
  source 1..80: mol_type = other DNA
taagagctcaaaaggtcccctcaaatctcgtgtaacgggataggttccagagtcacaaggtcttcttcaatcatctcagt

SEQ ID NO: 34262 - DNA, 80 bp, synthetic construct
  source 1..80: mol_type = other DNA
tgatctgacatagtcgtgtagattcttataatacaagaaatcttctgacagttgcagtgatcaacggtgctttcatcctc

SEQ ID NO: 34263 - DNA, 80 bp, synthetic construct
  source 1..80: mol_type = other DNA
cgaggaactaaggtcaaaggtcgcggacaagccagtgggtattgcgggtgattcagcatttgagcacagacagaggtcat

SEQ ID NO: 34264 - DNA, 80 bp, synthetic construct
  source 1..80: mol_type = other DNA
aatgcaccccctgatggcaagagcaacacgagtcagatgagaagggcactctgcctcccatgaaggacgtaagccataga

SEQ ID NO: 34265 - DNA, 80 bp, synthetic construct
  source 1..80: mol_type = other DNA
tcacaatcagcctgcatctcatcaaagtgtgcaaaaccataaagggctaagtcatctgaacttttcaatcaagaaaaaaa

SEQ ID NO: 34266 - DNA, 80 bp, synthetic construct
  source 1..80: mol_type = other DNA
tccttatatcaggactcagacctggccacctaaacatatagtagacttggtgggggatacttggcacaaactcccgatca

SEQ ID NO: 34267 - DNA, 80 bp, synthetic construct
  source 1..80: mol_type = other DNA
ctatctcctgcacttgcggtgcagcaggaggaagcagtcctagagtttccgtatctgtgctcccatccttcgaccagtcc

SEQ ID NO: 34268 - DNA, 80 bp, synthetic construct
  source 1..80: mol_type = other DNA
gattcgggatacaacgatggaaccatcttccctgttaatatatacagcaaggtctcccctagagactatctgagagggct

SEQ ID NO: 34269 - DNA, 80 bp, synthetic construct
  source 1..80: mol_type = other DNA
cgatacaccctgaaaaaaacaagaacctaaatcggaacctctgggtgttcgaatattttttttatccttattgttttttg

SEQ ID NO: 34270 - DNA, 80 bp, synthetic construct
  source 1..80: mol_type = other DNA
ctgaaaaaaacaagaacctaaatcggaacctctgggtgttcgaatattttttttatccttattgttttttggttaagcgt

SEQ ID NO: 34271 - DNA, 80 bp, synthetic construct
  source 1..80: mol_type = other DNA
cgatacaccctgaaaaaaacaaaatcctaaatcggaacctctggcggttcgattgttttttttatctttatggttttttg

SEQ ID NO: 34272 - DNA, 80 bp, synthetic construct
  source 1..80: mol_type = other DNA
cccacgttgacacagatagctccagtagtggttctttgtcctcatcaaaccatggactttttaagaaaccttgactggac

SEQ ID NO: 34273 - DNA, 80 bp, synthetic construct
  source 1..80: mol_type = other DNA
caggcaatcttggctttgactgggattcagattgaacacattatctgtatgaatcattaatacctctcagtatcttaagg

SEQ ID NO: 34274 - DNA, 80 bp, synthetic construct
  source 1..80: mol_type = other DNA
ggagaggttaggggtttctagaatggaagtcgatgaactaatgccaagtattagccctgatgacaccttggcccaacttg

SEQ ID NO: 34275 - DNA, 80 bp, synthetic construct
  source 1..80: mol_type = other DNA
aacacctatccagagcatttcccgcggtcactggattcataactcagatgacctcgtctttctcatcagagctatacctc

SEQ ID NO: 34276 - DNA, 80 bp, synthetic construct
  source 1..80: mol_type = other DNA
agattctctaagcgggggaagttctttcgggatgcagagtatttaacctcttccactcttcgagaaatgagcctggtatt

SEQ ID NO: 34277 - DNA, 80 bp, synthetic construct
  source 1..80: mol_type = other DNA
gttcaactgtagcagccccaagagtgagatgcagagggctcgctctctaaattaccaagatcttgtaagagggtttccag

SEQ ID NO: 34278 - DNA, 80 bp, synthetic construct
  source 1..80: mol_type = other DNA
tcttgtcggcccctccagatgatgacgacttgtggttaccccctccggaatatgttccgctgaaggagctcacgggcaag

SEQ ID NO: 34279 - DNA, 80 bp, synthetic construct
  source 1..80: mol_type = other DNA
ttttgaagtcattcgacgagatctattctggaaatcaaagaatgatcgggttggttaaagttgttgttggacttgcactg

SEQ ID NO: 34280 - DNA, 80 bp, synthetic construct
  source 1..80: mol_type = other DNA
gccatacgttgtgaatagcctagtccagagggcagaaaaatttaggcctctcattcattccctaggggactttcctgtat

SEQ ID NO: 34281 - DNA, 80 bp, synthetic construct
  source 1..80: mol_type = other DNA
tggaaccagaagagaaattggcaacacttctcatcctgagacgtccttcaaaatgctcgatccaggagaggtctatgatg

SEQ ID NO: 34282 - DNA, 80 bp, synthetic construct
  source 1..80: mol_type = other DNA
tcccttaatgcaacagttattgccgcctgtgcccctcatgagatgtctgttctagggggctatcttggagaggaattctt

SEQ ID NO: 34283 - DNA, 80 bp, synthetic construct
  source 1..80: mol_type = other DNA
cgggaaagggacgtttgaaagaagattctttagagatgaaaaagagcttcgagaatatgaggcggctgaactaataaaga

SEQ ID NO: 34284 - DNA, 80 bp, synthetic construct
  source 1..80: mol_type = other DNA
ggtagcatagaggacctttccggagaggtagaaagacaccttcatgggtacaacaggtggatcactctcgaggatatcaa

SEQ ID NO: 34285 - DNA, 80 bp, synthetic construct
  source 1..80: mol_type = other DNA
atctagatcatctctactagaatacagttgtctgtagaccggatactctcgggagcctgtacatactgaaattcgtgtat

SEQ ID NO: 34286 - DNA, 80 bp, synthetic construct
  source 1..80: mol_type = other DNA
ttcacttagacgatggacaatcgcctaaccctggtgagacggccaaggtgggagaaggcaagtatcgggaggactttcag

SEQ ID NO: 34287 - DNA, 80 bp, synthetic construct
  source 1..80: mol_type = other DNA
cctgctaaccgagcctccgagctcagcccctccggacactcaaatctgggatgtcctagagtcgacatgaaaaaaacagg

SEQ ID NO: 34288 - DNA, 80 bp, synthetic construct
  source 1..80: mol_type = other DNA
cggtctcattttgtttcgggaaattccccatttacacaataccagacaagcttggtccctggagcccgattgacatacat

SEQ ID NO: 34289 - DNA, 80 bp, synthetic construct
  source 1..80: mol_type = other DNA
ccaaagcgggaaggtcatatcttcatgggagtcatataaaagtggaggcgagactaggctgtgaggcccggttatccttt

SEQ ID NO: 34290 - DNA, 80 bp, synthetic construct
  source 1..80: mol_type = other DNA
gcgagactaggctgtgaggcccggttatccttttgacacttcaagtcccaaaaatcaccttcctccaggggtaggtggga

SEQ ID NO: 34291 - DNA, 80 bp, synthetic construct
  source 1..80: mol_type = other DNA
atctctggtttcaatagttctccttgaactccttgcaacagtgtgggttcaagagtcatgagactttcattaatcatctc

SEQ ID NO: 34292 - DNA, 80 bp, synthetic construct
  source 1..80: mol_type = other DNA
caggaaccgataccaaaggctatggacaagccagggggtgtttcggatgaatccgtgcgcaggcacggacagaggttata

SEQ ID NO: 34293 - DNA, 80 bp, synthetic construct
  source 1..80: mol_type = other DNA
gtgtgtctcctgatagcggactccacatgagtgagttgagaagtgcaatttgcctctcatgaaggacataagcaatagct

SEQ ID NO: 34294 - DNA, 80 bp, synthetic construct
  source 1..80: mol_type = other DNA
tggagatcaagagagcaaccagcaacacttctcatcctgagacctgcatcaaaatgctagatccaggagaggtctatgat

SEQ ID NO: 34295 - DNA, 80 bp, synthetic construct
  source 1..80: mol_type = other DNA
aatctctaagtagtagagagaagtctcgccatatcgggtcggctcaagggctcttatactcaatcttggtggcaattcat

SEQ ID NO: 34296 - DNA, 80 bp, synthetic construct
  source 1..80: mol_type = other DNA
atcagatccagatcatctctgttagattacagctgcttataaactaagcgcctctgatagaatgtgcagactgagacttc

SEQ ID NO: 34297 - DNA, 80 bp, synthetic construct
  source 1..80: mol_type = other DNA
ttatgcgtctctctgaccatacatccaggctcaactatattatgcagtcagatctaattttgcttcaagtctaccatgaa

SEQ ID NO: 34298 - DNA, 80 bp, synthetic construct
  source 1..80: mol_type = other DNA
aacatgagaaatttctgcatcaatggggaagtcaaagtgtgtagtccaaacggctactcatttaggatcttgcggcacat

SEQ ID NO: 34299 - DNA, 80 bp, synthetic construct
  source 1..80: mol_type = other DNA
acgaccccatcgatcctattgagtcggaagcagagtcgagaggaaaccccactatccccaacatcttaagaaactctgac

SEQ ID NO: 34300 - DNA, 80 bp, synthetic construct
  source 1..80: mol_type = other DNA
cctgctaactgaacttttaaactcagtccctctagacaatgacatctgggatgtcctagagtagacatgaaaaaaacagg

SEQ ID NO: 34301 - DNA, 80 bp, synthetic construct
  source 1..80: mol_type = other DNA
gtgtgtcccatgataatggactcaacatgagttaagtgagaacggcaatccgcctcccatgaaggacataagcaatagct

SEQ ID NO: 34302 - DNA, 80 bp, synthetic construct
  source 1..80: mol_type = other DNA
caatctcaactctcctttgatcgaagaccctgctagactgatgttagaatggttgagaacaggaaatagaccttatcgga

SEQ ID NO: 34303 - DNA, 80 bp, synthetic construct
  source 1..80: mol_type = other DNA
tgactctgacagacaattgctccaggtcttacagagttttgaaagcctttttcaagaaagtagatttgggttctctcaag

SEQ ID NO: 34304 - DNA, 80 bp, synthetic construct
  source 1..80: mol_type = other DNA
ctagaaactccaacctggctcaaaccctaattaggaacattatgtctctgacaggccccgatttccctctagaggaggct

SEQ ID NO: 34305 - DNA, 80 bp, synthetic construct
  source 1..80: mol_type = other DNA
cgtgaaaaaaacgggatcccaattcttaacctctatttgcttgattgtttttccatttttgttgtttatttgttaagcgt

SEQ ID NO: 34306 - DNA, 80 bp, synthetic construct
  source 1..80: mol_type = other DNA
ctctcaaggacattggaagaatccttttataactcagagacccatgggattaaccggatgacccagactccccaaagggt

SEQ ID NO: 34307 - DNA, 80 bp, synthetic construct
  source 1..80: mol_type = other DNA
ctatttcctgcacttgtggagcagcaggagggggaaaccctcgaatatcagtatccgtgcttccttcttttgatcagtca

SEQ ID NO: 34308 - DNA, 80 bp, synthetic construct
  source 1..80: mol_type = other DNA
ccagaaactcaaatcgggcccaaactctgattagaaacataatgtctctgactggcccggactttccactggaagaagcc

SEQ ID NO: 34309 - DNA, 80 bp, synthetic construct
  source 1..80: mol_type = other DNA
cttgctgacaatttttaaactcaggcctaccagactatagggcctgagctgttctggactcaacatggaaaaaaacatgc

SEQ ID NO: 34310 - DNA, 80 bp, synthetic construct
  source 1..80: mol_type = other DNA
cgaaagggtgtttaagagtcggggcgagatgtcatcctcatgtgaacggagtatttttcaatggtatcatcctaggccct

SEQ ID NO: 34311 - DNA, 80 bp, synthetic construct
  source 1..80: mol_type = other DNA
gagaccaagctgtaaaggcaggtcatctccttcatatttcaagtcccgaggatcccatccccttgaggggaaggggacat

SEQ ID NO: 34312 - DNA, 80 bp, synthetic construct
  source 1..80: mol_type = other DNA
ccagtatgccgaggaaatcctcagaggagaaagctacccagacttccagccgggaactcaagaaggagacagtgtctgct

SEQ ID NO: 34313 - DNA, 80 bp, synthetic construct
  source 1..80: mol_type = other DNA
tcttctcagcgagaaattcaaccattaaaagccaaaatggcagctcaaaccacctccggtcctcctgctctcgagtggtc

SEQ ID NO: 34314 - DNA, 80 bp, synthetic construct
  source 1..80: mol_type = other DNA
tatccggcatgaatgcagccaagctagaccctggagacgtgtgctcttatctggctgccgcaatgcagttctttgaggga

SEQ ID NO: 34315 - DNA, 80 bp, synthetic construct
  source 1..80: mol_type = other DNA
caacaccactgataagatgaactttctacgtaagatagtgaagaactgcagagatgaggacactcagaagccctctatca

SEQ ID NO: 34316 - DNA, 80 bp, synthetic construct
  source 1..80: mol_type = other DNA
aatatgagaaacttttgcgttaatggagaagtcaaggtgtgtagcccgaacggctattcatttaggatcctgcggcacat

SEQ ID NO: 34317 - DNA, 80 bp, synthetic construct
  source 1..80: mol_type = other DNA
gtggaggacgaggggtgtacaagtctgtcagggttttcttacatggaattgaaggtgggatacatatctgccataaaagt

SEQ ID NO: 34318 - DNA, 80 bp, synthetic construct
  source 1..80: mol_type = other DNA
ctcttaaagagtctataaactggttcattacaagaaactcaaatcttgctcaaactctaattagaaacataatgtctctg

SEQ ID NO: 34319 - DNA, 80 bp, synthetic construct
  source 1..80: mol_type = other DNA
cagatgctaggcttgtattcaatagcttgttggaggtgaatgacctgatggcctccggaacacatccattacctccttca

SEQ ID NO: 34320 - DNA, 80 bp, synthetic construct
  source 1..80: mol_type = other DNA
aattacaaagagggactctatctaaaatgtctatcattatagccatcatgatagttttctccaatagagtctttaatgtc

SEQ ID NO: 34321 - DNA, 80 bp, synthetic construct
  source 1..80: mol_type = other DNA
tctaaaccattgacggaccctttgttttatccaccatctgaccccaaaatcttgaggcacttcaacatatgctgcagtac

SEQ ID NO: 34322 - DNA, 80 bp, synthetic construct
  source 1..80: mol_type = other DNA
tcgggagcattgaagacttatctggagaggtggtgagacatcttcaagggtataacaggtggattaccctcgaggacatc

SEQ ID NO: 34323 - DNA, 80 bp, synthetic construct
  source 1..80: mol_type = other DNA
agatctagatcatctctattagactacagctgcttatgagctgaatattgttgaggcttgtaaatactgaagctcttgga

SEQ ID NO: 34324 - DNA, 80 bp, synthetic construct
  source 1..80: mol_type = other DNA
tggtgtaccctgaaaaaaacaagatcccaaatcagaacctctggttgcttgattgtttttttcatttttgttgtttattt

SEQ ID NO: 34325 - DNA, 80 bp, synthetic construct
  source 1..80: mol_type = other DNA
ctgacttagcactggcagacgacggaaccgtcaactctgatgacgaagactacttctccggtgaaaccaggagtccggaa

SEQ ID NO: 34326 - DNA, 80 bp, synthetic construct
  source 1..80: mol_type = other DNA
caagatgaaaagaacctacaagttgtgtatatctcacatgaaaaaaactaacacccctccttttgaaccatcccagccat

SEQ ID NO: 34327 - DNA, 80 bp, synthetic construct
  source 1..80: mol_type = other DNA
ttcagttagatgatgggaagccatcggatctcagtgaagcgaccacagcaggagaaagcaaatatcgggaggacttccag

SEQ ID NO: 34328 - DNA, 80 bp, synthetic construct
  source 1..80: mol_type = other DNA
gtccggagagagattcctcaagatttggtcacagactgtagaggaaatagtctcctatgtcatgactaacttccccaacc

SEQ ID NO: 34329 - DNA, 80 bp, synthetic construct
  source 1..80: mol_type = other DNA
catcgggaaggtcttcggaagacaagtctacccaaactgctggaagagaacttaagaaggaaaccccatcagcttcttct

SEQ ID NO: 34330 - DNA, 80 bp, synthetic construct
  source 1..80: mol_type = other DNA
caaagagagagccaatcctcgaaagcccgaatggcggctcaaactgcctctggtcctccagctctcgagtggtctgcgac

SEQ ID NO: 34331 - DNA, 80 bp, synthetic construct
  source 1..80: mol_type = other DNA
cctgctgaccgaattttaatactcaggcctaccagacaagggggcctgagttgctctgaattcgacgtaaaaaaaacagg

SEQ ID NO: 34332 - DNA, 80 bp, synthetic construct
  source 1..80: mol_type = other DNA
ttaatggtgaggtcaaggtgtgcagtcccaacggctattcgttcaggatcttacggcatattcttagatcatttgatgag

SEQ ID NO: 34333 - DNA, 80 bp, synthetic construct
  source 1..80: mol_type = other DNA
ccaaagagtcctttgttatcatatctccaagtgtggcagatctagatccgtacgataaatcccttcattcgagagttttt

SEQ ID NO: 34334 - DNA, 80 bp, synthetic construct
  source 1..80: mol_type = other DNA
cctagaggaaaatgctcaggaataacggtgtcttctacctactgctctactaaccatgactacaccatctggatgcctga

SEQ ID NO: 34335 - DNA, 80 bp, synthetic construct
  source 1..80: mol_type = other DNA
ttatggatggaacatgggtcgcgattcagacatcagacgagaccaagtggtgccctcctgaccagctagtgaatctacat

SEQ ID NO: 34336 - DNA, 80 bp, synthetic construct
  source 1..80: mol_type = other DNA
cagatgtgcataagcaggtctcaggggtcgatctcggtctcccaagctgggggaagtatgtgttgatgagcgcaggcatt

SEQ ID NO: 34337 - DNA, 80 bp, synthetic construct
  source 1..80: mol_type = other DNA
ttgactgcactgatgttgacgattttcttaatgacgtgttgccgaaggactaatagagcagaatcgatacaacacagtct

SEQ ID NO: 34338 - DNA, 80 bp, synthetic construct
  source 1..80: mol_type = other DNA
tggagagacagggaggaaagtgtcggtaacctcccaaagcgggagggtcatatcttcatgggagtcatacaaaagcggag

SEQ ID NO: 34339 - DNA, 80 bp, synthetic construct
  source 1..80: mol_type = other DNA
gagaccaagctgtaagggcaggtcagctcctttatatctcaagtcccgaagatctcatccccttgagttgaaggggacat

SEQ ID NO: 34340 - DNA, 80 bp, synthetic construct
  source 1..80: mol_type = other DNA
tctatcagacattgtcatgtggattcttataacacaagaaatcttctagcagttccagtgactaacggtgcttttaccct

SEQ ID NO: 34341 - DNA, 80 bp, synthetic construct
  source 1..80: mol_type = other DNA
ccaagaactgacaccaaaggtgatggacagacctagagatatctcagacaacgttgtgtttaaacacagacagagattgt

SEQ ID NO: 34342 - DNA, 80 bp, synthetic construct
  source 1..80: mol_type = other DNA
ggtgagcccccagatactagactgggtaagagtctgttaagaaagaatacttgcctcctatgaaggacataagcaataga

SEQ ID NO: 34343 - DNA, 80 bp, synthetic construct
  source 1..80: mol_type = other DNA
tcaccatcatcttgcatctcagcgaagtgtgcacaattataaagggctgggtcattcatgattttcagtcgagaaaaaaa

SEQ ID NO: 34344 - DNA, 80 bp, synthetic construct
  source 1..80: mol_type = other DNA
tatagaacagaaggacaactagcaacacttctcatcttgagactgtcaccatgatgattgatcctggagaggtctatgat

SEQ ID NO: 34345 - DNA, 80 bp, synthetic construct
  source 1..80: mol_type = other DNA
gacccggtagatccgattgagtcagaggctgaacccagagggactcccactgtccccaacatcttgaggaactccgacta

SEQ ID NO: 34346 - DNA, 80 bp, synthetic construct
  source 1..80: mol_type = other DNA
acttcgttatcactgaaaagctcctagctaattatatcttgccactctttgatgcgctgactatgacagacaacctgaac

SEQ ID NO: 34347 - DNA, 80 bp, synthetic construct
  source 1..80: mol_type = other DNA
aaccaagttctatgtccaacatatatgttatcgcctgggctgtcgagggaggggcttctttatgaactggagagtatatc

SEQ ID NO: 34348 - DNA, 80 bp, synthetic construct
  source 1..80: mol_type = other DNA
aagaaatgccctttcaatataccgagctatcgaggagggagcagcaaagctagggctgattatcaagaaggaagagacca

SEQ ID NO: 34349 - DNA, 80 bp, synthetic construct
  source 1..80: mol_type = other DNA
aatctttaagtggtagggaaaaatcccgtcacatagggtctgctcaagggctcctatattcgatcttggtcgcaatacat

SEQ ID NO: 34350 - DNA, 80 bp, synthetic construct
  source 1..80: mol_type = other DNA
gactcaggatacaatgacggaactatcttccctgtcaacatatatggcaaggtctctcctagagactatttgagggggct

SEQ ID NO: 34351 - DNA, 80 bp, synthetic construct
  source 1..80: mol_type = other DNA
tgagaggagagatattttctataccccagaaaattccagctgcttacccaaccacgatgagggagggtaatagatctatc

SEQ ID NO: 34352 - DNA, 80 bp, synthetic construct
  source 1..80: mol_type = other DNA
cgccacgcagccagaactatgacgggggattacagccccaacaagaagatgtcacgcaaggtaggatgttccaaaaacag

SEQ ID NO: 34353 - DNA, 80 bp, synthetic construct
  source 1..80: mol_type = other DNA
atgctcagctcagcaggttgcagtcttcacctctgctaatccagcccctgtctcagagcttgacataagggccctctcca

SEQ ID NO: 34354 - DNA, 80 bp, synthetic construct
  source 1..80: mol_type = other DNA
ggcgatgcaaaagtcactgacatagcatcagtcaatcggatgaatccggtgatgtccgacttcgcattgtcaatagacgg

SEQ ID NO: 34355 - DNA, 80 bp, synthetic construct
  source 1..80: mol_type = other DNA
agacccttaaaagagatgagatggttgacgatctaaacaagggggtggtgagactctttcaagattataacaggtggatc

SEQ ID NO: 34356 - DNA, 80 bp, synthetic construct
  source 1..80: mol_type = other DNA
cagatctcaggaacttgaccacatggaagtacttccagtcagtccaaaaaaaggtgaacatgtcttatgacctctatttt

SEQ ID NO: 34357 - DNA, 80 bp, synthetic construct
  source 1..80: mol_type = other DNA
cactgtatctggtctccaaaactcacgaaactacgccggtagatccagaatatagagcaattcaacacccgtcaagggca

SEQ ID NO: 34358 - DNA, 80 bp, synthetic construct
  source 1..80: mol_type = other DNA
ttcccttcagtcacaggatttataacccagatgacttcgtccttttcatctgagctatacctccgattctccaagcgagg

SEQ ID NO: 34359 - DNA, 80 bp, synthetic construct
  source 1..80: mol_type = other DNA
aattacaaagagggactctgtctaagggctctatcattatagctattatgatagattttttcatgagagttttcaatgtt

SEQ ID NO: 34360 - DNA, 80 bp, synthetic construct
  source 1..80: mol_type = other DNA
ttccaaccgctgactgatcctttgttctacccaccatctgaccccaaaatcttgaggcacttcaacatatgctgcagtac

SEQ ID NO: 34361 - DNA, 80 bp, synthetic construct
  source 1..80: mol_type = other DNA
agaccgtcggaagaagcgggaagaaaggaggtgtaaacaggatggtggtgagacatcttcaggactataacaggtggatc

SEQ ID NO: 34362 - DNA, 80 bp, synthetic construct
  source 1..80: mol_type = other DNA
caagatcgaaaagaacctacaaattgtgtatatctaacatgaaaaaaatcaacaccccccctactgaaccatcccaacca

SEQ ID NO: 34363 - DNA, 80 bp, synthetic construct
  source 1..80: mol_type = other DNA
tataaaacgtactgatgtggaagggaattgggctttgacggggggtatggagttgacaagggaccccactgtgtctgagc

SEQ ID NO: 34364 - DNA, 80 bp, synthetic construct
  source 1..80: mol_type = other DNA
gtatggagttgacaagggaccccactgtgtctgagcacgcatctttagttggtcttctcttgagtctttataggttgagc

SEQ ID NO: 34365 - DNA, 80 bp, synthetic construct
  source 1..80: mol_type = other DNA
gccccatcttaaagggcagagtctacaaaattctaaatgcggaaggagacaattttctcatagctatgtcaagaataatc

SEQ ID NO: 34366 - DNA, 80 bp, synthetic construct
  source 1..80: mol_type = other DNA
tatctagacccttccttagggggagtatctggaatgtctttggggagatttcatatacgccagttttcagatcctgtctc

SEQ ID NO: 34367 - DNA, 80 bp, synthetic construct
  source 1..80: mol_type = other DNA
caagaaaagttctaatagggtcgtccatatgcttcttgaccagaatgactaacatcaacatttataggcctctagagttg

SEQ ID NO: 34368 - DNA, 80 bp, synthetic construct
  source 1..80: mol_type = other DNA
atctcaggtgtgatctcatatatcctcttgaggctggataatcacccatctttgtacataatgctcagagaaccatctct

SEQ ID NO: 34369 - DNA, 80 bp, synthetic construct
  source 1..80: mol_type = other DNA
tagaggagagatattttctataccccagaaaattccagctgctcccccgaccacgatgaaggagggtaagacatctacgt

SEQ ID NO: 34370 - DNA, 80 bp, synthetic construct
  source 1..80: mol_type = other DNA
tgtgttacctccaacatgtgctgcgctatgagcgagaggttattacagcatctccagagaatgactggttgtggatcttc

SEQ ID NO: 34371 - DNA, 80 bp, synthetic construct
  source 1..80: mol_type = other DNA
ggtaaatgttcaggaataacagtatcttctacctattgtcccactaaccatgactatactatctggatgccggaaaatcc

SEQ ID NO: 34372 - DNA, 80 bp, synthetic construct
  source 1..80: mol_type = other DNA
tatcaggcatgaatgccgccaaacttgatcctgatgatgtatgttcttacttggcagcatcaatgcagtttttcgagggg

SEQ ID NO: 34373 - DNA, 80 bp, synthetic construct
  source 1..80: mol_type = other DNA
caattgatctgacatgatcatgtagattctcacgatacgggaaatcttctagcagtttcagtgaccaaaggtgctttcat

SEQ ID NO: 34374 - DNA, 80 bp, synthetic construct
  source 1..80: mol_type = other DNA
ctttctccccctgagccccgatactcagatgacttggtatctcaactgtgccagctatacatcgctggggatcaagtctt

SEQ ID NO: 34375 - DNA, 80 bp, synthetic construct
  source 1..80: mol_type = other DNA
gtgcaacgagtgtgtaaggcctattgatgatataacactggaaacttctcagatcttcgagttcccggatgtgtcaaaga

SEQ ID NO: 34376 - DNA, 80 bp, synthetic construct
  source 1..80: mol_type = other DNA
aagaacctctccaaaagtatgagagccagcttgagacaaatgagctctctaatgagacaagtgctgggtgggcatggtga

SEQ ID NO: 34377 - DNA, 80 bp, synthetic construct
  source 1..80: mol_type = other DNA
ggataccttggagtcagacgaagacattcagaggctgttaaaagactctttgcacaggactaggtgggtggatcaagaag

SEQ ID NO: 34378 - DNA, 80 bp, synthetic construct
  source 1..80: mol_type = other DNA
tgcgccatgcagcaagaactatgacaggaagttacagccccaacaagaggatgtcacgcaaagctgggggttcagagtgg

SEQ ID NO: 34379 - DNA, 80 bp, synthetic construct
  source 1..80: mol_type = other DNA
gtatgctctgctcagcaggttgcagtttcaacatcagcgaacccagcccctgcagccgagctggacatcaggatcctctc

SEQ ID NO: 34380 - DNA, 80 bp, synthetic construct
  source 1..80: mol_type = other DNA
taggagacttcaaaaccccttgatctcgggcctgagagtagttcagtgggcaacaggggcccattataagctcaagccca

SEQ ID NO: 34381 - DNA, 80 bp, synthetic construct
  source 1..80: mol_type = other DNA
cttctgacttaaggaacttaaccacatggagatatttccaatcagttcaggaacaggtcaatatgtcttatgacctcatc

SEQ ID NO: 34382 - DNA, 80 bp, synthetic construct
  source 1..80: mol_type = other DNA
atttgtgatgcagaggtcactgatattgcatcaatcaaccgaataaccctcctaatgtctgatttcgcattgtccataga

SEQ ID NO: 34383 - DNA, 80 bp, synthetic construct
  source 1..80: mol_type = other DNA
tttcccgcagtcactggattcataacccagatgacctcatctttctcatccgagctgtacctcagattctctaaacgggg

SEQ ID NO: 34384 - DNA, 80 bp, synthetic construct
  source 1..80: mol_type = other DNA
aaagttctttcgggatgcagaatacttaacctcctctactctgcgggaaatgagcctcgtgttgtttaactgcagcagcc

SEQ ID NO: 34385 - DNA, 80 bp, synthetic construct
  source 1..80: mol_type = other DNA
ccaagagtgagatgcagagagcccgctctctaaattaccaggatttagtcagaggatttccagatgagattatatccaat

SEQ ID NO: 34386 - DNA, 80 bp, synthetic construct
  source 1..80: mol_type = other DNA
gttgcagcgaggaactttgtccaaagtctctattattatagccatcatgatagtcttttccaatagagtgttcaatgtct

SEQ ID NO: 34387 - DNA, 80 bp, synthetic construct
  source 1..80: mol_type = other DNA
cgaaaccgatgactgaacctttgttctacccgccatctgatcccaaaatcctgagacatttcaacatatgttgcagcacc

SEQ ID NO: 34388 - DNA, 80 bp, synthetic construct
  source 1..80: mol_type = other DNA
ggaagcatagaaaacctgtccggagaagtcgagaggcaccttagagggtacaacagatggatcacccttgatgacattag

SEQ ID NO: 34389 - DNA, 80 bp, synthetic construct
  source 1..80: mol_type = other DNA
gtccagatcgtctctcttagattatagctgcctgtaacctaaatgctctcgaaggaatgtacagactccgactcttagac

SEQ ID NO: 34390 - DNA, 80 bp, synthetic construct
  source 1..80: mol_type = other DNA
aatgcaccctgaaaaaaacgaggtcccaattcatgacctctgtttacttgattgttttttttgtctttgttgtttttttg

SEQ ID NO: 34391 - DNA, 80 bp, synthetic construct
  source 1..80: mol_type = other DNA
ctgaaaaaaacgaggtcccaattcatgacctctgtttacttgattgttttttttgtctttgttgtttttttgttaagcgt

SEQ ID NO: 34392 - DNA, 80 bp, synthetic construct
  source 1..80: mol_type = other DNA
ccgaagcagccttggcagatgacgggactgtcaactctgatgacgaggactacttctccagtgaggccaggagtccggag

SEQ ID NO: 34393 - DNA, 80 bp, synthetic construct
  source 1..80: mol_type = other DNA
gctgtttatacccgaatcatgatgaatggaggtagactgaaaagatcacatataaggaggtatgtctcagtcagctccaa

SEQ ID NO: 34394 - DNA, 80 bp, synthetic construct
  source 1..80: mol_type = other DNA
caggattatgaacactaataaattgcatacatccttcacgaaaaaaactaacacccctccttttgaaccatctcagacat

SEQ ID NO: 34395 - DNA, 80 bp, synthetic construct
  source 1..80: mol_type = other DNA
gagcaagatttttgtcaacccgagtgcaatcagggcgggccttgcagatctagagatggcagaggaaacagtagacctaa

SEQ ID NO: 34396 - DNA, 80 bp, synthetic construct
  source 1..80: mol_type = other DNA
ttgctagaaacattgaggacaatcaggctcatctccaaggagagcccatagaggtagacagtctcccggaagacataaga

SEQ ID NO: 34397 - DNA, 80 bp, synthetic construct
  source 1..80: mol_type = other DNA
aggcttcaattagatgatcagaaaccatctggcctttgcgggatcaccaacgcaggggacaacaagtgtcaggaagactt

SEQ ID NO: 34398 - DNA, 80 bp, synthetic construct
  source 1..80: mol_type = other DNA
tcaaatggatgaggcagaggaccccgccctcttgttccagtcttacctggacaatgttggaattcagatggtcagacaaa

SEQ ID NO: 34399 - DNA, 80 bp, synthetic construct
  source 1..80: mol_type = other DNA
tcaactttatcattcttccgggaaagtctttagaagacaaagcaactcagactgcaagccgggaactcaagaaggaggta

SEQ ID NO: 34400 - DNA, 80 bp, synthetic construct
  source 1..80: mol_type = other DNA
gtgtccgatccctctcagcgagaaagtcagtcttctaaagccaaaatggcggcccaaactgcctctggtcctcctgctat

SEQ ID NO: 34401 - DNA, 80 bp, synthetic construct
  source 1..80: mol_type = other DNA
agagtggtcctccgccaacgaagaggatgacccatccgtagaagctgaaattgctcatcaaattgctgaaagcttctcca

SEQ ID NO: 34402 - DNA, 80 bp, synthetic construct
  source 1..80: mol_type = other DNA
tgcgttcttctgactacgcccccaagctctgtcacactatgtagtcaaatctgatccgctctaaatcaagcatgaaaaaa

SEQ ID NO: 34403 - DNA, 80 bp, synthetic construct
  source 1..80: mol_type = other DNA
acaggcaacaccactgataagatgaactttctgcgtaagatagtgaagaactgtagggatgaggacactcagaagccctc

SEQ ID NO: 34404 - DNA, 80 bp, synthetic construct
  source 1..80: mol_type = other DNA
tgtcagctcctcccgatgatgatgatttatggttgccccctcctgagtatattccattgaaagagctcacgggcaagaaa

SEQ ID NO: 34405 - DNA, 80 bp, synthetic construct
  source 1..80: mol_type = other DNA
aacatgagaaatttttgcatcaacggggaagtcaaggtgtgtagtccaaacggctattcttttagaatcctacgacacat

SEQ ID NO: 34406 - DNA, 80 bp, synthetic construct
  source 1..80: mol_type = other DNA
atatatgttatggtgccgttgaatcgctgcattttatcagagtctaatctattacctttacattttaagcttctcggatg

SEQ ID NO: 34407 - DNA, 80 bp, synthetic construct
  source 1..80: mol_type = other DNA
aaaactattaacatctctccaaagacctaagaaaagatgatccctcaggctcttttgtctttgcttctcctgatttcctc

SEQ ID NO: 34408 - DNA, 80 bp, synthetic construct
  source 1..80: mol_type = other DNA
gttgtgtctcgggaaattcccgatctacacaataccagacaagctcggcccttggagtcctattgacatacatcatctca

SEQ ID NO: 34409 - DNA, 80 bp, synthetic construct
  source 1..80: mol_type = other DNA
acatcagacgtaccaatgtggaagggaattgggctctaacagggggtatggagttgactagagaccccactgtttctgaa

SEQ ID NO: 34410 - DNA, 80 bp, synthetic construct
  source 1..80: mol_type = other DNA
aaggggtgcctaaaagtcggaggtatgtgtcatcctcatgtgggcgtggtgttttttaatggtataattctaggtccaga

SEQ ID NO: 34411 - DNA, 80 bp, synthetic construct
  source 1..80: mol_type = other DNA
tgatgcaccccttagcggacccgtcaacggttttcaaggaaggtgatgaggcagaagactttgttgagattcaccttcca

SEQ ID NO: 34412 - DNA, 80 bp, synthetic construct
  source 1..80: mol_type = other DNA
gctctggcaacactgattctgacaatcttcttaataacatgttgcagaaaggtcaatagaacagaatcaatacagcgagg

SEQ ID NO: 34413 - DNA, 80 bp, synthetic construct
  source 1..80: mol_type = other DNA
tcatggagaatcagaaaggaaagtgtctgtaagtccccaaaacgggagagtcatatcctcctgggagctgtacaaaagtg

SEQ ID NO: 34414 - DNA, 80 bp, synthetic construct
  source 1..80: mol_type = other DNA
gaggagaaaccaatctgtgaaggcgggtcatctccctcacactctgtgttaagagggttacctctctctaggatctgata

SEQ ID NO: 34415 - DNA, 80 bp, synthetic construct
  source 1..80: mol_type = other DNA
gaacctcatatttcaacagtccttcatggactccgcacaacaggatggactctagagtcagaaaacgttcatcaatcatc

SEQ ID NO: 34416 - DNA, 80 bp, synthetic construct
  source 1..80: mol_type = other DNA
tcaactgatcagacatagtcatatagatttcgataatgtatgatgtcttctgacggtatcttcgaccaatggtgctctca

SEQ ID NO: 34417 - DNA, 80 bp, synthetic construct
  source 1..80: mol_type = other DNA
tcccccgaggactgataccaaaggttgtggacaggccaactaataccccaaataactctctgcttgatcttgggcagagt

SEQ ID NO: 34418 - DNA, 80 bp, synthetic construct
  source 1..80: mol_type = other DNA
ccataacaattttcccaccgtagaccaaataggggttagctgagagaagcgacttgcctcctatgaaggacactagcaat

SEQ ID NO: 34419 - DNA, 80 bp, synthetic construct
  source 1..80: mol_type = other DNA
aggttacaatcatcttacatccagataatgtgtgcataactacaaaagactgagccatccaagcctttcagtcaagaaaa

SEQ ID NO: 34420 - DNA, 80 bp, synthetic construct
  source 1..80: mol_type = other DNA
tgaggaatggaggagtaattgacaacacttctcatcctgagaacaccaccatgatgattgatccaggggaagtttatgat

SEQ ID NO: 34421 - DNA, 80 bp, synthetic construct
  source 1..80: mol_type = other DNA
gaccccattgatccggttgagccagaggctgaacagagggagaaccccacaattcccaatatcttaagaaactctgatta

SEQ ID NO: 34422 - DNA, 80 bp, synthetic construct
  source 1..80: mol_type = other DNA
caacctcaactcccccttaatagaagacccagccaaattaatgctggaatggctgagaacagggaataggcctctcagga

SEQ ID NO: 34423 - DNA, 80 bp, synthetic construct
  source 1..80: mol_type = other DNA
tgactttgacggacaattgctctaggtcttataaagttttgaaagattacttcaagaaagtggatctaggatctctcaag

SEQ ID NO: 34424 - DNA, 80 bp, synthetic construct
  source 1..80: mol_type = other DNA
aggtgggcggatctgctgcccaatctatgatttccctttggctgtacggtgctcactctgaatcaaacaggagccggaag

SEQ ID NO: 34425 - DNA, 80 bp, synthetic construct
  source 1..80: mol_type = other DNA
tgtataacagacttggctcaattctattccaagtcttcccccatagaaaaactactaaactgcacactcggaaatcgagg

SEQ ID NO: 34426 - DNA, 80 bp, synthetic construct
  source 1..80: mol_type = other DNA
gagagatatgacatcaatagataccggaaaagacttggtcaagtttaaagatcaaatatggggattgctgattgtgacca

SEQ ID NO: 34427 - DNA, 80 bp, synthetic construct
  source 1..80: mol_type = other DNA
tttttgtctcggttcaactctctgctgattcttctttcacctccggaacccagatactcagatgacttgatatcgctact

SEQ ID NO: 34428 - DNA, 80 bp, synthetic construct
  source 1..80: mol_type = other DNA
gtgtcagctctatatcgctggagatcatgtcttatccatgtgcgggaactctggttatgaagtcatcaagatactggaac

SEQ ID NO: 34429 - DNA, 80 bp, synthetic construct
  source 1..80: mol_type = other DNA
ataagagataaggtgggtcaacttgaggggaccttcggtcctagtgcaaaaaggttcttcaaggtcttggatcaatttga

SEQ ID NO: 34430 - DNA, 80 bp, synthetic construct
  source 1..80: mol_type = other DNA
agttgcgacttctttcaaaagaccaccccctgattccttacattaaaacccagacatggcctcccaaacatatagtagat

SEQ ID NO: 34431 - DNA, 80 bp, synthetic construct
  source 1..80: mol_type = other DNA
ctagcatcgtggctatcagagaataggggagggccggtccccagcgagaaggtcgttatcacagctctctccaaacctcc

SEQ ID NO: 34432 - DNA, 80 bp, synthetic construct
  source 1..80: mol_type = other DNA
tggaatctgaggttgtattttgtcatcaccgagaagctcctggccaattatattttgccactttttgatgcactgactat

SEQ ID NO: 34433 - DNA, 80 bp, synthetic construct
  source 1..80: mol_type = other DNA
ggacatgtcaaacggaccgacatgctggaacggccaagatggcggactggagggtctgcgacagaagggctggagtctgg

SEQ ID NO: 34434 - DNA, 80 bp, synthetic construct
  source 1..80: mol_type = other DNA
cttgctgttcagccccatcctaaaaggcagagtttacaaagtcctgagtgctgaaggggacaattttcttctagctatgt

SEQ ID NO: 34435 - DNA, 80 bp, synthetic construct
  source 1..80: mol_type = other DNA
ccagaatcatctatttggatccctctctggggggagtttctggaatgtctctaggaaggttccacatacgtcagttctca

SEQ ID NO: 34436 - DNA, 80 bp, synthetic construct
  source 1..80: mol_type = other DNA
gggagtttctggaatgtctctaggaaggttccacatacgtcagttctcagatcccgtttcagaagggttgtccttctgga

SEQ ID NO: 34437 - DNA, 80 bp, synthetic construct
  source 1..80: mol_type = other DNA
tcaaggggggagccagtcctaccattcttctcaaagatgcaattagaagagccctatatgatgaggtggacaaagtggag

SEQ ID NO: 34438 - DNA, 80 bp, synthetic construct
  source 1..80: mol_type = other DNA
gagccctatatgatgaggtggacaaagtggagaactcagagtttagagaagctatcctcctgtccaagacccacagagat

SEQ ID NO: 34439 - DNA, 80 bp, synthetic construct
  source 1..80: mol_type = other DNA
aactcagagtttagagaagctatcctcctgtccaagacccacagagataactttatactctttttgaagtctgttgagcc

SEQ ID NO: 34440 - DNA, 80 bp, synthetic construct
  source 1..80: mol_type = other DNA
cgatctcctgcacttgtggagtaacaggagagggaaatccccggatatcagtgtctgtgcttccatcttttgatcagtca

SEQ ID NO: 34441 - DNA, 80 bp, synthetic construct
  source 1..80: mol_type = other DNA
ttcttctcgagaggtcctttgaagggataccttggctcgtccacttccatgtccactcagctattccacgcttgggagaa

SEQ ID NO: 34442 - DNA, 80 bp, synthetic construct
  source 1..80: mol_type = other DNA
caagaaattcaaatctagcccaaacgttgattaaaaacataatgtctttgaccggcccggacttcccgctggaagaggct

SEQ ID NO: 34443 - DNA, 80 bp, synthetic construct
  source 1..80: mol_type = other DNA
gatgtaacaagtgtataaggcccattgacgatattaccctcgagacctctcaggtctttgatttcccggatgtttcgaaa

SEQ ID NO: 34444 - DNA, 80 bp, synthetic construct
  source 1..80: mol_type = other DNA
agaatatctagaatggtctccggagctgtgcctcattttcggaaacttcctgacattcgtctgagaccgggtgacttcga

SEQ ID NO: 34445 - DNA, 80 bp, synthetic construct
  source 1..80: mol_type = other DNA
aatccctaagcggtaaggagaggtctcgccatatagggtctgcccaagggctcttgtattcaatcttggttgcgattcat

SEQ ID NO: 34446 - DNA, 80 bp, synthetic construct
  source 1..80: mol_type = other DNA
gactctgggtataatgatggaaccatcttccctgtcaacatatataacaaggtatcccctagagactatttgagagggct

SEQ ID NO: 34447 - DNA, 80 bp, synthetic construct
  source 1..80: mol_type = other DNA
ttgttggaagcatagaagacctgtccggggaaatagagaagcatcttcgaggttataacaggtggatcacccttgatgac

SEQ ID NO: 34448 - DNA, 80 bp, synthetic construct
  source 1..80: mol_type = other DNA
atcagatctagatcatctcttttagattatagttgcctgtaaatcgggcactctcgagggaatgtataaactagtaatct

SEQ ID NO: 34449 - DNA, 80 bp, synthetic construct
  source 1..80: mol_type = other DNA
tgaacggtacaccgtgaaaaaaacgggatcccaattcttaacctctatttgcttgattgtttttccatctttattgtttt

SEQ ID NO: 34450 - DNA, 80 bp, synthetic construct
  source 1..80: mol_type = other DNA
cctcgctgtgtctcgggaagttccccatctacacgataccagataagcttggcccctggagcccgatcgacatacatcat

SEQ ID NO: 34451 - DNA, 80 bp, synthetic construct
  source 1..80: mol_type = other DNA
tcactcagatgaaatagaacatctcgtcgtagaggaattgatcaagaaaagggaaggatgtttagatgcactggagtcca

SEQ ID NO: 34452 - DNA, 80 bp, synthetic construct
  source 1..80: mol_type = other DNA
gtgagaccgggatgtgaaggtgagtcattccctccacaccaatcggttatatgaccgcctctctttgagatctgagggat

SEQ ID NO: 34453 - DNA, 80 bp, synthetic construct
  source 1..80: mol_type = other DNA
cctatcttcttgacagtccttcgtggaccctgtgcaacaggatggactcaagagtcaagaaactttcatcaatcatctca

SEQ ID NO: 34454 - DNA, 80 bp, synthetic construct
  source 1..80: mol_type = other DNA
cccaaggacagataccaaaggtcatgagcaatccactcggaaactcagataactctatgtttgagtttgggtagatgcca

SEQ ID NO: 34455 - DNA, 80 bp, synthetic construct
  source 1..80: mol_type = other DNA
gatcacaatcatctcacatcccgataaaatgtgcatagctacagaggcctgggccatccaagcctttcagtcaagaaaaa

SEQ ID NO: 34456 - DNA, 80 bp, synthetic construct
  source 1..80: mol_type = other DNA
gacccgattgatctgattgagtcagaagccgagccgaaggggaatcctaccattcccaacatattaagaaactctgatta

SEQ ID NO: 34457 - DNA, 80 bp, synthetic construct
  source 1..80: mol_type = other DNA
caacctcaattctcctttgatagaggatccagcaagattaatgttagaatggttgaaaacagggaataggcctctccgga

SEQ ID NO: 34458 - DNA, 80 bp, synthetic construct
  source 1..80: mol_type = other DNA
ttgtgccaactgtatattgctggagatcaagttttgtccatgtgtggaaactctggttacgaagtcatcaaaatattaga

SEQ ID NO: 34459 - DNA, 80 bp, synthetic construct
  source 1..80: mol_type = other DNA
gcccgacatgttggaatggccaagatggagggctagagggtttacgacagaagggctggagtctggttagtttattaatg

SEQ ID NO: 34460 - DNA, 80 bp, synthetic construct
  source 1..80: mol_type = other DNA
agacaccttagagtcggacgaggacattcagagattgttaaaagactctttacgcaggacaagatgggtagatcaagagg

SEQ ID NO: 34461 - DNA, 80 bp, synthetic construct
  source 1..80: mol_type = other DNA
tgcgccatgcagcaaaaaccatgaccgggggttatagccccaacaagaagacatcccgcaaagcgggatgttcagaatgg

SEQ ID NO: 34462 - DNA, 80 bp, synthetic construct
  source 1..80: mol_type = other DNA
acggggaaagttctttcgagatgcagaatatttaacctcctctacccttcgggagatgagccttgtgttgttcaactgta

SEQ ID NO: 34463 - DNA, 80 bp, synthetic construct
  source 1..80: mol_type = other DNA
ttgtaggcagcacagacgatctatctggggagataaagaagcaccttcgaggatacaacagatggatcactttagatgat

SEQ ID NO: 34464 - DNA, 80 bp, synthetic construct
  source 1..80: mol_type = other DNA
gttaaatccagatcatccctcctagattacagctgcttgtgaattagacactcctgtgaaaatatacagaccgatattct

SEQ ID NO: 34465 - DNA, 80 bp, synthetic construct
  source 1..80: mol_type = other DNA
tgaagggtgtaccctgaaaaaaacgagacactgattcattacctctatttgcttgattatttctcctttttttattgttt

SEQ ID NO: 34466 - DNA, 80 bp, synthetic construct
  source 1..80: mol_type = other DNA
ccagtcctccggggaagccctctgaagacaaggccacccaaactaccaaccgtgaacttaaaaaggatacagcatcagca

SEQ ID NO: 34467 - DNA, 80 bp, synthetic construct
  source 1..80: mol_type = other DNA
aactggaaaatagcaggtgatcccaggtatgaagagtcccttcatactccttatcctgattatcattggctgagaactgt

SEQ ID NO: 34468 - DNA, 80 bp, synthetic construct
  source 1..80: mol_type = other DNA
gagggacttaacctcagtagacacgggaaaggacttggtcaagtttaaagatcaaatatgggggcatctgattgtgacca

SEQ ID NO: 34469 - DNA, 80 bp, synthetic construct
  source 1..80: mol_type = other DNA
tccaccaacgccttgactgtcgcacaacactcccagtctttgattaagccgatgagagacttcttactcatgtcagtaca

SEQ ID NO: 34470 - DNA, 80 bp, synthetic construct
  source 1..80: mol_type = other DNA
tcctcttgagattggacaatcacccgtctttatacatcatgcttagagagccatctctcagaggggagatattctctatc

SEQ ID NO: 34471 - DNA, 80 bp, synthetic construct
  source 1..80: mol_type = other DNA
cagagagttgaaaggaacctctccaaaagtatgagagtcaacctgcgacagatgagctctttgatgaggcaggtgttagg

SEQ ID NO: 34472 - DNA, 80 bp, synthetic construct
  source 1..80: mol_type = other DNA
ggaacctctccaaaagtatgagagtcaacctgcgacagatgagctctttgatgaggcaggtgttaggggggcatggagaa

SEQ ID NO: 34473 - DNA, 80 bp, synthetic construct
  source 1..80: mol_type = other DNA
gatctgctcagcccaacaagtcgctgtttcaacctcattgaatcccgccccaatctctgagctggacgttagatctctct

SEQ ID NO: 34474 - DNA, 80 bp, synthetic construct
  source 1..80: mol_type = other DNA
ccaagagacttcagaatccgttaatctctggcctgagggtggttcagtgggcaactggggcccattacaagctcaaaccc

SEQ ID NO: 34475 - DNA, 80 bp, synthetic construct
  source 1..80: mol_type = other DNA
atgacttgatggcgtcagggacacatccgttacccccctctgcaatcatgagtgggggagatgatattgtgtctagggtg

SEQ ID NO: 34476 - DNA, 80 bp, synthetic construct
  source 1..80: mol_type = other DNA
agctgtaccttagattctctaaacggggaaagttctttcgagatgcagaatatttgacttcttctactattcgagaaatg

SEQ ID NO: 34477 - DNA, 80 bp, synthetic construct
  source 1..80: mol_type = other DNA
ggggaaccttgtctaaggtctctatcatcatagccattgtaatagttttttccaatagggtattcaatgtctcgaaacca

SEQ ID NO: 34478 - DNA, 80 bp, synthetic construct
  source 1..80: mol_type = other DNA
actctggcttgagtctctcctctcactggatcaggctcatttataaaatcgtgaagactaccagacttgtaggaaatacg

SEQ ID NO: 34479 - DNA, 80 bp, synthetic construct
  source 1..80: mol_type = other DNA
gaagacttgtccagggaagtaaaaaagcacctccgagggtacaacaggtggatcaccctggatgacgttaaatccagatc

SEQ ID NO: 34480 - DNA, 80 bp, synthetic construct
  source 1..80: mol_type = other DNA
atcactccttgattatagctgcttataacccaggcactaaaaaggccacacagagactgacattcttggacaatgtaccc

SEQ ID NO: 34481 - DNA, 80 bp, synthetic construct
  source 1..80: mol_type = other DNA
cagaagtggcactagccgatgacgggacagtcaactctgatgatgaggactatttttccggtgaaaccaggagtccagag

SEQ ID NO: 34482 - DNA, 80 bp, synthetic construct
  source 1..80: mol_type = other DNA
atcatcaagctcgccctaattcatttgctgagttcctcaataaaacatattcaaacgattcataggaagttgaatcatag

SEQ ID NO: 34483 - DNA, 80 bp, synthetic construct
  source 1..80: mol_type = other DNA
aactgtcaacactaataaatcatgcaatttcttcacgaaaaaaactaacatccctccttaagaaccatctcaaacatgag

SEQ ID NO: 34484 - DNA, 80 bp, synthetic construct
  source 1..80: mol_type = other DNA
tccaattgaataatgaaaaacaatatggccttgccgaggtggacaaagaaggagagaacaagagccgtgaggactttcaa

SEQ ID NO: 34485 - DNA, 80 bp, synthetic construct
  source 1..80: mol_type = other DNA
atgaacgaagagaaagaccccagcctcttattccagtcgtacctggacaatgttggagttcaaatggtcagacagatgag

SEQ ID NO: 34486 - DNA, 80 bp, synthetic construct
  source 1..80: mol_type = other DNA
atcaggagagagattcctcaagatatggtctcgtactgtagaggaaattatatcctatgtaatgattaacttctccagtt

SEQ ID NO: 34487 - DNA, 80 bp, synthetic construct
  source 1..80: mol_type = other DNA
ctctggggaggccttccgaagacaaatctactcaaactgctaatcggggactcaagagggagaccacgtcatctccttct

SEQ ID NO: 34488 - DNA, 80 bp, synthetic construct
  source 1..80: mol_type = other DNA
caacgagagaatcaatcatccaaagccaatatggcggcccagactgcatcaggccctcctgccctggattggtccgccac

SEQ ID NO: 34489 - DNA, 80 bp, synthetic construct
  source 1..80: mol_type = other DNA
cagctccagaaagttccagctgctagttgagcctgacaagttgaacaaaataatgcaggatgacctgaaccgttatttat

SEQ ID NO: 34490 - DNA, 80 bp, synthetic construct
  source 1..80: mol_type = other DNA
ctaattaatcagaccaccagcctcagtcccaccatgcaacctcatccagggtaatccaaatttgacgtgaaaaaaacaga

SEQ ID NO: 34491 - DNA, 80 bp, synthetic construct
  source 1..80: mol_type = other DNA
aatggggaagtcagggtatgtagtccaaatggatattcttttaggattttgcgtcacatattaaaatcatttgatgagat

SEQ ID NO: 34492 - DNA, 80 bp, synthetic construct
  source 1..80: mol_type = other DNA
ctgatatgtccctcaaaacacagagatctgaggaggacaaagactcttctgtccttctcgaatagttgagttatatcctg

SEQ ID NO: 34493 - DNA, 80 bp, synthetic construct
  source 1..80: mol_type = other DNA
taagtccctcaattgtttacctctggaggagagaacacatggacttaactccagcattcaggagcaatagaacaaaacca

SEQ ID NO: 34494 - DNA, 80 bp, synthetic construct
  source 1..80: mol_type = other DNA
accatgctatggtgccgttgaatagctgcattttctcagagtcaaattaattacatttgcattttaagcctcttggatgt

SEQ ID NO: 34495 - DNA, 80 bp, synthetic construct
  source 1..80: mol_type = other DNA
gaaaaaaactattaacatccctcgaaagacctaaggaaagatggttcttcaggcccttctgttcgcaccttttctgattt

SEQ ID NO: 34496 - DNA, 80 bp, synthetic construct
  source 1..80: mol_type = other DNA
catcgttgtgccttggaaagttccctatctatacgataccagacaagctcggcccttggagccctatcgatatacatcat

SEQ ID NO: 34497 - DNA, 80 bp, synthetic construct
  source 1..80: mol_type = other DNA
ctcagctgtcccaacaatctagttgtagaagacgaggggtgcaacagtctatcaggaatttcttacatggaactgaaagt

SEQ ID NO: 34498 - DNA, 80 bp, synthetic construct
  source 1..80: mol_type = other DNA
gggatatatctccgccataaaggtgaacgggttcacctgtactggtgtcgtgactgaagctgagacttacaccaacttcg

SEQ ID NO: 34499 - DNA, 80 bp, synthetic construct
  source 1..80: mol_type = other DNA
ttggttatgtcaccaccacattcaagagaaaacactttcatccgatgccggatgcgtgtagatctgcatacaactggaaa

SEQ ID NO: 34500 - DNA, 80 bp, synthetic construct
  source 1..80: mol_type = other DNA
ctggcaggcgatcctcgttatgaagagtcccttcaaaacccatatcccgattaccactggctgcggaccgtaaaaaccac

SEQ ID NO: 34501 - DNA, 80 bp, synthetic construct
  source 1..80: mol_type = other DNA
caaggagtctcttatcatcatatcgcccagtgtggctgacctggatccatatgacaaatctctccactcaaggatttttc

SEQ ID NO: 34502 - DNA, 80 bp, synthetic construct
  source 1..80: mol_type = other DNA
ctagtgggaaatgctcagggatgactatttcttctacctactgctcaactaaccacgaatacactatatggatgcccgaa

SEQ ID NO: 34503 - DNA, 80 bp, synthetic construct
  source 1..80: mol_type = other DNA
aaggcaggtctcgggacgtcttgtgacatatttaccaccagcaagggaaagagagcgtccaaaggaggaaagacctgtgg

SEQ ID NO: 34504 - DNA, 80 bp, synthetic construct
  source 1..80: mol_type = other DNA
acataaaacgtactgacgtggaagggaactgggctttgacagggggcctggaattgaccagggatcccaccatctcagaa

SEQ ID NO: 34505 - DNA, 80 bp, synthetic construct
  source 1..80: mol_type = other DNA
gtttgtggatgaaagaggcttatacaagtccttgaaggtggcatgtaagctcaagctatgtggggtctccgggctcagac

SEQ ID NO: 34506 - DNA, 80 bp, synthetic construct
  source 1..80: mol_type = other DNA
taatggatgggacttgggttgcaatccagacatcagaagagaccaagtggtgtcctcctgatcagttggtgaatctgcat

SEQ ID NO: 34507 - DNA, 80 bp, synthetic construct
  source 1..80: mol_type = other DNA
gaccttcactcagatgagatagagcatcttgttgtcgaggagttggtcaagaaaagggaggagtgcttagatgcattaga

SEQ ID NO: 34508 - DNA, 80 bp, synthetic construct
  source 1..80: mol_type = other DNA
cgggcatgtcctgatcccagagatgcagtcgtctcttctccaacagcatatggaactgttggagtcttctgtgatccccc

SEQ ID NO: 34509 - DNA, 80 bp, synthetic construct
  source 1..80: mol_type = other DNA
tgatgcatcccctggcagacctctcaacagtctttaaggatggtgatgaagcagaagacttcgttgaagttcatcttccg

SEQ ID NO: 34510 - DNA, 80 bp, synthetic construct
  source 1..80: mol_type = other DNA
gatgttcacaaacagatctcaggggtggatcttggcctcccgagctggggaaagtatgtgctaatgagtgcaggtgcctt

SEQ ID NO: 34511 - DNA, 80 bp, synthetic construct
  source 1..80: mol_type = other DNA
ttggcctcccgagctggggaaagtatgtgctaatgagtgcaggtgccttggcaatcctaatgttggtgatctctttaatg

SEQ ID NO: 34512 - DNA, 80 bp, synthetic construct
  source 1..80: mol_type = other DNA
ggcaatcctaatgttggtgatctctttaatgaaatgtttctggggggtcaacagaacaaaaccaatacaacagggtccta

SEQ ID NO: 34513 - DNA, 80 bp, synthetic construct
  source 1..80: mol_type = other DNA
catgcatctttggttggtcttcttctgagtctatatagactgagcaagatatctggactaaacaccggcaattacaagac

SEQ ID NO: 34514 - DNA, 80 bp, synthetic construct
  source 1..80: mol_type = other DNA
gagaatcagaacgaaaggtatcaattgctccccagagcaggaaagttatatcttcttgggagtcttataagagtggaggg

SEQ ID NO: 34515 - DNA, 80 bp, synthetic construct
  source 1..80: mol_type = other DNA
gagactgaactgtaaagataggccgtccccatcatacctcacatgcaaaagattgctcccctctgagacattggggcatc

SEQ ID NO: 34516 - DNA, 80 bp, synthetic construct
  source 1..80: mol_type = other DNA
tcttgccttgacaatcttccgtgaactctgtatagcaaggcggactcaaaaatcgagaaactttcatctgtcatactacc

SEQ ID NO: 34517 - DNA, 80 bp, synthetic construct
  source 1..80: mol_type = other DNA
ctatcagacacgatcatgtagattttgataatgtatggagtatcataataatatcagcgaccgatggtgctctcacctcc

SEQ ID NO: 34518 - DNA, 80 bp, synthetic construct
  source 1..80: mol_type = other DNA
taaggaccgataccaaaggttgtagacaggccgaatagtatctctgaagaccccgctccttggtttgggcagaggctatc

SEQ ID NO: 34519 - DNA, 80 bp, synthetic construct
  source 1..80: mol_type = other DNA
tcaagttcttctactccaaaatgtacagggactaactgagaaaatcaaattgcctcctatgaaggacaaaaataatagat

SEQ ID NO: 34520 - DNA, 80 bp, synthetic construct
  source 1..80: mol_type = other DNA
ctcagtcatctcacatttcgataggacgtgcacaactgcaaagggcttggtcatctaagcttttcagtcaggaaaaaaac

SEQ ID NO: 34521 - DNA, 80 bp, synthetic construct
  source 1..80: mol_type = other DNA
tgtgagatggagggacaactgacaacacctctcatcttgatagcaacaccatgatgattgatcctggggaggtttatgat

SEQ ID NO: 34522 - DNA, 80 bp, synthetic construct
  source 1..80: mol_type = other DNA
gaccccgttgatcctgttgattcagaggctgagccgcgagggaactccactattcctaacatcttgcgaaactctgacta

SEQ ID NO: 34523 - DNA, 80 bp, synthetic construct
  source 1..80: mol_type = other DNA
taatctcaactcccctctaatcgaggacccagctaaaatgatgttagagtggttgaaaacaggaaatagacctcttcgaa

SEQ ID NO: 34524 - DNA, 80 bp, synthetic construct
  source 1..80: mol_type = other DNA
tgactttgactgacaattgttccaggtcctacaaagtcctgagggattatttcaagaaagtggatctcgggtctatcaaa

SEQ ID NO: 34525 - DNA, 80 bp, synthetic construct
  source 1..80: mol_type = other DNA
gttggcggggcagcagcacaatctatgatctctctttggttatacggtgctcactccgaatcgaaccggagccgaaagtg

SEQ ID NO: 34526 - DNA, 80 bp, synthetic construct
  source 1..80: mol_type = other DNA
tatagctgacttagctcagttctattccaggtcctcccccatagaaaatctgttaaactacacactcggaaatagggggc

SEQ ID NO: 34527 - DNA, 80 bp, synthetic construct
  source 1..80: mol_type = other DNA
tggggaaggacctgatcaagttcaaggaccagatatggggacatttaattgtgactaaagactttatatattcgcagagc

SEQ ID NO: 34528 - DNA, 80 bp, synthetic construct
  source 1..80: mol_type = other DNA
tctcactgtctcttcgatcggaactatacactcatgttaaaggaccttttcttgtctcggtttaactctctaatgattct

SEQ ID NO: 34529 - DNA, 80 bp, synthetic construct
  source 1..80: mol_type = other DNA
gctatccccccctgagcctcgatattcagatgacttgatatctcaactgtgtcagctgtacattgcaggggatcatgtct

SEQ ID NO: 34530 - DNA, 80 bp, synthetic construct
  source 1..80: mol_type = other DNA
tgtccttgtgcgggaactctggttatgaagttataaaaatcttggaaccatatgtagtgaatagcttagtcttcagagcc

SEQ ID NO: 34531 - DNA, 80 bp, synthetic construct
  source 1..80: mol_type = other DNA
gaaagattcaggcctctcattcattccctaggggacttccctgtattcataagggataaagtggggcaactcgaaggaac

SEQ ID NO: 34532 - DNA, 80 bp, synthetic construct
  source 1..80: mol_type = other DNA
gtttggccccagtgcgaaaaaattctttaaagctttagatcagttcgacaatatacacgacttagtctttgtatatggtt

SEQ ID NO: 34533 - DNA, 80 bp, synthetic construct
  source 1..80: mol_type = other DNA
atccacgactccttgcaagggatcaccccctaactccctatattaagacccagacatggccccccaaacacgttgtggat

SEQ ID NO: 34534 - DNA, 80 bp, synthetic construct
  source 1..80: mol_type = other DNA
ctcaaatatttgagatccccgaatcaatggacccatccgaaatattggacgacaaatcacattccttcacaaggacaaaa

SEQ ID NO: 34535 - DNA, 80 bp, synthetic construct
  source 1..80: mol_type = other DNA
acctaaagaaagggagcttaaaatagaaggtcggttcttcgccttaatgtcttggaatctaaggttatattttgttatca

SEQ ID NO: 34536 - DNA, 80 bp, synthetic construct
  source 1..80: mol_type = other DNA
cagagaaactcctggctaattatgttctgccactctttgatgctttaactatgacagacaacttgaacaaagtgtttaaa

SEQ ID NO: 34537 - DNA, 80 bp, synthetic construct
  source 1..80: mol_type = other DNA
ggtgggccagggtctcttgtatctctaacgaccaaatagtcaacctggcgaatataatgtcaacagtatctaccaatgcc

SEQ ID NO: 34538 - DNA, 80 bp, synthetic construct
  source 1..80: mol_type = other DNA
ctgttgcgcagcattcccagtctttaattaagccgatgagggacttcttactcatgtcagtacaagctgtcttccattac

SEQ ID NO: 34539 - DNA, 80 bp, synthetic construct
  source 1..80: mol_type = other DNA
agaggagtctttttatacctccgagatccatgggatcaaccggatgacacagactcctcaaagaatagggagtgtttggg

SEQ ID NO: 34540 - DNA, 80 bp, synthetic construct
  source 1..80: mol_type = other DNA
cgatttcctgcacctgtggggggacaggaaggggaaaccctcgcatatccgtgtctgtgcttccgtcttttgatcagtct

SEQ ID NO: 34541 - DNA, 80 bp, synthetic construct
  source 1..80: mol_type = other DNA
gggaaaccctcgcatatccgtgtctgtgcttccgtcttttgatcagtctttcttttctagaggccctctaaagggatatc

SEQ ID NO: 34542 - DNA, 80 bp, synthetic construct
  source 1..80: mol_type = other DNA
atgtgtctgtcagtacagacacaatgtctgacctgactcacgacggtaagaactatgacttcatgttccaaccacttatg

SEQ ID NO: 34543 - DNA, 80 bp, synthetic construct
  source 1..80: mol_type = other DNA
ctttatgcacaaacatggacatcggagctagtgcaaaaggacactcggttaaaggactccacctttcattggcatctccg

SEQ ID NO: 34544 - DNA, 80 bp, synthetic construct
  source 1..80: mol_type = other DNA
atgcagtaagtgtattaggcccattgacgacattaccctcgagacttcccaagttttcgagtttccggatgtttcgagac

SEQ ID NO: 34545 - DNA, 80 bp, synthetic construct
  source 1..80: mol_type = other DNA
ggatatccaggatggtttctggagctgttccccattttcaaaaacttcccgacatccgcttaaggcctggtgactttgag

SEQ ID NO: 34546 - DNA, 80 bp, synthetic construct
  source 1..80: mol_type = other DNA
tctctaagtgaccgagagaagtcgcgccacatagggtcagcccaggggctcttgtactcgatcttggttgctattcatga

SEQ ID NO: 34547 - DNA, 80 bp, synthetic construct
  source 1..80: mol_type = other DNA
acaccctggagtcagatgaagacattcagaggctgttaaaagactctttgcgcaggacgaggtgggtagatcaagaggta

SEQ ID NO: 34548 - DNA, 80 bp, synthetic construct
  source 1..80: mol_type = other DNA
ccgagctggacatcagagcccttaccaaaaggcttcagaatccgttgatctccggcttgagagtagttcagtgggcgaca

SEQ ID NO: 34549 - DNA, 80 bp, synthetic construct
  source 1..80: mol_type = other DNA
attaggtccagatcatctcttctagattatagctgcttgtaaaataggctctctcgaaggagtgtacagaccaaaactct

SEQ ID NO: 34550 - DNA, 80 bp, synthetic construct
  source 1..80: mol_type = other DNA
tggactatataccctgaaaaaaacgaaatcccgatccgtaacctctgtttacttgattgtgtttttcatctttattgttt

SEQ ID NO: 34551 - DNA, 80 bp, synthetic construct
  source 1..80: mol_type = other DNA
aagaagctagactcgggacatcttgtgacatttttatcaacagcagagggaaaagagcatctaaggggggcaggacttgc

SEQ ID NO: 34552 - DNA, 80 bp, synthetic construct
  source 1..80: mol_type = other DNA
tggggggtcaggaaggaaagtatcggtctctccccaaaacgggaaagtcatatcttcatgggagtcttataagaatggag

SEQ ID NO: 34553 - DNA, 80 bp, synthetic construct
  source 1..80: mol_type = other DNA
gtcatatcttcatgggagtcttataagaatggaggcgaaaccaggctgtgagggcaggtcatctcctctatgccttgcgt

SEQ ID NO: 34554 - DNA, 80 bp, synthetic construct
  source 1..80: mol_type = other DNA
atgaccccattgatccagttgagtcagaggccgagccgagagggaatcccaccattcctaacatcttaagaaactctgac

SEQ ID NO: 34555 - DNA, 80 bp, synthetic construct
  source 1..80: mol_type = other DNA
ctctcgagaaacttagaggagtccttttataactcagagatccatgggctcaatcggatgacccagactccccaaagggt

SEQ ID NO: 34556 - DNA, 80 bp, synthetic construct
  source 1..80: mol_type = other DNA
cgatctcctgcacttgtggagtcacagggggtggaaatcctagaatatcagtgtctgtgcttccatcctttgataattca

SEQ ID NO: 34557 - DNA, 80 bp, synthetic construct
  source 1..80: mol_type = other DNA
ggatatctaggatggtttccggagctgtacctcattttcgacaacttcctgatattcgtttgagaccaggtgacttcgaa

SEQ ID NO: 34558 - DNA, 80 bp, synthetic construct
  source 1..80: mol_type = other DNA
aagaatctctccaaaaacatgagggccaacttacgacaaatgagttctctaatgaggcaagtgctgggcggccatggcga

SEQ ID NO: 34559 - DNA, 80 bp, synthetic construct
  source 1..80: mol_type = other DNA
ctggatgatctcaatgttttcccatccctgtgtctggtggttggggatggatcaggtgggatctcaagggccgtgctcaa

SEQ ID NO: 34560 - DNA, 80 bp, synthetic construct
  source 1..80: mol_type = other DNA
catgttcccggatgccaggcttgtattcaacagcttgctggaagtgaatgatttgatggcgtcaggaacacatccgttgc

SEQ ID NO: 34561 - DNA, 80 bp, synthetic construct
  source 1..80: mol_type = other DNA
cagtctgttcaggaacaagtgaatatgtcctatgacctcatcatctgtgatgcagaggtcacggacattgcatcaatcaa

SEQ ID NO: 34562 - DNA, 80 bp, synthetic construct
  source 1..80: mol_type = other DNA
cactttatttggtattcaaaacttacggaactatgcttgtaaatccggattacagagcagtccaacacctatccagagca

SEQ ID NO: 34563 - DNA, 80 bp, synthetic construct
  source 1..80: mol_type = other DNA
tttcctactgtcacaggatttataactcaaatgacatcatccttttcatccgagctatacctaagattctctaaacgggg

SEQ ID NO: 34564 - DNA, 80 bp, synthetic construct
  source 1..80: mol_type = other DNA
aattacagcgaggaactttgtccaaagtctctatcatcatagctatagtgatagtcttctccaacagggtgttcaatgtc

SEQ ID NO: 34565 - DNA, 80 bp, synthetic construct
  source 1..80: mol_type = other DNA
atatatgctgtagtaccatgatgtatttgtccaccgccttgggggatgtgcccagctttgcgagacttcatgacctgtac

SEQ ID NO: 34566 - DNA, 80 bp, synthetic construct
  source 1..80: mol_type = other DNA
actctagcctgagtctctcctcccactggatcaggctgatttacaaaatagtgaagaccaccagacttgtaggcagcaca

SEQ ID NO: 34567 - DNA, 80 bp, synthetic construct
  source 1..80: mol_type = other DNA
gaagacctatctggggagataaagaagcaccttcgaggatacaacagatggatcactttagacgatgttaaatccagatc

SEQ ID NO: 34568 - DNA, 80 bp, synthetic construct
  source 1..80: mol_type = other DNA
atcccttctagattacagctgcttgtgaattagatactcctgtgaaaatatacagaccaatattcttgaatggtgtaccc

SEQ ID NO: 34569 - DNA, 80 bp, synthetic construct
  source 1..80: mol_type = other DNA
ctgaaaaaaacaagacactgattcatgacctctatttgcttgattatttctcctttttttgttgtttttttgttaagcgt

SEQ ID NO: 34570 - DNA, 80 bp, synthetic construct
  source 1..80: mol_type = other DNA
ctgaagccgctctggcagatgacggaacagtcgactctgacgacgaagactacttttctggtgagaccaggagtcctgag

SEQ ID NO: 34571 - DNA, 80 bp, synthetic construct
  source 1..80: mol_type = other DNA
gcagtctatactcggatcatgatgaatggaggccgactcaaaagatcgcacataagaagatatgtctcagtcagttccaa

SEQ ID NO: 34572 - DNA, 80 bp, synthetic construct
  source 1..80: mol_type = other DNA
tcaccaagcccgccccaactcgttcgctgagtttctaaacaagacatactcgagcgattcttagaaggccgaattgcaaa

SEQ ID NO: 34573 - DNA, 80 bp, synthetic construct
  source 1..80: mol_type = other DNA
gccgtcgagatcactaaattgtgtacctccttcatgaaaaaaactaacacccctccttttgaaccatcccaaacatgagc

SEQ ID NO: 34574 - DNA, 80 bp, synthetic construct
  source 1..80: mol_type = other DNA
ttcaattagatgatgaaaagtcttctggccttggcgaggcagccaaggcaggggagagcaagtgtcaggaggactttcag

SEQ ID NO: 34575 - DNA, 80 bp, synthetic construct
  source 1..80: mol_type = other DNA
atggatgagggggaagacccccgcctcttgttccagtcatacctggacaacgttggagttcaaatggtcagacgtatgag

SEQ ID NO: 34576 - DNA, 80 bp, synthetic construct
  source 1..80: mol_type = other DNA
ccagtcctccgggaaggccctctgaagacaaggctacccaaactgccaaccgtgaacttaagaaagatacagagtcagca

SEQ ID NO: 34577 - DNA, 80 bp, synthetic construct
  source 1..80: mol_type = other DNA
cattctaaacgggaaagtcaatcatccaaagtcagaatggcagctcaaacagcctctggccctcatgcattagaatggtc

SEQ ID NO: 34578 - DNA, 80 bp, synthetic construct
  source 1..80: mol_type = other DNA
tgccgccaatgaggaagaagatctgtccgtagaagctgaaattgctcaccagatagctgagagcttttcgaagaagtaca

SEQ ID NO: 34579 - DNA, 80 bp, synthetic construct
  source 1..80: mol_type = other DNA
tcaaagagtcaaagaatgtgccaggtgttacccgcttggcccacgaaggatctaaactccctctgagatgtgtgctcggg

SEQ ID NO: 34580 - DNA, 80 bp, synthetic construct
  source 1..80: mol_type = other DNA
cagttccaggaagttccagattctggttgagcctgacaagctaaacaaaataatgcaagatgacttgaaccgttatgtgt

SEQ ID NO: 34581 - DNA, 80 bp, synthetic construct
  source 1..80: mol_type = other DNA
tatctggtatgaatgcagctaagcttgaccccgacgatgtatgctcttatttagcagccgcaatgcaattctttgaagga

SEQ ID NO: 34582 - DNA, 80 bp, synthetic construct
  source 1..80: mol_type = other DNA
ctcgttaaccaaactctcaacctcagacccactatgcgatcaaatccgggctgatcgagccccaacgtgaaaaaaacagg

SEQ ID NO: 34583 - DNA, 80 bp, synthetic construct
  source 1..80: mol_type = other DNA
caacaccactgatacaatgaacttcctacgcaaaatagtgaaaaattgcagagatgaggacaccaataagccctctctcg

SEQ ID NO: 34584 - DNA, 80 bp, synthetic construct
  source 1..80: mol_type = other DNA
tatcggcccctccagatgacgatgatttatggttgccccctccagaatatgtccccttgaaggagctcacaggaaagaaa

SEQ ID NO: 34585 - DNA, 80 bp, synthetic construct
  source 1..80: mol_type = other DNA
aacatgagaaacttctgcattaacggggaagtcaaaatatgcagtccaaatggatattcttttaggatcttgcgccatat

SEQ ID NO: 34586 - DNA, 80 bp, synthetic construct
  source 1..80: mol_type = other DNA
tttgagatcattcgatgagatctattctggaaatcaaagaatgatcggattggttaaagttgttgttggactggccttgt

SEQ ID NO: 34587 - DNA, 80 bp, synthetic construct
  source 1..80: mol_type = other DNA
agaggtctgatgaggataaagactcttccgtgcttttggagtagttacagtacatcccacaagttcctcagttgtttacc

SEQ ID NO: 34588 - DNA, 80 bp, synthetic construct
  source 1..80: mol_type = other DNA
acatgcccggaggactggaccagctatggaattttgattgcaaggcagggagataaaattactccaaattctcttgtgga

SEQ ID NO: 34589 - DNA, 80 bp, synthetic construct
  source 1..80: mol_type = other DNA
aaaactattaacatccctcgaaagacttaagagaagatggtccctcaagctctcctatttgtgcctcttctgattccatc

SEQ ID NO: 34590 - DNA, 80 bp, synthetic construct
  source 1..80: mol_type = other DNA
agtgtgcctggggaagttcccgatctacacaatcccagacaagctaggtccttggagtcctatcgatatacatcatctca

SEQ ID NO: 34591 - DNA, 80 bp, synthetic construct
  source 1..80: mol_type = other DNA
gttgtcctaacaatctggttgttgaagatgagggatgcagtaatctatcaggattttcttacatggaattgaaggtagga

SEQ ID NO: 34592 - DNA, 80 bp, synthetic construct
  source 1..80: mol_type = other DNA
tatatttctgccataaaagtggatggattcacttgcactggcgtagttacggaagctgagacctacaccaattttatcgg

SEQ ID NO: 34593 - DNA, 80 bp, synthetic construct
  source 1..80: mol_type = other DNA
cctaatggaaaatgttcgggaataacggtctactctacttactgctcaactaaccacgattataccatctggatgcccga

SEQ ID NO: 34594 - DNA, 80 bp, synthetic construct
  source 1..80: mol_type = other DNA
gaaggcaggactcgggacatcttgtgacatctttaccaacagcaaggggaagagggcatccaaaggaggcaggacttgcg

SEQ ID NO: 34595 - DNA, 80 bp, synthetic construct
  source 1..80: mol_type = other DNA
tataaaacgtactgatgtagaagggaactgggctctaacagggggcttggagttgactagggaccccaccatttcagaac

SEQ ID NO: 34596 - DNA, 80 bp, synthetic construct
  source 1..80: mol_type = other DNA
gatttgtggatgaaagaggcttgtataagtctctgagaggagcatgtaagctcaagttatgcggagtgcctggactcagg

SEQ ID NO: 34597 - DNA, 80 bp, synthetic construct
  source 1..80: mol_type = other DNA
tcatggatgggacttgggccacaatccagacaccggaagagaccaaatggtgctctcctgatcagctggtgaatctgcat

SEQ ID NO: 34598 - DNA, 80 bp, synthetic construct
  source 1..80: mol_type = other DNA
gattttcattcagatgagatagagcatcttgttgtggaggacctggtcaagaaaagagaggaatgtctggatacactaga

SEQ ID NO: 34599 - DNA, 80 bp, synthetic construct
  source 1..80: mol_type = other DNA
caaaagggtgtctgagagtgggagggaggtgtcatcctcatgtgaatggagtgttcttcaatggtgtgatcatgggtcct

SEQ ID NO: 34600 - DNA, 80 bp, synthetic construct
  source 1..80: mol_type = other DNA
gacggtcatgtcctgatcccagagatgcaatcatcccttctccaacaacatatggagctgctggagtcgtctgtgatccc

SEQ ID NO: 34601 - DNA, 80 bp, synthetic construct
  source 1..80: mol_type = other DNA
cggatgttcacaaacaagtctctggaatagacctcggcctccccagctggggaaggtatttgttgatgattgccggtgct

SEQ ID NO: 34602 - DNA, 80 bp, synthetic construct
  source 1..80: mol_type = other DNA
ctgatgactctaactctggtaatcttcttgatgatatgttgcaggagagtcaacaaagcaggatcaatacaacaagatcc

SEQ ID NO: 34603 - DNA, 80 bp, synthetic construct
  source 1..80: mol_type = other DNA
atgcatccttggtaggtcttctcttgagtctgtacagattgagcaaaatatctggtcagaacaccggaaattacaagaca

SEQ ID NO: 34604 - DNA, 80 bp, synthetic construct
  source 1..80: mol_type = other DNA
tgagaagtcagaaaggaggagatcagttaccccccagaacgggaaggtcatatcttcatgggaatcctataagagtggaa

SEQ ID NO: 34605 - DNA, 80 bp, synthetic construct
  source 1..80: mol_type = other DNA
gcgaaactcggctgtgagggcatgttatttcctctatgccttgcgttcagaagattgccaccctctctcagggacatggg

SEQ ID NO: 34606 - DNA, 80 bp, synthetic construct
  source 1..80: mol_type = other DNA
ggaatttcttgttccgataatccttcacggactctgtacgaaggggtgggttaagaaaatgagggatttttcattaatca

SEQ ID NO: 34607 - DNA, 80 bp, synthetic construct
  source 1..80: mol_type = other DNA
tcttgactaattggacatagtcatgtggatcctgataatgtataaagtatcccaatagcatcagcaactaatggtgctat

SEQ ID NO: 34608 - DNA, 80 bp, synthetic construct
  source 1..80: mol_type = other DNA
caccttccaagggctgataccaaatgttgtggacagatcgattgatatctcagacgactctgtgctttagcttgggcaaa

SEQ ID NO: 34609 - DNA, 80 bp, synthetic construct
  source 1..80: mol_type = other DNA
gcctagaacaagtccctctaaaccaaacaggggtcaactgagagaagtgatttgcctcctatgaaggacacaagtaatgg

SEQ ID NO: 34610 - DNA, 80 bp, synthetic construct
  source 1..80: mol_type = other DNA
atcataatcatctcacatccaattaaggtgtgcataaccggagaggcctgagttgtatacacttttcagtaaagaaaaaa

SEQ ID NO: 34611 - DNA, 80 bp, synthetic construct
  source 1..80: mol_type = other DNA
actgtgagatggaggaacaatcaacaccacttctcatcctgagaactggaccacaatgattgacccaggggatgtttacg

SEQ ID NO: 34612 - DNA, 80 bp, synthetic construct
  source 1..80: mol_type = other DNA
atgaccctgttgatctgattgaatcagaggtcgagcccaaagggaactccaccatccctaacattttacgaaattccgac

SEQ ID NO: 34613 - DNA, 80 bp, synthetic construct
  source 1..80: mol_type = other DNA
tacaatctcaactcccctttaatcgaagatccagctaaattgatgttggaatggttgaaaacaggaaaccgacctctccg

SEQ ID NO: 34614 - DNA, 80 bp, synthetic construct
  source 1..80: mol_type = other DNA
aatatcgcagatcgtatagagcagatcttcgagacggccccctttgtgaaagtcgtagaacatcatactttaatgacaac

SEQ ID NO: 34615 - DNA, 80 bp, synthetic construct
  source 1..80: mol_type = other DNA
gtgggtggggctgcagcacaatccatgatctctctctggctacaaggtgctcactctgaatcaaccaggagccggaaatg

SEQ ID NO: 34616 - DNA, 80 bp, synthetic construct
  source 1..80: mol_type = other DNA
tataactgacttagctcagttttgttccaggtcttcccctatagagaagctgttaaactgtacacttggcaatagagggc

SEQ ID NO: 34617 - DNA, 80 bp, synthetic construct
  source 1..80: mol_type = other DNA
atatattcttcctatttgttctttcatgtaatcactctttacatgaatgctctggattgggatgaggagaaaaccatcct

SEQ ID NO: 34618 - DNA, 80 bp, synthetic construct
  source 1..80: mol_type = other DNA
cgcactgtggagggacttaacctcagtagacacgggaaaggacttagtcaagtttaaagatcaaatatggaggcatctgg

SEQ ID NO: 34619 - DNA, 80 bp, synthetic construct
  source 1..80: mol_type = other DNA
ttgtgaccaaagacttcatatattctcaaagttctgactgcctttttgataggaactatacacttatgctgaaagacctt

SEQ ID NO: 34620 - DNA, 80 bp, synthetic construct
  source 1..80: mol_type = other DNA
ttttcttatctcggttcaattctctgatgattttgctatccccccctgaaccacgatactctgatgatttgatatctctg

SEQ ID NO: 34621 - DNA, 80 bp, synthetic construct
  source 1..80: mol_type = other DNA
ctgtgtcagctatacattgctggagatcaagtcctgtccatgtgcggaaactctggttatgaagttataaaaatcttaga

SEQ ID NO: 34622 - DNA, 80 bp, synthetic construct
  source 1..80: mol_type = other DNA
cttacgttgtgaacagtttagtcaatagagcagagagatttaggcctctcatccattctttaggagatttcccttcattt

SEQ ID NO: 34623 - DNA, 80 bp, synthetic construct
  source 1..80: mol_type = other DNA
ataagagacaaagtgggtcagcttgagggaacattcggccccagtgcgaagaggttttttaaggttctagaccaattcga

SEQ ID NO: 34624 - DNA, 80 bp, synthetic construct
  source 1..80: mol_type = other DNA
caaagttgtacgaccaagtccacatcaagaaggtaatagataagccttatcaggagtgtttggcgagtgatctggccaag

SEQ ID NO: 34625 - DNA, 80 bp, synthetic construct
  source 1..80: mol_type = other DNA
aagaaagggagttgaaaatcgaaggccggtttttcgccttgatgtcttggaatctgagattatattttgttatcacagag

SEQ ID NO: 34626 - DNA, 80 bp, synthetic construct
  source 1..80: mol_type = other DNA
gccccatcttaaagagcagagtttacaggattttgggcgctgagggagacggttttcttttagctatgtcgagaataatt

SEQ ID NO: 34627 - DNA, 80 bp, synthetic construct
  source 1..80: mol_type = other DNA
cgatctcctgcacttgtggggtgacaagagggggaaacccccgaatatcagtgtctgtactcccgtctttcgatcaatcg

SEQ ID NO: 34628 - DNA, 80 bp, synthetic construct
  source 1..80: mol_type = other DNA
gcccagaccctgattagaaacataatgtctctgacaggtccagactttcccctggaagaagcccctgttttcaaaaggac

SEQ ID NO: 34629 - DNA, 80 bp, synthetic construct
  source 1..80: mol_type = other DNA
gatgcagtaagtgcattaggcccatcgacgatattacccttgagacctctcagatctttgagttcccggatgtttcaaga

SEQ ID NO: 34630 - DNA, 80 bp, synthetic construct
  source 1..80: mol_type = other DNA
aggatatccagaatggtctccggggcagtaccacattttcaaaggcttcctgatattcgcctaaaacctggtgacttcga

SEQ ID NO: 34631 - DNA, 80 bp, synthetic construct
  source 1..80: mol_type = other DNA
tctttgagtgacaaagagaggtcgcgccatatagggtctgcccaagggctcttgtattcaatcttggtcgcgattcacga

SEQ ID NO: 34632 - DNA, 80 bp, synthetic construct
  source 1..80: mol_type = other DNA
ctctgggtataatgatggcaccattttccctgttaacatatatagcaaggtctctccgagagattatctaagagggctcg

SEQ ID NO: 34633 - DNA, 80 bp, synthetic construct
  source 1..80: mol_type = other DNA
gcgggcatggggaagacaccttagagtcagacgaagacattcaaaggctgttgaaagactctttgcgcaggacaaaatgg

SEQ ID NO: 34634 - DNA, 80 bp, synthetic construct
  source 1..80: mol_type = other DNA
tgcgccatgcgacaagaaccatgacgggaggctacagccccaacaagaggatgtcacgcaaagcagggtgttcagagtgg

SEQ ID NO: 34635 - DNA, 80 bp, synthetic construct
  source 1..80: mol_type = other DNA
gtatgttctgctcagcaggttgcggtttcaacctcagcgaacccagctcccgcctccgaattggacatcagggctctctc

SEQ ID NO: 34636 - DNA, 80 bp, synthetic construct
  source 1..80: mol_type = other DNA
cactttgcctggttttcaaatcttatggtaccatgcttgtaaatccggattacagagcaattcaacacctgtcccgagct

SEQ ID NO: 34637 - DNA, 80 bp, synthetic construct
  source 1..80: mol_type = other DNA
tttcctgtaatcactggattcatcactcagatgacctcgtctttctcatccgaaatatacctcagattctcaaaacgagg

SEQ ID NO: 34638 - DNA, 80 bp, synthetic construct
  source 1..80: mol_type = other DNA
tggcttgcaattctagcttgagtctctcatcccactggatcaggcttatttacaaaatagtaaagaccaccagacttgtc

SEQ ID NO: 34639 - DNA, 80 bp, synthetic construct
  source 1..80: mol_type = other DNA
ggaagcgtagaagacttgtctggggaagtggagaagcaccttagagggtacaacaggtggatcacccttgatgacattag

SEQ ID NO: 34640 - DNA, 80 bp, synthetic construct
  source 1..80: mol_type = other DNA
atccagatcatctctcttagattatagctgcttgtaaaccagacattctcgagggaatatacagactgagactcttggac

SEQ ID NO: 34641 - DNA, 80 bp, synthetic construct
  source 1..80: mol_type = other DNA
ggtgcaccctgaaaaaaacgaaatcttaattcattgcctctgtttgcttgattgtttttccatctttattgtttttttgt

SEQ ID NO: 34642 - DNA, 80 bp, synthetic construct
  source 1..80: mol_type = other DNA
attgaaaacactaataaattgtttacatccttcacgaaaaaaactaacacccctccttttgaaccatctcagacatgagc

SEQ ID NO: 34643 - DNA, 80 bp, synthetic construct
  source 1..80: mol_type = other DNA
tctaatcgctaggaacatcgaagataatcaggctcatctccaaggggatcccatagaggtggacagtctccctgacgaca

SEQ ID NO: 34644 - DNA, 80 bp, synthetic construct
  source 1..80: mol_type = other DNA
ttcaattagaagatgaaaagtcatcaggttttggcggaatggccaaggcaggggaaagcaagtgtcaggaagactttcag

SEQ ID NO: 34645 - DNA, 80 bp, synthetic construct
  source 1..80: mol_type = other DNA
atggatgaggcggaggacccatccctcttgttccagtcgtatctagacaatgttggaattcaaatggtcagacaaatgag

SEQ ID NO: 34646 - DNA, 80 bp, synthetic construct
  source 1..80: mol_type = other DNA
tcaacttccccagtctgcccaggaagtcttcagaagataaggctacacagaccaccagccgggaactcaagaaagagact

SEQ ID NO: 34647 - DNA, 80 bp, synthetic construct
  source 1..80: mol_type = other DNA
caacgaagaggatgacccatctgtggaggctgaaatagctcaccaaattgctgagagcttttctaaaaaatacaaattcc

SEQ ID NO: 34648 - DNA, 80 bp, synthetic construct
  source 1..80: mol_type = other DNA
caactccaaaaagttccagctgttagttgagcccgacaagctaaacaaagtaatgcaagatgacctgaaccgttatgcgc

SEQ ID NO: 34649 - DNA, 80 bp, synthetic construct
  source 1..80: mol_type = other DNA
tcctctgaatgcactccccagctcagtcaaactgtgcagtcaaatctgacctgctccaaatccagcatgaaaaaaacagg

SEQ ID NO: 34650 - DNA, 80 bp, synthetic construct
  source 1..80: mol_type = other DNA
aaaactattaacatccctcaacagatctaaggaaagatgatctctcaggctttcctgtatgtccctctcttaatttcctc

SEQ ID NO: 34651 - DNA, 80 bp, synthetic construct
  source 1..80: mol_type = other DNA
gttgtgtttcgggaaattcccaatttacacgataccagacaagatcggcccctggagtcccatcgacatacatcatctca

SEQ ID NO: 34652 - DNA, 80 bp, synthetic construct
  source 1..80: mol_type = other DNA
attcgtggatgaaaggggcctgtacaagtctctaagaggagcatgtaaacttaagctgtgtggggttccgggacttagac

SEQ ID NO: 34653 - DNA, 80 bp, synthetic construct
  source 1..80: mol_type = other DNA
tgatggatggaacctgggtctcaatccagacatcagatgagaccaaatggtgccctccggatcagctggtgaatgtacat

SEQ ID NO: 34654 - DNA, 80 bp, synthetic construct
  source 1..80: mol_type = other DNA
caaaagggtgcctcaaagtcggagggatgtgtcatccccatgtggacggagtgtttttcaatggtataattttgggtcca

SEQ ID NO: 34655 - DNA, 80 bp, synthetic construct
  source 1..80: mol_type = other DNA
cagatattcacaaacaggtctcagggatagaccttggtctcccagactgggggaaatatctgctgatgagtgcaggtgct

SEQ ID NO: 34656 - DNA, 80 bp, synthetic construct
  source 1..80: mol_type = other DNA
ctggcaatattattgttaacaatcttcttaatgacatgttgcagaagggtcaatagaacagaatcagcacagcgagatcc

SEQ ID NO: 34657 - DNA, 80 bp, synthetic construct
  source 1..80: mol_type = other DNA
atgcatccttggttggtcttctcctgagtctgtataggttgagcaaaatatccggacaaaacaccggcaattacaagaca

SEQ ID NO: 34658 - DNA, 80 bp, synthetic construct
  source 1..80: mol_type = other DNA
tggagagttaggacggaaagtatcagcaactcctcagaacaggaaagtcatatcttcttgggagttgtacaagagtggag

SEQ ID NO: 34659 - DNA, 80 bp, synthetic construct
  source 1..80: mol_type = other DNA
gcgatactaggctgtgagggcgggtcatctcctccacacattgctttcagaaaattgcttctcttttagagctgagagaa

SEQ ID NO: 34660 - DNA, 80 bp, synthetic construct
  source 1..80: mol_type = other DNA
cttctccttttaacaatcattcatgaactctgcacgacagggtggattcaagagtcgagaaactctcattaatcatctca

SEQ ID NO: 34661 - DNA, 80 bp, synthetic construct
  source 1..80: mol_type = other DNA
actgattagacacagtcctgtaggttctgataaggtatgatgtattcggacagtatcattgactaatggtgctctcatcc

SEQ ID NO: 34662 - DNA, 80 bp, synthetic construct
  source 1..80: mol_type = other DNA
cccaaggactgacactgaaagttggggataagccaattgacatctcatacaactctatgcttgactttgggcagaggcca

SEQ ID NO: 34663 - DNA, 80 bp, synthetic construct
  source 1..80: mol_type = other DNA
tagcaagttcctcctacattagactaaataggggttagttgagagaagcgacttgcctcctatgagggacacaagcaata

SEQ ID NO: 34664 - DNA, 80 bp, synthetic construct
  source 1..80: mol_type = other DNA
tgtcacaaccatctcacatcccgacaaggtatgcaagactacaaagggctgggccatccaagcttcttagtcaagaaaaa

SEQ ID NO: 34665 - DNA, 80 bp, synthetic construct
  source 1..80: mol_type = other DNA
aacagtggaatggaggaataattgacaacacttctcatcctgagaactgtatcatgatgattgatccaggggaagtttat

SEQ ID NO: 34666 - DNA, 80 bp, synthetic construct
  source 1..80: mol_type = other DNA
aacatcgcagacagaatagagcagattttcgagacggccccttttgtaaagatcgtagaacatcatactttgatgacaac

SEQ ID NO: 34667 - DNA, 80 bp, synthetic construct
  source 1..80: mol_type = other DNA
tgactctgacagacaattgctccaggtcttacaaagttttaaaagattacttcaagagagtggatctagggtctatcaag

SEQ ID NO: 34668 - DNA, 80 bp, synthetic construct
  source 1..80: mol_type = other DNA
aggatttcgtgtactcccaaaattcgggctgcctcttcgatagaaactatacacttatgctgaaagacctttttttgtct

SEQ ID NO: 34669 - DNA, 80 bp, synthetic construct
  source 1..80: mol_type = other DNA
atttgcgacttctttcgagggaccaccccctgatcccttatatcaaaacccaaacatggcctcccaaacatatagtagat

SEQ ID NO: 34670 - DNA, 80 bp, synthetic construct
  source 1..80: mol_type = other DNA
aaccaagttctgtgtccgacatatatgttgtcaccggggctttctagagagggacttctctacgagttggagagcatatc

SEQ ID NO: 34671 - DNA, 80 bp, synthetic construct
  source 1..80: mol_type = other DNA
aagaaatgctctttcaatctaccgtgccattgaggagggggcatccaaactggggcttatcataaagaaggaagaaacta

SEQ ID NO: 34672 - DNA, 80 bp, synthetic construct
  source 1..80: mol_type = other DNA
tttttctcgagaggccctctgaagggatatctgggctcatccacttctatgtcgacccagctattccacgcatgggagaa

SEQ ID NO: 34673 - DNA, 80 bp, synthetic construct
  source 1..80: mol_type = other DNA
caagaaactctaatctagcccaaactctgattaggaacataatgtctctgacaggcccagattttccgctggaagaggcc

SEQ ID NO: 34674 - DNA, 80 bp, synthetic construct
  source 1..80: mol_type = other DNA
gatattttctattccccaaaaagttcctgctgcttacccaactacgatgaaagaaggtaacagatctatcctgtgctacc

SEQ ID NO: 34675 - DNA, 80 bp, synthetic construct
  source 1..80: mol_type = other DNA
cgccacgcagcgagaactatgacagggagttacagccctaacaagaagatgccacgcaaggcagggtgttcagaatgggt

SEQ ID NO: 34676 - DNA, 80 bp, synthetic construct
  source 1..80: mol_type = other DNA
gagcatttcctgcggtcactggattcataactcaagtgacctcatccttctcatccgagatatacctccgattctcaaaa

SEQ ID NO: 34677 - DNA, 80 bp, synthetic construct
  source 1..80: mol_type = other DNA
cggggaaagttctttcgggatgcagaatatttgacctcttctactcttcgagaaatgagccttgtgttgttcaactgcag

SEQ ID NO: 34678 - DNA, 80 bp, synthetic construct
  source 1..80: mol_type = other DNA
tagccctaagagtgagatgcagagggcccgctctctaaactaccaagatctggtgagaggatttccagatgagatcatat

SEQ ID NO: 34679 - DNA, 80 bp, synthetic construct
  source 1..80: mol_type = other DNA
acatatgttgcagtaccatgatgtatttgtccaccgccgtaggagacgtccctagctttgcgagacttcatgacctgtac

SEQ ID NO: 34680 - DNA, 80 bp, synthetic construct
  source 1..80: mol_type = other DNA
gtccagatcatctcttctagattatagctgcttgtgaaataggctctctcgaaggagtgtacagaccgaaacccttggac

SEQ ID NO: 34681 - DNA, 80 bp, synthetic construct
  source 1..80: mol_type = other DNA
gatataccctgaaaaaaacaagatcctgatccgtaacctctgtttacttgattgtgtttttcatctttattgtttttttg

SEQ ID NO: 34682 - DNA, 80 bp, synthetic construct
  source 1..80: mol_type = other DNA
ttcgtaaaaggttgaacaacaggattgtgaatgctaataaatcttgtacatcattcatgaaaaaaactaacacccctcct

SEQ ID NO: 34683 - DNA, 80 bp, synthetic construct
  source 1..80: mol_type = other DNA
ttcaattggacgatgaaaaaccatctggcctcggtggggtggtcaaagcaagagagatcaagtgtcaggaagactttcag

SEQ ID NO: 34684 - DNA, 80 bp, synthetic construct
  source 1..80: mol_type = other DNA
ccagtctgtcggggaagtcttcagaagacaaggctacccagactgcaaaccgagagctcaaaaaggagacagtgtctcct

SEQ ID NO: 34685 - DNA, 80 bp, synthetic construct
  source 1..80: mol_type = other DNA
tcctctcagagagaaagccagccatctaaggccaaaatggaggcccagaccgcctctggtcctcctgctctagagtggtc

SEQ ID NO: 34686 - DNA, 80 bp, synthetic construct
  source 1..80: mol_type = other DNA
agctgccaacgaagaggatgacttatccgtggaggctgaaatcgctcaccagattgctgagagcttctccaagaagtaca

SEQ ID NO: 34687 - DNA, 80 bp, synthetic construct
  source 1..80: mol_type = other DNA
cctactaaccagcccctcaaacctggcctcattgtgcaatcagatccaaactgcttcaaatacaccatgaaaaaaacagg

SEQ ID NO: 34688 - DNA, 80 bp, synthetic construct
  source 1..80: mol_type = other DNA
aaaaaaactagtaacatccctcgaaagatctaaggaaaaatgatccctcaggctattctgtcagtgcctcttctgatttc

SEQ ID NO: 34689 - DNA, 80 bp, synthetic construct
  source 1..80: mol_type = other DNA
ctcgctgtgttttgggaaattccccatctacacgataccagaaaaactcggcccttggagtcccattgatatacatcatc

SEQ ID NO: 34690 - DNA, 80 bp, synthetic construct
  source 1..80: mol_type = other DNA
ttatggatggaacttgggtttcaattcaggcatcagatgagaccaagtggtgctcccctgatcaactggtgaatgtacat

SEQ ID NO: 34691 - DNA, 80 bp, synthetic construct
  source 1..80: mol_type = other DNA
cgggaacgtattgatcccggagatgcaatcgtccctacttcaacagcatatggagctgttagagtcttctgtaatccccc

SEQ ID NO: 34692 - DNA, 80 bp, synthetic construct
  source 1..80: mol_type = other DNA
ctggcaattcttatactgacaatcttcttaataacatgttgtagaagggctaataaaacaaaatcaatacaacaaggtct

SEQ ID NO: 34693 - DNA, 80 bp, synthetic construct
  source 1..80: mol_type = other DNA
gtgaaaccaggctgtgagggcaggtcatctcctctatgccttgcgttcaaaacattgcatctcttagagatcagggggaa

SEQ ID NO: 34694 - DNA, 80 bp, synthetic construct
  source 1..80: mol_type = other DNA
tctcttgattcgacagtccttcatggactccatgccacggggtagattcaatagtcaagaaactgtcattaatcatctca

SEQ ID NO: 34695 - DNA, 80 bp, synthetic construct
  source 1..80: mol_type = other DNA
attaatcggacacatttatgcagattctgacaatgtatgatatcttcagatggtgtcagtgaccaatggtgccctcatcc

SEQ ID NO: 34696 - DNA, 80 bp, synthetic construct
  source 1..80: mol_type = other DNA
cccagggactgataccaaatgttgtggacggtccaattgatatctcagatgattctgtgcttgggctaaggtagaaccca

SEQ ID NO: 34697 - DNA, 80 bp, synthetic construct
  source 1..80: mol_type = other DNA
tcgcaagttcccttacaatagactaaacaggggttgactgagagaagtgattcgcctcctatgaagggcacaagcaatag

SEQ ID NO: 34698 - DNA, 80 bp, synthetic construct
  source 1..80: mol_type = other DNA
atcacaaccatcttgcatcccaataaagtgtgtacaactctaaagggatggaccatccaatcctttcagttaagaaaaaa

SEQ ID NO: 34699 - DNA, 80 bp, synthetic construct
  source 1..80: mol_type = other DNA
tgactctgacagacaattgttctagatcttacaaagtattgaaggactacttcaggaaggtcgatataggatctctcaag

SEQ ID NO: 34700 - DNA, 80 bp, synthetic construct
  source 1..80: mol_type = other DNA
tataactgacctggctcagttttattccaagtcttcccctatagaaaaactgttaaactgcacactaggaaatagaggga

SEQ ID NO: 34701 - DNA, 80 bp, synthetic construct
  source 1..80: mol_type = other DNA
tagcactgtggagggatctaacctcagtggatattggaaaggacttggtcaagtttaaggaccaaatatggggattgctg

SEQ ID NO: 34702 - DNA, 80 bp, synthetic construct
  source 1..80: mol_type = other DNA
attgtgaccaaggattttgtgtactcccagagttctaactgtctctttgatagaaattatacgcttatgctgaaagacct

SEQ ID NO: 34703 - DNA, 80 bp, synthetic construct
  source 1..80: mol_type = other DNA
agaatcctcaggtggggatttgataaatattccaagtggtatcttgatttgagacttcttgcgagggaccaccccctgat

SEQ ID NO: 34704 - DNA, 80 bp, synthetic construct
  source 1..80: mol_type = other DNA
ctggaacggccaagatggtgggctagaaggtttgcgacagaaaggctggagtctagttagcttgttaatgatagatcgtg

SEQ ID NO: 34705 - DNA, 80 bp, synthetic construct
  source 1..80: mol_type = other DNA
aatctctaagtgatagggagaagtcacgacatatagggtcggcccaagggctcttgtattcaattctggttgcaattcat

SEQ ID NO: 34706 - DNA, 80 bp, synthetic construct
  source 1..80: mol_type = other DNA
ctggacgacctcaatgttttcccatccctctgtcttgtagttggggacggatcaggtgggatttcaagggcagtcctcaa

SEQ ID NO: 34707 - DNA, 80 bp, synthetic construct
  source 1..80: mol_type = other DNA
tagcctgtaactctagcctgagcttgtcctctcactggatcaggttgatttacaagatagtaaaaactaccagactcgtt

SEQ ID NO: 34708 - DNA, 80 bp, synthetic construct
  source 1..80: mol_type = other DNA
atctagatcatctctattggactacagttgcttgtaaacctgacactcctggaagcctgcacaagctaagactcttgtgt

SEQ ID NO: 34709 - DNA, 80 bp, synthetic construct
  source 1..80: mol_type = other DNA
gatgtgtcttgaaaaaaacaagatcttaagtctgagcctctggttgtttgattgtttttcccatctttattgtttttttg

SEQ ID NO: 34710 - DNA, 80 bp, synthetic construct
  source 1..80: mol_type = other DNA
cacaatgccggaagtctatagattgtgtatgtcaatcatgaaaaaaactaacacccctcctttcgaaccatcccaaatat

SEQ ID NO: 34711 - DNA, 80 bp, synthetic construct
  source 1..80: mol_type = other DNA
ctctccaggaaggtcttcagaggacaaatcaacccaaactactggcagagtgcccaagaaggagacaacatccactccct

SEQ ID NO: 34712 - DNA, 80 bp, synthetic construct
  source 1..80: mol_type = other DNA
caaggactgataccaaaggttgtggactggccaaggagtgtgtcggatgtctccgtgcttgggcatggacagaggtcata

SEQ ID NO: 34713 - DNA, 80 bp, synthetic construct
  source 1..80: mol_type = other DNA
cgctttgtctggttttcaaaacttatggaaccatgcttgtaaacccggattacagggcggttcaacacctgtccagagca

SEQ ID NO: 34714 - DNA, 80 bp, synthetic construct
  source 1..80: mol_type = other DNA
tatccggcatgaatgcagctaagctagacccagatgatgtgtgttcctatttggcagctgccatgcaattctttgaagga

SEQ ID NO: 34715 - DNA, 80 bp, synthetic construct
  source 1..80: mol_type = other DNA
tctgctcccccagatgatgatgatctgtggctgccccctccggaatatgtcccattgagggagcacaccgggaagaagaa

SEQ ID NO: 34716 - DNA, 80 bp, synthetic construct
  source 1..80: mol_type = other DNA
acatgtccggaggactggactagctatgaaatcttgattgcaaggaagggagataagatcaccccaagctctcttgtaga

SEQ ID NO: 34717 - DNA, 80 bp, synthetic construct
  source 1..80: mol_type = other DNA
atctatcatgaccactaaatcagtaagtttcagacgtctcagccacttgagaaaacttgttccaggctttgggaaagcat

SEQ ID NO: 34718 - DNA, 80 bp, synthetic construct
  source 1..80: mol_type = other DNA
caaaagggtgtttgagagtcggagggaagtgtcatcctcatgtggatggggtgttcttcaacggcataatactgggtccg

SEQ ID NO: 34719 - DNA, 80 bp, synthetic construct
  source 1..80: mol_type = other DNA
ggtgttcttcaacggcataatactgggtccggacgggcatgtcctgatcccagagatgcagtcgtctcttctccaacagc

SEQ ID NO: 34720 - DNA, 80 bp, synthetic construct
  source 1..80: mol_type = other DNA
gctctttctaagcctcctgtcaaccccagggagtttttgaaatctatagaccttggaggactgccagacgaagatttgat

SEQ ID NO: 34721 - DNA, 80 bp, synthetic construct
  source 1..80: mol_type = other DNA
taggggggagatattttctatcccacaaaagatacccgctgcatacccgaccacaatgaaagagggcaacagatccatcc

SEQ ID NO: 34722 - DNA, 80 bp, synthetic construct
  source 1..80: mol_type = other DNA
tacccgaccacaatgaaagagggcaacagatccatcctgtgttacctccaacatgtgctgcgctatgaacaggaggtcat

SEQ ID NO: 34723 - DNA, 80 bp, synthetic construct
  source 1..80: mol_type = other DNA
tgtgttacctccaacatgtgctgcgctatgaacaggaggtcataactgcatctcctgagaatgattggttgtggatcttc

SEQ ID NO: 34724 - DNA, 80 bp, synthetic construct
  source 1..80: mol_type = other DNA
atactttggagtcagatgacgacattcagcgattacttaaagactctttgcgaaggaccaagtgggtggatcaagaggtg

SEQ ID NO: 34725 - DNA, 80 bp, synthetic construct
  source 1..80: mol_type = other DNA
cgccatgcagctagaaccatgacaggagactacagccccaacaagaaggtgccccgcaaggcgggatgttcagaatgggt

SEQ ID NO: 34726 - DNA, 80 bp, synthetic construct
  source 1..80: mol_type = other DNA
ggcagcatcaaggacctatctagagagatagaaaaacaccttcacgggtacaacagatggatcaccctagaagatgtcag

SEQ ID NO: 34727 - DNA, 80 bp, synthetic construct
  source 1..80: mol_type = other DNA
atctagatcatctctactagactacagttgcttgtaaaccggctactcccggaggcctgtacgtgataaggctcttatat

SEQ ID NO: 34728 - DNA, 80 bp, synthetic construct
  source 1..80: mol_type = other DNA
gatatatcttgaaaaaaacaagatcttgaatccgagcctctgattgcttgattgttttttccgtctttattgtttttttg

SEQ ID NO: 34729 - DNA, 80 bp, synthetic construct
  source 1..80: mol_type = other DNA
ccgacgtagcactagcagatgatggaactgtcaactccgacgacgaagactacttctccggtgaaaccaggagtccagaa

SEQ ID NO: 34730 - DNA, 80 bp, synthetic construct
  source 1..80: mol_type = other DNA
actcataagaagttgaacaatagggtgccggaggtctatggattgtgtatatccatcatgaaaaaaactaacacccctcc

SEQ ID NO: 34731 - DNA, 80 bp, synthetic construct
  source 1..80: mol_type = other DNA
ttttgaaccaccccgaccatgagcaagatctttgtcaaccccagtgcaatcagagccggtctggccgatcttgagatggc

SEQ ID NO: 34732 - DNA, 80 bp, synthetic construct
  source 1..80: mol_type = other DNA
ttcacttggacgatggaaaatcgtccaacctcggtgagatggccgagatgggagaaagcaagtgtcgagaggactttcag

SEQ ID NO: 34733 - DNA, 80 bp, synthetic construct
  source 1..80: mol_type = other DNA
cctgctaaccaagcttctcagctcagtccctctagacaataaggtctgagatgtcctagagtcgacatgaaaaaaacagg

SEQ ID NO: 34734 - DNA, 80 bp, synthetic construct
  source 1..80: mol_type = other DNA
acatgctatggtgccattaaaccgctgcatttatcaatgtcaagttaattacctttacattttgagcctcttgggtgtga

SEQ ID NO: 34735 - DNA, 80 bp, synthetic construct
  source 1..80: mol_type = other DNA
aaaaaactattaacatccctcaacggacttaaagaaaaaatggtctctcaggctcttttgtttgtatctcctttgatttt

SEQ ID NO: 34736 - DNA, 80 bp, synthetic construct
  source 1..80: mol_type = other DNA
atcactgtgttccggggaattccccatttacacgataccagacaaactgggtccttggagccctattgacatacatcatc

SEQ ID NO: 34737 - DNA, 80 bp, synthetic construct
  source 1..80: mol_type = other DNA
cgaaagggtgtttaagagtcgggaggaggtgtcatcctcatgtgaacggtgtgttcttcaatggtataatattgggacct

SEQ ID NO: 34738 - DNA, 80 bp, synthetic construct
  source 1..80: mol_type = other DNA
cggtgtgttcttcaatggtataatattgggacctgacggccatgttctaatcccagagatgcaatcatccctcctccagc

SEQ ID NO: 34739 - DNA, 80 bp, synthetic construct
  source 1..80: mol_type = other DNA
ctgatgtgcacaaacaggtctccggtgtcgacctgggtctcccgaactggggcaagtatgcattagtgagtgcgggagcc

SEQ ID NO: 34740 - DNA, 80 bp, synthetic construct
  source 1..80: mol_type = other DNA
ctgactgccttgatgttgatagctttcctaatgacatgttgcagaggagtcaatctaccaaaatctacgcaacgcagtcc

SEQ ID NO: 34741 - DNA, 80 bp, synthetic construct
  source 1..80: mol_type = other DNA
tggagggacaaggagaaaggtgtctgtcgcttctcaaagcgggaaggtcatagcttcttgggaggcatataaaagtggat

SEQ ID NO: 34742 - DNA, 80 bp, synthetic construct
  source 1..80: mol_type = other DNA
gtgaaaccaaaatgtgagagttggtcatcctgtcgactcctcaagtcctgaagatcacctcccactggagttggggggaa

SEQ ID NO: 34743 - DNA, 80 bp, synthetic construct
  source 1..80: mol_type = other DNA
tctctgggttcagtagtcctccttgaactccatgcaacagggtagatttaagagtcatgagactttcattaatcatctca

SEQ ID NO: 34744 - DNA, 80 bp, synthetic construct
  source 1..80: mol_type = other DNA
tgatcggacacggccgtggagattctcataatatgggaaatcctctagcagtttcagtgactaacggtgctttcattctc

SEQ ID NO: 34745 - DNA, 80 bp, synthetic construct
  source 1..80: mol_type = other DNA
caggagctaataccaaaggttggggacagtccagggggtgtttagaatgactccgcacttgggcacagaaagaggtcata

SEQ ID NO: 34746 - DNA, 80 bp, synthetic construct
  source 1..80: mol_type = other DNA
gcatatctgctgatagcagactcaacgtgagttgattgagaaaagcaacttgcctcccatgaaggacatgagcaatagct

SEQ ID NO: 34747 - DNA, 80 bp, synthetic construct
  source 1..80: mol_type = other DNA
ttcccttcagttacaggatttataacccaaatgacctcatctttttcgtccgagctgtacctcagattctccaagcgagg

SEQ ID NO: 34748 - DNA, 80 bp, synthetic construct
  source 1..80: mol_type = other DNA
aaaatttttccgagatgctgagtacttgacttcttctacccttcgagagatgagccttgttttattcaactgtagcagcc

SEQ ID NO: 34749 - DNA, 80 bp, synthetic construct
  source 1..80: mol_type = other DNA
aattacagagaggaactctgtctaaaatatctattattatagccattatgatagttttctctaatagagtcttcaatgtc

SEQ ID NO: 34750 - DNA, 80 bp, synthetic construct
  source 1..80: mol_type = other DNA
tcggaagcattgaagacctatctggggaagtagcaagacacctccaggggtataacaggtggattacccttgaggacatc

SEQ ID NO: 34751 - DNA, 80 bp, synthetic construct
  source 1..80: mol_type = other DNA
aggtccagatcatctctgctagactacagttgcttatgagctggagatttctgtgaatctgtatatcctaagattctcag

SEQ ID NO: 34752 - DNA, 80 bp, synthetic construct
  source 1..80: mol_type = other DNA
acagtgtaccatgaaaaaaacgaagtctcaagtcagaacttctagctgtttgattactttttccatctttattgtttttt

SEQ ID NO: 34753 - DNA, 80 bp, synthetic construct
  source 1..80: mol_type = other DNA
ctgacgtagcactggcagacgacggaaccgtcaattctgatgacgaggattacttctccggtgagacaaggagccctgag

SEQ ID NO: 34754 - DNA, 80 bp, synthetic construct
  source 1..80: mol_type = other DNA
caagattgaaaataccctataaagagtgtacatctcccatgaaaaaaactaacacccctcctttgaaccatcccaaacat

SEQ ID NO: 34755 - DNA, 80 bp, synthetic construct
  source 1..80: mol_type = other DNA
ttcagctggatgacggaaaaccgtctggcctcagtgagatagctactgcggtagaaagcaagtatagggaggacttccag

SEQ ID NO: 34756 - DNA, 80 bp, synthetic construct
  source 1..80: mol_type = other DNA
cctcgggaaggtcttcagaagacaaatctacccagaccgctgggagagaactcaagaaggaaccaccatcagctcctctc

SEQ ID NO: 34757 - DNA, 80 bp, synthetic construct
  source 1..80: mol_type = other DNA
cagagagaaagcaaaccactgaaagcccgaatggaggctcaaactgcctctggtcctccagctctcgaatggtccgcaac

SEQ ID NO: 34758 - DNA, 80 bp, synthetic construct
  source 1..80: mol_type = other DNA
taacgaagaggatgatctatctgtggaggcagaaatcgcccaccagattgccgagagcttttctaagaaatacaaattcc

SEQ ID NO: 34759 - DNA, 80 bp, synthetic construct
  source 1..80: mol_type = other DNA
cctgctgacagatttttaaacttggttctgttagacaataaagcctgagctgttccggacccgacatgaaaaaaacaggc

SEQ ID NO: 34760 - DNA, 80 bp, synthetic construct
  source 1..80: mol_type = other DNA
ccagtggtaaatgctcaggaataacagtgtcttctacctattgtcccactaaccatgattataccatctggatgcctgaa

SEQ ID NO: 34761 - DNA, 80 bp, synthetic construct
  source 1..80: mol_type = other DNA
aatccgagactagggacctcttgtgacattttcaccaatagcagagggaagagggcatccaaaggaagcaaaacctgtgg

SEQ ID NO: 34762 - DNA, 80 bp, synthetic construct
  source 1..80: mol_type = other DNA
gtgcttaagagttgggtggagatgtcacccccatgttaacggggtgtttttcaacggtatcatcctgggtcctgatggac

SEQ ID NO: 34763 - DNA, 80 bp, synthetic construct
  source 1..80: mol_type = other DNA
tttcaacggtatcatcctgggtcctgatggacatgttctaatcccagaaatgcagtcgtctctccttcaacagcatatgg

SEQ ID NO: 34764 - DNA, 80 bp, synthetic construct
  source 1..80: mol_type = other DNA
cggatgtgcacaagcaggtctcgggagttgatctcggtctcccaagctgggggaagtatgtgctgatgagtgtaggcact

SEQ ID NO: 34765 - DNA, 80 bp, synthetic construct
  source 1..80: mol_type = other DNA
ctgattgcactgatgttgatgattctcttgacgacgtgttgcagaaaggcgaatggagcagaatcaatacaacaccgtct

SEQ ID NO: 34766 - DNA, 80 bp, synthetic construct
  source 1..80: mol_type = other DNA
tggagagacgggaaggaaagtgtcagtcacctcccagaacgggagggtcatatcttcctgggagtcgtataaaagcggtg

SEQ ID NO: 34767 - DNA, 80 bp, synthetic construct
  source 1..80: mol_type = other DNA
gtgagaccaagctgtaaagaaagaccatctcctctagatctcacattccaaaaatcacatccccttgtgatgaaggggac

SEQ ID NO: 34768 - DNA, 80 bp, synthetic construct
  source 1..80: mol_type = other DNA
atttctggattcaacagtcctctctggactccttgcaacagggtagattcaagagtcacaagatttccattaatcatctc

SEQ ID NO: 34769 - DNA, 80 bp, synthetic construct
  source 1..80: mol_type = other DNA
caatcgatcagatatggtgatgtagattctcataatacaagagatcttctagcagttccagtgaccaacggtgcttccac

SEQ ID NO: 34770 - DNA, 80 bp, synthetic construct
  source 1..80: mol_type = other DNA
cctccaagaactgatgccaagggcggtggacaggtcaagagacatttcagacaatgttgtgtttgaacacagacagagat

SEQ ID NO: 34771 - DNA, 80 bp, synthetic construct
  source 1..80: mol_type = other DNA
tgtagtgggtatccagatactagactgggtaagagttgatcaagaaaggaaacttgcctcctatgaaggacagaagcaat

SEQ ID NO: 34772 - DNA, 80 bp, synthetic construct
  source 1..80: mol_type = other DNA
tgtggaacagaaggacaattagtaacacttctcatcttcaggacctcaccatgttgatcgattcaggggaagtttatgat

SEQ ID NO: 34773 - DNA, 80 bp, synthetic construct
  source 1..80: mol_type = other DNA
gacccggtggatccaattgagtcagaggccgagcctaggggagctcccactgtccccaacatcctgaggaactctgacta

SEQ ID NO: 34774 - DNA, 80 bp, synthetic construct
  source 1..80: mol_type = other DNA
tgaccctaacagacaactgctctaggtcttacaaggtctttaaggattacttcaagaagtttgatttgggatctgttaaa

SEQ ID NO: 34775 - DNA, 80 bp, synthetic construct
  source 1..80: mol_type = other DNA
gtaggtgggactgcggcccagtcgatgatctctctctggttatatggtgcccactctgaatcaaacaggagcaggaggtg

SEQ ID NO: 34776 - DNA, 80 bp, synthetic construct
  source 1..80: mol_type = other DNA
cataactgacttggcccatttctattccaagtcttcacccatagagaagttgttaaattgcacacttgggaatagaggac

SEQ ID NO: 34777 - DNA, 80 bp, synthetic construct
  source 1..80: mol_type = other DNA
aggatccttaggtggggatttgacaagtactccaagtggtacattgactcacgatttcttcctaaagatcatcccttgac

SEQ ID NO: 34778 - DNA, 80 bp, synthetic construct
  source 1..80: mol_type = other DNA
tccgtacatcaagactcagacatggccacccaaacatatagtagatttagtaggggacacatggcacaagctcccaatca

SEQ ID NO: 34779 - DNA, 80 bp, synthetic construct
  source 1..80: mol_type = other DNA
atctcgtgcacttgtggaaccacaggaggagaaaatcccagagtgtcagtatctgtgctcccatcctttgatcaatcatt

SEQ ID NO: 34780 - DNA, 80 bp, synthetic construct
  source 1..80: mol_type = other DNA
tttctcacgaggccccctgaaagggtacttgggctcatcaacttccatgtctactcagctgtttcatgcgtgggaaaagg

SEQ ID NO: 34781 - DNA, 80 bp, synthetic construct
  source 1..80: mol_type = other DNA
gatgtaacaggtgtgtaaggcccatcgacgacatcgtactggagacctctcaagtattcgagtttccggacgtgtcaaaa

SEQ ID NO: 34782 - DNA, 80 bp, synthetic construct
  source 1..80: mol_type = other DNA
aggatatctaggatggtttctggggctgtacctcattttcagaaacttccggatatccgtctaaaaccaggagattttga

SEQ ID NO: 34783 - DNA, 80 bp, synthetic construct
  source 1..80: mol_type = other DNA
aatctctaagtggcagggagaaatctcgtcacataggttcggctcaagggctcttgtattcgattttggttgcaatccat

SEQ ID NO: 34784 - DNA, 80 bp, synthetic construct
  source 1..80: mol_type = other DNA
cctgctgaccaaacttttaaactcagccctgatggacaactcaatccgaactgttctaaattcaacatgaaaaaaacagg

SEQ ID NO: 34785 - DNA, 80 bp, synthetic construct
  source 1..80: mol_type = other DNA
gatcaagcgtacagatatagaaggaaactgggctctaacaggaggtatggaattgacgagagaccccacggtttctgaac

SEQ ID NO: 34786 - DNA, 80 bp, synthetic construct
  source 1..80: mol_type = other DNA
gagaaacagggagaaaagtgtcggtcacttcccaaaacgggaaggtaatatcttcatgggaatcatataagaacggaggc

SEQ ID NO: 34787 - DNA, 80 bp, synthetic construct
  source 1..80: mol_type = other DNA
caaagctatacgatcaagtccatattaaaaaagtgatcgataagtcctaccagcagtgtttagcgagcgacctagccagg

SEQ ID NO: 34788 - DNA, 80 bp, synthetic construct
  source 1..80: mol_type = other DNA
gagggcacggagaagacaccttggaatcggacgacgacattcagaggctactgaaagactctctgcgcagaacgaggtgg

SEQ ID NO: 34789 - DNA, 80 bp, synthetic construct
  source 1..80: mol_type = other DNA
gtggatcaagaagtgcgccatgcagccagaaccatgatcgggggttacagccctaacaaaaaattgtcacgcaaggcagg

SEQ ID NO: 34790 - DNA, 80 bp, synthetic construct
  source 1..80: mol_type = other DNA
atctagatcttctctactggactacggctgcttataaactgaacccttttagaggtttgtaggtactaagacccttagac

SEQ ID NO: 34791 - DNA, 80 bp, synthetic construct
  source 1..80: mol_type = other DNA
gatgcacctagaaaaaaacaagactctgaatcagaacctctgggtgtttgattattttttttatctttgttgtttatttg

SEQ ID NO: 34792 - DNA, 80 bp, synthetic construct
  source 1..80: mol_type = other DNA
caagattgcgaaaaacccatgtattgtatacattccacatgaaaaaaactaacacccctcctttcgaaccatctcagaca

SEQ ID NO: 34793 - DNA, 80 bp, synthetic construct
  source 1..80: mol_type = other DNA
caacgggaaagtcaatcttcgaaagcccaaagggtggctcaaactgcctctggtccaccggctctcgaatggtctgcgac

SEQ ID NO: 34794 - DNA, 80 bp, synthetic construct
  source 1..80: mol_type = other DNA
cctgctgaccaattttacccctcaggcccatcagacagttaagcctgagttattctgaatttgacatgaaaaaaacaggc

SEQ ID NO: 34795 - DNA, 80 bp, synthetic construct
  source 1..80: mol_type = other DNA
atcggctcctccagatgatgatgacttatggctgccccctcctgaatatgttcctttgaaagaactcacgggcaagaaaa

SEQ ID NO: 34796 - DNA, 80 bp, synthetic construct
  source 1..80: mol_type = other DNA
tccctgggtttggaaaggcgtataccatattcaacaaaaccttgatggaagctgatgctcactataaatcaatccagact

SEQ ID NO: 34797 - DNA, 80 bp, synthetic construct
  source 1..80: mol_type = other DNA
gagactaagctgtgaggacaagtcatctcttctacacttcgagtccgaagacctcatcccctcggggtaaggggaacatc

SEQ ID NO: 34798 - DNA, 80 bp, synthetic construct
  source 1..80: mol_type = other DNA
cgatcagacatggtcacgcagattcttataataagagaaatcttctagcagttccagtgactaatggtgcttttaccctc

SEQ ID NO: 34799 - DNA, 80 bp, synthetic construct
  source 1..80: mol_type = other DNA
caagaactgataccaaaggtggtggacacgccgaaagccatctcaaatgatgttgtgcttgaacacggatagagattgta

SEQ ID NO: 34800 - DNA, 80 bp, synthetic construct
  source 1..80: mol_type = other DNA
gtgggcccccagatactgagctgggtaatagtggattaagaaaggagacattcatcccatgaaggacataagcaatagat

SEQ ID NO: 34801 - DNA, 80 bp, synthetic construct
  source 1..80: mol_type = other DNA
catatgtcgtaaacagtttagtccagagggcagagaagtttagacctcttattcattctctaggggatttccctgtgttc

SEQ ID NO: 34802 - DNA, 80 bp, synthetic construct
  source 1..80: mol_type = other DNA
ataaaagacaaggtgagtcaacttgaagggacgtttggtcccagtgcaaaaaggttttttagagctctggatcaatttga

SEQ ID NO: 34803 - DNA, 80 bp, synthetic construct
  source 1..80: mol_type = other DNA
cactaaaggagtctataaactggttcatcacaagaaactcgaacctagctcagactttaatcaaaaacattatgtctctg

SEQ ID NO: 34804 - DNA, 80 bp, synthetic construct
  source 1..80: mol_type = other DNA
ctcgggatataatgatgggaccatcttccctgtcaacatatacagcaaggtatcacctagagactatttaagagggcttg

SEQ ID NO: 34805 - DNA, 80 bp, synthetic construct
  source 1..80: mol_type = other DNA
gaccagttatggaatattgattgcacgaaagggagacaagatcacccctgattcccttgttgagataaaacgtactgatg

SEQ ID NO: 34806 - DNA, 80 bp, synthetic construct
  source 1..80: mol_type = other DNA
ctcggagtctagagaggcaattctcttgtccaagacccatagggacaactttatactcttcctgaagtctgtggaacccc

SEQ ID NO: 34807 - DNA, 80 bp, synthetic construct
  source 1..80: mol_type = other DNA
tgttcccccgattcctcagtgagcttttcagctcgtctttcttggggatccctgagtcaatcattggattgatacaaaac

SEQ ID NO: 34808 - DNA, 80 bp, synthetic construct
  source 1..80: mol_type = other DNA
cctcccggtcatctggaatctttttgtacaattttgaacagttgaagatgaaccttgacgacatagtcaaggagtcaaag

SEQ ID NO: 34809 - DNA, 80 bp, synthetic construct
  source 1..80: mol_type = other DNA
aatgtgccgggtataacccatttggctcatgatggatctaagctccctctcagatgtatactggggtgggttgctctggc

SEQ ID NO: 34810 - DNA, 80 bp, synthetic construct
  source 1..80: mol_type = other DNA
cctgatcgtactagtgctgatgattttcttgatgacgtgttgtaaaaggcctaatagagcggagctaatacaccacagtc

SEQ ID NO: 34811 - DNA, 80 bp, synthetic construct
  source 1..80: mol_type = other DNA
cactgtcatcttgcatctcaataatgtgtgcacaattattaatgcttagatcattcacgattctcattcgagaaaaaaac

SEQ ID NO: 34812 - DNA, 80 bp, synthetic construct
  source 1..80: mol_type = other DNA
acaccttagaatcagatgatgacattcaaaggctgttgaaagattctctgcgtaggacgaggtgggtggatcaagaggtg

SEQ ID NO: 34813 - DNA, 80 bp, synthetic construct
  source 1..80: mol_type = other DNA
cgtcacgcagctagaactatgactgggaattacagccccaacaagaagatgtcccgcaaggcaggatgctctgagtgggt

SEQ ID NO: 34814 - DNA, 80 bp, synthetic construct
  source 1..80: mol_type = other DNA
cagatctaaggaatttgaccacatggaagtacttccaatcagtccaaaataaggtgaacatgtcttatgacctcatcatt

SEQ ID NO: 34815 - DNA, 80 bp, synthetic construct
  source 1..80: mol_type = other DNA
tgtgatgcagaagtcacagacattgcctcaattaatcggataactctcttgatgtctgactttgcattatccatagatgg

SEQ ID NO: 34816 - DNA, 80 bp, synthetic construct
  source 1..80: mol_type = other DNA
agaccactaggcttgtaggaagcatcgaagacttgtctagagaggtggagagacatcttcacgggtataataggtggatc

SEQ ID NO: 34817 - DNA, 80 bp, synthetic construct
  source 1..80: mol_type = other DNA
acccttgctgacatcagatctagatcatctctactagattacagctgcctataaaatgaacattttcgaagctagcagat

SEQ ID NO: 34818 - DNA, 80 bp, synthetic construct
  source 1..80: mol_type = other DNA
gccgaagctctcagaccaggtaccctgaaaaaaacgagatcccaaatcagaacctctgattgtttgatcattttttttgt

SEQ ID NO: 34819 - DNA, 80 bp, synthetic construct
  source 1..80: mol_type = other DNA
ctgatgtggcattggcagacgacggaactgttgactctgacgatgaagactacttttccggtgagaccaggagtcctgaa

SEQ ID NO: 34820 - DNA, 80 bp, synthetic construct
  source 1..80: mol_type = other DNA
tcatcaagcacgtccaaactcctttgccgagtttttaagcaagacgtactctagtgactcgtgatgagccgaacaacaag

SEQ ID NO: 34821 - DNA, 80 bp, synthetic construct
  source 1..80: mol_type = other DNA
atcgaacagaacctacacattgtgtgtattccacacgaaaaaaactaacacccctccttctgaaccatctcaaacatgag

SEQ ID NO: 34822 - DNA, 80 bp, synthetic construct
  source 1..80: mol_type = other DNA
ttcaactggaagacggaaagccatcagaccccagcgaggtggcagcggtgggaggagacaagtacaaggaggacttccag

SEQ ID NO: 34823 - DNA, 80 bp, synthetic construct
  source 1..80: mol_type = other DNA
atggatgaaggagaagatccagccctcctgttccagtcgtacctggacaatgttggggttcaaatggtcagacaaatgag

SEQ ID NO: 34824 - DNA, 80 bp, synthetic construct
  source 1..80: mol_type = other DNA
cattgggaaagtcctcagaggacaaatccacccaaactgctgggggagggttcaagaaagaaaccccatcggcatcttcc

SEQ ID NO: 34825 - DNA, 80 bp, synthetic construct
  source 1..80: mol_type = other DNA
cagagaaagagccagtccttgaaagcccggacggaggttcatccgacctctggtcctccagctcttgaatggtctgctac

SEQ ID NO: 34826 - DNA, 80 bp, synthetic construct
  source 1..80: mol_type = other DNA
caacgaagaagacgacctatcagtggaggcggagatcgctcaccagattgctgaaagcttttccaagaaatacaaattcc

SEQ ID NO: 34827 - DNA, 80 bp, synthetic construct
  source 1..80: mol_type = other DNA
cctgctgacagtttttgaactctggcatgctagacaatggagcttaacatgttctgggttcgacatgaaaaaaacagaca

SEQ ID NO: 34828 - DNA, 80 bp, synthetic construct
  source 1..80: mol_type = other DNA
aatggagaggtcagggtgtgcagtccgactggctattcgttcaggatcttacggcatattctaagatcatttgatgagat

SEQ ID NO: 34829 - DNA, 80 bp, synthetic construct
  source 1..80: mol_type = other DNA
cacagacttaccacttgtttacctctagaggagggagcacacgggcttaactccagcctttgggagcaatcgaacaaaat

SEQ ID NO: 34830 - DNA, 80 bp, synthetic construct
  source 1..80: mol_type = other DNA
acatgccctgaagactggatcagctatgggatcttgatcgcgaagaaaggggacaagattacccccgattccctcgtgga

SEQ ID NO: 34831 - DNA, 80 bp, synthetic construct
  source 1..80: mol_type = other DNA
atatgttatggtgccattaaacagctgcattttatcaaaatcagattaattacctttacattttaaacctcgcggatgtg

SEQ ID NO: 34832 - DNA, 80 bp, synthetic construct
  source 1..80: mol_type = other DNA
ttccgttgtgtcttgggaagtttcctatttacacgataccagacaaacttggcccctggagccctattgatatacatcac

SEQ ID NO: 34833 - DNA, 80 bp, synthetic construct
  source 1..80: mol_type = other DNA
ctcagctgtccgaataatatggtcgtggaggacgaaggatgtaccaacctgtcagggttctcatacatggaactcaaagt

SEQ ID NO: 34834 - DNA, 80 bp, synthetic construct
  source 1..80: mol_type = other DNA
ttggctatgtcactaccacgtttaagagaaagcactttcgtccgatgccggatgcatgcagagatgcgcataactggaag

SEQ ID NO: 34835 - DNA, 80 bp, synthetic construct
  source 1..80: mol_type = other DNA
ctggtgggaaatgctcaggaataacagtgtcctctacttactgttctaccaaccatgattacaccatctggatgcctgaa

SEQ ID NO: 34836 - DNA, 80 bp, synthetic construct
  source 1..80: mol_type = other DNA
aatcctagattggggacttcttgtgatattttcacctatagtaaagggaagagagcatccaaagagagcaagacatgtgg

SEQ ID NO: 34837 - DNA, 80 bp, synthetic construct
  source 1..80: mol_type = other DNA
tataagacgtactgacgtcgaagggaattgggccctgacgggaggtatggagttgacaagagaccccactgtttctgagc

SEQ ID NO: 34838 - DNA, 80 bp, synthetic construct
  source 1..80: mol_type = other DNA
cagatgtccacaagcaggtctcaggggttgatctcggtctcccaagctgggggaaatatgtactgatgagcgcaggcgtc

SEQ ID NO: 34839 - DNA, 80 bp, synthetic construct
  source 1..80: mol_type = other DNA
ttgatcgtactagtgttgatgattttcttgatgatgtgttgtaaaaagcctaatagagcggagccaattcatcacagtcc

SEQ ID NO: 34840 - DNA, 80 bp, synthetic construct
  source 1..80: mol_type = other DNA
tagggagacggaaaggaaaatgtcagtaacttctcaaggcgggagagtcatatcttcatgggagtcatataaaaacggag

SEQ ID NO: 34841 - DNA, 80 bp, synthetic construct
  source 1..80: mol_type = other DNA
gagaccaagctgtaagagtaggccatctcctctatatttcgaatcccaaagttcacatcctcttgaggttaaggggacat

SEQ ID NO: 34842 - DNA, 80 bp, synthetic construct
  source 1..80: mol_type = other DNA
ctctggattcaacagtcttctttagactcctcgcaacagggtaagtccaagagtcacgagatttccattaatcatctcaa

SEQ ID NO: 34843 - DNA, 80 bp, synthetic construct
  source 1..80: mol_type = other DNA
ccgatcagacatggtcatgtagattcttgtaatgcaagagatcctccagcagttccagtgaccaacggtgctttcaccct

SEQ ID NO: 34844 - DNA, 80 bp, synthetic construct
  source 1..80: mol_type = other DNA
ccaagaacagataccaaaggtggtgaacaaaccggcggatatctcagataacgttgtgtttggacacagctagagattgt

SEQ ID NO: 34845 - DNA, 80 bp, synthetic construct
  source 1..80: mol_type = other DNA
agtcagtccccggacactacactaggtaagagttgatcaggaaaggagacctgccttatagggagaacataagcaataga

SEQ ID NO: 34846 - DNA, 80 bp, synthetic construct
  source 1..80: mol_type = other DNA
tcactgtcatcttgcatctcagtaatgtgtgcacaactattaaagcctggatcattcacgattctcagtcaagaaaaaaa

SEQ ID NO: 34847 - DNA, 80 bp, synthetic construct
  source 1..80: mol_type = other DNA
ctataaaactgaaagacaactaacaacacttctcatcttgagactctcaccatgatgattgacccaggagaggtttatga

SEQ ID NO: 34848 - DNA, 80 bp, synthetic construct
  source 1..80: mol_type = other DNA
tgacccaattgatccgattgaatcagaagctgagcctagagggactcccacagtcccaaacatcttgaggaactctgatt

SEQ ID NO: 34849 - DNA, 80 bp, synthetic construct
  source 1..80: mol_type = other DNA
taaccctgacagacaactgttctaggtcttacaaagtcctgaaggattacttcaagaagttagacttggattccctcaag

SEQ ID NO: 34850 - DNA, 80 bp, synthetic construct
  source 1..80: mol_type = other DNA
gtgggtggaactgcagcccaatcaatgatctccctctggttatatggtgctcactctgagtcaaacaggagccggaagtg

SEQ ID NO: 34851 - DNA, 80 bp, synthetic construct
  source 1..80: mol_type = other DNA
tatgaccgacttggcccatttctattcaaagtcttcccccatagagaaattgttaaactgcacacttggaaatagaggac

SEQ ID NO: 34852 - DNA, 80 bp, synthetic construct
  source 1..80: mol_type = other DNA
tgaaaattcccccagaaggggtgttaagttgtcttgaaagagtcgactatgacaaggcgtttggaaggtatctcgccaat

SEQ ID NO: 34853 - DNA, 80 bp, synthetic construct
  source 1..80: mol_type = other DNA
acatattcctcttatctgttcttccacgtgattaccttgtacatgaatgccctagattgggatgaagaaaagaccatctt

SEQ ID NO: 34854 - DNA, 80 bp, synthetic construct
  source 1..80: mol_type = other DNA
cgagaataatctatttagacccctccctagggggagtgtctgggatgtcactggggagatttcatatacgccagttctca

SEQ ID NO: 34855 - DNA, 80 bp, synthetic construct
  source 1..80: mol_type = other DNA
gatcctgtttccgagggattgtccttctggagagagatctggctaagctctcaagaggcttggattcatgccctgtgtca

SEQ ID NO: 34856 - DNA, 80 bp, synthetic construct
  source 1..80: mol_type = other DNA
atctcttgtacctgcggagcaacaggaggagggaatcctagagtctcagtgtctgtgctcccatcctttgatcagtcatt

SEQ ID NO: 34857 - DNA, 80 bp, synthetic construct
  source 1..80: mol_type = other DNA
tttttcaagaggtccactaaaaggatacttgggctcatctacctcgatgtcaacccagctattccacgcttgggagaaag

SEQ ID NO: 34858 - DNA, 80 bp, synthetic construct
  source 1..80: mol_type = other DNA
gatgtaacaagtgtgtaaggcccatcgatgatataacattagagacctcccagatctttgagtttccggatgtgtctaag

SEQ ID NO: 34859 - DNA, 80 bp, synthetic construct
  source 1..80: mol_type = other DNA
agaatatcccggatggtctctggagctgtgcctcacttccagaagcttcctgatatccatctgagaccaggggatttcga

SEQ ID NO: 34860 - DNA, 80 bp, synthetic construct
  source 1..80: mol_type = other DNA
atctctgagcggcagagaaaaatctcgtcacataggttcagctcaagggctcctgtattcaatcttggttgcaatccatg

SEQ ID NO: 34861 - DNA, 80 bp, synthetic construct
  source 1..80: mol_type = other DNA
tcttttgaggctggataatcacccgtctttgtacataatgctcagagagccatctctgagaggagagatattctctatac

SEQ ID NO: 34862 - DNA, 80 bp, synthetic construct
  source 1..80: mol_type = other DNA
tagcctgtaactccagcctaagtctgtcgtctcactggatcagggtgatgtacaagatagtaaagaccaccaggcttgta

SEQ ID NO: 34863 - DNA, 80 bp, synthetic construct
  source 1..80: mol_type = other DNA
ggaagcatcgaggacttatctggagaggtggagagacatcttcacgggtataataggtggatcacccttgcggacatcag

SEQ ID NO: 34864 - DNA, 80 bp, synthetic construct
  source 1..80: mol_type = other DNA
atctagatcatctctactagattacagctgcctatgaaatgaacatttttgaggctcttggaagccgaagctctcaaacc

SEQ ID NO: 34865 - DNA, 80 bp, synthetic construct
  source 1..80: mol_type = other DNA
caagattgaacagaacctacacatcgtgtgtaccccacatgaaaaaaactaacacccctccttctgaaccatctcaaaca

SEQ ID NO: 34866 - DNA, 80 bp, synthetic construct
  source 1..80: mol_type = other DNA
gcttcggactgtaaagactaccaaggagtctctagttatcatatccccgagtgttgcagatttagacccatatgataaat

SEQ ID NO: 34867 - DNA, 80 bp, synthetic construct
  source 1..80: mol_type = other DNA
gaccttcactcggatgagcttgaacatcgtgttgtggaagagttagtcaagaaacgggaggagtgtttagatgcattaga

SEQ ID NO: 34868 - DNA, 80 bp, synthetic construct
  source 1..80: mol_type = other DNA
ccttaatgcatcccttggcagatccctcggcggttttcaaaactggtgacgaggcggaggattttgttgaggttcacctt

SEQ ID NO: 34869 - DNA, 80 bp, synthetic construct
  source 1..80: mol_type = other DNA
tgctattcagccccatcctaaaaggcagagtctataaaattctaagtgctgagggggacaattttcttctagcaatgtcg

SEQ ID NO: 34870 - DNA, 80 bp, synthetic construct
  source 1..80: mol_type = other DNA
gagaggagagatattctctataccccaaaagattccagctgcttacccaaccacgatgaaagagggcaatagatctattt

SEQ ID NO: 34871 - DNA, 80 bp, synthetic construct
  source 1..80: mol_type = other DNA
caccaggcaagtccctggaagacaaatccacccagactactggccgagagcctaagaaagagacgacactctcttcttct

SEQ ID NO: 34872 - DNA, 80 bp, synthetic construct
  source 1..80: mol_type = other DNA
cctgctgaccaaactttcaaactcagccctgatacacagctaaatccgagctgttttaaattctacatgaaaaaaacagg

SEQ ID NO: 34873 - DNA, 80 bp, synthetic construct
  source 1..80: mol_type = other DNA
caggaactgataccaaaggttggagacaggccaagggatattttggatgaccccgtgtttggacacggaccgaggttgta

SEQ ID NO: 34874 - DNA, 80 bp, synthetic construct
  source 1..80: mol_type = other DNA
tttggaccaagagagcaattggcaacacttctcatcttgagacgtccatcaagatgctcgatccaggagaggtctatgat

SEQ ID NO: 34875 - DNA, 80 bp, synthetic construct
  source 1..80: mol_type = other DNA
tcatgcactgtgccaagaggctgggaacccggatctcggggagagaacactcgagagcttcactcgccttcttgaagatc

SEQ ID NO: 34876 - DNA, 80 bp, synthetic construct
  source 1..80: mol_type = other DNA
atctagatcatctctactggactacagctgcttgtaaaccgggtgctcctgaaagcttgcatatgccaagactcttgtac

SEQ ID NO: 34877 - DNA, 80 bp, synthetic construct
  source 1..80: mol_type = other DNA
cctgctaaccgaacttttagattcggcccttctagattataaaatctgagatgtcccatagtcgacatgaaaaaaacagg

SEQ ID NO: 34878 - DNA, 80 bp, synthetic construct
  source 1..80: mol_type = other DNA
tgtcagcccctccggatgacgatgacctgtggcttccaccccctgaatacgtcccactgaaagaactcacaagcaagaag

SEQ ID NO: 34879 - DNA, 80 bp, synthetic construct
  source 1..80: mol_type = other DNA
gccctgattgccttgatgttgatgatctttctaatgacgtgttgtagaaaattcaatcgaccagaatctacgcagcgcag

SEQ ID NO: 34880 - DNA, 80 bp, synthetic construct
  source 1..80: mol_type = other DNA
tctcggagggacagggaggaaggtgtcaatcacatcccaaggcgggaaggttatatcttcgtgggagtcatataagagtg

SEQ ID NO: 34881 - DNA, 80 bp, synthetic construct
  source 1..80: mol_type = other DNA
caagaactggtaccaaaggttgtggacgggccgagaggtatttcgaatgactccgtgcctggtcacggacaggggtcgta

SEQ ID NO: 34882 - DNA, 80 bp, synthetic construct
  source 1..80: mol_type = other DNA
tggatcgggtgtttggcttgaagagagcgttttctagaacacatgagttttttcagaagtcctggatctactattcagac

SEQ ID NO: 34883 - DNA, 80 bp, synthetic construct
  source 1..80: mol_type = other DNA
ttcccaaatcttccatttcgtgcacttgtagagcaacaggggggggcaatcctagagtttctgtatcagtactcccgtcc

SEQ ID NO: 34884 - DNA, 80 bp, synthetic construct
  source 1..80: mol_type = other DNA
atttcgtgcacttgtagagcaacaggggggggcaatcctagagtttctgtatcagtactcccgtcctttgatcaatcgtt

SEQ ID NO: 34885 - DNA, 80 bp, synthetic construct
  source 1..80: mol_type = other DNA
tttttcacgaggtcccctaaagggatacttgggctcgtccacctctatgtcaacccaactattccatgcatgggagaaag

SEQ ID NO: 34886 - DNA, 80 bp, synthetic construct
  source 1..80: mol_type = other DNA
caacttcacttggatgatggcaaatcgtccaacctcggtgagatgtccaagacgggggaaggcaagtatcgagaggactt

SEQ ID NO: 34887 - DNA, 80 bp, synthetic construct
  source 1..80: mol_type = other DNA
cctgctaaccgaacttttgaacccagtccctctagataataacatccgagatgtcccagagtcgacatgaaaaaaacaag

SEQ ID NO: 34888 - DNA, 80 bp, synthetic construct
  source 1..80: mol_type = other DNA
tctgagttcaatagcccgcctcggactccatgcgatagggtagattcaagagtcatgagactttcatcaatcatctcagt

SEQ ID NO: 34889 - DNA, 80 bp, synthetic construct
  source 1..80: mol_type = other DNA
ctaggaactgataccaaaggttatggacgggacaagaggtatttcagatgactctatgcttgggcactgacagaggtcat

SEQ ID NO: 34890 - DNA, 80 bp, synthetic construct
  source 1..80: mol_type = other DNA
ataacctcaactcccctttgatagaagattctgcgagactaatgttagaatggttgaagacagggaatagaccttgtcgg

SEQ ID NO: 34891 - DNA, 80 bp, synthetic construct
  source 1..80: mol_type = other DNA
ctgattgccctgatgttgataacttttctaatgacatgttgtagaagagtcaatcgaccagagtctacgaaacgccgtct

SEQ ID NO: 34892 - DNA, 80 bp, synthetic construct
  source 1..80: mol_type = other DNA
atctagatcatctctgttggactacagctgcttgtaaaccggatatccccagaagcctgcatatctcaagacttttgtgt

SEQ ID NO: 34893 - DNA, 80 bp, synthetic construct
  source 1..80: mol_type = other DNA
caggaactgatatcaaaggttgtagacgggccaagatgtatttcagataactccgtgcttgggcaaagacagaggtcata

SEQ ID NO: 34894 - DNA, 80 bp, synthetic construct
  source 1..80: mol_type = other DNA
atctagatcatccttactagactacagttgcttgtaaactggatattcccggacgcctgtacacgataagacccttgtat

SEQ ID NO: 34895 - DNA, 80 bp, synthetic construct
  source 1..80: mol_type = other DNA
actcataaggagttagataataaggtgccagaaatctatagattgtgtatgtccatcatgaaaaaaactaacacccctcc

SEQ ID NO: 34896 - DNA, 80 bp, synthetic construct
  source 1..80: mol_type = other DNA
ttcatttggacgatgggaaatcatccaaccttggtgaggtggccacggtgggggaaggcaagtatagagaagactttcag

SEQ ID NO: 34897 - DNA, 80 bp, synthetic construct
  source 1..80: mol_type = other DNA
cttcaggaaggtcttcagaggataaatcaacccaaactactggccgagagcctaggaaagaagcagcatctactccttct

SEQ ID NO: 34898 - DNA, 80 bp, synthetic construct
  source 1..80: mol_type = other DNA
caagaactgatactaaaggttgtggacaagtcaaggggcatttcggacacctccgtgtttgagcacggacaggggtcata

SEQ ID NO: 34899 - DNA, 80 bp, synthetic construct
  source 1..80: mol_type = other DNA
gtgtattttctgatagcagattcaacacggattgattgagaaaggcaatctgcctcccatgatgaacacaagcaatagct

SEQ ID NO: 34900 - DNA, 80 bp, synthetic construct
  source 1..80: mol_type = other DNA
tgcagactagaagagaaactggcaacacttctcatcctgagacccacatcaagatgctagatccaggagaggtctatgat

SEQ ID NO: 34901 - DNA, 80 bp, synthetic construct
  source 1..80: mol_type = other DNA
gaccccatagatccagtcgaatcagaggctgaacccagaggagcccccacagtccccaacattttgaggaactctgatta

SEQ ID NO: 34902 - DNA, 80 bp, synthetic construct
  source 1..80: mol_type = other DNA
gaatatccagaatggtctcaggggctgtccctcactttcagaagcttcccgatattcgtctgaggccaggggattttgat

SEQ ID NO: 34903 - DNA, 80 bp, synthetic construct
  source 1..80: mol_type = other DNA
cgccacgcagctagaaccatgacaggggattatagccctaacaggaggatgtcacgtaaggcaggatgctcagaatgggt

SEQ ID NO: 34904 - DNA, 80 bp, synthetic construct
  source 1..80: mol_type = other DNA
atctagatcatctctactagactacagctgcttataaactgggaaccttcaaaggcctatacatgctaagacccttacga

SEQ ID NO: 34905 - DNA, 80 bp, synthetic construct
  source 1..80: mol_type = other DNA
gatgcaccctgaaaaaaacgagatcttaaatccgatcctctggctgtttgattgttttttccatctttgttgtttttttg

SEQ ID NO: 34906 - DNA, 80 bp, synthetic construct
  source 1..80: mol_type = other DNA
tttgggcttgacagtccccctcaaactctggatgacagggtagatttaagagtcacgggactttcattaatcatctctat

SEQ ID NO: 34907 - DNA, 80 bp, synthetic construct
  source 1..80: mol_type = other DNA
tgatcagacatggtcatgtagatccttataatacaggaaatcttctagcagtttcagtgactaaaggtgctctcatcctc

SEQ ID NO: 34908 - DNA, 80 bp, synthetic construct
  source 1..80: mol_type = other DNA
gtgggcggagttgcagcacagtcgatgatttccctctggttatatggtgcccattctgaatctaacaggagcaggagatg

SEQ ID NO: 34909 - DNA, 80 bp, synthetic construct
  source 1..80: mol_type = other DNA
tactcttcctgaaatcagtcgagcctctatttccccgatttctcagtgagcttttcagttcatctttcttggggattcct

SEQ ID NO: 34910 - DNA, 80 bp, synthetic construct
  source 1..80: mol_type = other DNA
atccagatcatctctgttagattatagctgcttataaactaagcgcccctgatagaatattcagacttagactcatggat

SEQ ID NO: 34911 - DNA, 80 bp, synthetic construct
  source 1..80: mol_type = other DNA
gcgaagccaggctgtgatggcgggccatctccttaatatcttgtgatcagaagactgcctacctttaagatctggtggac

SEQ ID NO: 34912 - DNA, 80 bp, synthetic construct
  source 1..80: mol_type = other DNA
ctcaaggactgataccaaagggggtggacagaccaactgccatctcaaacaactctatgactgagtccaggcggaggccg

SEQ ID NO: 34913 - DNA, 80 bp, synthetic construct
  source 1..80: mol_type = other DNA
tcgcgagttccactgcattagaccaggtagagattagttgagaaagacaatttgcctcctgtgaaggacataagcaatag

SEQ ID NO: 34914 - DNA, 80 bp, synthetic construct
  source 1..80: mol_type = other DNA
gtgtcagctatatatcgccggagatcacgtcttgtctgtgtgcgggaattctggatatgaggtcatcaaaatattagaac

SEQ ID NO: 34915 - DNA, 80 bp, synthetic construct
  source 1..80: mol_type = other DNA
aatcaggttctttgcccgacatatatgttgtcaccggggctctccagagagggtcttctctacgagctggagagcatatc

SEQ ID NO: 34916 - DNA, 80 bp, synthetic construct
  source 1..80: mol_type = other DNA
aagaaatgctctctcaatataccgggccatcgaggagggggcgtccaaactggggctcattataaagaaggaagagacca

SEQ ID NO: 34917 - DNA, 80 bp, synthetic construct
  source 1..80: mol_type = other DNA
agaatcatttatctagacccctctttggggggagtatcaggaatgtctctcggaaggttccacatacgtcagttctctga

SEQ ID NO: 34918 - DNA, 80 bp, synthetic construct
  source 1..80: mol_type = other DNA
cttcgatctcctgctcctgtggggtgactggaaggggaaaccctcgaatatctgtgtctgtgcttccgtcttttgatcag

SEQ ID NO: 34919 - DNA, 80 bp, synthetic construct
  source 1..80: mol_type = other DNA
gatgtaacaagtgtataagacccattgacgacattacccttgagactgctcaggtctttgattttccggatgtttcaaga

SEQ ID NO: 34920 - DNA, 80 bp, synthetic construct
  source 1..80: mol_type = other DNA
tcagactttagaagctctaagatgacgtatctgactcttatcacttaccaatctcatcttttgctccagagagttgagaa

SEQ ID NO: 34921 - DNA, 80 bp, synthetic construct
  source 1..80: mol_type = other DNA
agaacccaagagacattccagaagtcttggatatattactcagatagatctgatcttataggattgtgggaggaccagat

SEQ ID NO: 34922 - DNA, 80 bp, synthetic construct
  source 1..80: mol_type = other DNA
atactgtttagacatgtcaaatggcccgacgtgctggaacggccaagatggcgggttagaggggttacgacagaagggct

SEQ ID NO: 34923 - DNA, 80 bp, synthetic construct
  source 1..80: mol_type = other DNA
tcatcaagctcgtccaaactcattcgctgaatttttaaacaagacatattcgattgactcataaggagctggacaacagg

SEQ ID NO: 34924 - DNA, 80 bp, synthetic construct
  source 1..80: mol_type = other DNA
tccctgagttcaacagccctccttgaactccatgcaacagggtagattcaagagtcatgatactttcatcaatcatctca

SEQ ID NO: 34925 - DNA, 80 bp, synthetic construct
  source 1..80: mol_type = other DNA
acacgttagagtcagatgatgacattcaaaggctattaaaggactccctgcgtagaacgaggtgggtggatcaagaagtg

SEQ ID NO: 34926 - DNA, 80 bp, synthetic construct
  source 1..80: mol_type = other DNA
cgccatgcagccagaactatgacgggggattacagccccaataagaagatgtcacgcaaagcgggatgttctgagtgggt

SEQ ID NO: 34927 - DNA, 80 bp, synthetic construct
  source 1..80: mol_type = other DNA
gctgtctatactcgaatcatgatgaacggaggtcgactaaagagatcgcacataaggagatacgtttctgtcagctctaa

SEQ ID NO: 34928 - DNA, 80 bp, synthetic construct
  source 1..80: mol_type = other DNA
cctgctgacaattttcacactcaagcctaccagacaatggggcctgagttgctctgaattcgacatgaaaaaaaacaggc

SEQ ID NO: 34929 - DNA, 80 bp, synthetic construct
  source 1..80: mol_type = other DNA
cttgctgttcagccccatcttaaagggtagagtctacaaaattctaagcgctgagggggacaactttctcctagcgatgt

SEQ ID NO: 34930 - DNA, 80 bp, synthetic construct
  source 1..80: mol_type = other DNA
caagaataatctatttagacccttccttaggaggagtgtctggaatgtctttggggagatttcatatgcgccagttctca

SEQ ID NO: 34931 - DNA, 80 bp, synthetic construct
  source 1..80: mol_type = other DNA
gaatatctaggatggtctctggggctgtgcctcacttccaaaaactccctgatatccgcctgaaatctggagattttgaa

SEQ ID NO: 34932 - DNA, 80 bp, synthetic construct
  source 1..80: mol_type = other DNA
atactttagagtcagacgacgacattcaaagattactgaaagactcgctgctaagaacaaagtgggtggatcaagaggtg

SEQ ID NO: 34933 - DNA, 80 bp, synthetic construct
  source 1..80: mol_type = other DNA
atctagatcatctctactagactacagctgcttgtaaaccggatactctcagaaacctgtacatgctaaggctcttgtgt

SEQ ID NO: 34934 - DNA, 80 bp, synthetic construct
  source 1..80: mol_type = other DNA
cagaaactggtaccaaaggttgtggatgggccgagaggtatttcgaatggctccgcgttcgggcacggacagaggtcata

SEQ ID NO: 34935 - DNA, 80 bp, synthetic construct
  source 1..80: mol_type = other DNA
ttcacttagatgatggaaaatcgtccaaccttggtgagatggctaaagcgggagaaggtaagtatcgagaggattttcag

SEQ ID NO: 34936 - DNA, 80 bp, synthetic construct
  source 1..80: mol_type = other DNA
tcctaattgccttgatgttgataattttcctaatgacatgttgtagaagaaccaatcaaccagaatctacgcagcgcagt

SEQ ID NO: 34937 - DNA, 80 bp, synthetic construct
  source 1..80: mol_type = other DNA
cattcaggaaggtcttcagaggacaaatcaacccaaaccactagtcgagaacccaagagggagacaacatcccctccttc

SEQ ID NO: 34938 - DNA, 80 bp, synthetic construct
  source 1..80: mol_type = other DNA
tctgggctcaatagtcctccttgaactccatgcaacagggtagattcaagagccttgagattttcattaatcatcttagt

SEQ ID NO: 34939 - DNA, 80 bp, synthetic construct
  source 1..80: mol_type = other DNA
caggaactggtaccaaaggctgtggacgggtcgagaggtatttcggatgaccccatacttgggcacagacagaggtcatg

SEQ ID NO: 34940 - DNA, 80 bp, synthetic construct
  source 1..80: mol_type = other DNA
caacctcaactcccctttgatagaagaccccgcgagactaatgttagaatggttaaaaacagggaatcgacctcatcgga

SEQ ID NO: 34941 - DNA, 80 bp, synthetic construct
  source 1..80: mol_type = other DNA
aaatctagatcatctctactagactacagctgcctgtaaaccggatactcccgaaatcctgtatatgctaagactcttgt

SEQ ID NO: 34942 - DNA, 80 bp, synthetic construct
  source 1..80: mol_type = other DNA
aaaactattaacatccctcgaaagactcaagggaagatggttcctcaggctcttctgtccgtgctcctcttgggctcttc

SEQ ID NO: 34943 - DNA, 80 bp, synthetic construct
  source 1..80: mol_type = other DNA
tgatcaaactaggtcatgtaggttctcataatgagggaaatcttctagcagtttcagtgaccaacggtgctctcattttc

SEQ ID NO: 34944 - DNA, 80 bp, synthetic construct
  source 1..80: mol_type = other DNA
atctctactagattacagctgcctgtaaaccggatactcccggaagcctgtacatgataagactcttgtgtgatgtatct

SEQ ID NO: 34945 - DNA, 80 bp, synthetic construct
  source 1..80: mol_type = other DNA
gtacgtcccatgacagcggacccaacatgagttaattgggaaaagcaatctgcctcccatgaaggacataagcaatagct

SEQ ID NO: 34946 - DNA, 80 bp, synthetic construct
  source 1..80: mol_type = other DNA
gccggagatgtataacggacttggcccatttctattctaagtcatcccccatagagaagctattaaattgtacgttaggg

SEQ ID NO: 34947 - DNA, 80 bp, synthetic construct
  source 1..80: mol_type = other DNA
ggaggatcctcagatggggatttgataagtactccaagtggtatctggattctcgatttcttgcccgagaccacccccta

SEQ ID NO: 34948 - DNA, 80 bp, synthetic construct
  source 1..80: mol_type = other DNA
actccttatatcaaaacccaaacatggccacctaaacacatagtagacttagtgggggatacatggcacaagctcccgat

SEQ ID NO: 34949 - DNA, 80 bp, synthetic construct
  source 1..80: mol_type = other DNA
aaactaccagactcgttggcagcattgaggatctatctggagaggttgaaagacaccttcatgggtacaacagatggatc

SEQ ID NO: 34950 - DNA, 80 bp, synthetic construct
  source 1..80: mol_type = other DNA
gatgtgcacaaacaggtctcaggggttgacctgggcctcccaaactggaggaaatatatattgttgagtgcagggaccct

SEQ ID NO: 34951 - DNA, 80 bp, synthetic construct
  source 1..80: mol_type = other DNA
cgatacaccttgaaaaaaaacaagatcctaaatcggagtctctggctgtttgattgttttttttatctttattgtttttt

SEQ ID NO: 34952 - DNA, 80 bp, synthetic construct
  source 1..80: mol_type = other DNA
tgctaagactcttgtgcgaagtatcttgaaaaaaacaagatcttaaatcagaacctctggctgtttgattgttttttcca

SEQ ID NO: 34953 - DNA, 80 bp, synthetic construct
  source 1..80: mol_type = other DNA
ctgactgctttgatgttgataatttttctaatgacatgttgtagaagagtcaatcgaccagaatctatgcaacgtagtct

SEQ ID NO: 34954 - DNA, 80 bp, synthetic construct
  source 1..80: mol_type = other DNA
cctcagggaggtcctcagaggacaaatctacccaaaccactggtcgagaacctaagaaagagacaacatccgctccctct

SEQ ID NO: 34955 - DNA, 80 bp, synthetic construct
  source 1..80: mol_type = other DNA
ccagaactggtactgaaggttgtagacgggccgagaggagttgcagatgactccatgcctgggcgcggacagaggtcgta

SEQ ID NO: 34956 - DNA, 80 bp, synthetic construct
  source 1..80: mol_type = other DNA
gacttaaggaacttgacgacatggaggtacttccaatcggttcaagaacaagtgaatatgtcctatgatcttattatttg

SEQ ID NO: 34957 - DNA, 80 bp, synthetic construct
  source 1..80: mol_type = other DNA
caacgaagaagacgatttgtctgtggaggcagagatagctcatcaaatcgccgagagcttctccaagaagtacaaattcc

SEQ ID NO: 34958 - DNA, 80 bp, synthetic construct
  source 1..80: mol_type = other DNA
ttcctttaggatcttgcgtcacattctgaaatcgttcgatgagatctattccggaaatcaaagaatgattgggttagtca

SEQ ID NO: 34959 - DNA, 80 bp, synthetic construct
  source 1..80: mol_type = other DNA
gctcaaaccttaatcaggaatataatgtctctgacgggaccagacttcccgctggaagaggcccccgtctttaagagaac

SEQ ID NO: 34960 - DNA, 80 bp, synthetic construct
  source 1..80: mol_type = other DNA
ctcatcttttacttcagagggttgagaagaatctctctaaaagtatgagggccaacctacgacagatgagctctctcatg

SEQ ID NO: 34961 - DNA, 80 bp, synthetic construct
  source 1..80: mol_type = other DNA
agacaagtattgggcgggcatggcgaagacactttagaatcagacgaggacattcagaggttgttgaaagactcattacg

SEQ ID NO: 34962 - DNA, 80 bp, synthetic construct
  source 1..80: mol_type = other DNA
taggacaagatgggtagatcaagaggtgcgtcatgcagccagagccatgacagggggttatagccccagtaagaagatgt

SEQ ID NO: 34963 - DNA, 80 bp, synthetic construct
  source 1..80: mol_type = other DNA
ctcgcaaagcggggtgttcagaatgggtctgctctgcccaacaggttgctgtttcaacctcggcaaatccagcccctgtc

SEQ ID NO: 34964 - DNA, 80 bp, synthetic construct
  source 1..80: mol_type = other DNA
ggcgctcattacaaactcaaacctattcttgatgatctcaatgtgttcccatccttatgtcttgtggtcggagacgggtc

SEQ ID NO: 34965 - DNA, 80 bp, synthetic construct
  source 1..80: mol_type = other DNA
cttgatgatctcaatgtgttcccatccttatgtcttgtggtcggagacgggtcaggggggatttcaagggctgttctcaa

SEQ ID NO: 34966 - DNA, 80 bp, synthetic construct
  source 1..80: mol_type = other DNA
cttctgacttaaggaacttgacgacatggaggtacttccagtcagttcaagaacaggtgaatatgtcctatgatcttatt

SEQ ID NO: 34967 - DNA, 80 bp, synthetic construct
  source 1..80: mol_type = other DNA
atttgtgacgcagaggtcactgacatctcatcaattaatcgaataactctgctaatgtctgattttgcattatcaataga

SEQ ID NO: 34968 - DNA, 80 bp, synthetic construct
  source 1..80: mol_type = other DNA
cgctttatttaattttcaaaacttatggaaccatgctcgtgaatcctgattacagagccgttcaacatctgtccagagca

SEQ ID NO: 34969 - DNA, 80 bp, synthetic construct
  source 1..80: mol_type = other DNA
tttcccacagtcacaggattcataacccagatgacatcatccttctcgtctgagctatacctcagattctctaaaagggg

SEQ ID NO: 34970 - DNA, 80 bp, synthetic construct
  source 1..80: mol_type = other DNA
aaaatttttccgagatgcagaatacttgacttcttctactattagggagatgagccttgtattgttcaactgcagcagcc

SEQ ID NO: 34971 - DNA, 80 bp, synthetic construct
  source 1..80: mol_type = other DNA
cgaaaccgttgactgaccctttattcaatccgccatctgaccccaaaatcttgagacacttcaatatttgctgcagtacc

SEQ ID NO: 34972 - DNA, 80 bp, synthetic construct
  source 1..80: mol_type = other DNA
atgatgtacttgtctactgctctgggggatgttccaagctttgctagacttcatgatctgtataacagaccaataaccta

SEQ ID NO: 34973 - DNA, 80 bp, synthetic construct
  source 1..80: mol_type = other DNA
actatttcgggaagaaagttatccgagggaacatttatttgtcctggagttggtctgacgacacctcagtgttcaaaagg

SEQ ID NO: 34974 - DNA, 80 bp, synthetic construct
  source 1..80: mol_type = other DNA
agactaccagacttgtaggaaatacggagagtctatccagggaggtcgaaaagcaccttcgagggtacaacaggtggatt

SEQ ID NO: 34975 - DNA, 80 bp, synthetic construct
  source 1..80: mol_type = other DNA
accctagacgacataaaatccagatcatctcttctagattacagctgcctataaaacagggcatttggggagaaatacat

SEQ ID NO: 34976 - DNA, 80 bp, synthetic construct
  source 1..80: mol_type = other DNA
ggaccaacaccttgggacggtatgccctgaaaaaaacaagaccctgattcataacctctatttgcttgatgatttttttg

SEQ ID NO: 34977 - DNA, 80 bp, synthetic construct
  source 1..80: mol_type = other DNA
cctgaaaaaaacaagaccctgattcataacctctatttgcttgatgatttttttgtctttgttgtttatttgttaagcgt

SEQ ID NO: 34978 - DNA, 80 bp, synthetic construct
  source 1..80: mol_type = other DNA
ctgaggtcgctctggcagacgacgggacagtcaattctgacgacgaagactacttctctggtgaaaccaggagtccagag

SEQ ID NO: 34979 - DNA, 80 bp, synthetic construct
  source 1..80: mol_type = other DNA
tcatcaagctcgccccaattcatttgctgaatttctaaacaagacatattctaacgacccgtagggagtcgaacttcaag

SEQ ID NO: 34980 - DNA, 80 bp, synthetic construct
  source 1..80: mol_type = other DNA
attgtcaaccataataaattgtttaattcctccacgaaaaaaactaacacccctccttttgaaccatcccaagcatgagc

SEQ ID NO: 34981 - DNA, 80 bp, synthetic construct
  source 1..80: mol_type = other DNA
tccacttggatgatgaaaaaccgtctggttttgacaaggtgacaaaagaaggggagaacaagtgtcatgaagactttcag

SEQ ID NO: 34982 - DNA, 80 bp, synthetic construct
  source 1..80: mol_type = other DNA
gtcaggagagagattccttaaaatatggtctcagactgtggaggagatcatatcctatgtcatgatcaatttcccaggct

SEQ ID NO: 34983 - DNA, 80 bp, synthetic construct
  source 1..80: mol_type = other DNA
ctttggagaggccttctgaagacaaggccactcaaactgccaatcgggaacccaagaaaggggtggcatcagtttcgtct

SEQ ID NO: 34984 - DNA, 80 bp, synthetic construct
  source 1..80: mol_type = other DNA
caactcgaaggtcaatcatccaaagcgagagcggcagcccaaactgcctccggtccacctgccctagaatggtctgccac

SEQ ID NO: 34985 - DNA, 80 bp, synthetic construct
  source 1..80: mol_type = other DNA
ctcgtcaactaaatttgtagcctcagtcccattatgcaatcaaatccagtctgatccaaagtcaacgtgaaaaaaacagg

SEQ ID NO: 34986 - DNA, 80 bp, synthetic construct
  source 1..80: mol_type = other DNA
tcgcatcggcccccccagatgatgatgatctgtggttgccccctccagaatatgtcccattgaaggagctcacagggaag

SEQ ID NO: 34987 - DNA, 80 bp, synthetic construct
  source 1..80: mol_type = other DNA
aagaacatgagaaacttttgtgttaatggggaggtcaaggtgtgtagtccaaacggatattcctttaggatcttgcgtca

SEQ ID NO: 34988 - DNA, 80 bp, synthetic construct
  source 1..80: mol_type = other DNA
tctgaaatcgtttgatgagatctattccggaaatcaaagaatgattgggttagttaaagttgtggtcggattggccttgt

SEQ ID NO: 34989 - DNA, 80 bp, synthetic construct
  source 1..80: mol_type = other DNA
ctggagccccagtccccgagggcatgaactgggtttacaaactaaggagaactcttattttccaatgggcagactctaga

SEQ ID NO: 34990 - DNA, 80 bp, synthetic construct
  source 1..80: mol_type = other DNA
atagatctgaggaggacaaggactcctcagtccttctagagtagtcgaattatatcccacaagttcctcaattatccacc

SEQ ID NO: 34991 - DNA, 80 bp, synthetic construct
  source 1..80: mol_type = other DNA
acatgttatggtgccgttgaatcgctgcattttatcagagtcaaatcaattacaattgcactttaagcctcttggatgtg

SEQ ID NO: 34992 - DNA, 80 bp, synthetic construct
  source 1..80: mol_type = other DNA
aaaaaaactattaacatccctcaaaagacctgaggaaagatggtcccttgggcccttctgtttgtgccttttctgatctc

SEQ ID NO: 34993 - DNA, 80 bp, synthetic construct
  source 1..80: mol_type = other DNA
acctcagttgtcccaataatcttgttgtggaagacgaggggtgcaatagtctgtcggggttttcttacatggaactaaaa

SEQ ID NO: 34994 - DNA, 80 bp, synthetic construct
  source 1..80: mol_type = other DNA
gtgggatacatctctgccataaaagtgaacgggttcacttgtactggtgtcgtgacggaagccgagacctacactaactt

SEQ ID NO: 34995 - DNA, 80 bp, synthetic construct
  source 1..80: mol_type = other DNA
ctggggggaaatgcacgggtctaacagtctcttccacctactgctcgaccaaccatgactacaccatctggatgcctgaa

SEQ ID NO: 34996 - DNA, 80 bp, synthetic construct
  source 1..80: mol_type = other DNA
tgctcgaccaaccatgactacaccatctggatgcctgaaaaagcagggctcgggacatcttgtgacatcttcaccaatag

SEQ ID NO: 34997 - DNA, 80 bp, synthetic construct
  source 1..80: mol_type = other DNA
aaagcagggctcgggacatcttgtgacatcttcaccaatagtaaagggaagagagcatctaaaggaggcaagacttgtgg

SEQ ID NO: 34998 - DNA, 80 bp, synthetic construct
  source 1..80: mol_type = other DNA
atttgtggacgagagaggtttgtataagtccttgaaaggagcttgtaagctcaagctgtgcggagtttctgggcttagac

SEQ ID NO: 34999 - DNA, 80 bp, synthetic construct
  source 1..80: mol_type = other DNA
ttatggatggaacttgggttgcgattcagacattggatgaaaccaaatggtgctctcctgatcaactggtgaatctgcat

SEQ ID NO: 35000 - DNA, 80 bp, synthetic construct
  source 1..80: mol_type = other DNA
gacttccactcggatgagcttgagcatcttgttgtagaggagttggttagaaagagggaggaatgtcttgatgcattaga

SEQ ID NO: 35001 - DNA, 80 bp, synthetic construct
  source 1..80: mol_type = other DNA
atccatcatgaccaccaaatcagtaagcttcagacgtctaagccacctgagaaaactagttcctgggtttgggaaggcat

SEQ ID NO: 35002 - DNA, 80 bp, synthetic construct
  source 1..80: mol_type = other DNA
caaaagggtgtttgagagtaggggggagatgtcatcctcatgtaaatggagtatttttcaatggcatcattctaggtccg

SEQ ID NO: 35003 - DNA, 80 bp, synthetic construct
  source 1..80: mol_type = other DNA
tggagtatttttcaatggcatcattctaggtccggacgggcatgtgttgatcccagaaatgcagtcatcccttctccaac

SEQ ID NO: 35004 - DNA, 80 bp, synthetic construct
  source 1..80: mol_type = other DNA
gacgggcatgtgttgatcccagaaatgcagtcatcccttctccaacaacatgtggaactgttggagtcctccgtgatccc

SEQ ID NO: 35005 - DNA, 80 bp, synthetic construct
  source 1..80: mol_type = other DNA
cctcatgcaccccctggcagatccttcagcagttttcaaagatggtgacgaggcagaggattttgttgaggttcatctcc

SEQ ID NO: 35006 - DNA, 80 bp, synthetic construct
  source 1..80: mol_type = other DNA
cagatgttcacaaacagatctcaggggtggacctaggcctcccaagctggggaaagtatatgctgatgattgcaggtgct

SEQ ID NO: 35007 - DNA, 80 bp, synthetic construct
  source 1..80: mol_type = other DNA
ctaacgactctaatgctgttcatcttcttgatgacatgttgtaaaagggtcaacaggacaaaatcaatacgacaaggccc

SEQ ID NO: 35008 - DNA, 80 bp, synthetic construct
  source 1..80: mol_type = other DNA
cagagagatagaaagaaaagtatcatttactccccaaaacaagaaagtcgtatcttcatgggagtcttacaagagcggag

SEQ ID NO: 35009 - DNA, 80 bp, synthetic construct
  source 1..80: mol_type = other DNA
gcgagaccaagctgtaaggagggctgccccctccacacactatgctcggaaaactgttcccctctgatacatggaagaat

SEQ ID NO: 35010 - DNA, 80 bp, synthetic construct
  source 1..80: mol_type = other DNA
atcctgccttgacaatcccccacggactctgtccaacagggtaaacttcgaagtcaagaaactttcatcaatcatctcac

SEQ ID NO: 35011 - DNA, 80 bp, synthetic construct
  source 1..80: mol_type = other DNA
tcggccagacacattcaggtggactttgatgatgtatgaagcatttttacagtatcagcgactaatggtgctctcaccct

SEQ ID NO: 35012 - DNA, 80 bp, synthetic construct
  source 1..80: mol_type = other DNA
ctaaggactggtactaaaggtagcggacaggctgaccgacatctcagacaaccctgtttcttagcttgggcagaggttgt

SEQ ID NO: 35013 - DNA, 80 bp, synthetic construct
  source 1..80: mol_type = other DNA
gataagctcctctaccttaaactaaaacagtgatcagctgagaaaactgatttgcctcctatgaaggacacaatcaatag

SEQ ID NO: 35014 - DNA, 80 bp, synthetic construct
  source 1..80: mol_type = other DNA
atcacaatcatttcacatcccaataagttgtgcataactacaaagggctgggccatctaatctcctcgatcaagaaaaaa

SEQ ID NO: 35015 - DNA, 80 bp, synthetic construct
  source 1..80: mol_type = other DNA
tgtgagacagagaaatcctcaacaacacttctcatcctgaacactgcaccatgatgattgatccaggggaggtttatgat

SEQ ID NO: 35016 - DNA, 80 bp, synthetic construct
  source 1..80: mol_type = other DNA
gaccccattgatccagtcgagtctgagagtgagccaagaggaaactccaatatccccaacatcttgcgaaattctgacta

SEQ ID NO: 35017 - DNA, 80 bp, synthetic construct
  source 1..80: mol_type = other DNA
caatctcaactcccctctgatcgaggattcagccaagctgatgttagaatggctgaaaacaggaaatagacctctccgga

SEQ ID NO: 35018 - DNA, 80 bp, synthetic construct
  source 1..80: mol_type = other DNA
aatatctctgatcgtatagagcagatttttgagacggccccctttgtgaagatcgtggaacatcacaccttgatgacaac

SEQ ID NO: 35019 - DNA, 80 bp, synthetic construct
  source 1..80: mol_type = other DNA
tgaccctgaccgacaattgttctcggtcttacaaggttctgaaagattacctcaagaaagtggatctaggatctctcaaa

SEQ ID NO: 35020 - DNA, 80 bp, synthetic construct
  source 1..80: mol_type = other DNA
tatgactgacttagctcagttctactccaaatcttcccctatagagaagctgttaaacttcacactcgggaatagagggt

SEQ ID NO: 35021 - DNA, 80 bp, synthetic construct
  source 1..80: mol_type = other DNA
tgagaatcccccctgagggagtcctaagctgtcttgagagggtggattacgataaggcatttgggaggtatttggccaat

SEQ ID NO: 35022 - DNA, 80 bp, synthetic construct
  source 1..80: mol_type = other DNA
gagggaattgacatcagtggatatgggaaaggacttagtcaagtttaaagatcagatatggggacttctgattgtgacta

SEQ ID NO: 35023 - DNA, 80 bp, synthetic construct
  source 1..80: mol_type = other DNA
tttttttgtcccggttcaactctctgatgattttgctgtcccccccggagcccagatactcagatgacttgatatctcag

SEQ ID NO: 35024 - DNA, 80 bp, synthetic construct
  source 1..80: mol_type = other DNA
ataaaggacaaggtgaatcaacttgaggggacgtttggtcctagtgcgaagaggttctttaaagtcttggatcaattcga

SEQ ID NO: 35025 - DNA, 80 bp, synthetic construct
  source 1..80: mol_type = other DNA
aaatggtatctagatccacgacttcttgcgagggatcaccccctgactccttatatcaaaacccagacatggcctcccaa

SEQ ID NO: 35026 - DNA, 80 bp, synthetic construct
  source 1..80: mol_type = other DNA
tagaccttggggggctgccagatgaagacttaatcatcggcttgaaacccaaagaaagagagctgaagatcgaaggccga

SEQ ID NO: 35027 - DNA, 80 bp, synthetic construct
  source 1..80: mol_type = other DNA
tggaatttaaggctatacttcgttattacagagaagctcctggccaattatatattaccactctttgatgcattaaccat

SEQ ID NO: 35028 - DNA, 80 bp, synthetic construct
  source 1..80: mol_type = other DNA
gccccattttaaaaggcagagtttacaaaatactgagtgctgatggggatcattttcttttagctatgtctagaatagtt

SEQ ID NO: 35029 - DNA, 80 bp, synthetic construct
  source 1..80: mol_type = other DNA
taccttgacccctcattagggggtgtgtctggaatgtctcttgggaggtttcacatacgccagttttcagacccggtctc

SEQ ID NO: 35030 - DNA, 80 bp, synthetic construct
  source 1..80: mol_type = other DNA
aaaattctagaacgataagaagacagtttaggaagaacctctctagaaccttagaagagtccttctataactcagagatt

SEQ ID NO: 35031 - DNA, 80 bp, synthetic construct
  source 1..80: mol_type = other DNA
catgggatcaatcggatgacacagactccccagagaataggaagagtttgggcctgctcttctgagagggcagatctcct

SEQ ID NO: 35032 - DNA, 80 bp, synthetic construct
  source 1..80: mol_type = other DNA
caatctcctgtacttgtggcgtaacaggagggggaaatcctcgaatatcagtgtctgtactcccgtcctttgatcagtcg

SEQ ID NO: 35033 - DNA, 80 bp, synthetic construct
  source 1..80: mol_type = other DNA
tctctaagtgacaaagagaagtcacgccacatagggtcagctcaggggctcttgtattcaatcctggttgcgatccacga

SEQ ID NO: 35034 - DNA, 80 bp, synthetic construct
  source 1..80: mol_type = other DNA
ctctgggtacaacgacggaaccatttttcctgtcaacatatatagcaaggtctccccgagagactatttaagaggtctcg

SEQ ID NO: 35035 - DNA, 80 bp, synthetic construct
  source 1..80: mol_type = other DNA
tgagaggagaaatattttctattccccaaaagatccccgccgcttacccaaccacaatgaaagagggcaacagatctatc

SEQ ID NO: 35036 - DNA, 80 bp, synthetic construct
  source 1..80: mol_type = other DNA
gcgggcatggcgaagacactttagaatcggacgaggacattcagaggttgttgaaagactcattacgtaggacaagatgg

SEQ ID NO: 35037 - DNA, 80 bp, synthetic construct
  source 1..80: mol_type = other DNA
gtagatcaagaggtgcgtcatgcagccagagccatgacaggaggttatagccccaataagaaggtgtctcgcaaagcggg

SEQ ID NO: 35038 - DNA, 80 bp, synthetic construct
  source 1..80: mol_type = other DNA
caagttcctcaattgtccacctctggagaagagaacacatgggctcaactccaaccttcaggagcaatagaacaaaaaca

SEQ ID NO: 35039 - DNA, 80 bp, synthetic construct
  source 1..80: mol_type = other DNA
ccccaaaagatccccgccgcttacccaaccacgatgaaagagggcaacagatctatcctgtgttacctccagcatgtgct

SEQ ID NO: 35040 - DNA, 80 bp, synthetic construct
  source 1..80: mol_type = other DNA
ggggatgatatcatatctagggtaattgacttcgactccatctgggaaaagccttctgacttaaggaacttgacgacatg

SEQ ID NO: 35041 - DNA, 80 bp, synthetic construct
  source 1..80: mol_type = other DNA
gaggtacttccagtcagttcaagaacaggtgaatatgtcctatgatcttattatttgtgacgcagaggtcactgacatcg

SEQ ID NO: 35042 - DNA, 80 bp, synthetic construct
  source 1..80: mol_type = other DNA
agagttgacaaagactgaggtcgctctggcagacgacggaacagtcaattctgacgacgaagactacttctctggtgaaa

SEQ ID NO: 35043 - DNA, 80 bp, synthetic construct
  source 1..80: mol_type = other DNA
ccaggagtccagaggcggtctatactcggattatgatcaatgggggccgactcaaaagatcacatataagaaggtatgta

SEQ ID NO: 35044 - DNA, 80 bp, synthetic construct
  source 1..80: mol_type = other DNA
tcagtcagttccaatcatcaagctcgccccaattcatttgctgaatttctaaacaagacatattctaacgacccgtaggg

SEQ ID NO: 35045 - DNA, 80 bp, synthetic construct
  source 1..80: mol_type = other DNA
agtcgaacttcaagattgtcaacaataataaattgtttaactcctccacgaaaaaaactaacacccctccttttgaacca

SEQ ID NO: 35046 - DNA, 80 bp, synthetic construct
  source 1..80: mol_type = other DNA
tcccaagcatgagcaagatttttgtcaacccaagtgcgatccgggccggccttgctgacctagagatggcagaggagact

SEQ ID NO: 35047 - DNA, 80 bp, synthetic construct
  source 1..80: mol_type = other DNA
cccggctatcaaagacttaaaaaagcccagtatctccctgggaaaagctcctgatttgaacaaggcgtataagtcaattc

SEQ ID NO: 35048 - DNA, 80 bp, synthetic construct
  source 1..80: mol_type = other DNA
tatccggtatgaatgcagctaagctcgaccctgacgatgtgtgctcttacttggcagctgcaatgcagttctttgaagga

SEQ ID NO: 35049 - DNA, 80 bp, synthetic construct
  source 1..80: mol_type = other DNA
tgcgccatgcagcgaggacgatgacaggaggttatagccccagcaagaggatgtcacgcaaggccgggtgttcagagtgg

SEQ ID NO: 35050 - DNA, 80 bp, synthetic construct
  source 1..80: mol_type = other DNA
gtctgctctgctcagcaggttgcagtctcaacctcagcgaatccggcccctgcctccgagctggacatcaggaccctctc

SEQ ID NO: 35051 - DNA, 80 bp, synthetic construct
  source 1..80: mol_type = other DNA
actatacctcagattctcaaaacgggggaagttctttcgggatgctgaatatttgacctcttctactcttagagaaatga

SEQ ID NO: 35052 - DNA, 80 bp, synthetic construct
  source 1..80: mol_type = other DNA
gccttgtattattcaactgtagcagccccaaaagtgagatgcagagggcccgctctctcaattaccaagatcttgtaagg

SEQ ID NO: 35053 - DNA, 80 bp, synthetic construct
  source 1..80: mol_type = other DNA
aattacaacgaggaactttgtccaaagtttctattattatcgccatcatgatagtcttctccaatagagtgttcaacgtc

SEQ ID NO: 35054 - DNA, 80 bp, synthetic construct
  source 1..80: mol_type = other DNA
ttgttggaagaatagaagacctgtccagggaggtagagaagcaccttcgggggtacaacaggtggatcaccctcgatgac

SEQ ID NO: 35055 - DNA, 80 bp, synthetic construct
  source 1..80: mol_type = other DNA
atcaggtccagatcatctctattagattatagctgtttatgaactgtgcactctcaagggaatatacagaccaaaactcc

SEQ ID NO: 35056 - DNA, 80 bp, synthetic construct
  source 1..80: mol_type = other DNA
tggacagtacaccttgaaaaaaacaagatccaaattcagaacctctgtctgattgactgtttttccatctttattgtttt

SEQ ID NO: 35057 - DNA, 80 bp, synthetic construct
  source 1..80: mol_type = other DNA
cttgaaaaaaacaagatccaaattcagaacctctgtctgattgactgtttttccatctttattgtttttttgttaagcgt

SEQ ID NO: 35058 - DNA, 80 bp, synthetic construct
  source 1..80: mol_type = other DNA
aagatttttgtcaacccaagtgcgatcagagcaggtttagctgatctagagatggcagaggagacggtagatcttatcgc

SEQ ID NO: 35059 - DNA, 80 bp, synthetic construct
  source 1..80: mol_type = other DNA
ttcaattagatgatgaaaaaccatctgacctcggcggcaaagccaaagttggggagaggaagtgtcaggaagactttcag

SEQ ID NO: 35060 - DNA, 80 bp, synthetic construct
  source 1..80: mol_type = other DNA
tcaactttcccagtatgccgaggaaatcctcagaggaaaaagctacccagacttccagccgggaactcaagaaggagaca

SEQ ID NO: 35061 - DNA, 80 bp, synthetic construct
  source 1..80: mol_type = other DNA
gtgtctgcttcttctcagcgagaaattcaaccattaaaagccaaaatggcagctcaaaccacctccggtcctcctgctct

SEQ ID NO: 35062 - DNA, 80 bp, synthetic construct
  source 1..80: mol_type = other DNA
tcaaagagtcgaagaatgtgccaagcgtgactcgcttggcccatgacggatccaaactccctctgagatgtgtgctgggg

SEQ ID NO: 35063 - DNA, 80 bp, synthetic construct
  source 1..80: mol_type = other DNA
tcttttgaccgcacccccaggcttaatcacactatgcaatcaaatctgacctgattcaaatccaccatgaaaaaaacagg

SEQ ID NO: 35064 - DNA, 80 bp, synthetic construct
  source 1..80: mol_type = other DNA
aaaaatctgaagaggataaagattcttcagtgcttctggaatagtctaattgcatcataaaacttcctcaattgtttacc

SEQ ID NO: 35065 - DNA, 80 bp, synthetic construct
  source 1..80: mol_type = other DNA
ctcagatgtcctaacaatttggtcgtggaggacgaggggtgtacaagtctgtcagggttttcttacatggaattgaaggt

SEQ ID NO: 35066 - DNA, 80 bp, synthetic construct
  source 1..80: mol_type = other DNA
gggatacatatctgccataaaagtgaacgggttcacctgtacaggcgttgtgacagaagctgagacctacaccaactttg

SEQ ID NO: 35067 - DNA, 80 bp, synthetic construct
  source 1..80: mol_type = other DNA
ttggttatgtcactaccacattcaagaggaaacattttcgccctacgcccgacgcatgcagggctgcctacaactggaag

SEQ ID NO: 35068 - DNA, 80 bp, synthetic construct
  source 1..80: mol_type = other DNA
gtggccggtgatcctagatatgaggagtctcttcagaatccttatcccgattaccattggctacggactgtaaagaccac

SEQ ID NO: 35069 - DNA, 80 bp, synthetic construct
  source 1..80: mol_type = other DNA
atgactttcactcagatgaaatagagcatctcgtcgtggaggagttggtcaagaagagggaagaatgtttagatgcattg

SEQ ID NO: 35070 - DNA, 80 bp, synthetic construct
  source 1..80: mol_type = other DNA
cggatgttcacaagcaaatctcaggggttgaccttggtctcccaagctgggggaagtatctactgatgattgcaggtgct

SEQ ID NO: 35071 - DNA, 80 bp, synthetic construct
  source 1..80: mol_type = other DNA
ctggctggactaattctgataatcttcttgatggcatgttgtagaagggccaagagaacagagtcaagacgacgaggttc

SEQ ID NO: 35072 - DNA, 80 bp, synthetic construct
  source 1..80: mol_type = other DNA
tggggagtcagaaaggaaagtgccagtacctccccaaaacgggaaagtcatatcttcatgggagttgtacaagagtgaag

SEQ ID NO: 35073 - DNA, 80 bp, synthetic construct
  source 1..80: mol_type = other DNA
gcgagaccgggctgtgagggcatgccatctcctctataccatgcgttcagaagattgctgatctttcagatcggacggac

SEQ ID NO: 35074 - DNA, 80 bp, synthetic construct
  source 1..80: mol_type = other DNA
tctctcattttaacggtccttcatgaacttcgtgtaacaggatgaacttaagagtcgagaaacgtccattaatcatctca

SEQ ID NO: 35075 - DNA, 80 bp, synthetic construct
  source 1..80: mol_type = other DNA
actgatcagacacagtcatgtagattttaataatgtatgatgtcctctgacagtatcattgaccaatggtgctttcatct

SEQ ID NO: 35076 - DNA, 80 bp, synthetic construct
  source 1..80: mol_type = other DNA
cccaaggacttataccaaaggttgtggacaagccaactgatctcccaaataactctatgattgagttttggcaaaggcca

SEQ ID NO: 35077 - DNA, 80 bp, synthetic construct
  source 1..80: mol_type = other DNA
tcgtaagttctatggcattagaccaaatcgagattagttgagagaagcgacttgcctcctatgaaggaccctagcaatag

SEQ ID NO: 35078 - DNA, 80 bp, synthetic construct
  source 1..80: mol_type = other DNA
gtcacaatcatcttacatcccgacaaggtgtgcataactacaaagggctggaccatccaagccttctagtcaggaaaaaa

SEQ ID NO: 35079 - DNA, 80 bp, synthetic construct
  source 1..80: mol_type = other DNA
actgtagaatggaggggtaatcgacaacacttctcatcccaagaacttcaccatgatgattgatccaggagaggtttatg

SEQ ID NO: 35080 - DNA, 80 bp, synthetic construct
  source 1..80: mol_type = other DNA
tataaccgacttggctcaattctactccaaatcctcccccgtagaaaagctattaaactgcacactcggaaatagagggc

SEQ ID NO: 35081 - DNA, 80 bp, synthetic construct
  source 1..80: mol_type = other DNA
gaaggatttaacatcaatcgatacggggaaggacttggtcaagtttaaagatcaaatatggggattgctgattgtgacca

SEQ ID NO: 35082 - DNA, 80 bp, synthetic construct
  source 1..80: mol_type = other DNA
gcccgacatgctggaacggccaagatggcggcctagagggtctgcgtcaaaagggctggagtctggtcagcttgttaatg

SEQ ID NO: 35083 - DNA, 80 bp, synthetic construct
  source 1..80: mol_type = other DNA
agaatcatctatttagacccctcattgggaggggtatctggaatgtctctcggaaggttccatatacgtcagttctccga

SEQ ID NO: 35084 - DNA, 80 bp, synthetic construct
  source 1..80: mol_type = other DNA
tagatgtaacaagtgcataaggcccattgatgatattaccctagagacctctcagatcttcgagttcccggatgtttcaa

SEQ ID NO: 35085 - DNA, 80 bp, synthetic construct
  source 1..80: mol_type = other DNA
agactaccagactcgttggcagcatcgaggacctatccggagaggtagagagacaccttcatggttacaacaggtggatt

SEQ ID NO: 35086 - DNA, 80 bp, synthetic construct
  source 1..80: mol_type = other DNA
atctagatcatctctactagactacagctgcttgtaaatcggatactcccggaagcctgtacatgccacaactcttgtgt

SEQ ID NO: 35087 - DNA, 80 bp, synthetic construct
  source 1..80: mol_type = other DNA
ctgacgtggcattggcagatgacgggactgtcaactctgacgacgaggactatttctctggtgagaccagaagtccagaa

SEQ ID NO: 35088 - DNA, 80 bp, synthetic construct
  source 1..80: mol_type = other DNA
agtgccggagatctattgattgtgtatgtccatcatgaaaaaaactaacacccctcctttcgaaccatcccaagtatgag

SEQ ID NO: 35089 - DNA, 80 bp, synthetic construct
  source 1..80: mol_type = other DNA
aggagacttcacttggatgacggaaaatcgtctaaccttgatgagatggccagagcgggggaaggcaagtatcgggaaga

SEQ ID NO: 35090 - DNA, 80 bp, synthetic construct
  source 1..80: mol_type = other DNA
ctttcagatggatgaaggagaggatcctagcctcctgtttcagtcgtacctggacaatgttggagtccaaatagtcagac

SEQ ID NO: 35091 - DNA, 80 bp, synthetic construct
  source 1..80: mol_type = other DNA
ctccaggaaggtcctcagaggacaaatcaacccaaactactggtcgagagcccaggaaggagacaacatccactccttct

SEQ ID NO: 35092 - DNA, 80 bp, synthetic construct
  source 1..80: mol_type = other DNA
cctgctagccgaacttttgaattcagtccctctagacaataaaatctgggatgtcccaaagtcgacatgaaaaaaacagg

SEQ ID NO: 35093 - DNA, 80 bp, synthetic construct
  source 1..80: mol_type = other DNA
gccctgatagccttgatgttgataattttcctaatgacatgttgtaaaagaatcaatcgaccagagtctacgcaacgtaa

SEQ ID NO: 35094 - DNA, 80 bp, synthetic construct
  source 1..80: mol_type = other DNA
caggaaatgacaccaaaggttgtgtaagggccaagaggtactccgaatgactccgtgcttggtcacggacagaggttata

SEQ ID NO: 35095 - DNA, 80 bp, synthetic construct
  source 1..80: mol_type = other DNA
ttgcgtcccgtgacagcggactcaacatgagtccgttgagaaaggcaatctgcctcccatgaaggacataagcaatagct

SEQ ID NO: 35096 - DNA, 80 bp, synthetic construct
  source 1..80: mol_type = other DNA
gccggagatgtataacagacttggcccatttctattccaagtcatcccccatagaaaagctgttgaactgtacgctagga

SEQ ID NO: 35097 - DNA, 80 bp, synthetic construct
  source 1..80: mol_type = other DNA
tttttttgtctcgcttcaactccttgatgatcttgctttctccccccgagccccgatactccgatgacttgatatctcag

SEQ ID NO: 35098 - DNA, 80 bp, synthetic construct
  source 1..80: mol_type = other DNA
ctgtgccagctgtacatcgctggggatcaagtcttgtccatgtgtgggaactccggctatgaagtcattaaagtattgga

SEQ ID NO: 35099 - DNA, 80 bp, synthetic construct
  source 1..80: mol_type = other DNA
gccctgattgccttgatattgataattttcctaatgatatgttgcagaagagtcaatcgaccagaacctacgcagcgtag

SEQ ID NO: 35100 - DNA, 80 bp, synthetic construct
  source 1..80: mol_type = other DNA
agactaccagacttgttggcagcgtcgaggacttatctggagaggtggaaagacaccttcatgggtacaacaggtggatc

SEQ ID NO: 35101 - DNA, 80 bp, synthetic construct
  source 1..80: mol_type = other DNA
tgctaaaactctcgtgtgatgtatcttgaaaaaaacaagatcttgaatccgaacctttggctgtttgattgtttttttca

SEQ ID NO: 35102 - DNA, 80 bp, synthetic construct
  source 1..80: mol_type = other DNA
tgattgaactaagtcatttagattctcataatacgggaaatcttctagcagtttcagtgaccaacggtgctttcactctc

SEQ ID NO: 35103 - DNA, 80 bp, synthetic construct
  source 1..80: mol_type = other DNA
tccttatgtcaaaacccagacatggccacccaaacatatagtggacttggtgggggatacttggcacaagctcccgatca

SEQ ID NO: 35104 - DNA, 80 bp, synthetic construct
  source 1..80: mol_type = other DNA
atctgatctcataggattatgggagggccagatatactgtttagacatgtcaaatggcccgacgtgctggaacggccaag

SEQ ID NO: 35105 - DNA, 80 bp, synthetic construct
  source 1..80: mol_type = other DNA
atgaccaggtccacattaaaaaggtgatagataagtcctatcaggagtgtttagcgagtgacctagccaagagaatcctc

SEQ ID NO: 35106 - DNA, 80 bp, synthetic construct
  source 1..80: mol_type = other DNA
ttcagctggaagatgggaagccgtctaacttcaaggagatagccgaggtgggagagagcaagtatcgagaagatttccaa

SEQ ID NO: 35107 - DNA, 80 bp, synthetic construct
  source 1..80: mol_type = other DNA
caaaagcgtgtgtgagagttggacggaggcgtcattcccatgttcatggactgtcttttagcggcataatacggggtcct

SEQ ID NO: 35108 - DNA, 80 bp, synthetic construct
  source 1..80: mol_type = other DNA
ggggagccttgtctaaaatgtctatcattatagccatcatgatagttttctccaatagggtcttcgatgtttccaaacca

SEQ ID NO: 35109 - DNA, 80 bp, synthetic construct
  source 1..80: mol_type = other DNA
aatccgagactgggggcatcttgtgacatttttgtcaacagtagagggaagagagcgtctaaagggagcaagacttgcgg

SEQ ID NO: 35110 - DNA, 80 bp, synthetic construct
  source 1..80: mol_type = other DNA
catatgttgtgaacagcctagtacagagagcagaaaaattcagacctcttattcattccctaggagacttccccgtgtct

SEQ ID NO: 35111 - DNA, 80 bp, synthetic construct
  source 1..80: mol_type = other DNA
aactgtgccagttgtacattgccggggatcaagtcctgtccatgtgcggaaactcaggctacgagggcatcaaaatatta

SEQ ID NO: 35112 - DNA, 80 bp, synthetic construct
  source 1..80: mol_type = other DNA
gagcgatatgttgtgaacagcctagtacagagagcagagaaaatcagacctctcattcactccctaggagacttccccgt

SEQ ID NO: 35113 - DNA, 80 bp, synthetic construct
  source 1..80: mol_type = other DNA
gtgtataaaggataaggtgagtcagcttgaagggacttttggccccagtgcaaaaaggttttttagagatctggatcaaa

SEQ ID NO: 35114 - DNA, 80 bp, synthetic construct
  source 1..80: mol_type = other DNA
tcggttatgtcaccactacgttcaggagaaagcactttcgccctacaccggacgcgtgtagggccgcatacgactggaag

SEQ ID NO: 35115 - DNA, 80 bp, synthetic construct
  source 1..80: mol_type = other DNA
atggcaggtgaccctagatatgaagagtctatgcacaatccatatcctgactatcattggctccggacggtaaagatcac

SEQ ID NO: 35116 - DNA, 80 bp, synthetic construct
  source 1..80: mol_type = other DNA
taatgcaccccttggcagacccatcaacagttgttaaggatgctgatgaggctgaggatttcgtagaggtgcaccttcct

SEQ ID NO: 35117 - DNA, 80 bp, synthetic construct
  source 1..80: mol_type = other DNA
gctttgtggatgaaagaggtctgtacaagtctctaaaaggggcatgcaaactcaagctatgtgcggttctcggacttaga

SEQ ID NO: 35118 - DNA, 80 bp, synthetic construct
  source 1..80: mol_type = other DNA
tggcttgtaactctagcttgagcctctcatcccattggatcaggttgatttacaagatagtaaagaccaccagattcatc

SEQ ID NO: 35119 - DNA, 80 bp, synthetic construct
  source 1..80: mol_type = other DNA
ggaagaatcgaggatctatctggggaagtcgagagacaccttcacgggtataacagatggattaccctcgaggacatcag

SEQ ID NO: 35120 - DNA, 80 bp, synthetic construct
  source 1..80: mol_type = other DNA
ttttcttgtctcgtttcaactctttgatgatcctgctttctccccctgaaccccggtattcaggcgactggatatctcaa

SEQ ID NO: 35121 - DNA, 80 bp, synthetic construct
  source 1..80: mol_type = other DNA
aacctctctagaaccttagaagagtccttctataactcagagattcatgggatcaatcggatgacacagactccccagag

SEQ ID NO: 35122 - DNA, 80 bp, synthetic construct
  source 1..80: mol_type = other DNA
aataggaagagtttgggcctgctcttctgagagggcagatcttctaagagaaatctcgtgggggagaaaggtggttggta

SEQ ID NO: 35123 - DNA, 80 bp, synthetic construct
  source 1..80: mol_type = other DNA
gaacatgcccagaagactggactagctatggaatcttgattgcaaggaaaggagacaagataactccaaactccctcgta

SEQ ID NO: 35124 - DNA, 80 bp, synthetic construct
  source 1..80: mol_type = other DNA
gacataaaacgtacagatgtagaagggaactgggctctaacaggaggaatggagttgactagggatcccaccattccaga

SEQ ID NO: 35125 - DNA, 80 bp, synthetic construct
  source 1..80: mol_type = other DNA
agaagagtccttctataactcggagattcatggaatcaatcggatgacacagactccccagagaataggaagagtttggg

SEQ ID NO: 35126 - DNA, 80 bp, synthetic construct
  source 1..80: mol_type = other DNA
cctgctcttctgagagggcagatcttctaagagaaatctcgtgggggagaaaggtggttggtacgaccgtccctcacccc

SEQ ID NO: 35127 - DNA, 80 bp, synthetic construct
  source 1..80: mol_type = other DNA
ggctagcgtcgtggctctcggaaaacaggggaggaccggttccaagtgagaaggtcattattacggctctctccaaaccg

SEQ ID NO: 35128 - DNA, 80 bp, synthetic construct
  source 1..80: mol_type = other DNA
gatctgaggaacttaaccacctggaaatacttccagtcagtccaaaaacaggtgaacatgtcttatgacctaatcatttg

SEQ ID NO: 35129 - DNA, 80 bp, synthetic construct
  source 1..80: mol_type = other DNA
aaatccgagactaggggcctcttgtgacattttcaccaatagcagcgggaagagagcatctaaggggagcaagacctgtg

SEQ ID NO: 35130 - DNA, 80 bp, synthetic construct
  source 1..80: mol_type = other DNA
ctctggattcaacagtcctctctggactcttctcaacagggtagattcaagagtcacaagactttcattaatcatctcaa

SEQ ID NO: 35131 - DNA, 80 bp, synthetic construct
  source 1..80: mol_type = other DNA
aggtgggtgggactgcagcccagtcgatgatctctctttggctgtatggagcccactcagaatcaaacaggagccggaag

SEQ ID NO: 35132 - DNA, 80 bp, synthetic construct
  source 1..80: mol_type = other DNA
tgtataactgacctggcccatttctattcaaagtcagcccccatagagaagttattaaattgcacacttggaaatagagg

SEQ ID NO: 35133 - DNA, 80 bp, synthetic construct
  source 1..80: mol_type = other DNA
tcgggagtgtcgaggatctatcgagagaagttgaaagacaccttcaagggtataacaggtggatcaccctcgaagacctc

SEQ ID NO: 35134 - DNA, 80 bp, synthetic construct
  source 1..80: mol_type = other DNA
acgatgcacctagaaaaaaacaagactctgaatcataacctctgattgtttgattattttttttgtctttattgtttttt

SEQ ID NO: 35135 - DNA, 80 bp, synthetic construct
  source 1..80: mol_type = other DNA
gaagagaaaaccatcttagctctatggaaagatttgacctccgtggatattgggaaggacttggtaaagtttaaagatca

SEQ ID NO: 35136 - DNA, 80 bp, synthetic construct
  source 1..80: mol_type = other DNA
tttccctcagtcacagggtttataacccaggtaacctcgtccttttcatctgagttatacctccgattctccaaacgagg

SEQ ID NO: 35137 - DNA, 80 bp, synthetic construct
  source 1..80: mol_type = other DNA
ctagggactgatatcaaaggttgtagacgggccaagaggtatttcggatgaccccgtgcttgggcacagacagaggtcat

SEQ ID NO: 35138 - DNA, 80 bp, synthetic construct
  source 1..80: mol_type = other DNA
agtacatcccataatagcagactcaagatgagtcggttgagagaggcaatctgcctccaatgaaggacataagcaatagc

SEQ ID NO: 35139 - DNA, 80 bp, synthetic construct
  source 1..80: mol_type = other DNA
ttcagttagatgatggaaaatcttctaacctcggtgagatgtccaagacgggggaaagcaagtatcgagaggactttcag

SEQ ID NO: 35140 - DNA, 80 bp, synthetic construct
  source 1..80: mol_type = other DNA
aggagacttcacttggacgatggaaaatcgtcaaacctcggtgagatgtccaagacgggggaaggcaaatatcgagagga

SEQ ID NO: 35141 - DNA, 80 bp, synthetic construct
  source 1..80: mol_type = other DNA
atctagatcgtctctattagactacagctgcttgtaaatcggatatccccagaagcctgcacgtcctaagacttttgtgt

SEQ ID NO: 35142 - DNA, 80 bp, synthetic construct
  source 1..80: mol_type = other DNA
gatgtatcttgaaaaaaacaagatcttgaatccgagcctctggctgtttgattgtttctttcatctttgttggttttttg

SEQ ID NO: 35143 - DNA, 80 bp, synthetic construct
  source 1..80: mol_type = other DNA
catggtgccgagaatctattgattgtgtatatccatcatgaaaaaaactaacactcctccttttgaaccatcccaaacat

SEQ ID NO: 35144 - DNA, 80 bp, synthetic construct
  source 1..80: mol_type = other DNA
cctgctaaccgaacttttaaacttagtccctctagatgataaaatctgagatgtcctagagtcaacatgaaaaaaacatg

SEQ ID NO: 35145 - DNA, 80 bp, synthetic construct
  source 1..80: mol_type = other DNA
gtcatataaaagtgggggtgagactagattgtaaaagctggtcgtcctttcgacgcttcaagttctgaaggtcacctccc

SEQ ID NO: 35146 - DNA, 80 bp, synthetic construct
  source 1..80: mol_type = other DNA
gagactagattgtaaaagctggtcgtcctttcgacgcttcaagttctgaaggtcacctccccttggggttggggggaatc

SEQ ID NO: 35147 - DNA, 80 bp, synthetic construct
  source 1..80: mol_type = other DNA
tgatcaaacaaggtcatgttggttctcataatacgggaaatcttctagcagtttcagtaaccaacggtgctttcattctt

SEQ ID NO: 35148 - DNA, 80 bp, synthetic construct
  source 1..80: mol_type = other DNA
cgggaactgagatcaaaggttgtagacgggccaagaggtatttcgggtgactccgtgcttgggaacagacagaggttata

SEQ ID NO: 35149 - DNA, 80 bp, synthetic construct
  source 1..80: mol_type = other DNA
tcatcaagcccgtcccaactcattcgctgagtttttaaacaaaacatattcgaatgactcatgaggagctgaataacatg

SEQ ID NO: 35150 - DNA, 80 bp, synthetic construct
  source 1..80: mol_type = other DNA
atggatgaaggagaggaccctagcctcctattccagtcgtacctggacaacgttggagtccagatggtaagacaaatgag

SEQ ID NO: 35151 - DNA, 80 bp, synthetic construct
  source 1..80: mol_type = other DNA
cctcaggaaggccctcagaggacaaatcgacccaaaccactggtcgagaactcaagaaggagacaacatccaccccctct

SEQ ID NO: 35152 - DNA, 80 bp, synthetic construct
  source 1..80: mol_type = other DNA
aaaatccaagactagggacgtcttgcgacatttttgccaatagtagagggaagagagcatctaaagggggtaagacttgc

SEQ ID NO: 35153 - DNA, 80 bp, synthetic construct
  source 1..80: mol_type = other DNA
gaccctgattgccttgatgttgataatttttctaatgacatgttgtagaagagtcaatcgaccagagtctacgggccgca

SEQ ID NO: 35154 - DNA, 80 bp, synthetic construct
  source 1..80: mol_type = other DNA
attctcgattccttgcccgagaccatcctctgactccctatatcaaaacccaaacatggccacccaaacatgtggtagat

SEQ ID NO: 35155 - DNA, 80 bp, synthetic construct
  source 1..80: mol_type = other DNA
gaatatccagaatggtttctggggcagtacctcatttccagaagcttccagatatccgtctgagaccaggtgattttgaa

SEQ ID NO: 35156 - DNA, 80 bp, synthetic construct
  source 1..80: mol_type = other DNA
tctctaagtggtagggaaaaatctcgccatatagggtcagctcaggggctcttatactcaatattagtggcaattcacga

SEQ ID NO: 35157 - DNA, 80 bp, synthetic construct
  source 1..80: mol_type = other DNA
gtgtcagttatacatcgcgggggatcaagtcttgtccatgtgtggaaactccggctatgaagtcattaagatattagagc

SEQ ID NO: 35158 - DNA, 80 bp, synthetic construct
  source 1..80: mol_type = other DNA
catatatcgtgaacagtttagtccagagagctgaaaggtttaggcctcttattcattccttgggagactttcctgtattt

SEQ ID NO: 35159 - DNA, 80 bp, synthetic construct
  source 1..80: mol_type = other DNA
actcataaagagttgaatcataggattctaggaaacgacaacttgtgtacatcttccatgaaaaaaactaacacctctcc

SEQ ID NO: 35160 - DNA, 80 bp, synthetic construct
  source 1..80: mol_type = other DNA
attctaggaaacggcaacttgtgtacatcttccatgaaaaaaactaacacctctccttgagaaccatcctagatatgagc

SEQ ID NO: 35161 - DNA, 80 bp, synthetic construct
  source 1..80: mol_type = other DNA
atggatgaaggggaggaccccagcctcttgttccaatcatatctggacaatgtaggagtccaaatagtcagacaaatgag

SEQ ID NO: 35162 - DNA, 80 bp, synthetic construct
  source 1..80: mol_type = other DNA
tcataggattctaggaaacgacaacttgtgtacatccttcatgaaaaaaactaacacctctccttgcgaaccatcctaga

SEQ ID NO: 35163 - DNA, 80 bp, synthetic construct
  source 1..80: mol_type = other DNA
cttttcacgaggccctctaaaagggtacttaggctcatctacttccatgtcgacccagctgtttcacgcctgggaaaaag

SEQ ID NO: 35164 - DNA, 80 bp, synthetic construct
  source 1..80: mol_type = other DNA
cactctatctggttttcaaaacttatggtaccatgcttgtgaaccctgactacagagcaattcaacatctatccagagca

SEQ ID NO: 35165 - DNA, 80 bp, synthetic construct
  source 1..80: mol_type = other DNA
gaagttctttcgggatgcagagtatttgacttcttccacccttcgagaaatgagccttgtattgttcaactgtagcagtc

SEQ ID NO: 35166 - DNA, 80 bp, synthetic construct
  source 1..80: mol_type = other DNA
attagatcccgatcatctctgttagattatagctgcttgtaagactaagcactctcgatggaatgtacagactgagatta

SEQ ID NO: 35167 - DNA, 80 bp, synthetic construct
  source 1..80: mol_type = other DNA
tgggacggtgcaacctgaaaaaaacaagatcccgttcataacttctgtttacttgattgttttttttatctttattgttt

SEQ ID NO: 35168 - DNA, 80 bp, synthetic construct
  source 1..80: mol_type = other DNA
gagcaagatttttgtcaacccaagtgcaatcagggcaggcttggctgacctggagatggcagaggaaactgtagatttag

SEQ ID NO: 35169 - DNA, 80 bp, synthetic construct
  source 1..80: mol_type = other DNA
tagttgccaagaacatcgaagataatcaagctcatctccaaggagaacccatagaggtggacagtcttcctgaagacatg

SEQ ID NO: 35170 - DNA, 80 bp, synthetic construct
  source 1..80: mol_type = other DNA
agacgacttcagttagacgatgaaaaaccatctggcctcggtgtgattgccaaagcaggggagagcaaatgtcaggaaga

SEQ ID NO: 35171 - DNA, 80 bp, synthetic construct
  source 1..80: mol_type = other DNA
ctttcagatggacgagggggaggaccccgccctcttgttccagtcgtacctagacaatattggagttcaaatggtcagac

SEQ ID NO: 35172 - DNA, 80 bp, synthetic construct
  source 1..80: mol_type = other DNA
gatcaggagagaggttcctcaagatatggtctcagactgttgaggagatcatatcctatgtctcggtcaatttccccagt

SEQ ID NO: 35173 - DNA, 80 bp, synthetic construct
  source 1..80: mol_type = other DNA
ctgccaaggaaagcctcagaagacaaggctacccagactgccaaccaggaactcaagaaaaagacaatgtctgtttcttc

SEQ ID NO: 35174 - DNA, 80 bp, synthetic construct
  source 1..80: mol_type = other DNA
tcagcgagaaagtaaatcatctaaagctaaaatggcggcccaaaccgcctccggtcctcctgctctagaatggtccgcca

SEQ ID NO: 35175 - DNA, 80 bp, synthetic construct
  source 1..80: mol_type = other DNA
tctgctgaccaaaccctcaaactcagtcctgctatgcgatcaaatccagcctgctccaaacccaaagtgaaaaaacaggc

SEQ ID NO: 35176 - DNA, 80 bp, synthetic construct
  source 1..80: mol_type = other DNA
tttcgtgtcggctcctccagatgatgatgacttgtggttaccccctccggaatatgttccattgaaggaactctcgggta

SEQ ID NO: 35177 - DNA, 80 bp, synthetic construct
  source 1..80: mol_type = other DNA
agaaaaacatgagaaacttttgtataaatggagaggtcaaagtgtgtagtccaaatggctattcatttaggatcctgagg

SEQ ID NO: 35178 - DNA, 80 bp, synthetic construct
  source 1..80: mol_type = other DNA
tatttccctcgttgtgtctcgggaaattccccatctacaccataccggaaaagctcggcccttggagtcccatcgacata

SEQ ID NO: 35179 - DNA, 80 bp, synthetic construct
  source 1..80: mol_type = other DNA
catcatctcagctgtcctaacaatttggttgtggaggacgagggttgcgacagtctgtcagggttttcttacatggaact

SEQ ID NO: 35180 - DNA, 80 bp, synthetic construct
  source 1..80: mol_type = other DNA
ttatggatggaacgtgggtcgctattcagacaccaggtgaggccaaatggtgctctcctgatcagctggtaaatctacat

SEQ ID NO: 35181 - DNA, 80 bp, synthetic construct
  source 1..80: mol_type = other DNA
gactttcgttcagatgagatagaacatctcgtcgtggaggagttgatcaagaagagagaagaatgtctagatgcactaga

SEQ ID NO: 35182 - DNA, 80 bp, synthetic construct
  source 1..80: mol_type = other DNA
ctagcgaccgtgatactgacaatcttcttgttaatatgttgcagaagggttaacagaacaaaaccaaaacaacaaggtct

SEQ ID NO: 35183 - DNA, 80 bp, synthetic construct
  source 1..80: mol_type = other DNA
tggggagtcaggaaggaaagtatcggttactcctcaaaatgggaaggtcatgtcctcatgggagtattacaagagtgagg

SEQ ID NO: 35184 - DNA, 80 bp, synthetic construct
  source 1..80: mol_type = other DNA
gcaggaccagtctgtgagtgctggccatctcctccatatcttgcgttcagaagatcacctctcttctggatctgggggaa

SEQ ID NO: 35185 - DNA, 80 bp, synthetic construct
  source 1..80: mol_type = other DNA
tctcttgttttgacagtcttttgtggactccgtgctacaaggcaaaattcgagggacaagaaactttcattaatcatccc

SEQ ID NO: 35186 - DNA, 80 bp, synthetic construct
  source 1..80: mol_type = other DNA
aactgaccagacacagttatgtagattctgataatgtatgacgtcttctgacaatgtcagtgaccaatggtgctctcatc

SEQ ID NO: 35187 - DNA, 80 bp, synthetic construct
  source 1..80: mol_type = other DNA
ccccgaggactgataccaaaggttgtggacaagccaactgatatctcagataattctaggcttgagctggggcagggacc

SEQ ID NO: 35188 - DNA, 80 bp, synthetic construct
  source 1..80: mol_type = other DNA
gtggctagtccccctacactagactaaataatggttaactgagggaagcgatttgcctcctatgaaggacataagcaata

SEQ ID NO: 35189 - DNA, 80 bp, synthetic construct
  source 1..80: mol_type = other DNA
gatcacaatcatcttacatcccgataaggtgtgcttaactacaaagggctgggccatccaagcttttcagccaagaaaaa

SEQ ID NO: 35190 - DNA, 80 bp, synthetic construct
  source 1..80: mol_type = other DNA
caatctcaactctcctctaatagaggatccagccaaactaatgttagaatggttgaagacaggaaataggcctctccgga

SEQ ID NO: 35191 - DNA, 80 bp, synthetic construct
  source 1..80: mol_type = other DNA
taactttaacagacaattgctctaggtcttacaaagttttgaaggattatttcaagaaagtggatataggatctatcaaa

SEQ ID NO: 35192 - DNA, 80 bp, synthetic construct
  source 1..80: mol_type = other DNA
gtgtcagctatatatcgctggagatcatgtcttgtctatgtgcgggaactctggttatgaggtcattaaaatattggagc

SEQ ID NO: 35193 - DNA, 80 bp, synthetic construct
  source 1..80: mol_type = other DNA
aaatggtatattgattcaagactcctctcaaaggaccaccccctaactccttatatcaaaacccagacgtggcctccaaa

SEQ ID NO: 35194 - DNA, 80 bp, synthetic construct
  source 1..80: mol_type = other DNA
gatgtaataaatgcataaggcctatcgatgatatcacccttgatacctctcagatcttcgagttcccagatgtctcaaga

SEQ ID NO: 35195 - DNA, 80 bp, synthetic construct
  source 1..80: mol_type = other DNA
tagaggagagatattttctattccccaaaaggtccccgctgcttacccgaccacgatgaaagaaggtaacagatctgttc

SEQ ID NO: 35196 - DNA, 80 bp, synthetic construct
  source 1..80: mol_type = other DNA
tcggactttagaagctctaagatgacatatctgactctcatcacataccagtctcatctgttgcttcagaaggttgagaa

SEQ ID NO: 35197 - DNA, 80 bp, synthetic construct
  source 1..80: mol_type = other DNA
atctaggtcatctttgctagaatacagttgcttgtagaccggatgatcccgaaagcctacacatactacgactcgtgtat

SEQ ID NO: 35198 - DNA, 80 bp, synthetic construct
  source 1..80: mol_type = other DNA
cctgctaacctaacttataaactcagttcctccagacaataaaatctgagatgtcccagagtctacatgaaaaaaacagg

SEQ ID NO: 35199 - DNA, 80 bp, synthetic construct
  source 1..80: mol_type = other DNA
gattgccttgatgctgataatttctctaatgacatgttgtagaggagtccatcgaccaaactctatacaacaccggctcg

SEQ ID NO: 35200 - DNA, 80 bp, synthetic construct
  source 1..80: mol_type = other DNA
gggagactagactgtgaggatcggttattcttttgacacctcaagtcctgaaaatcaccttcccccagggctgagggagg

SEQ ID NO: 35201 - DNA, 80 bp, synthetic construct
  source 1..80: mol_type = other DNA
aatctctgggttcaatggtcctctttgaaatccatgcaacagggtagattcaagaatcataagaccttcatccatcaccc

SEQ ID NO: 35202 - DNA, 80 bp, synthetic construct
  source 1..80: mol_type = other DNA
cagtcgaccagtcatggttatgtagattctcataatgagggaaatattctagcagtttcagtgaccaacggtgctttcat

SEQ ID NO: 35203 - DNA, 80 bp, synthetic construct
  source 1..80: mol_type = other DNA
tctccagggactgataccaaaggttgtgggcaggccagggggtgtttcggatgaatccgtgagtgtgcttggacagaggt

SEQ ID NO: 35204 - DNA, 80 bp, synthetic construct
  source 1..80: mol_type = other DNA
cacagtgtgtctcctgataacggacccaacaggagtgaactgagaattgcaatctgcctcccatgaaggacataagcaat

SEQ ID NO: 35205 - DNA, 80 bp, synthetic construct
  source 1..80: mol_type = other DNA
catgaatgatctggcccatttctattctaaatcatcccccatagagaagctgttaaattgcacgctagggaatagagggc

SEQ ID NO: 35206 - DNA, 80 bp, synthetic construct
  source 1..80: mol_type = other DNA
gtgcatgtcccgatgactgggttagctacgggatcttgatagcacggaagggcgacaagattaccccaggcactcttgtg

SEQ ID NO: 35207 - DNA, 80 bp, synthetic construct
  source 1..80: mol_type = other DNA
aagaagtttcaaaaccctcttatctcgggcttgagagttgtccagtgggcaactggcgcccattacaagctcaagcccat

SEQ ID NO: 35208 - DNA, 80 bp, synthetic construct
  source 1..80: mol_type = other DNA
ttgagagttgtccagtgggcaactggcgcccattacaagctcaagcccattctagacgatctcaatgttttcccatccct

SEQ ID NO: 35209 - DNA, 80 bp, synthetic construct
  source 1..80: mol_type = other DNA
tctagacgatctcaatgttttcccatccctatgtctagtagtaggagatggatcggggggaatatcgagagcagtcctca

SEQ ID NO: 35210 - DNA, 80 bp, synthetic construct
  source 1..80: mol_type = other DNA
atcaggtccagatcatctctgctagactacagttgcttatgagctggagatttctgtagatctgtatatacttagactct

SEQ ID NO: 35211 - DNA, 80 bp, synthetic construct
  source 1..80: mol_type = other DNA
ccaagtgtgtcggacttagacccgtacgataaatctcttcattccagagtttttcccagcggtaaatgctcaggaataac

SEQ ID NO: 35212 - DNA, 80 bp, synthetic construct
  source 1..80: mol_type = other DNA
agtgtcttctacctattgtcccactaaccatgactatactatctggatgccggaaaatccgagactagggacctcttgtg

SEQ ID NO: 35213 - DNA, 80 bp, synthetic construct
  source 1..80: mol_type = other DNA
atgattgcactaatgttgacgattttcttgacgacgtgttgcagaaaaactaacggagcagggtcaatacaacaccgtcc

SEQ ID NO: 35214 - DNA, 80 bp, synthetic construct
  source 1..80: mol_type = other DNA
gaaagatttgacttcagtcgatattggaaaagatttagtcaagttcaaagatcaaatatgggggttgttaattgtgacga

SEQ ID NO: 35215 - DNA, 80 bp, synthetic construct
  source 1..80: mol_type = other DNA
tttttttgtctcgcttcaactctctgatgattctgctttctccccctgaaccccgatattcagacgacctgatatctcaa

SEQ ID NO: 35216 - DNA, 80 bp, synthetic construct
  source 1..80: mol_type = other DNA
ctatgccagctgtatattgccggggatcaagtattgtccatgtgtggaaactccggttatgaagtaattaaaatactgga

SEQ ID NO: 35217 - DNA, 80 bp, synthetic construct
  source 1..80: mol_type = other DNA
atcaaagacaaggtgagtcaacttgagggaacattcggtcctagtgcaaaaaggttttttagagttctggatcagttcga

SEQ ID NO: 35218 - DNA, 80 bp, synthetic construct
  source 1..80: mol_type = other DNA
caacatacatgacctggtctttgtatatggctgttacaggcattggggacatccttatatagattacagaaagggtctgt

SEQ ID NO: 35219 - DNA, 80 bp, synthetic construct
  source 1..80: mol_type = other DNA
cctgctgacagacttttaaactcagttctattagacgataaagcctgagctgttcttgactctacatgaaaaaaacaggc

SEQ ID NO: 35220 - DNA, 80 bp, synthetic construct
  source 1..80: mol_type = other DNA
cgccatgcagccagaaccatgatcggggattacagccctaacaaaaagatgtcacgcaaggcaggatgttccgagtgggt

SEQ ID NO: 35221 - DNA, 80 bp, synthetic construct
  source 1..80: mol_type = other DNA
atttgtggatgaaagaggcttgtacaagtctctaaagggagcatgcaaaatgaagctatgtggggttctaggacttagac

SEQ ID NO: 35222 - DNA, 80 bp, synthetic construct
  source 1..80: mol_type = other DNA
gactattatgaccacaaagtccgtgagtttcagacgtcttagtcatttgaggaagctagtccctgggtttggaaaggcgt

SEQ ID NO: 35223 - DNA, 80 bp, synthetic construct
  source 1..80: mol_type = other DNA
gctctgactgcattaatgttgcagattttcttaatgacgtgttgcagaaagactattagagcagagtcaatacaacacag

SEQ ID NO: 35224 - DNA, 80 bp, synthetic construct
  source 1..80: mol_type = other DNA
tcctggagagacagggaggaaagtgtcggtgacttttcacaacggaagggtcatatcttcatgggaatcatataaaagcg

SEQ ID NO: 35225 - DNA, 80 bp, synthetic construct
  source 1..80: mol_type = other DNA
gaagtgagaccaagctgtgaagacaagtcatctcctctacatttcgagtcccgaagacctcatctcctcggggtaagggg

SEQ ID NO: 35226 - DNA, 80 bp, synthetic construct
  source 1..80: mol_type = other DNA
aacatctctggatttaacagtcctcctcggacttcttgcaacagggtagattcaagagtcatgatacttccattaatcat

SEQ ID NO: 35227 - DNA, 80 bp, synthetic construct
  source 1..80: mol_type = other DNA
cgcgactccttgcaaaagaccatcccttaaatccttatatcaaaactcagacatggccacccaaacatatagtagacttg

SEQ ID NO: 35228 - DNA, 80 bp, synthetic construct
  source 1..80: mol_type = other DNA
tagaggagaaatattttctattccccaaaaaattccagccgcttacccgactacaatgaaggaaggcaatagatctattt

SEQ ID NO: 35229 - DNA, 80 bp, synthetic construct
  source 1..80: mol_type = other DNA
cccagctatcaaagatctgcagaaacccagtatctccctagggaaggctcccgacttaaacaaggcctataagtcagttc

SEQ ID NO: 35230 - DNA, 80 bp, synthetic construct
  source 1..80: mol_type = other DNA
tgtagaactaaagaacaactagcaacacttctcatcttaaaatttccatcatgatgatcgatccaggagaggtttatgat

SEQ ID NO: 35231 - DNA, 80 bp, synthetic construct
  source 1..80: mol_type = other DNA
ggcagcatagaagacctatcaggagaggtagaacgacacctccatggctacaacagatggatcaccctcgaggatatcag

SEQ ID NO: 35232 - DNA, 80 bp, synthetic construct
  source 1..80: mol_type = other DNA
atctagatcatccctactagactacagttgcttgtaaaccggatcttaccgaaagcctgcacatgctaagactcttgtat

SEQ ID NO: 35233 - DNA, 80 bp, synthetic construct
  source 1..80: mol_type = other DNA
ttcacttggacgatgaaaaaccgtccagccttggagagatggctaatgtgggggaaggcaagtatcgagaggactttcag

SEQ ID NO: 35234 - DNA, 80 bp, synthetic construct
  source 1..80: mol_type = other DNA
ctccaggaaggtcttcggaggacaaatcgactcagactactggcagagagctcaagaaggagacgacatctaatcattct

SEQ ID NO: 35235 - DNA, 80 bp, synthetic construct
  source 1..80: mol_type = other DNA
gacgtgcataagcaggtctcaggagttgatctgggtctccccaactggtggaagtatgtattgatgagtgcaggggtcct

SEQ ID NO: 35236 - DNA, 80 bp, synthetic construct
  source 1..80: mol_type = other DNA
caggaactgataccaaaggctgtggacaggcctaggggtgtttcgaatgaccctatgcttgggcgcagaaagaggtcgtg

SEQ ID NO: 35237 - DNA, 80 bp, synthetic construct
  source 1..80: mol_type = other DNA
tgtgaaccagaagaacaactagcaacacttctcatcctgaaacccatatcaagatgctagatccaggggaggtctatgat

SEQ ID NO: 35238 - DNA, 80 bp, synthetic construct
  source 1..80: mol_type = other DNA
caatctcaactctcctttgattgaagaccctgccagattaatgttagaatggttgaaaacagggaacaggccctatcgga

SEQ ID NO: 35239 - DNA, 80 bp, synthetic construct
  source 1..80: mol_type = other DNA
taaacagtctagtccagagggcagagaagttcaggcctctcatccactctttaggagactttcctgtattcataagagac

SEQ ID NO: 35240 - DNA, 80 bp, synthetic construct
  source 1..80: mol_type = other DNA
aaggtgaatcaactcgaggggactttcggtcccagtgcaaaaaggttctttagggttctagatcagtttgacaacataca

SEQ ID NO: 35241 - DNA, 80 bp, synthetic construct
  source 1..80: mol_type = other DNA
caatgaagaagatgacttatccgtagaggcagagatcgctcatcagattgctgagagcttttccaagaagtacaaatttc

SEQ ID NO: 35242 - DNA, 80 bp, synthetic construct
  source 1..80: mol_type = other DNA
atttagagttgcagcgaggaactttgtctaaagtttcaattattgtagctataatgatagtcttttccaatagggtgttc

SEQ ID NO: 35243 - DNA, 80 bp, synthetic construct
  source 1..80: mol_type = other DNA
aatgtctcgaaacccctgactgaccctctattctacccgccatctgatcctaaaatcttgagacacttcaacatatgctg

SEQ ID NO: 35244 - DNA, 80 bp, synthetic construct
  source 1..80: mol_type = other DNA
cagtaccatgatgtacttgtccactgccttgggggatgtgcccagctttgcgagacttcatgacctgtacaacagaccca

SEQ ID NO: 35245 - DNA, 80 bp, synthetic construct
  source 1..80: mol_type = other DNA
ttatttcaagaaacaagttattcgggggaatatctatctgtcttggagttggtctgatgacacttcggtgtttaaaaggg

SEQ ID NO: 35246 - DNA, 80 bp, synthetic construct
  source 1..80: mol_type = other DNA
atgataaacctcaacaaattatgtacatctttcatgaaaaaaactaacacccctcctttcgaaccatctcagacatgagc

SEQ ID NO: 35247 - DNA, 80 bp, synthetic construct
  source 1..80: mol_type = other DNA
tgtctggcatgaatgcagctaagctcgaccctgacgatgtatgctcttatctagcggctgcaatgcagttctttgaggga

SEQ ID NO: 35248 - DNA, 80 bp, synthetic construct
  source 1..80: mol_type = other DNA
tcctatgaacacaccccctagcttagtcccactatgcaataaaacctggtctgctccaaattccatatgaaaaaaacagg

SEQ ID NO: 35249 - DNA, 80 bp, synthetic construct
  source 1..80: mol_type = other DNA
gcatgtcccgatgattggattagctacggaatcctgatagcacggaagggcgacaaaatcaccccaggctctcttgtgga

SEQ ID NO: 35250 - DNA, 80 bp, synthetic construct
  source 1..80: mol_type = other DNA
ctcagctgtcccaacaatctggttgcagaaaacgacgggtgcaacagtctgtcagggttttcctatatggaactgaaggt

SEQ ID NO: 35251 - DNA, 80 bp, synthetic construct
  source 1..80: mol_type = other DNA
tatcagacgtactaatgtggaagggagttgggctctaacagggggcatggagttgacgagagatcccactgttccagagc

SEQ ID NO: 35252 - DNA, 80 bp, synthetic construct
  source 1..80: mol_type = other DNA
ccctgattccttatataaggactcaaacgtggcctcccaaacacatagtagatttggtgggggatacatggcataagctc

SEQ ID NO: 35253 - DNA, 80 bp, synthetic construct
  source 1..80: mol_type = other DNA
cctatcactcagatcttcgaaatccccgaatcaatggacccatctgagatactagatgataagtcacactctttcactag

SEQ ID NO: 35254 - DNA, 80 bp, synthetic construct
  source 1..80: mol_type = other DNA
ctcgcatcatggctatcagaaaacagagggggacctgtccccagtgagaaagtcatcatcacggctctttccaaacctcc

SEQ ID NO: 35255 - DNA, 80 bp, synthetic construct
  source 1..80: mol_type = other DNA
ttagtttgttaatgatagatcgtgagtcccagaccaggaacacaagaactaagatactggcccagggggataatcaggta

SEQ ID NO: 35256 - DNA, 80 bp, synthetic construct
  source 1..80: mol_type = other DNA
aactcagagttcagagaagcaatcctcttgtctaagactcatagagataactttatacttttcttaaagtctgtcgagcc

SEQ ID NO: 35257 - DNA, 80 bp, synthetic construct
  source 1..80: mol_type = other DNA
aggatatctagaatggtttctggagcagtgcctaattttcgaaaacttcctgatattcgtctaagaccgggggacttcga

SEQ ID NO: 35258 - DNA, 80 bp, synthetic construct
  source 1..80: mol_type = other DNA
tcctgtgctatcttcagcatgtattgcgctacgaacgagaagcaatcacagcatctccggagaatgactggttatggata

SEQ ID NO: 35259 - DNA, 80 bp, synthetic construct
  source 1..80: mol_type = other DNA
ttctcagactttagaagctccaagatgacatacctgactctgatcacctaccagtctcatcttttacttcagagagttga

SEQ ID NO: 35260 - DNA, 80 bp, synthetic construct
  source 1..80: mol_type = other DNA
cctctaaggactggtaccaaaggttgtggacaagctgaccggcatctcagacaaccctgtttcttagcttgggcagaggc

SEQ ID NO: 35261 - DNA, 80 bp, synthetic construct
  source 1..80: mol_type = other DNA
aggtgggggttcgacaaatactccaaatggtatctagatccacgacttcttgcgagggatcaccccctgactccttatat

SEQ ID NO: 35262 - DNA, 80 bp, synthetic construct
  source 1..80: mol_type = other DNA
acatccaaaggctgctgaaagattccttgcgcaggacgaggtgggtggatcaagaggtgcgccatgctgctagaactatg

SEQ ID NO: 35263 - DNA, 80 bp, synthetic construct
  source 1..80: mol_type = other DNA
acagggagttacagccccaataggagggtatcacgcaaagcagggtgttcagagtgggtctgcactgcgcagcaggttgc

SEQ ID NO: 35264 - DNA, 80 bp, synthetic construct
  source 1..80: mol_type = other DNA
tgtttcaacctctgcaaacccagctcctgcttccgagctggatatcaggactctctctagaaggcttcagaatccattga

SEQ ID NO: 35265 - DNA, 80 bp, synthetic construct
  source 1..80: mol_type = other DNA
gacttgaggaacttgactacatggagatacttccagtcagttcaagaacaggtaaatatgtcctatgaccttatcatctg

SEQ ID NO: 35266 - DNA, 80 bp, synthetic construct
  source 1..80: mol_type = other DNA
cactatacctggtcttcaagacgtatggtaccatgcttgtaaatccggactacaaagcaattcaacatttgtccagagct

SEQ ID NO: 35267 - DNA, 80 bp, synthetic construct
  source 1..80: mol_type = other DNA
tttcccgcggtcacaggattcataactcagatgacatcgtctttctcatctgagctatacctcagattctcaaagcgagg

SEQ ID NO: 35268 - DNA, 80 bp, synthetic construct
  source 1..80: mol_type = other DNA
gaaattctttagggatgcagaatatttgacctcttctaccctccgagaaatgagccttgtattattcaattgtagcagcc

SEQ ID NO: 35269 - DNA, 80 bp, synthetic construct
  source 1..80: mol_type = other DNA
aggaaccttgtctaaagtttcaattattgtagctataatgatggtcttttccaatagggtgttcaatgtctcgaagcccc

SEQ ID NO: 35270 - DNA, 80 bp, synthetic construct
  source 1..80: mol_type = other DNA
ggaagcatagaggacctgtccagggaaatagagaagcaccttcgagggtacaacaggtggatcacacttgatgacatcag

SEQ ID NO: 35271 - DNA, 80 bp, synthetic construct
  source 1..80: mol_type = other DNA
atctagatcatctcttttagattatagttgcctgtaaatcgggcactccagagggaatgtataaactggtaatcttaaac

SEQ ID NO: 35272 - DNA, 80 bp, synthetic construct
  source 1..80: mol_type = other DNA
ggtacactgtgaaaaaaactggatcccaatccttaacctctatttgcttgattatttttccatcttcattgtttttttgt

SEQ ID NO: 35273 - DNA, 80 bp, synthetic construct
  source 1..80: mol_type = other DNA
cagaagtggctttggcagatgacgggaccgtcaactctgatgatgaggactacttctcaagtgagaccaggagtcctgaa

SEQ ID NO: 35274 - DNA, 80 bp, synthetic construct
  source 1..80: mol_type = other DNA
tcatcaggcccgccctaactctttcgctgaatttttaaacaagacatactcaagtgattcttaaagagtagaacaacggg

SEQ ID NO: 35275 - DNA, 80 bp, synthetic construct
  source 1..80: mol_type = other DNA
aagatttttgtcaatccaagtgctatcagggcgggtttggctgatctggagatggcagaggaaactgtagatctaatagc

SEQ ID NO: 35276 - DNA, 80 bp, synthetic construct
  source 1..80: mol_type = other DNA
taggaacattgaggataatcaggctcatctccaaggagaacctatagaggtggacagtcttcccgaggatataagacggc

SEQ ID NO: 35277 - DNA, 80 bp, synthetic construct
  source 1..80: mol_type = other DNA
ttcaattggatgatacgaaaccatctggactaggtgagattgctgcaatgggggaaagcaagtgtcaggaagactttcag

SEQ ID NO: 35278 - DNA, 80 bp, synthetic construct
  source 1..80: mol_type = other DNA
atggatgaggcggaggacccctccctattgttccagtcataccttgacaacattggaattcaaatggtaagacagatgaa

SEQ ID NO: 35279 - DNA, 80 bp, synthetic construct
  source 1..80: mol_type = other DNA
tcaacttctccagtccgccagggaagtctacagaagacaaagccacccaaactgctggccgtgaacccaagaaagagact

SEQ ID NO: 35280 - DNA, 80 bp, synthetic construct
  source 1..80: mol_type = other DNA
gtgtctgctccctctcagcgagacagtcaatcatccaagactagaatggcggctcaaactgcctctggtcctcctgctct

SEQ ID NO: 35281 - DNA, 80 bp, synthetic construct
  source 1..80: mol_type = other DNA
agaatggtccactgctaatgaagaggatgatccatctgtagaggctgagattgctcatcagatcgccgagagcttctcca

SEQ ID NO: 35282 - DNA, 80 bp, synthetic construct
  source 1..80: mol_type = other DNA
caaatccaagaagttccagctgttagttgagcccgacaagctgaataaaataatgcaagatgacctgaaccgttacgcat

SEQ ID NO: 35283 - DNA, 80 bp, synthetic construct
  source 1..80: mol_type = other DNA
ttctatgaacacaccccctagcttggtcacattatgcaataaagtatggcctgctctaaattccatatgaaaaaaacagg

SEQ ID NO: 35284 - DNA, 80 bp, synthetic construct
  source 1..80: mol_type = other DNA
caacaccactgataagatgaacttcctgcgcaagatagtgaagacctgtagagatgaggacacccggaaaccccctctcg

SEQ ID NO: 35285 - DNA, 80 bp, synthetic construct
  source 1..80: mol_type = other DNA
aaaatatgagaaacttttgcgtgaacggagaagtcaaggtatgcggtccaaacggttattcatttaggaccttgcggcat

SEQ ID NO: 35286 - DNA, 80 bp, synthetic construct
  source 1..80: mol_type = other DNA
attttgagatcattcgatgagatttattctgggaatcagagaatgatcgggctggtcaaagttgtcgttggattggcgtt

SEQ ID NO: 35287 - DNA, 80 bp, synthetic construct
  source 1..80: mol_type = other DNA
catgttatggtgccgttgaatcgctgcattttatcagagtcaaatatataacctttacattttaagcttctaggatgtga

SEQ ID NO: 35288 - DNA, 80 bp, synthetic construct
  source 1..80: mol_type = other DNA
aaaaaacaaccaacatccctcaaaggatctcaggaaaaatgattcctcaggctcttctgtttgtgcctctcctgattccc

SEQ ID NO: 35289 - DNA, 80 bp, synthetic construct
  source 1..80: mol_type = other DNA
tctctgtgtcttggggaattccccatctacacgataccagacaagctcggcccttggagccctatcgacatacatcatct

SEQ ID NO: 35290 - DNA, 80 bp, synthetic construct
  source 1..80: mol_type = other DNA
tcggttatgtcactaccacattcaagaggaagcacttccgcccgacgccagatgcctgcagagccgcacacgactggaag

SEQ ID NO: 35291 - DNA, 80 bp, synthetic construct
  source 1..80: mol_type = other DNA
ccaaggagtcacttgttattatatccccgagtgttgctgatttggacccttacgacaagtcccttcattcaagagttttc

SEQ ID NO: 35292 - DNA, 80 bp, synthetic construct
  source 1..80: mol_type = other DNA
cccagtgggaagtgtttggggataacagtctcttccacctactgctcaaccaaccatgattacaccatctggatgcccgt

SEQ ID NO: 35293 - DNA, 80 bp, synthetic construct
  source 1..80: mol_type = other DNA
tctcttccacctactgctcaaccaaccatgattacaccatctggatgcccgtagaaccaagacttggaacatcttgtgat

SEQ ID NO: 35294 - DNA, 80 bp, synthetic construct
  source 1..80: mol_type = other DNA
gtagaaccaagacttggaacatcttgtgatatttttaccaatagcagagggaagagagcatctaaggggggcagggtttg

SEQ ID NO: 35295 - DNA, 80 bp, synthetic construct
  source 1..80: mol_type = other DNA
atataagacgcaccaatgtggaagggagttgggctctaacagggggtatggagttgacaagggatcctactgttccagag

SEQ ID NO: 35296 - DNA, 80 bp, synthetic construct
  source 1..80: mol_type = other DNA
tggattcgtggatgaaaggggcttatacaagtctctcaaaggagcatgcagactcaagctgtgcggagtccccgggatcc

SEQ ID NO: 35297 - DNA, 80 bp, synthetic construct
  source 1..80: mol_type = other DNA
ggctgttggacggaacatgggtctcaatccagacatcagaagatatcaagtggtgccctcctgatcgattagtgaatcta

SEQ ID NO: 35298 - DNA, 80 bp, synthetic construct
  source 1..80: mol_type = other DNA
cacgactttcactcggatgaaatagaacatcttgttgtagcggaattaatcaagaggagggaaaattgtctagatgcact

SEQ ID NO: 35299 - DNA, 80 bp, synthetic construct
  source 1..80: mol_type = other DNA
ggagtccatcatgaccaccaaatcagtgaccttcagacgtctcactcacttgagaaaacttgttcctgggtttgggaagg

SEQ ID NO: 35300 - DNA, 80 bp, synthetic construct
  source 1..80: mol_type = other DNA
acttggaacgaagttatcccttcgaaaggttgcctggaagtcggagggagatgtcatccccatgtgaacggagtattctt

SEQ ID NO: 35301 - DNA, 80 bp, synthetic construct
  source 1..80: mol_type = other DNA
caatggtataattttgggtccggatggaaatgttctgatccctgagatgcagtcttccctgcttcaacaacatatggagc

SEQ ID NO: 35302 - DNA, 80 bp, synthetic construct
  source 1..80: mol_type = other DNA
cagatgtccacaagcaggtttcggatgttgacctcggccttccgagttgggggaagtatctgttgattagtgcaggtgct

SEQ ID NO: 35303 - DNA, 80 bp, synthetic construct
  source 1..80: mol_type = other DNA
ttggcaatactgattctggcgatcgtcttaataatatgttgtaggagggttaataagacaggatccacacagagaggtca

SEQ ID NO: 35304 - DNA, 80 bp, synthetic construct
  source 1..80: mol_type = other DNA
tagggaatcaggagggaaaatgtctgtagtacctcaaaacgggaagatcatatcctcatgggagttgtacaaaagtgaaa

SEQ ID NO: 35305 - DNA, 80 bp, synthetic construct
  source 1..80: mol_type = other DNA
gtgagactgggctgtgaaggtgagtcatccccttcacaccatgcatttagaagattgcatctctttgagatatgagagat

SEQ ID NO: 35306 - DNA, 80 bp, synthetic construct
  source 1..80: mol_type = other DNA
cctatcttcttgacagtccctcatggaccctgtgctactggatagacttaagagtgaagaaactttcattaatcatctca

SEQ ID NO: 35307 - DNA, 80 bp, synthetic construct
  source 1..80: mol_type = other DNA
actaattaagcacagtcatgttgattctggtaatatatgacgtcctctgacagtatcatttactaatggtgctctcatcc

SEQ ID NO: 35308 - DNA, 80 bp, synthetic construct
  source 1..80: mol_type = other DNA
tctaaggactgataccaaaggtcatgaacaatccaaatggaaacccagataactctatgattgagtctgtgtagatgcct

SEQ ID NO: 35309 - DNA, 80 bp, synthetic construct
  source 1..80: mol_type = other DNA
tagcacgttcccctacattagatcagatgggggtttagttgagagaagcgacttgcctcctatgaaggacacgagcaata

SEQ ID NO: 35310 - DNA, 80 bp, synthetic construct
  source 1..80: mol_type = other DNA
gatcacaatcatcttacattccgatgagatgaccataactacaaagggctgggccatccaagcctttcagtcaagaaaaa

SEQ ID NO: 35311 - DNA, 80 bp, synthetic construct
  source 1..80: mol_type = other DNA
aactgtggaatggaggagtaattgacaacacttctcctcctaacaacggcactatgatgattgatccaggggaagtttat

SEQ ID NO: 35312 - DNA, 80 bp, synthetic construct
  source 1..80: mol_type = other DNA
gatgatccgattgatcctattgagtcagaagccgagccgagggggaatcccaccattcccaacatcttaagaaactctga

SEQ ID NO: 35313 - DNA, 80 bp, synthetic construct
  source 1..80: mol_type = other DNA
ttacaacctcaattctcctctaatagaggatccagcgaaattaatgttggaatggttgaaaactgggaataggccactcc

SEQ ID NO: 35314 - DNA, 80 bp, synthetic construct
  source 1..80: mol_type = other DNA
ggatgaccttgacagacaactgctctaggtcttacaaagttctgaaagactacttcaagagagtggatctgggatctctt

SEQ ID NO: 35315 - DNA, 80 bp, synthetic construct
  source 1..80: mol_type = other DNA
attcacgacttctttcaagagaccaccccctgattccttacataaagactcaaacgtggcctcccaaacacatagtagac

SEQ ID NO: 35316 - DNA, 80 bp, synthetic construct
  source 1..80: mol_type = other DNA
caaatatactgtctggacatgtcgaacggcccgacgtgctggaatggccaagatggagggttggagggtttaagacagaa

SEQ ID NO: 35317 - DNA, 80 bp, synthetic construct
  source 1..80: mol_type = other DNA
ctatttcctgcacttgcggggcatcgggagggggaaatcctcgaatatcagtgtccgtgcttccatcttttgaccagtca

SEQ ID NO: 35318 - DNA, 80 bp, synthetic construct
  source 1..80: mol_type = other DNA
cttcagtttgtccgaatctcctctctcatatctctgtcagcacagacacgatgtctgacttgactcatgatgggagaaac

SEQ ID NO: 35319 - DNA, 80 bp, synthetic construct
  source 1..80: mol_type = other DNA
gatgtaacaagtgtataagacccattgatgatattacccttgatacctctcaggtcttcgagttcccggacgtttcaaga

SEQ ID NO: 35320 - DNA, 80 bp, synthetic construct
  source 1..80: mol_type = other DNA
tcctcttaagattggataatcacccttctttgtacataatgctcagagagccctctctcagaggagagatattttctatt

SEQ ID NO: 35321 - DNA, 80 bp, synthetic construct
  source 1..80: mol_type = other DNA
ccccaaaaggttcccgctgcttacccgaccacaatgaaagagggcaatagatccatcctgtgctatcttcagcatgtgtt

SEQ ID NO: 35322 - DNA, 80 bp, synthetic construct
  source 1..80: mol_type = other DNA
gaacctctccaaaaatatgagagccagcttacgacaaatgagctctctgatgagacaggttctgggtgggcatggtgagg

SEQ ID NO: 35323 - DNA, 80 bp, synthetic construct
  source 1..80: mol_type = other DNA
ctccctcagcaatcatgagtggaggagatgacatcatctctagggtaattgattttgattccatttgggagaaaccctct

SEQ ID NO: 35324 - DNA, 80 bp, synthetic construct
  source 1..80: mol_type = other DNA
aggaactttgtccaaagtttccattattatagctatcatgatagtcttttccaatagagtgttcaatgtctcgaaaccgc

SEQ ID NO: 35325 - DNA, 80 bp, synthetic construct
  source 1..80: mol_type = other DNA
tgactgaacccctgttctacccgccttctgacccaaaaatcttgagacatttcaacatatgttgcagcaccatgatgtac

SEQ ID NO: 35326 - DNA, 80 bp, synthetic construct
  source 1..80: mol_type = other DNA
gtccagatcatctcttttagattatagttgcatgtaacctaagcactctcgaatgaacgtacagactctgacttttagac

SEQ ID NO: 35327 - DNA, 80 bp, synthetic construct
  source 1..80: mol_type = other DNA
agtgcaccctgaaaaaaacaaggtcctgattcagaacctctgcttgcttgattgttttttttatctttgttgtttttttg

SEQ ID NO: 35328 - DNA, 80 bp, synthetic construct
  source 1..80: mol_type = other DNA
ctgagttgatgaggactgatacggcattggcagatgacgggaccgtcaactctgatgacgaggactacttctctggtgag

SEQ ID NO: 35329 - DNA, 80 bp, synthetic construct
  source 1..80: mol_type = other DNA
tcatcaagctcgacccaattcatttgctgagttcttaaacaagacatattcgaatgactcataaaagattaaacaacagg

SEQ ID NO: 35330 - DNA, 80 bp, synthetic construct
  source 1..80: mol_type = other DNA
attgtgaacactaataaagtgcgtacatacttcacgaaaaaaactaacacccctcctttcgaaccatctcaaacatgagc

SEQ ID NO: 35331 - DNA, 80 bp, synthetic construct
  source 1..80: mol_type = other DNA
ttcaactggacgaccagaaaccatctggcctttgcgggattgccaacacaggggacaacaagtgtcaggaagactttcag

SEQ ID NO: 35332 - DNA, 80 bp, synthetic construct
  source 1..80: mol_type = other DNA
tatcattcttccgggaaagtcttcagaagacaaagcaacccagactgtgagccgggaatttaagaaggaggcagtgtctg

SEQ ID NO: 35333 - DNA, 80 bp, synthetic construct
  source 1..80: mol_type = other DNA
attcctctcagcgagaaggtcagtctcctaaagtcaaaatggcggcacaaactgcctctggtcctcctgctatagagtgg

SEQ ID NO: 35334 - DNA, 80 bp, synthetic construct
  source 1..80: mol_type = other DNA
tcctccgccaacgaagatgatgacccatctgtggaggctgaaattgctcaccaaattgccgaaagcttctccaagaagta

SEQ ID NO: 35335 - DNA, 80 bp, synthetic construct
  source 1..80: mol_type = other DNA
caactccaaaaagttccagctgttagttgagcctgacaaactaaacaagataatgcaagacgacctgaatcgttatgcct

SEQ ID NO: 35336 - DNA, 80 bp, synthetic construct
  source 1..80: mol_type = other DNA
tcttctgaccacgcccccaagctcagtcacactatgtaatccaatctgacccgctctaaatccagcatgaaaaaaacatg

SEQ ID NO: 35337 - DNA, 80 bp, synthetic construct
  source 1..80: mol_type = other DNA
ctaaagatgcctcaattgtttacctctggaggagagagcacatgggcttgactccaaccttcgggagcaatagaacaaac

SEQ ID NO: 35338 - DNA, 80 bp, synthetic construct
  source 1..80: mol_type = other DNA
aaaactattaacatccctccaaagacccaaggaaagatgatccttcaggctcttctgcttttgcctctcctgatatcatc

SEQ ID NO: 35339 - DNA, 80 bp, synthetic construct
  source 1..80: mol_type = other DNA
ttggttatgttaccacaacattcaagagaaaacactttcgcccgatgcccgatgcatgcagagctgcgcatgaatggaaa

SEQ ID NO: 35340 - DNA, 80 bp, synthetic construct
  source 1..80: mol_type = other DNA
atggctggtgatcccagatatgaagattctcttcaaaatccctatcctgattaccattggctacggaccgtaaagaccac

SEQ ID NO: 35341 - DNA, 80 bp, synthetic construct
  source 1..80: mol_type = other DNA
tcttccacctactgctcaactaaccacgattacaccatatggatgccagaggaagcgagacttgggacatcttgtgacat

SEQ ID NO: 35342 - DNA, 80 bp, synthetic construct
  source 1..80: mol_type = other DNA
ggaagcgagacttgggacatcttgtgacatttttacaaacagcaaagggaagaaagcttctaaggggggcaaggtttgcg

SEQ ID NO: 35343 - DNA, 80 bp, synthetic construct
  source 1..80: mol_type = other DNA
gattcgtggatgaaaggggcttatacaagtctctgaaaggagcatgtaaacttaagctatgcggagtccccggacttaga

SEQ ID NO: 35344 - DNA, 80 bp, synthetic construct
  source 1..80: mol_type = other DNA
ctgatggacggaacctgggtatcaattcaaacatcggatgagactaaatggtgtcctcctgatcaattggtgaatataca

SEQ ID NO: 35345 - DNA, 80 bp, synthetic construct
  source 1..80: mol_type = other DNA
tcatgaccactaaatccgtaagcttccgacgcctcagccacttaaggaaacttgttccgggatttggaaaggcatatact

SEQ ID NO: 35346 - DNA, 80 bp, synthetic construct
  source 1..80: mol_type = other DNA
cggtactgtcttgatccctgaaatgcagtcgtccttgctccaacaacatatggagctgttggagtcctctgtgatccccc

SEQ ID NO: 35347 - DNA, 80 bp, synthetic construct
  source 1..80: mol_type = other DNA
cagatgttcacaagcaggtctctggggttgaccttggtctccctagctgggggaagtatctgttgatgagtgtgggtgct

SEQ ID NO: 35348 - DNA, 80 bp, synthetic construct
  source 1..80: mol_type = other DNA
ctggcaacactaatcctgattatcttcttaataacatgttgcagaaaggtcaagagaacagaatcaatacagcgaggcca

SEQ ID NO: 35349 - DNA, 80 bp, synthetic construct
  source 1..80: mol_type = other DNA
tggagaatcaggaaggaaagtgtctgcaagtccccagaacgggaaagtcatatcttcctgggagctgtacaaaagtgaag

SEQ ID NO: 35350 - DNA, 80 bp, synthetic construct
  source 1..80: mol_type = other DNA
gggaaaccaatctgtgatggtgggtcatcacctccatactcggtgttaagaagattacctctctttaagatctgagagaa

SEQ ID NO: 35351 - DNA, 80 bp, synthetic construct
  source 1..80: mol_type = other DNA
tctcacgtctcaacagtccttcatggactccgcacaacaggatggactcaggagtcaggaaattttcatcaatcatatca

SEQ ID NO: 35352 - DNA, 80 bp, synthetic construct
  source 1..80: mol_type = other DNA
cctgatcagacacagttatgtagactttgataatgtgtgatgtcttctgacagtatctttgactaatggtgctctcatcc

SEQ ID NO: 35353 - DNA, 80 bp, synthetic construct
  source 1..80: mol_type = other DNA
cccaaggactgataccaaaggttgtggacaggctaactgataccccaataactctctgctgtagtttgggcaaagtccat

SEQ ID NO: 35354 - DNA, 80 bp, synthetic construct
  source 1..80: mol_type = other DNA
agccaattttcccatcgtaaaccaaataggggttagctgagagaagcgacttgcctcctatgaaggacactagcaatagg

SEQ ID NO: 35355 - DNA, 80 bp, synthetic construct
  source 1..80: mol_type = other DNA
tcacaatcatcttacatccagataatgtgtgcataactataaagggctgagccatccaagcttttcagtcaagaaaaaaa

SEQ ID NO: 35356 - DNA, 80 bp, synthetic construct
  source 1..80: mol_type = other DNA
tataacagacttagctcagttctactccaagtcttccccaatagaaaaactactaaactgcacacttggaaatagagggc

SEQ ID NO: 35357 - DNA, 80 bp, synthetic construct
  source 1..80: mol_type = other DNA
gcccagacgttgattaaaaacataatgtccctgactggcccggacttcccactggaagaggcccctgtcttcaagagaac

SEQ ID NO: 35358 - DNA, 80 bp, synthetic construct
  source 1..80: mol_type = other DNA
agggtctgctctgcataggttcaagtcagccaggtatagtgaagggggttactcttctgtctgtcctaatctcctctctc

SEQ ID NO: 35359 - DNA, 80 bp, synthetic construct
  source 1..80: mol_type = other DNA
tcagactttagaagctccaagatgacgtatctgactctcatcacctaccaatctcatcttttacttcaaagggtagaaaa

SEQ ID NO: 35360 - DNA, 80 bp, synthetic construct
  source 1..80: mol_type = other DNA
tgcgccatgcggcgagaactatgacagggagttacagccccaacaagaagatgtcacgcaaagcagggtgttcggaatgg

SEQ ID NO: 35361 - DNA, 80 bp, synthetic construct
  source 1..80: mol_type = other DNA
tttggatgatctcaatgtcttcccatccctatgtctggtggtaggggatggatcaggagggatatcaagagcggtactta

SEQ ID NO: 35362 - DNA, 80 bp, synthetic construct
  source 1..80: mol_type = other DNA
acatgttcccagatgccagacttgtattcaacagcttattagaagtgaatgacctgatggcgtcaggaacacatccgttg

SEQ ID NO: 35363 - DNA, 80 bp, synthetic construct
  source 1..80: mol_type = other DNA
catttcctgcggtcactggatttataactcaggtgacctcgtctttctcatccgagctatacctccggttctcaaaacga

SEQ ID NO: 35364 - DNA, 80 bp, synthetic construct
  source 1..80: mol_type = other DNA
gggaagttttttcgggatgcagaatacttgacctcctctactcttcgagaaatgagcctggtattgttcaactgtagcag

SEQ ID NO: 35365 - DNA, 80 bp, synthetic construct
  source 1..80: mol_type = other DNA
agacaactagacttgtcggaagcatagaagacctatccggggaggtagagaggcaccttcgagggtacaacagatggatt

SEQ ID NO: 35366 - DNA, 80 bp, synthetic construct
  source 1..80: mol_type = other DNA
atctagatcatctcttctagattatagctgcttgtaatctaggctctctcgaaggaatgtatggaccaagactcttggac

SEQ ID NO: 35367 - DNA, 80 bp, synthetic construct
  source 1..80: mol_type = other DNA
agtgtaccctgaaaaaaacgagatcctgattcatgacctctttttgcttgattgtttttcccatctttattgtttttttt

SEQ ID NO: 35368 - DNA, 80 bp, synthetic construct
  source 1..80: mol_type = other DNA
ctgaggtagccttggcagatgacggaacagtcaattctgatgatgaggactacttctctagtgagactaggagtcctgaa

SEQ ID NO: 35369 - DNA, 80 bp, synthetic construct
  source 1..80: mol_type = other DNA
gcagtttatactagaatcatgatgaatggaggcagactaagaaggtcacacataaggagatatgtctcagttagttccaa

SEQ ID NO: 35370 - DNA, 80 bp, synthetic construct
  source 1..80: mol_type = other DNA
ttcataaagaactaaacaacaagactgtagacaccaataaatcatgtacatccttcacgaaaaaaactaacacccctcct

SEQ ID NO: 35371 - DNA, 80 bp, synthetic construct
  source 1..80: mol_type = other DNA
cccgaaccacctcagacatgagcaagatttttgtcaacccaagtgcgatcagggcaggtttggctgatctagagatggca

SEQ ID NO: 35372 - DNA, 80 bp, synthetic construct
  source 1..80: mol_type = other DNA
ttcaattagacgatgaaaaactatctggcctcggcgagatggccaaagcaggggaaagcaaatgtcaggaagattttcag

SEQ ID NO: 35373 - DNA, 80 bp, synthetic construct
  source 1..80: mol_type = other DNA
atggatgagggggaggaccccgtcttcttgttccagtcgtacctagacaatgttggagttcaaatagtcagacaaatgag

SEQ ID NO: 35374 - DNA, 80 bp, synthetic construct
  source 1..80: mol_type = other DNA
tcaacttccccgatctgtcggggaagtcttcagaagacaaagctacccagactgcaaacagagaaatcaagaaggagaca

SEQ ID NO: 35375 - DNA, 80 bp, synthetic construct
  source 1..80: mol_type = other DNA
gtgtctgcttcttctcagcgagaaagtcaatcatctaaaaccaaaatggcggcccaaaccgcctccggtcctcctgctct

SEQ ID NO: 35376 - DNA, 80 bp, synthetic construct
  source 1..80: mol_type = other DNA
agagtggtccgccgccaacgaagaggatgacctatccgtggaggctgaaatcgctcaccagattgctgagagcttctcca

SEQ ID NO: 35377 - DNA, 80 bp, synthetic construct
  source 1..80: mol_type = other DNA
caattccaaaaggttccagcttttagttgagcccgacaagctaaataaaataatgcaagacgacctgaaccgttatgtgt

SEQ ID NO: 35378 - DNA, 80 bp, synthetic construct
  source 1..80: mol_type = other DNA
caaactgacaaacctctcaaactcagtcctaccattcaatcaaatccgaactgcttcgaacccgacatgaaaaaaacagg

SEQ ID NO: 35379 - DNA, 80 bp, synthetic construct
  source 1..80: mol_type = other DNA
aaaactattaacatccctcaaaagatctaagaaaagatgatccctcaatctcttctgtttttgcctctcctgatttcctc

SEQ ID NO: 35380 - DNA, 80 bp, synthetic construct
  source 1..80: mol_type = other DNA
tttgtgtttcggggaattccccatctacacgataccagaaaaactaggcccttggagtcccatcgacatacatcacctca

SEQ ID NO: 35381 - DNA, 80 bp, synthetic construct
  source 1..80: mol_type = other DNA
aagaggcaagacttggaacctcttgtgacatttttactaacagcaaagggaagagagcatccaagggaggtaggacttgc

SEQ ID NO: 35382 - DNA, 80 bp, synthetic construct
  source 1..80: mol_type = other DNA
ggattcgtggatgaaaggggattatataagtctctaaaaggggcatgcaaacttaaactgtgcggagttcctggacttag

SEQ ID NO: 35383 - DNA, 80 bp, synthetic construct
  source 1..80: mol_type = other DNA
ttatggatggaacttgggtctcaattcagacatcaaatgagaccaaatggtgccctcctgatcaactggtaaatatacat

SEQ ID NO: 35384 - DNA, 80 bp, synthetic construct
  source 1..80: mol_type = other DNA
caaaagggtgcctaagcgtcggagggaggtgctaccctcatgtgagcggagtgtttttcaatggtataattctgggtccg

SEQ ID NO: 35385 - DNA, 80 bp, synthetic construct
  source 1..80: mol_type = other DNA
gacgggagtgtcctgatccccgaaatgcaatcatccctgcttcaacagcatatggagctgttggagtcttctgtaatccc

SEQ ID NO: 35386 - DNA, 80 bp, synthetic construct
  source 1..80: mol_type = other DNA
cctaatgcatcccttggcaaacccatcaacagtcttcaaggacggtgatgaggcggaggactttgttgaggttcaccttc

SEQ ID NO: 35387 - DNA, 80 bp, synthetic construct
  source 1..80: mol_type = other DNA
cggacgttaaagaacaggtctcaggggttgacctcggtctcccaaactgggggaagtatgtgctgatgagtgcaggtgct

SEQ ID NO: 35388 - DNA, 80 bp, synthetic construct
  source 1..80: mol_type = other DNA
ctggctatcctaatgctggcaatattcttaatgacatgttgcagaagggccaatagaacaaaatcaatacaacaaggtcc

SEQ ID NO: 35389 - DNA, 80 bp, synthetic construct
  source 1..80: mol_type = other DNA
tagggagtcaggaaggaaagtatcagttcctccccaaaacgggaaagtcatatcttcatgggagtcgtttaagagtggag

SEQ ID NO: 35390 - DNA, 80 bp, synthetic construct
  source 1..80: mol_type = other DNA
tcatatcttcatgggagtcgtttaagagtggaggcgaaaccaggctgtgagggcgggtcatctcctctgtaccttgtgtt

SEQ ID NO: 35391 - DNA, 80 bp, synthetic construct
  source 1..80: mol_type = other DNA
gcgaaaccaggctgtgagagcgggtcatctcctctgtaccttgtgttcagaagatcgcctctctttgagatcagggggga

SEQ ID NO: 35392 - DNA, 80 bp, synthetic construct
  source 1..80: mol_type = other DNA
tctcttgacttaacagtccttcatggactccgcgcaacggggtaggttcaaaaatcaagaaacttccattaatcatctca

SEQ ID NO: 35393 - DNA, 80 bp, synthetic construct
  source 1..80: mol_type = other DNA
actgatcagccacatttatgtagattctgatagtgtatgatatcttctgactgtatctgtgaccaatggtgctctcatct

SEQ ID NO: 35394 - DNA, 80 bp, synthetic construct
  source 1..80: mol_type = other DNA
cccagggattgataccaaaggttgtggacaatccaactgatatctcagatgactctgtgcttgagctcgggcagaagcta

SEQ ID NO: 35395 - DNA, 80 bp, synthetic construct
  source 1..80: mol_type = other DNA
tagcattttcctctacaatagactgaataggggttaactgagagaagtgatttgcctcctatgaaggacacaagcaatag

SEQ ID NO: 35396 - DNA, 80 bp, synthetic construct
  source 1..80: mol_type = other DNA
attataatcatcttgcatcccgataaggtgtgcacaactacaaggggtcgggtcatccaatcttttcagtcaagaaaaaa

SEQ ID NO: 35397 - DNA, 80 bp, synthetic construct
  source 1..80: mol_type = other DNA
actgtggaatggagaagcaattgacaacacttctcatcctgagaaatgcaccatgatgatcgatccaggggaggtttatg

SEQ ID NO: 35398 - DNA, 80 bp, synthetic construct
  source 1..80: mol_type = other DNA
atgaccccattgatccaattgagccagatgctgagccaagaggaaaccccaccattcctaacatcttaagaaactccgac

SEQ ID NO: 35399 - DNA, 80 bp, synthetic construct
  source 1..80: mol_type = other DNA
tacaatctcaactctcccctgatagaggatccagccaagttaatgttagaatggttaaaaacaggaaataggcctctccg

SEQ ID NO: 35400 - DNA, 80 bp, synthetic construct
  source 1..80: mol_type = other DNA
gatgactctaacagacaattgctctagatcttataaagtattgaaggattacttcaagaaaatcgatataggatctctca

SEQ ID NO: 35401 - DNA, 80 bp, synthetic construct
  source 1..80: mol_type = other DNA
gtgggcggagctgcagcacagtcaatgatctctctttggctgtacggtgcccactctgaatcaaacaggagccggaagtg

SEQ ID NO: 35402 - DNA, 80 bp, synthetic construct
  source 1..80: mol_type = other DNA
tataaccgatttggctcagttctattccaagtcttcccccatagaaaagctgttaaattgcacactcggaaatagagggc

SEQ ID NO: 35403 - DNA, 80 bp, synthetic construct
  source 1..80: mol_type = other DNA
gagggatttgacctcagtagacattggaaaggacttggtcaagtttaaagatcaaatatggggattgctaattgtgacca

SEQ ID NO: 35404 - DNA, 80 bp, synthetic construct
  source 1..80: mol_type = other DNA
tttttttgtctcggtttaactctctaatgattctcctttcccctccagagcccagatactcagatgacctgatatctcag

SEQ ID NO: 35405 - DNA, 80 bp, synthetic construct
  source 1..80: mol_type = other DNA
ctgtgtcagctatatatcgccggagatcacgtcttgtccatgtgcgggaactcaggttatgaagtcatcaaaatattgga

SEQ ID NO: 35406 - DNA, 80 bp, synthetic construct
  source 1..80: mol_type = other DNA
caagactggcgtcatggctatcagagaacagaggagggccggtccccagcgaaaaggtcattatcacggctctttccagg

SEQ ID NO: 35407 - DNA, 80 bp, synthetic construct
  source 1..80: mol_type = other DNA
aggaaagggagctaaaaattgaaggtcggtttttcgccttgatgtcctggaatctgaggttgtactttgtcatcacagag

SEQ ID NO: 35408 - DNA, 80 bp, synthetic construct
  source 1..80: mol_type = other DNA
tcctcttgagactggacaatcacccatctttatacataatgctcagagagccatctctgaggggagagatattttctatt

SEQ ID NO: 35409 - DNA, 80 bp, synthetic construct
  source 1..80: mol_type = other DNA
ccccaaaaagttcccgctgcttacccgaccacgatgaaagaaggtaacagatccattctgtgctacctccagcacgtgtt

SEQ ID NO: 35410 - DNA, 80 bp, synthetic construct
  source 1..80: mol_type = other DNA
acaccctagagtcggacgaagatatccaaaggctgctaaaagactccttgcgcaggacaaggtgggtggatcaagaggtg

SEQ ID NO: 35411 - DNA, 80 bp, synthetic construct
  source 1..80: mol_type = other DNA
cgccatgctgcaagaactatgacagggagttacagccccaacaggagggtgtcacgcaaagcagggtgttcagagtgggt

SEQ ID NO: 35412 - DNA, 80 bp, synthetic construct
  source 1..80: mol_type = other DNA
ctgctctgcgcagcaggttgccgtctcaacctctgcaaacccggctcctgcttctgagctggatatcaggactctctcta

SEQ ID NO: 35413 - DNA, 80 bp, synthetic construct
  source 1..80: mol_type = other DNA
gttgcagcgaggaaccttgtctaaagtttcaattattgtagctataatgatagtcttttccaatagggtgttcaatgtct

SEQ ID NO: 35414 - DNA, 80 bp, synthetic construct
  source 1..80: mol_type = other DNA
cgaaacccctgactgaccctttattctacccgccatctgatcctaaaatcttgagacacttcaacatatgctgcagcacc

SEQ ID NO: 35415 - DNA, 80 bp, synthetic construct
  source 1..80: mol_type = other DNA
ggggaatatctatctatcttggagttggtccgatgacacttcggtttttaaaagggtggcttgcaactccagcctgagtc

SEQ ID NO: 35416 - DNA, 80 bp, synthetic construct
  source 1..80: mol_type = other DNA
tctcttctcactggatcaggctgatatacaaaatagtaaagactaccagactagttggaagcctagaagacttgtccagg

SEQ ID NO: 35417 - DNA, 80 bp, synthetic construct
  source 1..80: mol_type = other DNA
gaaatagagaagcaccttcgggggtataacaggtggatcacactggatgacatcagatctagatcatctcttttagatta

SEQ ID NO: 35418 - DNA, 80 bp, synthetic construct
  source 1..80: mol_type = other DNA
tagttacctgtaaactgggcactctagagggaaggtataaactggtaatcttgaacggcacactgtgaaaaaaactggat

SEQ ID NO: 35419 - DNA, 80 bp, synthetic construct
  source 1..80: mol_type = other DNA
tgtgaaaaaaactggatcccaatccttaacctctacttgcttgattgtttttccatcttcattgtttttttgttaagcgt

SEQ ID NO: 35420 - DNA, 80 bp, synthetic construct
  source 1..80: mol_type = other DNA
tcatataaacacaccccctcgcccagtcacactatgcaataaaatctggcccgctccaaattccatatgaaaaaaacagg

SEQ ID NO: 35421 - DNA, 80 bp, synthetic construct
  source 1..80: mol_type = other DNA
cgaaaggttgccttgaagtcggagggagatgtcatccccctgtgaacggagtattcttcaatggtataattttgggtccg

SEQ ID NO: 35422 - DNA, 80 bp, synthetic construct
  source 1..80: mol_type = other DNA
gatggaaatgttctgatccctgagatgcaatcttccctgcttcaacaacatatggagcttttagagtcttctgttatccc

SEQ ID NO: 35423 - DNA, 80 bp, synthetic construct
  source 1..80: mol_type = other DNA
tgatgcatcccttggcggacccatcaacggtctttaaggaaggtgatgaggcggaagactttgtcgaggttcatcttcca

SEQ ID NO: 35424 - DNA, 80 bp, synthetic construct
  source 1..80: mol_type = other DNA
ggcaatactgattctagcgatcgtcttaataatatgttgtaggagggtcaacaagacaagatcatcacagagaggtcaca

SEQ ID NO: 35425 - DNA, 80 bp, synthetic construct
  source 1..80: mol_type = other DNA
catgcatccttggtcggtcttctcttgagcttgtataggttaagcaaaatctcaggacagaacactggcaattacaagac

SEQ ID NO: 35426 - DNA, 80 bp, synthetic construct
  source 1..80: mol_type = other DNA
gagactgggctgtgaaggtgagtcacccccttcgcaccatgcatttggaagattgcgtctctttgaaatctgagggatcc

SEQ ID NO: 35427 - DNA, 80 bp, synthetic construct
  source 1..80: mol_type = other DNA
aaacattgcagacagaatagagcaaattttcgagacagccccttttgtcaagattgtcgagcatcatactttgatgacaa

SEQ ID NO: 35428 - DNA, 80 bp, synthetic construct
  source 1..80: mol_type = other DNA
gttggcggggctgctgcacagtcgatgatctccctttggctatacggtgcccattctgaatcaaataggagtcggaagtg

SEQ ID NO: 35429 - DNA, 80 bp, synthetic construct
  source 1..80: mol_type = other DNA
tataactgacttggctcagttttattccaagtcctcccctatagaaaagctgttgaattgtacactcggaaatagaggac

SEQ ID NO: 35430 - DNA, 80 bp, synthetic construct
  source 1..80: mol_type = other DNA
tagcactgtggagagacataacatcaatagatacaggaaaggacttagtcaagtttaaggatcagatatggggattgctg

SEQ ID NO: 35431 - DNA, 80 bp, synthetic construct
  source 1..80: mol_type = other DNA
cagcgagaactatgacaggagtttacagccccaccaagaagatgtcacgcaaagccgggtgttcagaatgggtctgctct

SEQ ID NO: 35432 - DNA, 80 bp, synthetic construct
  source 1..80: mol_type = other DNA
cctggtgggaaatgtttggggataacaatctcttccacctactgctcaactaaccatgactatactatctggatgcccga

SEQ ID NO: 35433 - DNA, 80 bp, synthetic construct
  source 1..80: mol_type = other DNA
tgttgagagactctttgcgcagaacaaggtgggtggatcaggaagtgcgccatgcagccagaactatgacaggggtttac

SEQ ID NO: 35434 - DNA, 80 bp, synthetic construct
  source 1..80: mol_type = other DNA
tgactgatcctttattctatccaccatctgatcccaaaatcttgagacacttcaacatatgctgcagtaccatgatgtat

SEQ ID NO: 35435 - DNA, 80 bp, synthetic construct
  source 1..80: mol_type = other DNA
attaggtccagatcatctcttttagattatagctgcttgtaaaactaggcgttcttgagggaatgtaccaactaagattt

SEQ ID NO: 35436 - DNA, 80 bp, synthetic construct
  source 1..80: mol_type = other DNA
ttggacggtgcaccctgaaaaaaacaagatcacgattcataacctctgcttgcttgagtgtttttccatctttattgttt

SEQ ID NO: 35437 - DNA, 80 bp, synthetic construct
  source 1..80: mol_type = other DNA
cttgaaccatctcagacatgagcaagatttttgtcaaccccagtgcgatccgggcgggcctagctaacctagagatggca

SEQ ID NO: 35438 - DNA, 80 bp, synthetic construct
  source 1..80: mol_type = other DNA
ttcaattggaagacgagaaaccttctggcctcggcgagatggccaaatcaggggagagcaaatgtcaggaagactttcag

SEQ ID NO: 35439 - DNA, 80 bp, synthetic construct
  source 1..80: mol_type = other DNA
gtcaggagagaggttcctcaagatatggtctcataccgtcgaggagatcatatcatatgtcatggtcaattttcccagtc

SEQ ID NO: 35440 - DNA, 80 bp, synthetic construct
  source 1..80: mol_type = other DNA
tgccgaggaagtcttccgaagacaaagctacccagactgtcaaccgggagctcaagaaggggacagtgtctgtttcttct

SEQ ID NO: 35441 - DNA, 80 bp, synthetic construct
  source 1..80: mol_type = other DNA
cagcgagaaagtcaattatctaaagccaaaatggtggcccaaaccgcctccggtcctccagctctggagtggtctgccac

SEQ ID NO: 35442 - DNA, 80 bp, synthetic construct
  source 1..80: mol_type = other DNA
tctgttgaccacaccctcaggctcagtcccaccatgcaatcaaaaccaacctgttccaaatccaatgtgaaaaaaacagg

SEQ ID NO: 35443 - DNA, 80 bp, synthetic construct
  source 1..80: mol_type = other DNA
aactggaagacggccggcgatcctagatatgaagagtcccttcacaatccttatcctgattaccattggctaaggactgt

SEQ ID NO: 35444 - DNA, 80 bp, synthetic construct
  source 1..80: mol_type = other DNA
ccaaagaatcccttattatcatatcgccaagtgtggctgatttggacccctacgacaaatctcttcattcaagaatcttc

SEQ ID NO: 35445 - DNA, 80 bp, synthetic construct
  source 1..80: mol_type = other DNA
acatcaaacgtactaatgtggaagggaactgggctctaacagggggtatggagttgacaagagaccccaccgttccggag

SEQ ID NO: 35446 - DNA, 80 bp, synthetic construct
  source 1..80: mol_type = other DNA
gatgggcatatcctgattccggagatgcaatcatccctcctccaacagcatatggagctgttagaatcctctgtaatccc

SEQ ID NO: 35447 - DNA, 80 bp, synthetic construct
  source 1..80: mol_type = other DNA
ctagcgaccgtgatgctgacaatattcttgataacctgttgcagaagggtcaagagaacagaatcagtacaacaaggtct

SEQ ID NO: 35448 - DNA, 80 bp, synthetic construct
  source 1..80: mol_type = other DNA
catgcatcgttagttggtcttctcttgagtctgtatagattgagcaaaatatctggacagaacactggcaattataaaac

SEQ ID NO: 35449 - DNA, 80 bp, synthetic construct
  source 1..80: mol_type = other DNA
tggtgagtcaggaaggaaagtgtcggtagctccccaaaacggaaaagtcatgtcctcatgggaatattacaagagtggag

SEQ ID NO: 35450 - DNA, 80 bp, synthetic construct
  source 1..80: mol_type = other DNA
gcgggaccaggctgtgagagcaggtcatctcctccgtaccttgcgtgtggatgatcatctctcctctagatctggggaga

SEQ ID NO: 35451 - DNA, 80 bp, synthetic construct
  source 1..80: mol_type = other DNA
tctcttgttttgacagtcctctatggacttcgtgcgacaaggtaaatttaagagtcaagaaactttcattaatcatctca

SEQ ID NO: 35452 - DNA, 80 bp, synthetic construct
  source 1..80: mol_type = other DNA
actgatcagacacagtcatgtagattttgatgatgtatgatttcttctgacagtatcagtgactaatggtgctctcattt

SEQ ID NO: 35453 - DNA, 80 bp, synthetic construct
  source 1..80: mol_type = other DNA
cctaaggactgataccaaaggctttggacaatccaactgatatatcggatggttctgagcttgaacttgggcagagacca

SEQ ID NO: 35454 - DNA, 80 bp, synthetic construct
  source 1..80: mol_type = other DNA
taacaagttcccctacacttgactaaataagggttagctgagggaagcgagttgcctcctatgaaggacataagcaatag

SEQ ID NO: 35455 - DNA, 80 bp, synthetic construct
  source 1..80: mol_type = other DNA
tataactgacttggttcagttctatgccaagtcttcccccatagagaaactgttaaactacacactcggaaatagagggc

SEQ ID NO: 35456 - DNA, 80 bp, synthetic construct
  source 1..80: mol_type = other DNA
atatactcctcttatttattctttcacgttatcaccctttacatgaacgccttggattgggatgaggagaagaccattct

SEQ ID NO: 35457 - DNA, 80 bp, synthetic construct
  source 1..80: mol_type = other DNA
ttttcttgtctcggttcaactctttgatgattcttctttcccctcctgaacccagatattcagatgacctgatatctcaa

SEQ ID NO: 35458 - DNA, 80 bp, synthetic construct
  source 1..80: mol_type = other DNA
tgtcaacccaagagaatttttgaagtctatagaccttggaggattgccggacgaggatctgataatcggcctcaagccta

SEQ ID NO: 35459 - DNA, 80 bp, synthetic construct
  source 1..80: mol_type = other DNA
acaatcatcagaggctggaatcgacagaggacgtattttccgtacttgatcgagtgtttgggttaaagagggtattttct

SEQ ID NO: 35460 - DNA, 80 bp, synthetic construct
  source 1..80: mol_type = other DNA
aaccaggttttgtgtccgacatatatgctgtccccggggctctctcaagaggggcttctctacgagttggagagcatctc

SEQ ID NO: 35461 - DNA, 80 bp, synthetic construct
  source 1..80: mol_type = other DNA
tctctaagtggtaaggagaagtcacgccatataggatcggcccaagggctcttatattcaatcttggttgcgactcatga

SEQ ID NO: 35462 - DNA, 80 bp, synthetic construct
  source 1..80: mol_type = other DNA
gatattttctattccccaaaaagtccccgctgcttacccgaccacgatgaaggaaggtaatagatctgttctgtgctacc

SEQ ID NO: 35463 - DNA, 80 bp, synthetic construct
  source 1..80: mol_type = other DNA
cactttatctggttttcaaaacttatggtacgatgcttgtaaatccagattacagagcaattcaacacttatccagagca

SEQ ID NO: 35464 - DNA, 80 bp, synthetic construct
  source 1..80: mol_type = other DNA
catttcctgcggtcactggattcgtaactcaaatgacctcgtctttctcatctgagctctacctcagattctcaaaacgg

SEQ ID NO: 35465 - DNA, 80 bp, synthetic construct
  source 1..80: mol_type = other DNA
ttgtcggaagcatagaagacttgtctggtgaagtagagaggcaccttcgagggtacaacaggtggatcaccctcgatgac

SEQ ID NO: 35466 - DNA, 80 bp, synthetic construct
  source 1..80: mol_type = other DNA
attagatcccgatcgtcccttttggattatagctgcttgtgaactatgctctctcggaggaatatacagactaaggctct

SEQ ID NO: 35467 - DNA, 80 bp, synthetic construct
  source 1..80: mol_type = other DNA
tggactgtgtatcctgaaaaaaccgagatcctgattcagaacctctgtttgcttgattttttttcttttctttattgttt

SEQ ID NO: 35468 - DNA, 80 bp, synthetic construct
  source 1..80: mol_type = other DNA
caagatctttgttaaccctagtgcgatccgggcaggtttggctgatctagagatggcagaggagactgtagatctaatct

SEQ ID NO: 35469 - DNA, 80 bp, synthetic construct
  source 1..80: mol_type = other DNA
atggatgaaggggaggaccccgccctcttattccagtcatacctggacaatgttggagttcaaatggtcaaacaaatgag

SEQ ID NO: 35470 - DNA, 80 bp, synthetic construct
  source 1..80: mol_type = other DNA
gtcgggagggagattcctcaagatatggtctcagaccgtcgaggagatcatatcctatgtcaaggtcaacttccccagtc

SEQ ID NO: 35471 - DNA, 80 bp, synthetic construct
  source 1..80: mol_type = other DNA
tgtccgagaaatctttagaagacaaagctactcagaccaccaaccgggaactcaagagggagacggtgtctacttcctct

SEQ ID NO: 35472 - DNA, 80 bp, synthetic construct
  source 1..80: mol_type = other DNA
cagcgagaaagtcaatcatccaaagccaaaatggcggctcaaaccgcttctggtcctcctgctctagagtggtctgccgc

SEQ ID NO: 35473 - DNA, 80 bp, synthetic construct
  source 1..80: mol_type = other DNA
caactccagaaagttccaactgttggttgagcctgataagctaaataaaataatgcaagacgacctgaaccgttatgtgt

SEQ ID NO: 35474 - DNA, 80 bp, synthetic construct
  source 1..80: mol_type = other DNA
ctcactgaccagaccctcaaactcagtcctactatgcaatcagatctgatctgttctaaattccacgtgaaaaaaacggg

SEQ ID NO: 35475 - DNA, 80 bp, synthetic construct
  source 1..80: mol_type = other DNA
tatcgtgtcggctcctccggatgacgatgatttgtggttaccccctccagaatacgttccgttgagggagctcaccggca

SEQ ID NO: 35476 - DNA, 80 bp, synthetic construct
  source 1..80: mol_type = other DNA
ggatcctgaggcatattttgaaatcattcgatgagatttattctgggaatcagagaatgatcggattagtcaaagttgtt

SEQ ID NO: 35477 - DNA, 80 bp, synthetic construct
  source 1..80: mol_type = other DNA
aaaggtctgaggaggataaagactcttccgtgcttttagagtagtcgaattacatcctacagattcctcaattttttacc

SEQ ID NO: 35478 - DNA, 80 bp, synthetic construct
  source 1..80: mol_type = other DNA
aaaactattaacatccctcgaaagacctaagggaagatgatccctcaggctcttctgtttgtgcctcttctgatttcctc

SEQ ID NO: 35479 - DNA, 80 bp, synthetic construct
  source 1..80: mol_type = other DNA
ttatggatggaacctgggtttcaattcagacaccaggtgaaaccaaatggtgctctcctgatcagctagtgaatctacat

SEQ ID NO: 35480 - DNA, 80 bp, synthetic construct
  source 1..80: mol_type = other DNA
gattttcactcagatgagatagagcatctcgtcgcagaggagttggtcaaaaagagggaagaatgtttggatgcactgga

SEQ ID NO: 35481 - DNA, 80 bp, synthetic construct
  source 1..80: mol_type = other DNA
gacggaagtgtcttgatcccggagatgcagtcgtccctactccaacagcatatggaactgctggagtcctctgtaatccc

SEQ ID NO: 35482 - DNA, 80 bp, synthetic construct
  source 1..80: mol_type = other DNA
cggacgttcacaaacaagtctcaggagttgatcttggtctcccaaactgggggaagtatttgctgatgattgcaggtgct

SEQ ID NO: 35483 - DNA, 80 bp, synthetic construct
  source 1..80: mol_type = other DNA
ctggcaaccctaatgctgacaatcttcctaatgacatgttgcagaaggactaagagagcggaatcaatacaatatggtct

SEQ ID NO: 35484 - DNA, 80 bp, synthetic construct
  source 1..80: mol_type = other DNA
catgcgtctttagttggtcttctcttgagtctgtataggttgagcaagatatctggacaaaacaccggcaactacaaaac

SEQ ID NO: 35485 - DNA, 80 bp, synthetic construct
  source 1..80: mol_type = other DNA
cggagagtcaggaaggaaagtgtcagttactccccaaagcgggaaagttatatcttcatgggagtcgtataagagtggag

SEQ ID NO: 35486 - DNA, 80 bp, synthetic construct
  source 1..80: mol_type = other DNA
gaaagttatatcttcatgggagtcgtataagagtggaggcgagaccaggctgtgagggcgggtcggctcctccatacctt

SEQ ID NO: 35487 - DNA, 80 bp, synthetic construct
  source 1..80: mol_type = other DNA
gcgagaccaggctgtgagggcgtgtcggctcctccataccttgcgttcataagatctcctctcttcgagattagggtgga

SEQ ID NO: 35488 - DNA, 80 bp, synthetic construct
  source 1..80: mol_type = other DNA
attctttgcttcaacagtccttcatggaccccaggtaacagggtagattcaaaagtcgagaaactttcattaatcatctc

SEQ ID NO: 35489 - DNA, 80 bp, synthetic construct
  source 1..80: mol_type = other DNA
cactgatcagacatagtcatgtagatttcgataatgtgtgatatcttctaacgatatcagtgaccaatggtgctctcatc

SEQ ID NO: 35490 - DNA, 80 bp, synthetic construct
  source 1..80: mol_type = other DNA
ccccaaggactgataccaaaggttgtggacaagccaactgatatctcagatgactctgtgcttgagtttaggcagaggcc

SEQ ID NO: 35491 - DNA, 80 bp, synthetic construct
  source 1..80: mol_type = other DNA
ttagcacgttcccctacactagactaaataagtgttaactgaaggaactgatttgcctcctatgaaggatataagcaata

SEQ ID NO: 35492 - DNA, 80 bp, synthetic construct
  source 1..80: mol_type = other DNA
gatcacaatcatcttacatcccgataaggtgtgcacagctacaacgggccgagctatcaaagcctttcggtcaagaaaaa

SEQ ID NO: 35493 - DNA, 80 bp, synthetic construct
  source 1..80: mol_type = other DNA
aactgtggaacggagaagtaattgacaacacttctcatcctgagtacctcaccatgatgattgatccgggagatgtttat

SEQ ID NO: 35494 - DNA, 80 bp, synthetic construct
  source 1..80: mol_type = other DNA
gatgaccctgttgatccaattgagtcagaggctgagccgagaggaaaccctaccattcctaacatcttaagaaactctga

SEQ ID NO: 35495 - DNA, 80 bp, synthetic construct
  source 1..80: mol_type = other DNA
tgagaatcccctcagagggggtcctaagttgttttgaaagggtcgattacgacaaagcctttgggaggtatctggctaac

SEQ ID NO: 35496 - DNA, 80 bp, synthetic construct
  source 1..80: mol_type = other DNA
ggcactgtggaaggatttaacctcaatagatattggaaaggacttggttaagtttaaagatcaaatatggggagtgctaa

SEQ ID NO: 35497 - DNA, 80 bp, synthetic construct
  source 1..80: mol_type = other DNA
ttgtgactaaagattttgtgtactcacagagttctaactgcctctttgatagaaactatacacttatgctgaaggacctt

SEQ ID NO: 35498 - DNA, 80 bp, synthetic construct
  source 1..80: mol_type = other DNA
tttttttgtctcggttcaactctctaataatcctcctttctcctccggaatccagatattcagatgacctgatatctcag

SEQ ID NO: 35499 - DNA, 80 bp, synthetic construct
  source 1..80: mol_type = other DNA
ctgtgtcaactatatatcgctggagatcatgtcctgtccatgtgtgggaactctggttatgaggtcattaagatattaga

SEQ ID NO: 35500 - DNA, 80 bp, synthetic construct
  source 1..80: mol_type = other DNA
acgacttagtttttgtatatggatgttataggcattgggggcatccttacatagattatagaaggggcttgtcaaagcta

SEQ ID NO: 35501 - DNA, 80 bp, synthetic construct
  source 1..80: mol_type = other DNA
ctagcgtcatggctatcggagaacaggggagggccggtccccagtgaaaaggtcattatcacggctctctccaagcctcc

SEQ ID NO: 35502 - DNA, 80 bp, synthetic construct
  source 1..80: mol_type = other DNA
aggaacgggaactgaaaattgaaggtcggttcttcgctttgatgtcttggaatctgagattatattttgtcatcactgag

SEQ ID NO: 35503 - DNA, 80 bp, synthetic construct
  source 1..80: mol_type = other DNA
atataatgtcaacggtatccaccaatgcattaactgtagcacaacactctcagtctttgattaaaccaatgagggacttt

SEQ ID NO: 35504 - DNA, 80 bp, synthetic construct
  source 1..80: mol_type = other DNA
gccccatcttgaagggcagagtctacaagatcctgagtgccgagggggactattttcttctagctatgtctagaataatc

SEQ ID NO: 35505 - DNA, 80 bp, synthetic construct
  source 1..80: mol_type = other DNA
gcccaaactttgattaaaaacatagtgtctctgacaggcccagactttcctctggaggaggcccctgtctttaagaggac

SEQ ID NO: 35506 - DNA, 80 bp, synthetic construct
  source 1..80: mol_type = other DNA
aggatatctaggatggtttctggagctgtgcctcattttcgaaagcttcctgatattcgtctgaggccgggtgactttga

SEQ ID NO: 35507 - DNA, 80 bp, synthetic construct
  source 1..80: mol_type = other DNA
gatgaacctagaaaaaaacaaaactctgaatcagaacctctggttgtttgattaatttttttatctatgttgttatgtta

SEQ ID NO: 35508 - DNA, 80 bp, synthetic construct
  source 1..80: mol_type = other DNA
tagaaaaaaacaaaactctgaatcagaacctctggttgtttgattaatttttttatctatgttgttatgttattgagcgt

SEQ ID NO: 35509 - DNA, 80 bp, synthetic construct
  source 1..80: mol_type = other DNA
tgtagtgagtccccagatactgagctgggtaatagtggattaagaaaggagacattaatcccatgaaagacataagcaat

SEQ ID NO: 35510 - DNA, 80 bp, synthetic construct
  source 1..80: mol_type = other DNA
ataacctcaactctcctctaatagaagaccctgccaaattgatgctggagtggttgaatacagggaatagaccttaccgg

SEQ ID NO: 35511 - DNA, 80 bp, synthetic construct
  source 1..80: mol_type = other DNA
aggatccttcggtggggatttgacaagtactccaagtggtatcttgactcgcgacttcttgctagaaaccatcccctaac

SEQ ID NO: 35512 - DNA, 80 bp, synthetic construct
  source 1..80: mol_type = other DNA
tccttacatcaaaactcagacatggccacccaaacacatagtagatctggtaggggatacgtggcacaagcttccgatta

SEQ ID NO: 35513 - DNA, 80 bp, synthetic construct
  source 1..80: mol_type = other DNA
tggaatttaagattgtattttgtcatcaccgaaaagctcctggcaaattatatcctgcctctatttgatgcactaactat

SEQ ID NO: 35514 - DNA, 80 bp, synthetic construct
  source 1..80: mol_type = other DNA
gtgtaatagatgtataaggcctatagatgatatcacattggagacctcccagattttcgagttcccggatgtgtcaaaac

SEQ ID NO: 35515 - DNA, 80 bp, synthetic construct
  source 1..80: mol_type = other DNA
ggatatctaggatggtttctggagctgtccctcactttcaaaaacttcccgatattcgtttaaaaccaggtgactttgaa

SEQ ID NO: 35516 - DNA, 80 bp, synthetic construct
  source 1..80: mol_type = other DNA
acaccttagaatctgacgacgacattcataggctactgaaagactctctgcgcagaacgaggtgggtggatcaagaagtg

SEQ ID NO: 35517 - DNA, 80 bp, synthetic construct
  source 1..80: mol_type = other DNA
aggaactctgtccaagatgtctatcattatagctattatgatagtattctccaacagagttttcaatgtctctaaaccgc

SEQ ID NO: 35518 - DNA, 80 bp, synthetic construct
  source 1..80: mol_type = other DNA
taaccgatcatttgttctacccaccatctgaccccaaaatcttaaggcacttcaacatatgctgcagtacaatgatgtat

SEQ ID NO: 35519 - DNA, 80 bp, synthetic construct
  source 1..80: mol_type = other DNA
atctagatcttctctactagactacagctgcttataaattggacacttatagaggtgtgtagatattgagacccttagac

SEQ ID NO: 35520 - DNA, 80 bp, synthetic construct
  source 1..80: mol_type = other DNA
gatacacctgaaaaaaaacaaggttttgaatcagaacctctggttgtttgattatttcccccatctttgttgtttatttg

SEQ ID NO: 35521 - DNA, 80 bp, synthetic construct
  source 1..80: mol_type = other DNA
tgaaaaaaaacaaggttttgaatcagaacctctggttgtttgattatttcccccatctttgttgtttatttgttaagcgt

SEQ ID NO: 35522 - DNA, 80 bp, synthetic construct
  source 1..80: mol_type = other DNA
ctgatgcagcattagcagatgacggaactgtcaattctgatgatgaggactatttctctggtgagaccaggagtcctgag

SEQ ID NO: 35523 - DNA, 80 bp, synthetic construct
  source 1..80: mol_type = other DNA
gctgtctatactcgaatcatgattaatggaggtcgactaaagagatcacatataaggagatatgtttcagtcagttccaa

SEQ ID NO: 35524 - DNA, 80 bp, synthetic construct
  source 1..80: mol_type = other DNA
caagattgcgacaaacctatgtgttgtgtacattccacatgaaaaaaactaacacccctcctcttgaaccatctcgaaca

SEQ ID NO: 35525 - DNA, 80 bp, synthetic construct
  source 1..80: mol_type = other DNA
tgagcaagatctttgtcaatccgagtgcaatcagagccggtttggctgatctggagatggctgaagagaccgttgatcta

SEQ ID NO: 35526 - DNA, 80 bp, synthetic construct
  source 1..80: mol_type = other DNA
ttcagctggatgacggaaaaccatctggccttgacgagatggccacggcaggaggaagcaagtatcgggaggacttccag

SEQ ID NO: 35527 - DNA, 80 bp, synthetic construct
  source 1..80: mol_type = other DNA
atggatgagggggaagaccctggtttcctgttccaatcatacctggacaatgtcggagtccagatagtcagacaaatgag

SEQ ID NO: 35528 - DNA, 80 bp, synthetic construct
  source 1..80: mol_type = other DNA
cgtcaggaaggccttcagaggataaatctacccagactgttggcaaagaactcaaaaaggagataccgtctgcttcttct

SEQ ID NO: 35529 - DNA, 80 bp, synthetic construct
  source 1..80: mol_type = other DNA
cagagagaaagtcaatcgtcaaaggctcgaatggtggctcaaattgcttctggtcccccagctcttgaatggtctgcgac

SEQ ID NO: 35530 - DNA, 80 bp, synthetic construct
  source 1..80: mol_type = other DNA
aatgtacccggtttgacccgtctagctcatgacggttctaaactccctctaagatgtgtactggggtgggtagccctagc

SEQ ID NO: 35531 - DNA, 80 bp, synthetic construct
  source 1..80: mol_type = other DNA
caactctaagaagttccagctattagtcgagccagacaagctgaacaaaatcatgcaggatgatctgaaccgttatacat

SEQ ID NO: 35532 - DNA, 80 bp, synthetic construct
  source 1..80: mol_type = other DNA
tctgtctggtatgaatgctgccaagcttgatcctgatgatgtgtgttcctatttagcggctgcaatgcaattctttgagg

SEQ ID NO: 35533 - DNA, 80 bp, synthetic construct
  source 1..80: mol_type = other DNA
cttgttgaccaattctcccactcaggcccatcagacaattgagcctgagttgttttgaaattgacatgaaaaaaacaggc

SEQ ID NO: 35534 - DNA, 80 bp, synthetic construct
  source 1..80: mol_type = other DNA
aacggagaggtcaaggtgtgcagtcctaacggctattcgttcaggatcttgcggcacattttaagatcatttgatgagat

SEQ ID NO: 35535 - DNA, 80 bp, synthetic construct
  source 1..80: mol_type = other DNA
cacagattgactacttgtttacctctggaggagagaacatacgggcttaactccaacccttgggagcaatagaacaaaaa

SEQ ID NO: 35536 - DNA, 80 bp, synthetic construct
  source 1..80: mol_type = other DNA
gaacatgccctgaggactggaccagttatggaatattgattgcacgaaagggagacaagatcacccccgattctcttgta

SEQ ID NO: 35537 - DNA, 80 bp, synthetic construct
  source 1..80: mol_type = other DNA
tcggttatgtcaccaccacgtttaagagaaagcactttcgtcctatgccagacgcgtgcagaaccgcatacagctggaag

SEQ ID NO: 35538 - DNA, 80 bp, synthetic construct
  source 1..80: mol_type = other DNA
atggctggtgaccccaggtatgaagagtctctgcacaatccataccctgactaccactggctccgaactgtaaagaccac

SEQ ID NO: 35539 - DNA, 80 bp, synthetic construct
  source 1..80: mol_type = other DNA
ctggcggaaaatgttcaggattaaccgtgtcctctacctgttgctctactaaccacgactacaccatctggatgcctgaa

SEQ ID NO: 35540 - DNA, 80 bp, synthetic construct
  source 1..80: mol_type = other DNA
cctctacctgttgctctactaaccacgactacaccatctggatgcctgaaaatcctagactgggaacttcgtgtgacatc

SEQ ID NO: 35541 - DNA, 80 bp, synthetic construct
  source 1..80: mol_type = other DNA
aatcctagactgggaacttcgtgtgacatcttcacaaatagtagagggaagagggcatcaaaggggggcaagacctgtgg

SEQ ID NO: 35542 - DNA, 80 bp, synthetic construct
  source 1..80: mol_type = other DNA
gcgataagacgtactgatgtggaagggaattgggccttgacgggaggtatggagttgacgagagaccccacagtctcaga

SEQ ID NO: 35543 - DNA, 80 bp, synthetic construct
  source 1..80: mol_type = other DNA
atttgtggatgaaagaggcttgtataagtctctaaaggtggcatgcaagctgaagctatgtggggtctcagggcttcgac

SEQ ID NO: 35544 - DNA, 80 bp, synthetic construct
  source 1..80: mol_type = other DNA
ttatggatggaacatgggttgcaattcagacgtcagatgagatcaaatggtgctctcctgatcagctagtgaatctacac

SEQ ID NO: 35545 - DNA, 80 bp, synthetic construct
  source 1..80: mol_type = other DNA
gtgtttaagagttggggggagatgtcatccccatgtgaacggggtgttcttcaatggtatcatactaggtcctgacggac

SEQ ID NO: 35546 - DNA, 80 bp, synthetic construct
  source 1..80: mol_type = other DNA
ggtgttcttcaatggtatcatactaggtcctgacggacatgttctaatcccagagatgcaatcgtccctcctccatcagc

SEQ ID NO: 35547 - DNA, 80 bp, synthetic construct
  source 1..80: mol_type = other DNA
cagatgcgcacaagcagatctcgggggttgatcttggtctcccaaactggaggaagtatgtgctgatgagtgcaggcgct

SEQ ID NO: 35548 - DNA, 80 bp, synthetic construct
  source 1..80: mol_type = other DNA
ctgactgcattaatgttgatgattttcttaatgacgtgctgcagaaagactaatagagcagaatcaatgccacacagtcc

SEQ ID NO: 35549 - DNA, 80 bp, synthetic construct
  source 1..80: mol_type = other DNA
tggagagacagggaggaaagtgtcattaacttcgcacaacggaagggtcatatcttcatgggaatcatataaaagtggag

SEQ ID NO: 35550 - DNA, 80 bp, synthetic construct
  source 1..80: mol_type = other DNA
gagaccaagctgtgaggacaaatcatctcttctatacttcgagtcccgatgaccacatccccttggggcaaggggaagat

SEQ ID NO: 35551 - DNA, 80 bp, synthetic construct
  source 1..80: mol_type = other DNA
ctctggattcaacagtcctccttggacttctcgcaacagggtagattcaagagtcatgagacttccattaatcatctcaa

SEQ ID NO: 35552 - DNA, 80 bp, synthetic construct
  source 1..80: mol_type = other DNA
caagaactgataccaaaggtggtggacaagctaggagccatctcaaatgatgatacgcttgaacaaagatagaggttgca

SEQ ID NO: 35553 - DNA, 80 bp, synthetic construct
  source 1..80: mol_type = other DNA
gtgagtccccaggtactagactgagtaagagtggattgagaaaggagactttcattatatgaagaacataagcaatagat

SEQ ID NO: 35554 - DNA, 80 bp, synthetic construct
  source 1..80: mol_type = other DNA
caccatcatcttgcatctcagcaaaatgtgtacacttataaaagactgggtcatctatgctttccagtcgagaaaaaaac

SEQ ID NO: 35555 - DNA, 80 bp, synthetic construct
  source 1..80: mol_type = other DNA
tgtagaactgaggaacaactagcaacacatctcatctcgagactttcgccatgatgattgatccaggagatgtttatgat

SEQ ID NO: 35556 - DNA, 80 bp, synthetic construct
  source 1..80: mol_type = other DNA
gacccggttgatccgatcgagtctgaagccgaagctagggggactcccactgttcctaacatattgaggaactctgacta

SEQ ID NO: 35557 - DNA, 80 bp, synthetic construct
  source 1..80: mol_type = other DNA
tataactgacttggcccacttctattccaagtcctcccccatagaaaagttattaaattgcacacttggaaatagagggc

SEQ ID NO: 35558 - DNA, 80 bp, synthetic construct
  source 1..80: mol_type = other DNA
tttttttatctcgtttcaactctctaatgatcctgctttctccccctgaacctcggtattcagacgacttgatatctcag

SEQ ID NO: 35559 - DNA, 80 bp, synthetic construct
  source 1..80: mol_type = other DNA
ctatgccaactatacatagctggggatcaggttttgtccatgtgcggaaactctggttatgaagtcattaaaatactaga

SEQ ID NO: 35560 - DNA, 80 bp, synthetic construct
  source 1..80: mol_type = other DNA
taaacagtttagtccagagagcagagaagtttagacctctcattcattctctaggggatttccctatgttcataaaagac

SEQ ID NO: 35561 - DNA, 80 bp, synthetic construct
  source 1..80: mol_type = other DNA
aggattcttaggtggggattcgacaaatactccaagtggtatattgacttgcgactccttgcaagagaccatcccttaaa

SEQ ID NO: 35562 - DNA, 80 bp, synthetic construct
  source 1..80: mol_type = other DNA
tccctacattaaaactcagacatggccacccaaacatatagtggatttagtaggggatacatggcataaactcccgatca

SEQ ID NO: 35563 - DNA, 80 bp, synthetic construct
  source 1..80: mol_type = other DNA
agaataatctatctggacccctccttagggggggtgtcaggaatgtctctcgggagattccacatacgtcagttctcaga

SEQ ID NO: 35564 - DNA, 80 bp, synthetic construct
  source 1..80: mol_type = other DNA
ggtgtcaggaatgtctctcgggagattccacatacgtcagttctcagatcccgtctctgaaggattgtcattctggagag

SEQ ID NO: 35565 - DNA, 80 bp, synthetic construct
  source 1..80: mol_type = other DNA
atctcctgtacctgtggtacaacaggaggaggaaatcctagggtttcagtgtctgtactcccatcattcgatcaatcatt

SEQ ID NO: 35566 - DNA, 80 bp, synthetic construct
  source 1..80: mol_type = other DNA
tttctcacgaggacctctaaaggggtacttgggatcatccacctccatgtcgacccagctgttccatgcttgggaaaagg

SEQ ID NO: 35567 - DNA, 80 bp, synthetic construct
  source 1..80: mol_type = other DNA
gaatatccaggatggtgtctggagctgtgccccactttcaaaaacttcccgacatcagtctgaaacccggagattttgaa

SEQ ID NO: 35568 - DNA, 80 bp, synthetic construct
  source 1..80: mol_type = other DNA
tctctaagtggtagggagaaatcccgccatataggttcagctcaagggctcttatattcaattttggttgcaatccatga

SEQ ID NO: 35569 - DNA, 80 bp, synthetic construct
  source 1..80: mol_type = other DNA
acatgcatctttagtcggtttactcttaagtctgtataggttgagcaaaatatctggacaaaacaccggcaactacaaga

SEQ ID NO: 35570 - DNA, 80 bp, synthetic construct
  source 1..80: mol_type = other DNA
catgtttccagatgccaagcttgtattcaacagcttgttggaggtgaatgacctgatggcatccggaacacatccgttgc

SEQ ID NO: 35571 - DNA, 80 bp, synthetic construct
  source 1..80: mol_type = other DNA
actatacctccgattttccaagcgaggaaaattcttccgagatgccgagtacttaacttcttctacccttcgagagatga

SEQ ID NO: 35572 - DNA, 80 bp, synthetic construct
  source 1..80: mol_type = other DNA
actctagtttgagtctgtcgtctcattggatcaggcttgtttacaagatagtgaagaccaccagacttgtcgggagtatt

SEQ ID NO: 35573 - DNA, 80 bp, synthetic construct
  source 1..80: mol_type = other DNA
atctctattagactacagctgcttatgaactgaacattattggggcttgtaaataccgaaactcttaggcgatgcacctt

SEQ ID NO: 35574 - DNA, 80 bp, synthetic construct
  source 1..80: mol_type = other DNA
caagattgaaaagaacctacaaagtgtgtatatccttcatgaaaaaaactaacacccctccttttgaaccatctcaacga

SEQ ID NO: 35575 - DNA, 80 bp, synthetic construct
  source 1..80: mol_type = other DNA
ttcagttagatgatgggaagccgtcggacctcagtgagatggccccggcgggagagagcaagtatcgggaggactttcag

SEQ ID NO: 35576 - DNA, 80 bp, synthetic construct
  source 1..80: mol_type = other DNA
catcgggaagatcctcggaggacaaatctacccagactgctgggagagaacttaagaaggaagctccatcggcttcttct

SEQ ID NO: 35577 - DNA, 80 bp, synthetic construct
  source 1..80: mol_type = other DNA
caacgacgaagatgatctgtctgtagaggcggagattgctcaccagattgctgagagcttctccaagaaatacaaattcc

SEQ ID NO: 35578 - DNA, 80 bp, synthetic construct
  source 1..80: mol_type = other DNA
caagaacagataccaaaggtggtggacaagcctagagatatctcagatgatgttgtgcttcaacacagacagagattgta

SEQ ID NO: 35579 - DNA, 80 bp, synthetic construct
  source 1..80: mol_type = other DNA
acgatcaagttcatatcaaaaaggtgatagataaatcctatcaggagtgcttggcgagcgacctggccaggaggatcctt

SEQ ID NO: 35580 - DNA, 80 bp, synthetic construct
  source 1..80: mol_type = other DNA
agtaaccgggcaagggctcttggactactcacgggttacatacgcttttcacctagactatgagaagtggaacaatcatc

SEQ ID NO: 35581 - DNA, 80 bp, synthetic construct
  source 1..80: mol_type = other DNA
tccttttcaagaggccctctaaagggatacctgggatcatctacctccatgtcaacccagctattccatgcttgggagaa

SEQ ID NO: 35582 - DNA, 80 bp, synthetic construct
  source 1..80: mol_type = other DNA
atgcatctttggttggtcttctcctgagtttgtatcgattgagcaaaatatccggacagaacacaggcaattataagacg

SEQ ID NO: 35583 - DNA, 80 bp, synthetic construct
  source 1..80: mol_type = other DNA
cggctctctccaaaccgcctgtcaaccctagagagtttttgaaatctatagaccttggggggctgccagacgaagactta

SEQ ID NO: 35584 - DNA, 80 bp, synthetic construct
  source 1..80: mol_type = other DNA
atcatcggcttgaaacccaaagaaagggagctgaagatcgaaggccgattttttgctttaatgtcttggaacttaaggct

SEQ ID NO: 35585 - DNA, 80 bp, synthetic construct
  source 1..80: mol_type = other DNA
atacttcgttattacagagaagctcctggccaattatatattaccactctttgatgcattaaccatgaccgacaatctga

SEQ ID NO: 35586 - DNA, 80 bp, synthetic construct
  source 1..80: mol_type = other DNA
atgaactttctcaatcataaaaaaccttttccaagctgttcacaatcagaataggaggaggatctcgcctttccctcaca

SEQ ID NO: 35587 - DNA, 80 bp, synthetic construct
  source 1..80: mol_type = other DNA
taattttctcgtcgtgttttgggaaattccccatttacacgataccagacaaacttggtccatggagtcccatcgatata

SEQ ID NO: 35588 - DNA, 80 bp, synthetic construct
  source 1..80: mol_type = other DNA
ccgagcgttgcagatttggatccgtacgataaatcccttcactcaagagtttttcctggcggaaaatgctcaggaataac

SEQ ID NO: 35589 - DNA, 80 bp, synthetic construct
  source 1..80: mol_type = other DNA
cgtgtcctccacttgctgctctactaaccacgactacaccatctggatgcctgaaaatcctagactgggaacttcatgtg

SEQ ID NO: 35590 - DNA, 80 bp, synthetic construct
  source 1..80: mol_type = other DNA
acattttcaccaatagtagagggaagagggcatctaaagggggcaagacttgtggatttgtggatgaaagaggcttgtac

SEQ ID NO: 35591 - DNA, 80 bp, synthetic construct
  source 1..80: mol_type = other DNA
tcctgtttctgaggggttgtcattctggagggaaatttggctgagctcccatgaatcttggattcatgccctgtgtcagg

SEQ ID NO: 35592 - DNA, 80 bp, synthetic construct
  source 1..80: mol_type = other DNA
gatgtaataagtgtgtaaggcccatagatgatatcacactggagaccccccagatctttgagtttccagatgtgtcaaaa

SEQ ID NO: 35593 - DNA, 80 bp, synthetic construct
  source 1..80: mol_type = other DNA
gtgcgtcccaggatggtggacttaacatgagtttatcaagaaaggcaatctgcctcccatgaaggacataagcaatagct

SEQ ID NO: 35594 - DNA, 80 bp, synthetic construct
  source 1..80: mol_type = other DNA
gtaatctcatatatcctcctgaggttagataatcacccttccttgtacataatgctcagagagccatctcttagaggaga

SEQ ID NO: 35595 - DNA, 80 bp, synthetic construct
  source 1..80: mol_type = other DNA
cgttaaaagagtctataaactggttcattactaggaattccaacctggctcaaactctaatcaggaacattatgtctctg

SEQ ID NO: 35596 - DNA, 80 bp, synthetic construct
  source 1..80: mol_type = other DNA
tttttttgtctcgcttcaattccttaatgatcttgctctctcccccagagccccgatactcagacgatttgatatctcaa

SEQ ID NO: 35597 - DNA, 80 bp, synthetic construct
  source 1..80: mol_type = other DNA
tttctcacgaggccccctgaagggatacttaggttcgtccacttctatgtcaacccaattattccatgcatgggaaaaag

SEQ ID NO: 35598 - DNA, 80 bp, synthetic construct
  source 1..80: mol_type = other DNA
cgggaaaggaacattcgagagaagattcttcagggatgaaaaggaacttcaagaatacgaggcagctgaactgacaaaga

SEQ ID NO: 35599 - DNA, 80 bp, synthetic construct
  source 1..80: mol_type = other DNA
tttggatgatctaaatgttttcccgtccctctgccttgtagttggggacgggtcagggggaatatcaagggcagttctca

SEQ ID NO: 35600 - DNA, 80 bp, synthetic construct
  source 1..80: mol_type = other DNA
actcataagaagttgaatggccgggtaccggaaacatattgatcgcgtatatccgtcatgaaaaaaactaacacccctcc

SEQ ID NO: 35601 - DNA, 80 bp, synthetic construct
  source 1..80: mol_type = other DNA
gtgtaccccctgatagcaggctatacataagttaatcggaaaaggcaatctgcctcccatgaaggacataagcaatagct

SEQ ID NO: 35602 - DNA, 80 bp, synthetic construct
  source 1..80: mol_type = other DNA
gtaccatgatgtacttgtctactgctctgggggatgttccaagctttgctagacttcatgacctatataacagaccgata

SEQ ID NO: 35603 - DNA, 80 bp, synthetic construct
  source 1..80: mol_type = other DNA
caggatcggctctgcacaggttcaagtcagctaggtacagtgaagggggttattcctctgtctgccccaatctcctctct

SEQ ID NO: 35604 - DNA, 80 bp, synthetic construct
  source 1..80: mol_type = other DNA
ccccaaagagatggaaagaaaattatcatttactccccaaaacaaaaaagtcgtatcttcatgggagtcttacaaaagcg

SEQ ID NO: 35605 - DNA, 80 bp, synthetic construct
  source 1..80: mol_type = other DNA
gctagggtctcctgtatctctaacgaccaaatagtcaacctcgctaatataatgtcgacagtgtctaccaatgctttgac

SEQ ID NO: 35606 - DNA, 80 bp, synthetic construct
  source 1..80: mol_type = other DNA
tatgatgaccccattgatccggtcgagtctgagagtgagccaagaggaaattccaatatccccaacatcttgcgaaattc

SEQ ID NO: 35607 - DNA, 80 bp, synthetic construct
  source 1..80: mol_type = other DNA
tccggatgaccctgaccgacaattgttctcggtcttacaaagttctgaaggattacctcaagaaagtggatctaggatct

SEQ ID NO: 35608 - DNA, 80 bp, synthetic construct
  source 1..80: mol_type = other DNA
ttcggaaaacagaggaggactggttccaagtgagaaggtcattattacggctctctccaaaccgcctgtcaaccctagag

SEQ ID NO: 35609 - DNA, 80 bp, synthetic construct
  source 1..80: mol_type = other DNA
tcattattacggctctctccaaaccgcctgtcaaccctagagagtttttgaaatctatagaccttggggggctgccagac

SEQ ID NO: 35610 - DNA, 80 bp, synthetic construct
  source 1..80: mol_type = other DNA
gaagacttaatcatcggcttgaaacccaaagaaagggagctgaagatcgaaggccgattttttgctttaatgtcttggaa

SEQ ID NO: 35611 - DNA, 80 bp, synthetic construct
  source 1..80: mol_type = other DNA
cgataagaagacagtttaggaagaacctctctagaaccttagaagagtccttctataactcagagattcatgggatcaat

SEQ ID NO: 35612 - DNA, 80 bp, synthetic construct
  source 1..80: mol_type = other DNA
cggatgacacagactccccagagaataggaagagtttgggcctgctcttctgagagggcagatctcctaagagaaatctc

SEQ ID NO: 35613 - DNA, 80 bp, synthetic construct
  source 1..80: mol_type = other DNA
aagaatctctctaaaaatatgagggccaacctacgacagatgagctctctcatgagacaagtattgggcgggcatggcga

SEQ ID NO: 35614 - DNA, 80 bp, synthetic construct
  source 1..80: mol_type = other DNA
aggtgcgtcatgcagccagagctatgacagggggttatagccccaataagaagatgtctcgcaaagcgtggtgttcagaa

SEQ ID NO: 35615 - DNA, 80 bp, synthetic construct
  source 1..80: mol_type = other DNA
tgggtctgctctgcccaacaggttgctgtttcaacctcggcaaatccagcccctgtctctgagctggacatcagggctct

SEQ ID NO: 35616 - DNA, 80 bp, synthetic construct
  source 1..80: mol_type = other DNA
gcggtctatactcggatcatgatcaatgggggccgactcaaaagatcacatataagaaggtatgtatcagtcagttctaa

SEQ ID NO: 35617 - DNA, 80 bp, synthetic construct
  source 1..80: mol_type = other DNA
caacaccactaatacaatgaatttcctacgcaagatagtgaagaactgtagagatgaggacgaccagaagccctctctcg

SEQ ID NO: 35618 - DNA, 80 bp, synthetic construct
  source 1..80: mol_type = other DNA
cagcagttttcaaagatggtgacgaggcagaggattttgttgaggttcatctcccagatgttcacaaacagatctcaggg

SEQ ID NO: 35619 - DNA, 80 bp, synthetic construct
  source 1..80: mol_type = other DNA
gtggacctaggcctcccaagctggggaaagtatatgctgatgattgcaggtgctctaacgactctaatgctgttcatctt

SEQ ID NO: 35620 - DNA, 80 bp, synthetic construct
  source 1..80: mol_type = other DNA
cttgatgacatgttgcaaaagagtcaacgggacaaaatctatacgacaaggccccagagagatagaaagaaaagtatcat

SEQ ID NO: 35621 - DNA, 80 bp, synthetic construct
  source 1..80: mol_type = other DNA
ttactccccaaaacaaaaaagtcatatcttcatgggagtcttacaagagcggaggcgagaccaagctgtaaggagggctg

SEQ ID NO: 35622 - DNA, 80 bp, synthetic construct
  source 1..80: mol_type = other DNA
ccccctccacacactatgctcagaaaactgttcccctctgatacatggaagaatatcctgccttgacaatcccccacgga

SEQ ID NO: 35623 - DNA, 80 bp, synthetic construct
  source 1..80: mol_type = other DNA
ctctgtccaacagggtaaatttcgaagtcaagaaactctcatcgatcatctcactcgaccagacacattcaggtggacgt

SEQ ID NO: 35624 - DNA, 80 bp, synthetic construct
  source 1..80: mol_type = other DNA
tgatgatgtatgaagcatttttacagtatcagcgactaatggtgctctcaccctctaaggactggtactaaaggtagcgg

SEQ ID NO: 35625 - DNA, 80 bp, synthetic construct
  source 1..80: mol_type = other DNA
acaggctgaccgacatctcagacaacactgtttcttagcttgggcagaggttgtgataaactcctctaccctaaactaaa

SEQ ID NO: 35626 - DNA, 80 bp, synthetic construct
  source 1..80: mol_type = other DNA
acagtgatcagctgagaaaactgatttgcctcctatgaaggacacaagcaatagatcacaatcatctcacatcccaataa

SEQ ID NO: 35627 - DNA, 80 bp, synthetic construct
  source 1..80: mol_type = other DNA
atccacgacttcttgcgagggatcaccccctgactccttatatcaagacccagacatggcctcccaagcacatagtggat

SEQ ID NO: 35628 - DNA, 80 bp, synthetic construct
  source 1..80: mol_type = other DNA
ctgtcccccccggaacccagatactcagatgacttgatatctcagctgtgtcagctgtacatagcaggagatcaagtgtt

SEQ ID NO: 35629 - DNA, 80 bp, synthetic construct
  source 1..80: mol_type = other DNA
cagagaaactcctggccaattatatattaccactctttgatgcattaaccatgaccgacaatctgaacaaggtgttcaaa

SEQ ID NO: 35630 - DNA, 80 bp, synthetic construct
  source 1..80: mol_type = other DNA
ttcttttccagaggccctctgaagggatacttgggctcatccacatctatgtcaacccagctgttccatgcttgggagaa

SEQ ID NO: 35631 - DNA, 80 bp, synthetic construct
  source 1..80: mol_type = other DNA
ctgatatgtcccttcaaacttatagatctgaggaggacaaagactcctcagtccttctagagtagtcgaattatatccca

SEQ ID NO: 35632 - DNA, 80 bp, synthetic construct
  source 1..80: mol_type = other DNA
cgccatgcagccagaaccatgacaggaggttacagtcctaacaagaaggtgtcgcgcaaggcggggtgctcagagtgggt

SEQ ID NO: 35633 - DNA, 80 bp, synthetic construct
  source 1..80: mol_type = other DNA
atggatgaaggagaggaccctagtctcttattccaatcatacctagacaatgttggagtccaaatagtcagacagatgag

SEQ ID NO: 35634 - DNA, 80 bp, synthetic construct
  source 1..80: mol_type = other DNA
catcgggaaggtctttggaagataaatctacccagaccgctgggagagaacccaagaaggaatcgccatctgctcctctc

SEQ ID NO: 35635 - DNA, 80 bp, synthetic construct
  source 1..80: mol_type = other DNA
ttatggacggaacatgggctgcgattcaagcatctgatgaggccaaatggtgccctcctgatcagttagtgaatatacat

SEQ ID NO: 35636 - DNA, 80 bp, synthetic construct
  source 1..80: mol_type = other DNA
gattttcgctctgatgagattgaacatcttgttgtggaagagttagtaaagaaaagggaagagtgtctagatgcactaga

SEQ ID NO: 35637 - DNA, 80 bp, synthetic construct
  source 1..80: mol_type = other DNA
caagagctgatgccaagggtggtggacgggtcaagagacatttcaaacagtgttgtgtttgaacacaaacagagatcgta

SEQ ID NO: 35638 - DNA, 80 bp, synthetic construct
  source 1..80: mol_type = other DNA
cactatcagcttgcatctcagcaaagtgcgtacaattataaagggctgggtcatctacgcttttcagtcgagaaaaaaac

SEQ ID NO: 35639 - DNA, 80 bp, synthetic construct
  source 1..80: mol_type = other DNA
agatctcttgggggaggaaagtggtaggtaccacggtgcctcacccttcggagatgttgggcctgcttcctaggtcttca

SEQ ID NO: 35640 - DNA, 80 bp, synthetic construct
  source 1..80: mol_type = other DNA
gcgcagaccttaattaggaacataatgtctctgacaggccctgatttccctctggaggaggctcctgttttcaaaaggac

SEQ ID NO: 35641 - DNA, 80 bp, synthetic construct
  source 1..80: mol_type = other DNA
gattcgggatataatgacagcaccatcttccctgtcaacatatatggcaaggtttcccctagagactatttgagagggct

SEQ ID NO: 35642 - DNA, 80 bp, synthetic construct
  source 1..80: mol_type = other DNA
ttcagctggatgacagaaaaccatctggtcttaacgagatggcagcagcaggagaaagcaaatatcgggaggacttccaa

SEQ ID NO: 35643 - DNA, 80 bp, synthetic construct
  source 1..80: mol_type = other DNA
atggatgagggggaagatccaggtttcttattccagtcatacctggataatgtcgaagtccagatagttagacaaatgag

SEQ ID NO: 35644 - DNA, 80 bp, synthetic construct
  source 1..80: mol_type = other DNA
gctctgactgcattaatgttgatggttttcctaatgacgtgttgcagaaaagctaatagagcagagtcaatacaacacaa

SEQ ID NO: 35645 - DNA, 80 bp, synthetic construct
  source 1..80: mol_type = other DNA
gacccagttgatccgattgagtcggaagccgaacctagggggacccccactgtccctaacatcttgagaaactctgacta

SEQ ID NO: 35646 - DNA, 80 bp, synthetic construct
  source 1..80: mol_type = other DNA
tggccctgacagacaactgctctaggtcttacaaagtcttgaaagattactttaagaagctagatttgggatccctcaag

SEQ ID NO: 35647 - DNA, 80 bp, synthetic construct
  source 1..80: mol_type = other DNA
cgggactgtcaattctgatgacgaggactatttctctggtgagaccaggagtcctgaggctgtctatactcgaatcatga

SEQ ID NO: 35648 - DNA, 80 bp, synthetic construct
  source 1..80: mol_type = other DNA
aggactcatgaatttttccagaagtcttgggtctattattcagacagatcagaccttatcgggttatgggaggacctaat

SEQ ID NO: 35649 - DNA, 80 bp, synthetic construct
  source 1..80: mol_type = other DNA
catccagggaggtcctcagaggacaaatcaacacaaactgctggtcgagggcccaagaaggagacagcatccactccttc

SEQ ID NO: 35650 - DNA, 80 bp, synthetic construct
  source 1..80: mol_type = other DNA
atctagatcttctctactagactacagttgcttataagcaggacccttttagaggtttgtgggtgctaagacctttagac

SEQ ID NO: 35651 - DNA, 80 bp, synthetic construct
  source 1..80: mol_type = other DNA
gtcaggagaaagatttctcaagatctggtcacagaccgtagaggaaattgtctcctatgtcacagtcaacttctctactc

SEQ ID NO: 35652 - DNA, 80 bp, synthetic construct
  source 1..80: mol_type = other DNA
cagaactggtgcagaaggacatacggctgagagactccacctttcactggcatcttcgatgcaataagtgtataaggtcc

SEQ ID NO: 35653 - DNA, 80 bp, synthetic construct
  source 1..80: mol_type = other DNA
tcagatggatgaaggggaggaccccagcctcttgttccagtcatatctggacaatgtcggagttcaaatagtcaggcaaa

SEQ ID NO: 35654 - DNA, 80 bp, synthetic construct
  source 1..80: mol_type = other DNA
tttgctgttcatgtccgttatattattactacccacgttgacacagatagctccagtagtggttctttgtcctcatcaaa

SEQ ID NO: 35655 - DNA, 80 bp, synthetic construct
  source 1..80: mol_type = other DNA
tctgatttcagaagttccaaaatgacctatttaacccttatcacctatcagtctcatcttttacttcagagggttgagaa

SEQ ID NO: 35656 - DNA, 80 bp, synthetic construct
  source 1..80: mol_type = other DNA
ttgccaggaacatcgaggacaatcaggctcatctccaaggggagcctatagaagtagatagtctgcccgatgacatgaga

SEQ ID NO: 35657 - DNA, 80 bp, synthetic construct
  source 1..80: mol_type = other DNA
aggctctttggggagaccttctgaagacaaggccacccaaactgccaatcgagaacccaagaaaggagtggcatcagttt

SEQ ID NO: 35658 - DNA, 80 bp, synthetic construct
  source 1..80: mol_type = other DNA
aagagaaatctcgtgggggagaaaggtggttggtacgaccgtccctcacccctctgagatgttggggttgcttcctaaat

SEQ ID NO: 35659 - DNA, 80 bp, synthetic construct
  source 1..80: mol_type = other DNA
aagcaggaaatccggatttaggagagagaacactggaaagcttcacacgccttctcgaagatcccactaccctaaatata

SEQ ID NO: 35660 - DNA, 80 bp, synthetic construct
  source 1..80: mol_type = other DNA
aaaggaggggccagtccaaccattcttctcaaggatgcaatcagaaaggccctgtatgatgaagtagataaggtggagaa

SEQ ID NO: 35661 - DNA, 80 bp, synthetic construct
  source 1..80: mol_type = other DNA
cggctccacttggataatgaaaaaccgtcttgttttgacaaggtgacagaagaaggggagagcaagtgtcatgaagactt

SEQ ID NO: 35662 - DNA, 80 bp, synthetic construct
  source 1..80: mol_type = other DNA
gtggcttgcaattctagtttgagcctctcggctcactggataaggttgatttacaaaatagtgaagactaccagacttgt

SEQ ID NO: 35663 - DNA, 80 bp, synthetic construct
  source 1..80: mol_type = other DNA
aggaaatacggagaatctatccagggaggtagaaaagcaccttcgagggtacaacaggtggattaccctagacgacataa

SEQ ID NO: 35664 - DNA, 80 bp, synthetic construct
  source 1..80: mol_type = other DNA
aatccagatcatctcttctagattacagctgcctataaaacagggcatttggggagaaatacatggaccaacaccttggg

SEQ ID NO: 35665 - DNA, 80 bp, synthetic construct
  source 1..80: mol_type = other DNA
acagtatgccctgaaaaaaacaagaccctgattcataacctctatttgcttgatggttttttttgtctttgttgtttatt

SEQ ID NO: 35666 - DNA, 80 bp, synthetic construct
  source 1..80: mol_type = other DNA
atcttgcgtcacattctgaaatcgtttgatgagatctattccggaaatcaaagaatgattgggttagtcaaagttgtggt

SEQ ID NO: 35667 - DNA, 80 bp, synthetic construct
  source 1..80: mol_type = other DNA
aatatcctgccttgacaatcccccacggactctgtccgacagggtaaatttcgaagttaagaaactttcatagatcatct

SEQ ID NO: 35668 - DNA, 80 bp, synthetic construct
  source 1..80: mol_type = other DNA
agatgcagagggcccgctctctgaattacccggaccttgtaagaggatttcctgaggagatcatatccaacccatataat

SEQ ID NO: 35669 - DNA, 80 bp, synthetic construct
  source 1..80: mol_type = other DNA
tgaggggttatctttttggagagagatttggttgagttcaaatgagtcttggatccatgcactttgtcaagaagcaggaa

SEQ ID NO: 35670 - DNA, 80 bp, synthetic construct
  source 1..80: mol_type = other DNA
aaaagacttcaaaatccgttgatttcaggtctgagagttgttcagtgggcaacaggcgctcattacaaactcaaacctat

SEQ ID NO: 35671 - DNA, 80 bp, synthetic construct
  source 1..80: mol_type = other DNA
gtgtcagctgtacatagcaggagatcaagtgttgtccatgtgcgggaactctggttatgaagtcataaaaatcttggagc

SEQ ID NO: 35672 - DNA, 80 bp, synthetic construct
  source 1..80: mol_type = other DNA
cgtatgttgtaaacagcttggtctatagagcggaaaaattcaggcctcttattcactctctgggggacttccctgttttt

SEQ ID NO: 35673 - DNA, 80 bp, synthetic construct
  source 1..80: mol_type = other DNA
tttcactggcatcttcgatgcaataagtgtataagatccatcgatgacatcactctagagacttcccagatctttgaatt

SEQ ID NO: 35674 - DNA, 80 bp, synthetic construct
  source 1..80: mol_type = other DNA
tcctccttagattagacaatcacccatccttatacatcatgctcagagaaccgtctttgagaggagaaatattttctatt

SEQ ID NO: 35675 - DNA, 80 bp, synthetic construct
  source 1..80: mol_type = other DNA
ctatacgcacagacatggacatcagaactggtgcagaaggacatacggctgagagattccacctttcactggcatcttcg

SEQ ID NO: 35676 - DNA, 80 bp, synthetic construct
  source 1..80: mol_type = other DNA
atgcaataaatgtataaggtctatcgatgacatcactctagagacttcccagatctttgaattcccggatgtttcgaaaa

SEQ ID NO: 35677 - DNA, 80 bp, synthetic construct
  source 1..80: mol_type = other DNA
atgacctgatggcttcagggacacatccgttacccccttcagcaatcatgagcggaggggatgatatcatatctagggtg

SEQ ID NO: 35678 - DNA, 80 bp, synthetic construct
  source 1..80: mol_type = other DNA
aggatatctaggatggtctctggagcagtgcctcactttcaaaaacttcctgatattcgtctaagacctggagactttga

SEQ ID NO: 35679 - DNA, 80 bp, synthetic construct
  source 1..80: mol_type = other DNA
agacaccttggaatcagacgaggacattcagaggttgctgaaagactcattacgtaggacaagatgggtagaccaagagg

SEQ ID NO: 35680 - DNA, 80 bp, synthetic construct
  source 1..80: mol_type = other DNA
ggactatgagaaatggaacaatcatcagagactagaatcgactgaggatgtattctccgtccttgatcaagtgtttggat

SEQ ID NO: 35681 - DNA, 80 bp, synthetic construct
  source 1..80: mol_type = other DNA
gaagtcttctctcgcatcggcccccccagatgatgatgatctgtggttgccccctccagaatatgtcccattgaaggagc

SEQ ID NO: 35682 - DNA, 80 bp, synthetic construct
  source 1..80: mol_type = other DNA
tcacagggaagaagaacatgagaaacttctgtgttaatggggaggtcaaggtgtgtagtccaaacggatattcctttagg

SEQ ID NO: 35683 - DNA, 80 bp, synthetic construct
  source 1..80: mol_type = other DNA
caacatacatgatttggtctttgtatacggttgttacaggcattgggggcacccttacatagactatagaaagggtctgt

SEQ ID NO: 35684 - DNA, 80 bp, synthetic construct
  source 1..80: mol_type = other DNA
atggatgaaggggaggaccccagcctcttattccagtcatacctggataatgtcggagttcaaatagtccggcaaatgag

SEQ ID NO: 35685 - DNA, 80 bp, synthetic construct
  source 1..80: mol_type = other DNA
tgtctagaatagtttaccttgacccctcattagggggtgtgtctggaatgtctcttgggaggtttcacatacgccagttt

SEQ ID NO: 35686 - DNA, 80 bp, synthetic construct
  source 1..80: mol_type = other DNA
tcagacccggtctctgaggggttatctttttggagagagatttggttaagttcaaatgagtcttggatccatgcactttg

SEQ ID NO: 35687 - DNA, 80 bp, synthetic construct
  source 1..80: mol_type = other DNA
gctctaacgactctaatgttgttcatcttcttgatgacatgttgcaaaagagtcaacaggacggaatcaatacgacaagg

SEQ ID NO: 35688 - DNA, 80 bp, synthetic construct
  source 1..80: mol_type = other DNA
ccccagagagttagaaagcaaagtatcagttactccccaaaacagaaaagtcatatcttcatgggagtcttacaagagcg

SEQ ID NO: 35689 - DNA, 80 bp, synthetic construct
  source 1..80: mol_type = other DNA
gaggcgagaccaagctgtgaggagggctgcctcctccacacactatgcttggaaaactgctcccctccgatacatggaag

SEQ ID NO: 35690 - DNA, 80 bp, synthetic construct
  source 1..80: mol_type = other DNA
cacccgaccagacacagtcatgtggactttgatgatgtatgaagcatttttatagtatcagcgactaatggtgctctcac

SEQ ID NO: 35691 - DNA, 80 bp, synthetic construct
  source 1..80: mol_type = other DNA
ctaaaaggttccaaaaccccttaatctctggcctgagagtggttcagtgggcaaccggcgcccactataagcttaagccc

SEQ ID NO: 35692 - DNA, 80 bp, synthetic construct
  source 1..80: mol_type = other DNA
tgagagtggttcagtgggcaaccggcgcccactataagcttaagcccatcctagatgatctcaatgttttcccatctctc

SEQ ID NO: 35693 - DNA, 80 bp, synthetic construct
  source 1..80: mol_type = other DNA
atcctagatgatctcaatgttttcccatctctctgtcttgtagttggggacggatcaggtgggatatcaagggcagttct

SEQ ID NO: 35694 - DNA, 80 bp, synthetic construct
  source 1..80: mol_type = other DNA
tagcctgcaattctagcctgagtctgtcatctcactggatcaggctgatttacaaggtagtgaagactaccagactcgtt

SEQ ID NO: 35695 - DNA, 80 bp, synthetic construct
  source 1..80: mol_type = other DNA
ggtagcatcgaggacctatctggagaggtaaaaaggcacctccatgggtacaacaggtggatcactcttgaagacatcag

SEQ ID NO: 35696 - DNA, 80 bp, synthetic construct
  source 1..80: mol_type = other DNA
atctagatcatctttgctggagtacagctgcttgtagaccggataatcccgggagcccatacataccgatactcgtatat

SEQ ID NO: 35697 - DNA, 80 bp, synthetic construct
  source 1..80: mol_type = other DNA
tcatcaagctcgtccaggctcattcgccgagttcctaaacaagacatattcgagtgactcgtgaggagttgaatgacaaa

SEQ ID NO: 35698 - DNA, 80 bp, synthetic construct
  source 1..80: mol_type = other DNA
atgccagaaatttatagattgtgtatatccaccatgaaaaaaactaacacccctcctttcgaaccatcccaaatatgagc

SEQ ID NO: 35699 - DNA, 80 bp, synthetic construct
  source 1..80: mol_type = other DNA
ttcacttagacgatggacaatcgtccaaccttggtgagatggccaaagtgagagaaagcaagtatcgagaggactttcag

SEQ ID NO: 35700 - DNA, 80 bp, synthetic construct
  source 1..80: mol_type = other DNA
cttcgggaaggtcttcagaggataaatcaacccagactactggccgagaattcaagagggaggcaacatccactccttct

SEQ ID NO: 35701 - DNA, 80 bp, synthetic construct
  source 1..80: mol_type = other DNA
cagagagaaagccaatcctcgaaagccaggatggcagctcaagctgcctctggtcctccagcccttgaatggtctgctac

SEQ ID NO: 35702 - DNA, 80 bp, synthetic construct
  source 1..80: mol_type = other DNA
cctgccaaccgagcctataagctcagttcttccagatagtcaaatctgagatgtcccagagtctacatgaaaaaaacagg

SEQ ID NO: 35703 - DNA, 80 bp, synthetic construct
  source 1..80: mol_type = other DNA
ttatagatggaacatggatagcaatgcaaacatcagaggaaaccaagtggtgccccccggatcagttagtgaatctgcat

SEQ ID NO: 35704 - DNA, 80 bp, synthetic construct
  source 1..80: mol_type = other DNA
gactttcgctctgatgagattgagcaccttgttgtagaggagttggtcaagaaaagagaagagtgtttggatgcattaga

SEQ ID NO: 35705 - DNA, 80 bp, synthetic construct
  source 1..80: mol_type = other DNA
gattgccttgatgttgataatttttctaatgacatgttgtagaggagtccatcgaccagactctgcacaacaaaagctcg

SEQ ID NO: 35706 - DNA, 80 bp, synthetic construct
  source 1..80: mol_type = other DNA
gagggacagggaggagtgtgtcgattacttcccaaggcgtgagggtcatatcttcatgggagtcctataaaagtggaggc

SEQ ID NO: 35707 - DNA, 80 bp, synthetic construct
  source 1..80: mol_type = other DNA
gcgatactagactgtgaggaccgtttatcctttcgacacctcagatcctgaaaatcaccttcccccgggggttggaggtg

SEQ ID NO: 35708 - DNA, 80 bp, synthetic construct
  source 1..80: mol_type = other DNA
ggaatctctgggttcaatagtcctctttgaactccatgcaacagggtagattcaagagtcacgaaaccttcattaatcac

SEQ ID NO: 35709 - DNA, 80 bp, synthetic construct
  source 1..80: mol_type = other DNA
tcaaccggacatggttatgtagattctcataatgagggaaatcttctcacagtttcagtgaccaacggtgctctcattct

SEQ ID NO: 35710 - DNA, 80 bp, synthetic construct
  source 1..80: mol_type = other DNA
ccaggaactgataccaaaggttgtaggcaggccagaggtgtttcgaatgactccatgtgtgtgctcggacagaggtcata

SEQ ID NO: 35711 - DNA, 80 bp, synthetic construct
  source 1..80: mol_type = other DNA
gtgtgtctcctaatagtggactcaataggagtgaactgagaagtgcaatctgcctcccatgaaggacataagcaatagct

SEQ ID NO: 35712 - DNA, 80 bp, synthetic construct
  source 1..80: mol_type = other DNA
tataaccgatttggcccatttctattccaagtcatcccccatagagaagctgttaaattgtacgctagggaatagaggac

SEQ ID NO: 35713 - DNA, 80 bp, synthetic construct
  source 1..80: mol_type = other DNA
tggccaaactcagctggttgcggtctccaacccagctaatccagcccctttatcagagcttgacataaggaccctctcta

SEQ ID NO: 35714 - DNA, 80 bp, synthetic construct
  source 1..80: mol_type = other DNA
tgatgcgaaagtcactgacattgcatcagtcaatcggatgcaactgttgatgtctgacttcgcattgtccatagatggcc

SEQ ID NO: 35715 - DNA, 80 bp, synthetic construct
  source 1..80: mol_type = other DNA
cgctctatctggttttcaaaacttatggaaccaagctggtaaatccagaatatcgagctatccaacacctgtcgagggca

SEQ ID NO: 35716 - DNA, 80 bp, synthetic construct
  source 1..80: mol_type = other DNA
agagtcctagattattcggaagtgtcgaagatctatcaagagaagttgaaagacaccttcaaggttataacaggtggatc

SEQ ID NO: 35717 - DNA, 80 bp, synthetic construct
  source 1..80: mol_type = other DNA
ttcaattggatgacggaaaaccatctggctttgtcgagatggccgcagcgggagaaggcaagtatcgggaggacttccag

SEQ ID NO: 35718 - DNA, 80 bp, synthetic construct
  source 1..80: mol_type = other DNA
gccagaaccatgatcggggattacagccctaacaaaaagatgtcacgcaaggatggtcattctgagtgggttaacagatg

SEQ ID NO: 35719 - DNA, 80 bp, synthetic construct
  source 1..80: mol_type = other DNA
ccgatcggttgcggtctccacctctgctaatccagcccctgtctcagagcttgacataagggccctctccaagaggtttc

SEQ ID NO: 35720 - DNA, 80 bp, synthetic construct
  source 1..80: mol_type = other DNA
ggcgatgcaaaaatcactgacattgcatcagtcattcggatacactggttgatgtctgacttcgcattgtccatagatgg

SEQ ID NO: 35721 - DNA, 80 bp, synthetic construct
  source 1..80: mol_type = other DNA
cattcccctcagtcacaggatttataacccagatgacctcgtctttttcatctgaactatatctccgattctccaaacga

SEQ ID NO: 35722 - DNA, 80 bp, synthetic construct
  source 1..80: mol_type = other DNA
aattacagagaggaactctgtctaaggggcggatgtttatagctattatgattatttcttccaacagagttctcaatgtt

SEQ ID NO: 35723 - DNA, 80 bp, synthetic construct
  source 1..80: mol_type = other DNA
ggggagtcgtagaagaagagggagggtcgaagatttttcaagagaagttgaaagacaccttcaaggttataacaggtgga

SEQ ID NO: 35724 - DNA, 80 bp, synthetic construct
  source 1..80: mol_type = other DNA
tcaccctcgaagacctcagatctagatcttctctactagactacagctgcttataaactggacccttttagaaggttgta

SEQ ID NO: 35725 - DNA, 80 bp, synthetic construct
  source 1..80: mol_type = other DNA
ggtactaagacccttagacgatgaacctagaaaaaaacaagagtctgaatcagaacctctggttgtttgattattttttt

SEQ ID NO: 35726 - DNA, 80 bp, synthetic construct
  source 1..80: mol_type = other DNA
tgctgagactcttttgtgatgtgtctcgaaaaaaacaagatcttgaatcaggacctctggctgtttgattgtttcttttg

SEQ ID NO: 35727 - DNA, 80 bp, synthetic construct
  source 1..80: mol_type = other DNA
ctagcggaaagtgctcaggaataacggtgccttctgtctactgctcaactaaccacgattacaccgtttggatgcctgaa

SEQ ID NO: 35728 - DNA, 80 bp, synthetic construct
  source 1..80: mol_type = other DNA
tggttaagttcccactactccaggattcactcctcctgtcttgtggaaagggacccacatcttggagagagaacacttga

SEQ ID NO: 35729 - DNA, 80 bp, synthetic construct
  source 1..80: mol_type = other DNA
aattcagagtttcgagaggccatcctgctgtccaaaaaccatagagacaacttcatactcctcttaaaatctgttgagcc

SEQ ID NO: 35730 - DNA, 80 bp, synthetic construct
  source 1..80: mol_type = other DNA
cagggtcagcctgccttatgtttacgtctgccaaatacgacaaaagacggtattcttctgtctgcccaaacctcctctct

SEQ ID NO: 35731 - DNA, 80 bp, synthetic construct
  source 1..80: mol_type = other DNA
caatttcacctgggcgatgaaaaattgtccaaccttggtgagatggttagggtgggcgaaggcaagtatcgagaggactt

SEQ ID NO: 35732 - DNA, 80 bp, synthetic construct
  source 1..80: mol_type = other DNA
atctagatcatccctactagactacagttgtttgtaagccggacattaatgaaagcctgtacatgctaaaattcttgtat

SEQ ID NO: 35733 - DNA, 80 bp, synthetic construct
  source 1..80: mol_type = other DNA
acccgtcggagatattggacgacaagtcacattctctcaccaggacgggactagcttcttggctgtcagggaaccgaggg

SEQ ID NO: 35734 - DNA, 80 bp, synthetic construct
  source 1..80: mol_type = other DNA
ctagcttcttggctgtcagggaaccgaggggggcctgttcctagcgaaaaagtcatcatcacagccctgtctaagccgcc

SEQ ID NO: 35735 - DNA, 80 bp, synthetic construct
  source 1..80: mol_type = other DNA
ccccctcagcaatcatgagtgggggagatgatatcatctccagggtaattgacttagattccatctgggagaaaccttct

SEQ ID NO: 35736 - DNA, 80 bp, synthetic construct
  source 1..80: mol_type = other DNA
cgctatacctgattttcaaaacatatggtaccatgcttgtaaatccggactacagagcaattcaacatctgtccagagca

SEQ ID NO: 35737 - DNA, 80 bp, synthetic construct
  source 1..80: mol_type = other DNA
tggcttgcaattccagcttgagtctctcttctcactggatcaggctgatctacaaaatagtaaagactactagacttgtt

SEQ ID NO: 35738 - DNA, 80 bp, synthetic construct
  source 1..80: mol_type = other DNA
tctccagtctgccagggaagtctacagaggacaaatctacccaaactgccagccgtgaacccaagaaagagactgtgtct

SEQ ID NO: 35739 - DNA, 80 bp, synthetic construct
  source 1..80: mol_type = other DNA
gctccctctcagcgagacagtcaatcatccaagaccaaaatggcggctcaaaccgcctctggtcctcctgctctagagtg

SEQ ID NO: 35740 - DNA, 80 bp, synthetic construct
  source 1..80: mol_type = other DNA
gtccactgctaatgaagaggatgatccatctgtagaggctgaaattgctcatcagattgctgagagcttctccaagaagt

SEQ ID NO: 35741 - DNA, 80 bp, synthetic construct
  source 1..80: mol_type = other DNA
tcctatgaacacaccccctagtttgatcacactatgcaataaaatctggcctattccaaattccatatgaaaaaaacagg

SEQ ID NO: 35742 - DNA, 80 bp, synthetic construct
  source 1..80: mol_type = other DNA
gcagaaaacgacgggtgcacaagtctgtcagggttttcctatatggaactgaaggtgggatacatctctgccataaaggt

SEQ ID NO: 35743 - DNA, 80 bp, synthetic construct
  source 1..80: mol_type = other DNA
tgaaaacagggaataggccactccggatgaccttgacagacaactgctctaggtcttacaaagttctgaaagattacttc

SEQ ID NO: 35744 - DNA, 80 bp, synthetic construct
  source 1..80: mol_type = other DNA
gagagacataacatcagtagatacaggaaaggacctggtcaagtttaaggatcagatatggggattgctgattgtgacca

SEQ ID NO: 35745 - DNA, 80 bp, synthetic construct
  source 1..80: mol_type = other DNA
aagattttgtgtactcccaaagctccggctgcctctttgatagaaactatacacttatgctgaaagacctttttctatct

SEQ ID NO: 35746 - DNA, 80 bp, synthetic construct
  source 1..80: mol_type = other DNA
tagcctgtaattccagcttgagtctttcatctcattggatcaggttgatttacaagatagtgaagactaccagactcgtc

SEQ ID NO: 35747 - DNA, 80 bp, synthetic construct
  source 1..80: mol_type = other DNA
ggcagcttagaagacctattgggagaggtggaacgacatcttcacgggtacaacagatggatcaccctcgaggatatcag

SEQ ID NO: 35748 - DNA, 80 bp, synthetic construct
  source 1..80: mol_type = other DNA
atctagatcatccctactggactacagctgtttgtaagccggacactactgaaagcctgtacatgctgagaatcttgtgt

SEQ ID NO: 35749 - DNA, 80 bp, synthetic construct
  source 1..80: mol_type = other DNA
caaggtgccaaggatctataatttgtgtatatctatcatgaaaaaaactaacacccctcctgtcaaactgtcccaaatat

SEQ ID NO: 35750 - DNA, 80 bp, synthetic construct
  source 1..80: mol_type = other DNA
ttcacttgggtgatgaaaagtcgtccaacctcggtgagatggccaaggtgggggaaggcaagtatagagaggactttcag

SEQ ID NO: 35751 - DNA, 80 bp, synthetic construct
  source 1..80: mol_type = other DNA
ctccaggaagttcttcagaagataaatcaacccagactactggccgagatcttaagaaagagacgacatctcctcttttt

SEQ ID NO: 35752 - DNA, 80 bp, synthetic construct
  source 1..80: mol_type = other DNA
cagagagaaagccaaccctcgaaagccaagatggtggcccaagttgcctctggtcctcccgcccttgaatggtctgccac

SEQ ID NO: 35753 - DNA, 80 bp, synthetic construct
  source 1..80: mol_type = other DNA
cctgctaaccgagacttctaacttagtccctctagacaacaaaaactgagatgtcctgaagtcgacatgaaaaaaacagg

SEQ ID NO: 35754 - DNA, 80 bp, synthetic construct
  source 1..80: mol_type = other DNA
gacgtacacaaacaagtctcaggggttgacctgggtctcccaaattggggtaagtatgtattgatgagtgcaggtgccct

SEQ ID NO: 35755 - DNA, 80 bp, synthetic construct
  source 1..80: mol_type = other DNA
gagacccaactgtgagggccggccatcctttttgcgcttcaagttctaaggataacttcctctctgggctggtgggaatc

SEQ ID NO: 35756 - DNA, 80 bp, synthetic construct
  source 1..80: mol_type = other DNA
cctggatccaattgtcctccttgaactccatccaacagggtaaattcaagagtcgtgagactttcattaatcatctcagt

SEQ ID NO: 35757 - DNA, 80 bp, synthetic construct
  source 1..80: mol_type = other DNA
tgatcagacaaggtcatgtagattctcataatacgggaaaccttctagcattttcagtgactaatggtgctttaattttc

SEQ ID NO: 35758 - DNA, 80 bp, synthetic construct
  source 1..80: mol_type = other DNA
cagggactgataccagagagtgtggacaagccaaggggcatttcaaatgactcagtgcttgggcacagaaagaagtcgtg

SEQ ID NO: 35759 - DNA, 80 bp, synthetic construct
  source 1..80: mol_type = other DNA
gtgtatcccctgatctgggactaaacatgggttgattgagaaaagcaatccgcctccaatgaaggacataagcagtagct

SEQ ID NO: 35760 - DNA, 80 bp, synthetic construct
  source 1..80: mol_type = other DNA
cgtaatcatattgcgtctcagtaaagtgtacataactataaagggctgggtcatttaagcatttcaatcgagaaaaaaac

SEQ ID NO: 35761 - DNA, 80 bp, synthetic construct
  source 1..80: mol_type = other DNA
ggatatccaggatggtatctggagccgtccctcactttcaaaagcttcctgatattcgtctgaaaccaggtgattttgaa

SEQ ID NO: 35762 - DNA, 80 bp, synthetic construct
  source 1..80: mol_type = other DNA
tctttaagtagtagagaaaagtctcgccacatagggtcggctcaggggctcttatactcaatcttagtagcaattcacga

SEQ ID NO: 35763 - DNA, 80 bp, synthetic construct
  source 1..80: mol_type = other DNA
acccttgaggatatcagatctagatcatctctattggactacagctgcttataaaccggacactcctggaagcctgcaca

SEQ ID NO: 35764 - DNA, 80 bp, synthetic construct
  source 1..80: mol_type = other DNA
cgctaagaatcttgtgtgatgtgtcttgaaaaaaacaagatcttgaatctgagcctctggttgtttgattgtttttccca

SEQ ID NO: 35765 - DNA, 80 bp, synthetic construct
  source 1..80: mol_type = other DNA
ttcacttggatgatgggagatcgtccaaccctggtgagatggccaaggcgggagaaggcaggtgccgggaggactttcaa

SEQ ID NO: 35766 - DNA, 80 bp, synthetic construct
  source 1..80: mol_type = other DNA
caaaagggtgtttaaaagtagggaggaggtgtcatcctcatgtgaacggggtgtttttcaacggtgtaatattagggcct

SEQ ID NO: 35767 - DNA, 80 bp, synthetic construct
  source 1..80: mol_type = other DNA
gccctgactgccttgatgttgataattttcctaatggcatgttgtagaaaagttaatcgaccagaacctacgcaacgcag

SEQ ID NO: 35768 - DNA, 80 bp, synthetic construct
  source 1..80: mol_type = other DNA
tctcgaaggaaaagggaggaaagtatcgatcacttcccaaagtgggaaggtcatatcgtcatgggagtcatataaaagcg

SEQ ID NO: 35769 - DNA, 80 bp, synthetic construct
  source 1..80: mol_type = other DNA
caaggcctgacaccagaggttgcggacatgccaaggggtatttcggatgtctccgtgcttgggcatggacagaggtcata

SEQ ID NO: 35770 - DNA, 80 bp, synthetic construct
  source 1..80: mol_type = other DNA
gtgagtcccatgatgacggactcaacatgagttaattgagaacggcaacccgcctcccataaaagacataaacaacagct

SEQ ID NO: 35771 - DNA, 80 bp, synthetic construct
  source 1..80: mol_type = other DNA
cacaatcatcttacatctcagcaaagtgtgcataattataaagggctaggtcatccaaacttctcagtcgagaaaaaaac

SEQ ID NO: 35772 - DNA, 80 bp, synthetic construct
  source 1..80: mol_type = other DNA
tgcataacagacttggcccatttctactctaaatcatctcccatagagaagctgttaaactgtacgctaggaaatagggg

SEQ ID NO: 35773 - DNA, 80 bp, synthetic construct
  source 1..80: mol_type = other DNA
aagtggtatctggacttgcgattcctttcccgagaccaccccttgactccttacataagaacccaaacatggccacccaa

SEQ ID NO: 35774 - DNA, 80 bp, synthetic construct
  source 1..80: mol_type = other DNA
agactaccagactcgttggcaacatagaagacctatcaggagaggtagaacgacaccttcatgggtacaacagatggatc

SEQ ID NO: 35775 - DNA, 80 bp, synthetic construct
  source 1..80: mol_type = other DNA
atctagatcatccctgctagactacagttgtttgtgagcctgatccgaccgaaagcctgtatatgctgagattattgtat

SEQ ID NO: 35776 - DNA, 80 bp, synthetic construct
  source 1..80: mol_type = other DNA
gatgcatcttgaaaaaaacaagatcttgaatctgaacctctggttgtttgattgttttttttatctttattgtttttttg

SEQ ID NO: 35777 - DNA, 80 bp, synthetic construct
  source 1..80: mol_type = other DNA
ttcacctggatgatgaaaaatcgtccaaccttggtgaggtagttagggcgggagaagggaagtatagagaggattttcag

SEQ ID NO: 35778 - DNA, 80 bp, synthetic construct
  source 1..80: mol_type = other DNA
atggatgagggagaggaccccaacctcctgttccaatcgtacctggacaacgttggagtccaaatagtcagacaaatgag

SEQ ID NO: 35779 - DNA, 80 bp, synthetic construct
  source 1..80: mol_type = other DNA
ctccaggaaggtcttcggaggataaatcaacacagactactggccgagagctcaagaaggagacaacatctactcctcct

SEQ ID NO: 35780 - DNA, 80 bp, synthetic construct
  source 1..80: mol_type = other DNA
cagagagaaagccagccttcaaaagctaggatggtggctcaagctgcctctggtcccccagcccttgattggtctgccac

SEQ ID NO: 35781 - DNA, 80 bp, synthetic construct
  source 1..80: mol_type = other DNA
cctgctaaccgagttttcgaattcagtccctctagatgataaaaactgaaatgtcctggagtcgacatgaaaaaaacagg

SEQ ID NO: 35782 - DNA, 80 bp, synthetic construct
  source 1..80: mol_type = other DNA
caacaccactgataaaatgaactttctacgtaagatagtgaaaaactgtagggatgaggacactcaaaagccctctcctg

SEQ ID NO: 35783 - DNA, 80 bp, synthetic construct
  source 1..80: mol_type = other DNA
gataaagcgtactgatgtagaggggaactgggctcttacaggaggcatggaactgacaagggaccccactgtctctgaac

SEQ ID NO: 35784 - DNA, 80 bp, synthetic construct
  source 1..80: mol_type = other DNA
ttgtagatggaacatgggtcgcgatgcaaacatcagatgataccaaatggtgccctccagaccagttggtgaatttgcac

SEQ ID NO: 35785 - DNA, 80 bp, synthetic construct
  source 1..80: mol_type = other DNA
gactttcgctcggacgagattgagtatctcgttgtggaggagttggtcaagaaaagagaggagtgtctagatgcactaga

SEQ ID NO: 35786 - DNA, 80 bp, synthetic construct
  source 1..80: mol_type = other DNA
gccctgattgctctgatgttgataattttcctaatgacatgttgcggaagagtcaatcgatcagaatctaagcaacgcag

SEQ ID NO: 35787 - DNA, 80 bp, synthetic construct
  source 1..80: mol_type = other DNA
atgcatctttagtcggtctcctcctgagtctgtacaggttgagcaaaatatcaggacagaacactggtaactataagaca

SEQ ID NO: 35788 - DNA, 80 bp, synthetic construct
  source 1..80: mol_type = other DNA
tcttggtgggacggggaggaaggtgtctgtcacttcccaaagtgggaaagtcatatcttcatgggagtcatataaaagcg

SEQ ID NO: 35789 - DNA, 80 bp, synthetic construct
  source 1..80: mol_type = other DNA
cccaaagtgggaaagtcatatcttcatgggagtcatataaaagcggaggtgaaaccagactgtgaaggccggccatcctt

SEQ ID NO: 35790 - DNA, 80 bp, synthetic construct
  source 1..80: mol_type = other DNA
gaaaccagactgtgaaggcctgccatccttttgacgtttcaagtcctgaagacaacctcctctcgggggtgggaggaatc

SEQ ID NO: 35791 - DNA, 80 bp, synthetic construct
  source 1..80: mol_type = other DNA
tctggatccaataatccttcttgaactccatctaacagggtagattcaagagtcatgagattttcattaatcatctcagt

SEQ ID NO: 35792 - DNA, 80 bp, synthetic construct
  source 1..80: mol_type = other DNA
caggaattgatgccaaaggttgtggacaggccaagggttgtttcagatgacacggtacttgggtacagaaagaggccgta

SEQ ID NO: 35793 - DNA, 80 bp, synthetic construct
  source 1..80: mol_type = other DNA
gtgtgccccctgatagcggactcaacatgagttgattaagaaaggctatatgcctcccatgaagaacataagcaatagct

SEQ ID NO: 35794 - DNA, 80 bp, synthetic construct
  source 1..80: mol_type = other DNA
cacaatcatcttgcatctcagtgaagtgtacataactataaagggctgagtcatctaagcatttcagtcgagaaaaaaac

SEQ ID NO: 35795 - DNA, 80 bp, synthetic construct
  source 1..80: mol_type = other DNA
tgtggaccaaaagaacaaccagcaacacttctcatcccgagacccgtatcaagatgctagatccgggagaggtttatgat

SEQ ID NO: 35796 - DNA, 80 bp, synthetic construct
  source 1..80: mol_type = other DNA
gaccctattgatccaattgagtcagaggctgaacctagaggaacccccactgtccccaacatcttgaggaactctgacta

SEQ ID NO: 35797 - DNA, 80 bp, synthetic construct
  source 1..80: mol_type = other DNA
gtgggcggaactgctgcacagtcaatgatatctctctggttatatggtgcccactctgaatcaaacaggagccggagatg

SEQ ID NO: 35798 - DNA, 80 bp, synthetic construct
  source 1..80: mol_type = other DNA
tataaccgacttggcccatttttactccaagtcatcccccatagagaagctgttgaattgtacgctaggaaacagaggct

SEQ ID NO: 35799 - DNA, 80 bp, synthetic construct
  source 1..80: mol_type = other DNA
gctcaaactctagtcagaaacatcatgtctttgacaggccctgatttccctctcgaagagacccctgtttttaaacggac

SEQ ID NO: 35800 - DNA, 80 bp, synthetic construct
  source 1..80: mol_type = other DNA
agggtcagccttgcataggttcaagtctgccagatacagtgaaggagggtattcctctgtttgccccaaccttctctctc

SEQ ID NO: 35801 - DNA, 80 bp, synthetic construct
  source 1..80: mol_type = other DNA
tcatcaaatccgtccaggctcattcgctgagttcctaaacaaaacgtattcgagtgactcataaagagttgaataacaga

SEQ ID NO: 35802 - DNA, 80 bp, synthetic construct
  source 1..80: mol_type = other DNA
cataatcattttgcatctcagcaaagcgtgcataactataaagggctgggtcatctaagcttttcagtcgagaaaaaaac

SEQ ID NO: 35803 - DNA, 80 bp, synthetic construct
  source 1..80: mol_type = other DNA
acgatgcgccttgaaaaatacaagattatgacgctgagcctctggatgtttagatgtcttttttatctttcttgtttatt

SEQ ID NO: 35804 - DNA, 80 bp, synthetic construct
  source 1..80: mol_type = other DNA
tccagctggacgataaagaaccttctaaccttggcggggtgactaaagcggtggaaggcaagtaccgagaagactttcag

SEQ ID NO: 35805 - DNA, 80 bp, synthetic construct
  source 1..80: mol_type = other DNA
tcctgatcgccttgatgttgataatttttctaatgacgtgtcgcggaagagtcaatcgacacaggtctacaccacgcgac

SEQ ID NO: 35806 - DNA, 80 bp, synthetic construct
  source 1..80: mol_type = other DNA
ggggttccttggtttgatcgaatgacccagaccccgcaaagagtcggtagggtgtggccttgctcctctgagagtgcgga

SEQ ID NO: 35807 - DNA, 80 bp, synthetic construct
  source 1..80: mol_type = other DNA
ctcgaaggggcagggaggaaggtgtcggtaacctcccaaagcggaaaggttatatcttcatgggagtcatataaaagcag

SEQ ID NO: 35808 - DNA, 80 bp, synthetic construct
  source 1..80: mol_type = other DNA
acgcttaacaacaaaatcagagaaaaagcagacagcgtcaattgcaaagcaaaaatgtaacacccctacaatggatgccg

SEQ ID NO: 35809 - DNA, 80 bp, synthetic construct
  source 1..80: mol_type = other DNA
cagactttagaagtgccaaaatgacatacctgaccctcattacttaccagtctcaccttctacttcagagggttgagaga

SEQ ID NO: 35810 - DNA, 80 bp, synthetic construct
  source 1..80: mol_type = other DNA
cagagggttgagagaaatttgtctaagagtatgagagctaacctgcgacaattgagttccttgatgaggcaggtgctggg

SEQ ID NO: 35811 - DNA, 80 bp, synthetic construct
  source 1..80: mol_type = other DNA
aatttgtctaagagtatgagagctaacctgcgacaattgagttccttgatgaggcaggtgctgggggggcatggggaaga

SEQ ID NO: 35812 - DNA, 80 bp, synthetic construct
  source 1..80: mol_type = other DNA
tactttagagtcagacgatgatgttcaacgactattaaaagactctttgcgaaggacaaggtgggtcgatcaggaagtcc

SEQ ID NO: 35813 - DNA, 80 bp, synthetic construct
  source 1..80: mol_type = other DNA
gccatgcagctagaaccatgacaggggactatagtcccaacaagaaagtgtcccgcaaggcaggaggctcagaatgggtt

SEQ ID NO: 35814 - DNA, 80 bp, synthetic construct
  source 1..80: mol_type = other DNA
tgctctgcccaacaggttgcagtctccacctcagctaacccggcccctgtctcagaacttgacataagggccctctccag

SEQ ID NO: 35815 - DNA, 80 bp, synthetic construct
  source 1..80: mol_type = other DNA
ctctgaatgcaacggtcattgctgcatgtgctcctcatgagatgtctgttttgggaggctatttgggggaggagtttttc

SEQ ID NO: 35816 - DNA, 80 bp, synthetic construct
  source 1..80: mol_type = other DNA
gaggcttcaaaaccctctgatctcgggcctgagggtagttcaatgggcaactggtgctcattataagcttaagcctattc

SEQ ID NO: 35817 - DNA, 80 bp, synthetic construct
  source 1..80: mol_type = other DNA
tagatgatctcaacgtcttcccatctctatgtctagtagtcggagatgggtcaggcgggatatcaagggcagtactccac

SEQ ID NO: 35818 - DNA, 80 bp, synthetic construct
  source 1..80: mol_type = other DNA
atgtttccagacgtcaagcttgtgttcaacagtttgttagaggtaaatgacctaatggcttccggaacacatccactgcc

SEQ ID NO: 35819 - DNA, 80 bp, synthetic construct
  source 1..80: mol_type = other DNA
tccttcagcaatcgtgagcggaggagatgaccttgtttccagagtaatagattttgactcaatctgggaaaaaccgtccg

SEQ ID NO: 35820 - DNA, 80 bp, synthetic construct
  source 1..80: mol_type = other DNA
acctgagaaacttggcaacctggagatacttccaatcagtccaaagacaggtaaacatgtcttatgatctcattatttgt

SEQ ID NO: 35821 - DNA, 80 bp, synthetic construct
  source 1..80: mol_type = other DNA
gacgcagaagttactgacattgcatctatcaatagaataactctgttgatgtcggatttcgcattgtctatagacggacc

SEQ ID NO: 35822 - DNA, 80 bp, synthetic construct
  source 1..80: mol_type = other DNA
tctttatttggtcttcaaaacttacgggactatgctggtaaacccagactataaagcgattcaacacttgtcgagagcgt

SEQ ID NO: 35823 - DNA, 80 bp, synthetic construct
  source 1..80: mol_type = other DNA
tcccctcggtcacaggttttataactcaagtaacttcgtcattttcatctgagctatatcttcgattttccaaacgaggg

SEQ ID NO: 35824 - DNA, 80 bp, synthetic construct
  source 1..80: mol_type = other DNA
aaatttttcagagatcccgagtacctgacctcctctacccttcgagagatgagccttgtgttattcaattgcagcagccc

SEQ ID NO: 35825 - DNA, 80 bp, synthetic construct
  source 1..80: mol_type = other DNA
aaagagtgagatgcagagagctcgctccttaaattatcaagatcttgtaagggggtttccagaagagatcatatcaaatc

SEQ ID NO: 35826 - DNA, 80 bp, synthetic construct
  source 1..80: mol_type = other DNA
gggaagggaacgtttgaaagaagattcttcagagatgagaaagaacttcaagaatatgagacggctgaattgacaaagac

SEQ ID NO: 35827 - DNA, 80 bp, synthetic construct
  source 1..80: mol_type = other DNA
cttacaatgaaatgatcataactctaattgacagtgacgtagaatctttcttggtccacaagatggtggatgacctcgag

SEQ ID NO: 35828 - DNA, 80 bp, synthetic construct
  source 1..80: mol_type = other DNA
ttacagaggggaactctgtcaaaagtggctatcattatagccattatgatagtcttttccaatagagtatttaacatttc

SEQ ID NO: 35829 - DNA, 80 bp, synthetic construct
  source 1..80: mol_type = other DNA
caaaccattgactgaccccttgttctatcctccatctgatcccaagatcctaaggcacttcaacatatgttgcagcacta

SEQ ID NO: 35830 - DNA, 80 bp, synthetic construct
  source 1..80: mol_type = other DNA
tgatgtatctatccaccgctctgggagatgtccccagctttgcaagacttcatgacctatataacagacctataacttat

SEQ ID NO: 35831 - DNA, 80 bp, synthetic construct
  source 1..80: mol_type = other DNA
tactttagaaagcaagtcattcgagggaatatttatctctcttggagttggtcagatgatacctcggtgttcaagagggt

SEQ ID NO: 35832 - DNA, 80 bp, synthetic construct
  source 1..80: mol_type = other DNA
ggcttgtaactctagcctgagtctgtcatctcattggatcagattgatttacaaagtagtaaaaaccactagactgattg

SEQ ID NO: 35833 - DNA, 80 bp, synthetic construct
  source 1..80: mol_type = other DNA
gaagtattgaggatctatcaggagagattgaaaagcaccttcaggggtacaacagatggattaccctcgaagatatcaga

SEQ ID NO: 35834 - DNA, 80 bp, synthetic construct
  source 1..80: mol_type = other DNA
tccagaacgtctctgctagattacagctgcttgtgaattggacactctaggaggcttgtacaagctaaaactcttgtatt

SEQ ID NO: 35835 - DNA, 80 bp, synthetic construct
  source 1..80: mol_type = other DNA
atgtaccttgaaaaaaacgagatcttgactccgagcctctgattgtttgattatttttctatctttattgtttttttgtt

SEQ ID NO: 35836 - DNA, 80 bp, synthetic construct
  source 1..80: mol_type = other DNA
tgacacggcactggcagatgatggaactgtcaattcggatgacgaagactacttctccggggaaaccagaagccctgagg

SEQ ID NO: 35837 - DNA, 80 bp, synthetic construct
  source 1..80: mol_type = other DNA
ctgtttatgcccgaatcatgatgaatgggggtagactaaagagatcgcacatacggagatatgtctcagtcagctcaaat

SEQ ID NO: 35838 - DNA, 80 bp, synthetic construct
  source 1..80: mol_type = other DNA
caccaagctcgtccaaactcatttgctgagtttctaaataagacgtattctagtgactcgtaaatagttgaataacggaa

SEQ ID NO: 35839 - DNA, 80 bp, synthetic construct
  source 1..80: mol_type = other DNA
cacaagaaacccatagattgtgtatatccttcatgaaaaaaactaacacccctccttatgaaccaccccaaatatgagca

SEQ ID NO: 35840 - DNA, 80 bp, synthetic construct
  source 1..80: mol_type = other DNA
aaatctttgtcaatccgagtgcaattagagctggtctggctgatctggagatggctgaagagactgttgatctgatcaac

SEQ ID NO: 35841 - DNA, 80 bp, synthetic construct
  source 1..80: mol_type = other DNA
cctgctattaaggacttgaagaagcccagtatcaccctaggtaaggcccccgatttgaacaaggcatacaagtcagtttt

SEQ ID NO: 35842 - DNA, 80 bp, synthetic construct
  source 1..80: mol_type = other DNA
aaaaacatagaagacaatcaggctcatctccagggagaacctatagaggtggacaatctccctgaggacatgaagcggct

SEQ ID NO: 35843 - DNA, 80 bp, synthetic construct
  source 1..80: mol_type = other DNA
tcagctggacgataaaaaaccttcaggcctaggggagatggccagagcaggagaaggcaagggtcgggaagattttctga

SEQ ID NO: 35844 - DNA, 80 bp, synthetic construct
  source 1..80: mol_type = other DNA
tggatgaaggggaggatcctggcctcctcttccagtcatacctggacaatgttggagtgcagatagtcagacaaatgagg

SEQ ID NO: 35845 - DNA, 80 bp, synthetic construct
  source 1..80: mol_type = other DNA
tcaggggagagattcctcaagatatggtcacaaaccgtggaggaaatcatatcttatgtcacagtcaactttcctaaccc

SEQ ID NO: 35846 - DNA, 80 bp, synthetic construct
  source 1..80: mol_type = other DNA
cccaaggaagtccttggaagataagtcaactcagacaactggccgagaactcaagaaggagacaacatctatttcttccc

SEQ ID NO: 35847 - DNA, 80 bp, synthetic construct
  source 1..80: mol_type = other DNA
agagagacagtcaatcctcgaaggccaagatggtggctcaagccgcctctggtcccccagccctcgagtggtctgctacc

SEQ ID NO: 35848 - DNA, 80 bp, synthetic construct
  source 1..80: mol_type = other DNA
aatgaggaggatgatctgtcagtagaagctgagatcgctcaccaggttgcagaaagcttctccaagaagtacaagtttcc

SEQ ID NO: 35849 - DNA, 80 bp, synthetic construct
  source 1..80: mol_type = other DNA
ctctcgatcatctgggatatttctgtataattttgagcaattaaaaatgaaccttgatgacatagttaaagaagcaaaaa

SEQ ID NO: 35850 - DNA, 80 bp, synthetic construct
  source 1..80: mol_type = other DNA
atgtgccgggtgtcacccgtttagcccatgacggatctaaactccctctaagatgtgtactgggatgggttggtctggcc

SEQ ID NO: 35851 - DNA, 80 bp, synthetic construct
  source 1..80: mol_type = other DNA
aactctaaaaaattccagttgttagtcgagccagacaagctaaataaaatcatgcaagacgatttaaatcgctatacatc

SEQ ID NO: 35852 - DNA, 80 bp, synthetic construct
  source 1..80: mol_type = other DNA
atcaggcttgaatgctgccaagcttgatcctgatgacgtatgttcctatttagcagccgcaatgcagttcttcgagggga

SEQ ID NO: 35853 - DNA, 80 bp, synthetic construct
  source 1..80: mol_type = other DNA
tagctaactaagcttttctgctcggtcccgacagacggcaaaatatgaaatgctctgaattcgacatgaaaaaaacaagc

SEQ ID NO: 35854 - DNA, 80 bp, synthetic construct
  source 1..80: mol_type = other DNA
aacaccactgataagatgaactttctacgcaagatagtaaaaaactgtcgggatgaggacacccagaagccctctcttgt

SEQ ID NO: 35855 - DNA, 80 bp, synthetic construct
  source 1..80: mol_type = other DNA
gtcagctcctccagatgacgatgacctatggctccctccccccgaatatgttccgctgaaagaactcacaggcaagaaga

SEQ ID NO: 35856 - DNA, 80 bp, synthetic construct
  source 1..80: mol_type = other DNA
acctgaagaacttttgcatcaacggagaggttaaggtgtgtagcccgaacggttactcgtttaggatcctgcgacacatt

SEQ ID NO: 35857 - DNA, 80 bp, synthetic construct
  source 1..80: mol_type = other DNA
ctgagatcattcgacgagatatattctgggaatcacagaatgatcgggttagtcaaggttgttattggactagctttgtc

SEQ ID NO: 35858 - DNA, 80 bp, synthetic construct
  source 1..80: mol_type = other DNA
aggagcccccgtcccggagggcatgaactgggtatacaagttgaggagaacccttatcttccagtgggccgactccaggg

SEQ ID NO: 35859 - DNA, 80 bp, synthetic construct
  source 1..80: mol_type = other DNA
gccctcttgagggggaggagttggaatactctcaagagatcacttgggacgatgacactgaatttgttgggttacaaata

SEQ ID NO: 35860 - DNA, 80 bp, synthetic construct
  source 1..80: mol_type = other DNA
agagtaagtgcaagacaatgtcacattcagggcaggatctggtgtatcaacatgaactcgagagcatgtcaactatggtc

SEQ ID NO: 35861 - DNA, 80 bp, synthetic construct
  source 1..80: mol_type = other DNA
agacatgtctcttcagacacaaaggtctgaagaggacaaagactcttctctacttctagaataatcaaattatatcccgc

SEQ ID NO: 35862 - DNA, 80 bp, synthetic construct
  source 1..80: mol_type = other DNA
aagtttctaacttgtttacctctggaggagagaacatacgggcttgactccaacctttgggagcaatagaacaaaaaacc

SEQ ID NO: 35863 - DNA, 80 bp, synthetic construct
  source 1..80: mol_type = other DNA
cgtgtcccgaagactggaccagctatgggatcctgattgcacggaaaggagataagatcaccccagattctctggtggag

SEQ ID NO: 35864 - DNA, 80 bp, synthetic construct
  source 1..80: mol_type = other DNA
atatgtaatggtgccatttaatcgctgcattttatcgaagtcaaactaattacctttacatttggggtctcttggatgtg

SEQ ID NO: 35865 - DNA, 80 bp, synthetic construct
  source 1..80: mol_type = other DNA
aaaaaaactgtcaacatccctcaaaagacttaaggaatgatggttcctcaagctcttttgtttgtgccccttctggcttt

SEQ ID NO: 35866 - DNA, 80 bp, synthetic construct
  source 1..80: mol_type = other DNA
tccaatgtgtttcgggaaattccccatctacacaataccagacaaacttggtccctggagcccgattgacatacatcatc

SEQ ID NO: 35867 - DNA, 80 bp, synthetic construct
  source 1..80: mol_type = other DNA
tcagctgtccaaacaacttggttgtggaagacgaaggatgcaccaacttgtcgggtttctcctacatggaactcaaggtg

SEQ ID NO: 35868 - DNA, 80 bp, synthetic construct
  source 1..80: mol_type = other DNA
ggatacatttcggccataaaagtgaacgggttcacgtgcacaggtgtggtgacagaggctgagacctacactaactttgt

SEQ ID NO: 35869 - DNA, 80 bp, synthetic construct
  source 1..80: mol_type = other DNA
cggttatgttaccaccacgtttaagagaaagcatttccgcccaacaccagatgcatgtagagctgcttacaactggaaaa

SEQ ID NO: 35870 - DNA, 80 bp, synthetic construct
  source 1..80: mol_type = other DNA
tggccggtgatcccagatatgaagaatctcttcataatccgtaccctgactaccattggcttcgaaccgtgaaaaccacg

SEQ ID NO: 35871 - DNA, 80 bp, synthetic construct
  source 1..80: mol_type = other DNA
aaggagtctctcatcatcatatccccaagtgtagcagacctagacccatatgacaaatcccttcactcgagggtctttcc

SEQ ID NO: 35872 - DNA, 80 bp, synthetic construct
  source 1..80: mol_type = other DNA
tagcgggaagtgcttgggaataacaatatcatctacctactgctcgactaaccatgattacaccatctggatgcccgaga

SEQ ID NO: 35873 - DNA, 80 bp, synthetic construct
  source 1..80: mol_type = other DNA
atgtgagattagggacatcttgtgacatctttaccaacagtagagggaagagagcatccaaagggagcaagacttgtgga

SEQ ID NO: 35874 - DNA, 80 bp, synthetic construct
  source 1..80: mol_type = other DNA
ataaagcgtactggtgtagaagggaattgggctttgacgggagggatggaactgactagggaccccactgttccagagca

SEQ ID NO: 35875 - DNA, 80 bp, synthetic construct
  source 1..80: mol_type = other DNA
tttgttgacgaaagaggcttgtataagtctttgaagggggcatgcaagctcaaattatgtggagttctgggacttagact

SEQ ID NO: 35876 - DNA, 80 bp, synthetic construct
  source 1..80: mol_type = other DNA
tatggacggaacgtgggtctcgatgccaacatcggatgagaccaagtggtgtccccctgatcagttggtaaatctacacg

SEQ ID NO: 35877 - DNA, 80 bp, synthetic construct
  source 1..80: mol_type = other DNA
actttcgctcggacgagatcgaacatcttgtcgtggaggagttggtcaggaaaagagaggagtgtctggatgccctagag

SEQ ID NO: 35878 - DNA, 80 bp, synthetic construct
  source 1..80: mol_type = other DNA
tccatcatgactaccaagtcggtgagttttagacgtctaagccacttgagaaaacttgtccctggattcggaaaagcata

SEQ ID NO: 35879 - DNA, 80 bp, synthetic construct
  source 1..80: mol_type = other DNA
caccatattcaacaaaaccctgatggaagccgatgctcactacaagtcagtccggacctggaatgagatcatcccctcca

SEQ ID NO: 35880 - DNA, 80 bp, synthetic construct
  source 1..80: mol_type = other DNA
aggggtgtctgagagttggagggaggtgtcatccccacgtaaacggagtgttttttaacggcataatactgggccctgac

SEQ ID NO: 35881 - DNA, 80 bp, synthetic construct
  source 1..80: mol_type = other DNA
ggccatgttctaatcccagagatgcaatcatccctccttcagcaacatatggagttgttggaatcatcagttatccctct

SEQ ID NO: 35882 - DNA, 80 bp, synthetic construct
  source 1..80: mol_type = other DNA
gatgcatcctttagcagacccgtctacagttttcaaggacggtgatgaagcagaggattttgttgaggttcaccttcccg

SEQ ID NO: 35883 - DNA, 80 bp, synthetic construct
  source 1..80: mol_type = other DNA
atgtgcacaaacagatctcaggggttgacctgggtctccctaactggggaaagtatgtcttaataattgcaggtgtattg

SEQ ID NO: 35884 - DNA, 80 bp, synthetic construct
  source 1..80: mol_type = other DNA
attgccatgatattgacaatcttcttaatgacatgttgtggaagaggtaatcgacccaagtccacacaacacagtcttgg

SEQ ID NO: 35885 - DNA, 80 bp, synthetic construct
  source 1..80: mol_type = other DNA
tgcgtctctagtcggtcttctcttgagtctgtatagactaagcaaaatatctgggcaaaacactggtaactataagacaa

SEQ ID NO: 35886 - DNA, 80 bp, synthetic construct
  source 1..80: mol_type = other DNA
agggatagggaggaaggtgtcatccacttcccaaagcgggaaggtcatatcttcgtgggagtcatataaaagcggtggtg

SEQ ID NO: 35887 - DNA, 80 bp, synthetic construct
  source 1..80: mol_type = other DNA
agaccagactgtgaaggccggtcatcccttccaaacttcaagtcccgaagatcgcctcccctcggggctaggaggaatct

SEQ ID NO: 35888 - DNA, 80 bp, synthetic construct
  source 1..80: mol_type = other DNA
ctgggttcaacagtcctccctggactccatgcaatagggtaggcttaagagtcatgagactttcattaatcatctccgtt

SEQ ID NO: 35889 - DNA, 80 bp, synthetic construct
  source 1..80: mol_type = other DNA
aatcagacaaggtcgtgtagattcctaaaatacaaaaagtcttctgacagtttcagtgaccaacggtgctttcattctcc

SEQ ID NO: 35890 - DNA, 80 bp, synthetic construct
  source 1..80: mol_type = other DNA
agggatcgataccaaaggttgtggacaggtcaggggttacctcagatcacttagcgttcgggcacggacagagatcatgg

SEQ ID NO: 35891 - DNA, 80 bp, synthetic construct
  source 1..80: mol_type = other DNA
tgagtcccctgacattagactcaacatgattcaactgagcagggcgatctgcctctcctgaaggacataagcaatagctc

SEQ ID NO: 35892 - DNA, 80 bp, synthetic construct
  source 1..80: mol_type = other DNA
acaatcatcttacatctcagtaaagtgtgtataattataaagggctgggtcatctaagcttttccgtcgagaaaaaaact

SEQ ID NO: 35893 - DNA, 80 bp, synthetic construct
  source 1..80: mol_type = other DNA
gtaggccgaaagagcaactggcaacacttctcatcttcggacatagatcaaaatgcttgatccaggagaggtctatgatg

SEQ ID NO: 35894 - DNA, 80 bp, synthetic construct
  source 1..80: mol_type = other DNA
accctgttgatccaattgagtcagaggctgagtctagaggggcccccactgtccctaacatcttgaggaattctgattac

SEQ ID NO: 35895 - DNA, 80 bp, synthetic construct
  source 1..80: mol_type = other DNA
aatctaaattcccccttaatagaagatcctgccggattaatgttagagtggttgaaaacggggaacagacctcaccgaat

SEQ ID NO: 35896 - DNA, 80 bp, synthetic construct
  source 1..80: mol_type = other DNA
acattgcagataggatagagcagattttcgagacagccccctttattaagatcgtggagcatcatactctgatgacaact

SEQ ID NO: 35897 - DNA, 80 bp, synthetic construct
  source 1..80: mol_type = other DNA
gaccctgacggacaattgctccaggtcttacaaagttctgaaagattatttcaagaaagtggatatgggctctctcaaag

SEQ ID NO: 35898 - DNA, 80 bp, synthetic construct
  source 1..80: mol_type = other DNA
tgggtgggactgctgcacaggcaatgatttccctctggttgtatggtgcccactctgaatcaaacagaagtagaaaatgc

SEQ ID NO: 35899 - DNA, 80 bp, synthetic construct
  source 1..80: mol_type = other DNA
ataactgaattagctcatttctattccaagtcatcccctatagagaagttgctgaattgtacacttggaaatagagggct

SEQ ID NO: 35900 - DNA, 80 bp, synthetic construct
  source 1..80: mol_type = other DNA
gaggattcccccagagggggtattaagttgccttgagagggtcgattatgataaggcatttgggagatatctggctaaca

SEQ ID NO: 35901 - DNA, 80 bp, synthetic construct
  source 1..80: mol_type = other DNA
catattcctcttatttatttttccatgtgatcaccctgtacatgaatgccctagactgggacgaagagaagactatcctg

SEQ ID NO: 35902 - DNA, 80 bp, synthetic construct
  source 1..80: mol_type = other DNA
gctttatggagagaattaacctcagtggatatcgggaaggacttggtcaagttcaaagatcaaatatggggactactaat

SEQ ID NO: 35903 - DNA, 80 bp, synthetic construct
  source 1..80: mol_type = other DNA
tgtgacaaaagactttgtttattctcagagttctaactgtctttttgacagaaactacacacttatgctaaaagacctct

SEQ ID NO: 35904 - DNA, 80 bp, synthetic construct
  source 1..80: mol_type = other DNA
tcttgtctcgtttcaattccctaatgattttgctttctcccccagaacccagatattcagacgacttgatctcccagttg

SEQ ID NO: 35905 - DNA, 80 bp, synthetic construct
  source 1..80: mol_type = other DNA
tgccaactatacatagctggggatcaagtcctttccatgtgtggaaactccggttatgacgttatcaagatactggagcc

SEQ ID NO: 35906 - DNA, 80 bp, synthetic construct
  source 1..80: mol_type = other DNA
atatgtcgtgaacagcctcgtccaaagggcagaaaaatttaggcccctcattcactccctgggagacttccctgtattta

SEQ ID NO: 35907 - DNA, 80 bp, synthetic construct
  source 1..80: mol_type = other DNA
cacaagatgtgtgccaactggagtactataccaaacttcagattccttgcagggacctacgacatgtttttctcccggat

SEQ ID NO: 35908 - DNA, 80 bp, synthetic construct
  source 1..80: mol_type = other DNA
taaaagataaagtcagtcagctcgaagggacgtttggccccagcgcaaaaaggttttttggagttctggatcaattcgac

SEQ ID NO: 35909 - DNA, 80 bp, synthetic construct
  source 1..80: mol_type = other DNA
aacatacatgacttggtttttgtgtacggctgttacaggcattggggtcatccctatatagattatagaaagggtctttc

SEQ ID NO: 35910 - DNA, 80 bp, synthetic construct
  source 1..80: mol_type = other DNA
gaaactatatgatcaagttcacattaagaaggtgatagacaagtcttaccaggagtgtctggcaagcgacttagccagaa

SEQ ID NO: 35911 - DNA, 80 bp, synthetic construct
  source 1..80: mol_type = other DNA
ggatcctccggtgggggtttgataagtattctaaatggtatcttgattcacgacttctcgcccgagaccatcctttgact

SEQ ID NO: 35912 - DNA, 80 bp, synthetic construct
  source 1..80: mol_type = other DNA
ccctacatcaaaacccagacatggccacccaaacatatagttgatttggtaggagatacctggcataggctcccaataac

SEQ ID NO: 35913 - DNA, 80 bp, synthetic construct
  source 1..80: mol_type = other DNA
gcaaatttttgaaatccctgagtcaatggatccgtcagaaatactggatgacaaatcccattctttcaccagaacaagac

SEQ ID NO: 35914 - DNA, 80 bp, synthetic construct
  source 1..80: mol_type = other DNA
tggcctcttggttgtcggagaacagaggggggcctgttcccagcgagaaggtcattatcacggcgttgtctaagccgccc

SEQ ID NO: 35915 - DNA, 80 bp, synthetic construct
  source 1..80: mol_type = other DNA
gggcctgttcccagcgagaaggtcattatcacggcgttgtctaagccgcccgtcaatcccagagaattcttaaaatctat

SEQ ID NO: 35916 - DNA, 80 bp, synthetic construct
  source 1..80: mol_type = other DNA
gtcaatcccagagaattcttaaaatctattgacctcggaggattgcctaatgaggacttgataattggtctcaagccaaa

SEQ ID NO: 35917 - DNA, 80 bp, synthetic construct
  source 1..80: mol_type = other DNA
ggaacgagaactaaagatcgagggtcgattttttgctctgatgtcatggaatctaagattgtattttgttattacggaaa

SEQ ID NO: 35918 - DNA, 80 bp, synthetic construct
  source 1..80: mol_type = other DNA
agcttttggccaactacatcctgccactctttgatgcgttgactatgacagacaatctgaacaaagtgtttaagaagctg

SEQ ID NO: 35919 - DNA, 80 bp, synthetic construct
  source 1..80: mol_type = other DNA
cgagcatctgtattcagcaatcagagtaggtacggtagtcactgcttatgaagactgctcggggctggtatcatttactg

SEQ ID NO: 35920 - DNA, 80 bp, synthetic construct
  source 1..80: mol_type = other DNA
atcgacagagtcaccggacaaggacttttggactattcaagggtcacatatgcctttcaccttgactatgagaaatggaa

SEQ ID NO: 35921 - DNA, 80 bp, synthetic construct
  source 1..80: mol_type = other DNA
caatcatcaaagattggagtcgacagaagatgtgttttctgtcctagaccaggtgtttggactaaaaagggtgttttcca

SEQ ID NO: 35922 - DNA, 80 bp, synthetic construct
  source 1..80: mol_type = other DNA
ggacacacgagttttttcaaaagtcctggatctactattcagacagatcagaccttatcggattatgggaagatcagata

SEQ ID NO: 35923 - DNA, 80 bp, synthetic construct
  source 1..80: mol_type = other DNA
tattgcttagatatgtccaatggcccgacctgctggaatggtcaagatggtgggttggagggcttacggcagaagggctg

SEQ ID NO: 35924 - DNA, 80 bp, synthetic construct
  source 1..80: mol_type = other DNA
gagtctagtcagcctattaatgatagatagagaatcccaaaccaggaacacacgaaccaagatactagctcaaggggaca

SEQ ID NO: 35925 - DNA, 80 bp, synthetic construct
  source 1..80: mol_type = other DNA
atcaggttctatgtcctacatacatgttatctccaggactatctcgagaagggctcctctatgagttggagagtatatca

SEQ ID NO: 35926 - DNA, 80 bp, synthetic construct
  source 1..80: mol_type = other DNA
aggaatgcgctttcaatataccgggccatcgaggaaggagcatctaagctggggctgatcatcaagaaagaagagaccat

SEQ ID NO: 35927 - DNA, 80 bp, synthetic construct
  source 1..80: mol_type = other DNA
gtgtagttatgactttcttatctatggaaagacccctctgtttcgaggcaacatcttagtacctgaatctaaaagatggg

SEQ ID NO: 35928 - DNA, 80 bp, synthetic construct
  source 1..80: mol_type = other DNA
cccgagtctcttgcatctctaacgaccaaatagtcaacctagccaatatcatgtcgacagtatccacaaatgcactgaca

SEQ ID NO: 35929 - DNA, 80 bp, synthetic construct
  source 1..80: mol_type = other DNA
gtagcacaacactctcaatctctgatcaaaccgatgagggactttctgctcatgtcagtacaggcagtctttcactacct

SEQ ID NO: 35930 - DNA, 80 bp, synthetic construct
  source 1..80: mol_type = other DNA
acaagattgtattcaaagttaataatcaggtggtctctttgaagcctgagattatcgtggatcaatatgagtacaagtac

SEQ ID NO: 35931 - DNA, 80 bp, synthetic construct
  source 1..80: mol_type = other DNA
ggtttataaaacagataaatctcactgccagggaagcaatactatatttcttccacaaaaacttcgaggaagagataaga

SEQ ID NO: 35932 - DNA, 80 bp, synthetic construct
  source 1..80: mol_type = other DNA
gttgtttagcccaattttgaagggcagagtttacaagattctaagtgctgaaggggagagttttcttttagccatgtcaa

SEQ ID NO: 35933 - DNA, 80 bp, synthetic construct
  source 1..80: mol_type = other DNA
ggataatctacttagatccttctttgggaggagtgtctggaatgtctcttggaaggttccatatacgtcaattctcggac

SEQ ID NO: 35934 - DNA, 80 bp, synthetic construct
  source 1..80: mol_type = other DNA
cctgtctctgaagggctgtctttctggagagagatctggttaagctcccacgagtcctggattcatgcgttatgtcagga

SEQ ID NO: 35935 - DNA, 80 bp, synthetic construct
  source 1..80: mol_type = other DNA
ggccgggaacccagatcttggagagagaacactcgagagcttcactcgccttctggaggatcctaccaccttaaatatta

SEQ ID NO: 35936 - DNA, 80 bp, synthetic construct
  source 1..80: mol_type = other DNA
aaggaggggctagtcccaccatcttactcaaggatgcaatcaggaaggctctgtatgatgaggtggataaggtggaaaac

SEQ ID NO: 35937 - DNA, 80 bp, synthetic construct
  source 1..80: mol_type = other DNA
tcagagttcagagaggcaatcttgttgtccaagacccatagagataactttatacttttcttaaaatctgttgagccttt

SEQ ID NO: 35938 - DNA, 80 bp, synthetic construct
  source 1..80: mol_type = other DNA
gtttcctcgatttcttagtgaacttttcagttcgtcctttctgggaattcccgagtccatcattggactgatacagaact

SEQ ID NO: 35939 - DNA, 80 bp, synthetic construct
  source 1..80: mol_type = other DNA
ctcggacaataagaaggcagttcagaaggagtctatcaagaactttagaagagtccttttacaactcagagatccatggg

SEQ ID NO: 35940 - DNA, 80 bp, synthetic construct
  source 1..80: mol_type = other DNA
atcaatcggatgacccagacacctcaacgggtcgtgagggtgtggccttgttcttctgagagggcagacctcttaaggga

SEQ ID NO: 35941 - DNA, 80 bp, synthetic construct
  source 1..80: mol_type = other DNA
gatctcttggggaagaaaagtggttggcacaacagtccctcacccttctgagatgttggggttacttcccaagtcctcca

SEQ ID NO: 35942 - DNA, 80 bp, synthetic construct
  source 1..80: mol_type = other DNA
agaatgtttgagccaggacaagagacagctgttcctcactcctatttcattcactttcgttcactgggcttgagtgggaa

SEQ ID NO: 35943 - DNA, 80 bp, synthetic construct
  source 1..80: mol_type = other DNA
tttcctgttcttgtggagcaacaagaggaagcaaccctagagtctcggtctctgtactcccgtctttcgatcagtcattc

SEQ ID NO: 35944 - DNA, 80 bp, synthetic construct
  source 1..80: mol_type = other DNA
ttttcacgaggccctctaaaagggtacttgggctcgtccacctccatgtcgacccagctattccatgcttgggaaaaagt

SEQ ID NO: 35945 - DNA, 80 bp, synthetic construct
  source 1..80: mol_type = other DNA
cactaatgttcatgtggttaaaagggccttatcattaaaagaatccataaactggtttatcacaagaaattccaatttgg

SEQ ID NO: 35946 - DNA, 80 bp, synthetic construct
  source 1..80: mol_type = other DNA
ctcaaactctaattagaaacattatgtctctgacaggccccgatttccctctagaagaggctcctgtcttcaaaagaact

SEQ ID NO: 35947 - DNA, 80 bp, synthetic construct
  source 1..80: mol_type = other DNA
gggtcagcattgcataggttcaaatctgcaaggtacagcgagggagggtattcctctgtctgccccaatctactctctca

SEQ ID NO: 35948 - DNA, 80 bp, synthetic construct
  source 1..80: mol_type = other DNA
tatttccgttagtacagacactatgtctgatttaacccaagacggaaaaaattatgacttcatgtttcagcccttgatgc

SEQ ID NO: 35949 - DNA, 80 bp, synthetic construct
  source 1..80: mol_type = other DNA
tttatgcgcaaacatggacatcagagctggtacaaagagacacaaggctgagagactctacgtttcattggcaccttcgg

SEQ ID NO: 35950 - DNA, 80 bp, synthetic construct
  source 1..80: mol_type = other DNA
tgcaacagatgtgtgaggcccattgatgatatcacactggagacttcccagatcttcgaatttccggatgtgtcgagaag

SEQ ID NO: 35951 - DNA, 80 bp, synthetic construct
  source 1..80: mol_type = other DNA
aatatctagaatggtttctggagctgtgcctcactttcagaaactccctgatatccgcctaaagccaggtgacttcgagt

SEQ ID NO: 35952 - DNA, 80 bp, synthetic construct
  source 1..80: mol_type = other DNA
ctctgaacggtagagaaaagtctcgccatataggatcggctcaagggctcttatactcaatcttagtggcaattcatgac

SEQ ID NO: 35953 - DNA, 80 bp, synthetic construct
  source 1..80: mol_type = other DNA
gtccccttattcatcaaatgcagttggtcatgtgttcaatctcatccactttgttggatgctatatgggacaagtgagat

SEQ ID NO: 35954 - DNA, 80 bp, synthetic construct
  source 1..80: mol_type = other DNA
tctggatataatgatgggaccatctttcctgtcaacatatatggcaaggtctctcctagagactatttgagggggctcgc

SEQ ID NO: 35955 - DNA, 80 bp, synthetic construct
  source 1..80: mol_type = other DNA
aaggggagttttgataggatcttcgatttgcttcttgacaagaatgacaaatatcaatattaatagacctcttgagttga

SEQ ID NO: 35956 - DNA, 80 bp, synthetic construct
  source 1..80: mol_type = other DNA
tctcaggggtaatctcgtatatccttctgagactagataatcacccctctttgtatataatgctcagagaacagtccctt

SEQ ID NO: 35957 - DNA, 80 bp, synthetic construct
  source 1..80: mol_type = other DNA
agaggagagatattctccatccctcagaagatccctgctgcttatccgaccaccatgaaagaagggaacagatcgatttt

SEQ ID NO: 35958 - DNA, 80 bp, synthetic construct
  source 1..80: mol_type = other DNA
gtgttatctccaacatgtgctacgctatgagcgggaggtgatcacagcgtcgcctgagaatgactggttgtggatcttct

SEQ ID NO: 35959 - DNA, 80 bp, synthetic construct
  source 1..80: mol_type = other DNA
tcgttggcagcatcgaggacctatccggagaggtagaaagacaccttcatgggtataacaggtggatcactctcgaggat

SEQ ID NO: 35960 - DNA, 80 bp, synthetic construct
  source 1..80: mol_type = other DNA
atcagatctagatcatctctactagaatacagttgcttatagaccggatactcccgggagcctgtacatactgagactca

SEQ ID NO: 35961 - DNA, 80 bp, synthetic construct
  source 1..80: mol_type = other DNA
tgtatgatatatcctgaaaaaaacaagatcttgaatcctagcctctggttgtttgattgttttttttgtctttattgttt

SEQ ID NO: 35962 - DNA, 80 bp, synthetic construct
  source 1..80: mol_type = other DNA
ctccaagacgatcttcggaggaaaaatcaacccagactactggccgagagcccaagaaggagactacatctactccttct

SEQ ID NO: 35963 - DNA, 80 bp, synthetic construct
  source 1..80: mol_type = other DNA
cctgctaaccgagctctgaagttcagttcctctagacagtcaagtctgagatgccctagagtcgacatgagaaaaacagg

SEQ ID NO: 35964 - DNA, 80 bp, synthetic construct
  source 1..80: mol_type = other DNA
agtcttagagggacagggaggaaggtgtcggtgactccccaaagcgggaaggtcatatcctcatgggagtcatacaaaag

SEQ ID NO: 35965 - DNA, 80 bp, synthetic construct
  source 1..80: mol_type = other DNA
tgaccagacacggtcatatggattctcataatacgggaagtcttctagcagttctagtgatcaacggtgctctcattctc

SEQ ID NO: 35966 - DNA, 80 bp, synthetic construct
  source 1..80: mol_type = other DNA
cgggaactgataccaaaggttgtggacaggccaatgggtgcttcggatgaccctgtgcctaaacacggacagaggtcatg

SEQ ID NO: 35967 - DNA, 80 bp, synthetic construct
  source 1..80: mol_type = other DNA
gtgtgtctcctgatagcgaacttaacatgagtgaaatgaaaagtgcaacctgcctccaatgaaggacataagcaatagct

SEQ ID NO: 35968 - DNA, 80 bp, synthetic construct
  source 1..80: mol_type = other DNA
gatcccattgatccgattgaatcagaggctgagcctagaggagcccccactgttcctaacatcttgaggaactctgacta

SEQ ID NO: 35969 - DNA, 80 bp, synthetic construct
  source 1..80: mol_type = other DNA
gattaatagaatgacccagacacctcaaagggttgggagggtgtggccttgctcttcagaaagggcagatttacttcgtg

SEQ ID NO: 35970 - DNA, 80 bp, synthetic construct
  source 1..80: mol_type = other DNA
tcaagaagcaggaaatccggatttgggagagagaacactggaaagcttcacacgccttctcgaggatcccactaccctga

SEQ ID NO: 35971 - DNA, 80 bp, synthetic construct
  source 1..80: mol_type = other DNA
ctgtagatcttattgccaggaacatcgaggacaatcaggctcatctccaaggagagcctatagaagtagatagtctgccc

SEQ ID NO: 35972 - DNA, 80 bp, synthetic construct
  source 1..80: mol_type = other DNA
ggaagcatcgaggacctatccggagaggtggaaagacaccttcatgggtacaataggtggatcacccttgaggatatcag

SEQ ID NO: 35973 - DNA, 80 bp, synthetic construct
  source 1..80: mol_type = other DNA
atctagatcatctctattagactacagctgcttgtaaacaagatactcctggaagcctgtacattccgaaactctcgtgt

SEQ ID NO: 35974 - DNA, 80 bp, synthetic construct
  source 1..80: mol_type = other DNA
ctgatgtggcattggctgatgacggaactgtcaactctgacgatgaggattacttttccggtgaaaccagaagcccagaa

SEQ ID NO: 35975 - DNA, 80 bp, synthetic construct
  source 1..80: mol_type = other DNA
gctgtttatacccgaatcatgatgaacggaggtcgattgaagagatcgcacatacggagatatgtctcagtcagctccaa

SEQ ID NO: 35976 - DNA, 80 bp, synthetic construct
  source 1..80: mol_type = other DNA
agtcgacttcacttggatgatagaaaatcgcccaaccggggtgagacggccaaaccgggtgagggcaggtatcgagagga

SEQ ID NO: 35977 - DNA, 80 bp, synthetic construct
  source 1..80: mol_type = other DNA
ttttcagatggaggagggagaggatcctggcctcctgttccagtcgtacctggacaacattggagtccaaatagttagac

SEQ ID NO: 35978 - DNA, 80 bp, synthetic construct
  source 1..80: mol_type = other DNA
cttcaagaaggtcttcagaagataaatcaacccaaaccactagtcgagagcccaagaaggaaacaacatccacctcttct

SEQ ID NO: 35979 - DNA, 80 bp, synthetic construct
  source 1..80: mol_type = other DNA
cctgctaaccaaacgttgaaactcagtccctctgggtaaagaagtctgagatgtcctataatcgacatgaaaaaaacagg

SEQ ID NO: 35980 - DNA, 80 bp, synthetic construct
  source 1..80: mol_type = other DNA
aacccgagactggggacatcgtgtgacatttttaccaatagtaaagggaagagagcatccaaagggagtaaaatctgcgg

SEQ ID NO: 35981 - DNA, 80 bp, synthetic construct
  source 1..80: mol_type = other DNA
ctttgtggatgaaagaggtctgtataagtctctaaaaggagcatgcaaactcaagctatgtggagttaccggactaagac

SEQ ID NO: 35982 - DNA, 80 bp, synthetic construct
  source 1..80: mol_type = other DNA
gatgcccacaagcaggtctcaggggttgacctgggtctcccaaactgggaggagtatgtgttactgggtgcaggagccct

SEQ ID NO: 35983 - DNA, 80 bp, synthetic construct
  source 1..80: mol_type = other DNA
gggagtatgtgttactgggtgcaggagccctgattgccttgatgttgataattttcctaatgacatgctgtagaagaggc

SEQ ID NO: 35984 - DNA, 80 bp, synthetic construct
  source 1..80: mol_type = other DNA
gattgccttgatgttgataattttcctaatgacatgctgtagaagaggcaatcgactagaatctacacaacgcggtctca

SEQ ID NO: 35985 - DNA, 80 bp, synthetic construct
  source 1..80: mol_type = other DNA
gagggacaaggaggaaggtgtcggtcacttcccagagcgggaaggccatatcttcatgggaatcatacaagagtggtggt

SEQ ID NO: 35986 - DNA, 80 bp, synthetic construct
  source 1..80: mol_type = other DNA
gagactagactgtgaaggctggtcatcctttcgacgcttcaattcttgaagatcacctccctctgggggttcgggggaac

SEQ ID NO: 35987 - DNA, 80 bp, synthetic construct
  source 1..80: mol_type = other DNA
ctagggaccgataccaaaggttgtggacgggccaagaggtattttgaatgactctgtgcttgggtacagacagaggtcat

SEQ ID NO: 35988 - DNA, 80 bp, synthetic construct
  source 1..80: mol_type = other DNA
aatgcgttccatgatagcggactcaacatgagtcaattgagaaaggcaatctgcctcttatgaagggcgtaagcaatagc

SEQ ID NO: 35989 - DNA, 80 bp, synthetic construct
  source 1..80: mol_type = other DNA
tcacaatcatcgtgcatcttagcaaagtgtgcataattataaagggctaggtcatataagcttttcagtcgagaaaaaaa

SEQ ID NO: 35990 - DNA, 80 bp, synthetic construct
  source 1..80: mol_type = other DNA
atttcttgcatttgtgggacatcaggaggaggcaatcctagagtttctgtatctgtactcccatctttcgatcaatcatt

SEQ ID NO: 35991 - DNA, 80 bp, synthetic construct
  source 1..80: mol_type = other DNA
tttttcacgaggccccttgaaaggatacttgggttcatccacctccatgtcaacccaactattccatgcatgggaaaaag

SEQ ID NO: 35992 - DNA, 80 bp, synthetic construct
  source 1..80: mol_type = other DNA
gaagtttttccgagacgcagagtatttaacttcatccacccttagagagatgagtcttgtgttgtttaattgtagtagcc

SEQ ID NO: 35993 - DNA, 80 bp, synthetic construct
  source 1..80: mol_type = other DNA
gttacagagaggaactctgtctaagatgtctatcattatagccatcatgatagttttctccaatagagttttcaatgtct

SEQ ID NO: 35994 - DNA, 80 bp, synthetic construct
  source 1..80: mol_type = other DNA
tgatgcccctagaaaaaaacgagatcccaagtcagaacctctgattgtttgattgtttttcccatttttattgttttttt

SEQ ID NO: 35995 - DNA, 80 bp, synthetic construct
  source 1..80: mol_type = other DNA
cgcccgtgtccgcccccccagatgacgatgacctgtggttgcctcctcctgaatatgtcccgttgaaggaacttgcgggc

SEQ ID NO: 35996 - DNA, 80 bp, synthetic construct
  source 1..80: mol_type = other DNA
aaaactattaacatccctcgaaagacttagggaaaaatggtccctcaggttctcttgtttgtgccccttctagtgttctc

SEQ ID NO: 35997 - DNA, 80 bp, synthetic construct
  source 1..80: mol_type = other DNA
tactaaccatgattacaccatctggatgcctgaaaacccgagactagggacatcttgtgacatcttcgtcaacagcaggg

SEQ ID NO: 35998 - DNA, 80 bp, synthetic construct
  source 1..80: mol_type = other DNA
aaaacccgagactagggacatcttgtgacatcttcgtcaacagcagggggaagagggcgtctaagggtggcaagacctgt

SEQ ID NO: 35999 - DNA, 80 bp, synthetic construct
  source 1..80: mol_type = other DNA
taaactcctctaccccaaactaaaacagtgatcagctgagaaaactgatttgcctcctatgaaggacacaagcaacatat

SEQ ID NO: 36000 - DNA, 80 bp, synthetic construct
  source 1..80: mol_type = other DNA
ttggttatgtcaccaccacattcaagagaaaacactttcgcccgatgcccgattcatgtagatccgcatataattggaaa

SEQ ID NO: 36001 - DNA, 80 bp, synthetic construct
  source 1..80: mol_type = other DNA
atggcaggcgatcctaggtatgaagagtcccttcacaacccataccctgattatcattggctgcggacagttaaaaccac

SEQ ID NO: 36002 - DNA, 80 bp, synthetic construct
  source 1..80: mol_type = other DNA
ggcactgtggagggaattgacatcagtggatgtgggaaaggacttggtcaagtttaaagaccagatatggggacttctga

SEQ ID NO: 36003 - DNA, 80 bp, synthetic construct
  source 1..80: mol_type = other DNA
ttgtgactaaagacttcatatattcacaaagttctcactgtctctttgacaggaactatacgcttatgctaaaagacctt

SEQ ID NO: 36004 - DNA, 80 bp, synthetic construct
  source 1..80: mol_type = other DNA
ctagagagtttttgaaatctatagaccttggggggctgccagacgaagacttaatcatcggcttgaaacccaaagaaagg

SEQ ID NO: 36005 - DNA, 80 bp, synthetic construct
  source 1..80: mol_type = other DNA
gagctgaagatcgaaggccgattttttgctttaatgtcttggaatctaaggctatacttcgttattacagagaagctcct

SEQ ID NO: 36006 - DNA, 80 bp, synthetic construct
  source 1..80: mol_type = other DNA
atatgtttccggacgctaggctcgtgttcaacagcctgttggaagtgaatgacctgatggcttcagggacacatccgttg

SEQ ID NO: 36007 - DNA, 80 bp, synthetic construct
  source 1..80: mol_type = other DNA
ctaactccagaaagttccagctgctggtcgagcctgacaagctaaataaaataatgcaagacgacctaaaccgttatttg

SEQ ID NO: 36008 - DNA, 80 bp, synthetic construct
  source 1..80: mol_type = other DNA
caaggagtctcttatcatcatctcgccgagtgtggctgacctagacccatatgacaaatcccttcattcgaggattttcc

SEQ ID NO: 36009 - DNA, 80 bp, synthetic construct
  source 1..80: mol_type = other DNA
aagttgtggtcgggttggccttgtctggagccccagtccccgagggcatgaactgggtttacaaactaaggagaactctt

SEQ ID NO: 36010 - DNA, 80 bp, synthetic construct
  source 1..80: mol_type = other DNA
aattgcagcgaggaactttgtctaaagtctccattatcgtagccatcatgatagtcttttccaacagggtgtttaatgtc

SEQ ID NO: 36011 - DNA, 80 bp, synthetic construct
  source 1..80: mol_type = other DNA
ttcattgtgttttgggaagtttcctatctacacaataccagacaagctaggtccttggagtcctatcgatatacatcatc

SEQ ID NO: 36012 - DNA, 80 bp, synthetic construct
  source 1..80: mol_type = other DNA
aggtgggcggagctgcagcacaatccatgatctctctttggttatatggtgctcactctgaatcaaataggagcaggaga

SEQ ID NO: 36013 - DNA, 80 bp, synthetic construct
  source 1..80: mol_type = other DNA
atctagatcatctctcttggattatagttgcctgtaaattgggcactctcgagggaatgtatgaactagtaatcttgaac

SEQ ID NO: 36014 - DNA, 80 bp, synthetic construct
  source 1..80: mol_type = other DNA
tcatcaggctcgtcccaattcattcgctgagtttttgaacaagacatactcaagtgattcttaaagaatggaacaacagg

SEQ ID NO: 36015 - DNA, 80 bp, synthetic construct
  source 1..80: mol_type = other DNA
ccagtctgccagggaagtccacagaagacaaagccactcaaactgccagccgagaactcaagaaagagactgcgtccgct

SEQ ID NO: 36016 - DNA, 80 bp, synthetic construct
  source 1..80: mol_type = other DNA
aaaaacatgagaaacttttgtgttaacggagaagtcaaggtgtgcggtccaaacggttattcgtttaggactctacggca

SEQ ID NO: 36017 - DNA, 80 bp, synthetic construct
  source 1..80: mol_type = other DNA
tatcttgagatctttcgacgagatctattctggaaatcagagaatgatcgggttggttaaagttgtcgttggattggcgt

SEQ ID NO: 36018 - DNA, 80 bp, synthetic construct
  source 1..80: mol_type = other DNA
ggttagctacggaatcctgatagcgcggaggggcgacaagatcaccccaaattctcttgtggatataagacgtactaatg

SEQ ID NO: 36019 - DNA, 80 bp, synthetic construct
  source 1..80: mol_type = other DNA
cggatttgtagatgaaaggggcttgtacaagtctctgaaaggagcatgcaaactcaagctatgcggagtccccgggctca

SEQ ID NO: 36020 - DNA, 80 bp, synthetic construct
  source 1..80: mol_type = other DNA
cggatgttcacaaacaggtctcggagattgaccttggtctcccgagttgggggaagtatctgttgatgagtgcaggtgtt

SEQ ID NO: 36021 - DNA, 80 bp, synthetic construct
  source 1..80: mol_type = other DNA
ctggcaacactgattctggcgatcttcttgataacatgctgtagaagggccaataggacagaatcaacacagagaggtcg

SEQ ID NO: 36022 - DNA, 80 bp, synthetic construct
  source 1..80: mol_type = other DNA
gtgagaccgggctgtgaaggtgagtcattccccccacacaccatgcgtttagatgaccgcctctctttgagatctgaggg

SEQ ID NO: 36023 - DNA, 80 bp, synthetic construct
  source 1..80: mol_type = other DNA
attctatcttcttgacagtccttcacggactctgtgcaacagggtggacttaagagtcaagaaactttcattaatcatct

SEQ ID NO: 36024 - DNA, 80 bp, synthetic construct
  source 1..80: mol_type = other DNA
caactgatctaacaccgtcatgtcgattctggtaatgtatgacgtcctctgacagtatcatttactaatggtgctctcat

SEQ ID NO: 36025 - DNA, 80 bp, synthetic construct
  source 1..80: mol_type = other DNA
cccccaaggactgataccaaaggtcatgaacaatccaatcggaaactcagataactctatgcttgagtttagatagatgc

SEQ ID NO: 36026 - DNA, 80 bp, synthetic construct
  source 1..80: mol_type = other DNA
catagcatgttcccctacattagaccaaataggggtttatttgaaagaaccgacttgcctcctatgaaggacacaagcaa

SEQ ID NO: 36027 - DNA, 80 bp, synthetic construct
  source 1..80: mol_type = other DNA
tatatcacaatcatcttacatcccgataagatgtacatagctacagagggctgagccatccaagcctttcagtcaagaaa

SEQ ID NO: 36028 - DNA, 80 bp, synthetic construct
  source 1..80: mol_type = other DNA
aaaactgtggaatggaggagcaattaacaacacttctcctcctgataacggcaccatgatgattgatccaggggaggttt

SEQ ID NO: 36029 - DNA, 80 bp, synthetic construct
  source 1..80: mol_type = other DNA
ttaaaaccccccccgagggggtcctgagttgtcttgcaagagtcgattacgataaagcatttgggaggtatctggctaac

SEQ ID NO: 36030 - DNA, 80 bp, synthetic construct
  source 1..80: mol_type = other DNA
ggcaacattgaggacctatccagagaagtggaaagacaccttcatggatacaacaggtggatcaccctcaaggacatcag

SEQ ID NO: 36031 - DNA, 80 bp, synthetic construct
  source 1..80: mol_type = other DNA
atccagatcatccttattagactacagctgcttgtaaaccaggcattcccggatgtctgcacatgctgagactcttgtgt

SEQ ID NO: 36032 - DNA, 80 bp, synthetic construct
  source 1..80: mol_type = other DNA
gatgtgtctcgaaaaaaacaagatcgtgaatctggacctctggctgtttgattgtttcttttgtctttgttgtttatttg

SEQ ID NO: 36033 - DNA, 80 bp, synthetic construct
  source 1..80: mol_type = other DNA
tcgaaaaaaacaagatcgtgaatctggacctctggctgtttgattgtttcttttgtctttgttgtttatttgttaagcgt

SEQ ID NO: 36034 - DNA, 80 bp, synthetic construct
  source 1..80: mol_type = other DNA
ctgacgtggcattggcagatgatggaactgtcgactctgacgacgaagaccactttcccggtgaagccagaggtccagaa

SEQ ID NO: 36035 - DNA, 80 bp, synthetic construct
  source 1..80: mol_type = other DNA
actcttaaggagttaaacaactgtgtgccggaaatctattgattgtgtatatccatcatgaaaaaaactaacacctctcc

SEQ ID NO: 36036 - DNA, 80 bp, synthetic construct
  source 1..80: mol_type = other DNA
agccgaattcacttggattatggaaagttgcccgaccttggtaggatgtccaaagcgggggagggcaggcatcaagagga

SEQ ID NO: 36037 - DNA, 80 bp, synthetic construct
  source 1..80: mol_type = other DNA
cttcaggaaggtcttcagaggataagtcaacccagatcactagtcaagagcccaagaaggagacaacatccactccttct

SEQ ID NO: 36038 - DNA, 80 bp, synthetic construct
  source 1..80: mol_type = other DNA
cttgctaaccgaactcttaaactcagtccctttagatgatgaaacctgagatgtcctaaagtcaacaggaaaaaaacggg

SEQ ID NO: 36039 - DNA, 80 bp, synthetic construct
  source 1..80: mol_type = other DNA
gaccttgattgccttggtgttgataattttcctaatgacatgttgtagaaaagtcgatcggccagaatctacacaacgca

SEQ ID NO: 36040 - DNA, 80 bp, synthetic construct
  source 1..80: mol_type = other DNA
gtctcagagggacaggaaggaacgtgtcagtcacctcccaaagcgggaaattcataaattcatgggagtcgtataaaagt

SEQ ID NO: 36041 - DNA, 80 bp, synthetic construct
  source 1..80: mol_type = other DNA
tgatcaaacaaggtcatgtagattctcataatgcgggaaatcttatagtagtttcagtgaccgacagtgctttcattcca

SEQ ID NO: 36042 - DNA, 80 bp, synthetic construct
  source 1..80: mol_type = other DNA
caggaactgatgtcaaaggttgtggacgggtcaagagttatttctgatgactccgtgcgtgggcccggacagaggtcata

SEQ ID NO: 36043 - DNA, 80 bp, synthetic construct
  source 1..80: mol_type = other DNA
caacctcaactcccctttgatagaagatcctgtgagactgatgttggagtggctgaaaacagggaatagaccttgtcgga

SEQ ID NO: 36044 - DNA, 80 bp, synthetic construct
  source 1..80: mol_type = other DNA
agccgacctcacccggatgatggaaaattgcccgaccccggcaggatgtccaaagcgggtgagggcaggcaccaagagga

SEQ ID NO: 36045 - DNA, 80 bp, synthetic construct
  source 1..80: mol_type = other DNA
gaggcatcttcaaggatataacaggtggatcaccctcgaggacataagatccagatcatctctactggactatagctgct

SEQ ID NO: 36046 - DNA, 80 bp, synthetic construct
  source 1..80: mol_type = other DNA
atccagatcatctctactggactatagctgcttataaactgaatgattttggggggcttatacatgatgcgactcttaga

SEQ ID NO: 36047 - DNA, 80 bp, synthetic construct
  source 1..80: mol_type = other DNA
tagaaaaaaacaagatcccaagtcagaacctctgattgtttgattgttttttctatttttattgtttttttgttaagcgt

SEQ ID NO: 36048 - DNA, 80 bp, synthetic construct
  source 1..80: mol_type = other DNA
cctgatgatctaacttttggaactcagccctaccagacaacggaatctgaaccgttctagactcaacatgaaaaaaacag

SEQ ID NO: 36049 - DNA, 80 bp, synthetic construct
  source 1..80: mol_type = other DNA
gtgtttaagagtaggaggaagatgtcatcctcatgtgaatggggtattttttaatggtataatattgggccctgatggcc

SEQ ID NO: 36050 - DNA, 80 bp, synthetic construct
  source 1..80: mol_type = other DNA
caagaactgataccaaaggttgtggacaggccgaggaacatctcagatgattacctgttggagcatggatggaggctata

SEQ ID NO: 36051 - DNA, 80 bp, synthetic construct
  source 1..80: mol_type = other DNA
gtcgacagtctctaccaacgctttaactgtagctcaacactcccaatctttgatcaagccgatgagggacttcttgttga

SEQ ID NO: 36052 - DNA, 80 bp, synthetic construct
  source 1..80: mol_type = other DNA
actccttagactcagacgaagacatccagaggctgttgaaagactcactgcgaagaactaggtgggtagatcaagaagtc

SEQ ID NO: 36053 - DNA, 80 bp, synthetic construct
  source 1..80: mol_type = other DNA
cgccatgcagctagaacaatgacgggagattatagccccaacaggaagatgtcacgcaaggcaggatgttcagagtgggt

SEQ ID NO: 36054 - DNA, 80 bp, synthetic construct
  source 1..80: mol_type = other DNA
tgggcaacaggcgcccattacaagcttaaacctattctggatgatctcaatgttttcccgtccctgtgtctcgtggttgg

SEQ ID NO: 36055 - DNA, 80 bp, synthetic construct
  source 1..80: mol_type = other DNA
ctggatgatctcaatgttttcccgtccctgtgtctcgtggttggagatggatcggggggaatatcaagagcagtacttaa

SEQ ID NO: 36056 - DNA, 80 bp, synthetic construct
  source 1..80: mol_type = other DNA
catgtttccagacgccaagcttgtctttaacagcctgttagaagtgaatgacttgatggcatccgggacacatccactgc

SEQ ID NO: 36057 - DNA, 80 bp, synthetic construct
  source 1..80: mol_type = other DNA
cattcccctcagtcacaggatttataactcaaatgacttcatctttctcatccgagttatacctcagattctccaaacat

SEQ ID NO: 36058 - DNA, 80 bp, synthetic construct
  source 1..80: mol_type = other DNA
gggaagtttttccgggatgccgagtatttaacctcctccacccttcgagagatgagtcttgtgttgttcaattgtagcag

SEQ ID NO: 36059 - DNA, 80 bp, synthetic construct
  source 1..80: mol_type = other DNA
tcggaagcatcgaggacctatccagagaaatagagaggcatcttcaaggatataacaggtggatcaccttcgaggacata

SEQ ID NO: 36060 - DNA, 80 bp, synthetic construct
  source 1..80: mol_type = other DNA
agatccagatcatctttactggactatagctgcttatgaactgaatgatttttggggggcttgtacacgatgagactctt

SEQ ID NO: 36061 - DNA, 80 bp, synthetic construct
  source 1..80: mol_type = other DNA
agatgatgcatctagaaaaaaacaaggtctcaagtctgaacctctgattgtttgattgttttttctatttttattgtttt

SEQ ID NO: 36062 - DNA, 80 bp, synthetic construct
  source 1..80: mol_type = other DNA
tcatcaagcccgcccaaactcattcgctgagtttctaaacaagacatattctaacgactcatgaggagttgaacaacaag

SEQ ID NO: 36063 - DNA, 80 bp, synthetic construct
  source 1..80: mol_type = other DNA
cttgcaaaaacctacaaattgtgtgccatctccatgaaaaaaactaacacccctcctttcgaatcactccaaacatgagc

SEQ ID NO: 36064 - DNA, 80 bp, synthetic construct
  source 1..80: mol_type = other DNA
aagatctttgtcaatcctggtgccctcagagctggtctagctgatctcgagatggccgaggagactgttgatctaatcaa

SEQ ID NO: 36065 - DNA, 80 bp, synthetic construct
  source 1..80: mol_type = other DNA
ttcagctagatgatgataagcagtccggcctgagcgaaatggctaaggcaggagaaagcaagtaccgggaggacttccaa

SEQ ID NO: 36066 - DNA, 80 bp, synthetic construct
  source 1..80: mol_type = other DNA
aatccaccggggaggtcttcagaggacaagtctacccaaactgccatccgagagctcaagaaagagacaacatctatgtc

SEQ ID NO: 36067 - DNA, 80 bp, synthetic construct
  source 1..80: mol_type = other DNA
ctctcaaaaagaaagtcgaccttcaaaaacccgaatggcggctcaagctgcctctggtcctccagctctcgactggtctg

SEQ ID NO: 36068 - DNA, 80 bp, synthetic construct
  source 1..80: mol_type = other DNA
ccaccaacgaagaggatgatctgtctgtggaggcagaaatcgctcaccaaatcgctgagagcttttccaagaagtacaaa

SEQ ID NO: 36069 - DNA, 80 bp, synthetic construct
  source 1..80: mol_type = other DNA
cctgatgatctaaccccggaactcagccttaccagacaatggaacctaaaccgttctagactcatcatgaaaaaaacagg

SEQ ID NO: 36070 - DNA, 80 bp, synthetic construct
  source 1..80: mol_type = other DNA
taacaccactgataaaatgaactttctccgcaagatcgtgaaaaattgcagggatgaggacgcccaaaagtcctcgcctg

SEQ ID NO: 36071 - DNA, 80 bp, synthetic construct
  source 1..80: mol_type = other DNA
tgtctgcccctccggatgatgatgatctgtggttgcctcctcctgaatatatccccttgaaagaactagcgggcaagaag

SEQ ID NO: 36072 - DNA, 80 bp, synthetic construct
  source 1..80: mol_type = other DNA
aatatgaggaatttttgtgtcaatggagaggtcaaggtgtgtagtccaaacggttactcatttaggatcctgcggcatat

SEQ ID NO: 36073 - DNA, 80 bp, synthetic construct
  source 1..80: mol_type = other DNA
tacaccatttggatgcctgagaatccaagactcgggacatcttgtgacatcttcatcaacagcagagggaagagggcgtc

SEQ ID NO: 36074 - DNA, 80 bp, synthetic construct
  source 1..80: mol_type = other DNA
aatccaagactcgggacatcttgtgacatcttcatcaacagcagagggaagagggcgtccaagggaggcaagacctgtgg

SEQ ID NO: 36075 - DNA, 80 bp, synthetic construct
  source 1..80: mol_type = other DNA
gtttgtagatgagagaggtttgtataagtcgctaaaaggggcttgcaaactcaaattatgtggggtgcctggacttagac

SEQ ID NO: 36076 - DNA, 80 bp, synthetic construct
  source 1..80: mol_type = other DNA
cggatgtgcacaaactgatctcaggggtcgaccttggtcttcccagctgcgggaagtatgtgttgatgagtgcaggcatt

SEQ ID NO: 36077 - DNA, 80 bp, synthetic construct
  source 1..80: mol_type = other DNA
ctgacaacactaatgttgatgatcttcttgatgatttgttgcaggagggttaatcaaacaggatcaaaacaacatgggct

SEQ ID NO: 36078 - DNA, 80 bp, synthetic construct
  source 1..80: mol_type = other DNA
cggagaggcagggaggaaagtatctgttacttcccagaacgggagggtcatatcctcctgggagtcatataaaagcggag

SEQ ID NO: 36079 - DNA, 80 bp, synthetic construct
  source 1..80: mol_type = other DNA
gaaaccaggctgtgatggcaggtcctatcttctgtacttcgggtccggaggatcaccgcatcttggggttaaggagaacc

SEQ ID NO: 36080 - DNA, 80 bp, synthetic construct
  source 1..80: mol_type = other DNA
tccaaacttaacagccccctttgggctccgtgcaacagggtaaattcaagagtcaagagaccttcattaatcatctcaat

SEQ ID NO: 36081 - DNA, 80 bp, synthetic construct
  source 1..80: mol_type = other DNA
cgatcagatgtggtcaggtagagtgtaatattctgggaaatcttctagcagtttctgtgaccaacggtgctttcattctt

SEQ ID NO: 36082 - DNA, 80 bp, synthetic construct
  source 1..80: mol_type = other DNA
caggaactgataccaaaggttgtggacaggccgagggatatctcggatgactacctatttgagcatggatagaggctata

SEQ ID NO: 36083 - DNA, 80 bp, synthetic construct
  source 1..80: mol_type = other DNA
gtatgtcccttgatacaagactgaacaggagtcaactgagagaaacaatttacctcctatgagggacacaagcaatagat

SEQ ID NO: 36084 - DNA, 80 bp, synthetic construct
  source 1..80: mol_type = other DNA
cacgatcatctcacatcttagcaaagcgtgcatatttacaaagggctgggtcatctaagcttttcagccgagaaaaaaac

SEQ ID NO: 36085 - DNA, 80 bp, synthetic construct
  source 1..80: mol_type = other DNA
tgcagggcataaggccagctagcaacacttctcatctcgagattatcaccatgatgcttgatccaggagaagtctacgat

SEQ ID NO: 36086 - DNA, 80 bp, synthetic construct
  source 1..80: mol_type = other DNA
gaccctgttgatccgattgagtcagaggctgagcctagaggaacccccactgtacctaacatattaaggaattccgacta

SEQ ID NO: 36087 - DNA, 80 bp, synthetic construct
  source 1..80: mol_type = other DNA
gtgggcggaactgcagcacaatctatgatttctctttggttatatggtgctcactccgaatcaaacaggagtcggaggtg

SEQ ID NO: 36088 - DNA, 80 bp, synthetic construct
  source 1..80: mol_type = other DNA
cataactgacttggcccacttctattctaaatcttcccccatagagaagctgctgaactatacgcttggaaacagagggc

SEQ ID NO: 36089 - DNA, 80 bp, synthetic construct
  source 1..80: mol_type = other DNA
ctcgcgacttcttgctagaaaccatcccctaactccttacatcaaaactcagacatggccacccaaacacatagtagatc

SEQ ID NO: 36090 - DNA, 80 bp, synthetic construct
  source 1..80: mol_type = other DNA
atctcttgcacttgtggagtaacaggaggaggcaatcctagagtttcagtgtctgtgctcccgtccttcgatcaatcatt

SEQ ID NO: 36091 - DNA, 80 bp, synthetic construct
  source 1..80: mol_type = other DNA
tttttcacgaggccctctaaagggatacttgggttcgtctacctctatgtcaacccagctgtttcatgcttgggaaaaag

SEQ ID NO: 36092 - DNA, 80 bp, synthetic construct
  source 1..80: mol_type = other DNA
tcctcttgagattggataaccacccatccttgtatataatgctcagagagccatctcttagaggagagatcttttctatc

SEQ ID NO: 36093 - DNA, 80 bp, synthetic construct
  source 1..80: mol_type = other DNA
gattccctcgctgtgtctcgggaaattccccatctacacgataccagacaagctcggcccctggagcccgatcgacatac

SEQ ID NO: 36094 - DNA, 80 bp, synthetic construct
  source 1..80: mol_type = other DNA
ggctaatggatggaacctgggtctcaatccagacatcagatgatattaaatggtgccctcctgatcaattggtgaatcta

SEQ ID NO: 36095 - DNA, 80 bp, synthetic construct
  source 1..80: mol_type = other DNA
catgactttcactcagatgaaatagaacatcttgtcgtagaggaattgatcaagaaaagagaaggatgtctagatgcact

SEQ ID NO: 36096 - DNA, 80 bp, synthetic construct
  source 1..80: mol_type = other DNA
tagcctgtaattctagcttgagtctgtcgtctcactggatcaggttgatttacaaaatagtgaggaccaccagacttgtt

SEQ ID NO: 36097 - DNA, 80 bp, synthetic construct
  source 1..80: mol_type = other DNA
atctagatcatctttattagactacagctgcttgtaaaccggatattcccgaagatccgcacatgctaagactctcgtgt

SEQ ID NO: 36098 - DNA, 80 bp, synthetic construct
  source 1..80: mol_type = other DNA
agacgacttcacctggatgatggacaatcatccaaccttggtgagatggccaaagtaggggaaggcaagtatcgagagga

SEQ ID NO: 36099 - DNA, 80 bp, synthetic construct
  source 1..80: mol_type = other DNA
cttctggaaggtcttcagaggataaatcaacccaaaccaccggacgagagcccaagaaggagacaccatccactccttct

SEQ ID NO: 36100 - DNA, 80 bp, synthetic construct
  source 1..80: mol_type = other DNA
cctgctagccgaacctctgaactcagtccctctagatagtgaaatctgagatgtcctagagtcgacatgaaaaaaacagg

SEQ ID NO: 36101 - DNA, 80 bp, synthetic construct
  source 1..80: mol_type = other DNA
gagactagactgtgagggctggtcatcctttcgacgcttcaagtttcgaagatcatctccactttgggtttttggggaaa

SEQ ID NO: 36102 - DNA, 80 bp, synthetic construct
  source 1..80: mol_type = other DNA
ggtacatcccatgatggcgggctcaatataagccggttgagaagggtaatctgcctcccatgaaggacataagcaatagc

SEQ ID NO: 36103 - DNA, 80 bp, synthetic construct
  source 1..80: mol_type = other DNA
tataacagacttggcccaattctattccaagtcatcccccatagagaagctgttgaactgtacactaggaaatagagggc

SEQ ID NO: 36104 - DNA, 80 bp, synthetic construct
  source 1..80: mol_type = other DNA
atctcttgcacttgtggagcgacaggaggaggcaatcctagagtttctgtatcagtacttccgtccttcgatcagtcatt

SEQ ID NO: 36105 - DNA, 80 bp, synthetic construct
  source 1..80: mol_type = other DNA
cgccatgcagctagaaccatgacaggggactatagtcccaacaagaaagtgtctcgcaagagcgggcctgccgaacgggc

SEQ ID NO: 36106 - DNA, 80 bp, synthetic construct
  source 1..80: mol_type = other DNA
ttgctctgctcaacaagttgccgtctccacctcagctaacccagcccctgtctcagagcttgacataagggccctgtcta

SEQ ID NO: 36107 - DNA, 80 bp, synthetic construct
  source 1..80: mol_type = other DNA
tgtatccagctaactaagatgttgaactctgtcccgacaaataatagaatccgagaagctctgaactcgacatgaaaaaa

SEQ ID NO: 36108 - DNA, 80 bp, synthetic construct
  source 1..80: mol_type = other DNA
atctagatcatctttattagactacagctgcttgtaaacaggacattcccggaagttaacacatgctaagactcttgtgt

SEQ ID NO: 36109 - DNA, 80 bp, synthetic construct
  source 1..80: mol_type = other DNA
actcatgaggagttaaataacagggtgctggaaatctatcgattgtgtatatccatcatgaaaaaaactaacacccctcc

SEQ ID NO: 36110 - DNA, 80 bp, synthetic construct
  source 1..80: mol_type = other DNA
agacgacttcatttggatgacggaaaatcgtccaaccttgatgagatggtcaaggcgggggaaggcaagtatcgagagga

SEQ ID NO: 36111 - DNA, 80 bp, synthetic construct
  source 1..80: mol_type = other DNA
cttcaggcagatcttcagaggataagtcaacccagaccactggtcgagagcctaagaaggaaacaacatccacaccttct

SEQ ID NO: 36112 - DNA, 80 bp, synthetic construct
  source 1..80: mol_type = other DNA
cctgctgaccggactttgaagctcagtccctctagataataaaatctgagatgtcctatagtcaacatgaaaaaaacagg

SEQ ID NO: 36113 - DNA, 80 bp, synthetic construct
  source 1..80: mol_type = other DNA
gagccctgattgccttgatgttgataattttcctgatgacatgttgcagaagagtcaatcgaccagaatctacgcaacgc

SEQ ID NO: 36114 - DNA, 80 bp, synthetic construct
  source 1..80: mol_type = other DNA
agtctcggagggacagggaggaaggtgtcgatcacctcccaaagtgggaaggtcatatcttcatgggagtcatataaaag

SEQ ID NO: 36115 - DNA, 80 bp, synthetic construct
  source 1..80: mol_type = other DNA
caggaactgataccaaaggctgtggacgggccaagaggtgtttctgatgactctgtgcttgggcacggacagaggtcaca

SEQ ID NO: 36116 - DNA, 80 bp, synthetic construct
  source 1..80: mol_type = other DNA
ttacgtcccatgataacggacttaacatgagtcgattgagaaaggctatctccctcccatgaaggacataagcaatagct

SEQ ID NO: 36117 - DNA, 80 bp, synthetic construct
  source 1..80: mol_type = other DNA
cacaatcgtcttacatctcagcaaagtgtgcataattataaaggactgagtcatttaagcttctcggtcgagaaaaaaac

SEQ ID NO: 36118 - DNA, 80 bp, synthetic construct
  source 1..80: mol_type = other DNA
caacctgaactcccctttgatagaggatccggcgagactgatgttagaatggttgaagacagggaatagaccttatcgga

SEQ ID NO: 36119 - DNA, 80 bp, synthetic construct
  source 1..80: mol_type = other DNA
tgactctaacagacaattgctccaggtcttacaaagttttgaaagattatttcaaaaaagtagacttgggttctcttaaa

SEQ ID NO: 36120 - DNA, 80 bp, synthetic construct
  source 1..80: mol_type = other DNA
tactcttcttaaaatctgtggaacctctgtttcctcgatttctcagtgaactcttcagttcgtctttcttgggaatccct

SEQ ID NO: 36121 - DNA, 80 bp, synthetic construct
  source 1..80: mol_type = other DNA
gaatatccaggatggtttctggagccgtccctcacttccagaagcttcctgatatccgtttgagaccaggagattttgaa

SEQ ID NO: 36122 - DNA, 80 bp, synthetic construct
  source 1..80: mol_type = other DNA
tctctgagtggcagagaaaagtctcgccatatagggtcggctcagggactcttatactcaatcttagtggcgattcacga

SEQ ID NO: 36123 - DNA, 80 bp, synthetic construct
  source 1..80: mol_type = other DNA
attctagatgatctcaatgtcttcccatccctctgtctggtagttggggatggatcaggaggaatatcccgggcagtgct

SEQ ID NO: 36124 - DNA, 80 bp, synthetic construct
  source 1..80: mol_type = other DNA
agaccaccagactcgttggcagggtggaggacctctctggggaggtagagagacaccttcatggctataacaggtggatc

SEQ ID NO: 36125 - DNA, 80 bp, synthetic construct
  source 1..80: mol_type = other DNA
acactcgaagatatcagatctagatcatctctcctagaatacagctgcttgtgagctggacaccctcagagagtagcaca

SEQ ID NO: 36126 - DNA, 80 bp, synthetic construct
  source 1..80: mol_type = other DNA
tgctaatactcttatactatgtgtcttgaaaaaaacagaaccttaagtctgaacctctggttgtttgattgttttttaca

SEQ ID NO: 36127 - DNA, 80 bp, synthetic construct
  source 1..80: mol_type = other DNA
ttcacctggacgatagaacgccatctgactttagcgggatggtcgagtcgggagaaggcaggtatcgggaggattttcaa

SEQ ID NO: 36128 - DNA, 80 bp, synthetic construct
  source 1..80: mol_type = other DNA
cgtccaggaaagtcttcggaggacaaattcacccagactacaggccaagaacccaagaaggaaacagcatcagcttcttc

SEQ ID NO: 36129 - DNA, 80 bp, synthetic construct
  source 1..80: mol_type = other DNA
atataaagcgtactgatatagaagggaactgggctctgacaggaggcatggaattgacgagggatcccacagtctctgaa

SEQ ID NO: 36130 - DNA, 80 bp, synthetic construct
  source 1..80: mol_type = other DNA
cgaaaggatgtctaagggtgggggggagatgtcatcctcatgtaaatggtgtgtttttcaatggcataatactagagtct

SEQ ID NO: 36131 - DNA, 80 bp, synthetic construct
  source 1..80: mol_type = other DNA
ggtgtttttcaatggcataatactagggtctgacggccatgttctaatccccgagatgcaatcatccctccttcagcaac

SEQ ID NO: 36132 - DNA, 80 bp, synthetic construct
  source 1..80: mol_type = other DNA
atctcagagttcgataaacctcctcaaactttgtgtaacagggtagattccgaaatcacgaagttttcttcaatcatctc

SEQ ID NO: 36133 - DNA, 80 bp, synthetic construct
  source 1..80: mol_type = other DNA
cagggactaaggccaaagatcgtggacaagccagtgggtatcgcggatgactcagcatgtgggcacgaacaggagttgta

SEQ ID NO: 36134 - DNA, 80 bp, synthetic construct
  source 1..80: mol_type = other DNA
gtgcaccccctgatagcaaacctaacacaggtcagttgagaagggcactctgcctcacgtgaaggatataagccatagat

SEQ ID NO: 36135 - DNA, 80 bp, synthetic construct
  source 1..80: mol_type = other DNA
cacaatcattctgcatctcagtaaagtgtgcacaactataaagggctgttccatccaaactcttcaatcgagaaaaaaac

SEQ ID NO: 36136 - DNA, 80 bp, synthetic construct
  source 1..80: mol_type = other DNA
ttgtgtcagctgtatatcgctggagatcaagtcttgtccatgtgcggaaactctgattttgaagtcatcaaaatattaga

SEQ ID NO: 36137 - DNA, 80 bp, synthetic construct
  source 1..80: mol_type = other DNA
gccatacgttgtgaatagcttggttcagaaggcagaaaaatttaggcctcttattcactctctgggggatttccctatat

SEQ ID NO: 36138 - DNA, 80 bp, synthetic construct
  source 1..80: mol_type = other DNA
ctcatcttttacttcagagagttgataaaaatctctccaaaagtatgagagccagcttacgacaaatgagctctctgatg

SEQ ID NO: 36139 - DNA, 80 bp, synthetic construct
  source 1..80: mol_type = other DNA
ctgctctgctcaacaggttgctgtttcaacctctgcaaacccagctcctgcttcagagttggacatcaggactctctcta

SEQ ID NO: 36140 - DNA, 80 bp, synthetic construct
  source 1..80: mol_type = other DNA
caaaaggttgcctaaaggtcggagggaggtgtcatccccctgtaaatggagtattcttcaatggtataattttgggtcca

SEQ ID NO: 36141 - DNA, 80 bp, synthetic construct
  source 1..80: mol_type = other DNA
gggagtcaggagggaaagtgtcagtagcccctcaaagcgggaaaatcatatcctcatgggagttgtacaaaagtgaaagt

SEQ ID NO: 36142 - DNA, 80 bp, synthetic construct
  source 1..80: mol_type = other DNA
tactgctaatgaggaggatgatccatccgtggaggctgaaattgctcaccagattgctgagagcttttctaagaaataca

SEQ ID NO: 36143 - DNA, 80 bp, synthetic construct
  source 1..80: mol_type = other DNA
aatgtgccaagcgtgacccgtctggcccatgatggatccaagcttcctctgagatgtgtgttggggtgggttgccctagc

SEQ ID NO: 36144 - DNA, 80 bp, synthetic construct
  source 1..80: mol_type = other DNA
tcggttatgtcaccaccacatttaagagaaaacacttccgcccgatgccagacgcctgcagggctgcacacgactggaag

SEQ ID NO: 36145 - DNA, 80 bp, synthetic construct
  source 1..80: mol_type = other DNA
tcctctgactacacccctgagcttagtcacactatgcaataaaatctggcctgctccaaattccatatgaaaaaaacagg

SEQ ID NO: 36146 - DNA, 80 bp, synthetic construct
  source 1..80: mol_type = other DNA
tctccagtctaccggggaagtccacagaagacaaagccactcaaactgccagccgtgaacccaagaaagagaccgtgtct

SEQ ID NO: 36147 - DNA, 80 bp, synthetic construct
  source 1..80: mol_type = other DNA
tcctataagcacaccccctagcttggtcacactatgcaataaattctggcccgctccaagttccatatgaaaaaaacagg

SEQ ID NO: 36148 - DNA, 80 bp, synthetic construct
  source 1..80: mol_type = other DNA
gatggaacctgggtctcaatccagacatcagaagatattaagtggtgccctcctgatcgattagtgaatctacacgactt

SEQ ID NO: 36149 - DNA, 80 bp, synthetic construct
  source 1..80: mol_type = other DNA
tcactcggatgaactagaacatcttgttgtagaggaattgatcaagaggagggaaaattgtctagatgcactggagtcca

SEQ ID NO: 36150 - DNA, 80 bp, synthetic construct
  source 1..80: mol_type = other DNA
tagcccgttcccccacattagaccaaatgggggggttttagttgagagaagcgatttgcctcctatgaaggacacaagca

SEQ ID NO: 36151 - DNA, 80 bp, synthetic construct
  source 1..80: mol_type = other DNA
ttagttgagagaagcgatttgcctcctatgaaggacacaagcaatagatcacaatcatcttacatcccgatgagatgagc

SEQ ID NO: 36152 - DNA, 80 bp, synthetic construct
  source 1..80: mol_type = other DNA
gggttggagtctggttagtttgttaatgatagatcgtgagtcccagaccaggaacacacgaactaagatactagcccagg

SEQ ID NO: 36153 - DNA, 80 bp, synthetic construct
  source 1..80: mol_type = other DNA
gatgcaattagaaaagctctatatgatgaggtagacaaagtggagaactcagagttcagagaagcgatcctcttgtctaa

SEQ ID NO: 36154 - DNA, 80 bp, synthetic construct
  source 1..80: mol_type = other DNA
gatacgccttgaaaaaaacaagattatgacgctgagcctctggttgtttgattgtttttttcatctttattgtttttttg

SEQ ID NO: 36155 - DNA, 80 bp, synthetic construct
  source 1..80: mol_type = other DNA
atggatgaagggggggaccctatcatcctctttcaatcatacctggacaatgttggagtccagatagtcagacaaatgag

SEQ ID NO: 36156 - DNA, 80 bp, synthetic construct
  source 1..80: mol_type = other DNA
gggaccctatcatcctctttcaatcatacctggacaatgttggagtccagatagtcagacaaatgagatcaggagaaaga

SEQ ID NO: 36157 - DNA, 80 bp, synthetic construct
  source 1..80: mol_type = other DNA
acaggcaacaccactgataaaatgaactttctacgcaagatagtgaaaaactgtcgggatgaggatacccggaagccctc

SEQ ID NO: 36158 - DNA, 80 bp, synthetic construct
  source 1..80: mol_type = other DNA
cagagagaaagccaaccttcgaaagctaggatggcggctcaagttgcccctggtcctccagcccttgaatggtcagccac

SEQ ID NO: 36159 - DNA, 80 bp, synthetic construct
  source 1..80: mol_type = other DNA
catgtttccagatgctaagcttgtattcaatagcctcttagaggtgaatgatctgatggcttccggaacacatccactgc

SEQ ID NO: 36160 - DNA, 80 bp, synthetic construct
  source 1..80: mol_type = other DNA
atgtagatcatctctacttgattacagctgcttgtgaactggacaccctcagaggcctgtacagaccgagactcttatac

SEQ ID NO: 36161 - DNA, 80 bp, synthetic construct
  source 1..80: mol_type = other DNA
ctccagggaggtcttcggaggacaagtcaacccagacaactggtcgagaactcaagaaggagaccacacctgcctctcac

SEQ ID NO: 36162 - DNA, 80 bp, synthetic construct
  source 1..80: mol_type = other DNA
gacgtgcacaaacaagtttcaggtgttgacctgggtctccccagctggggaaagtatgttttggtgagtgcaggggtcct

SEQ ID NO: 36163 - DNA, 80 bp, synthetic construct
  source 1..80: mol_type = other DNA
atccagatcgtctctactaaactacagctgtttgtgaactaaacactctaagaggcttgtacaggtcaagactcttatac

SEQ ID NO: 36164 - DNA, 80 bp, synthetic construct
  source 1..80: mol_type = other DNA
gatgtaccttgaaaaaaacaagatcttgacactgagcctctggttggttgattgttttttttatctttcttgtttatttg

SEQ ID NO: 36165 - DNA, 80 bp, synthetic construct
  source 1..80: mol_type = other DNA
tgtatccagctaactaatctgttgaactttgccccgacagacaatagaatctgagaagctctgaattcgacatgaaaaaa

SEQ ID NO: 36166 - DNA, 80 bp, synthetic construct
  source 1..80: mol_type = other DNA
tcctgatcgctttgatgttaataatttttctaatgacatgttgcggaagagtcaatcgaccaaagtccacacaacacaat

SEQ ID NO: 36167 - DNA, 80 bp, synthetic construct
  source 1..80: mol_type = other DNA
cttggcgggacagggaggaaggtgtcagtaactccccaaagcggaaaggttatatcttcatgggagtcatacaaaagcgg

SEQ ID NO: 36168 - DNA, 80 bp, synthetic construct
  source 1..80: mol_type = other DNA
cagggatcgataccaaaggttgcggacgggtcaagggttacttcagatgactccgtgctagggcgtggagagaggttata

SEQ ID NO: 36169 - DNA, 80 bp, synthetic construct
  source 1..80: mol_type = other DNA
gtgtgtcccctgacggccgattctccatgagtagatagagcagggcgatttgcccctcatgaaggacataagcaatagct

SEQ ID NO: 36170 - DNA, 80 bp, synthetic construct
  source 1..80: mol_type = other DNA
gatgcgccttgaaaaaaacaagatcatgacgctgagcctcggggagattagatgtcttttttattcttctagtatactgg

SEQ ID NO: 36171 - DNA, 80 bp, synthetic construct
  source 1..80: mol_type = other DNA
ttgaaaaaaacaagatcatgacgctgagcctcggggagattagatgtcttttttattcttctagtatactggttaagcgt

SEQ ID NO: 36172 - DNA, 80 bp, synthetic construct
  source 1..80: mol_type = other DNA
tctaagatcattcgacgagatatattctgggaatcgctcggtacccgggttacctcaggaggttatcggactggctttgt

SEQ ID NO: 36173 - DNA, 80 bp, synthetic construct
  source 1..80: mol_type = other DNA
atatatcctgaagactggaccagctatggaatcctgattgcacggaaaggagataagatcaccccggattctttttttga

SEQ ID NO: 36174 - DNA, 80 bp, synthetic construct
  source 1..80: mol_type = other DNA
gataaagcgttttgatgtagagaggaactgggctttaacgggagggggggaatcttcgcgggacaccactttttccgagc

SEQ ID NO: 36175 - DNA, 80 bp, synthetic construct
  source 1..80: mol_type = other DNA
gggaatcttcgcgggacaccactttttccgagcatgcgtctctagttggtcttcttttgagtctgtataggctgagcaaa

SEQ ID NO: 36176 - DNA, 80 bp, synthetic construct
  source 1..80: mol_type = other DNA
ctgtcaagaactttggaaggatccgagctcggttcccggggaccctctagagatcgaatgactcagaccccgcaaagagt

SEQ ID NO: 36177 - DNA, 80 bp, synthetic construct
  source 1..80: mol_type = other DNA
cggtagagtgtggccttgctcctctgagagggcggatctcctaagggaaatctcctggggaagaaaagtggtaggcacga

SEQ ID NO: 36178 - DNA, 80 bp, synthetic construct
  source 1..80: mol_type = other DNA
gaatatctagaatggtttctggagcggttcctcacaatcgtaaaccagctgatagcaaccttaagcctggtgagtttttt

SEQ ID NO: 36179 - DNA, 80 bp, synthetic construct
  source 1..80: mol_type = other DNA
gcggaaaggttatatcttcatgggagtcatataaaagcggaggtgagaccagactgtgaaagccggtcactccctccaag

SEQ ID NO: 36180 - DNA, 80 bp, synthetic construct
  source 1..80: mol_type = other DNA
aggtgagaccagactgtgaaagccggtcactccctccaagctttaagttttgaaggtcaccttcccttggggttggggtg

SEQ ID NO: 36181 - DNA, 80 bp, synthetic construct
  source 1..80: mol_type = other DNA
atctagatcgtctctacttgactacagttgtttatgaactggacactctcagaggcttgtacaggtcaaaactcttatac

SEQ ID NO: 36182 - DNA, 80 bp, synthetic construct
  source 1..80: mol_type = other DNA
ctgatgtggcgctggcagatgacggaacggtcaattcagatgacgaggattacttttcaggtgaaaccagaagccctgaa

SEQ ID NO: 36183 - DNA, 80 bp, synthetic construct
  source 1..80: mol_type = other DNA
ggacagagaagatatataaattgtgtatatccttcatgaaaaaaactaacactcctccttttgaaccatcccaaatatga

SEQ ID NO: 36184 - DNA, 80 bp, synthetic construct
  source 1..80: mol_type = other DNA
agattctatgatttcatgtttcagccattaaagctttatgtgcaaacatggccatcagatcttgtacaaagagacataag

SEQ ID NO: 36185 - DNA, 80 bp, synthetic construct
  source 1..80: mol_type = other DNA
tctctaagtgatagagaaaagtctcgccatataatggcggctcaggggctcttatattcgatcttattcgagaatcatga

SEQ ID NO: 36186 - DNA, 80 bp, synthetic construct
  source 1..80: mol_type = other DNA
ctgacgtagcactggcagatgatggaactgtcaactctgacgacgaggactacttttcaggtgaaaccagaagtccggag

SEQ ID NO: 36187 - DNA, 80 bp, synthetic construct
  source 1..80: mol_type = other DNA
ggatgcaggagatctacagattgcgtatatccttcatgaaaaaaactaacacccctccttttgaaccatcccaaatatga

SEQ ID NO: 36188 - DNA, 80 bp, synthetic construct
  source 1..80: mol_type = other DNA
cagttgatcagacatggtcgtgcagattcttaaaatataagaaatcttctagcagtttcagtgaccaacggtgctttcac

SEQ ID NO: 36189 - DNA, 80 bp, synthetic construct
  source 1..80: mol_type = other DNA
atctagatcatccctactagactacagttgcctgtgaaccggatactcctggaagcctgcccatgctaagactcttgtgt

SEQ ID NO: 36190 - DNA, 80 bp, synthetic construct
  source 1..80: mol_type = other DNA
gatgtatcttgaaaaaaacaagatcttaaatctgaacctttggttgtttgattgtttttctcatttttgttgtttatttg

SEQ ID NO: 36191 - DNA, 80 bp, synthetic construct
  source 1..80: mol_type = other DNA
ttcacctggatgatggaaaatcgcccaaccctggtgagatggccaaggtgggagagggcaagtgtcgagaggactttcgg

SEQ ID NO: 36192 - DNA, 80 bp, synthetic construct
  source 1..80: mol_type = other DNA
cttgctaaccgaacctctccactcagtccctctagacaataaagtccgagatgtcctaaagtcaacatgaaaaaaacagg

SEQ ID NO: 36193 - DNA, 80 bp, synthetic construct
  source 1..80: mol_type = other DNA
caacaccactgataaaatgaaccttctacgcaagatagcgaaaaaccgaagggacgaggacactcaaaaaccctctcccg

SEQ ID NO: 36194 - DNA, 80 bp, synthetic construct
  source 1..80: mol_type = other DNA
tctcagagggacagggagggaggtgtcagtcactccccaaagcgggaagatcatatcttcatgggaatcatacaagagtg

SEQ ID NO: 36195 - DNA, 80 bp, synthetic construct
  source 1..80: mol_type = other DNA
ttcatgggaatcatacaagagtgggggtgagaccagactgtgaggactggccgtcctttcaacaatccaagtcctgaaga

SEQ ID NO: 36196 - DNA, 80 bp, synthetic construct
  source 1..80: mol_type = other DNA
gagaccagactgtgaggactggccgtcctttcaacaatccaagtcctgaagatcacctccccttggggggttctttttga

SEQ ID NO: 36197 - DNA, 80 bp, synthetic construct
  source 1..80: mol_type = other DNA
aaaacctgggttcaatagtcctccttgaactccatgcaactgggtagattcaagagtcatgagattttcattaatcctct

SEQ ID NO: 36198 - DNA, 80 bp, synthetic construct
  source 1..80: mol_type = other DNA
tgatcaagcaagatcatgtagattctcataataggggagatcttctagcagtttcagtgactaacggtactttcattctc

SEQ ID NO: 36199 - DNA, 80 bp, synthetic construct
  source 1..80: mol_type = other DNA
caggaactgacaccaacagttgtagactaaccacggggtgtctcgggtgactctgtgcttgggcacagacaaaggtcatg

SEQ ID NO: 36200 - DNA, 80 bp, synthetic construct
  source 1..80: mol_type = other DNA
gtgtgttccatgatagcggactcaggatgagttaattgagagaggcagtcttcctcccgtgaaggacataagcagtagct

SEQ ID NO: 36201 - DNA, 80 bp, synthetic construct
  source 1..80: mol_type = other DNA
cagtagatcagaagaacaactggcaacactcctcatcctgagacctacttcaaaatgctcgatcctggagaggtctatga

SEQ ID NO: 36202 - DNA, 80 bp, synthetic construct
  source 1..80: mol_type = other DNA
tgtataacagacttggcccatttctattccaagtcgtcccccatagagaagctgttaaatctcacgctaggaaatagagg

SEQ ID NO: 36203 - DNA, 80 bp, synthetic construct
  source 1..80: mol_type = other DNA
aggtgggcggaatggctgcacagtccatgacttctctctggttatatggtgcccactctgaatccaacaggagccggaga

SEQ ID NO: 36204 - DNA, 80 bp, synthetic construct
  source 1..80: mol_type = other DNA
ccaagagcgagatgcagagggcccgatctctgaattaccaagatcttgtgaggggatttccagatgagatcatatccaat

SEQ ID NO: 36205 - DNA, 80 bp, synthetic construct
  source 1..80: mol_type = other DNA
attgtgaacatcaatcaattatgtacatcctccatgaaaaaaactaacacccctcctttcgaaccatctcagacatgagc

SEQ ID NO: 36206 - DNA, 80 bp, synthetic construct
  source 1..80: mol_type = other DNA
cgattcaactctctaatgattcttctctctcctccggagcccagatattcagatgacctgatatctcaattgtgtcaact

SEQ ID NO: 36207 - DNA, 80 bp, synthetic construct
  source 1..80: mol_type = other DNA
gttggaatggccaagatggagggctagagggtttacgacagaagggctggagtctggttagtttgttaatgatagatcgt

SEQ ID NO: 36208 - DNA, 80 bp, synthetic construct
  source 1..80: mol_type = other DNA
tcccctcgttgtgtttcgggggattccccatctacacgataccagacaagctcggcccctggagtcccattgatatacat

SEQ ID NO: 36209 - DNA, 80 bp, synthetic construct
  source 1..80: mol_type = other DNA
atgccttagagtcagatgacaacattcaacgactactaaaagactctttacgaaggacaagatgggtggatcaagaggtg

SEQ ID NO: 36210 - DNA, 80 bp, synthetic construct
  source 1..80: mol_type = other DNA
gtgatgtatcttgaaaaaaacaagatcttgaatctgagcctctagttgtttgattgtttttcttatttttgttgtctttt

SEQ ID NO: 36211 - DNA, 80 bp, synthetic construct
  source 1..80: mol_type = other DNA
gccctgactgccttgatgttgataatcttcctgatgacacgttgtagaagagtcaatcgatcagaacctacgcagcacaa

SEQ ID NO: 36212 - DNA, 80 bp, synthetic construct
  source 1..80: mol_type = other DNA
cacaatcatctctcgtctcagcaaagtgtgcataatcataaagtgctgggtcatccaagcttttcagtcgagaaaaaaac

SEQ ID NO: 36213 - DNA, 80 bp, synthetic construct
  source 1..80: mol_type = other DNA
tgaccctattgacccaatcgagttagaggctgaacccagaggagcttccactgtccccaacatcttgaggaactctgact

SEQ ID NO: 36214 - DNA, 80 bp, synthetic construct
  source 1..80: mol_type = other DNA
gattagtcggatgacccagacacctcagagggttggtgaggtgtggccttgctcttcagagagggcagatctacttaggg

SEQ ID NO: 36215 - DNA, 80 bp, synthetic construct
  source 1..80: mol_type = other DNA
caattaagtatgaaggtatatgtgtcccctaagagacacactgtacatagcaaataatctatagatcaagttagaaagta

SEQ ID NO: 36216 - DNA, 80 bp, synthetic construct
  source 1..80: mol_type = other DNA
gaaaacatgaaagagaattaagtatgaaggtatatgtgtcccctaagagacacactgtacatagcaaataatctatagat

SEQ ID NO: 36217 - DNA, 80 bp, synthetic construct
  source 1..80: mol_type = other DNA
aatctatagatcaaagggctacgcaacccctgaatagtaacaaaatacaaaatcactaaaaattataaaaacagaaaacc

SEQ ID NO: 36218 - DNA, 80 bp, synthetic construct
  source 1..80: mol_type = other DNA
tcagaagcatgttgattaagtgaggaccagactaatcatctggtatccaatcttagttagcatgtagctatatcaagtca

SEQ ID NO: 36219 - DNA, 80 bp, synthetic construct
  source 1..80: mol_type = other DNA
ataccttggagtcagacgacgacattcaacggttactaagagattctttgcgaaggacaagatgggtagatcaagaggtg

SEQ ID NO: 36220 - DNA, 80 bp, synthetic construct
  source 1..80: mol_type = other DNA
agtcgacttcacttgggtgatgaaaagccgtccaacctcggtgagatggccaaggtggtggaaggcaagtatagagagga

SEQ ID NO: 36221 - DNA, 80 bp, synthetic construct
  source 1..80: mol_type = other DNA
tcttggaggaacagggagaaaggtgtcggccgcttcccagagcgggaaggtcatatcttcatgggagtcatataagagtg

SEQ ID NO: 36222 - DNA, 80 bp, synthetic construct
  source 1..80: mol_type = other DNA
ccagagcgggaaggtcatatcttcatgggagtcatataagagtggaggtgagacccgactgtgagggccggccacccttt

SEQ ID NO: 36223 - DNA, 80 bp, synthetic construct
  source 1..80: mol_type = other DNA
gagacccgactgtgagggccggccaccctttttacgtctcaagctctaagggtaatctcctctctgggctggtgggaatc

SEQ ID NO: 36224 - DNA, 80 bp, synthetic construct
  source 1..80: mol_type = other DNA
catgaactgataccaaagggtgtggacaagccaagggaggattttttcttaaatgactcagtgcttgggcacagaaagag

SEQ ID NO: 36225 - DNA, 80 bp, synthetic construct
  source 1..80: mol_type = other DNA
gtcgtagtgtatcccctgatcgaggactcaacatgggctgattgagaaaggcaatccgcctccaatgaaggacacaagca

SEQ ID NO: 36226 - DNA, 80 bp, synthetic construct
  source 1..80: mol_type = other DNA
gtagctcataatcatattgcgtctcagtgaagtgtacataactataaagggctgggtcatctaagcatttcaatcgagaa

SEQ ID NO: 36227 - DNA, 80 bp, synthetic construct
  source 1..80: mol_type = other DNA
catagccgaattagctcatttctattccaagtcgtcccccatagagaagctgttgaattatacgctaggaaacagagggc

SEQ ID NO: 36228 - DNA, 80 bp, synthetic construct
  source 1..80: mol_type = other DNA
actcataaggaggtgaatgacaggctgccggaaatctatcgattacgtatatccatcatgaaaaaaactaacacccctcc

SEQ ID NO: 36229 - DNA, 80 bp, synthetic construct
  source 1..80: mol_type = other DNA
cttccggaagatcttcagaggataaatcaacccaaaccactggtcgagagcccaagaaggagactatatccactccctct

SEQ ID NO: 36230 - DNA, 80 bp, synthetic construct
  source 1..80: mol_type = other DNA
cctactaaccgaacctttacactcagtctctctagataataaaatcggagatgtcctagagtcgacatgaaaaaaacagg

SEQ ID NO: 36231 - DNA, 80 bp, synthetic construct
  source 1..80: mol_type = other DNA
gtgcttaagagttggagggaggtgtcatcctcatgtgaacggggtatttttcaatggtataatattagggcctgacggcc

SEQ ID NO: 36232 - DNA, 80 bp, synthetic construct
  source 1..80: mol_type = other DNA
gatgtgcacaaacaggtctcaggggttgacctgggcctcccgaactggtggaagtatgtgttactgagtgcgggaaccct

SEQ ID NO: 36233 - DNA, 80 bp, synthetic construct
  source 1..80: mol_type = other DNA
gagaccagactgtgaaggctggtcatcccctcgacgcttcaagttccgaagatcacctctactttgggttctctttgggg

SEQ ID NO: 36234 - DNA, 80 bp, synthetic construct
  source 1..80: mol_type = other DNA
ggaatctctgggttcgatggttctccctgaactccatgcaacagggtagatttaagagtcacgagactttcattaatcat

SEQ ID NO: 36235 - DNA, 80 bp, synthetic construct
  source 1..80: mol_type = other DNA
ccaggaactgataccaaaggttacggacgggccaagaggtgtttctgatgactccgtgattgggtacggacagaggtcat

SEQ ID NO: 36236 - DNA, 80 bp, synthetic construct
  source 1..80: mol_type = other DNA
atttacttagggagatttcttggggaagaaaagtggtaggcacgacagttcctcacccctctgagatgttggggttactt

SEQ ID NO: 36237 - DNA, 80 bp, synthetic construct
  source 1..80: mol_type = other DNA
caatgaagaggatgatctatcagtggaggctgagatcgctcaccagattgcagaaagtttctccaaaaaatataagtttc

SEQ ID NO: 36238 - DNA, 80 bp, synthetic construct
  source 1..80: mol_type = other DNA
atctaggtcatctttattagactacagctgcttgtaaaccggacattccagaaaatctgcacgtgctaggactcttgtgt

SEQ ID NO: 36239 - DNA, 80 bp, synthetic construct
  source 1..80: mol_type = other DNA
tttcaaactattccaaatatgagcaagatcttcatcaatccgagtgctatcagagccggtctggccgatcttgagatggc

SEQ ID NO: 36240 - DNA, 80 bp, synthetic construct
  source 1..80: mol_type = other DNA
caacttcacctggatgatagaaaattgtctgaccttggtgagatgtccaaggtgagggaaggcaagtatcgagaggactt

SEQ ID NO: 36241 - DNA, 80 bp, synthetic construct
  source 1..80: mol_type = other DNA
cagagagagtgccagtcctcgaaagccaggatggcggctcaaactgcctctggccttccagcccttgaacggtctgccac

SEQ ID NO: 36242 - DNA, 80 bp, synthetic construct
  source 1..80: mol_type = other DNA
aaggagagaaagacctgcggctttgtggatgaaagaggcctgtataagtctctaagaggctcatgcaaactcaagttatg

SEQ ID NO: 36243 - DNA, 80 bp, synthetic construct
  source 1..80: mol_type = other DNA
caaaagggtgtttaagagtcgaagggaggtgtcatcctcatgtaaacggggtatttttcaatggtataatattagggcct

SEQ ID NO: 36244 - DNA, 80 bp, synthetic construct
  source 1..80: mol_type = other DNA
tgatgcacccccttgcagacccgtccacggttttcaaggaaggcgatgaggcggaggactttgtagaagttcactttcca

SEQ ID NO: 36245 - DNA, 80 bp, synthetic construct
  source 1..80: mol_type = other DNA
gagggacagagatgaaggtgtcggtcaccccccaaagcgggaaattcaaatcttcatgggaatcatataaaagtggtgat

SEQ ID NO: 36246 - DNA, 80 bp, synthetic construct
  source 1..80: mol_type = other DNA
gaagctagactgtgaaggctggtcatcctttcgacacttcgagttccgaagatcacctcccctttaagtttgctttattg

SEQ ID NO: 36247 - DNA, 80 bp, synthetic construct
  source 1..80: mol_type = other DNA
gggggaatctccgggttcaagagtcctccttgaactccatgcgacagagtagattcaagagtcatgagactctcattaat

SEQ ID NO: 36248 - DNA, 80 bp, synthetic construct
  source 1..80: mol_type = other DNA
tgatcaaatcaagtcatgtagattctcataacgcgggagatcttctagcagtttcagtgcccaactgtgctttcattctc

SEQ ID NO: 36249 - DNA, 80 bp, synthetic construct
  source 1..80: mol_type = other DNA
caggaactaatactaagggttgtggacggaccaagaggtatctccgatgatcccgtgcttgggcacgggtagaggtcata

SEQ ID NO: 36250 - DNA, 80 bp, synthetic construct
  source 1..80: mol_type = other DNA
gtacgtcccacgatatcggactccacatgaaccgattgagaaaggcaatctgcctcccatgaaggacgcaagtaatagct

SEQ ID NO: 36251 - DNA, 80 bp, synthetic construct
  source 1..80: mol_type = other DNA
taacattatggaaagatttgacctcaatggacattgggaaggacttagtcaagttcaaagaccaaatatggggactgttg

SEQ ID NO: 36252 - DNA, 80 bp, synthetic construct
  source 1..80: mol_type = other DNA
ggagaatccttagatggggatttgataagtactccaagtggtatctggattcgcgattactcgcccaagaccaccccttg

SEQ ID NO: 36253 - DNA, 80 bp, synthetic construct
  source 1..80: mol_type = other DNA
ataaaagacaaggtaagtcaacttgaagagacgttcggtccctgtgcaagaaggttctttagggctctggatcaattcgc

SEQ ID NO: 36254 - DNA, 80 bp, synthetic construct
  source 1..80: mol_type = other DNA
tgggcaactggtgcccattataagcttaagcccattcttgacaatctcgaggttctcccatccctctgtcttgtagtcgg

SEQ ID NO: 36255 - DNA, 80 bp, synthetic construct
  source 1..80: mol_type = other DNA
cttgacaatctcgaggttctcccatccctctgtcttgtagtcggggacgggtcaggtgggatatcaagggcagttctcaa

SEQ ID NO: 36256 - DNA, 80 bp, synthetic construct
  source 1..80: mol_type = other DNA
aatccgagacaagggatgtcttgtgacattttcaccaatagtcgagggaagagagcatccaaggagagcaagacctgcgg

SEQ ID NO: 36257 - DNA, 80 bp, synthetic construct
  source 1..80: mol_type = other DNA
ctttgtggatgaaagaggcctgtataagtctctaagaggctcatgcaaactcaagttatgtggagttcttggacttagac

SEQ ID NO: 36258 - DNA, 80 bp, synthetic construct
  source 1..80: mol_type = other DNA
acgcttaacgacaaaaccagaaaaggaatagacacaatcatctatagaacagaaatgcaacacccctacaatggatgctg

SEQ ID NO: 36259 - DNA, 80 bp, synthetic construct
  source 1..80: mol_type = other DNA
attctctgacttcagaagtgcgaagatgacttatctgacattggtcacttatcaatcgcacatcctgctccaaaagattg

SEQ ID NO: 36260 - DNA, 80 bp, synthetic construct
  source 1..80: mol_type = other DNA
agaagaaccttcccaaacagatgagaatccgactcaggcagttgagttctttgatgagacagatcctaggaggtcacggg

SEQ ID NO: 36261 - DNA, 80 bp, synthetic construct
  source 1..80: mol_type = other DNA
gaagacaccctagactctgatgaggacattcaagggttgttgcgagatgctttacagaggactagatgggtcgaccaaga

SEQ ID NO: 36262 - DNA, 80 bp, synthetic construct
  source 1..80: mol_type = other DNA
ggtccgtcatgcggccaagactatgactggggatcacagccctagcaagaaaatgtctcggaaggccgggtgttcagagt

SEQ ID NO: 36263 - DNA, 80 bp, synthetic construct
  source 1..80: mol_type = other DNA
ggatatgctctgctcagcaagtagcaatctcgacctcttccaatcctgctccgacttcagaaatggatgtgagggcacta

SEQ ID NO: 36264 - DNA, 80 bp, synthetic construct
  source 1..80: mol_type = other DNA
cattgaatgcgacggtcattgccacctgtgcacctcacgagatgtctgtgttgggaggttatctcggggaggaattcttt

SEQ ID NO: 36265 - DNA, 80 bp, synthetic construct
  source 1..80: mol_type = other DNA
tctagaaggtttcagaaccctttgatctcaggtttaagagtggtacagtgggccacaggtgctcattacaagttgaaacc

SEQ ID NO: 36266 - DNA, 80 bp, synthetic construct
  source 1..80: mol_type = other DNA
aatccttgacaacctggaggcctacccgtctttatgtctggttgtgggtgatggatccggtggaatctccagaactgtac

SEQ ID NO: 36267 - DNA, 80 bp, synthetic construct
  source 1..80: mol_type = other DNA
taagtatgttcccagatgctaaattagtctttaacagtttgttggaggtgaatgacctcatggcctcgggaacacatccg

SEQ ID NO: 36268 - DNA, 80 bp, synthetic construct
  source 1..80: mol_type = other DNA
ttgcctccatctgcaatcgtgagtggaggtgacgatattgtgtctagagtgatagactttggatccatctgggagaagcc

SEQ ID NO: 36269 - DNA, 80 bp, synthetic construct
  source 1..80: mol_type = other DNA
gtcagacttgagaaatctatccacatggagatatttccagtcaattcaaactgtcaacaatatgtcttatgacctaattg

SEQ ID NO: 36270 - DNA, 80 bp, synthetic construct
  source 1..80: mol_type = other DNA
tttgtgatgcagaggttacagacataccctctgttaacaaaatcactttgttgatgtctgatttttcgctctcgatcaat

SEQ ID NO: 36271 - DNA, 80 bp, synthetic construct
  source 1..80: mol_type = other DNA
ggtccacttaatctaatattcaagacttatggaaccatgttggtgaacccagactacaaggctattcaacacctctcaag

SEQ ID NO: 36272 - DNA, 80 bp, synthetic construct
  source 1..80: mol_type = other DNA
agcatttccttctgtgactggttatatcactcagatgacctcctccttctcgtctgagctatatttaaagttttctaaaa

SEQ ID NO: 36273 - DNA, 80 bp, synthetic construct
  source 1..80: mol_type = other DNA
gaggcaaattcttcagagatgcagagtatctcacatcatccacattacgggaaatgagtctggtgttatttaattgcagc

SEQ ID NO: 36274 - DNA, 80 bp, synthetic construct
  source 1..80: mol_type = other DNA
agtcctaagagtgagatgcagagggctcgttcattgaattatcaagatctggtaagaggtttccccgaagaaattatatc

SEQ ID NO: 36275 - DNA, 80 bp, synthetic construct
  source 1..80: mol_type = other DNA
ggcaagggaacatttgaaagaagattcttcagggacgagagggaacttgcagagcatgaggcaatcgaatcaaccaagac

SEQ ID NO: 36276 - DNA, 80 bp, synthetic construct
  source 1..80: mol_type = other DNA
taacccttacaacgaaatgattataactctgatagatagtgaagttgagtcattccttgttcacaaaatggtggatgatc

SEQ ID NO: 36277 - DNA, 80 bp, synthetic construct
  source 1..80: mol_type = other DNA
tagagcttcaaagagggaccttggctaaaatgtccatcatcatcgccatcgtgatggtcttctctaacagggtgtttaat

SEQ ID NO: 36278 - DNA, 80 bp, synthetic construct
  source 1..80: mol_type = other DNA
gtatctaagcctttgacagatccaatgttttacccgccttcagaccccaagattttaagacacttcaatatctgctgcag

SEQ ID NO: 36279 - DNA, 80 bp, synthetic construct
  source 1..80: mol_type = other DNA
caccttgatgtatttatcaactgctctaggagatgtcttaaactttgcaaggcttcacgaattatataacaatcctataa

SEQ ID NO: 36280 - DNA, 80 bp, synthetic construct
  source 1..80: mol_type = other DNA
catactactttaagaagcaagtgatacgaggaagcatatatttgtcttggagctggtgcgatagtacttctgtctttaag

SEQ ID NO: 36281 - DNA, 80 bp, synthetic construct
  source 1..80: mol_type = other DNA
aaagtggcctgcaactcgaatctaagtttatcatcccactggatccgactaatttacaagattgttaggaccactcgact

SEQ ID NO: 36282 - DNA, 80 bp, synthetic construct
  source 1..80: mol_type = other DNA
tgcaggtagtagcaatgatctgtcaaaggaagtggagaaacacttaaaaggttacaacaggtggatcaatttcaatgaca

SEQ ID NO: 36283 - DNA, 80 bp, synthetic construct
  source 1..80: mol_type = other DNA
taagatcacgatcctccttgctggattatagctgcttgtgaggcaggacgtgtgccacttatgaaacagcaatttcccta

SEQ ID NO: 36284 - DNA, 80 bp, synthetic construct
  source 1..80: mol_type = other DNA
aggagaatgggcgtgaaaaaaacaatatctgaagtcaggatatttacctgtttggatggtcttcttttttctatgttttt

SEQ ID NO: 36285 - DNA, 80 bp, synthetic construct
  source 1..80: mol_type = other DNA
gtgaaaaaaacaatatctgaagtcaggatatttacctgtttggatggtcttcttttttctatgttttttttgttaagcgt

SEQ ID NO: 36286 - DNA, 80 bp, synthetic construct
  source 1..80: mol_type = other DNA
tgatgtggccctggcagatgatgggactgtaaactcagatgatgaggagctttactccggagggacaagaacccccgagg

SEQ ID NO: 36287 - DNA, 80 bp, synthetic construct
  source 1..80: mol_type = other DNA
ctgtgtacaccaggatcatggtcaatgggggaaaactgaaaaaatcccacatcaaaagatatgtgtcagtcagctcgaat

SEQ ID NO: 36288 - DNA, 80 bp, synthetic construct
  source 1..80: mol_type = other DNA
catcaggccagacctaactcctttgcagaattcttgaacaagacttattcgagtgatccaagatagaaggcaagaccttt

SEQ ID NO: 36289 - DNA, 80 bp, synthetic construct
  source 1..80: mol_type = other DNA
atttgtaatttgtttcatccaccatccccatatcagaggaaggggaaagaaaaaaactaacacccctctttccgctccat

SEQ ID NO: 36290 - DNA, 80 bp, synthetic construct
  source 1..80: mol_type = other DNA
cacaaccatgagcaagatctttgtcaacccgagtgcaattcgagctggcttagctgaccttgagatggcggaagagacgg

SEQ ID NO: 36291 - DNA, 80 bp, synthetic construct
  source 1..80: mol_type = other DNA
cctgccattaaagatcggaaaaaacccagcataacccttggaaaagctccggacctgaacagagcttataagtctattct

SEQ ID NO: 36292 - DNA, 80 bp, synthetic construct
  source 1..80: mol_type = other DNA
ttgacttagtcaacaaaaacatcgaggacaaccaagctcatctccaaggggagccgattgaggttgatgctcttccagag

SEQ ID NO: 36293 - DNA, 80 bp, synthetic construct
  source 1..80: mol_type = other DNA
gatatgagcaagcttcaaatcagtgaaaggaggcctgctcagttcactgacaacacaggcgggaaagaagaaggaagtga

SEQ ID NO: 36294 - DNA, 80 bp, synthetic construct
  source 1..80: mol_type = other DNA
tgaggacttttacatggctgaaagcgaggacccttatattcctctacaatcctatcttgagggtgttgggatccaactcg

SEQ ID NO: 36295 - DNA, 80 bp, synthetic construct
  source 1..80: mol_type = other DNA
tgagacagatgaagacaggagaaagattcttcaagatatggtctcaggcagtggaggagatcatttcctatgtgaccgtt

SEQ ID NO: 36296 - DNA, 80 bp, synthetic construct
  source 1..80: mol_type = other DNA
cacttccctatgccgttgggaaaatccactgaagataagtccacccaaactcccgaggagaagtccaaaccaagccctca

SEQ ID NO: 36297 - DNA, 80 bp, synthetic construct
  source 1..80: mol_type = other DNA
gcaggcagttactaagaaggagagtcaatcatccaagatcaagacgatctctcaggaatcctcaggtccacctgcgctag

SEQ ID NO: 36298 - DNA, 80 bp, synthetic construct
  source 1..80: mol_type = other DNA
aatggtccaccaccaatgatgaagaaaatgcgtccgttgaggcagaaatagcgcatcagattgcagagagcttctcaaag

SEQ ID NO: 36299 - DNA, 80 bp, synthetic construct
  source 1..80: mol_type = other DNA
aagtacaaattcccatccagatcctcgggaatattcctgtttaacttcgagcagttgaagatgaatcttgatgacatcgt

SEQ ID NO: 36300 - DNA, 80 bp, synthetic construct
  source 1..80: mol_type = other DNA
gagagaggccaaaaagattcctggggtagtgcgcctggcacaggatggattcaggctccctctaagatgcatattgggag

SEQ ID NO: 36301 - DNA, 80 bp, synthetic construct
  source 1..80: mol_type = other DNA
gagtaggttcggtcaattcaaagaagttccaacttttggtcaattcagacaaattgggcaagataatgcaggacgatctc

SEQ ID NO: 36302 - DNA, 80 bp, synthetic construct
  source 1..80: mol_type = other DNA
gtccggaataaatgctgctaggttggatcctgatgatgtgtgttcttatctggctgcagctatggctttgtttgagggga

SEQ ID NO: 36303 - DNA, 80 bp, synthetic construct
  source 1..80: mol_type = other DNA
aatcggtatttggcatattgatcctccccgtcttgagactttataatcatcatgagctagatattgctctgtctagccca

SEQ ID NO: 36304 - DNA, 80 bp, synthetic construct
  source 1..80: mol_type = other DNA
tgaaaaaaacatgtaacaccactaacgcgatgaactttctccgcaagatagtgagaggttgcagggatgaggaggatcag

SEQ ID NO: 36305 - DNA, 80 bp, synthetic construct
  source 1..80: mol_type = other DNA
aagcccgctctggtgtctgctcctccagatgatgatgacctgtggctccctcctccagagtatgtccccctgacagagat

SEQ ID NO: 36306 - DNA, 80 bp, synthetic construct
  source 1..80: mol_type = other DNA
tacaggcagaaagaacatgaggaacttctgtgttaacggagaggtaaaggtgtgcagccccaatggttactcatttagaa

SEQ ID NO: 36307 - DNA, 80 bp, synthetic construct
  source 1..80: mol_type = other DNA
tcttgaggcatatcctcaggtcatttgacggggtatactctggaaatcagaggatgagagggttagtcaaagttgttatt

SEQ ID NO: 36308 - DNA, 80 bp, synthetic construct
  source 1..80: mol_type = other DNA
ggtctggctctctcggggggaccgattccagagggaatgaactgggtttacaaggtaagacgcaccctggtgtttcaatg

SEQ ID NO: 36309 - DNA, 80 bp, synthetic construct
  source 1..80: mol_type = other DNA
gggaccgattccagagggaatgaactgggtttacaaggtaagacgcaccctggtgtttcaatgggcagagtcccgtggtc

SEQ ID NO: 36310 - DNA, 80 bp, synthetic construct
  source 1..80: mol_type = other DNA
ggcagagtcccgtggtcccctagatggggaagagttggagtattcccaagagattacctgggacgatgattctgagtttg

SEQ ID NO: 36311 - DNA, 80 bp, synthetic construct
  source 1..80: mol_type = other DNA
taggattgcaaatcagggtgagtgctagacagtgccacattcaagggaggatttggtgcattaacatgaactcaagagcc

SEQ ID NO: 36312 - DNA, 80 bp, synthetic construct
  source 1..80: mol_type = other DNA
tgtcaactatggtccgacatggctctaaagactcagcagtcggatgaggacaggaacacttccctgttgctagaataacc

SEQ ID NO: 36313 - DNA, 80 bp, synthetic construct
  source 1..80: mol_type = other DNA
cttcctctccacagtcactcactcgtttacctctgcacaaaatatatacacaatttgtcttctaccttttatgagcaata

SEQ ID NO: 36314 - DNA, 80 bp, synthetic construct
  source 1..80: mol_type = other DNA
tttgtcctgacgattgggagagctacgggattctcattgctaggaaaggggacaaaataaccccagccaatttagtcaat

SEQ ID NO: 36315 - DNA, 80 bp, synthetic construct
  source 1..80: mol_type = other DNA
gaacaaaaccatgttatggtgccgcacaactgctgcattttcttgaaacacccgactgaacaccttcacatgtgaaacct

SEQ ID NO: 36316 - DNA, 80 bp, synthetic construct
  source 1..80: mol_type = other DNA
ctgtaatgtgaaaaaaacatttaacatccctcaaagatctcaggaatcatgccatttcaaactgttttgtctgctcttct

SEQ ID NO: 36317 - DNA, 80 bp, synthetic construct
  source 1..80: mol_type = other DNA
ttctgccctcaccctctgcgttggcaagtttcccatctacacaatccctgataagttaggcccgtggagccccattgaca

SEQ ID NO: 36318 - DNA, 80 bp, synthetic construct
  source 1..80: mol_type = other DNA
ttcatcatctcagctgtccgaacaatattattgtagaggatgagggatgtacgaccctaacagtattctcgtacatggag

SEQ ID NO: 36319 - DNA, 80 bp, synthetic construct
  source 1..80: mol_type = other DNA
ttgaaagtcggatatataacgaccataaaagtgaacggatttacatgtactggggtggttacagaggcagagacttatac

SEQ ID NO: 36320 - DNA, 80 bp, synthetic construct
  source 1..80: mol_type = other DNA
taactttgttggttatgtaactaccacgtttaagagaaaacatttccgtcccagccccaatgcatgcagagatgcatata

SEQ ID NO: 36321 - DNA, 80 bp, synthetic construct
  source 1..80: mol_type = other DNA
gctggaagactgcaggtgatccgagatatgaggagtccttacacaatccctacccagactctcattggttaagaacagtt

SEQ ID NO: 36322 - DNA, 80 bp, synthetic construct
  source 1..80: mol_type = other DNA
accaccaccaaagagtccctcttgataatctcccctagtgtggccaatatggatgcgtatgacaagactctttattctaa

SEQ ID NO: 36323 - DNA, 80 bp, synthetic construct
  source 1..80: mol_type = other DNA
aatatttttaaatgggaaatgctcaggagtctctcaagtctctcttttctgctcaaccaatcatgattacacaatctgga

SEQ ID NO: 36324 - DNA, 80 bp, synthetic construct
  source 1..80: mol_type = other DNA
tgcccgagaatcccaacccgggtgtatcttgtgacatattcgcaaccagtaaggggaagaaggctacaaaagatggcaaa

SEQ ID NO: 36325 - DNA, 80 bp, synthetic construct
  source 1..80: mol_type = other DNA
attcagagaacagatgtagaaggcaattgggcactggcaggaggccaagacgtaataaaagatccgaccccagccgagca

SEQ ID NO: 36326 - DNA, 80 bp, synthetic construct
  source 1..80: mol_type = other DNA
ctgtgcggatttgtcgatgagagaggactctacaaatcattaaagggggcttgtaaactgaaactgtgtggaatctctgg

SEQ ID NO: 36327 - DNA, 80 bp, synthetic construct
  source 1..80: mol_type = other DNA
tatgagattgatggatgggtcatgggtgtctattcaaaatcacgatgaggcaaaatggtgctcccccgatcaacttgtga

SEQ ID NO: 36328 - DNA, 80 bp, synthetic construct
  source 1..80: mol_type = other DNA
acatccatgactttcactcagatgaggtagaacacctcattgcggaggagcttgttaaaaagagagaggagtgcttagat

SEQ ID NO: 36329 - DNA, 80 bp, synthetic construct
  source 1..80: mol_type = other DNA
gctttagagtcaatcatgactactaagtcaataagttttcgtcgtcttagtcatttaagaaagctagtccctgggttcgg

SEQ ID NO: 36330 - DNA, 80 bp, synthetic construct
  source 1..80: mol_type = other DNA
gaaagcttacaccattatcaacaaaacactcatggaagctgatgctcattacaagtctatcagggaatggactgatgtga

SEQ ID NO: 36331 - DNA, 80 bp, synthetic construct
  source 1..80: mol_type = other DNA
tcccctccaagggatgtctgatggcaggaggccgatgttaccctcatcacaatggagttttcttcaacggtataatattg

SEQ ID NO: 36332 - DNA, 80 bp, synthetic construct
  source 1..80: mol_type = other DNA
agtccagatgggcatgtgttaatcccagagatgcagtctgcaatgcttcaacagcatatagagttgttagagtcatcagt

SEQ ID NO: 36333 - DNA, 80 bp, synthetic construct
  source 1..80: mol_type = other DNA
gatacctctcatgcatccccttgctgacccatccactatctttaagaaggatgacgatgctgaggattttgttgaagtcc

SEQ ID NO: 36334 - DNA, 80 bp, synthetic construct
  source 1..80: mol_type = other DNA
accttccggacgtacaaaagcagatctcggggattgacctgggtcttcccgagtggaagaggtatttcctgatcgtggtg

SEQ ID NO: 36335 - DNA, 80 bp, synthetic construct
  source 1..80: mol_type = other DNA
tcggctttggctttccttgccttgatgatatttattgccgcctgctgtagaagagttaaacgtaagaagagagccaaacc

SEQ ID NO: 36336 - DNA, 80 bp, synthetic construct
  source 1..80: mol_type = other DNA
tgcatctttggtgggacttctcctctgtctttacagactaagcaaagtatcaggacagaacacaggtaattacaagacta

SEQ ID NO: 36337 - DNA, 80 bp, synthetic construct
  source 1..80: mol_type = other DNA
caacccggcggaattaatccgaaaagtgtctgtcacttcccaaagtgggagaccgattccttcatgggagtcttataaag

SEQ ID NO: 36338 - DNA, 80 bp, synthetic construct
  source 1..80: mol_type = other DNA
tggagactgggggtcagtcttaagtcagacttgcttgtctaatggaccaaatacccgacaacctattctcacatagacca

SEQ ID NO: 36339 - DNA, 80 bp, synthetic construct
  source 1..80: mol_type = other DNA
taaatcttctcaatcataaaaggaaaccccttccaagctattaataatcggaataggaggaggatctcgcctttccatca

SEQ ID NO: 36340 - DNA, 80 bp, synthetic construct
  source 1..80: mol_type = other DNA
cataattctggactgccagatcggatccgcttgagaataccggtacacagggtcttgcaatagttatatcaattattggt

SEQ ID NO: 36341 - DNA, 80 bp, synthetic construct
  source 1..80: mol_type = other DNA
gcttcagtcaatctgggccgcattcaatgaaccattcaagtgggagaggatgcaatagacttaccaaatcatatatacaa

SEQ ID NO: 36342 - DNA, 80 bp, synthetic construct
  source 1..80: mol_type = other DNA
tgtaaattcgtcaacattctccagaggacagtcgatctttatagacaagattatgagttctttgatcccaaaagactaat

SEQ ID NO: 36343 - DNA, 80 bp, synthetic construct
  source 1..80: mol_type = other DNA
cagatagatgatgctcagctattttattaactaactgtatatacggacaatgggtcaattcatctaagttgtatcatcat

SEQ ID NO: 36344 - DNA, 80 bp, synthetic construct
  source 1..80: mol_type = other DNA
gaaaaaaacgtctcgtcagaaaggaacaacacctctcttcagagagatcacttcaagatgattgatccccttgaggttta

SEQ ID NO: 36345 - DNA, 80 bp, synthetic construct
  source 1..80: mol_type = other DNA
tgacgaccctgtggacccagtcgaaccggagatagatgcaagaagcaactcagtagtgcctaatattctcaggaattcgg

SEQ ID NO: 36346 - DNA, 80 bp, synthetic construct
  source 1..80: mol_type = other DNA
attacaaccttaattctcccctgatagaggacccttcaaagcttatgttggattggctaataacaggaaataagcctgct

SEQ ID NO: 36347 - DNA, 80 bp, synthetic construct
  source 1..80: mol_type = other DNA
acgtggctgacagaatggaacaaatcttcgagacagccccgtttgtcaaaattgtagagcatcacactttgatgactact

SEQ ID NO: 36348 - DNA, 80 bp, synthetic construct
  source 1..80: mol_type = other DNA
cgattgaatctaactgacaactctttgagatcgtataaagtcttgaagagttatttcaagaaattggatgtcggatcttt

SEQ ID NO: 36349 - DNA, 80 bp, synthetic construct
  source 1..80: mol_type = other DNA
acgggtaggaggtttaggcgcacaatccatgatgtccctatggctccatggggcccactctgagtccaccagaagtcgaa

SEQ ID NO: 36350 - DNA, 80 bp, synthetic construct
  source 1..80: mol_type = other DNA
agtgcctctctgatctggctctattctatcaaagatcggcgcccattgaaaaattactgaattataccttagaaaataga

SEQ ID NO: 36351 - DNA, 80 bp, synthetic construct
  source 1..80: mol_type = other DNA
gggcttgcaattccaacagatggagttctctccagtttgaaaaaggtcaattatgatagagcattcgggcgatatctggg

SEQ ID NO: 36352 - DNA, 80 bp, synthetic construct
  source 1..80: mol_type = other DNA
taatttatactcatcttacttgtttttccatgtcataatcctgtatatgaacgcgttggactgggaagaggagaagacaa

SEQ ID NO: 36353 - DNA, 80 bp, synthetic construct
  source 1..80: mol_type = other DNA
ttctggccttatggaaggacctaaattctgtagacattaagaaagatcaggtaaagttcagagatcaaatatggggatct

SEQ ID NO: 36354 - DNA, 80 bp, synthetic construct
  source 1..80: mol_type = other DNA
cttttggtaactaaagactttgtgtattctcagagtgccaactgtctgtttgacaggaactacactctcatgttgaaaga

SEQ ID NO: 36355 - DNA, 80 bp, synthetic construct
  source 1..80: mol_type = other DNA
cctgtttctgtctagattcaactcccttctgattttactctctccccctgaacccagatactcagaagacctaatatccc

SEQ ID NO: 36356 - DNA, 80 bp, synthetic construct
  source 1..80: mol_type = other DNA
agctttgccagctctacattgcaggagacaatgtcctgtcaacatgcggcaattccgggtatgacgtcatcaagatgctg

SEQ ID NO: 36357 - DNA, 80 bp, synthetic construct
  source 1..80: mol_type = other DNA
gaaccatacgtagtaaacagtttagtgcagagggctgaaggattcagaccgatgattcattccctaggggactttcctac

SEQ ID NO: 36358 - DNA, 80 bp, synthetic construct
  source 1..80: mol_type = other DNA
cacaagatgtgcgccaactggagtacaattcccaactttaggttcttggctgggacatatgacatgttcttctctagaat

SEQ ID NO: 36359 - DNA, 80 bp, synthetic construct
  source 1..80: mol_type = other DNA
tttcatcaaggacaaagtgagccagcttgaaggaacctttggaccctgtgcaagaaactttttctttgttttggatcaac

SEQ ID NO: 36360 - DNA, 80 bp, synthetic construct
  source 1..80: mol_type = other DNA
tcgataacattcatgatttagtgttcgtgtatggttgttacagacactggggccatccctacatagactatcggaaaggt

SEQ ID NO: 36361 - DNA, 80 bp, synthetic construct
  source 1..80: mol_type = other DNA
ttatccaagttatacgatcaagtccatgttaagaaggtcatcgatggagattaccaggagtgcttggcgagtgacctggc

SEQ ID NO: 36362 - DNA, 80 bp, synthetic construct
  source 1..80: mol_type = other DNA
caaacggatcctcaggtggggttttgacaaatactccaaatggtatctggaccctaaactgttagataaagaccatcctt

SEQ ID NO: 36363 - DNA, 80 bp, synthetic construct
  source 1..80: mol_type = other DNA
tgatcccctatatccaaacacaaacttggcctccaaaacacatagtggacatagtggggaacacctggcacaagctccct

SEQ ID NO: 36364 - DNA, 80 bp, synthetic construct
  source 1..80: mol_type = other DNA
ataacccaaatttttgagatacctgagtctatggatccatctgagatcttagatgataaatctcactctttcactagaac

SEQ ID NO: 36365 - DNA, 80 bp, synthetic construct
  source 1..80: mol_type = other DNA
caagttggcttcttggctatccgatcaccgaggaggccctgtccccagtgagaaagtcataattacagcgctctccaggc

SEQ ID NO: 36366 - DNA, 80 bp, synthetic construct
  source 1..80: mol_type = other DNA
ctcctgtcaatcccagggagttcttaaaatctattgatctgggaggtctgccggatgatgatcttataatcggcttgaaa

SEQ ID NO: 36367 - DNA, 80 bp, synthetic construct
  source 1..80: mol_type = other DNA
ccaaaggaaagggaattgaagatagaagggaggttttttgcgctgatgtcatggaatttgaggctctactttgtgataac

SEQ ID NO: 36368 - DNA, 80 bp, synthetic construct
  source 1..80: mol_type = other DNA
cgaaaagctgttggcgaactacatcttacccctttttgatgccttaactatgaccgacaacttgaacaaagtgtttaaaa

SEQ ID NO: 36369 - DNA, 80 bp, synthetic construct
  source 1..80: mol_type = other DNA
agagcatctatactctgccattcgagtcgggacagtagtgactgcatatgaagattgttcagggctagtctctttcacgg

SEQ ID NO: 36370 - DNA, 80 bp, synthetic construct
  source 1..80: mol_type = other DNA
agctgatcgacagagtcacgggacaaggtctgcaagattattcgagggtgacatatgctttccacctagactacgaaaag

SEQ ID NO: 36371 - DNA, 80 bp, synthetic construct
  source 1..80: mol_type = other DNA
tggaacaatcaccagaggctagagtctactaaagatgtattttctgtactagattatgtttttgggttaaaaaaggtttt

SEQ ID NO: 36372 - DNA, 80 bp, synthetic construct
  source 1..80: mol_type = other DNA
ttccaggacccatgagttctttcagaagtcatggatatattactctgacaggtcagatctcataggactgtgggaagatc

SEQ ID NO: 36373 - DNA, 80 bp, synthetic construct
  source 1..80: mol_type = other DNA
aaatctactgcttagacatgtcagatggtcctacctgttggaatggtcaggatggaggactcgaggggttgaggcagaaa

SEQ ID NO: 36374 - DNA, 80 bp, synthetic construct
  source 1..80: mol_type = other DNA
ggttggagtctagtgagcctcttaatgatcgacagagaatctcaaaccaggaatacaagaaccaagattctagcgcaggg

SEQ ID NO: 36375 - DNA, 80 bp, synthetic construct
  source 1..80: mol_type = other DNA
agacaaccaagtcttgtgcccaacatatatgctatcctccgggttgacccaagagggactcatatatgaattggatagca

SEQ ID NO: 36376 - DNA, 80 bp, synthetic construct
  source 1..80: mol_type = other DNA
tctcgaggaatgcactgtcgatatatcgggctattgaggaaggggcatccaaattggggcttattataaagaaagaggag

SEQ ID NO: 36377 - DNA, 80 bp, synthetic construct
  source 1..80: mol_type = other DNA
acaatgtgcagctatgacttcctcatatatggaaaaacaccgttattcagaggcaacatactagtccctgagtctaagag

SEQ ID NO: 36378 - DNA, 80 bp, synthetic construct
  source 1..80: mol_type = other DNA
atgggccagggtgtcgtgcatctcaaatgatcagattgttaatcttgcgaacatcatgtctaccgtttctaccaatgcac

SEQ ID NO: 36379 - DNA, 80 bp, synthetic construct
  source 1..80: mol_type = other DNA
tgactgttgcacagcactcacaatctctgataaagcctatgagggacttcttgttgatggcagtccaggcggtatttcac

SEQ ID NO: 36380 - DNA, 80 bp, synthetic construct
  source 1..80: mol_type = other DNA
acagaattgtcttcaaagtccataatcagttagtgtctgtaaagccagaagtgattgtagatcagtatgagtataaatac

SEQ ID NO: 36381 - DNA, 80 bp, synthetic construct
  source 1..80: mol_type = other DNA
ggttcatcagacagatcaacttgacggcgaaggaggccatactgtatttctttcataagaactttgaagaagagatcaag

SEQ ID NO: 36382 - DNA, 80 bp, synthetic construct
  source 1..80: mol_type = other DNA
tatttgctctttagtcccatcttaaaagacagagtttataagatactcagtgcagagggggataactttctacttgcgat

SEQ ID NO: 36383 - DNA, 80 bp, synthetic construct
  source 1..80: mol_type = other DNA
gtcaaggataatttacttggacccgtcattggggggagtctctgggatgtccttaggtcgtttccacatccgtcagttct

SEQ ID NO: 36384 - DNA, 80 bp, synthetic construct
  source 1..80: mol_type = other DNA
tgggatgtccttaggtcgtttccacatccgtcagttctccgatcccgtgtcagaggggttatccttctggaaagagatct

SEQ ID NO: 36385 - DNA, 80 bp, synthetic construct
  source 1..80: mol_type = other DNA
ccgatcccgtgtcagaggggttatccttctggaaagagatctggtccagctcatctgagtcgtggattcactccttgtgt

SEQ ID NO: 36386 - DNA, 80 bp, synthetic construct
  source 1..80: mol_type = other DNA
caagaagcaggcaacccggacttgggtgatagaagcttggaaagtttcactcgtcttctcgaggatccgacaactctcaa

SEQ ID NO: 36387 - DNA, 80 bp, synthetic construct
  source 1..80: mol_type = other DNA
tataagaggaggagcaagtccaaccattctgcttaaggaggccatacggaaagccttgtatgatgaggtggacaaggtcg

SEQ ID NO: 36388 - DNA, 80 bp, synthetic construct
  source 1..80: mol_type = other DNA
agaactctgagttcagagaggctatattgttgtctaaaacccatcgggacaactttatcctgttcctgaaatctattgag

SEQ ID NO: 36389 - DNA, 80 bp, synthetic construct
  source 1..80: mol_type = other DNA
cctctcttcccaagattcctcagtgaattgtttagctcgtcctttctcggaatacctgagtctattatagggttgatcca

SEQ ID NO: 36390 - DNA, 80 bp, synthetic construct
  source 1..80: mol_type = other DNA
aaactctcgaacaattcgacggcaatttagaagaagcctctccaggaccttagaggagtccttcttcaactcagaaatcc

SEQ ID NO: 36391 - DNA, 80 bp, synthetic construct
  source 1..80: mol_type = other DNA
atgggatcaacagaatgactcaggtgccccagagggtcgggagggtgtggaactgctcatctgagagggctgatctgttg

SEQ ID NO: 36392 - DNA, 80 bp, synthetic construct
  source 1..80: mol_type = other DNA
agagagatctcttgggggagaaaggtggttgggaccactgttcctcatccaggagagatgttggtgttgttgcctaagtc

SEQ ID NO: 36393 - DNA, 80 bp, synthetic construct
  source 1..80: mol_type = other DNA
agaatgttcgagccagggcaagagacagctgtcccacactcttacttcatacatttcaggtcactaggcctaagtggaaa

SEQ ID NO: 36394 - DNA, 80 bp, synthetic construct
  source 1..80: mol_type = other DNA
atctgtctcctgtgtttgtaagcagacgggggaggacagtcctagaatatctgtttccgtgttgccatcctttgatcagt

SEQ ID NO: 36395 - DNA, 80 bp, synthetic construct
  source 1..80: mol_type = other DNA
cgtttttctctcgaggcccgttaaaaggatatctagggtcatcaacatccatgtcaactcaactgttccacgcttgggag

SEQ ID NO: 36396 - DNA, 80 bp, synthetic construct
  source 1..80: mol_type = other DNA
aaggtaaccaacgtccatgttgtcaagagggcgttatccctcaaggagtccatcaactggttcattgcgagggactcaaa

SEQ ID NO: 36397 - DNA, 80 bp, synthetic construct
  source 1..80: mol_type = other DNA
tctggcacagacactgatcaaaaacatcacttccttgacaggtccacagttccccctcgaggagacccctgtgtttaaga

SEQ ID NO: 36398 - DNA, 80 bp, synthetic construct
  source 1..80: mol_type = other DNA
ggaccggatcggcactccatcgattcaagtcagctaggtacagtgaagggggttactcctctatctgtcccaacctattg

SEQ ID NO: 36399 - DNA, 80 bp, synthetic construct
  source 1..80: mol_type = other DNA
tctcatatttcagttagcacagacaccatgtcagatttgacacaagatgggaagaacttcgactttatgtttcagccttt

SEQ ID NO: 36400 - DNA, 80 bp, synthetic construct
  source 1..80: mol_type = other DNA
aatgctatacgcacaaacctggacctctgagcttgtgcagaaagacgttagattgagggactcaacatttcattggcatc

SEQ ID NO: 36401 - DNA, 80 bp, synthetic construct
  source 1..80: mol_type = other DNA
tcagatgtctcaagtgcatccgaccgatagatgacataacccttgatgcacctcaagtctttatattcccggatgtctct

SEQ ID NO: 36402 - DNA, 80 bp, synthetic construct
  source 1..80: mol_type = other DNA
aaaagaatatctagaatggtgtctggggcagtgccgcaatttcagaagcttccggatatcaacttaaaacccggcaagtt

SEQ ID NO: 36403 - DNA, 80 bp, synthetic construct
  source 1..80: mol_type = other DNA
tgaggctcttaacagtaaagacaaatctagacatatagggactgctcaagggctcttgtattccatcctggttgcaattc

SEQ ID NO: 36404 - DNA, 80 bp, synthetic construct
  source 1..80: mol_type = other DNA
atctccttactcgtcgaatgcagtaggacatgtatttaatctcatccattttgtcggaagttacatgggtcaagtcaggt

SEQ ID NO: 36405 - DNA, 80 bp, synthetic construct
  source 1..80: mol_type = other DNA
atgactccggctacaacgatgccacaatttttcccgtgaacatatatagtaagatctctcccagggattatttgagagga

SEQ ID NO: 36406 - DNA, 80 bp, synthetic construct
  source 1..80: mol_type = other DNA
ttatcgagaggtattctaatcggatcctctatatgtttcctgacgagaatgaccaatatcaacataaacagacctctaga

SEQ ID NO: 36407 - DNA, 80 bp, synthetic construct
  source 1..80: mol_type = other DNA
gttaatatccggagttatatcctacatcttgttgaggctagacaatcatccctcattatatgtcatgttaagggaaccct

SEQ ID NO: 36408 - DNA, 80 bp, synthetic construct
  source 1..80: mol_type = other DNA
ctcttcgatctgagatattctcaatccctcagaagatccccgcagcttacccaacaacaatgaaagaaggcaatagatcc

SEQ ID NO: 36409 - DNA, 80 bp, synthetic construct
  source 1..80: mol_type = other DNA
gtcttatgttatctacagcatgtgcttcgttatgagagggatgtgattacagcctcccctgaaaacgattggctctggat

SEQ ID NO: 36410 - DNA, 80 bp, synthetic construct
  source 1..80: mol_type = other DNA
tcatgagacaggtcttgggtggtcacggagaagatactattgattcagatgacgagatattgtctcttctaaaggaatcc

SEQ ID NO: 36411 - DNA, 80 bp, synthetic construct
  source 1..80: mol_type = other DNA
gctgggctaactcgagcccaatcttcaaaaaggtagcatgcaactcttctatcagtctatcctctcactggatcaggttg

SEQ ID NO: 36412 - DNA, 80 bp, synthetic construct
  source 1..80: mol_type = other DNA
cttacaacaagtggatcaacataagggacgtacgatctagaacatctatcttagactactgttgtctctaatcaaatcaa

SEQ ID NO: 36413 - DNA, 80 bp, synthetic construct
  source 1..80: mol_type = other DNA
tataaatagactaaaaaagcatttttgaaaaaaacagataacagataccttgggcattgtcctgtgattgtttttaattt

SEQ ID NO: 36414 - DNA, 80 bp, synthetic construct
  source 1..80: mol_type = other DNA
tcatcaggctagacctaactcttttgctgaattcttaaacaaagtatatgcagatggatcataacttgttggcctctcga

SEQ ID NO: 36415 - DNA, 80 bp, synthetic construct
  source 1..80: mol_type = other DNA
aaaatgataatctacgggtagatgaggttgtgagacagatctaaaagaaaaaaacttaacaccactcttcaattcgtggt

SEQ ID NO: 36416 - DNA, 80 bp, synthetic construct
  source 1..80: mol_type = other DNA
gtcaaaatgagcaaggaccttgtgcatcccagtcttatcaggtcagggatagtagaattggaaatggcagaagaaaccat

SEQ ID NO: 36417 - DNA, 80 bp, synthetic construct
  source 1..80: mol_type = other DNA
ggatctgatcaatagaaccatagaaagcaatcaggctcaccttcagggcgagccattttatgttgattctttgccagaaa

SEQ ID NO: 36418 - DNA, 80 bp, synthetic construct
  source 1..80: mol_type = other DNA
atgagcagattgaggataggagagaaatcgggtcagaccaagacagaaggagatgagaaggatgaggacagctctgagga

SEQ ID NO: 36419 - DNA, 80 bp, synthetic construct
  source 1..80: mol_type = other DNA
agatgactatttatctggggaacaagaccccttagttccctttcagaatttcctcgacgaaattggagccaaagcggtca

SEQ ID NO: 36420 - DNA, 80 bp, synthetic construct
  source 1..80: mol_type = other DNA
catcatgattcccaggccgaggaaccttaagagcattcagattcaaactgagctaactgttccatctagttcagacaatg

SEQ ID NO: 36421 - DNA, 80 bp, synthetic construct
  source 1..80: mol_type = other DNA
agggtctgcgagatccccggtgtatgcatgagcaaaaggataagaaaggccacactactgatcaagatggggtctcagat

SEQ ID NO: 36422 - DNA, 80 bp, synthetic construct
  source 1..80: mol_type = other DNA
attgagtcagctcctgacaaggaagagattcgtgatatagagggagaagttgcccatcaggtcgcggaaagcttttcaaa

SEQ ID NO: 36423 - DNA, 80 bp, synthetic construct
  source 1..80: mol_type = other DNA
aacagttacatggcccggcttgaggatgcagaatagaagctgtccggactagtgtagtccagtcttgaaatgaaaaaaac

SEQ ID NO: 36424 - DNA, 80 bp, synthetic construct
  source 1..80: mol_type = other DNA
tcattttattcactaaatattccctgggagaatttcccttgtacacaattccggaaaagatagagaaatggacccctata

SEQ ID NO: 36425 - DNA, 80 bp, synthetic construct
  source 1..80: mol_type = other DNA
gacatgatccacctaagttgccctaacaacctgctgtctcaagaagagggctgcaatgcagagacgcccttcacttactt

SEQ ID NO: 36426 - DNA, 80 bp, synthetic construct
  source 1..80: mol_type = other DNA
ttgccttctaaagggtgtctaaaggtaggacagcaatgcatggaccctgtcaaaggagtcttcttcaacggaattatcaa

SEQ ID NO: 36427 - DNA, 80 bp, synthetic construct
  source 1..80: mol_type = other DNA
gggtcctgatggccagatactaattccagagatgcaatccgagcagctcaaacagcatatggacttgttaaaagcagctg

SEQ ID NO: 36428 - DNA, 80 bp, synthetic construct
  source 1..80: mol_type = other DNA
tgtttcctcttcgccaccctttaatcgacagaggagcggtatttaaaaaggacggagatgcagatgattttgtggacctc

SEQ ID NO: 36429 - DNA, 80 bp, synthetic construct
  source 1..80: mol_type = other DNA
cacatgcctgacgttcacaaatccgtgtcagatgttgatctgggcttgcctcactggaggctctggctgatgatcggggc

SEQ ID NO: 36430 - DNA, 80 bp, synthetic construct
  source 1..80: mol_type = other DNA
cggcagtagtggcatttatggtcctaatctgcctgctccgtgtatgttgtaaaagagtgggaagaagaagatcaccacat

SEQ ID NO: 36431 - DNA, 80 bp, synthetic construct
  source 1..80: mol_type = other DNA
gggctccctggtacatgatacttctatcagattgcctgatacatagctcacaacctggttacctgcctcggcacgataac

SEQ ID NO: 36432 - DNA, 80 bp, synthetic construct
  source 1..80: mol_type = other DNA
aatcaatcacatggtgtcaagtcttcgttcataccctccactgtataatgattcatggagggctgcttgtcaatcgggga

SEQ ID NO: 36433 - DNA, 80 bp, synthetic construct
  source 1..80: mol_type = other DNA
tggtgttctctcatgcactccgttacccatgatttagaacccttccttcctcatcttctcactatctctgaatacaatca

SEQ ID NO: 36434 - DNA, 80 bp, synthetic construct
  source 1..80: mol_type = other DNA
atagacgactgggtcttcgggttcctataaagagttgccttctaacatggggtggttcaaatagtattctattgagcctt

SEQ ID NO: 36435 - DNA, 80 bp, synthetic construct
  source 1..80: mol_type = other DNA
tgtctcattgttctgtataataacaggacgcaatattatgtctgtttgtatcatagagttttgatttgttatattggagc

SEQ ID NO: 36436 - DNA, 80 bp, synthetic construct
  source 1..80: mol_type = other DNA
cctagactgtcccgtatgagattatcaatgtgaaaaaaactgcccctaattcaaaatctacacttcaacacccctcctat

SEQ ID NO: 36437 - DNA, 80 bp, synthetic construct
  source 1..80: mol_type = other DNA
ttcgtctacaatcatgatggatgtcacggaggtgtatgacgacccgattgaccctgtcgaaccagagggagagtggaact

SEQ ID NO: 36438 - DNA, 80 bp, synthetic construct
  source 1..80: mol_type = other DNA
aatggctaacatctgggaacagaccctcgagaatgaacgtcacagagaacacggctaggtcttacaaagtcttgagagca

SEQ ID NO: 36439 - DNA, 80 bp, synthetic construct
  source 1..80: mol_type = other DNA
tttttcaaaggaatggatgttgcaacagtaaaaataggtggtgtaggtgcccaggcaatgatggggttgtgggtcttggg

SEQ ID NO: 36440 - DNA, 80 bp, synthetic construct
  source 1..80: mol_type = other DNA
tgctttggattgggaagaagagaagaccattttggctctgtggagagatataacatctatagatgtcagaaatgaccgag

SEQ ID NO: 36441 - DNA, 80 bp, synthetic construct
  source 1..80: mol_type = other DNA
tatccttcaaggaccccttgtgggggaagctattagtgacgaaagattttgtctatgcacacaatagcaactgtttattc

SEQ ID NO: 36442 - DNA, 80 bp, synthetic construct
  source 1..80: mol_type = other DNA
atacaggtgtcattcccaaagaacaccccctcgccccttatatagccacacaaacatggccacccaagcaagtagtggat

SEQ ID NO: 36443 - DNA, 80 bp, synthetic construct
  source 1..80: mol_type = other DNA
aaggggtagacacgttcatcgatagaacagaaatgtaacacccctacaatggatgttaacaaggttgtttttaaggtcca

SEQ ID NO: 36444 - DNA, 80 bp, synthetic construct
  source 1..80: mol_type = other DNA
ctggctttggatattctcggacttcaggagtataaagatgacctatctaactttaatcacttatcagtcccatctcttgc

SEQ ID NO: 36445 - DNA, 80 bp, synthetic construct
  source 1..80: mol_type = other DNA
ttcaaaggattgataggaatttgtccaaacagatgagggttcgattgagacaactgaactccctgatgcggcaggtctta

SEQ ID NO: 36446 - DNA, 80 bp, synthetic construct
  source 1..80: mol_type = other DNA
ggaggtcatggagaagggacattagattcagatgaggatatccaagggctattgagagacgctttacagaggacgagatg

SEQ ID NO: 36447 - DNA, 80 bp, synthetic construct
  source 1..80: mol_type = other DNA
ggtggatcaagaggtccgtcatgccgcgaaaacgatgaagtgtgattatagtccaagtaagagagtgtcacggaaggcag

SEQ ID NO: 36448 - DNA, 80 bp, synthetic construct
  source 1..80: mol_type = other DNA
gttgttcggaatggatatgctctgcacaacaagttgcggtgtccacctcatctaaccccgcacccatctcagagattgac

SEQ ID NO: 36449 - DNA, 80 bp, synthetic construct
  source 1..80: mol_type = other DNA
gagttgtgcaccccatgaaatgtcagttttggtgggttatctaggggaggagtttttcgggaagggaacatttgagagac

SEQ ID NO: 36450 - DNA, 80 bp, synthetic construct
  source 1..80: mol_type = other DNA
atcagggcattgtccaagaagttgcagaatccgctgatatctggtctcagggttgtccaatgggcaaccggagctcatta

SEQ ID NO: 36451 - DNA, 80 bp, synthetic construct
  source 1..80: mol_type = other DNA
caagttgaagccgatactcaacgatcttgaagcatgccccacattgtgtttagtggtaggagatggctcaggaggaatat

SEQ ID NO: 36452 - DNA, 80 bp, synthetic construct
  source 1..80: mol_type = other DNA
ccagagctgtactaagcatgtttcctgatgctaaattggtgtttaacagtctcttggaagttaatgatcttatggcatct

SEQ ID NO: 36453 - DNA, 80 bp, synthetic construct
  source 1..80: mol_type = other DNA
ggaacgcatcccctacctccttccgcattgatgagtggtggggaggatatagtatcaagagtgattgactttaactccat

SEQ ID NO: 36454 - DNA, 80 bp, synthetic construct
  source 1..80: mol_type = other DNA
ctgggagaaaccctctgatctgaggaatccatctacctggaggtatttccagaccgtccagagtgcagccaacatgtcct

SEQ ID NO: 36455 - DNA, 80 bp, synthetic construct
  source 1..80: mol_type = other DNA
acgacttaataatctgtgatgcggaagtgaccgacatcccatcaataaacaaaataactctgttaatgtcagacttctca

SEQ ID NO: 36456 - DNA, 80 bp, synthetic construct
  source 1..80: mol_type = other DNA
gggaggagtttttcgggaagggaacatttgagagacggttcttcagagatgagaaagagctacaggattacgaggcagca

SEQ ID NO: 36457 - DNA, 80 bp, synthetic construct
  source 1..80: mol_type = other DNA
ctgtccatcaatggacctctcaatctgatcttcaagacttatgggaccatgctggtcaatccagattataaagcagttca

SEQ ID NO: 36458 - DNA, 80 bp, synthetic construct
  source 1..80: mol_type = other DNA
gcatctctccagggcttttccttcagttacagggtatataactcagatgacctcatccttttcatcagaactctatttga

SEQ ID NO: 36459 - DNA, 80 bp, synthetic construct
  source 1..80: mol_type = other DNA
aattctccaagagggggaagttcttcagagattcggagtatttgacatcatccactttgagggaaatgagtttggtgctt

SEQ ID NO: 36460 - DNA, 80 bp, synthetic construct
  source 1..80: mol_type = other DNA
ttcaactgtagcagttctaaaagtgaaatgctgagagccagatcattaaattatcaagaccttgtaagagggtttccaga

SEQ ID NO: 36461 - DNA, 80 bp, synthetic construct
  source 1..80: mol_type = other DNA
ggttcttcagagatgagaaagagctacaggattacgaggcagcagaaagcactaaggttgatgtagcattagcagatgac

SEQ ID NO: 36462 - DNA, 80 bp, synthetic construct
  source 1..80: mol_type = other DNA
ggaaataatctctaatccatataatgaaatgattataactctcatagacaatgatgtagagtcctttctcgtccacaaga

SEQ ID NO: 36463 - DNA, 80 bp, synthetic construct
  source 1..80: mol_type = other DNA
tggttgatgacctcgagcttaggcagggagcattctcaaagatgtcaatcatattgacaattatgatggtgttttccaac

SEQ ID NO: 36464 - DNA, 80 bp, synthetic construct
  source 1..80: mol_type = other DNA
agagtgttcaatgtgtcaaaacctctgaacgaccctaaattttaccctccgtcagaccccaaaattctgaggcactttaa

SEQ ID NO: 36465 - DNA, 80 bp, synthetic construct
  source 1..80: mol_type = other DNA
tatttgctgtggtaccctaatatatctatcagcagccttaggagatgtgctgaactttgccagacttcatgaactgtaca

SEQ ID NO: 36466 - DNA, 80 bp, synthetic construct
  source 1..80: mol_type = other DNA
acaatcctgtgacctattacttcaagaagcagacattggggggaagaatgtacttggcatggagttggacagacaacact

SEQ ID NO: 36467 - DNA, 80 bp, synthetic construct
  source 1..80: mol_type = other DNA
ccagtattcaaaagagttgcctgtaactccagtttgagcttgtcgtcacactggataaggctgatttataaaattgtgaa

SEQ ID NO: 36468 - DNA, 80 bp, synthetic construct
  source 1..80: mol_type = other DNA
gactacaaggcttgtggggagtgctaaagatctctcccaagaggttgaaaaacaccttaaaagctacaatcggtggatca

SEQ ID NO: 36469 - DNA, 80 bp, synthetic construct
  source 1..80: mol_type = other DNA
acttcagtgatttgagatccagatcctccctattggattacagttgcttgtgatcccatctgtcaacatgcttttcacac

SEQ ID NO: 36470 - DNA, 80 bp, synthetic construct
  source 1..80: mol_type = other DNA
tgtggcctagtcgagccaagagatgtgaaaaaaacatctccttcatcctggtcttttacatttttggctcattctctgtt

SEQ ID NO: 36471 - DNA, 80 bp, synthetic construct
  source 1..80: mol_type = other DNA
ccaagagatgtgaaaaaaacatctccttcatcctggtcttttacatttttggctcattctctgttttttttgtttttttt

SEQ ID NO: 36472 - DNA, 80 bp, synthetic construct
  source 1..80: mol_type = other DNA
gggacagtgaattcggatgatgaagacttcttttcgggagacacgagaagcccagaggcagtatacaccaggattatgat

SEQ ID NO: 36473 - DNA, 80 bp, synthetic construct
  source 1..80: mol_type = other DNA
gaacggagggaggttaaaaaggtctcacataaagagatatgtctcagtgagtgcaaaccatcaggccaggcctaattcct

SEQ ID NO: 36474 - DNA, 80 bp, synthetic construct
  source 1..80: mol_type = other DNA
ttgcagagtttctcaacaagacgtattctagtgatcccagataatcccctgattagacaagggatcatgatgtgattaaa

SEQ ID NO: 36475 - DNA, 80 bp, synthetic construct
  source 1..80: mol_type = other DNA
taatccaattggaaagaaaaaaactaacaccactccgctggttccatcatcatcatgagcaagatctttgtcaaccctag

SEQ ID NO: 36476 - DNA, 80 bp, synthetic construct
  source 1..80: mol_type = other DNA
tgcacttagatccggcttggctgacttggagatggctgaggagacagtggatttggtgaataaaaacatggaggatagtc

SEQ ID NO: 36477 - DNA, 80 bp, synthetic construct
  source 1..80: mol_type = other DNA
aaccaagcatcactctcggaaaagatcccgacttgaaaacagcctacaagtctatcttgtcagggatgaatgctgctaaa

SEQ ID NO: 36478 - DNA, 80 bp, synthetic construct
  source 1..80: mol_type = other DNA
aagcccatcttcaaggaattcctatagacgtggaaacacttcctgaggatattaagaggctcagaatagcagactacaaa

SEQ ID NO: 36479 - DNA, 80 bp, synthetic construct
  source 1..80: mol_type = other DNA
caggggcaacaggaagaggatgcttcgagacaagaagagggtgaggatgaggacttctacatgaccgagagtgaaaactc

SEQ ID NO: 36480 - DNA, 80 bp, synthetic construct
  source 1..80: mol_type = other DNA
atacgtccctctccaatcttatcttgatgctgtgggaatgcagattgtcaggaagatgaaaaccggggatggattcttca

SEQ ID NO: 36481 - DNA, 80 bp, synthetic construct
  source 1..80: mol_type = other DNA
agatatgggcacaagcagtggaggacatcgtatcttatgtagccaccaacttccccgcccctgtcaacaagctccaggcc

SEQ ID NO: 36482 - DNA, 80 bp, synthetic construct
  source 1..80: mol_type = other DNA
gacaagtcaactcagaccacattggagaaggtcaagcaagccgcctcctcttctgcccctagcaagagggagggaccatc

SEQ ID NO: 36483 - DNA, 80 bp, synthetic construct
  source 1..80: mol_type = other DNA
ctcaaacatgaaccttgactcccaggagtcatcaggtcctccaggattagactgggctgccagcaatgatgaggatgatg

SEQ ID NO: 36484 - DNA, 80 bp, synthetic construct
  source 1..80: mol_type = other DNA
gatctattgaggcagagattgctcatcagatagccgagagcttttccaagaagtataagttcccttctcgatcatccggg

SEQ ID NO: 36485 - DNA, 80 bp, synthetic construct
  source 1..80: mol_type = other DNA
atattcctttggaattttgagcaactgaaaatgaatcttgatgatatagtgagagaggtcaaaggaatccctggggtgac

SEQ ID NO: 36486 - DNA, 80 bp, synthetic construct
  source 1..80: mol_type = other DNA
tgaatcttgatgatatagtgagagaggtcaaaggaatccctggggtgacaagaatggctcgggatggcatgaagttgccc

SEQ ID NO: 36487 - DNA, 80 bp, synthetic construct
  source 1..80: mol_type = other DNA
aagaatggctcgggatggcatgaagttgcccctccggtgcatgctggggggtgtggcatccaatcattccaaaaggttcc

SEQ ID NO: 36488 - DNA, 80 bp, synthetic construct
  source 1..80: mol_type = other DNA
aaattctagtcaattcggcgaaactgggcaaactcatgcaggatgatctaaacagatatcttgcatattgatctaaaatt

SEQ ID NO: 36489 - DNA, 80 bp, synthetic construct
  source 1..80: mol_type = other DNA
ttagacccagatgacgtctgctcttatttagctggagccatggtcttgtttgagggcatctgcccggaagattggactag

SEQ ID NO: 36490 - DNA, 80 bp, synthetic construct
  source 1..80: mol_type = other DNA
ggccactgtcacaccaggacaaacaaattgactgttatcagatcatgaaaaaaacatgtaacaccactggcaagatgaat

SEQ ID NO: 36491 - DNA, 80 bp, synthetic construct
  source 1..80: mol_type = other DNA
atcattcggaaaattgttaagagctgtaaggatgatgagatgcaaaagcccaacccagtctctgcccctcctgacgacga

SEQ ID NO: 36492 - DNA, 80 bp, synthetic construct
  source 1..80: mol_type = other DNA
tgacctatggcttccccctcctgaatatgtcccgctgtcagagatgactgggaagaagaacatgaggaacttttgtatca

SEQ ID NO: 36493 - DNA, 80 bp, synthetic construct
  source 1..80: mol_type = other DNA
acggggaagtcaaagtgtgcagcccaaatggatattcattcaggatcatcagacatatcttgagctccttcgaaggtgtg

SEQ ID NO: 36494 - DNA, 80 bp, synthetic construct
  source 1..80: mol_type = other DNA
tattctgggaatagaaggatgatagggctggtgaaggttgtcattgggttggcactgtccggggcccctgttccagatgg

SEQ ID NO: 36495 - DNA, 80 bp, synthetic construct
  source 1..80: mol_type = other DNA
aatgaattgggtttacaagatcaggcgcacccttatattccagtgggctgagtcatcgggccccctggatggtgaggagt

SEQ ID NO: 36496 - DNA, 80 bp, synthetic construct
  source 1..80: mol_type = other DNA
tagaatactctcaggagattacatgggatgatgattctgagtttgtcggcttgcagatgagggtgagtgcaagacagtgt

SEQ ID NO: 36497 - DNA, 80 bp, synthetic construct
  source 1..80: mol_type = other DNA
catattcaggggagactctggtgtatcaacatgaactccagagcatgccagctgtggtctgacatgtctctaaaaactca

SEQ ID NO: 36498 - DNA, 80 bp, synthetic construct
  source 1..80: mol_type = other DNA
gcagtctgacgaagacaagaacacttccttgctcctcgaatgaccatcactccaagccactgctcaatcagttacctcca

SEQ ID NO: 36499 - DNA, 80 bp, synthetic construct
  source 1..80: mol_type = other DNA
catgatgatatatacaaccacactcttccgtccttccgcgagcaatagaacaacgtatgttatggtgccacacaatagct

SEQ ID NO: 36500 - DNA, 80 bp, synthetic construct
  source 1..80: mol_type = other DNA
ttacggaatcaacattgctaagaaaggtgacaagataacacctgctacgttggtggacattcacaggacgaacactgagg

SEQ ID NO: 36501 - DNA, 80 bp, synthetic construct
  source 1..80: mol_type = other DNA
gcatactcttaatatatattatccaataccttcacatgtgaaatcgctgcaatgtgaaaaaaacaaataacatccctcga

SEQ ID NO: 36502 - DNA, 80 bp, synthetic construct
  source 1..80: mol_type = other DNA
aagattcaaaagccatgttactctctaccgccttattcgcctttttcttgaactgtgctccttgtctggcaaagtttcca

SEQ ID NO: 36503 - DNA, 80 bp, synthetic construct
  source 1..80: mol_type = other DNA
atctacactatcccggataagattggaccgtggagtcctattgacataaaccatctcagctgcccgaacaacttgatcgt

SEQ ID NO: 36504 - DNA, 80 bp, synthetic construct
  source 1..80: mol_type = other DNA
ggaagacgagggatgcacgactctcaccccattctcgtacatggaactgaaagtgggatatataacaacaataaaaatag

SEQ ID NO: 36505 - DNA, 80 bp, synthetic construct
  source 1..80: mol_type = other DNA
aaggatttacatgcactggtgtaataacagaggcagagacctacacaaactttgtaggatatgtgactacaaccttcaag

SEQ ID NO: 36506 - DNA, 80 bp, synthetic construct
  source 1..80: mol_type = other DNA
aggaaacatttccggccaactgtgagcgcctgtagagatgcctacaactggaagattactggtgatccgagatatgaaga

SEQ ID NO: 36507 - DNA, 80 bp, synthetic construct
  source 1..80: mol_type = other DNA
gtcactgcacaatccttaccctgactctcattggttgagaactgtgaagaccaccaaggagtctcttctgatcatctctc

SEQ ID NO: 36508 - DNA, 80 bp, synthetic construct
  source 1..80: mol_type = other DNA
ctagtgtagtcgacatggacgcatatgacaaaagcctctactccaaaatgttccctaatggtaaatgtctagcttcaccc

SEQ ID NO: 36509 - DNA, 80 bp, synthetic construct
  source 1..80: mol_type = other DNA
ccgagtgccatatgttgtccgacaaatcatgattacaccatttggattccagagaatcccaaacccgggctgtcctgtga

SEQ ID NO: 36510 - DNA, 80 bp, synthetic construct
  source 1..80: mol_type = other DNA
tatattcacaactagcaaaggaaagaaagcaaccaaagacgggaggctgtgtggatttgtggatgagagaggattgtaca

SEQ ID NO: 36511 - DNA, 80 bp, synthetic construct
  source 1..80: mol_type = other DNA
gcaactgggctcaaacaggaggtcaagatctcactcgggaccctacgacacctgaacatgcatctctggttggacttctt

SEQ ID NO: 36512 - DNA, 80 bp, synthetic construct
  source 1..80: mol_type = other DNA
aatccttgaagggggcttgcaagctgagactctgtggggtccctggcatgagattgatggatggatcatgggtatctctt

SEQ ID NO: 36513 - DNA, 80 bp, synthetic construct
  source 1..80: mol_type = other DNA
cagaaaaccgaagctccagaatggtgctctccagatcagcttgttaatgtccatgatttccatacagatgaaattgaaca

SEQ ID NO: 36514 - DNA, 80 bp, synthetic construct
  source 1..80: mol_type = other DNA
ccttgtggttgaagagttggtgaagaagagggaagagtgtttggatgctttagaaactatcatcacaaccaagtctataa

SEQ ID NO: 36515 - DNA, 80 bp, synthetic construct
  source 1..80: mol_type = other DNA
gtttcagacgtctcagtcatttcaggaaactggttcctgggttcggaaaggcatacactcttatcaacaagactctcatg

SEQ ID NO: 36516 - DNA, 80 bp, synthetic construct
  source 1..80: mol_type = other DNA
ggttcctgggttcggaaaggcatacactcttatcaacaagactctcatggaagcagacgcccattacaagtctgtaagag

SEQ ID NO: 36517 - DNA, 80 bp, synthetic construct
  source 1..80: mol_type = other DNA
gaagcagacgcccattacaagtctgtaagagaatggaaagaagtgatcccatctaaagggtgtctaatggcaggggggag

SEQ ID NO: 36518 - DNA, 80 bp, synthetic construct
  source 1..80: mol_type = other DNA
tctgtaagagaatggaaagaagtgatcccatctaaagggtgtctaatggcaggggggagatgccatcctcactacagtgg

SEQ ID NO: 36519 - DNA, 80 bp, synthetic construct
  source 1..80: mol_type = other DNA
aaagggtgtctaatggcagggtggagatgccatcctcactacagtggtatattcttcaatgggatcatactgagcccagg

SEQ ID NO: 36520 - DNA, 80 bp, synthetic construct
  source 1..80: mol_type = other DNA
atgccatcctcactacagtggtatattcttcaatgggatcatactgagcccagggggggatgtactcattccggagatgc

SEQ ID NO: 36521 - DNA, 80 bp, synthetic construct
  source 1..80: mol_type = other DNA
agtcagccttgttacagcagcacattgagctgctagaatcctcgatgattcctctcagacatcccttggctgacccttcc

SEQ ID NO: 36522 - DNA, 80 bp, synthetic construct
  source 1..80: mol_type = other DNA
acggtgttcaagagagatgatgaggcagaggattttgttgaggttcaccttccagacacccaaaaactcatatcaggcat

SEQ ID NO: 36523 - DNA, 80 bp, synthetic construct
  source 1..80: mol_type = other DNA
agatctgggttttcccgaatggaagcgttactttcttataggaatatctgtgcttgcccttcttgccttagcaataatta

SEQ ID NO: 36524 - DNA, 80 bp, synthetic construct
  source 1..80: mol_type = other DNA
ctgcagcatgttgcaaaaggttcaagaggagaaggaggcctaagccaaacccaatagagttgatcaggaaagtttctgta

SEQ ID NO: 36525 - DNA, 80 bp, synthetic construct
  source 1..80: mol_type = other DNA
ctttgtctttataggctcagtaagatagtaggacagaatacggggaactataagaccaatgtggcagatagaatggaaca

SEQ ID NO: 36526 - DNA, 80 bp, synthetic construct
  source 1..80: mol_type = other DNA
acctctcaaagtggaagggcaattccatcttgggagtcgtacaaagtgggggccactggtgagtcataagcatgtcttgt

SEQ ID NO: 36527 - DNA, 80 bp, synthetic construct
  source 1..80: mol_type = other DNA
ccatatatcatatgacaacagaggcaactatgcgatgaatctgatgaaagctttaaaaatcacctcatttaatcattata

SEQ ID NO: 36528 - DNA, 80 bp, synthetic construct
  source 1..80: mol_type = other DNA
tgaattactgcctttgcatattgaaccgggcgagggattgagatcagaaaggtcatccaaggagtatcttcccatatatg

SEQ ID NO: 36529 - DNA, 80 bp, synthetic construct
  source 1..80: mol_type = other DNA
gccagctgacatgatccttttgattcatgcttgagaattcttgagtttaatttacatctatctgagatgttggtgcttta

SEQ ID NO: 36530 - DNA, 80 bp, synthetic construct
  source 1..80: mol_type = other DNA
attagcctaattagatgttagcaggctacttgaatgatagaaacaataacaagacaatcatagtcaatagtgtacactaa

SEQ ID NO: 36531 - DNA, 80 bp, synthetic construct
  source 1..80: mol_type = other DNA
ctacatcggtatgcttagcataacccccgcttttagtataagctcagagctttgccacgctctttacccatttataagaa

SEQ ID NO: 36532 - DNA, 80 bp, synthetic construct
  source 1..80: mol_type = other DNA
tagtgaaaggggattacgctcagctaaagggtcaatcttctgatgtgtagacagacaaagagcctcctaaccaagattgt

SEQ ID NO: 36533 - DNA, 80 bp, synthetic construct
  source 1..80: mol_type = other DNA
gtactcctgaaaaaaacattaatatgcaagaggagccaacacccctcctcatagatcttcaaatgcaaaatgattgactc

SEQ ID NO: 36534 - DNA, 80 bp, synthetic construct
  source 1..80: mol_type = other DNA
taccgaggtttacgatgatccggtggatcctgttgagccagaggcagacctgagaagcaattcagttgtgccaaacatct

SEQ ID NO: 36535 - DNA, 80 bp, synthetic construct
  source 1..80: mol_type = other DNA
taagaaactcagattataatctgaattccccacttttggaagatccttcaagactgatgatagaatggttgacgacgggg

SEQ ID NO: 36536 - DNA, 80 bp, synthetic construct
  source 1..80: mol_type = other DNA
gatctttgagactgccccatttgtcaagattgtggaacaccacacattgatgaccacccacaagatgtgtgccaactgga

SEQ ID NO: 36537 - DNA, 80 bp, synthetic construct
  source 1..80: mol_type = other DNA
aacaggcccagccgactaaatttgacagacaacttgctcagatcctacaaggttctgagaggctattttaagaagttaga

SEQ ID NO: 36538 - DNA, 80 bp, synthetic construct
  source 1..80: mol_type = other DNA
tgtcgggtcaatgcgggcaggaggtctaggagcacaagctatgataaccctgtggctacatgggtctcactctgagtcta

SEQ ID NO: 36539 - DNA, 80 bp, synthetic construct
  source 1..80: mol_type = other DNA
cacgtagcagaaagtgtctcacagaactctcacagttctacaagaagtcatcccctatagagaagttgttaaactatacc

SEQ ID NO: 36540 - DNA, 80 bp, synthetic construct
  source 1..80: mol_type = other DNA
ctagagaacagaggactgaagactccgacagagggggtgctatctagcatcaataaagtccaatatgaccaggcattcgg

SEQ ID NO: 36541 - DNA, 80 bp, synthetic construct
  source 1..80: mol_type = other DNA
taggtatctaggcaatacttattcctcttacttgtttttccatgtaataattctgtatatgaacgcccttgactgggatg

SEQ ID NO: 36542 - DNA, 80 bp, synthetic construct
  source 1..80: mol_type = other DNA
aagagaaaaccatcttggccttatggaaagagattgcctccatagacgtgaagagcgatttggtaaagttcagagatcag

SEQ ID NO: 36543 - DNA, 80 bp, synthetic construct
  source 1..80: mol_type = other DNA
atatgggggtctctcgtcataactaaagactttgtatactctcaaagtgcaaattgtctgttcgatagaaactataccct

SEQ ID NO: 36544 - DNA, 80 bp, synthetic construct
  source 1..80: mol_type = other DNA
aatgcttaaggacttgtttttgtcaagattcaactcacttttaatcttgatctctcccccagaatcaagatattcagatg

SEQ ID NO: 36545 - DNA, 80 bp, synthetic construct
  source 1..80: mol_type = other DNA
acttggtgtctaatttatgtcaactctacatcgcgggagacaaggtattgtctgcatgtggaaactccggatacgacgtg

SEQ ID NO: 36546 - DNA, 80 bp, synthetic construct
  source 1..80: mol_type = other DNA
ataaagctgctggagccttatatcgtgaataagttggtacagagagcagagaggtttagacctctaattcactccttggg

SEQ ID NO: 36547 - DNA, 80 bp, synthetic construct
  source 1..80: mol_type = other DNA
gcactatacctaattttagattcttggcaggggcttatgacatgttttttgccagaattgagcacctgtattctgcaatt

SEQ ID NO: 36548 - DNA, 80 bp, synthetic construct
  source 1..80: mol_type = other DNA
agatttccctcagttcattcgtgacaaaactaatcagctagaggggacttttgggcccagtgccagagagttttttcaga

SEQ ID NO: 36549 - DNA, 80 bp, synthetic construct
  source 1..80: mol_type = other DNA
ctatggacttgttagataacatacatgacttggtgttcgtttacggctgctatagacattggggtcatccttatattgac

SEQ ID NO: 36550 - DNA, 80 bp, synthetic construct
  source 1..80: mol_type = other DNA
tacagaaaggggttgtccaagttgtatgatcaggtccacgtcaagaaaatcatagacaggaattatcaagagtgtctggc

SEQ ID NO: 36551 - DNA, 80 bp, synthetic construct
  source 1..80: mol_type = other DNA
gagcgatttggctaagaggatactcaggtggggatttgacaaatattcccgctggtatctagactctaatttgctgccgg

SEQ ID NO: 36552 - DNA, 80 bp, synthetic construct
  source 1..80: mol_type = other DNA
gtgatcatcctttgtctccttatgtgaaaacccagacttggcctccaaaacatgtggttgacatggttggggacacttgg

SEQ ID NO: 36553 - DNA, 80 bp, synthetic construct
  source 1..80: mol_type = other DNA
catagcctccccataacccaaatctttgaaatcccggagtccatggatccttcagaaattctggatgacaaatctcactc

SEQ ID NO: 36554 - DNA, 80 bp, synthetic construct
  source 1..80: mol_type = other DNA
gttcactaggactaggctggcttcatggctctcggagaatagaggcggaccagtccctagtgagaaagtgatcattacag

SEQ ID NO: 36555 - DNA, 80 bp, synthetic construct
  source 1..80: mol_type = other DNA
cactctctagacctccagtcaatcctcgagagttcctccggtcaattgatgtgggaggactgccggatgatgacttgata

SEQ ID NO: 36556 - DNA, 80 bp, synthetic construct
  source 1..80: mol_type = other DNA
attggtctgaagccaaaagaacgggagcttaagatagagggaagattcttcgcactgatgtcttggaatctaaggcttta

SEQ ID NO: 36557 - DNA, 80 bp, synthetic construct
  source 1..80: mol_type = other DNA
ttttgtcataacagagaaactgttggctacatatatcttgcccctgtttgacgccttgacgatgactgacaatttgaaca

SEQ ID NO: 36558 - DNA, 80 bp, synthetic construct
  source 1..80: mol_type = other DNA
cgggttgggacagtggttactgcttatgaggattgttcggggttggtgtctttcacagggttcatcaagcaaatcaattt

SEQ ID NO: 36559 - DNA, 80 bp, synthetic construct
  source 1..80: mol_type = other DNA
aggtatttaaaaagttaattgatcgagtcacagggcagggtttattagattattcccgggtgacttatgcattccacctg

SEQ ID NO: 36560 - DNA, 80 bp, synthetic construct
  source 1..80: mol_type = other DNA
gattatgaaaagtggaacaaccatcaacgactagagtcgacaaaagatgtgttttctgtcttggacaaagtattcggcct

SEQ ID NO: 36561 - DNA, 80 bp, synthetic construct
  source 1..80: mol_type = other DNA
caagaaagtattctctcggacacacgagttcttccaaaaatcgtgggtttactactcagatagatctgacttaattggat

SEQ ID NO: 36562 - DNA, 80 bp, synthetic construct
  source 1..80: mol_type = other DNA
tgtggagggatcaaatatactgcctggatatgaccaatggtcctacctgttggaacggccaggacggtggacttgaaggg

SEQ ID NO: 36563 - DNA, 80 bp, synthetic construct
  source 1..80: mol_type = other DNA
ttgagacagaaagggtggagtttggtcagtcttctaatgatagacagagagtcacagacaagaaacactaggacgaaaat

SEQ ID NO: 36564 - DNA, 80 bp, synthetic construct
  source 1..80: mol_type = other DNA
cctggcgcagggggacaatcaagtcttgtgcccgacttacatgctgtcgtccggattgaacaaggagggcttgctgtacg

SEQ ID NO: 36565 - DNA, 80 bp, synthetic construct
  source 1..80: mol_type = other DNA
agttggacagtatatcaaggaatgccatctcgatctatagagctattgaagatggggcttccaagttggggcttatcatt

SEQ ID NO: 36566 - DNA, 80 bp, synthetic construct
  source 1..80: mol_type = other DNA
aagaaagaggagactatgtgcagttatgactttctcatatacgggaagactcctttgtttaggggcaatatcctggttcc

SEQ ID NO: 36567 - DNA, 80 bp, synthetic construct
  source 1..80: mol_type = other DNA
ggagtctaagagatgggccagagtctcatgtatatccaatgaccagatagtcaacctagcaaacattatgtcgactgtgt

SEQ ID NO: 36568 - DNA, 80 bp, synthetic construct
  source 1..80: mol_type = other DNA
caactaatgccttgacagtagctcaacactcacaatccttgatcaagcccatgagagactttcttctgatgtctgtccag

SEQ ID NO: 36569 - DNA, 80 bp, synthetic construct
  source 1..80: mol_type = other DNA
taatcagctggtctcggtaagacctgaggtgatttctgatcagtatgagtataagtaccctgctattaaagacaagaaga

SEQ ID NO: 36570 - DNA, 80 bp, synthetic construct
  source 1..80: mol_type = other DNA
gacagccagggaggccatattatacttcttccacaagaacttcgaggaagagatcaagagaatgtttgagccagggcaag

SEQ ID NO: 36571 - DNA, 80 bp, synthetic construct
  source 1..80: mol_type = other DNA
gcagtgtaccattaccttctgttcagccctatcttgaaggatagagtttacaagatattggttgctgatggaactgagtt

SEQ ID NO: 36572 - DNA, 80 bp, synthetic construct
  source 1..80: mol_type = other DNA
tttgttggcaatgtcaaggataatttatctggacccgtctcttggtggagtctcagggatgtccttgggacgattccata

SEQ ID NO: 36573 - DNA, 80 bp, synthetic construct
  source 1..80: mol_type = other DNA
ttcgtcagttttcggacccagtctctgagggattatctttctggagggagatctggctgagctcctcagaatcatggatt

SEQ ID NO: 36574 - DNA, 80 bp, synthetic construct
  source 1..80: mol_type = other DNA
catgcgctatgccaagaagcaggaaaccctgacctgggggacagaagcctggagagcttcaccaggctgctggaagaccc

SEQ ID NO: 36575 - DNA, 80 bp, synthetic construct
  source 1..80: mol_type = other DNA
cacaacattgaacataagaggaggagcaagcccgactatcctgttaaaggaagctattcggaaggccttgtatgatgagg

SEQ ID NO: 36576 - DNA, 80 bp, synthetic construct
  source 1..80: mol_type = other DNA
ttgacaaggtagaaaattctgaatttcgggaggccatattattgtccaagacacacagagacaactttatattgtttctg

SEQ ID NO: 36577 - DNA, 80 bp, synthetic construct
  source 1..80: mol_type = other DNA
agatctatagaacctttattccctcgatttctcagtgaattgttcagctcctcattccttggaattcctgaatcaatcat

SEQ ID NO: 36578 - DNA, 80 bp, synthetic construct
  source 1..80: mol_type = other DNA
cggattaatccaaaactcccgaaccatccgacgccaattcaggagaagcttgtcaagaaccctagaggagtcgtttttta

SEQ ID NO: 36579 - DNA, 80 bp, synthetic construct
  source 1..80: mol_type = other DNA
actctgaaatccatggaatcagcaggatgactcaggttcctcagagaatagggagggtgtggagctgttccgcagagcga

SEQ ID NO: 36580 - DNA, 80 bp, synthetic construct
  source 1..80: mol_type = other DNA
gcggatcagttgagagagatatcatggggtaggaaggtggtgggcacaactgtcccccacccatctgagatgttggccct

SEQ ID NO: 36581 - DNA, 80 bp, synthetic construct
  source 1..80: mol_type = other DNA
aaacagctgttccgcactcgtatttcatccacttcagatcacttggactcagtgggaagtctccttattcatccaatgcg

SEQ ID NO: 36582 - DNA, 80 bp, synthetic construct
  source 1..80: mol_type = other DNA
aattcccaagtcatcgatttcctgcacctgtggacagtcaggggatgacagcccaagaatatctgtgtcagttctcccgt

SEQ ID NO: 36583 - DNA, 80 bp, synthetic construct
  source 1..80: mol_type = other DNA
ctctcgaccagtccttcttctccagaggtcccctcaagggatacctgggatcttctacctcaatgtctactcagttgttc

SEQ ID NO: 36584 - DNA, 80 bp, synthetic construct
  source 1..80: mol_type = other DNA
catgcttgggagaaagtgactaatgttcatgtcgtcaagagggccttgtccctcaaggaatccatcaattggttcattac

SEQ ID NO: 36585 - DNA, 80 bp, synthetic construct
  source 1..80: mol_type = other DNA
gagagactcgaaccttgctcagaccttgatccgaaacatagtgtcgttgacaggcccctttttccccctagaggaagctc

SEQ ID NO: 36586 - DNA, 80 bp, synthetic construct
  source 1..80: mol_type = other DNA
ctgtgtttaagagaactggatctgccctccaccgcttcaaatcagcaagatacagcgaggggggttactcttccatatgc

SEQ ID NO: 36587 - DNA, 80 bp, synthetic construct
  source 1..80: mol_type = other DNA
cctaacctgttgtctcatatctctgtgagtacagacacaatgtctgacctcacacaagatggaacaaacttcgacttcat

SEQ ID NO: 36588 - DNA, 80 bp, synthetic construct
  source 1..80: mol_type = other DNA
gtttcagcctctcatgctctatgctcaaacttggacttcagaactggttcagaaagaccttcgattaagagactccacct

SEQ ID NO: 36589 - DNA, 80 bp, synthetic construct
  source 1..80: mol_type = other DNA
ttcattggcaccttagatgtcccaaatgtatccgaccgatagatgacatcaccttagaagccccaaaaatcttctccttt

SEQ ID NO: 36590 - DNA, 80 bp, synthetic construct
  source 1..80: mol_type = other DNA
cccgacgtatcaaaaagaatatcaaggatggtgtcaggagcagtgcctcagttcagaaagctgcctgagataggactgaa

SEQ ID NO: 36591 - DNA, 80 bp, synthetic construct
  source 1..80: mol_type = other DNA
gccagggaagtttgactcattgaaggaaaaagacaaatccagacatatagggactgctcaggggctcttatactccattt

SEQ ID NO: 36592 - DNA, 80 bp, synthetic construct
  source 1..80: mol_type = other DNA
gttgggcatgtgtttaacctgattcactttgtgggttgttacatgggccaaatcagatctttaaatgccactgtcattca

SEQ ID NO: 36593 - DNA, 80 bp, synthetic construct
  source 1..80: mol_type = other DNA
tggttgctactcacgattcagggtataatgacggaaccatattcccggtaaatatctacgggaaagtctctcctagagac

SEQ ID NO: 36594 - DNA, 80 bp, synthetic construct
  source 1..80: mol_type = other DNA
tatctaagagggttggccaggggagtattgataggctcttctatttgctttttgaccagaatgaccaatatcaacatcaa

SEQ ID NO: 36595 - DNA, 80 bp, synthetic construct
  source 1..80: mol_type = other DNA
tcgccccttggagttgatttctggagtcatttcttatatacttctgaggcttgacaatcacccctcattgtatgtcatgc

SEQ ID NO: 36596 - DNA, 80 bp, synthetic construct
  source 1..80: mol_type = other DNA
taaaagagccatctctgagatctgagatattctccatccctcagaaaatacctgctgcctatcccaccaccatgaaggag

SEQ ID NO: 36597 - DNA, 80 bp, synthetic construct
  source 1..80: mol_type = other DNA
ggcaacagatctgttttatgttatttgcagcatgtgcttcgctatgagcgagaagccataacaacatccccggagaatga

SEQ ID NO: 36598 - DNA, 80 bp, synthetic construct
  source 1..80: mol_type = other DNA
taaaaatcaacaaaaatcataaaatagaaaaccagaaatagaagtaggtaagaaggtatatgtgtcccctaagagacaca

SEQ ID NO: 36599 - DNA, 80 bp, synthetic construct
  source 1..80: mol_type = other DNA
ggcaaacggaagagacgtaggtacttaagcttcctaaaagcagccgaactcactttgagatgtaggcatagcataccgaa

SEQ ID NO: 36600 - DNA, 80 bp, synthetic construct
  source 1..80: mol_type = other DNA
ctataacaagtggatcaacataagagacacaagatctagaacttcgatattggactactgctgtctttagtctaatcaat

SEQ ID NO: 36601 - DNA, 80 bp, synthetic construct
  source 1..80: mol_type = other DNA
ggtgatagacttggagagcatcattgaaaaaaacaggtagcaattaccttatgcattgtcctgtgattatttttgatttt

SEQ ID NO: 36602 - DNA, 80 bp, synthetic construct
  source 1..80: mol_type = other DNA
aagacgatgatctctagaggggtattattgtgagacagattccagaaaaaaacttaacaccactcctcgattcgtggtgt

SEQ ID NO: 36603 - DNA, 80 bp, synthetic construct
  source 1..80: mol_type = other DNA
caaaatgagcaaagatttggtgcatcctagtcttatcagggcagggatagtagaactggaaatggcagaagagactactg

SEQ ID NO: 36604 - DNA, 80 bp, synthetic construct
  source 1..80: mol_type = other DNA
atataatgacatctggggagagagatactaggagcatacaaattcagacagaaccaaccgcttcagttagctctggaaac

SEQ ID NO: 36605 - DNA, 80 bp, synthetic construct
  source 1..80: mol_type = other DNA
gagagtcggcatgattctgagagcatgcatgatccaaatgacaagaaagatcacacacccgatcacgatgtggtcccgga

SEQ ID NO: 36606 - DNA, 80 bp, synthetic construct
  source 1..80: mol_type = other DNA
cattgagtcttctactgacaaaggagagattcgagatatagaaggagaagttgcccatcaggtagcagaaagcttttcaa

SEQ ID NO: 36607 - DNA, 80 bp, synthetic construct
  source 1..80: mol_type = other DNA
aacagttacatggcccggctcgaggaggcagagtaaaggctgagaggacccataaaagaactcgaatttggcaatctggt

SEQ ID NO: 36608 - DNA, 80 bp, synthetic construct
  source 1..80: mol_type = other DNA
aggccagtgtgagaaacttttgcattagtggagaggtcaagatatgtagtccaaacgggtactccttcaagatactcagg

SEQ ID NO: 36609 - DNA, 80 bp, synthetic construct
  source 1..80: mol_type = other DNA
gcttagccactacacattctctgggagaattccccttgtacacaattcctgagaagatagagaaatggactcccatagac

SEQ ID NO: 36610 - DNA, 80 bp, synthetic construct
  source 1..80: mol_type = other DNA
atgatccatctgagttgccccaacaacctattatctgaggaagaaggttgcaatgcagagtcatcctttacttactttga

SEQ ID NO: 36611 - DNA, 80 bp, synthetic construct
  source 1..80: mol_type = other DNA
caactcaggagatccccctgagctttccctctgcccctgttcctcgagccaaagtggtgtcatcttgggagtcctataaa

SEQ ID NO: 36612 - DNA, 80 bp, synthetic construct
  source 1..80: mol_type = other DNA
gggcttccaggtacatgaaaccttcatcagattgcctaacatatcccccacaaccggattacctgcctcggcaagacaca

SEQ ID NO: 36613 - DNA, 80 bp, synthetic construct
  source 1..80: mol_type = other DNA
acttgatcacatggtgtcaaatctcctttcaaaccctccagtgtataatgattagaggagggttgcttgtcaatcaggtg

SEQ ID NO: 36614 - DNA, 80 bp, synthetic construct
  source 1..80: mol_type = other DNA
gtggtgttgtctcatacattccgttactcgtaagttgaaatctctcctttctcattgtctaaatacttctgaacacaatc

SEQ ID NO: 36615 - DNA, 80 bp, synthetic construct
  source 1..80: mol_type = other DNA
tctcaacgattaggtcttctggtttttataaagagttgccttctaaaatgggcactctatagagccttcaatctttttga

SEQ ID NO: 36616 - DNA, 80 bp, synthetic construct
  source 1..80: mol_type = other DNA
tagactgtcacatatgagattattgatgtgaaaaaaacatgccccttggtcaaagtcaacgcctcaacactcctcctact

SEQ ID NO: 36617 - DNA, 80 bp, synthetic construct
  source 1..80: mol_type = other DNA
tcagttgcaaccatgatggacgttacggaggtgtatgacgacccgatagaccctgttgagccagaaggagaatggaatag

SEQ ID NO: 36618 - DNA, 80 bp, synthetic construct
  source 1..80: mol_type = other DNA
agtggctaacatccgagaatagaccctcgagaatgaatgtcacagagaacacaaccaggtcttacaaagtcttgagaaca

SEQ ID NO: 36619 - DNA, 80 bp, synthetic construct
  source 1..80: mol_type = other DNA
cttttcaagggagtggatatagcaacaataaaaataggtggtgtgggagctcaggcaatgatggtgctgtgggtcttggg

SEQ ID NO: 36620 - DNA, 80 bp, synthetic construct
  source 1..80: mol_type = other DNA
tctcctttaaggaccctttgtgggggaaactctcagtaacaaaagattttgtatatgcacacaatagcaactgtttattt

SEQ ID NO: 36621 - DNA, 80 bp, synthetic construct
  source 1..80: mol_type = other DNA
ctaactattcaccatctagagaggataatttgcagcgtgtatttacagtggcttccattagaagcatgcttgtcaaatga

SEQ ID NO: 36622 - DNA, 80 bp, synthetic construct
  source 1..80: mol_type = other DNA
ctaactattcaccatccagggaagataatttgcaacgtgtctttacagtagcctctatcagaagcatgttgattaagtga

SEQ ID NO: 36623 - DNA, 80 bp, synthetic construct
  source 1..80: mol_type = other DNA
caatcttggcttcaactgggattcagattgagcacgctgtccatatggatcatcaacatttttcaatgtcttaagggcaa

SEQ ID NO: 36624 - DNA, 80 bp, synthetic construct
  source 1..80: mol_type = other DNA
aacatcccagtgttagctttaccaaggaggaagttctaataaagcggctagagaaaaatttcctcaagcaacacaatctg

SEQ ID NO: 36625 - DNA, 80 bp, synthetic construct
  source 1..80: mol_type = other DNA
gaaatcatggaaacagtaaaccttatattttttgctgctctttcagctccttggtgcttgcactacaaagcactagaatc

SEQ ID NO: 36626 - DNA, 80 bp, synthetic construct
  source 1..80: mol_type = other DNA
catacaacaaatggatcagcataagggacatacgatcgaggacctctattctggactactgttgtctttaatccaatcaa

SEQ ID NO: 36627 - DNA, 80 bp, synthetic construct
  source 1..80: mol_type = other DNA
tatggataagctgtgagagcatcattgaaaaaaacaagtaacaattacattatgcatcatcatgtgattgtttttaattt

SEQ ID NO: 36628 - DNA, 80 bp, synthetic construct
  source 1..80: mol_type = other DNA
tcatcaagccagaccgaactcttttgccgaattcttgaacaaggtatatgcagatggttcttaatctgaaggtttcttgg

SEQ ID NO: 36629 - DNA, 80 bp, synthetic construct
  source 1..80: mol_type = other DNA
gagatggaaatctacagataagtaaggttgtgagacaggctccaagaaaaaaacttaacaccactcctcgattcgtggtg

SEQ ID NO: 36630 - DNA, 80 bp, synthetic construct
  source 1..80: mol_type = other DNA
gcacaatgagcaaagacttggtacaccctagtctgatccgagcggggatagtggaattggaaatggcagaagagaccact

SEQ ID NO: 36631 - DNA, 80 bp, synthetic construct
  source 1..80: mol_type = other DNA
aaacatgggcagattgaaaatagaggacaaatctattaggaccaagaccgaagaagaagagggagatgaatgcagctctg

SEQ ID NO: 36632 - DNA, 80 bp, synthetic construct
  source 1..80: mol_type = other DNA
aagaggatgactatttgtctgagggacacgacccattagttctccttcaaaattttcttgacgaaattggggccaaagct

SEQ ID NO: 36633 - DNA, 80 bp, synthetic construct
  source 1..80: mol_type = other DNA
agaagttgaagactggcgaggggttcttcagggtgtggtcagctctgtcggatgacataaaggggtatgtatctactcat

SEQ ID NO: 36634 - DNA, 80 bp, synthetic construct
  source 1..80: mol_type = other DNA
gtaataacatctggggctaggagcactaagagcatacaaactcagacagaaccaactgcctcatataattcaggacacga

SEQ ID NO: 36635 - DNA, 80 bp, synthetic construct
  source 1..80: mol_type = other DNA
gagtctgcgggacccctggtgcatgcatgaccagaaggataagaaagacagcgcaattgggcccgcaagggtctcagacg

SEQ ID NO: 36636 - DNA, 80 bp, synthetic construct
  source 1..80: mol_type = other DNA
ttgaatcggctgctgacaaggaagagactcgagatatagaaggagaagtcgcccatcaggtcgcagaaagcttctcgaag

SEQ ID NO: 36637 - DNA, 80 bp, synthetic construct
  source 1..80: mol_type = other DNA
agacccaaaagtatccgtcagcatcggcgcctccagatgatgacgacctttggatgcctccgcctgagtatgtcccttta

SEQ ID NO: 36638 - DNA, 80 bp, synthetic construct
  source 1..80: mol_type = other DNA
atgtgaaaaaaactgcatgaaaagactcaacagccctctaactgccatcatgaatataccttgctttgctgtgatcctca

SEQ ID NO: 36639 - DNA, 80 bp, synthetic construct
  source 1..80: mol_type = other DNA
atgatccatcttagttgccctaataacctgctgtctgaggaagaaggttgcaatacagagtctcctttcacctacttcga

SEQ ID NO: 36640 - DNA, 80 bp, synthetic construct
  source 1..80: mol_type = other DNA
gaattaggctgttcgacggaacttgggtctcttttacaaagccggacgttcatgtgtggtgcactcccaaccagttagtc

SEQ ID NO: 36641 - DNA, 80 bp, synthetic construct
  source 1..80: mol_type = other DNA
aatatacataacgacagactagatgaggttgaacatctgatcgtggacgatatcatcaagaagagagaggagtgtttaga

SEQ ID NO: 36642 - DNA, 80 bp, synthetic construct
  source 1..80: mol_type = other DNA
cacgctggaaactatacttatgtctcaatcagttagttttagacggttgagccatttcagaaagttagttccaggatatg

SEQ ID NO: 36643 - DNA, 80 bp, synthetic construct
  source 1..80: mol_type = other DNA
ctatgtttcctctccgtcatcctttaatcaacagagaggcagtcttcaagaaggatggaaatgccgatgattttgttgat

SEQ ID NO: 36644 - DNA, 80 bp, synthetic construct
  source 1..80: mol_type = other DNA
ctccatatgcctgatgttcaaaaatctgtgtcggatgtcgacctgggcctgcctcattgggggttctggttgttagtcgg

SEQ ID NO: 36645 - DNA, 80 bp, synthetic construct
  source 1..80: mol_type = other DNA
aacagtagtagcctttgtggtcttggcgtgcttgctccgtgtatgttgtaggagagtgagaaggagaaggtcactgcgtg

SEQ ID NO: 36646 - DNA, 80 bp, synthetic construct
  source 1..80: mol_type = other DNA
ccactcaggatatccccctcagcgttgcccctgcccctgtccctcgtgccaaagtggtgtcatcatgggagtcttataaa

SEQ ID NO: 36647 - DNA, 80 bp, synthetic construct
  source 1..80: mol_type = other DNA
gggctcccaggtacttgatgcctttatcatactgcctgacacatagatcacaacctgattacctgcctcagcacaccaga

SEQ ID NO: 36648 - DNA, 80 bp, synthetic construct
  source 1..80: mol_type = other DNA
tctcacccacatgctgtcaaatctcagttcacaacctccaatcacgattaatagggggttgtctgtctataagggagtgg

SEQ ID NO: 36649 - DNA, 80 bp, synthetic construct
  source 1..80: mol_type = other DNA
tgtcctctcacatattctgttgcctatacttaaaaacctttcctttttattgtctaaatatctctgaacacaatcaatag

SEQ ID NO: 36650 - DNA, 80 bp, synthetic construct
  source 1..80: mol_type = other DNA
acgactgggttttctggtttctataaagagttgccttctaacatggggtggttcaaatagtactctcttgagcctttaat

SEQ ID NO: 36651 - DNA, 80 bp, synthetic construct
  source 1..80: mol_type = other DNA
tagactgtcccatataatattattgatgtgaaaaaaacgtgcccttgggtcaaagtttacacttcaacactcctcctact

SEQ ID NO: 36652 - DNA, 80 bp, synthetic construct
  source 1..80: mol_type = other DNA
tcattttgcaatcatgatggacgtcacggaggtgtatgacgacccgatagaccctgttgaaccagagggagagtggaaca

SEQ ID NO: 36653 - DNA, 80 bp, synthetic construct
  source 1..80: mol_type = other DNA
tgcgttggattgggaagaggagaagaccattctggccctgtggagagacataacagcgatagatgtcaaaaatgaccgag

SEQ ID NO: 36654 - DNA, 80 bp, synthetic construct
  source 1..80: mol_type = other DNA
tctcatttaaggaccccttgtgggggaagctcttggtgacaaaggactttgtctatgcacacaataggaactgtttattc

SEQ ID NO: 36655 - DNA, 80 bp, synthetic construct
  source 1..80: mol_type = other DNA
gacaaaaactatacactgatgctaaaagatttgttcctatctagattcaactcattgcttatactagtatccccaccaga

SEQ ID NO: 36656 - DNA, 80 bp, synthetic construct
  source 1..80: mol_type = other DNA
ctcaaggtactcggacgatctggctgccaacctgtgccggctttacatttcaggtgacaggcttctctccacttgcggga

SEQ ID NO: 36657 - DNA, 80 bp, synthetic construct
  source 1..80: mol_type = other DNA
atgcaggatatgatgtgatcaagatgctggagccttatgtggtggatctcctagttagcagagctgagacattccgtcca

SEQ ID NO: 36658 - DNA, 80 bp, synthetic construct
  source 1..80: mol_type = other DNA
ttctggcctaaataacgaaggactcatgtatgaactggaaaacatctccaaaaatgcaatgtccatatatcgtgcgattg

SEQ ID NO: 36659 - DNA, 80 bp, synthetic construct
  source 1..80: mol_type = other DNA
cccccctttacccacattgacacagtcagctccggtggtggctttttgtctctgtggtaccatggatttcttgaggaacc

SEQ ID NO: 36660 - DNA, 80 bp, synthetic construct
  source 1..80: mol_type = other DNA
aacctagtactgtggcacaaattgaacacaaggatgagcagtgtcaagagcaaattagcttggatgacctaatggcaagt

SEQ ID NO: 36661 - DNA, 80 bp, synthetic construct
  source 1..80: mol_type = other DNA
gcagaagccctcaagacaggaaaccttggctttaactgggattcagattgaacatgccatctgtacgagccatcaatgtc

SEQ ID NO: 36662 - DNA, 80 bp, synthetic construct
  source 1..80: mol_type = other DNA
aaccttggctttaactgggattcagattgaacatgccatctgtacgagccatcaatgtctcttaatgtcccaagggcaaa

SEQ ID NO: 36663 - DNA, 80 bp, synthetic construct
  source 1..80: mol_type = other DNA
gagaactttcagccaaggaaaaggaaggagaacttgcggaacaagggaaccagcaaggcgccgttgagcacgagagccca

SEQ ID NO: 36664 - DNA, 80 bp, synthetic construct
  source 1..80: mol_type = other DNA
agcatctcagccttcaaggactatagagagagaggaatagtcgaggagaaccacatgaggcttagcgaagaagatcagct

SEQ ID NO: 36665 - DNA, 80 bp, synthetic construct
  source 1..80: mol_type = other DNA
ggaaggatattttaaagctgttagagttgctaggaatcaaatgctcctttatcgcctgcgccgactgctcgtctacaccg

SEQ ID NO: 36666 - DNA, 80 bp, synthetic construct
  source 1..80: mol_type = other DNA
ccggatagatggtggattacggaggacagagtacgagtcttaaagaattcagtcagtttcctcttcaataaactctctag

SEQ ID NO: 36667 - DNA, 80 bp, synthetic construct
  source 1..80: mol_type = other DNA
caaaattttcaggtagcgaattggctgcattttgtcaataacaatcaatttagacaagtagttattgatggtgtattgaa

SEQ ID NO: 36668 - DNA, 80 bp, synthetic construct
  source 1..80: mol_type = other DNA
cagaaattcgatgcatacgttaacgtcaaatcttactttcaccgtttactcagatctgcttgcattcgtatcggccgata

SEQ ID NO: 36669 - DNA, 80 bp, synthetic construct
  source 1..80: mol_type = other DNA
agtttccaacaatgcctgttgattataagaggtcaatccagcgtggaatattattgctatcaaataggcttggtcaatta

SEQ ID NO: 36670 - DNA, 80 bp, synthetic construct
  source 1..80: mol_type = other DNA
gttgatttaactaggttattagcttacaactacgaaacactaatggcatgtgttacgatgaatatgcaacatgttcagac

SEQ ID NO: 36671 - DNA, 80 bp, synthetic construct
  source 1..80: mol_type = other DNA
tcaggtactgaatgacaatattagaaatggacatgtcattaatcagttgatggaggctttaatgcaactatcacgacaac

SEQ ID NO: 36672 - DNA, 80 bp, synthetic construct
  source 1..80: mol_type = other DNA
actaacatgctcttgaataatcaaccagtagcgctagttggagctcttccatttgttacagactcgtcagtcatatcgtt

SEQ ID NO: 36673 - DNA, 80 bp, synthetic construct
  source 1..80: mol_type = other DNA
aatagcgaagcttgacgctacagtttttgcccagatagttaaattacggaaagttgataccttgaaaccaatattgtata

SEQ ID NO: 36674 - DNA, 80 bp, synthetic construct
  source 1..80: mol_type = other DNA
cgtggccgtcttattctcaaacagtgtcttcaatgtatctaagtcactgaacgagccaaagttcttccccccatcggatc

SEQ ID NO: 36675 - DNA, 80 bp, synthetic construct
  source 1..80: mol_type = other DNA
caaaactgttgaggcacttcaatatatgctctagcacacttctattcttgtctactgcgatgggagatctgtcgaacttc

SEQ ID NO: 36676 - DNA, 80 bp, synthetic construct
  source 1..80: mol_type = other DNA
gttgggaccaatcaagcccaatcttcaaaaaggtagcatgcaactcctctatcagtctatcctctcactggatacggctg

SEQ ID NO: 36677 - DNA, 80 bp, synthetic construct
  source 1..80: mol_type = other DNA
atatacaagatagtcaaaaccactcgcctgaactgttctcctagggacatgttgagagagacagaagcttgcctgagaac

SEQ ID NO: 36678 - DNA, 80 bp, synthetic construct
  source 1..80: mol_type = other DNA
cttacaacaagtggatcaacataagggacatacgatccagaacatctatcttggattactgttgtctttagtctaattca

SEQ ID NO: 36679 - DNA, 80 bp, synthetic construct
  source 1..80: mol_type = other DNA
tggtgatagatttagagagcattattgaaaaaaacaggtaacaaataccttatgcattgtcatgtgactgtttttaattt

SEQ ID NO: 36680 - DNA, 80 bp, synthetic construct
  source 1..80: mol_type = other DNA
ttgaaaaaaacaggtaacaaataccttatgcattgtcatgtgactgtttttaatttttatgtggtttttttgttaagcgt

SEQ ID NO: 36681 - DNA, 80 bp, synthetic construct
  source 1..80: mol_type = other DNA
tcatcaagctagaccgaactcttttgccgaattcttaaacaaggtgtatgcagatgggtcataatccgagggcttcttgg

SEQ ID NO: 36682 - DNA, 80 bp, synthetic construct
  source 1..80: mol_type = other DNA
aaaacgagggtctacagatgagtagggttgtgggacagattccaagaaaaaaacttaacaccactctttgattcgtggtg

SEQ ID NO: 36683 - DNA, 80 bp, synthetic construct
  source 1..80: mol_type = other DNA
atgagcaagttgagaatagaggaccaatctggtaggactaaaacagaagaaggcgagggagatgaagatagctctgagga

SEQ ID NO: 36684 - DNA, 80 bp, synthetic construct
  source 1..80: mol_type = other DNA
ggatgactatctgtttgagggacaagacccgttaattctctttcagaatttccttgacgaaattggggccaaagcagtaa

SEQ ID NO: 36685 - DNA, 80 bp, synthetic construct
  source 1..80: mol_type = other DNA
ccatataatgacacatagggcgaaaaatactaagagtatacaaattcaaacagaaccagcggcatcatctagccctggag

SEQ ID NO: 36686 - DNA, 80 bp, synthetic construct
  source 1..80: mol_type = other DNA
gtgcggttctgcaggattccaggagcaaggatgacccaaatgacaaaaaagatcataccgccgatcatgatgtggtctca

SEQ ID NO: 36687 - DNA, 80 bp, synthetic construct
  source 1..80: mol_type = other DNA
gatgttgagtcagctattgacaaagacgagagccgagatatagagggagaagtcgctcatcaagttgcggaaagcttttc

SEQ ID NO: 36688 - DNA, 80 bp, synthetic construct
  source 1..80: mol_type = other DNA
tcagcttagccactacacattcccttggagactttcccttgtacacaattcccgagaagatagagaaatggactcctata

SEQ ID NO: 36689 - DNA, 80 bp, synthetic construct
  source 1..80: mol_type = other DNA
gacttgattcatctaagttgccctaacaacctcctgtctgaggaggaaggatgcaatacagagtcatccttcacttactt

SEQ ID NO: 36690 - DNA, 80 bp, synthetic construct
  source 1..80: mol_type = other DNA
aatatacataatgacagactagacgaggtagaacacttgatcgtggaggacatcatcaagaaaagagaagagtgcttaga

SEQ ID NO: 36691 - DNA, 80 bp, synthetic construct
  source 1..80: mol_type = other DNA
cactctagaaacaatactcatgtctcaatcaattagttttagacgattgagccatttcaggaaactagttccaggatatg

SEQ ID NO: 36692 - DNA, 80 bp, synthetic construct
  source 1..80: mol_type = other DNA
aactgtagtagcatttgtggtcttggtatgcttactccgtgtatgttgtaggcgagtgaggatgagaagatcagtacgtg

SEQ ID NO: 36693 - DNA, 80 bp, synthetic construct
  source 1..80: mol_type = other DNA
agactcaagagatccccctaagcatttcatctgcctctgcccctcgagctagagttgtgtcttcatgggagtcctataaa

SEQ ID NO: 36694 - DNA, 80 bp, synthetic construct
  source 1..80: mol_type = other DNA
gggctcccgggtacatgagacctccatcagaatgcctgacatataactcacaaccggattacctgcctcggcacgacaca

SEQ ID NO: 36695 - DNA, 80 bp, synthetic construct
  source 1..80: mol_type = other DNA
actcagcaacatggtatcaaatctcctttcatgccctcccacgtataatgattagcggagggttgcttgccaatcgggtg

SEQ ID NO: 36696 - DNA, 80 bp, synthetic construct
  source 1..80: mol_type = other DNA
tggtgtcctctcacacattccgttactcgttcgttgaaatccctccttcttcactgtctaaatatctctgaatgcaatca

SEQ ID NO: 36697 - DNA, 80 bp, synthetic construct
  source 1..80: mol_type = other DNA
acagatgattgggtcttctgatttttataaagagtggccttctaacatgggttggttcaaacaataatctattgagtctt

SEQ ID NO: 36698 - DNA, 80 bp, synthetic construct
  source 1..80: mol_type = other DNA
caatcattctgaggtgcggcaatattagcttgaactaacctcaaggtctaagtgctcctgttttctaataatatcacagg

SEQ ID NO: 36699 - DNA, 80 bp, synthetic construct
  source 1..80: mol_type = other DNA
gcgtctagctgttctgtatgataacaggacgccatatgatgtttctttgtattgtaggatgttgattcgtcagattgtgg

SEQ ID NO: 36700 - DNA, 80 bp, synthetic construct
  source 1..80: mol_type = other DNA
ccctagaccgtctcatgtgatgttgtcaatgtgaaaaaaacatgcccccttgtcaaagtcaacacatcaacactcctcct

SEQ ID NO: 36701 - DNA, 80 bp, synthetic construct
  source 1..80: mol_type = other DNA
atctcagtggtaaccatgatggatgttactgaggtgtatgacgacccgatagaccctgtcgaaccagaaggagagtggaa

SEQ ID NO: 36702 - DNA, 80 bp, synthetic construct
  source 1..80: mol_type = other DNA
gcattctttaagggaatggatatcgcagcagtaaagatcggaggtgtaggggcccaggcaatgatggcgttgtgggtctt

SEQ ID NO: 36703 - DNA, 80 bp, synthetic construct
  source 1..80: mol_type = other DNA
ggggtctcattcagagtcatccagaagcagaaagtgcttagctgatttgtctgccttttatcgaaggaccctacctatcg

SEQ ID NO: 36704 - DNA, 80 bp, synthetic construct
  source 1..80: mol_type = other DNA
gagagacatagcatctatagatgtcaaaaatgaccgagtctcttttaaggaccctttgtgggggaaactcttagtgacaa

SEQ ID NO: 36705 - DNA, 80 bp, synthetic construct
  source 1..80: mol_type = other DNA
atatatgtgccattcctaagaaccatcctctagccccttatattgcaacacaaacatggcccccgaagcatgtggtggat

SEQ ID NO: 36706 - DNA, 80 bp, synthetic construct
  source 1..80: mol_type = other DNA
ctcctaggagattcttggcacactctcccaataactcaaatttttgaggttccggaatctatggacccttctgagattct

SEQ ID NO: 36707 - DNA, 80 bp, synthetic construct
  source 1..80: mol_type = other DNA
cagaattggttcaaaaggacttcaggttggcggattctacttttcactggcatttaaggtgtcaaaaatgtatcagaccc

SEQ ID NO: 36708 - DNA, 80 bp, synthetic construct
  source 1..80: mol_type = other DNA
gtatatgtgtcccctaagagacacaccatatatagctaagaatcaatagataagcatagatcaaagggctgaacaaccct

SEQ ID NO: 36709 - DNA, 80 bp, synthetic construct
  source 1..80: mol_type = other DNA
caaaaacaaaaaaggggtagacacgttcattgatagaacagaaatgtaacacccctacaatggatgttaacaaggttgtt

SEQ ID NO: 36710 - DNA, 80 bp, synthetic construct
  source 1..80: mol_type = other DNA
taatgaggcaggtcctgggtggtcatggggaagatactattgattcagatgacgaaatattatcacttcttaaagaatcc

SEQ ID NO: 36711 - DNA, 80 bp, synthetic construct
  source 1..80: mol_type = other DNA
ctaagacgaacaagatgggttgaccaagaggtccgccatgcagccaagtcaatgactccggacctaaatcctgttcccaa

SEQ ID NO: 36712 - DNA, 80 bp, synthetic construct
  source 1..80: mol_type = other DNA
gacttcatgagctctacaactctcctgtggcatattacttcgggaagcaaaccataagaggaaggaagtatctatcatgg

SEQ ID NO: 36713 - DNA, 80 bp, synthetic construct
  source 1..80: mol_type = other DNA
agttgggctaactcaagccctatattcaagaaggtagcatgcaactcctccatcagcttatcctctcactggatcaggtt

SEQ ID NO: 36714 - DNA, 80 bp, synthetic construct
  source 1..80: mol_type = other DNA
ctacaacaaatggatcagcataagggacataaggtctagaacttccatcatggactactgttgtctttaatcagttctat

SEQ ID NO: 36715 - DNA, 80 bp, synthetic construct
  source 1..80: mol_type = other DNA
tttgatagattaaaaagcattcgtgaaaaaaacgagtaacaagcacatcatgcattgtcctgtgattgtttttaattttt

SEQ ID NO: 36716 - DNA, 80 bp, synthetic construct
  source 1..80: mol_type = other DNA
gtgaaaaaaacgagtaacaagcacatcatgcattgtcctgtgattgtttttaatttttatgtggtttttttgttaagcgt

SEQ ID NO: 36717 - DNA, 80 bp, synthetic construct
  source 1..80: mol_type = other DNA
tcatcaggcgagacctaactcttttgccgaatttttgaacaaggtctatgccgatggatcataatcagagggcttcttag

SEQ ID NO: 36718 - DNA, 80 bp, synthetic construct
  source 1..80: mol_type = other DNA
aggatgacagtttgcagaagatcaaagttgtgagacggactccaagaaaaaaacttaacaccactcttcaattcgtggtg

SEQ ID NO: 36719 - DNA, 80 bp, synthetic construct
  source 1..80: mol_type = other DNA
aaaaaaatgagtaaggacttggtacatcctagtcttatcagagccgggatagtagaactagagatggcagaggagaccac

SEQ ID NO: 36720 - DNA, 80 bp, synthetic construct
  source 1..80: mol_type = other DNA
tcctgcaattctagatggaaagaaaccagggataaccttggggaaggcccccgatttaaatactgcttataagtctatct

SEQ ID NO: 36721 - DNA, 80 bp, synthetic construct
  source 1..80: mol_type = other DNA
atgagcagattgagaattagggacagttctggcgggaccaaaatggaggtggaggacagagaggaaggcagctcggagga

SEQ ID NO: 36722 - DNA, 80 bp, synthetic construct
  source 1..80: mol_type = other DNA
agatgactatatgtctgagggacaagacccattggtcctctttcagaatttcctcgacgagattggggccaaagcggtca

SEQ ID NO: 36723 - DNA, 80 bp, synthetic construct
  source 1..80: mol_type = other DNA
aaaagttgaaaactggtgagggattcttcagagtgtggtcatccctttcagatgacataaaggggtatgtctctacccat

SEQ ID NO: 36724 - DNA, 80 bp, synthetic construct
  source 1..80: mol_type = other DNA
ataatgaaatccaaggcgacaaatactaaaagtagacagactcaaacagaaccaaccacatcatctagttctggaaatga

SEQ ID NO: 36725 - DNA, 80 bp, synthetic construct
  source 1..80: mol_type = other DNA
gagtctgtgggattctcggtgcatgtctgatcaaaaggatgagaaagaccactctactgatcatgagatggtcttagatg

SEQ ID NO: 36726 - DNA, 80 bp, synthetic construct
  source 1..80: mol_type = other DNA
ttgattctgctacagacaaagaagagattcgagatatagaaggagaagtcgctcaccaggtcgcggaaagcttttcaaag

SEQ ID NO: 36727 - DNA, 80 bp, synthetic construct
  source 1..80: mol_type = other DNA
tgtcaggaatgaaggctgctaagcttgatccagacgatgtttgctcttacttggcagctgctatgcctctgttcgagggg

SEQ ID NO: 36728 - DNA, 80 bp, synthetic construct
  source 1..80: mol_type = other DNA
aacagctacatggcccggcttgaggatgcagactagggactgttcaaccccctaataaaaccttgaattgggaatttcag

SEQ ID NO: 36729 - DNA, 80 bp, synthetic construct
  source 1..80: mol_type = other DNA
tcatgacatgaaaaaaacatgtaacatccctaaaaagatgaatttcctaaagaagatggttagaagctgcaaggaggaag

SEQ ID NO: 36730 - DNA, 80 bp, synthetic construct
  source 1..80: mol_type = other DNA
agattcagaagtgtccatcagcatcagcgcctccggacgatgatgacctttggatgcctccaccagaatatgtccctttg

SEQ ID NO: 36731 - DNA, 80 bp, synthetic construct
  source 1..80: mol_type = other DNA
gagtagactttaattcacatctctgtctctcagttgttacctctgtttgcagtagagaataaccgcgagcaatagaacaa

SEQ ID NO: 36732 - DNA, 80 bp, synthetic construct
  source 1..80: mol_type = other DNA
atgtgaaaaaaactacataaaaaggcacaacagccctctcacagccatcatgaatataccttgctttgctgttatcttca

SEQ ID NO: 36733 - DNA, 80 bp, synthetic construct
  source 1..80: mol_type = other DNA
gtttagccattacatattccttgggagagttccccttgtacacgatccccgagaagatagaaaaatggactcccatagac

SEQ ID NO: 36734 - DNA, 80 bp, synthetic construct
  source 1..80: mol_type = other DNA
atgatccatctgagttgccctaacaacctattgtcggaggaagagggctgcaacacagagtctcccttcacatactttga

SEQ ID NO: 36735 - DNA, 80 bp, synthetic construct
  source 1..80: mol_type = other DNA
tgtttccacttcgtcatcctttaattaaaagagaatcagttttcaaaacggatggtgatgctgatgactttgtggatctc

SEQ ID NO: 36736 - DNA, 80 bp, synthetic construct
  source 1..80: mol_type = other DNA
catatgcccgatgttcacaaatctgtgtcaggtgtcgacctgggcctgcctcattggaggttttggctgttgatcggggc

SEQ ID NO: 36737 - DNA, 80 bp, synthetic construct
  source 1..80: mol_type = other DNA
cgacggcagtcgcatttgtggtcttggtgtgcttgcttcgtgtgtgctgtaggagaataagaaggagaagatctctacat

SEQ ID NO: 36738 - DNA, 80 bp, synthetic construct
  source 1..80: mol_type = other DNA
gcgactcaagagatccccctcagcgtttcctctgcctctgtcccaagagccaaagtggtgtcatcatgggagtcttataa

SEQ ID NO: 36739 - DNA, 80 bp, synthetic construct
  source 1..80: mol_type = other DNA
gggctcccaggtacttgatacttctatccaattgcctgacacataactcacaacctgactacctgcctcggcacgcccaa

SEQ ID NO: 36740 - DNA, 80 bp, synthetic construct
  source 1..80: mol_type = other DNA
gatcaaccatatggtgtcaaatctccgttcataccctccgatatgtgatgattggaggagggttgcctgttaattgggtg

SEQ ID NO: 36741 - DNA, 80 bp, synthetic construct
  source 1..80: mol_type = other DNA
gtggcatcccatcatacattccgttattcttaagttagagtctcttctttctcgttgtctaaatagctctgaatataatc

SEQ ID NO: 36742 - DNA, 80 bp, synthetic construct
  source 1..80: mol_type = other DNA
actagatgactaggtcttctgatctctacaaagatttgccttctaacatggggtggttcaaatagtactcttttgagcct

SEQ ID NO: 36743 - DNA, 80 bp, synthetic construct
  source 1..80: mol_type = other DNA
catttcgaggtgcgttaatattagcttgaactaacctcaaggtctaaatgctcctgtgattttcaataatctcacagaag

SEQ ID NO: 36744 - DNA, 80 bp, synthetic construct
  source 1..80: mol_type = other DNA
catcttattgttctgtatggtgacaggacacaatataatgtctctttgtgtagtagaggtttgattcgtctgattgtatc

SEQ ID NO: 36745 - DNA, 80 bp, synthetic construct
  source 1..80: mol_type = other DNA
tctaataccgtcctatatgatcttggtgatgtgaaaaaaacttgcccttaggtcaaagtctacacatcaacaatcctcct

SEQ ID NO: 36746 - DNA, 80 bp, synthetic construct
  source 1..80: mol_type = other DNA
gtctcatttccaaccatgatggatatcacagaggtgtatgacgacccgatagatcctgttgaaccagaaggagagtggaa

SEQ ID NO: 36747 - DNA, 80 bp, synthetic construct
  source 1..80: mol_type = other DNA
gatctaactctgaatcatctaggagtaggaggtgcctaactgacttgtctgccttttatcgccgaaccatgcctatagaa

SEQ ID NO: 36748 - DNA, 80 bp, synthetic construct
  source 1..80: mol_type = other DNA
tctattttgaaccacaccttgatgaacagaggattgcagactcccaaggagggagtgttatcaggattaaatagagtcag

SEQ ID NO: 36749 - DNA, 80 bp, synthetic construct
  source 1..80: mol_type = other DNA
acgcactggattgggaagaagagaagactatcctagccctatggagagacataacatctatagatgtcaaaaatgaccga

SEQ ID NO: 36750 - DNA, 80 bp, synthetic construct
  source 1..80: mol_type = other DNA
gtttcctttaaggaccctttatgggggaagctcttggtgacaaaagattttgtctatgcacacaataacaattgtttatt

SEQ ID NO: 36751 - DNA, 80 bp, synthetic construct
  source 1..80: mol_type = other DNA
cgacaaaaactatacactgatgctgaaggatctgttcttatctcgatttaactcattgctcatacttgtttccccgccgg

SEQ ID NO: 36752 - DNA, 80 bp, synthetic construct
  source 1..80: mol_type = other DNA
cctccgaagcttgggttcatcacctttgtcaggaagcgggaaaccccgacttgggagatagaagtctggagagcttcaca

SEQ ID NO: 36753 - DNA, 80 bp, synthetic construct
  source 1..80: mol_type = other DNA
cttcagaaatgttagctttaatcccgaagtcttcggtagcttgcggatgttacacaagggaggcaggcaaccccaggatt

SEQ ID NO: 36754 - DNA, 80 bp, synthetic construct
  source 1..80: mol_type = other DNA
tccgtttcggtgttgccttcttttgacccttcttttctatcacggggcccccttaaggggtatctagggtcttctacatc

SEQ ID NO: 36755 - DNA, 80 bp, synthetic construct
  source 1..80: mol_type = other DNA
cagagttagtccaaaaagaccttcggttggcagattctacctttcattggcacttaagatgtcagaaatgcattagaccc

SEQ ID NO: 36756 - DNA, 80 bp, synthetic construct
  source 1..80: mol_type = other DNA
ttaacaacaaaaacaaaaaaggggtagacacgttcatcgatagaacagaaatgtaacacccctacaatggatgttaacaa

SEQ ID NO: 36757 - DNA, 80 bp, synthetic construct
  source 1..80: mol_type = other DNA
tggcaaatggaagagacgtaggtactagcataccgaactcttccacaattctccgtacccatagggacgtaggagatgtt

SEQ ID NO: 36758 - DNA, 80 bp, synthetic construct
  source 1..80: mol_type = other DNA
ggtacttaagcttcctaaaagcagccgaactcactttgagatgtaggcatagcataccgaactcttccacaattctccgt

SEQ ID NO: 36759 - DNA, 80 bp, synthetic construct
  source 1..80: mol_type = other DNA
acgcttaacaacaaaatcataaaaggggcagacatgttcatttgtataacacaaatgtaacacccctacaatggatgctg

SEQ ID NO: 36760 - DNA, 80 bp, synthetic construct
  source 1..80: mol_type = other DNA
agaagccataacagcatcaccagagtgcgactggttgtggattttctctgatttcagaagcattaagatgacttatttaa

SEQ ID NO: 36761 - DNA, 80 bp, synthetic construct
  source 1..80: mol_type = other DNA
ctctgatcacatatcagtctcaccttttactgcaaaaaatagataggaacttatcaaagcagatgagagttcagttgagg

SEQ ID NO: 36762 - DNA, 80 bp, synthetic construct
  source 1..80: mol_type = other DNA
caactgaattccctgatgagacaggtgttaggtgggcatggagaaggctctttagactctgctgacgacattcacgggtt

SEQ ID NO: 36763 - DNA, 80 bp, synthetic construct
  source 1..80: mol_type = other DNA
gttaagagacgctctacaacgaacacgatgggttgaccaggaggtccgccatgcagccaaggcgatgaaatgtgactaca

SEQ ID NO: 36764 - DNA, 80 bp, synthetic construct
  source 1..80: mol_type = other DNA
gtcctcaaaagagatcatcaaggaaagctagtagttctgaatggatatgctcagctcaacagattgccatatcgacctct

SEQ ID NO: 36765 - DNA, 80 bp, synthetic construct
  source 1..80: mol_type = other DNA
cattaaacgctacagttatccaaagttgtgccccgcatgagatgtccgtattgggaggttatttgggagaggaattcttc

SEQ ID NO: 36766 - DNA, 80 bp, synthetic construct
  source 1..80: mol_type = other DNA
tcaaatcctgccccgacatctgagattgatatcagagcattgtctaggaagttgcaaaatcctcttatttctggccttcg

SEQ ID NO: 36767 - DNA, 80 bp, synthetic construct
  source 1..80: mol_type = other DNA
agttgttcaatgggctactggagcccattataagcttaaaccgatcctcaacgagctagatacatatcccacattgtgtt

SEQ ID NO: 36768 - DNA, 80 bp, synthetic construct
  source 1..80: mol_type = other DNA
tggtagtgggtgatggttccgggggaatttcaagggcagtgctgagcatgttccctgatgctaaattagtttttaatagt

SEQ ID NO: 36769 - DNA, 80 bp, synthetic construct
  source 1..80: mol_type = other DNA
ctcttggaggtcagtgacttgatggcttcagggacacacccattacctccctccgcgttggtaagtggaggagaggatat

SEQ ID NO: 36770 - DNA, 80 bp, synthetic construct
  source 1..80: mol_type = other DNA
catatctcgagttattgacttccagtccatctgggagaagccttcagatttgagaaacccatcaacttggaggtatttcc

SEQ ID NO: 36771 - DNA, 80 bp, synthetic construct
  source 1..80: mol_type = other DNA
agagtgtccaacaaaccaccaacatgtcatatgatctgataatttgtgatgcagaagttacagacatttcctcgatcaac

SEQ ID NO: 36772 - DNA, 80 bp, synthetic construct
  source 1..80: mol_type = other DNA
aagataaccttgttaatgtctgatttctccctgtcgatcaatggtcctctgagtttaattttcaagacttacgggacaat

SEQ ID NO: 36773 - DNA, 80 bp, synthetic construct
  source 1..80: mol_type = other DNA
gttggttaatcctgactacagggctattcagcatctctctagggcattcccttcagcagcagggtatataacgcaggtga

SEQ ID NO: 36774 - DNA, 80 bp, synthetic construct
  source 1..80: mol_type = other DNA
cctcttcattctcttcagaactttacttgaagttctcaaagcgagggaagttttttagagaccctgagcatttaacatca

SEQ ID NO: 36775 - DNA, 80 bp, synthetic construct
  source 1..80: mol_type = other DNA
tctaccttgagagaaatgagcctggtgctctttaattgcagcagctccaagagcgagatgctgagagcaagatcattaaa

SEQ ID NO: 36776 - DNA, 80 bp, synthetic construct
  source 1..80: mol_type = other DNA
ggaaaggggacctttgagagacgattctttcgggacgagaaagagctgcaagactatgaagaagcagaggccactaagat

SEQ ID NO: 36777 - DNA, 80 bp, synthetic construct
  source 1..80: mol_type = other DNA
ctatcaagatcttgttaggggatttccagaagaaatcatatcaaatccatacaatgagatgataataaccctcatagata

SEQ ID NO: 36778 - DNA, 80 bp, synthetic construct
  source 1..80: mol_type = other DNA
acgatgtagagtcattccttgttcacaagatgattgatgacctggagcttcaacgaggggcgttctccaaactgtcaatc

SEQ ID NO: 36779 - DNA, 80 bp, synthetic construct
  source 1..80: mol_type = other DNA
atactaaccatcatggtggtgttttctaatagagtgttcaatgtgtctaagcctttgacagacactaagttttacccacc

SEQ ID NO: 36780 - DNA, 80 bp, synthetic construct
  source 1..80: mol_type = other DNA
gtcagacccgaagatcttaaaacacttcaatatctgttgtagcactctcttgtacttatcagttgctttgggtgatgtcc

SEQ ID NO: 36781 - DNA, 80 bp, synthetic construct
  source 1..80: mol_type = other DNA
tcaactttgcccgactccatgaactttacaacaaccctataacatattattttaggaagcaagtgataggagggagaatg

SEQ ID NO: 36782 - DNA, 80 bp, synthetic construct
  source 1..80: mol_type = other DNA
tatttggcctggagctggtcacacagtacatcggtctttaagagagttgcttgcaactcaaatctgagtctgtccgcgca

SEQ ID NO: 36783 - DNA, 80 bp, synthetic construct
  source 1..80: mol_type = other DNA
ctggattcggctgatctataaagtcgtcaagacaacaagactcactggaggccccaaggacctgtctcgagagatggaaa

SEQ ID NO: 36784 - DNA, 80 bp, synthetic construct
  source 1..80: mol_type = other DNA
gacatctaaagagctacaacagatggatcaactttgatgatctccgatccagatcatctctgttggattatagtggtctt

SEQ ID NO: 36785 - DNA, 80 bp, synthetic construct
  source 1..80: mol_type = other DNA
taagtatctctgaccataatattatatatgtccccaaaagccataccagagaacatgaaaaaacatttgaaacattctgt

SEQ ID NO: 36786 - DNA, 80 bp, synthetic construct
  source 1..80: mol_type = other DNA
aacatgaaaaaacatttgaaacattctgtacttctgcccccttgactcattttgtgtcttgtttgttttttttgttaagc

SEQ ID NO: 36787 - DNA, 80 bp, synthetic construct
  source 1..80: mol_type = other DNA
tgaggctgcattggctgatgatggaactgtgaactccgacgatgaagactttttctccggagatacaagaagtccagaag

SEQ ID NO: 36788 - DNA, 80 bp, synthetic construct
  source 1..80: mol_type = other DNA
ctgtttacacaaggatcatgatgaacggagggcggttaaagggggcacacataagaaggtacgtctctgtaagttctagt

SEQ ID NO: 36789 - DNA, 80 bp, synthetic construct
  source 1..80: mol_type = other DNA
caccaagcaagaccaaactcctttgcagagttcctcaacaagacctactccagtgactccagataagactctgctcaaag

SEQ ID NO: 36790 - DNA, 80 bp, synthetic construct
  source 1..80: mol_type = other DNA
caaaacaatgaggcatcaattccgctcaattagacatgaaaaaactaacaccactccgcaggtccatcaatcatcatgag

SEQ ID NO: 36791 - DNA, 80 bp, synthetic construct
  source 1..80: mol_type = other DNA
caagatttttatcaatcctagtgacattcgatcaggacttgcagatcttgagatggctgaagagaccgtcgaattggtca

SEQ ID NO: 36792 - DNA, 80 bp, synthetic construct
  source 1..80: mol_type = other DNA
cctgctattactgataagaagaagcctagtatcacacttggaagggctccggacttgaagacagcatacaagtccatctt

SEQ ID NO: 36793 - DNA, 80 bp, synthetic construct
  source 1..80: mol_type = other DNA
accggaacatggaagacagtcaagctcatctccaaggggtccccatagatgtggagaccctccctgaggatattcagaga

SEQ ID NO: 36794 - DNA, 80 bp, synthetic construct
  source 1..80: mol_type = other DNA
ctccatatcacagatcctcaagccagcctccgacaggatatggttgatgagcaaaaacaccaggaggatgaggactttta

SEQ ID NO: 36795 - DNA, 80 bp, synthetic construct
  source 1..80: mol_type = other DNA
ccttacaggaagagaaaaccctctttctccgtttcagacacatcttgatgctataggacttcgcattgtgaggaagatga

SEQ ID NO: 36796 - DNA, 80 bp, synthetic construct
  source 1..80: mol_type = other DNA
agacaggggaaggttttttcaagatatggtcacaggcagtggaggacatcgtctcttatgtagcccttaacttctccatt

SEQ ID NO: 36797 - DNA, 80 bp, synthetic construct
  source 1..80: mol_type = other DNA
ccagtgaacaagctgtttgaagacaagtccacccagactgttactgaaaagtctcaacaggcctctgcctcgtcggctcc

SEQ ID NO: 36798 - DNA, 80 bp, synthetic construct
  source 1..80: mol_type = other DNA
aaatcggcatgagaaatcatctcagaacgccagggtcaactccaaggatgcatcaggtcctgcagctctagactggactg

SEQ ID NO: 36799 - DNA, 80 bp, synthetic construct
  source 1..80: mol_type = other DNA
ccagcaatgaagcagatgacgagtcagtcgaagctgagatagctcatcagattgcagaaagcttctctaaaaagtacaag

SEQ ID NO: 36800 - DNA, 80 bp, synthetic construct
  source 1..80: mol_type = other DNA
ttcccgtctagatcctcagggattttcttatggaactttgaacaattgaaaatgaacttggatgaaatagttcgggaggt

SEQ ID NO: 36801 - DNA, 80 bp, synthetic construct
  source 1..80: mol_type = other DNA
caaggaaattcccggagtgatcaagatggcgaaagacgggatgaagctgcctctcaggtgtatgctgggaggagtggctt

SEQ ID NO: 36802 - DNA, 80 bp, synthetic construct
  source 1..80: mol_type = other DNA
ctacccactctcgaaggttccagattctcgtgaatccggaaaaacttggaaaagttatgcaggaggatcttgacaaatac

SEQ ID NO: 36803 - DNA, 80 bp, synthetic construct
  source 1..80: mol_type = other DNA
gtcggggatgaatgccgccaagctggatccagatgacgtatgttcatacttagcaggtgctatgattttgtttgagggtg

SEQ ID NO: 36804 - DNA, 80 bp, synthetic construct
  source 1..80: mol_type = other DNA
ctgacctattagattaggttttgataatacacaagacaaccatctcattcagttgtagcatagtcatggaaaaaacatgc

SEQ ID NO: 36805 - DNA, 80 bp, synthetic construct
  source 1..80: mol_type = other DNA
aacaccactgacaaaatgaacatcatccgtaagatagtaaaaagctgcaaagaggaggaggagcaaaagcccagtccggt

SEQ ID NO: 36806 - DNA, 80 bp, synthetic construct
  source 1..80: mol_type = other DNA
ttcagccccccccgatgacgatgacctgtggcttccccctccagagtatgtccctctgtcagagatcgccaataagaaga

SEQ ID NO: 36807 - DNA, 80 bp, synthetic construct
  source 1..80: mol_type = other DNA
acatgaggaatttctgtgtcaatggtgaaattaaagtgtgtagtccgaacgggtattcttttcgaattcttaggcacatc

SEQ ID NO: 36808 - DNA, 80 bp, synthetic construct
  source 1..80: mol_type = other DNA
ttaagatcctttgaaggggtatattcagggaacagaagaatgattggactggttaaggtggtgattggattggccttgtc

SEQ ID NO: 36809 - DNA, 80 bp, synthetic construct
  source 1..80: mol_type = other DNA
aggggcacctgtccctgatgggatgaactgggtttacaaaattagacgcactttaatatttcaatgggcagactcatcag

SEQ ID NO: 36810 - DNA, 80 bp, synthetic construct
  source 1..80: mol_type = other DNA
gccctcttgatggtgaggaacttgaatactctcaggaaataacttgggatgatgattccgagtttgtaggactgcaaata

SEQ ID NO: 36811 - DNA, 80 bp, synthetic construct
  source 1..80: mol_type = other DNA
agagtgagtgcaagacaatgtcatatccaagggagaatttggtgtatcaacatgaactcacgggcgtgtcaactctggtc

SEQ ID NO: 36812 - DNA, 80 bp, synthetic construct
  source 1..80: mol_type = other DNA
tgacatgtctctcaaaacccagcagtctgatgaagacaagaacacctctctcctgttggaatgactatctattaagatca

SEQ ID NO: 36813 - DNA, 80 bp, synthetic construct
  source 1..80: mol_type = other DNA
ttgtgcactgatagacactggtgacttccactcgtctccgcgagcaatagaacaacatatgttatggtgccacacaatag

SEQ ID NO: 36814 - DNA, 80 bp, synthetic construct
  source 1..80: mol_type = other DNA
tgtgtcccgaagattgggttagttatggaatccacattgcccggaaaggcgataaaataacccctgctacgttagttgac

SEQ ID NO: 36815 - DNA, 80 bp, synthetic construct
  source 1..80: mol_type = other DNA
ctgcataactccaaacttgtgatccagagccttcctaagtaagatcttagcaatgtgaaaaaaacaggcaacacccctca

SEQ ID NO: 36816 - DNA, 80 bp, synthetic construct
  source 1..80: mol_type = other DNA
aggagttcaagcgccatgccactcaatgcagtcatctttactcttctcctcagatgttccatctgccttggaaagtttcc

SEQ ID NO: 36817 - DNA, 80 bp, synthetic construct
  source 1..80: mol_type = other DNA
catttatacgatccctgacaaattggggccatggagccctatagacatacatcatctcagttgcccaaataacttggttg

SEQ ID NO: 36818 - DNA, 80 bp, synthetic construct
  source 1..80: mol_type = other DNA
tggaagacgaaggatgtacaactctcacccctttttcatacatggagttaaaggtaggttacattacatcaataaaggtg

SEQ ID NO: 36819 - DNA, 80 bp, synthetic construct
  source 1..80: mol_type = other DNA
tccggttttacctgcactggggtagtgactgaagctgagacttataccaatttcgttgggtatgtgacgacaacatttag

SEQ ID NO: 36820 - DNA, 80 bp, synthetic construct
  source 1..80: mol_type = other DNA
aagaagacatttccgtccatcagtaaactcttgtagagatgcatacaattggaagatcgcaggagaccctaggtatgaag

SEQ ID NO: 36821 - DNA, 80 bp, synthetic construct
  source 1..80: mol_type = other DNA
aatcactacacaacccttatccagactctcactggctcagaactgtcaagactacaaaagaatctcttttgataatctcc

SEQ ID NO: 36822 - DNA, 80 bp, synthetic construct
  source 1..80: mol_type = other DNA
cccagcgtggctgacatggatgcttatgacaagaagctttactccaagatgtttcctaacggaaggtgttcggaaatatc

SEQ ID NO: 36823 - DNA, 80 bp, synthetic construct
  source 1..80: mol_type = other DNA
tcctggttcccccttttgtcccaccaatcacgaatacactatctggatgcccgagagctcaaaccccggaatatcctgtg

SEQ ID NO: 36824 - DNA, 80 bp, synthetic construct
  source 1..80: mol_type = other DNA
acatattcacaagaagcatggggaagaaagccaccaaagatggacagttatgtgggtttgtagatgagagaggactgtac

SEQ ID NO: 36825 - DNA, 80 bp, synthetic construct
  source 1..80: mol_type = other DNA
atagttagaacaaatacagagggtaactgggctcagacgggaggtcaggatttaactagagatccaacaatctcagaaca

SEQ ID NO: 36826 - DNA, 80 bp, synthetic construct
  source 1..80: mol_type = other DNA
aaatctttgaagggagcttgtagattaagactctgtgggatcagcggactgagactgatggacgggtcatgggtttcact

SEQ ID NO: 36827 - DNA, 80 bp, synthetic construct
  source 1..80: mol_type = other DNA
cccacaggttaacaactcagaatggtgctccccagaccaactcgtcaacattcacgacttccattcagatgagatagagc

SEQ ID NO: 36828 - DNA, 80 bp, synthetic construct
  source 1..80: mol_type = other DNA
atcttgtcgcagatgagttggtgaaaaagagagaggattgtctagacgcccttgaaactatcatcttcaccaaatctata

SEQ ID NO: 36829 - DNA, 80 bp, synthetic construct
  source 1..80: mol_type = other DNA
agtttccggcggttaagccatcttcggaagctggttccaggctttggtaaagcatatactatcataaataggacccttat

SEQ ID NO: 36830 - DNA, 80 bp, synthetic construct
  source 1..80: mol_type = other DNA
ggaagcagaggctcattacaagtcagtgcgggagtggaaggaaattattccatccaaggggtgtctgaaggcaggaggga

SEQ ID NO: 36831 - DNA, 80 bp, synthetic construct
  source 1..80: mol_type = other DNA
ggtgctatcctcatcacaatggaattttcttcaacgggatcattctgggtccgggaggggagatcttgatccctgagatg

SEQ ID NO: 36832 - DNA, 80 bp, synthetic construct
  source 1..80: mol_type = other DNA
cagtctgccttgctccaacagcacattgagctgttagagtcctctgtagttcccctcaaacaccccctggcagacccttc

SEQ ID NO: 36833 - DNA, 80 bp, synthetic construct
  source 1..80: mol_type = other DNA
gactgtcttcaagaatgatgatgaagcggagagtttcgtagatgttcaccttcctgatacaaaccaaaaaatatctggaa

SEQ ID NO: 36834 - DNA, 80 bp, synthetic construct
  source 1..80: mol_type = other DNA
ttgacttagggttgccagagtggaaacgttacttcctaataggagtctcagcagttgctttgttggctttatctataatt

SEQ ID NO: 36835 - DNA, 80 bp, synthetic construct
  source 1..80: mol_type = other DNA
atcgctgtctgttgcaaaaggttcaggaaaaggaggaaatccaaacccagtccagtagaattgactagaaaagtgtctgt

SEQ ID NO: 36836 - DNA, 80 bp, synthetic construct
  source 1..80: mol_type = other DNA
tgcatcattggtaggacttttactttgcctatataggttaagcaaaattgtaggacagaacacagggaattacaagacga

SEQ ID NO: 36837 - DNA, 80 bp, synthetic construct
  source 1..80: mol_type = other DNA
catatccaaaggaaatggaccggtcccttcctgggaatcttataaagaaggaaccacaggagatgttcgtaatacgactc

SEQ ID NO: 36838 - DNA, 80 bp, synthetic construct
  source 1..80: mol_type = other DNA
catcaacaagggagtgagaggccggatgatgcttgaggatgtccagatggatacattctttatgatttacctcatcactt

SEQ ID NO: 36839 - DNA, 80 bp, synthetic construct
  source 1..80: mol_type = other DNA
aagagcggtacacttgattgatataatgtttgaagatttacttcacattgtctgagaagacttaagagatcacaagaaag

SEQ ID NO: 36840 - DNA, 80 bp, synthetic construct
  source 1..80: mol_type = other DNA
tttcatcattatccattgatttctgctgcatagcgaggttgatttgtgccaaagattgtttgattttaacacccacccct

SEQ ID NO: 36841 - DNA, 80 bp, synthetic construct
  source 1..80: mol_type = other DNA
ccaataacgttggtgctcattacgatcaagacaaaatttaattagtagatggagtgacgcgggaatttgaaaggcaatca

SEQ ID NO: 36842 - DNA, 80 bp, synthetic construct
  source 1..80: mol_type = other DNA
tggtcaatgatttatatatgctacattagtataatttccacctttgtgtgttttgcacatttttgagggtacgcattagc

SEQ ID NO: 36843 - DNA, 80 bp, synthetic construct
  source 1..80: mol_type = other DNA
cttacaactaacccagggggaggtgtgatgagatcttaccacagatccattgcctcaatcaagatgagaacacagagctt

SEQ ID NO: 36844 - DNA, 80 bp, synthetic construct
  source 1..80: mol_type = other DNA
cagatccatggatgcgtgctcatgaaaaaaacatcacaaagaggaatagaaagaaaacaaaaaagttaacacccctcccc

SEQ ID NO: 36845 - DNA, 80 bp, synthetic construct
  source 1..80: mol_type = other DNA
tgagcgaccaccccccagcatgctggagtccacagaggtgcacgatgaccctctggatcctgttgaaccggagtccgatc

SEQ ID NO: 36846 - DNA, 80 bp, synthetic construct
  source 1..80: mol_type = other DNA
tcaagacaaactccgtcgtaccaaacattttaagaaactcagactacaatctgaactctcccctcttagaagatccttca

SEQ ID NO: 36847 - DNA, 80 bp, synthetic construct
  source 1..80: mol_type = other DNA
atgtggctgaccggatggaacagatttttgaaactgctccatttgtcaagatagtcgagcaccacacattaatgaccact

SEQ ID NO: 36848 - DNA, 80 bp, synthetic construct
  source 1..80: mol_type = other DNA
aaactgatgctcgagtggctgatgactggaaacaaaccacacagactcaacttgacagataacttgctcagatcatacaa

SEQ ID NO: 36849 - DNA, 80 bp, synthetic construct
  source 1..80: mol_type = other DNA
ggtcttgaaaggatatttcaagagattggacacgggttcgttgagagttggttctgtagggtcccaagcgatggtgaccc

SEQ ID NO: 36850 - DNA, 80 bp, synthetic construct
  source 1..80: mol_type = other DNA
tgtggctacatgggtcccattctgaatcaacaagaagtagaaaatgccttgcggagttgtctcagttctacaaaaaatca

SEQ ID NO: 36851 - DNA, 80 bp, synthetic construct
  source 1..80: mol_type = other DNA
gctccaatagagacattgctgaactgcacactggagaacaggggcttgagaacacccccggaaggggttctgtcttgtct

SEQ ID NO: 36852 - DNA, 80 bp, synthetic construct
  source 1..80: mol_type = other DNA
tgacaaagttcactatgatcaagcgttcgggcggtacctgggtaacacttattcttcatatctgttcttccatgtgatgg

SEQ ID NO: 36853 - DNA, 80 bp, synthetic construct
  source 1..80: mol_type = other DNA
ttctgtatatgaacgccttagattgggatgaggaaaagaccattctatctctgtggagggatatctcctccatagacatc

SEQ ID NO: 36854 - DNA, 80 bp, synthetic construct
  source 1..80: mol_type = other DNA
aagaatgacttagtgaagttcaaagatcagatatgggggactttggttgtcacgaaggatttcatatactcccagagtgc

SEQ ID NO: 36855 - DNA, 80 bp, synthetic construct
  source 1..80: mol_type = other DNA
aaattgtctatttgacaggaattacaccctcatgcttaaagaccttttcctgtcccgcttcaactcatttctgatattgc

SEQ ID NO: 36856 - DNA, 80 bp, synthetic construct
  source 1..80: mol_type = other DNA
tctcacctcccgaagcaagatattcagatgacttagtatctaacttgtgtcaactttacatatcaggcgacagggtattg

SEQ ID NO: 36857 - DNA, 80 bp, synthetic construct
  source 1..80: mol_type = other DNA
tctgtgtgtggaaactctggattcgacgtaatcaagttgttagagccgtacatagtaaacaagttagtacaaagggcaga

SEQ ID NO: 36858 - DNA, 80 bp, synthetic construct
  source 1..80: mol_type = other DNA
cacaaaatgtgtgcgaattggagcacaatacccaattttagatttcttgcaggaacatatgacatgttcttctccagggt

SEQ ID NO: 36859 - DNA, 80 bp, synthetic construct
  source 1..80: mol_type = other DNA
gaagttccgtcctctcatacactctctgggggatttccctcaatttattaaagacaagacaacccagctcgaagggacct

SEQ ID NO: 36860 - DNA, 80 bp, synthetic construct
  source 1..80: mol_type = other DNA
tcggccccagtgccaaggagtttttccaaactatggactgcctagacaatgtacatgacttggtgtttgtgtacggatgc

SEQ ID NO: 36861 - DNA, 80 bp, synthetic construct
  source 1..80: mol_type = other DNA
tatagacactggggccatccatatatagactatagaagagggctgtctaaactgtatgatcaggtccacctcaagaagac

SEQ ID NO: 36862 - DNA, 80 bp, synthetic construct
  source 1..80: mol_type = other DNA
aatagacaagagttatcaggagtgtttagccagtgacttagccaaaagaattctcagatgggggtttgataagtattcca

SEQ ID NO: 36863 - DNA, 80 bp, synthetic construct
  source 1..80: mol_type = other DNA
gatggtatgtagaccccaatttgttgcaaaatgatcatcccctggttccatatgtgagaacccaaacatggcctccaaaa

SEQ ID NO: 36864 - DNA, 80 bp, synthetic construct
  source 1..80: mol_type = other DNA
catgtggttgatgttgtgggagacacatggcacaatctccccattacccagatatttgagatacctgagtctatggaccc

SEQ ID NO: 36865 - DNA, 80 bp, synthetic construct
  source 1..80: mol_type = other DNA
ctccgagattttagatgacaagtcacactcatttacaagaaccaagctagcttcttggctttctgaacacagaggggggc

SEQ ID NO: 36866 - DNA, 80 bp, synthetic construct
  source 1..80: mol_type = other DNA
cggtccccagtgagaaggtcataatcacagccttgtccagacccccagtgaatcctagagagttcctcaggtctattgat

SEQ ID NO: 36867 - DNA, 80 bp, synthetic construct
  source 1..80: mol_type = other DNA
gtcagtgggttgcctgatgatgatctaatcataggtctaaaaccaaaggaaagagaattgaagatagagggccgattctt

SEQ ID NO: 36868 - DNA, 80 bp, synthetic construct
  source 1..80: mol_type = other DNA
cgcactcatgtcctggaatctgaggctttattttgtcatcacagagaagcttttggccacatacatcctgcctctatttg

SEQ ID NO: 36869 - DNA, 80 bp, synthetic construct
  source 1..80: mol_type = other DNA
ggatcatttgtactcggctattagggttgggacggtagtcactgcatatgaagattgttcaggtttagtctcctttactg

SEQ ID NO: 36870 - DNA, 80 bp, synthetic construct
  source 1..80: mol_type = other DNA
actctctaaccatgacagacaacctgaacaaagtcttcaaaaagttgatcgacagagtgacaggacaagggttgttagac

SEQ ID NO: 36871 - DNA, 80 bp, synthetic construct
  source 1..80: mol_type = other DNA
tactcgcgagttacatatgcatttcatctcgactatgagaagtggaacaatcaccagagactagagtctaccatagatgt

SEQ ID NO: 36872 - DNA, 80 bp, synthetic construct
  source 1..80: mol_type = other DNA
cttctcagttctagataaggtattcgggcttaaaaaagtcttctctagaacccatgagttctttcaaaaatcctggatct

SEQ ID NO: 36873 - DNA, 80 bp, synthetic construct
  source 1..80: mol_type = other DNA
attattctgacagatcagacctcattggcctgtggagagatcagatatactgcctagacatgagcaatggccccacatgc

SEQ ID NO: 36874 - DNA, 80 bp, synthetic construct
  source 1..80: mol_type = other DNA
tggaacggtcaggacggtggacttgaaggtctaagacaaaaagggtggagtctagtaagtctcttaatgattgacagaga

SEQ ID NO: 36875 - DNA, 80 bp, synthetic construct
  source 1..80: mol_type = other DNA
atcacaaacccgcaacacaagaaccaagattttggcacagggagacaatcaggtgttatgccccacatatatgttgtctc

SEQ ID NO: 36876 - DNA, 80 bp, synthetic construct
  source 1..80: mol_type = other DNA
ctgggttgaacaaggaggggcttctctatgaactagacagcatatctaggaatgccatctctatatatagggccattgaa

SEQ ID NO: 36877 - DNA, 80 bp, synthetic construct
  source 1..80: mol_type = other DNA
gatggagctgcaaagcttggtctgataatcaaaaaggaagagacaatgtgcagttatgactttttgatctatgggaagac

SEQ ID NO: 36878 - DNA, 80 bp, synthetic construct
  source 1..80: mol_type = other DNA
ccctttgtttcgaggcaacatactggtgccagaatctaagcgatgggctagagtctcatgtatttccaacgatcagattg

SEQ ID NO: 36879 - DNA, 80 bp, synthetic construct
  source 1..80: mol_type = other DNA
ttaatttggcaaacataatgtcgacggtatctaccaatgcattgactgttgcccagcactcccaatccctgataaaacca

SEQ ID NO: 36880 - DNA, 80 bp, synthetic construct
  source 1..80: mol_type = other DNA
aaagaattgtctttaaggtccgtaatcagctagtctctgtaaaaccagaggtcatctctgatcagtatgagtacaaatat

SEQ ID NO: 36881 - DNA, 80 bp, synthetic construct
  source 1..80: mol_type = other DNA
ggtttatcaagcagattaacttgaccgctagagaagccatattatacttctttcacaagaactttgaggaggagatcaaa

SEQ ID NO: 36882 - DNA, 80 bp, synthetic construct
  source 1..80: mol_type = other DNA
atgagagatttccttttgatgtctgttcaagctgtctttcactatcttttatttagtccgatcttgaagaatagagtata

SEQ ID NO: 36883 - DNA, 80 bp, synthetic construct
  source 1..80: mol_type = other DNA
caaaatccttgtggccgatggaactgaattcttgctggcgatgtcaaggataatttatttggacccttccctgggtggtg

SEQ ID NO: 36884 - DNA, 80 bp, synthetic construct
  source 1..80: mol_type = other DNA
tctcagggatgtctctaggaaggttccacatccgccaattctctgatccggtgtccgagggcttgtcattctggagagag

SEQ ID NO: 36885 - DNA, 80 bp, synthetic construct
  source 1..80: mol_type = other DNA
atttggtctagttcctctgagacttggattcactccctgtgtcaagaagcagggaatccagatcttggtgaaaggagttt

SEQ ID NO: 36886 - DNA, 80 bp, synthetic construct
  source 1..80: mol_type = other DNA
agagagtttcacgaggctcttagaagatccgactaccctgaatatcagaggaggggcaagtcccaccatcctactcaaag

SEQ ID NO: 36887 - DNA, 80 bp, synthetic construct
  source 1..80: mol_type = other DNA
aggcaatcagaaaagcattatacgacgaggtcgacaaagttgagaactcagaattcagagaagcaatcttgctatccaaa

SEQ ID NO: 36888 - DNA, 80 bp, synthetic construct
  source 1..80: mol_type = other DNA
actcaccgggacaactttatattgttcttaaggtctgtggagcctctgtttccaagatttctcagtgagttgttcagctc

SEQ ID NO: 36889 - DNA, 80 bp, synthetic construct
  source 1..80: mol_type = other DNA
atctttcctaggcatccctgagtctatcattggtctcatccaaaactcaagaacaattagaagacagtttaggaagagtc

SEQ ID NO: 36890 - DNA, 80 bp, synthetic construct
  source 1..80: mol_type = other DNA
tatctcggactctagaggagtctttcttcagctcagagattcacggaatcagtcgagtgacccaagtggctcaaaaaata

SEQ ID NO: 36891 - DNA, 80 bp, synthetic construct
  source 1..80: mol_type = other DNA
ggaagggtttggaggtgttccgcagagagggcagaccagctccgggaaatatcctggggcaggaaagttgtgtggacaac

SEQ ID NO: 36892 - DNA, 80 bp, synthetic construct
  source 1..80: mol_type = other DNA
agaatgtttgagcccggacaggagactgctgtgcctcactcctactttatccactttagatccttaggtcttagcggcaa

SEQ ID NO: 36893 - DNA, 80 bp, synthetic construct
  source 1..80: mol_type = other DNA
tgtccctcacccatccgagatgttgtccatgatacctaagtcgtccatctcctgcacctgtggacagctagaagatgaca

SEQ ID NO: 36894 - DNA, 80 bp, synthetic construct
  source 1..80: mol_type = other DNA
atccccgtatctctgtgtcagtccttccgtccttcgaccaaacttttttctcccgagggcctctcaaaggttatttgggt

SEQ ID NO: 36895 - DNA, 80 bp, synthetic construct
  source 1..80: mol_type = other DNA
tcttccacctctatgtccactcagttgttccatgcatgggaaaaagtcacaaacgttcatgtggtcaagagagccctatc

SEQ ID NO: 36896 - DNA, 80 bp, synthetic construct
  source 1..80: mol_type = other DNA
tcttaaggaatcaatcaactggttcatatcgagagactctaatttggcgcacacattgattcgtaatattgtatctctga

SEQ ID NO: 36897 - DNA, 80 bp, synthetic construct
  source 1..80: mol_type = other DNA
ctggcccttcctttcctcttgaggaggctcccgtgttcaaaaggactggatctgctctgcatcgtttcaagtctgccaga

SEQ ID NO: 36898 - DNA, 80 bp, synthetic construct
  source 1..80: mol_type = other DNA
tacagtgaagggggatactcttccatttgtcccaacctattgtcccacatctctgtgagtacagataccatgtcagatct

SEQ ID NO: 36899 - DNA, 80 bp, synthetic construct
  source 1..80: mol_type = other DNA
cacgcaagatgggacaaactttgactttatgttccagcctttaatgctttatgcccaaacgtggacctctgagctggtcc

SEQ ID NO: 36900 - DNA, 80 bp, synthetic construct
  source 1..80: mol_type = other DNA
aaaaagacttgagactgaaggattccacattccattggcatctcagatgtgtcagatgtgtcaggccgatagatgatatc

SEQ ID NO: 36901 - DNA, 80 bp, synthetic construct
  source 1..80: mol_type = other DNA
actctcgaggccccgaatgtcttctcctttccagatgtttctagaagaatatctcgaatggtatcaggggctgttcctca

SEQ ID NO: 36902 - DNA, 80 bp, synthetic construct
  source 1..80: mol_type = other DNA
attccaaaaactgccagaaatctctttgaagccaggtaagttcgagaccctcagtgggaaagatcaatccaaacacattg

SEQ ID NO: 36903 - DNA, 80 bp, synthetic construct
  source 1..80: mol_type = other DNA
gtctccttactcctccaatgctgtcggacatgtgttcaacttgatccattttgtaggttgttacatgggtcaaatcagat

SEQ ID NO: 36904 - DNA, 80 bp, synthetic construct
  source 1..80: mol_type = other DNA
ggacagcccagggtctcttgtactctatattggtggctatccatgattcagggtacaatgatggaaccgttttcccagtc

SEQ ID NO: 36905 - DNA, 80 bp, synthetic construct
  source 1..80: mol_type = other DNA
aacatatacaagagagtgtctcccagagactatctcagagggctagcgagaggtgtcttgatagggtcctccatttgctt

SEQ ID NO: 36906 - DNA, 80 bp, synthetic construct
  source 1..80: mol_type = other DNA
cttaacccggatgaccagcattaacatcaatcgcccgttggagctgatttctggagtcatctcttacattttgttgagac

SEQ ID NO: 36907 - DNA, 80 bp, synthetic construct
  source 1..80: mol_type = other DNA
tcgacaaccacccctccctgtatgtcatgttgaaagaaccctctctcaggctcgagatattttccatccctcaaaaaata

SEQ ID NO: 36908 - DNA, 80 bp, synthetic construct
  source 1..80: mol_type = other DNA
cccgctgcgtatccgacaaccatgaaggagggcaacaggtctgtcttatgctatctgcaacatgtgctgagatatgaaag

SEQ ID NO: 36909 - DNA, 80 bp, synthetic construct
  source 1..80: mol_type = other DNA
ctttgagcgatcatttttcagcatgctggagtccacagaggtgtacgatgaccctctggatcctgttgaaccggagtcag

SEQ ID NO: 36910 - DNA, 80 bp, synthetic construct
  source 1..80: mol_type = other DNA
aagcttcctaaaagtagccgaactcactttgagacgtaggcatagtataccgaactcttccacaattctccgtacccata

SEQ ID NO: 36911 - DNA, 80 bp, synthetic construct
  source 1..80: mol_type = other DNA
ccttacctattagattgagttttgaaaacacacatgatgatcatttaatccaattgtagcacagccatgaaaagaacatg

SEQ ID NO: 36912 - DNA, 80 bp, synthetic construct
  source 1..80: mol_type = other DNA
ccctcaacaatagattgagaggttgaatgatgcttgagggtgtccagaacaatacattctttatgatttacctcatccac

SEQ ID NO: 36913 - DNA, 80 bp, synthetic construct
  source 1..80: mol_type = other DNA
ccaagaacggtacatttaactgatataatgtttaaagctttacatcaaatcataggagaatacttaggagatgacgagaa

SEQ ID NO: 36914 - DNA, 80 bp, synthetic construct
  source 1..80: mol_type = other DNA
ggtgttgtcattatccattgatttctgctgcattgcggagttgatttgtgccaataattgtttaattttaacgcccattc

SEQ ID NO: 36915 - DNA, 80 bp, synthetic construct
  source 1..80: mol_type = other DNA
tttcaacaacgctggtgctcattatgatcaagacaaaattaggttaatagatggagtgatgcggggatttgaaaggaaat

SEQ ID NO: 36916 - DNA, 80 bp, synthetic construct
  source 1..80: mol_type = other DNA
ccttgtcactaacccagggtgaggtgtaataaggtcttaccatagatccatcgcctcaatctggataagcacacaggcct

SEQ ID NO: 36917 - DNA, 80 bp, synthetic construct
  source 1..80: mol_type = other DNA
tcagatttatggatgcgtgctcatgaaaaaaacatcacaaggaggaataggaagaaaatgaaagagttaacacccctcct

SEQ ID NO: 36918 - DNA, 80 bp, synthetic construct
  source 1..80: mol_type = other DNA
ctttgatcgatcctctttcaatatgcttgagtctacagaggtgtatgatgaccctctagatcctgttgaaccggagtcag

SEQ ID NO: 36919 - DNA, 80 bp, synthetic construct
  source 1..80: mol_type = other DNA
atctcaagacaaactccgtcgttccaaacatcttaagaaattctgactacaatctgaactctcccctcttagaagacccc

SEQ ID NO: 36920 - DNA, 80 bp, synthetic construct
  source 1..80: mol_type = other DNA
atccaaggacttgatagaggctgcaaactgtatttaatggcagagaccccgaaagtcccgacttatcggaccgtataccc

SEQ ID NO: 36921 - DNA, 80 bp, synthetic construct
  source 1..80: mol_type = other DNA
ggcgcctgtgtactcgcctccgatcaacgtccgattgtccaaccccgagtccgcagtggcagcatgtaatgagttcctag

SEQ ID NO: 36922 - DNA, 80 bp, synthetic construct
  source 1..80: mol_type = other DNA
tcaaagtgactataaaaaaccctgaacagtaataaaacataaaattaataaggagtaccataattggcaaacggaagaga

SEQ ID NO: 36923 - DNA, 80 bp, synthetic construct
  source 1..80: mol_type = other DNA
agtgctctgttatgatctcattgaaacccctttctgacaaggatggctgatgaatcctctgggctgccaatctaagctct

SEQ ID NO: 36924 - DNA, 80 bp, synthetic construct
  source 1..80: mol_type = other DNA
ggtcccctctcacatctagtccctgaagagggcacagatctttgccatcgacatcatgataggacagccagggaggcagc

SEQ ID NO: 36925 - DNA, 80 bp, synthetic construct
  source 1..80: mol_type = other DNA
ggtgcatcatatgcctcgggtatgcaggggataggccgtccatggtagtcccagtgacaggaagccactcactcaagacg

SEQ ID NO: 36926 - DNA, 80 bp, synthetic construct
  source 1..80: mol_type = other DNA
cagtcagccccaccatactgctttaagagttcgataactctacgggcatcaaacccttgataagcaaactctcggaccca

SEQ ID NO: 36927 - DNA, 80 bp, synthetic construct
  source 1..80: mol_type = other DNA
tcattgcggtccactgcttgagcagcaaactggatcgcaagctcttgatagttgtccattattgtaatagtgtttgtatc

SEQ ID NO: 36928 - DNA, 80 bp, synthetic construct
  source 1..80: mol_type = other DNA
cttgagactgctgctgcctcaccccaccaccccaaattacaactaagcttacatctaaagtattattgcataagtttcta

SEQ ID NO: 36929 - DNA, 80 bp, synthetic construct
  source 1..80: mol_type = other DNA
ccccccctgcttcccgcctatcatcaaatggatcaatggctatcagggtccccttcaccaacagaggccgctcatctcca

SEQ ID NO: 36930 - DNA, 80 bp, synthetic construct
  source 1..80: mol_type = other DNA
ttttgtcattccttgtctgtggcagagaacccctctcaaagacaacaaagggatcaatcagatttgttgtgcactccaat

SEQ ID NO: 36931 - DNA, 80 bp, synthetic construct
  source 1..80: mol_type = other DNA
ccccatcctccacattgctcaaaacacttattctctcgcatggtcgtgctttccccaacaaatgaaaactctgctgaagt

SEQ ID NO: 36932 - DNA, 80 bp, synthetic construct
  source 1..80: mol_type = other DNA
ttcattgtccctccaagacagacacctattcacatggcattccccgacaaggtggcatctccttgagctcaaacatttag

SEQ ID NO: 36933 - DNA, 80 bp, synthetic construct
  source 1..80: mol_type = other DNA
ccttgacccccttcaacatcaaacaagcctctgccccaactgaccctgctctgatcaatgctgtgccagacagtctacac

SEQ ID NO: 36934 - DNA, 80 bp, synthetic construct
  source 1..80: mol_type = other DNA
aactatccccacccgctttttgtgaggaggaccctttatgagggaaatcttgtcctcaggatccttaccatggcaggtga

SEQ ID NO: 36935 - DNA, 80 bp, synthetic construct
  source 1..80: mol_type = other DNA
tgtgcctgttgccaggctttgatgtcatgtatgaggttgctcacgtacagtgcgttcggcttctgcaagcagcaaaagag

SEQ ID NO: 36936 - DNA, 80 bp, synthetic construct
  source 1..80: mol_type = other DNA
agaactttcctaactgaggctctccccatcttagaaatagcataatcaacaaacttatccattaagggatgagcaatcat

SEQ ID NO: 36937 - DNA, 80 bp, synthetic construct
  source 1..80: mol_type = other DNA
agccccgtactttcatctccacctcctcctttctcagtctgatgacatctgacatatcacccttaataatataaactggg

SEQ ID NO: 36938 - DNA, 80 bp, synthetic construct
  source 1..80: mol_type = other DNA
acccctgacctcttctttactggagctcctgttattctgactgttctaggcttgctttccattctagcaaagaaattcct

SEQ ID NO: 36939 - DNA, 80 bp, synthetic construct
  source 1..80: mol_type = other DNA
cagcatgatggggagaaacaactggattccagttattcctccaatcccagatgttgagatggaatcagaggaggagagtg

SEQ ID NO: 36940 - DNA, 80 bp, synthetic construct
  source 1..80: mol_type = other DNA
ccccactttagagaggagctaagaattagagcgccacctgggctcacgctacacgtttctgggatggtgacatcttcatc

SEQ ID NO: 36941 - DNA, 80 bp, synthetic construct
  source 1..80: mol_type = other DNA
tgatgttgcacaagtccacacaggccccttacattgcttccgggccctgatgccatgtgtttcaggaattttcactttat

SEQ ID NO: 36942 - DNA, 80 bp, synthetic construct
  source 1..80: mol_type = other DNA
ctgaaaaaggattgaacatgccaccccaggatatagacccatccttcttcttaagaatgaagggctcacctgctattctc

SEQ ID NO: 36943 - DNA, 80 bp, synthetic construct
  source 1..80: mol_type = other DNA
tttaaccaaatgataattactatgaatggaaatgagttccaaactggaggaattggcaatctaccaattagaaattggaa

SEQ ID NO: 36944 - DNA, 80 bp, synthetic construct
  source 1..80: mol_type = other DNA
gacttatctcacgttgatcacttatcaagctcatctctggctacaaaagatggagaagaatctctctaagcaaatgaggg

SEQ ID NO: 36945 - DNA, 80 bp, synthetic construct
  source 1..80: mol_type = other DNA
ccaagttgcgccagctgaactccttaatgcgtcaagttttaggaggccacggagaagaaaacgtagagtcagatgatgaa

SEQ ID NO: 36946 - DNA, 80 bp, synthetic construct
  source 1..80: mol_type = other DNA
tagatcaagaagttcgtcatgcagctaaaacaatggagccagactccaacccagtctctagggtgtctagaaaagtaggg

SEQ ID NO: 36947 - DNA, 80 bp, synthetic construct
  source 1..80: mol_type = other DNA
tcatcggaatggatatgctcagcccaacaaattgccttttcaacatctctcaatccagcatctacatctgatattgattt

SEQ ID NO: 36948 - DNA, 80 bp, synthetic construct
  source 1..80: mol_type = other DNA
gaggtccttatcccgtcagtatcaaaatccacttatgtctgggctacgagtggttcagtgggctaccggagctcactaca

SEQ ID NO: 36949 - DNA, 80 bp, synthetic construct
  source 1..80: mol_type = other DNA
aaatcaaacctatactaaatgatcttgagacatgtccatgtttatcattggtaataggagatggatcaggcggtatttct

SEQ ID NO: 36950 - DNA, 80 bp, synthetic construct
  source 1..80: mol_type = other DNA
gaagtatttccattcagtacaaaccagagtgaagactcaatttgatttgatagtgtgtgatgctgaagtcactgacattg

SEQ ID NO: 36951 - DNA, 80 bp, synthetic construct
  source 1..80: mol_type = other DNA
actcagtcaataaaataacccttttgttatctgatttctctatgtcaatcaaaggacctttgtatttgatctttaagact

SEQ ID NO: 36952 - DNA, 80 bp, synthetic construct
  source 1..80: mol_type = other DNA
tatggaactatgctgattaatcccaattacaaagctatccatcacttatctagagcattcccatgtgtcactggatttgt

SEQ ID NO: 36953 - DNA, 80 bp, synthetic construct
  source 1..80: mol_type = other DNA
cacccaaatgacctcttctttttcttcagaaatatatttgagattttcgaaaacaggttatttcttccgagatcacgagc

SEQ ID NO: 36954 - DNA, 80 bp, synthetic construct
  source 1..80: mol_type = other DNA
tgttaactgcatcaactatcagagaaatgagtcttgtattgtttaattgcagcaatccgaaaagtgagatgttaagagct

SEQ ID NO: 36955 - DNA, 80 bp, synthetic construct
  source 1..80: mol_type = other DNA
cttgagttgaagagaggtcattcttcaaagatggcaataattcttgctataactattttgttttccaacagagtcttcaa

SEQ ID NO: 36956 - DNA, 80 bp, synthetic construct
  source 1..80: mol_type = other DNA
tgtttccaagtctctcaaagataaaaagttttttcctccctctgatccaaaacttttgaggcattttaatatatgctcta

SEQ ID NO: 36957 - DNA, 80 bp, synthetic construct
  source 1..80: mol_type = other DNA
gcacccttttatttttatctactgctatgggtgatttgactaactttacaaaaattcatgaactttacaactctcccata

SEQ ID NO: 36958 - DNA, 80 bp, synthetic construct
  source 1..80: mol_type = other DNA
acttattactttaagaagcagaccataaaaagtaaaaggttcttgtcatggagttgggaagatcctggacctgtttttaa

SEQ ID NO: 36959 - DNA, 80 bp, synthetic construct
  source 1..80: mol_type = other DNA
aaaagtgtcatgcaattcatctctaagcttatcagctcattggatcagattaatctacaagatagtcaagactactcgat

SEQ ID NO: 36960 - DNA, 80 bp, synthetic construct
  source 1..80: mol_type = other DNA
tgaattgcagtcctagggagctggttagagagatcgagatgtatctgcggaattataatcggtggattacaatgaaagat

SEQ ID NO: 36961 - DNA, 80 bp, synthetic construct
  source 1..80: mol_type = other DNA
atccgatcaagaacgtcgattttggattattgctgtctataaaaatgttgtcgaattttgacctttttcctctctctaaa

SEQ ID NO: 36962 - DNA, 80 bp, synthetic construct
  source 1..80: mol_type = other DNA
tgtgatacacagaccaaagagaaaatatagaaaaaaacatctgcaagtgtctgaacgtctctccatgtgattgtttttaa

SEQ ID NO: 36963 - DNA, 80 bp, synthetic construct
  source 1..80: mol_type = other DNA
tagaggcatctttggcagatgacgggacggtagactctgatgatgaggacttcttctctggagagacaaggagccctgaa

SEQ ID NO: 36964 - DNA, 80 bp, synthetic construct
  source 1..80: mol_type = other DNA
agagaaaatatagaaaaaaacatctgcaagtgtctgaacgtctctccatgtgattgtttttaatttttatttgttttttt

SEQ ID NO: 36965 - DNA, 80 bp, synthetic construct
  source 1..80: mol_type = other DNA
gcagtctacagcagaatcatgatgaacaatggcagattgaagaaatctcacatacgcagatatgtttctgtcagttcgaa

SEQ ID NO: 36966 - DNA, 80 bp, synthetic construct
  source 1..80: mol_type = other DNA
ccatcaggcccggccgaattcctttgcagaattcctcaacaaggtgtattcagagagctcataactctactgcttacgct

SEQ ID NO: 36967 - DNA, 80 bp, synthetic construct
  source 1..80: mol_type = other DNA
ccaagcgcaagcgcatcgaacggtacatattattgaaggaggatagaaaaaaactcaacatctctcctcaagtcatctct

SEQ ID NO: 36968 - DNA, 80 bp, synthetic construct
  source 1..80: mol_type = other DNA
ccaacatgagcaagggattaatacaccctagtgccatccgctcaggcttggtagatttggagatggctgaggaaactgtg

SEQ ID NO: 36969 - DNA, 80 bp, synthetic construct
  source 1..80: mol_type = other DNA
gacttggttcataaaaatcttgcagacagtcaagcacatttgcaaggggagcccttaaatgtcgactccttgccggaaga

SEQ ID NO: 36970 - DNA, 80 bp, synthetic construct
  source 1..80: mol_type = other DNA
ggaaaaaaccaggcatcactttaggaagggctcctgatttgagcacagcatacaagtctatattgtctggtatgaatgcc

SEQ ID NO: 36971 - DNA, 80 bp, synthetic construct
  source 1..80: mol_type = other DNA
tatgaggaagatgaggttgacgaatgccccgagtgagagagaaatcattgaagaagatgaagaggaatatagctctgagg

SEQ ID NO: 36972 - DNA, 80 bp, synthetic construct
  source 1..80: mol_type = other DNA
atgaatactatctgtctcaggggcaagaccctatggttccattccagaatttcctcgacgaacttgggacacaaatagtc

SEQ ID NO: 36973 - DNA, 80 bp, synthetic construct
  source 1..80: mol_type = other DNA
aggaggatgaaatcaggagatggctttttcaaaatctggtccgcagcatcagaggatataaaagggtatgttctctccac

SEQ ID NO: 36974 - DNA, 80 bp, synthetic construct
  source 1..80: mol_type = other DNA
cttcatgaagccagaaacacaggctacagtgagcaaacaaacacagacagactcactatctgttccgagaccttcccagg

SEQ ID NO: 36975 - DNA, 80 bp, synthetic construct
  source 1..80: mol_type = other DNA
ggtacacttctgtcccgagggataagccatccaactctgagtcacaagggggaggggtcaagcctaagaaagttcagaaa

SEQ ID NO: 36976 - DNA, 80 bp, synthetic construct
  source 1..80: mol_type = other DNA
tcagagtggactagagatactgatgaaatcagtgatattgaaggagaagtcgcacatcaagttgctgagagtttttcaaa

SEQ ID NO: 36977 - DNA, 80 bp, synthetic construct
  source 1..80: mol_type = other DNA
atgtccctggagtagacaaaattgcagagaaaggaggaaagctgccgctgaggtgcattttggggttcgtctctctagat

SEQ ID NO: 36978 - DNA, 80 bp, synthetic construct
  source 1..80: mol_type = other DNA
tcttctaagagatttcgcctccttgcggacactgacaaggtggccagactcatgcaggatgacatccacaactacatgac

SEQ ID NO: 36979 - DNA, 80 bp, synthetic construct
  source 1..80: mol_type = other DNA
tagaattgaggagatagatcacaattagaaaattctcaaaaatgagctgattccgatcaacatgggtaaaatcttgaaaa

SEQ ID NO: 36980 - DNA, 80 bp, synthetic construct
  source 1..80: mol_type = other DNA
gccaagttagattcagatgacgtttgctcctatctggctgcagctatgcaactctttgaaggggtctgtccagaggattg

SEQ ID NO: 36981 - DNA, 80 bp, synthetic construct
  source 1..80: mol_type = other DNA
aaacatgcaacacccctagaaccatgaatttcctgaggaagatagtgaagaattgcaaagatgaagagatcccaaagccc

SEQ ID NO: 36982 - DNA, 80 bp, synthetic construct
  source 1..80: mol_type = other DNA
gggactccatcagctcctcctgatgatgatgacctttggatgcctcccccagagtatgtgcctttgactcaaattaaggg

SEQ ID NO: 36983 - DNA, 80 bp, synthetic construct
  source 1..80: mol_type = other DNA
aagagaatgttagaaacttttgtataaatggagagatcaaaatatgtagccccaatggttactcttttaggatccttaga

SEQ ID NO: 36984 - DNA, 80 bp, synthetic construct
  source 1..80: mol_type = other DNA
catatattgaaatcttttgacaatgtttattctgggaatagaagactgatcggggtagtcaaagtggtgatcggcctggt

SEQ ID NO: 36985 - DNA, 80 bp, synthetic construct
  source 1..80: mol_type = other DNA
tttatctggatctcctgtcccggagggcatgaattgggtttataaactccgtagaactttgatttttcaatgggcagagt

SEQ ID NO: 36986 - DNA, 80 bp, synthetic construct
  source 1..80: mol_type = other DNA
ggcagatatgggcctaaaaacccagcaatctcaagaagatgagaacacttcacttctgttggaataatatagagctcagt

SEQ ID NO: 36987 - DNA, 80 bp, synthetic construct
  source 1..80: mol_type = other DNA
gaacatgtctctatctgttacctctgttttgagtagatataatctgtgagcaatagaacaaatacagctatggtgcctgc

SEQ ID NO: 36988 - DNA, 80 bp, synthetic construct
  source 1..80: mol_type = other DNA
ttcaaatacaaaatctatgaatttcgcactcggtcatctttagaatcaggtctgagcaaaatgtgaaaaaaactttttaa

SEQ ID NO: 36989 - DNA, 80 bp, synthetic construct
  source 1..80: mol_type = other DNA
gataagttacggaatacatatagcaacaaaaggagaaaccatcactccggatgttttgatagatgtgaccaggacaaacg

SEQ ID NO: 36990 - DNA, 80 bp, synthetic construct
  source 1..80: mol_type = other DNA
taagatttaacagccctccccacttgtcaccatgagtcaactaaatttgataccctttttctgtgtaattatagtcttgt

SEQ ID NO: 36991 - DNA, 80 bp, synthetic construct
  source 1..80: mol_type = other DNA
ctgtagaggactttcctctatatacaattcctgaaaagataggtccttggactccgatcgacctgatccatctgagctgt

SEQ ID NO: 36992 - DNA, 80 bp, synthetic construct
  source 1..80: mol_type = other DNA
cctaataatttgcagtcagaggatgaaggatgtggtacctcatcagtcttcagttatgtagagctcaagacaggttatct

SEQ ID NO: 36993 - DNA, 80 bp, synthetic construct
  source 1..80: mol_type = other DNA
atgtgacaaccacctttaagcggaaacatttcaagccgacggcattggcttgcagagatgcttatcattggaagatttct

SEQ ID NO: 36994 - DNA, 80 bp, synthetic construct
  source 1..80: mol_type = other DNA
ccatgtttcccaccgggacctgttctaggttctatccgtcatccccttcttgtgccacaaatcatgattacactttatgg

SEQ ID NO: 36995 - DNA, 80 bp, synthetic construct
  source 1..80: mol_type = other DNA
cttccagatgaccctaatctgagtttggcatgtgatatctttgtgaccagcacagggaaaaagtcaatgaatggctctag

SEQ ID NO: 36996 - DNA, 80 bp, synthetic construct
  source 1..80: mol_type = other DNA
agacgagagagggtattaccggacaataaaaggagcttgtaaactgacattatgtgggaaaccaggtttgaggttatttg

SEQ ID NO: 36997 - DNA, 80 bp, synthetic construct
  source 1..80: mol_type = other DNA
tggaggggaattgggctcaagcaggaggaacagacatgacaagagatcccacaattgctgaacatgcttctctagtagga

SEQ ID NO: 36998 - DNA, 80 bp, synthetic construct
  source 1..80: mol_type = other DNA
atggcacatggatatccttcacccgcccggaagtcactacctggtgccttcctaatcagttagtcaatattcacaacaat

SEQ ID NO: 36999 - DNA, 80 bp, synthetic construct
  source 1..80: mol_type = other DNA
cactttagagacagttttaatgtccaaatcaatcagttttagacgactaagtcacttcagaaaattagtgccaggatatg

SEQ ID NO: 37000 - DNA, 80 bp, synthetic construct
  source 1..80: mol_type = other DNA
ggaaggcttacactattttaaatgggagcttaatggaaactaacgttcattatttaaaggttgacaattggagtgaaata

SEQ ID NO: 37001 - DNA, 80 bp, synthetic construct
  source 1..80: mol_type = other DNA
ctgccttccaagggatgtttaaaaataaacaatcagtgtgttgctcattataagggggtcttctttaacgggatcatcaa

SEQ ID NO: 37002 - DNA, 80 bp, synthetic construct
  source 1..80: mol_type = other DNA
gggaccagatggtcatattttaatccccgagatgcagtcaagtttgttgaaacagcacatggacctcttgaaggcagcgg

SEQ ID NO: 37003 - DNA, 80 bp, synthetic construct
  source 1..80: mol_type = other DNA
tttttcccttgagacatcctctgattgaaccgggctctttgttcaataaggatggtgatgccgatgaatttgttgatgtc

SEQ ID NO: 37004 - DNA, 80 bp, synthetic construct
  source 1..80: mol_type = other DNA
cacatgcctgatgtacataagttggtatcagatgtcgacttggggctacccgattggagcctttatgcgttgataggggc

SEQ ID NO: 37005 - DNA, 80 bp, synthetic construct
  source 1..80: mol_type = other DNA
aactattatagctttctttatactgatatgtcttattcgtatctgctgcaagaagaggggtcggagaaactctcccacaa

SEQ ID NO: 37006 - DNA, 80 bp, synthetic construct
  source 1..80: mol_type = other DNA
atagacctgatcttcctatagggttgtctactacacctcaacccaagtctaaagtgatatcatcatgggaatcttataag

SEQ ID NO: 37007 - DNA, 80 bp, synthetic construct
  source 1..80: mol_type = other DNA
ggtacctctaatgtctgatgctgccttcttggagggatctccagcagataacttacaacccaactaactgcctcttcatt

SEQ ID NO: 37008 - DNA, 80 bp, synthetic construct
  source 1..80: mol_type = other DNA
tttgaacattccacgatacaatcatctcattgggtgatgggtcatgtcggctctaatcatctgaaacttatattttattt

SEQ ID NO: 37009 - DNA, 80 bp, synthetic construct
  source 1..80: mol_type = other DNA
gaagctatttatcggcttgatgtaaatattaattcagatatctgaatgtcgtgtaatcaggggtgtctttatttctcgct

SEQ ID NO: 37010 - DNA, 80 bp, synthetic construct
  source 1..80: mol_type = other DNA
tttggacagtgatatgacaatcagcgggtgtgcagggtctaggacacatctagaagactttgactagatgtgaccgtctc

SEQ ID NO: 37011 - DNA, 80 bp, synthetic construct
  source 1..80: mol_type = other DNA
aaaacatatcttcactttagcctttacaattctgaggtgcaatattctacaaatgaagcaattttacagtttttgtattc

SEQ ID NO: 37012 - DNA, 80 bp, synthetic construct
  source 1..80: mol_type = other DNA
ctcaaagtctaatcatccatggggagataaattattgtctgatctaagaatagcacacaatgcgaaatccactctcccct

SEQ ID NO: 37013 - DNA, 80 bp, synthetic construct
  source 1..80: mol_type = other DNA
cgttcccatctatcatgtgtttatttcagttgagtctgtgtaacataattaacatgaaaaaaacgggttgttttgacaag

SEQ ID NO: 37014 - DNA, 80 bp, synthetic construct
  source 1..80: mol_type = other DNA
tcaagtaccaacagccctcatttatatttcacaatcatgattgattcatctgaagtgtacgatgatcctatcgaccctgt

SEQ ID NO: 37015 - DNA, 80 bp, synthetic construct
  source 1..80: mol_type = other DNA
agagccagaaaatgaatggaccgggaactcgatcatcccaaatatattgagaaattcggattacaacttgaattctcccc

SEQ ID NO: 37016 - DNA, 80 bp, synthetic construct
  source 1..80: mol_type = other DNA
tgttggaagaccctactgacctaatgatgcaatggttgttgtccggaaatcgaccaaccagaatagctgtcacagaaaat

SEQ ID NO: 37017 - DNA, 80 bp, synthetic construct
  source 1..80: mol_type = other DNA
atatcaagatctcataaagttcttaaaagttcctttaagaagattgatatcgccctcatcaaaatagggggggcaagtgc

SEQ ID NO: 37018 - DNA, 80 bp, synthetic construct
  source 1..80: mol_type = other DNA
tcgccctcatcaaaatagggggggcaagtgctcaggcaatgataggaatttgggtactagggtctcatgcagaatcctct

SEQ ID NO: 37019 - DNA, 80 bp, synthetic construct
  source 1..80: mol_type = other DNA
tcaggcaatgataggaatttgggtactagggtctcatgcagaatcctctcgtagtcgaaagtgcttgtctgacttgtctg

SEQ ID NO: 37020 - DNA, 80 bp, synthetic construct
  source 1..80: mol_type = other DNA
ctttctaccaaagatctttacccattgagtctattttgaattataccttactcaatagaggattgcaaacccccaaagag

SEQ ID NO: 37021 - DNA, 80 bp, synthetic construct
  source 1..80: mol_type = other DNA
ggagttttggcaggtttgagtcgaatcaactatgaccagtcttttggaagatatctcgggaatttgtattcttcttatct

SEQ ID NO: 37022 - DNA, 80 bp, synthetic construct
  source 1..80: mol_type = other DNA
tgtcgttcaaggaccccttatggggcaagctcttggtgaccaaagagtttgtttactcttactcaggcaatagtttattt

SEQ ID NO: 37023 - DNA, 80 bp, synthetic construct
  source 1..80: mol_type = other DNA
gacagaaattacacattgatgttaaaagatttgttcctctctcgatttaactctcttctaatacttatatctccccctga

SEQ ID NO: 37024 - DNA, 80 bp, synthetic construct
  source 1..80: mol_type = other DNA
atctagatactctgatgacttggttggaaacttgtgtcgtttgtatatcacgggtgatcgtatcatatcaacatgtggaa

SEQ ID NO: 37025 - DNA, 80 bp, synthetic construct
  source 1..80: mol_type = other DNA
actcagggtatgatataattaaaatgttagaaccttatgtggttgatttgttagtccgaaaagcagaaacctttcgtcca

SEQ ID NO: 37026 - DNA, 80 bp, synthetic construct
  source 1..80: mol_type = other DNA
ctgattcactctttgggggaattcccgaccttcatcaaggataaaacaacccaactgatcggaacatttggaccgtgtgc

SEQ ID NO: 37027 - DNA, 80 bp, synthetic construct
  source 1..80: mol_type = other DNA
tgcacagtttttctcagttctgaatcagtttgagaacattcatgacctggtatttgtttatggctgctacaggcattggg

SEQ ID NO: 37028 - DNA, 80 bp, synthetic construct
  source 1..80: mol_type = other DNA
tcaatggatccatctgaaatactagatgacaaatctcactcatttactcggactaaactcatttattggctatctgaaaa

SEQ ID NO: 37029 - DNA, 80 bp, synthetic construct
  source 1..80: mol_type = other DNA
caaggggggacctgtgcctagtgagaaagttatcatcacagctctatcaaagcctccggtcaacccaagagagttcttaa

SEQ ID NO: 37030 - DNA, 80 bp, synthetic construct
  source 1..80: mol_type = other DNA
aatctatagatctgggaggtctgaaagaggatgatctaattataggactcaaacccaaagagagagagttgaaaattgaa

SEQ ID NO: 37031 - DNA, 80 bp, synthetic construct
  source 1..80: mol_type = other DNA
aaagtgttcaagaaactgatagacagagtgactgggcaagggttgagggattactcgagagtcacttatgctttccatct

SEQ ID NO: 37032 - DNA, 80 bp, synthetic construct
  source 1..80: mol_type = other DNA
agagactggaatccacgaaagacgttttctccgttctagacaaggcatttggtttgtctcatgttttttctagaacacat

SEQ ID NO: 37033 - DNA, 80 bp, synthetic construct
  source 1..80: mol_type = other DNA
gatcttataggtatatggagagatcaaatatattgtttggacatggctgccggtcctacatgttggaatggtcaagatgg

SEQ ID NO: 37034 - DNA, 80 bp, synthetic construct
  source 1..80: mol_type = other DNA
caaatatattgtttggacatggctgccggtcctacatgttggaatggtcaagatggggggctggaaggtcttcgacaaaa

SEQ ID NO: 37035 - DNA, 80 bp, synthetic construct
  source 1..80: mol_type = other DNA
ttatgtcccacttatatgctttcatctggcctcaacagtgaagggcttatgtatgaattagagagcatctccaagaatgc

SEQ ID NO: 37036 - DNA, 80 bp, synthetic construct
  source 1..80: mol_type = other DNA
acctatctgcacgagacgcgctcttatatttctttcacaagagttttgaagaagagattaaaagaatgtttgaacctggt

SEQ ID NO: 37037 - DNA, 80 bp, synthetic construct
  source 1..80: mol_type = other DNA
tctaaaggagaggacttcctcttggcaatgtcgagaataatctatctagatccctctttagggggtgtatccggtatgtc

SEQ ID NO: 37038 - DNA, 80 bp, synthetic construct
  source 1..80: mol_type = other DNA
attggggaggtttcatatcagacagttctctgatccagtgtctgaaggtttgaccttttggaaagaaatatggctcagtt

SEQ ID NO: 37039 - DNA, 80 bp, synthetic construct
  source 1..80: mol_type = other DNA
ttctatccaagacccatagagacaacttcattctattcttaaaatccatagagcccttatttcctagatttttgagtgaa

SEQ ID NO: 37040 - DNA, 80 bp, synthetic construct
  source 1..80: mol_type = other DNA
ctctttagttcctcttttttgggaatcccagaatctataataggtctaattcaaaactcaagaactgtcaggaggcagtt

SEQ ID NO: 37041 - DNA, 80 bp, synthetic construct
  source 1..80: mol_type = other DNA
tccgaaaaagtctctcaaggacactagaagagtcatttttttactcagagattcacgggataaacaggatgactcaaact

SEQ ID NO: 37042 - DNA, 80 bp, synthetic construct
  source 1..80: mol_type = other DNA
ccacaaagactaggtagggtgtggcagtgctctgctgaaagggcagatcagctaagggagatttcctggtggaggaaagt

SEQ ID NO: 37043 - DNA, 80 bp, synthetic construct
  source 1..80: mol_type = other DNA
cttcagagatgttagtactaattcctaaatcatctgtggcttgtggttgtaatacaagagagacttgcaatcctcgcata

SEQ ID NO: 37044 - DNA, 80 bp, synthetic construct
  source 1..80: mol_type = other DNA
tcagtatcaattctaccctcatttgatcattctttcttttctagaggtcccctcaaggggtatctagggtcttcaacatc

SEQ ID NO: 37045 - DNA, 80 bp, synthetic construct
  source 1..80: mol_type = other DNA
agagctctatctctaaaagagtcaatcaactggtttgtatccagggactcaaacctggctcaaaccttgataaagaatat

SEQ ID NO: 37046 - DNA, 80 bp, synthetic construct
  source 1..80: mol_type = other DNA
tctatctctgacaggccctgccttcccaatcgaggaggcccccgttttcaaaaggacaggctctgccttgcatagattca

SEQ ID NO: 37047 - DNA, 80 bp, synthetic construct
  source 1..80: mol_type = other DNA
tgaactagttcagaaagatgggaggctgaaagactcaacttttcattggcatttgagatgcaagaaatgtatcagaccaa

SEQ ID NO: 37048 - DNA, 80 bp, synthetic construct
  source 1..80: mol_type = other DNA
ttgaagaggtctctcttgaggctcctcaaagtttcacgtttcctgatatatccacaagaatatcaaggatggtgtctgga

SEQ ID NO: 37049 - DNA, 80 bp, synthetic construct
  source 1..80: mol_type = other DNA
attgagctaaagccaggtgacttgatgatcttaagcaataatgagagatcataccatataggcacagcacaaggtctgtt

SEQ ID NO: 37050 - DNA, 80 bp, synthetic construct
  source 1..80: mol_type = other DNA
cgctctttccagtgaatatttatgggaagatatctgcacgtagttatttacgagggttagcacgaggtgtactgatagga

SEQ ID NO: 37051 - DNA, 80 bp, synthetic construct
  source 1..80: mol_type = other DNA
cagtgggtcatacattcaacctgattcacttcataggatgttatatgggtcagataagatcacttaatgcgaccgtaatt

SEQ ID NO: 37052 - DNA, 80 bp, synthetic construct
  source 1..80: mol_type = other DNA
acagacctttggagttactgtctggggtgatatcatatatcttgttgaggcttgacaatcatccttctctctatgtaatg

SEQ ID NO: 37053 - DNA, 80 bp, synthetic construct
  source 1..80: mol_type = other DNA
cccaaaagataccggctgcttaccctaccaccatggaagaagggaatcgatctgttctatgctatcttcaacaggtcctg

SEQ ID NO: 37054 - DNA, 80 bp, synthetic construct
  source 1..80: mol_type = other DNA
agatacgagagggatagcatctcttcatccccagggagtgagctattgtggatattctcagattttagaagtataaaaat

SEQ ID NO: 37055 - DNA, 80 bp, synthetic construct
  source 1..80: mol_type = other DNA
tcgctttgatgtaggcatagcacaccgaactcttccataattctccgaacccacagggacgtaggagatgttcaaagtgg

SEQ ID NO: 37056 - DNA, 80 bp, synthetic construct
  source 1..80: mol_type = other DNA
ctataaaaccctgaatagtaataaaatataaaattaataaggatcaaatgagtaccataattggcaaacggaagagacgt

SEQ ID NO: 37057 - DNA, 80 bp, synthetic construct
  source 1..80: mol_type = other DNA
gtcttgactggacccaagtgctggctggtcagtatgtgacaaatcccagattcagcatatctgactattttgaaattgtt

SEQ ID NO: 37058 - DNA, 80 bp, synthetic construct
  source 1..80: mol_type = other DNA
gaaaattacatgttcacctttcttctgaatcagtggcattgttatgtgagacagaaagacaggtgctgtcttggatgagt

SEQ ID NO: 37059 - DNA, 80 bp, synthetic construct
  source 1..80: mol_type = other DNA
ccaaagagcagcatcaactattcttgagccttcttcctcaatctcatgagtgtctacagaaacataaggacggtagcgca

SEQ ID NO: 37060 - DNA, 80 bp, synthetic construct
  source 1..80: mol_type = other DNA
atgtcagtcatacctgacaacagcaatccccggcttctcaagtttgtgcctctcaagaaaggtttagcagttgtgaaaat

SEQ ID NO: 37061 - DNA, 80 bp, synthetic construct
  source 1..80: mol_type = other DNA
aaagcaagagtagcctattacacaaatacctcaggtcaggaggcatcaggcaacgtaactcagaagagctgtttagagag

SEQ ID NO: 37062 - DNA, 80 bp, synthetic construct
  source 1..80: mol_type = other DNA
ataaaaacaagaagaagtttataacaaattgcttgctaagcactgcactgtcaggaaagaaagtgtttaaagtacttgga

SEQ ID NO: 37063 - DNA, 80 bp, synthetic construct
  source 1..80: mol_type = other DNA
aagctagacaaagtggtgataaaagacaatctagaacaagggatagaagaagagattgaattttgcaataatctaacaaa

SEQ ID NO: 37064 - DNA, 80 bp, synthetic construct
  source 1..80: mol_type = other DNA
gacagtatcagaaaacccgctaccactcagttgctggtcagaagtgcagaattatatagaagacataggcttcaacaacg

SEQ ID NO: 37065 - DNA, 80 bp, synthetic construct
  source 1..80: mol_type = other DNA
tcttggtgaatatcgacaagaacacagtcaaaagtgaacttttgtggaagttcacactagataccaatgtaagtacaaca

SEQ ID NO: 37066 - DNA, 80 bp, synthetic construct
  source 1..80: mol_type = other DNA
agcaccatcaaggacatcagaaccctcgtctcctacatcagcaccgagaccatacccaagtttttactctcatttcttct

SEQ ID NO: 37067 - DNA, 80 bp, synthetic construct
  source 1..80: mol_type = other DNA
ttacgaggaagtgctgatgaacttgatccagcaatgcaaggcaacaaaagagctcatcaacagtacagggctttcggacc

SEQ ID NO: 37068 - DNA, 80 bp, synthetic construct
  source 1..80: mol_type = other DNA
ttgaattggagagtctgctcactctatgtgtgttctgctttcaaactgagcatagtaagcgaggaggaccaaggtgttct

SEQ ID NO: 37069 - DNA, 80 bp, synthetic construct
  source 1..80: mol_type = other DNA
ttcacagcactgctaagcttaattcacgaagactggcaaaagataggaaagaacatccttgtccgtgcaagcaatgaatt

SEQ ID NO: 37070 - DNA, 80 bp, synthetic construct
  source 1..80: mol_type = other DNA
aggggacatttcactgaaagtgattatcattttggtccctcacaaggatatgtccaagcccaaatcagaaaggatcgtca

SEQ ID NO: 37071 - DNA, 80 bp, synthetic construct
  source 1..80: mol_type = other DNA
ctgccagaagatcactgaatcatgctttgtccttgatgttcttggaagaggtcacattacctgagctgaaagccttttcc

SEQ ID NO: 37072 - DNA, 80 bp, synthetic construct
  source 1..80: mol_type = other DNA
agcctgagcaacgaattactatacaaggcacctaagaaagctcttacaatcgtatgcagcgccctatttggaaagcaaat

SEQ ID NO: 37073 - DNA, 80 bp, synthetic construct
  source 1..80: mol_type = other DNA
ttggttgaccactgtgtagacatggaaaagaagaaggatgctgtcagagcagttgaggactttgtgctaatgttgacggg

SEQ ID NO: 37074 - DNA, 80 bp, synthetic construct
  source 1..80: mol_type = other DNA
gagagcagtgaggcccagcatagtgaatccagcagtgcctgagtttgagcagtgtcaggagcagataagcctggatgact

SEQ ID NO: 37075 - DNA, 80 bp, synthetic construct
  source 1..80: mol_type = other DNA
taatggcgtgtgacataacagtggtgcaaccagacagagaggcagaggcactcatgactggcaatcttagctttaactgg

SEQ ID NO: 37076 - DNA, 80 bp, synthetic construct
  source 1..80: mol_type = other DNA
gattcagactaagcgtgattttgagtttacaaaagagctgtccatttcttacatgaaattcaaggaacccagcatgccta

SEQ ID NO: 37077 - DNA, 80 bp, synthetic construct
  source 1..80: mol_type = other DNA
tgctcaacactccgcatacatcaaactgtgcataggtgtctgcgtcgtgatcaattctagccagcattattcccaaacac

SEQ ID NO: 37078 - DNA, 80 bp, synthetic construct
  source 1..80: mol_type = other DNA
catcaaactgtgcataggtgtctgcgtcgtgatcaattctagccagcattattcccaaacactctgatcgcctaatttac

SEQ ID NO: 37079 - DNA, 80 bp, synthetic construct
  source 1..80: mol_type = other DNA
aaacaaactgcagaactgtttcaggaccatcagtcctgtcagtctgcttgcacttagaaacttggattttgattgtctta

SEQ ID NO: 37080 - DNA, 80 bp, synthetic construct
  source 1..80: mol_type = other DNA
atgccgaacaagacaaaccactcatatcataacatcaagcacataaccaaaacagcagcacagaaatattatttggatga

SEQ ID NO: 37081 - DNA, 80 bp, synthetic construct
  source 1..80: mol_type = other DNA
cagaagacagtctaactcatagatgtatgagaagtgtcacgaatgcagaagagcatgtaatatctgagttttttaagaag

SEQ ID NO: 37082 - DNA, 80 bp, synthetic construct
  source 1..80: mol_type = other DNA
aaggacatcatgaagttcattagcacttctggcagagcgatgagtgctggcaaaataggcaatgtgttgtcttatgcgca

SEQ ID NO: 37083 - DNA, 80 bp, synthetic construct
  source 1..80: mol_type = other DNA
caatctgtaccttagcaaaaccagtctgaacatgtcctctgaagacatctcacagctcttaatagaaatcaaaaggctat

SEQ ID NO: 37084 - DNA, 80 bp, synthetic construct
  source 1..80: mol_type = other DNA
atgccctgcaagaagactctgaagtagaacctatagcaataatctgtgatggtatagaaagcaacatgaggcagcttttc

SEQ ID NO: 37085 - DNA, 80 bp, synthetic construct
  source 1..80: mol_type = other DNA
gcaatattaccacctgactgtgcaagagaatgcgaggtcctctttgatgacatcagaaactcacctacccacagcactgc

SEQ ID NO: 37086 - DNA, 80 bp, synthetic construct
  source 1..80: mol_type = other DNA
gcctgaggccaagcttatcggtcttagtctagaggactacctccagaggatgtcttctgacaatgaatggggctccactc

SEQ ID NO: 37087 - DNA, 80 bp, synthetic construct
  source 1..80: mol_type = other DNA
ttccgctgccagaaaccccacttagtgaggtccactctatagagagaattatggagaacttcacccaacttatgtgtgac

SEQ ID NO: 37088 - DNA, 80 bp, synthetic construct
  source 1..80: mol_type = other DNA
gcaagaccttctggaggaaaagagggcacagagcaggtagggcagcctacttcacagggcactgaagagcccgacaacac

SEQ ID NO: 37089 - DNA, 80 bp, synthetic construct
  source 1..80: mol_type = other DNA
taatgttctctcttttaaggactacagagaaagaggcatagttgaggaaaaccacatgagattcagtgaagaggaccaac

SEQ ID NO: 37090 - DNA, 80 bp, synthetic construct
  source 1..80: mol_type = other DNA
ttgaaaaaagacagctgctgcttgtagaggtcgggttccaaactgacattgatgggaaaataagaacagaccacaaaaag

SEQ ID NO: 37091 - DNA, 80 bp, synthetic construct
  source 1..80: mol_type = other DNA
tggaaagacattctcaaactactggagctattaggaattaaatgctcatttattgcatgtgcagattgttcatccacccc

SEQ ID NO: 37092 - DNA, 80 bp, synthetic construct
  source 1..80: mol_type = other DNA
cctgacaggtggtggataaaagaggataaagtgcgcatcttaaaaaactcagtcagcttccttttcaacaaactttccag

SEQ ID NO: 37093 - DNA, 80 bp, synthetic construct
  source 1..80: mol_type = other DNA
aaattcacctactgaagtaacagacatagtcgttggagctataagcacccagaaggttaggagctaccttaaggcaggca

SEQ ID NO: 37094 - DNA, 80 bp, synthetic construct
  source 1..80: mol_type = other DNA
ctgcaacaaagacacctgtttcaaccaaggatgtttctgaaacttgggagaagatgaaagggcacatactcagtaggcca

SEQ ID NO: 37095 - DNA, 80 bp, synthetic construct
  source 1..80: mol_type = other DNA
acaggattaatgctgcccaacaaccttgagcaggcaatgcgtaaaggcctagtcgaaggtgttgttatttccaaagaggg

SEQ ID NO: 37096 - DNA, 80 bp, synthetic construct
  source 1..80: mol_type = other DNA
ttcagaactttgcattaatatgttgaaagagaacatggatgggatcactgacgaatttgaacagacaaagtacaaacatg

SEQ ID NO: 37097 - DNA, 80 bp, synthetic construct
  source 1..80: mol_type = other DNA
agctcacacagaacgttgtaacgagtgaaaaaatgctgttaagctggctgactgaggatatcaaatcagcaaggtgcagt

SEQ ID NO: 37098 - DNA, 80 bp, synthetic construct
  source 1..80: mol_type = other DNA
gaatgcctcaatgcaattaagaaggccgttgaagaaactaccaacctttcagaaaagattgaattacttgcttacaatat

SEQ ID NO: 37099 - DNA, 80 bp, synthetic construct
  source 1..80: mol_type = other DNA
gtggcaattgtcatcctagtggcgttagcatcaacaacacatctaatgtggacaagaggtgtccttgtgttgaagtcgtc

SEQ ID NO: 37100 - DNA, 80 bp, synthetic construct
  source 1..80: mol_type = other DNA
aatcactgtgaaaacaggggcttcgaggatagtaacgaatgcctaactgacttggacaggcttgtcaggctcacattacc

SEQ ID NO: 37101 - DNA, 80 bp, synthetic construct
  source 1..80: mol_type = other DNA
gtataaaatacccaacaggacaacttatcacacatgggaaagttgctgcaaagctcaaggacggaagcctgagagacaag

SEQ ID NO: 37102 - DNA, 80 bp, synthetic construct
  source 1..80: mol_type = other DNA
agtgaagagaatcagaggctggctgaaaggactgacatcgttaaaaaagaactctctgaagctaagctgaaagattactc

SEQ ID NO: 37103 - DNA, 80 bp, synthetic construct
  source 1..80: mol_type = other DNA
cacttatgcaaaaggggtaatttctaactcgctaaaaaacatttcgaagcagagcagatctaagtgttctgtgccaagat

SEQ ID NO: 37104 - DNA, 80 bp, synthetic construct
  source 1..80: mol_type = other DNA
cctggctcgaaaagatactctttgacttaaaagtgcctaccaaagatgaagaagttctcattaatattagaaactccttg

SEQ ID NO: 37105 - DNA, 80 bp, synthetic construct
  source 1..80: mol_type = other DNA
aaggccaggtctgaatttgttagaaacaacgataaattactcataaggtcaaaggaggagctgaagaagtattttgatgc

SEQ ID NO: 37106 - DNA, 80 bp, synthetic construct
  source 1..80: mol_type = other DNA
ccacactactaagctgaagaaaaacagacagccaacacctttccaagtcgattgcatattattcaaggaagttgcagcag

SEQ ID NO: 37107 - DNA, 80 bp, synthetic construct
  source 1..80: mol_type = other DNA
aatgtatgaaaagacacatgagtacaccatacgaggggatcgtggacaccctggtttcacttataaatgtcctaacaaga

SEQ ID NO: 37108 - DNA, 80 bp, synthetic construct
  source 1..80: mol_type = other DNA
ttcgtttggtttcaagaagttgtgttatatggcaagatttgtgaaaccttcttgaggtgctgtacggagttcaacaggtc

SEQ ID NO: 37109 - DNA, 80 bp, synthetic construct
  source 1..80: mol_type = other DNA
aggcattaagttggttaaggtaaggcattgtgacataaacctttctgttaaattgccctcaaacaagaaggagaacatgc

SEQ ID NO: 37110 - DNA, 80 bp, synthetic construct
  source 1..80: mol_type = other DNA
tatgctgcatttacagcaataatatggaacttttaaaaggccctttttacttaaataggagacaggctgtcctaggttcg

SEQ ID NO: 37111 - DNA, 80 bp, synthetic construct
  source 1..80: mol_type = other DNA
acagcgtgagtgacaaaatgctacaggacatagaaaatcactctatgactctatcagaagatgcattgaaagagctcact

SEQ ID NO: 37112 - DNA, 80 bp, synthetic construct
  source 1..80: mol_type = other DNA
gccgccctggagggcagatttgaagcatcatacaagatacgttctgcaaggtgcagagcaagcggaaacttcctaaatag

SEQ ID NO: 37113 - DNA, 80 bp, synthetic construct
  source 1..80: mol_type = other DNA
agtgttgccacagcttgagactgatgctagaggaacactaagcctagtggacaaggttatagctgtagaccagctaacat

SEQ ID NO: 37114 - DNA, 80 bp, synthetic construct
  source 1..80: mol_type = other DNA
tgtttgcccaggtgagcttggaaagaagttctcaacaagttgcagaagaattgaggacaacattgccaggctatacttac

SEQ ID NO: 37115 - DNA, 80 bp, synthetic construct
  source 1..80: mol_type = other DNA
aaacaaccgtctactgttcggttagggatgtggaggaaaatgtgaagcactggaagttgaaggacttgtgtcctgatgca

SEQ ID NO: 37116 - DNA, 80 bp, synthetic construct
  source 1..80: mol_type = other DNA
accgtaccctgctttactgtttatggcactttcgtcaacagtgacaggcagctaatatttgacatttacaatgtgcatat

SEQ ID NO: 37117 - DNA, 80 bp, synthetic construct
  source 1..80: mol_type = other DNA
ttataacaaggaaatggacaactttgatgagggttgtatcagtgtcctagaagaaactgctgaaaggcacatgctctggg

SEQ ID NO: 37118 - DNA, 80 bp, synthetic construct
  source 1..80: mol_type = other DNA
agcttgatctaatgaactcactctgctctgatgaaaggagagatgagagaactgcaaggttgctgttaggctgccctaat

SEQ ID NO: 37119 - DNA, 80 bp, synthetic construct
  source 1..80: mol_type = other DNA
gtcagaaaggctgcgaacaaggaaggaaaaaaattgatgaagttaagtgatgacacgtccactgacacaaacagcatcgc

SEQ ID NO: 37120 - DNA, 80 bp, synthetic construct
  source 1..80: mol_type = other DNA
ttcagaggtgtcagacaggaggtcttatagctcaagcaagagtaggatccgtagcattttcggaaggtacaactctcaga

SEQ ID NO: 37121 - DNA, 80 bp, synthetic construct
  source 1..80: mol_type = other DNA
aaaaaccctttgaactgaggtcaggtctcgaggtgtttaacgacccgtttaatgattatcaacaagcaataactgacgtg

SEQ ID NO: 37122 - DNA, 80 bp, synthetic construct
  source 1..80: mol_type = other DNA
tgtcagttctctgagtacactcccagcaaagacagtgttttgaaagattgcctccaaatcatacgaaagaatcctagtca

SEQ ID NO: 37123 - DNA, 80 bp, synthetic construct
  source 1..80: mol_type = other DNA
cttcatctagtgatgagccgcaagactacgaagatcttgccctagcgcttgcagacacagaggaaccacgcaggcgaacg

SEQ ID NO: 37124 - DNA, 80 bp, synthetic construct
  source 1..80: mol_type = other DNA
caccatgggttcttttgaactaatacaggcagtatctgagtttggcatgagcaagtatcctccagaaaacatagacaaag

SEQ ID NO: 37125 - DNA, 80 bp, synthetic construct
  source 1..80: mol_type = other DNA
gaaagttgaagaagctaggtgccatctctacaaacgttgagattgggaaaagggactgtctggaccttcttagcactgta

SEQ ID NO: 37126 - DNA, 80 bp, synthetic construct
  source 1..80: mol_type = other DNA
gatggtttgacggatcagcagaaggagaacattgtgaacggcattttcgagccttctaagctatccttttaccattggaa

SEQ ID NO: 37127 - DNA, 80 bp, synthetic construct
  source 1..80: mol_type = other DNA
agaattgattaaaaaaaacattgaagaagtcttgttaacagaggatggaaacctgatcttctgttggctaaagacagtgt

SEQ ID NO: 37128 - DNA, 80 bp, synthetic construct
  source 1..80: mol_type = other DNA
catcatcagtcaaaggcagcttgaagaagaaactaaaattcatgaacatacattctcctgagctcatgcccgacaactgc

SEQ ID NO: 37129 - DNA, 80 bp, synthetic construct
  source 1..80: mol_type = other DNA
gcattttctccgaagctgagttccgagaactaataaagcttaaggagcttcttctcaatgaacagcaagatgagcaggaa

SEQ ID NO: 37130 - DNA, 80 bp, synthetic construct
  source 1..80: mol_type = other DNA
ttgaatcaggacctgctcatttctgcttggaccaagagcataacaacttgcaaagactttgcaaacataaatgacagggt

SEQ ID NO: 37131 - DNA, 80 bp, synthetic construct
  source 1..80: mol_type = other DNA
acaaaaattcatacaccaactctctgaggaactctacgaaataagactacagcatctagagttatcaaagctaaagcaag

SEQ ID NO: 37132 - DNA, 80 bp, synthetic construct
  source 1..80: mol_type = other DNA
aacaccctagtgtcagtttcaccaaggaagaagtgttaataaagaggctggaaaagaatttccttaagcagcacaatctc

SEQ ID NO: 37133 - DNA, 80 bp, synthetic construct
  source 1..80: mol_type = other DNA
agcctggacgaggttactttgtctagaagacaggcagaagtgcttagacagaaagcatctcaactgtccaagctagtcaa

SEQ ID NO: 37134 - DNA, 80 bp, synthetic construct
  source 1..80: mol_type = other DNA
tctcgaagtaatggaaacagttaacctcattttttttgcagcattgtcagccccttggtgtcttcattacaaggcactag

SEQ ID NO: 37135 - DNA, 80 bp, synthetic construct
  source 1..80: mol_type = other DNA
aatcttatctggtcagacatccggaaatacttgactgcgggctgaaggaagattgtagactccccctactggatctgtct

SEQ ID NO: 37136 - DNA, 80 bp, synthetic construct
  source 1..80: mol_type = other DNA
gtctccaaactgttggtgtctctgtaccgaaaagatggtgaagaattggtacaaaactccgggttaaaggttgggtttct

SEQ ID NO: 37137 - DNA, 80 bp, synthetic construct
  source 1..80: mol_type = other DNA
ggtgaagtatgctgtcacattgttcacatcaaacggcgagccattctcactcagcctgaatgatggtgggctggaccttg

SEQ ID NO: 37138 - DNA, 80 bp, synthetic construct
  source 1..80: mol_type = other DNA
atctccataaaaccaccgatgaaaaactgttgcatcagaccaaaatagtttttgcaaagataggcttatcaggaaatggg

SEQ ID NO: 37139 - DNA, 80 bp, synthetic construct
  source 1..80: mol_type = other DNA
tatgatttcatctggacaactcaaatgattgcgaatagcaatttcaatgtttgtaagaggttgacaggcaggagtaccgg

SEQ ID NO: 37140 - DNA, 80 bp, synthetic construct
  source 1..80: mol_type = other DNA
agaaaggctcccaagaagtgttaggagcaaagtcatttacgaaatggtaaagctggtaggtgaaacgggcatggccatac

SEQ ID NO: 37141 - DNA, 80 bp, synthetic construct
  source 1..80: mol_type = other DNA
agctggcttttgcacaagcacttaattacgaacatcgcttttatgcagtgctggcaccaaaagcacagttgggtggtgca

SEQ ID NO: 37142 - DNA, 80 bp, synthetic construct
  source 1..80: mol_type = other DNA
caagagccaaaacatacctaccagagttggtagggttctagactgcatgtttaactgcaaattgtgtgttgagataacct

SEQ ID NO: 37143 - DNA, 80 bp, synthetic construct
  source 1..80: mol_type = other DNA
acaaactggtttttataaagaatctatgcagacaggtagaaatacctgctggcagcatcaagaagattttaaacgtactt

SEQ ID NO: 37144 - DNA, 80 bp, synthetic construct
  source 1..80: mol_type = other DNA
ctgtcaaattcttagtgactacttacataagtaagggacttatggcgcttaatagctacaatcacatgggacaaggaatc

SEQ ID NO: 37145 - DNA, 80 bp, synthetic construct
  source 1..80: mol_type = other DNA
catcatgcgacatcatcagtgttgacttctttggcagcagtgctattcgaagaattaaccatttactacctaaagagaag

SEQ ID NO: 37146 - DNA, 80 bp, synthetic construct
  source 1..80: mol_type = other DNA
catgcctcaaacaaccattcatgttgagcatgcaggtagctctgatgattatgcaaaatgtatagtggtgacaggtattc

SEQ ID NO: 37147 - DNA, 80 bp, synthetic construct
  source 1..80: mol_type = other DNA
tgtcaaaagacctttatgctcaatatgatgaaacattctggaaacatgcatgtaggttgaagaatttcacagcagcagta

SEQ ID NO: 37148 - DNA, 80 bp, synthetic construct
  source 1..80: mol_type = other DNA
cagaggtgctgccaaatgaaagacagtgccaaaaccttagtaagtgactgctttcttgaattctatagtgaattcatgat

SEQ ID NO: 37149 - DNA, 80 bp, synthetic construct
  source 1..80: mol_type = other DNA
gttatagaatcacacctgctgtgataaaattcatatttacaggacttataaacagctcagtaacttccccacagagttta

SEQ ID NO: 37150 - DNA, 80 bp, synthetic construct
  source 1..80: mol_type = other DNA
atgcaagcatgtcatgtttcttctcagcaggcaatgtacaatagtgttcctcttataacaaacactgcctttacactact

SEQ ID NO: 37151 - DNA, 80 bp, synthetic construct
  source 1..80: mol_type = other DNA
acttaggcaacagattttcttcaaccacgttgaggatttcatcaggaggtatggaatcctgactcttgggacactatccc

SEQ ID NO: 37152 - DNA, 80 bp, synthetic construct
  source 1..80: mol_type = other DNA
ctttcggtaggctattcgtcccaacatactcaggtctagtcagctcagctgttgctctggaggatgctgaggtcattgct

SEQ ID NO: 37153 - DNA, 80 bp, synthetic construct
  source 1..80: mol_type = other DNA
gcagcacagactctaaacatgaacagtgtatcgatccagtcaagtagtttgaccacactagatggattagaacgaagccg

SEQ ID NO: 37154 - DNA, 80 bp, synthetic construct
  source 1..80: mol_type = other DNA
agcaagctcatctattgatgatagcagtagtataagtgacacaacagtggcttctcaagactcagggtcttctgcgtcaa

SEQ ID NO: 37155 - DNA, 80 bp, synthetic construct
  source 1..80: mol_type = other DNA
gtttctctttcgagctgaacagacccctatctgaaacagagatacagttcataaaggcacttagcagtctgaggtcaatc

SEQ ID NO: 37156 - DNA, 80 bp, synthetic construct
  source 1..80: mol_type = other DNA
caggcgtgtgagatagtacagaatagaataactgctctatacagcaatagtaacgaaggcccccttgacaggcacaatgt

SEQ ID NO: 37157 - DNA, 80 bp, synthetic construct
  source 1..80: mol_type = other DNA
catatatagcagtagaatggcagactcatgtgactggctgagagacggtaaaagaagaggaaactttgaattggcaaata

SEQ ID NO: 37158 - DNA, 80 bp, synthetic construct
  source 1..80: mol_type = other DNA
gaatacagtcagtactctgtgtactgatagctggctattacagatcgttcggaggagagggaacagaaaagcaagttaaa

SEQ ID NO: 37159 - DNA, 80 bp, synthetic construct
  source 1..80: mol_type = other DNA
gcatcactgaacagggatgataacaagataattgaagaccctatgatacagctgatccctgagaagttaagaagagagtt

SEQ ID NO: 37160 - DNA, 80 bp, synthetic construct
  source 1..80: mol_type = other DNA
agaaaggttaggcgtgtctagaatggaggttgatgagttgatgcccagtatcaacccagatgatacgcttgcgcagcttg

SEQ ID NO: 37161 - DNA, 80 bp, synthetic construct
  source 1..80: mol_type = other DNA
tggcaaaaaagcttattagtttgaatgtgtcgacagaagaatattcagccgaagtttcaaggcttaagcaaacactaact

SEQ ID NO: 37162 - DNA, 80 bp, synthetic construct
  source 1..80: mol_type = other DNA
gacagctgtggcaaacagctgacaggtaagataataactaaatacacccactggctggacacatttttaagctgctctgt

SEQ ID NO: 37163 - DNA, 80 bp, synthetic construct
  source 1..80: mol_type = other DNA
ctccatcaatagacataccaccgtcaaggagccatcattgttcaatcccaatatcagatgtgttaacctaatcaccttcg

SEQ ID NO: 37164 - DNA, 80 bp, synthetic construct
  source 1..80: mol_type = other DNA
atgtcggtgggctgctcagagctgcctttccaggaacggggattgaaaggcacatgcagctgcttcattctgaaatgata

SEQ ID NO: 37165 - DNA, 80 bp, synthetic construct
  source 1..80: mol_type = other DNA
cagttcttcccttcagtgtttaccctaatcagaatgcttacagatgagtcaacagattctgagaaaagtggcctcagccc

SEQ ID NO: 37166 - DNA, 80 bp, synthetic construct
  source 1..80: mol_type = other DNA
tgacttgcatcaggttgctaagtattcgaatcacctcaccctacttagtaggatgatacagcaagcgaagccaactgtta

SEQ ID NO: 37167 - DNA, 80 bp, synthetic construct
  source 1..80: mol_type = other DNA
ctgttttctacatgctaaaaggcaacctgatgaatacagagccgaccgttgcagaactcgtcagttatggcatcaaggaa

SEQ ID NO: 37168 - DNA, 80 bp, synthetic construct
  source 1..80: mol_type = other DNA
tatctgctataggcgggcttcctttgtgtcaaacagacaaatcctcattgctcatgagttttttaaactggagagtgaat

SEQ ID NO: 37169 - DNA, 80 bp, synthetic construct
  source 1..80: mol_type = other DNA
atggacatcagggctcctgattgtccactgtcaagtcatgaggcaggcatattaagtgagtttgatggacaggttattgc

SEQ ID NO: 37170 - DNA, 80 bp, synthetic construct
  source 1..80: mol_type = other DNA
aaatatacttgccagcgagttgagctccgtgaagcgtgactctgagcgtgaagggttgactgatctcctagactacctga

SEQ ID NO: 37171 - DNA, 80 bp, synthetic construct
  source 1..80: mol_type = other DNA
actcacccacggagctattgaagaaaaaaccctacttaggcaccacctgtaagttcaacacttggggagacacaaacaga

SEQ ID NO: 37172 - DNA, 80 bp, synthetic construct
  source 1..80: mol_type = other DNA
taaaaccctgaacagtaataaaatataaaattaataatgagtaccataattggcaaatggaagagacgtaggtactaagc

SEQ ID NO: 37173 - DNA, 80 bp, synthetic construct
  source 1..80: mol_type = other DNA
cagagaagatatagacagcgacaatgcgctaaacaaaatgtaacacccctacaatggattctgacaagattgttttcaag

SEQ ID NO: 37174 - DNA, 80 bp, synthetic construct
  source 1..80: mol_type = other DNA
ggtatgagagagacagcatgtgttcctcgccagaaagtgagctcctctggatattctctgattttagaagtatcaaaatg

SEQ ID NO: 37175 - DNA, 80 bp, synthetic construct
  source 1..80: mol_type = other DNA
acctatctgacattgataacttaccaggcccatctatggctacaaaaggtagaaagaaatttgtcaaaacagatgagagc

SEQ ID NO: 37176 - DNA, 80 bp, synthetic construct
  source 1..80: mol_type = other DNA
caagttacgccaattgaattccctgatgaggcaggtgttggggggccatggtgaggacaacgtagagtcagatgaggaga

SEQ ID NO: 37177 - DNA, 80 bp, synthetic construct
  source 1..80: mol_type = other DNA
ggccatggtgaggacaacgtagagtcagatgaggagatacactctctgctaaaagaggcgttgagaagaaccagatgggt

SEQ ID NO: 37178 - DNA, 80 bp, synthetic construct
  source 1..80: mol_type = other DNA
tacactctctgctaaaagaggcgttgagaagaaccagatgggtggatcaggaggttcgtcatgcagctaagtcgatgagt

SEQ ID NO: 37179 - DNA, 80 bp, synthetic construct
  source 1..80: mol_type = other DNA
ccagacttgagtccaattccaagaatatcacgcaaaatcggatcctctgaatggatatgttctgcacagcagatcgcaat

SEQ ID NO: 37180 - DNA, 80 bp, synthetic construct
  source 1..80: mol_type = other DNA
attcagacatgtgcaccccatgagatgtctgttttggggggatatttaggggaggagttttttgggaagagaacttttga

SEQ ID NO: 37181 - DNA, 80 bp, synthetic construct
  source 1..80: mol_type = other DNA
atccacctctttgaatccagcattggcatcagacattgatctaagatctctgtcccgtcaatttcaaaacccgctcatgt

SEQ ID NO: 37182 - DNA, 80 bp, synthetic construct
  source 1..80: mol_type = other DNA
caggtctaaggatcgttcaatgggcgacaggtgctcactacaaggtaaagcccatactgaatgaactggatgtgtgccct

SEQ ID NO: 37183 - DNA, 80 bp, synthetic construct
  source 1..80: mol_type = other DNA
tgtttgtcccttgttatcggggacgggtccggcggaatatctcgagtcgttttgagtatgttcccagattccaaattggt

SEQ ID NO: 37184 - DNA, 80 bp, synthetic construct
  source 1..80: mol_type = other DNA
cttcaacagcttgttggaggtgaatgatttaatggcttcaggcactcaccccttgcctccgtctgcactaatgagaggag

SEQ ID NO: 37185 - DNA, 80 bp, synthetic construct
  source 1..80: mol_type = other DNA
gagaggaaataacatcaagagtcatcgattttgactctatatgggagaagccctctgatctgagaaaccctctcacttgg

SEQ ID NO: 37186 - DNA, 80 bp, synthetic construct
  source 1..80: mol_type = other DNA
aagtactttcattccgtgcagtctaaactaaaaactcagtttgacttaattgtatgcgatgcagaggttacggacattga

SEQ ID NO: 37187 - DNA, 80 bp, synthetic construct
  source 1..80: mol_type = other DNA
gtcagtaaataaaataacacttctattgtctgacttctctatgtctattcgaggccccttgtgcttgatttttaaaacct

SEQ ID NO: 37188 - DNA, 80 bp, synthetic construct
  source 1..80: mol_type = other DNA
atgggaccatgctggtcaatccagattataaggcaattcaccacttgtccagagcgtttccgaacgtgacagggtttgtc

SEQ ID NO: 37189 - DNA, 80 bp, synthetic construct
  source 1..80: mol_type = other DNA
acccagatgacatcttctttctcttcagaggtttatctgaagttttccaaaaagggtcacttctttagagatcatgagtt

SEQ ID NO: 37190 - DNA, 80 bp, synthetic construct
  source 1..80: mol_type = other DNA
gcttacggcttctactatccgggagatgagcctggttttgttcaactgcagcaacaccaaaagcgagatgttaagggcta

SEQ ID NO: 37191 - DNA, 80 bp, synthetic construct
  source 1..80: mol_type = other DNA
gaggagattctttagagatgagaaggagatgcaagactatgcggagttagagggcgcaaaggttgaagcatctttggcgg

SEQ ID NO: 37192 - DNA, 80 bp, synthetic construct
  source 1..80: mol_type = other DNA
gaactttgaattatcaggacttggtaagaggcttccctgaggagattatatcaaacccttataatgagatgatcataacg

SEQ ID NO: 37193 - DNA, 80 bp, synthetic construct
  source 1..80: mol_type = other DNA
ttgatagacagcgaagtagaatcgttcttggttcataagatggtggatgagttggagttgaagagaggctacccatctaa

SEQ ID NO: 37194 - DNA, 80 bp, synthetic construct
  source 1..80: mol_type = other DNA
gatggctataatactcgcaataaccatagtattctccaatagggttttcaatgtgtctaaatctctcaaggagtctaagt

SEQ ID NO: 37195 - DNA, 80 bp, synthetic construct
  source 1..80: mol_type = other DNA
tcttccctccctctgacccaaagctattgagacattttaacatctgttctagcacacttctgtttctatcgacaacattg

SEQ ID NO: 37196 - DNA, 80 bp, synthetic construct
  source 1..80: mol_type = other DNA
ggagatttgcctaacttcaccagaatccacgaactttacaacctccctgtcacttactacttcaagaagcaaaccatcag

SEQ ID NO: 37197 - DNA, 80 bp, synthetic construct
  source 1..80: mol_type = other DNA
gagcaaaaagtacctatcatggagctgggcaagtcctagcccgatattcaaaaaggtagcgtgcaattcatctctgagtt

SEQ ID NO: 37198 - DNA, 80 bp, synthetic construct
  source 1..80: mol_type = other DNA
tgtcagctcactggataagaatgatatacaagatagtaaaaactaccagactgagctgtcgtccgaaagacctaatcagg

SEQ ID NO: 37199 - DNA, 80 bp, synthetic construct
  source 1..80: mol_type = other DNA
gagacagaagcttgtctcaagaattataatagatggataaatatgagagatattagatcaagaacatctcttatggatta

SEQ ID NO: 37200 - DNA, 80 bp, synthetic construct
  source 1..80: mol_type = other DNA
ttgttgtctataaaagagcttagggatgacaaactgtgtactaggtgaaagtgactgatacatgccaaagaatttacagt

SEQ ID NO: 37201 - DNA, 80 bp, synthetic construct
  source 1..80: mol_type = other DNA
gtgaaaaaaacatctgcaagtctctgagagcatcttaacttgactgtttttaattcttgtattgtttttttgttaagcgt

SEQ ID NO: 37202 - DNA, 80 bp, synthetic construct
  source 1..80: mol_type = other DNA
atgatggaacagttgattcggacgatgaggagtttttctccggtgaaaccaggagtccagaggccgtatatagcaggatt

SEQ ID NO: 37203 - DNA, 80 bp, synthetic construct
  source 1..80: mol_type = other DNA
atgatgaataatggtcgactgaggaagtctcatatacagagatatgtatctgtaagctcaaaccaccaggctcgcccaaa

SEQ ID NO: 37204 - DNA, 80 bp, synthetic construct
  source 1..80: mol_type = other DNA
ctcttttgcggaattcctcaacaaagtgtactcggagagctcttgagtcttaaattttagtttttgacacaaacaacgaa

SEQ ID NO: 37205 - DNA, 80 bp, synthetic construct
  source 1..80: mol_type = other DNA
ggtgcatcgctgtgcaggaagatttaagaaaaaaactcaacaccactccttgatccatcatctcagcatgagtaaggatc

SEQ ID NO: 37206 - DNA, 80 bp, synthetic construct
  source 1..80: mol_type = other DNA
tggtgcatcccagcttggtgcgtgcagggtatgtggaattggagatggccgatgagactgctgatgtggtcaatttgact

SEQ ID NO: 37207 - DNA, 80 bp, synthetic construct
  source 1..80: mol_type = other DNA
gaagaagccgggcatcactctcgggaaggccccagacctgagtacagcttacaagtcgatattgtcaggcatgaatgctg

SEQ ID NO: 37208 - DNA, 80 bp, synthetic construct
  source 1..80: mol_type = other DNA
atagcgagtaatcaggcacatctgcaaggtgagcctttctacgttgactccttgcccgaagacatgaataggatgaggct

SEQ ID NO: 37209 - DNA, 80 bp, synthetic construct
  source 1..80: mol_type = other DNA
cgcagaaacatctgggaaaatggaggttgcagaggatgatgaggatgattgcagctcagaagatgagttctatttgccta

SEQ ID NO: 37210 - DNA, 80 bp, synthetic construct
  source 1..80: mol_type = other DNA
aggggcaagatcctctggtccccttccagggatttcttgaggaagtaggggcaaggattgttaaaaggatgaaatcagtg

SEQ ID NO: 37211 - DNA, 80 bp, synthetic construct
  source 1..80: mol_type = other DNA
gaagggttttttaagatatggtctacaatgacagaggacataaaaggttatgtactcacgaatgtgatgaagaccagttc

SEQ ID NO: 37212 - DNA, 80 bp, synthetic construct
  source 1..80: mol_type = other DNA
taaaaccgtggaaaacaggcaaacgcaaactgacaaacaactctcctctaatctgcctaaagaactgaccccgcccaaga

SEQ ID NO: 37213 - DNA, 80 bp, synthetic construct
  source 1..80: mol_type = other DNA
gggaagacgcactcaatcccaaaaaagcagaggagagacccaagccaagcaaggctccagaggcgagctggaccaatgag

SEQ ID NO: 37214 - DNA, 80 bp, synthetic construct
  source 1..80: mol_type = other DNA
actgaagaagtcaatgacatagagggagaagttgcccatcaagttgctgaaagcttttctaaaaagtataagttcccatc

SEQ ID NO: 37215 - DNA, 80 bp, synthetic construct
  source 1..80: mol_type = other DNA
tagatcatcagggatcttcctatggaactttgaacagctcaaaatgaacttggatgacatagtcaaggcatccatgaaca

SEQ ID NO: 37216 - DNA, 80 bp, synthetic construct
  source 1..80: mol_type = other DNA
taccgggagtggagaagatcgcagaaaagggagggaagctgcctctcagatgtatcctagggtttgtggccttagactct

SEQ ID NO: 37217 - DNA, 80 bp, synthetic construct
  source 1..80: mol_type = other DNA
tctaagaggttcagactattggcagatacagacaaggtggccagacttatgcaagatgatatcaacagctatatggccag

SEQ ID NO: 37218 - DNA, 80 bp, synthetic construct
  source 1..80: mol_type = other DNA
ccaaattagacccagatgatgtgtgttcttatctggccgcagcaatgcagttcttcgaaggagtgtgtcctgaggactgg

SEQ ID NO: 37219 - DNA, 80 bp, synthetic construct
  source 1..80: mol_type = other DNA
gctggaagatgtagacaggaattagaatgtggatcaaattgactcatttcaatcaaatttggacaaagccatgaaaaaaa

SEQ ID NO: 37220 - DNA, 80 bp, synthetic construct
  source 1..80: mol_type = other DNA
catgtaacatccctaaaaagatgaatttcctgaagaaaatagtgaagacttgcaaagatgaggagactcccaagtatggg

SEQ ID NO: 37221 - DNA, 80 bp, synthetic construct
  source 1..80: mol_type = other DNA
gcagcatcagcgcctcctgatgatgatgacctttggatgcctccgccggagtatgtccctttgactcaggttaaaggcaa

SEQ ID NO: 37222 - DNA, 80 bp, synthetic construct
  source 1..80: mol_type = other DNA
agcaagtgttcgaaatttctgtatcaatggagagattaagatatgtagtcctaatggatactcctttagaattcttcgac

SEQ ID NO: 37223 - DNA, 80 bp, synthetic construct
  source 1..80: mol_type = other DNA
acatcttgaagtcgtttgataacgtctattcaggaaaccgaagaatgatcgggctggtcaaaatagtaattggcttagtg

SEQ ID NO: 37224 - DNA, 80 bp, synthetic construct
  source 1..80: mol_type = other DNA
ttatctgggtcccccgtccctgaaggtatgaactgggtttacaaacttcgcagaaccttgatctttcagtgggctgaatc

SEQ ID NO: 37225 - DNA, 80 bp, synthetic construct
  source 1..80: mol_type = other DNA
tcatgggcctctcgaaggagaagagctagagtattctcaagaaataacatgggatgacgaggcagagttcgtcggcttgc

SEQ ID NO: 37226 - DNA, 80 bp, synthetic construct
  source 1..80: mol_type = other DNA
agataagagtgagtgcaagacaatgccacatccagggaaggttgtggtgcatcaacatgaactctagagcctgccagctc

SEQ ID NO: 37227 - DNA, 80 bp, synthetic construct
  source 1..80: mol_type = other DNA
tgggcagatatggccctaaagacacaacaatctcaagaggacgagaacacttccctccttttggagtaattcaaggccca

SEQ ID NO: 37228 - DNA, 80 bp, synthetic construct
  source 1..80: mol_type = other DNA
acaaatatatccgtgattgttacctccatcttgagtagatataatctgtgagcaatagaacaaatacagtaatggtgcct

SEQ ID NO: 37229 - DNA, 80 bp, synthetic construct
  source 1..80: mol_type = other DNA
gtcagctatgggattatcatagcgaagaaaggggagacaataactcccagtgttttggtagatataaccaggacaaatgt

SEQ ID NO: 37230 - DNA, 80 bp, synthetic construct
  source 1..80: mol_type = other DNA
gcttccagcacaacatctataacctaaacacttgtttatctctagatccagggttgagcataatgtgaaaaaaacttgtg

SEQ ID NO: 37231 - DNA, 80 bp, synthetic construct
  source 1..80: mol_type = other DNA
aacacggaataacaaccctccctaatcgccaccatgagtcaattgttctcaaccttcatcttttgcttgttcataggaag

SEQ ID NO: 37232 - DNA, 80 bp, synthetic construct
  source 1..80: mol_type = other DNA
ttccataggagacttccctctctatacaattcccgaacggcttaatccctggactccaattgacttaatccacctgagct

SEQ ID NO: 37233 - DNA, 80 bp, synthetic construct
  source 1..80: mol_type = other DNA
gtcctaacaacttactgtctgatgctgaggggtgcagtgaaacttcatcctttacctatgtagagctcaaaaccggtttt

SEQ ID NO: 37234 - DNA, 80 bp, synthetic construct
  source 1..80: mol_type = other DNA
ctcgcccatcagaaagtgccggggttcacttgcacaggtgtgataaacgaggcagtcacatacaccaactttgttggata

SEQ ID NO: 37235 - DNA, 80 bp, synthetic construct
  source 1..80: mol_type = other DNA
tgttactaccacatttaagagaaaacattttaaaccaactgtttccgcatgtagggatgccttcaactggaaagtttctg

SEQ ID NO: 37236 - DNA, 80 bp, synthetic construct
  source 1..80: mol_type = other DNA
gagatcctagatacgaggagtctttacatacaccctatccggataacagttggctgcgaactgtcaccacaaccaaagaa

SEQ ID NO: 37237 - DNA, 80 bp, synthetic construct
  source 1..80: mol_type = other DNA
tccttgttaataatctctccaagcattgtagagatggatgtatacggtagaactctccattcccccatgtttcctacagg

SEQ ID NO: 37238 - DNA, 80 bp, synthetic construct
  source 1..80: mol_type = other DNA
aatctgctctaagttttatccatcaattccctcatgtgctaccaatcatgattacacgttgtggttgcctgaagacccta

SEQ ID NO: 37239 - DNA, 80 bp, synthetic construct
  source 1..80: mol_type = other DNA
acttgagtttgatttgtgacatatttgtgacaagcacaggaagaaaggcaatgaatgggtctcgtatgtgtggattcaca

SEQ ID NO: 37240 - DNA, 80 bp, synthetic construct
  source 1..80: mol_type = other DNA
ggaaggaaactgggcgcaagcaggtggggcagatatgacaagggaccccacgattgctgaacatgcctctttagtgggac

SEQ ID NO: 37241 - DNA, 80 bp, synthetic construct
  source 1..80: mol_type = other DNA
gatgaacgagggttttatcgaaccctgaagggagcatgcaagttgaccttgtgtgggaaaccaggcctacggttatatga

SEQ ID NO: 37242 - DNA, 80 bp, synthetic construct
  source 1..80: mol_type = other DNA
tgggacatgggtctcgttcactaggcctgaaatccatgtatggtgctctcctgatcagctggtgaacgtgcataacaacc

SEQ ID NO: 37243 - DNA, 80 bp, synthetic construct
  source 1..80: mol_type = other DNA
gcatagacgaaattgaacatttgattgtagatgacctcatcagaaagagagaggagtgtttggatacactagagaccgtc

SEQ ID NO: 37244 - DNA, 80 bp, synthetic construct
  source 1..80: mol_type = other DNA
ctaatgtctaagtcgttaagtttcagaaggctcagtcacttccggaagttagtccccgggtatggaaaggcctatacaat

SEQ ID NO: 37245 - DNA, 80 bp, synthetic construct
  source 1..80: mol_type = other DNA
gggcagatatgacaagggaccccacgattgctgaacatgcctctttagtgggactcttgctttgtctttatagactgagt

SEQ ID NO: 37246 - DNA, 80 bp, synthetic construct
  source 1..80: mol_type = other DNA
cctcaatgggagtctgatggaaaccaatgttcactataaaagggtggataattgggtcgacatactgccttccaaagggt

SEQ ID NO: 37247 - DNA, 80 bp, synthetic construct
  source 1..80: mol_type = other DNA
gccttaaggtaaacaataaatgtatggagtcagacacaggggttttcttcaatggaatcattaaagggcccgacggtagg

SEQ ID NO: 37248 - DNA, 80 bp, synthetic construct
  source 1..80: mol_type = other DNA
attctcatccctgaaatgcagtctggactgctaaaacaacatatggacctcttgaaggctgcagtgttccctctaagaca

SEQ ID NO: 37249 - DNA, 80 bp, synthetic construct
  source 1..80: mol_type = other DNA
cccattaattgacaaagcctcagtgttcaaaaaggatggtgatgcagacgacttcgttgatgtccacatgccagacatcc

SEQ ID NO: 37250 - DNA, 80 bp, synthetic construct
  source 1..80: mol_type = other DNA
agaagctagtatctgatgtcgacttgggcttgccaaattggagtttctttgctttgataggtgccagtgtaattgcactg

SEQ ID NO: 37251 - DNA, 80 bp, synthetic construct
  source 1..80: mol_type = other DNA
ctcattctagtatgtcttctgaggatgtgctgcaaacggatgaggagaagaagctctgtcagggaccaagtagccccacc

SEQ ID NO: 37252 - DNA, 80 bp, synthetic construct
  source 1..80: mol_type = other DNA
tcttgctttgtctttatagactgagtaagatagtgggtcaaaacacagctaattacaagaccaatgtagcagataggatg

SEQ ID NO: 37253 - DNA, 80 bp, synthetic construct
  source 1..80: mol_type = other DNA
gtttagcttatcatctactccttcttctaagtcaaaggtggtgtcatcatgggagtcatataaagggacatcaagtgtct

SEQ ID NO: 37254 - DNA, 80 bp, synthetic construct
  source 1..80: mol_type = other DNA
aattgaccgccctttaatgcgttgttggtggatggaatacaacccgattaactgcctcttcatctggaaacattccacgg

SEQ ID NO: 37255 - DNA, 80 bp, synthetic construct
  source 1..80: mol_type = other DNA
tacagtcgtatcatctcagtggaagaattgagctattgctcaaatcctctgacaatcaatgctcgctaggaattatttat

SEQ ID NO: 37256 - DNA, 80 bp, synthetic construct
  source 1..80: mol_type = other DNA
tagctaggtgcaaatgtttctcaaacaatccagtgtggccgaattcactgttctttatgtctatattttcgggtcgatat

SEQ ID NO: 37257 - DNA, 80 bp, synthetic construct
  source 1..80: mol_type = other DNA
gacgacaatcagtttctgaacaaatgtgaggtttgatatgaaggatcagggtcaaatagatcttattaaataaaattctt

SEQ ID NO: 37258 - DNA, 80 bp, synthetic construct
  source 1..80: mol_type = other DNA
cactttggcctttaaaactctgaggtgcgaaaatcaatgctttaagcaatcttacagattctgtgctccctttggtctga

SEQ ID NO: 37259 - DNA, 80 bp, synthetic construct
  source 1..80: mol_type = other DNA
tgagctccagggagtctctaattgttctgtataaagacagaacacaacttagtgtcttctctttgtatatgtctttattt

SEQ ID NO: 37260 - DNA, 80 bp, synthetic construct
  source 1..80: mol_type = other DNA
gtcatagttgcatctctatattgttgacgggacgtaaatggtgtgaaaaaaacataaatactctaagggcttgtaacgag

SEQ ID NO: 37261 - DNA, 80 bp, synthetic construct
  source 1..80: mol_type = other DNA
acaacattcctcatcattacatcttgaacatgattgattcctcagaggtgtatgatgaccctattgaccctgccgaacca

SEQ ID NO: 37262 - DNA, 80 bp, synthetic construct
  source 1..80: mol_type = other DNA
gagtgtgaatggagcgggaacccagtgatccccaacattttgaggaactccgattataatctgaattccccattgctaga

SEQ ID NO: 37263 - DNA, 80 bp, synthetic construct
  source 1..80: mol_type = other DNA
gagcagatcttcgaaactgctccctttataaaagtggtggagcatcacaccctgatgacaactcacaagatgtgtgcaaa

SEQ ID NO: 37264 - DNA, 80 bp, synthetic construct
  source 1..80: mol_type = other DNA
agatccaacccatctgatgattcaatggcttctatctggaaacagacctttgaggatgacagtcacagaaaacatggtga

SEQ ID NO: 37265 - DNA, 80 bp, synthetic construct
  source 1..80: mol_type = other DNA
ggtctcataaggttttgaaggcatcctttaaacgggtggatattgctgtcattaaaatcgggggcacaagtgctcaagca

SEQ ID NO: 37266 - DNA, 80 bp, synthetic construct
  source 1..80: mol_type = other DNA
atgatgggaacatgggtacaggggtcccacgcagagtcatcccggagtaggaagtgcctggccgatctgtcatctttcta

SEQ ID NO: 37267 - DNA, 80 bp, synthetic construct
  source 1..80: mol_type = other DNA
tcagaggtcttcacctattgagtcgatcttgaactacactcttatgaatcgaggcttgcagactccgagagaaggggttt

SEQ ID NO: 37268 - DNA, 80 bp, synthetic construct
  source 1..80: mol_type = other DNA
tggccggcttgagcagggtcagttacgatcaatccttcggaagatatttaggaaatctgtactcatcttacttattgttt

SEQ ID NO: 37269 - DNA, 80 bp, synthetic construct
  source 1..80: mol_type = other DNA
cataccattgttctttatatgaatgccctggattgggaagaagagaagaccattctggcactctggaaagacataacatc

SEQ ID NO: 37270 - DNA, 80 bp, synthetic construct
  source 1..80: mol_type = other DNA
agtagacataaagaatgataaagtcttgtttaaggatcccctgtgggggaagttcctggtcaccaaggactttgtttatt

SEQ ID NO: 37271 - DNA, 80 bp, synthetic construct
  source 1..80: mol_type = other DNA
cttatgactccaacagcctgtttgacaggaactatacattgatgctgaaagatctgtttctttccagattcaattcattg

SEQ ID NO: 37272 - DNA, 80 bp, synthetic construct
  source 1..80: mol_type = other DNA
ctgattctaatatcccctccagaaccaaggtattctgatgaacttgtagccaacctatgtcgcctttatattgcggggga

SEQ ID NO: 37273 - DNA, 80 bp, synthetic construct
  source 1..80: mol_type = other DNA
taagatcttgtctacatgcgggaatcctggatatgacataatcaagatgctagagccatatgtcgtgaaccttctggtac

SEQ ID NO: 37274 - DNA, 80 bp, synthetic construct
  source 1..80: mol_type = other DNA
ctggagtactatcccaaacttcaggtttttggcaggtacatatgacatgttttttgccagaattgaacatctttattctg

SEQ ID NO: 37275 - DNA, 80 bp, synthetic construct
  source 1..80: mol_type = other DNA
agaaagcagaaacgttccgacctctgatccatccccttggagagtttccaacctttataaaggacaagacggcccagctg

SEQ ID NO: 37276 - DNA, 80 bp, synthetic construct
  source 1..80: mol_type = other DNA
attggaacttttggaccttgcgcctcacagttcttctctatgttgagccaatttgacaacatccatgatctggtatttgt

SEQ ID NO: 37277 - DNA, 80 bp, synthetic construct
  source 1..80: mol_type = other DNA
ttatggttgctacagacactggggacacccatacatcgactatagacgaggactcaccaagctatttgatcaggttcata

SEQ ID NO: 37278 - DNA, 80 bp, synthetic construct
  source 1..80: mol_type = other DNA
tgagaaagaccatagatcagaaatatcaagaatgcttggctagcgatctggcgaagaaaattctcaggtggggtttcgac

SEQ ID NO: 37279 - DNA, 80 bp, synthetic construct
  source 1..80: mol_type = other DNA
aaatattccaaatggtatctagacacaaattccctccctaaaaatcatccgttaaccccctacattgcaactcagacctg

SEQ ID NO: 37280 - DNA, 80 bp, synthetic construct
  source 1..80: mol_type = other DNA
gcctcctaaacatattgtagacctcttaggagactcttggcatttattgcccatgacacaaatctttgaaattcccgaat

SEQ ID NO: 37281 - DNA, 80 bp, synthetic construct
  source 1..80: mol_type = other DNA
ccatggacccctcagagattctggatgacaagtcacactcattcactcgatctaagcttgcttattggctatcagaaaac

SEQ ID NO: 37282 - DNA, 80 bp, synthetic construct
  source 1..80: mol_type = other DNA
agggggggtcctgttcctagcgaaaaggtcatcattacagccttgtcacgacccccagtcaatcctagagagtttttaag

SEQ ID NO: 37283 - DNA, 80 bp, synthetic construct
  source 1..80: mol_type = other DNA
cagccttgtcacgacccccagtcaatcctagagagtttttaagaacaatcgatcaaggagggctaccggaagatgacctg

SEQ ID NO: 37284 - DNA, 80 bp, synthetic construct
  source 1..80: mol_type = other DNA
aacaatcgatcaaggagggctaccggaagatgacctgatcataggactaaaacccaaggagagggagttgaaaatagagg

SEQ ID NO: 37285 - DNA, 80 bp, synthetic construct
  source 1..80: mol_type = other DNA
ggaggttctttgccttgatgtcatggaatctaaggctatactttgtaatcacagagaagttgttggccaaccatattctt

SEQ ID NO: 37286 - DNA, 80 bp, synthetic construct
  source 1..80: mol_type = other DNA
ctattagggtcggcactgtggtgactgcttatgaggactgttcaggattggtatctttcactggattcattaaacagatc

SEQ ID NO: 37287 - DNA, 80 bp, synthetic construct
  source 1..80: mol_type = other DNA
cctctgtttgatgctttgaccatgacggacaatttgaataaggtattcaagaagttgatagacagggttaccggtcaagg

SEQ ID NO: 37288 - DNA, 80 bp, synthetic construct
  source 1..80: mol_type = other DNA
gctgttggattactcaagagtcacttatgcctttcacctggactatgagaagtggaataatcaccagcgactagagtcta

SEQ ID NO: 37289 - DNA, 80 bp, synthetic construct
  source 1..80: mol_type = other DNA
ccaaggatgttttctctgtcttagacaaagcttttggtttgtccagagtgttttctaggacacacgagttcttccagaag

SEQ ID NO: 37290 - DNA, 80 bp, synthetic construct
  source 1..80: mol_type = other DNA
tcctgggtgtattattcagacaggtctgacctgatagggatttggaaagaccaaatatactgtcttgacatggctgaagg

SEQ ID NO: 37291 - DNA, 80 bp, synthetic construct
  source 1..80: mol_type = other DNA
acccacatgctggaatggtcaagacggaggattagaaggcctcagacaaaaggggtggagtctggtcagccttcttatga

SEQ ID NO: 37292 - DNA, 80 bp, synthetic construct
  source 1..80: mol_type = other DNA
ttgagagggaatcacaaacccgaaatacgaggacaaagattctggcacagggggacaaccaagtgctctgccccacttac

SEQ ID NO: 37293 - DNA, 80 bp, synthetic construct
  source 1..80: mol_type = other DNA
atgctttcatcaggcctcaacaatgaggggcttaggtatgagctggaaagtatatcgaagaatgccatgtccatctatag

SEQ ID NO: 37294 - DNA, 80 bp, synthetic construct
  source 1..80: mol_type = other DNA
agcgatagaggagggggcctctaaactaggattgataataaagaaagaagaaacaatgtgtagctttgacttcctcattt

SEQ ID NO: 37295 - DNA, 80 bp, synthetic construct
  source 1..80: mol_type = other DNA
acggaaaaactcccctatttcgtggaaacatcctagtcccagaatctaagaggtgggccagagtatcctgcatctcaaat

SEQ ID NO: 37296 - DNA, 80 bp, synthetic construct
  source 1..80: mol_type = other DNA
gaccaaattgtgaatctagccaacattatgtctacagtctccaccaatgccttgactgttgcccaacactcacagtctct

SEQ ID NO: 37297 - DNA, 80 bp, synthetic construct
  source 1..80: mol_type = other DNA
gttcataatcagatcgtatctttaaagcctgagattatatcagaccaatatgaatataagtatccagctatcacagatgg

SEQ ID NO: 37298 - DNA, 80 bp, synthetic construct
  source 1..80: mol_type = other DNA
aacttatccgcgagagatgctctcctgtactttttccataaaaacttcgaggaggaaattaaaagaatgtttgaaccagg

SEQ ID NO: 37299 - DNA, 80 bp, synthetic construct
  source 1..80: mol_type = other DNA
catcaagcccatgagagacttcctcttgatgtcagttcaagcaatttatcattatcttttattcagccctatcctgaagg

SEQ ID NO: 37300 - DNA, 80 bp, synthetic construct
  source 1..80: mol_type = other DNA
accgagtttacaaagttctgaactctaaaggagaggatttcctactggcgatgtctaggataatttatctagatccatcg

SEQ ID NO: 37301 - DNA, 80 bp, synthetic construct
  source 1..80: mol_type = other DNA
ttggggggagtatcaggaatgtcccttggaagattccacatcagacaattttctgatcccgtgtcggagggtctaacctt

SEQ ID NO: 37302 - DNA, 80 bp, synthetic construct
  source 1..80: mol_type = other DNA
tttctgatcccgtgtcggagggtctaaccttctggaaggagatatggctgagtgcctccgagacatggatccatcacctg

SEQ ID NO: 37303 - DNA, 80 bp, synthetic construct
  source 1..80: mol_type = other DNA
ctggaaggagatatggctgagtgcctccgagacatggatccatcacctgtgtcaggaggcagggaatccagatttaggtg

SEQ ID NO: 37304 - DNA, 80 bp, synthetic construct
  source 1..80: mol_type = other DNA
acagaactttagaaagtttcacccgtcttttggaggaccccactacactcaacataagaggaggagcaagtcctacaatt

SEQ ID NO: 37305 - DNA, 80 bp, synthetic construct
  source 1..80: mol_type = other DNA
ctcctgaaagaagctattaggaaggctctgtatgatgaagtggacaaggtagagaattctgagttccgggaggcaataat

SEQ ID NO: 37306 - DNA, 80 bp, synthetic construct
  source 1..80: mol_type = other DNA
tttgtcgaagacacatcgagacaattttattctttttctcaaatctatagagcctttgtttcctaggttcctgagtgagc

SEQ ID NO: 37307 - DNA, 80 bp, synthetic construct
  source 1..80: mol_type = other DNA
tttttagctcttctttcttaggaataccagagtctattataggtctgattcaaaactccagaacagtgaggagacagttt

SEQ ID NO: 37308 - DNA, 80 bp, synthetic construct
  source 1..80: mol_type = other DNA
agaaagagcctttcaagggcactggaggagtctttcttccattccgaaattcacgggataaatcggatgacccaaacccc

SEQ ID NO: 37309 - DNA, 80 bp, synthetic construct
  source 1..80: mol_type = other DNA
tcaacgattggagagagtctggccctgttctgcagagcgggcagatcaactcagagagatctcatggggaaggaaggtgg

SEQ ID NO: 37310 - DNA, 80 bp, synthetic construct
  source 1..80: mol_type = other DNA
acaagaaactgctgttccccattcatattttatccacttcagggctttgggactcagcgggaaatccccttactcatcaa

SEQ ID NO: 37311 - DNA, 80 bp, synthetic construct
  source 1..80: mol_type = other DNA
tgggaaccacagttcctcacccggcagagatgctggtccttgttcccaggtcatctgtagcttgtggatgcaatgttaga

SEQ ID NO: 37312 - DNA, 80 bp, synthetic construct
  source 1..80: mol_type = other DNA
gatgcatacaaccctcgattatcggtgtctgtcttaccctcttttgacaattcctttttctcaagaggtcctctcaaagg

SEQ ID NO: 37313 - DNA, 80 bp, synthetic construct
  source 1..80: mol_type = other DNA
gtacctagggtcttcaacttcagtctctactcaactatttcatgcctgggagaaggtgaccaatgttcatgtcgtgaaga

SEQ ID NO: 37314 - DNA, 80 bp, synthetic construct
  source 1..80: mol_type = other DNA
gagcattgtctctcaaggagtcaatcaattggtttgtgtcaagagactcaaatctggcccagacgctcatcagaaatatc

SEQ ID NO: 37315 - DNA, 80 bp, synthetic construct
  source 1..80: mol_type = other DNA
ctttccttaacaggtccatcttttcctattgaagaggctcccgtttttaaacggacaggatcagccctgcataggtttaa

SEQ ID NO: 37316 - DNA, 80 bp, synthetic construct
  source 1..80: mol_type = other DNA
atctgccagatatagtgaaggaggttattcatctgtatgtcccaacttgttgtctcacatatctgtcagtacagatacta

SEQ ID NO: 37317 - DNA, 80 bp, synthetic construct
  source 1..80: mol_type = other DNA
tgtcagacctgactcaggatgggaccaattttgatttcatgttccaacctttgatgttatatgctcaaacctggacctct

SEQ ID NO: 37318 - DNA, 80 bp, synthetic construct
  source 1..80: mol_type = other DNA
gagttggttcaaaaagatgttagactaaaggactcaacatttcactggcatttgaggtgtcagaagtgtataagaccaat

SEQ ID NO: 37319 - DNA, 80 bp, synthetic construct
  source 1..80: mol_type = other DNA
agaagaggtctctttagaagccccccaaagctttatattccctgatatatcaacacggatttcaagaatggtgtcgggag

SEQ ID NO: 37320 - DNA, 80 bp, synthetic construct
  source 1..80: mol_type = other DNA
ccgtcccacagttcaggaaactgcctgatatcggcttaaaagcaggtgatttgacagtgttgaacaacaatgagcggtct

SEQ ID NO: 37321 - DNA, 80 bp, synthetic construct
  source 1..80: mol_type = other DNA
atgctgtgggtcatacctttaatttgatccatttcataggttgttatatggggcagatacgatctctaaatgcaactgtg

SEQ ID NO: 37322 - DNA, 80 bp, synthetic construct
  source 1..80: mol_type = other DNA
taccacatcggaacagctcagggtctcctgtattctatattggttgcagtccatgatccaggatataatgacaactcttt

SEQ ID NO: 37323 - DNA, 80 bp, synthetic construct
  source 1..80: mol_type = other DNA
gtttccagtaaacatctatggaagggtgtcggctagaagttatttaagaggactagcgcgaggagtcttgatagggtctt

SEQ ID NO: 37324 - DNA, 80 bp, synthetic construct
  source 1..80: mol_type = other DNA
cgatatgctttctaaccagaatgacgaacatcaacataaacaggcctctcgaattaatatcaggagtgatttcatacatt

SEQ ID NO: 37325 - DNA, 80 bp, synthetic construct
  source 1..80: mol_type = other DNA
ttattgaggctcgacaatcatccgtctctatatgtgatgttaaaagagcctgatcttagagcggagatcttttcaatacc

SEQ ID NO: 37326 - DNA, 80 bp, synthetic construct
  source 1..80: mol_type = other DNA
tttcataggttgttatatggggcagatacgatctctaaatgcaactgtgattcagacatgtgcaccccatgagatgtctg

SEQ ID NO: 37327 - DNA, 80 bp, synthetic construct
  source 1..80: mol_type = other DNA
tcaaaagattccagcagcttatcccaccacgatggaggagggaaacaggtctgtgttgtgctaccttcaacaggtcttaa

SEQ ID NO: 37328 - DNA, 80 bp, synthetic construct
  source 1..80: mol_type = other DNA
ccaaactccgccagctcaactctttaatgcgtcaagtcttagggggccatggagaagacaatgtcgaatctgatgatgaa

SEQ ID NO: 37329 - DNA, 80 bp, synthetic construct
  source 1..80: mol_type = other DNA
tagaccaagaagttcgccatgcagctaagactatgaaacctgatgttaatcctgtccctcgtgtgtctagaaaagttggg

SEQ ID NO: 37330 - DNA, 80 bp, synthetic construct
  source 1..80: mol_type = other DNA
tcatccgaatggatttgttctgcccaacaaatcgctatctctacctctcttaaccctgcttcggcatcagatatagattt

SEQ ID NO: 37331 - DNA, 80 bp, synthetic construct
  source 1..80: mol_type = other DNA
aagatctctatctcgtcagttccaaaaccctcttatgtccgggctaagggttgttcagtgggcaacaggggcacattata

SEQ ID NO: 37332 - DNA, 80 bp, synthetic construct
  source 1..80: mol_type = other DNA
aaatcaagcctatactgaatgacctagatatatgcccgtgtttgtctctagtagttggagatggatctggagggatttct

SEQ ID NO: 37333 - DNA, 80 bp, synthetic construct
  source 1..80: mol_type = other DNA
atgacttgatggcctcaggaactcacccattacctccatctgcacttgttagagggggagatgagatcacatcaagagta

SEQ ID NO: 37334 - DNA, 80 bp, synthetic construct
  source 1..80: mol_type = other DNA
gaaatatttcagctctgtacaatccaaaataaagagtcagttcgatctaattgtgtgtgatgctgaagtcactgacatag

SEQ ID NO: 37335 - DNA, 80 bp, synthetic construct
  source 1..80: mol_type = other DNA
attcagttaacaagataacactgttgttatcagactttgcaatgtccataagaggacctctgtacttaatatttaaaacg

SEQ ID NO: 37336 - DNA, 80 bp, synthetic construct
  source 1..80: mol_type = other DNA
tatgggactatgttagtaaatcctgattacaaggccatccatcacttgtcccgtgcattccccaatgtgacagggttcgt

SEQ ID NO: 37337 - DNA, 80 bp, synthetic construct
  source 1..80: mol_type = other DNA
tactcaaatgacctcttcattctcctcagagatttatttgagattctcaaagaaaggccatttcttcagggatcatgaac

SEQ ID NO: 37338 - DNA, 80 bp, synthetic construct
  source 1..80: mol_type = other DNA
ttataagaggattccctgatgagattatttctaacccttataatgaaatgattataactctgattgatagtgaggttgag

SEQ ID NO: 37339 - DNA, 80 bp, synthetic construct
  source 1..80: mol_type = other DNA
aactgaagagaggcagttcatcaaagatggcaataatactagcaataactgttttgttctcgaatagggttttcaatgtg

SEQ ID NO: 37340 - DNA, 80 bp, synthetic construct
  source 1..80: mol_type = other DNA
tcaaagtctcttaaggacaaaaagttttttcctccgtctgatcctaaattgctaagacatttcaacatttgctctagtac

SEQ ID NO: 37341 - DNA, 80 bp, synthetic construct
  source 1..80: mol_type = other DNA
tcttctgttcttgtccacaacgatgggagatctacccaactttaccagactacatgagctttataatgccccggtaacat

SEQ ID NO: 37342 - DNA, 80 bp, synthetic construct
  source 1..80: mol_type = other DNA
actatttcaagaaacaaacaataagaggtaaaaagtatttatcatggagttggtctgacccaagccctatttttaagaag

SEQ ID NO: 37343 - DNA, 80 bp, synthetic construct
  source 1..80: mol_type = other DNA
gttgcttgtaactcatctttgagtctctctgctcattggattagactgatttataagatagtgaaaaccacgaggctcaa

SEQ ID NO: 37344 - DNA, 80 bp, synthetic construct
  source 1..80: mol_type = other DNA
ctgtagtcctaaagacttgataagagaagcagaggactgcttgagaaattataacagatggatcaacatgagagacatta

SEQ ID NO: 37345 - DNA, 80 bp, synthetic construct
  source 1..80: mol_type = other DNA
gatctcgaacttcagtgttagactattgttgtttatgatagttcaaacaacacctcttttaaaatcctccaaataagttg

SEQ ID NO: 37346 - DNA, 80 bp, synthetic construct
  source 1..80: mol_type = other DNA
agtccttccaaagaaattatcttgaaaaaaacttttgtcaatttctgaccgtatcacaaagtgattgtctttaatttttt

SEQ ID NO: 37347 - DNA, 80 bp, synthetic construct
  source 1..80: mol_type = other DNA
ttgaaaaaaacttttgtcaatttctgaccgtatcacaaagtgattgtctttaatttttttattgtttttttgttaagcgt

SEQ ID NO: 37348 - DNA, 80 bp, synthetic construct
  source 1..80: mol_type = other DNA
tgaacaatggtagattgaagaagtcacatatcagaaggtacgtttctgtgagctctaatcatcaggcgcgaccgaattcc

SEQ ID NO: 37349 - DNA, 80 bp, synthetic construct
  source 1..80: mol_type = other DNA
tttgctgagtttctcaacaaggtatattctgaaagttcataaccttgctgttcaaactcaaaagagcactgctgaacata

SEQ ID NO: 37350 - DNA, 80 bp, synthetic construct
  source 1..80: mol_type = other DNA
gatcattgtgattcacagagataaagaaaaaaactcaacaccactccttaatcgatcttctcaaaatgagcaaggatctt

SEQ ID NO: 37351 - DNA, 80 bp, synthetic construct
  source 1..80: mol_type = other DNA
gtacatcccagcctactcagatctggtttagtcaaaatagagatggctgatgagactgcggacctggtcaaccggaccat

SEQ ID NO: 37352 - DNA, 80 bp, synthetic construct
  source 1..80: mol_type = other DNA
tgcggacaatcaggctcatttacaaggagagccttttagtgttgactcactgccggaagacatgagaaggatgaggatta

SEQ ID NO: 37353 - DNA, 80 bp, synthetic construct
  source 1..80: mol_type = other DNA
ttgagacctcgggaagaatggaggtgatcgaggaaggagatgatgaatccagttcagaagaggaatactatatgcctcaa

SEQ ID NO: 37354 - DNA, 80 bp, synthetic construct
  source 1..80: mol_type = other DNA
ggacaagacctgatggttccttttcagagttttctagaggaggttggagctcaagtggtaaaaagaatgaaatcagggga

SEQ ID NO: 37355 - DNA, 80 bp, synthetic construct
  source 1..80: mol_type = other DNA
gggctttttcaaaatctggtccacagtgtccgaagatatcaaagggtatgtctcttccaacctcatgagacctcgatcca

SEQ ID NO: 37356 - DNA, 80 bp, synthetic construct
  source 1..80: mol_type = other DNA
aatcaacagagagcaagaatactcagacagaccctgtcatcccatccaaaccgacccaggaagtggtcttgaccaaaaag

SEQ ID NO: 37357 - DNA, 80 bp, synthetic construct
  source 1..80: mol_type = other DNA
gatgaagcatcaggatctagaggtgtgggaggaaagggtccatccaaaaacactccaaagccaagctggatcaatgacac

SEQ ID NO: 37358 - DNA, 80 bp, synthetic construct
  source 1..80: mol_type = other DNA
gaacaactcaagatgaatttggatgacattgtgaaggcctccatgaatataccgggggtggacaaactagctgaaagagg

SEQ ID NO: 37359 - DNA, 80 bp, synthetic construct
  source 1..80: mol_type = other DNA
atataccgggtgtggacaaactagctgaaagaggggggaagctgccactaagatgtatcctgtggttcgtatctctggat

SEQ ID NO: 37360 - DNA, 80 bp, synthetic construct
  source 1..80: mol_type = other DNA
tcttcgaaaagattccgacttctagctgatgctgacaaagtagctaaactcatgcaggatgatattaacaactacatgac

SEQ ID NO: 37361 - DNA, 80 bp, synthetic construct
  source 1..80: mol_type = other DNA
cagattggaggaaatagacaaaaactgaagaatccccaaaaatcagaacacagatgacattcgtctagatgataatgaaa

SEQ ID NO: 37362 - DNA, 80 bp, synthetic construct
  source 1..80: mol_type = other DNA
aaaacattcaacacccctaacaaaatgaattttctaagaaagatagttaagacttgcaaggatgaagaggcccccaagta

SEQ ID NO: 37363 - DNA, 80 bp, synthetic construct
  source 1..80: mol_type = other DNA
tgaagcggcctctgctcctccagatgatgatgacctctggatgccaccccctgagtatgtgcccttgactcaggtcaaag

SEQ ID NO: 37364 - DNA, 80 bp, synthetic construct
  source 1..80: mol_type = other DNA
agggaagtgttaggaatttctgcataaatggagaggtcaaaatctgtagtccaaatggctattctttcaggatcctcaga

SEQ ID NO: 37365 - DNA, 80 bp, synthetic construct
  source 1..80: mol_type = other DNA
catattctaaaatcgtttgacaatgtatactctgggaatagaaggatgatcggactcgtcaagataataataggactggt

SEQ ID NO: 37366 - DNA, 80 bp, synthetic construct
  source 1..80: mol_type = other DNA
cttatctggatctccggtcccagagggtatgaactgggtttacaaactgcgcagaactctgatttttcagtgggccgagt

SEQ ID NO: 37367 - DNA, 80 bp, synthetic construct
  source 1..80: mol_type = other DNA
cggatatggcactgagaactcagcaatcccaagaggatgagaacacctcacttttgctggagtaacttcacacctggtga

SEQ ID NO: 37368 - DNA, 80 bp, synthetic construct
  source 1..80: mol_type = other DNA
atttgtatgtgactgttacctccacattgagtagatataatctgtgagcaatagaacaaatactgtaatggtgcctgctt

SEQ ID NO: 37369 - DNA, 80 bp, synthetic construct
  source 1..80: mol_type = other DNA
tccgagataagagtcaacagcactccctgtttgtcatcatgagttactcgatttcaacaccttttctgttcgctgtggct

SEQ ID NO: 37370 - DNA, 80 bp, synthetic construct
  source 1..80: mol_type = other DNA
gcaatttcagttgcagacttccccctttacacaattcccgagaagatcgactcctggacgcctatagatatgatccatct

SEQ ID NO: 37371 - DNA, 80 bp, synthetic construct
  source 1..80: mol_type = other DNA
gagttgtccaaataaccttttgtcaggggatgacgggtgcagcacatccacatccttcagttacgtggagctcaaaacag

SEQ ID NO: 37372 - DNA, 80 bp, synthetic construct
  source 1..80: mol_type = other DNA
gttatctgactcatcagaaagtgtctgggttcacctgtaccggggtcatcagtgaggctgttacatacacaaactttgta

SEQ ID NO: 37373 - DNA, 80 bp, synthetic construct
  source 1..80: mol_type = other DNA
ggttatgtgacaaccacatttaaaaggaagcatttcaagcccacggtctcagcctgtagagatgcatttcattggaagat

SEQ ID NO: 37374 - DNA, 80 bp, synthetic construct
  source 1..80: mol_type = other DNA
ctcaggggatcctagatatgaagagtctctgcatacgccttaccctgacagtagttggttaagaacggtcaccacaacaa

SEQ ID NO: 37375 - DNA, 80 bp, synthetic construct
  source 1..80: mol_type = other DNA
aggaatccttgctgataatctcccccagcattgtagagatggatatatatagtagaactcttcactctcctatgtttccc

SEQ ID NO: 37376 - DNA, 80 bp, synthetic construct
  source 1..80: mol_type = other DNA
gaacttgttccagattttatccatcagttccatcctgcgctaccaatcacgattacaccttgtggttgccagaagattct

SEQ ID NO: 37377 - DNA, 80 bp, synthetic construct
  source 1..80: mol_type = other DNA
aacttaagtctcatttgtgacatattcgttactagcacaggtagaaaagcaatgaacggctccaagatgtgtgggttcac

SEQ ID NO: 37378 - DNA, 80 bp, synthetic construct
  source 1..80: mol_type = other DNA
agatgagaggggtttttacagaacactgagaggggcctgtaaattgacgctctgcgggaaaccaggtctaagactatatg

SEQ ID NO: 37379 - DNA, 80 bp, synthetic construct
  source 1..80: mol_type = other DNA
atggaacatgggtatcctttacacgaccggaagttcatgtatggtgctccccgaatcaactagtcaatgtgcataataac

SEQ ID NO: 37380 - DNA, 80 bp, synthetic construct
  source 1..80: mol_type = other DNA
tagagggtaattgggcccaagcaggtggtactgatgtgattagggacccaacagttgcagaacatgcatcccttgtagga

SEQ ID NO: 37381 - DNA, 80 bp, synthetic construct
  source 1..80: mol_type = other DNA
cgtatcgatgagcttgagcatctgattgtggatgaccttatccaaaaaagagaagcatgtttagataccctggaaacaat

SEQ ID NO: 37382 - DNA, 80 bp, synthetic construct
  source 1..80: mol_type = other DNA
tctgatgtctaagtcaattagtttcaggagactcagtcatttcagaaagttggtacctggatatggaaaggcttacacca

SEQ ID NO: 37383 - DNA, 80 bp, synthetic construct
  source 1..80: mol_type = other DNA
tattaaacgggagcttgatggagacaaatgtccactacagaagggtggacaattggactgatatcttaccatcgaaagga

SEQ ID NO: 37384 - DNA, 80 bp, synthetic construct
  source 1..80: mol_type = other DNA
tgtctgaaagtggggaacaaatgccttgatccccataaaggagtttatttcaatggtattattaagggtccggatggtca

SEQ ID NO: 37385 - DNA, 80 bp, synthetic construct
  source 1..80: mol_type = other DNA
tattttaatcccagagatgcagtcgggcatgctgaaacagcatatagatcttctgaaggcagcggtttttcccctccgtc

SEQ ID NO: 37386 - DNA, 80 bp, synthetic construct
  source 1..80: mol_type = other DNA
accctcttatagatcagagttctgtgttcaaaaaagatggtgatgcagatgattttgttgatgttcacatgccggatgta

SEQ ID NO: 37387 - DNA, 80 bp, synthetic construct
  source 1..80: mol_type = other DNA
aacaagttagtatcggacatagatctagggttccatcactggggtctgttcattctgataggggtgacagtattggcgtt

SEQ ID NO: 37388 - DNA, 80 bp, synthetic construct
  source 1..80: mol_type = other DNA
tcttgttctgatatgtcttctttgtatttgttgtaagagagtgaagaggggaaggtctactggggataggacggacccgt

SEQ ID NO: 37389 - DNA, 80 bp, synthetic construct
  source 1..80: mol_type = other DNA
cattagcattatcttcaatctctcaatcaaaaccgaaagtggtgtcatcttgggagtcttacaagggctcctcaaatgcc

SEQ ID NO: 37390 - DNA, 80 bp, synthetic construct
  source 1..80: mol_type = other DNA
taagatctcgctcttcggataggtcggataggaagatgcaaccctatcagctgcctcctcatcttaaaacattccactat

SEQ ID NO: 37391 - DNA, 80 bp, synthetic construct
  source 1..80: mol_type = other DNA
cttctgctgtgtctttatagacttagcaagatagtaggccaaaatactgccaattataagaccaatgtggcagacaggat

SEQ ID NO: 37392 - DNA, 80 bp, synthetic construct
  source 1..80: mol_type = other DNA
acggtttttcatttttttgaggtaactgccaatttgactgtttgattgtctaagtgagatgtagattgtttgtcaagtag

SEQ ID NO: 37393 - DNA, 80 bp, synthetic construct
  source 1..80: mol_type = other DNA
atttgtgtgtttgattatgtgtctagatttagatttatataaaacctcaatatctgttgtttctgatctgtgcagcgaca

SEQ ID NO: 37394 - DNA, 80 bp, synthetic construct
  source 1..80: mol_type = other DNA
atcagaaattagacagagaaaagaatgtatctatgaattcaaagactgaatcagctgtccaaaaggactcctactttagc

SEQ ID NO: 37395 - DNA, 80 bp, synthetic construct
  source 1..80: mol_type = other DNA
ctttaacactcagtggtgcatactttacaaataaagcaatcatgtagttcgtgcactccttttaatgtaatatagtcaaa

SEQ ID NO: 37396 - DNA, 80 bp, synthetic construct
  source 1..80: mol_type = other DNA
gggtgcacgtctgttaaagataaggatgatgtagaatataatgttttctttcttttgatgtgttagtcctttattctaat

SEQ ID NO: 37397 - DNA, 80 bp, synthetic construct
  source 1..80: mol_type = other DNA
gttttgctcaaggtccatgtcaaataagttgtgtgaaaaaaacgtgaatttttctcactaatcacgtaacaacagtcctc

SEQ ID NO: 37398 - DNA, 80 bp, synthetic construct
  source 1..80: mol_type = other DNA
ctaaatctgttaaaaacatgatagattctacagaggtgtatgatgatccaattgatcccgcagagccagaaagtgaatgg

SEQ ID NO: 37399 - DNA, 80 bp, synthetic construct
  source 1..80: mol_type = other DNA
aatggaaattcagtcatcccaaacattttgcgaaactcggattacaatttaaactctcccttattagaggaccctactaa

SEQ ID NO: 37400 - DNA, 80 bp, synthetic construct
  source 1..80: mol_type = other DNA
tttaatgatacaatggctcttatcaggaaatcgaccacccagggtaacagtcacagagaacattctaagatctcataaga

SEQ ID NO: 37401 - DNA, 80 bp, synthetic construct
  source 1..80: mol_type = other DNA
ctctcaaaagtttcttcaaaaagatagacattgcttttgtcaaagtgggaagttcaggagctcaagcaatgatggggacc

SEQ ID NO: 37402 - DNA, 80 bp, synthetic construct
  source 1..80: mol_type = other DNA
tgggtgttggggtctcacgccgagtcttcaagaagtcgaaaatgtttgtctgaattatctgccttctaccaaaaatcatt

SEQ ID NO: 37403 - DNA, 80 bp, synthetic construct
  source 1..80: mol_type = other DNA
acccattgagtccatactaaattataccctaatgaatagaggattgcaaaccccaagagaaggggttctggcgggcctga

SEQ ID NO: 37404 - DNA, 80 bp, synthetic construct
  source 1..80: mol_type = other DNA
gtagagtcagttacgaccattcttttgggaggtacttggggaacttatattcatcctatctactatttcacaccatcatc

SEQ ID NO: 37405 - DNA, 80 bp, synthetic construct
  source 1..80: mol_type = other DNA
ttgtatatgaatgctctagattgggaagaagaaaagacaattctggcactgtggaaagacatgacctctgtagacgtaaa

SEQ ID NO: 37406 - DNA, 80 bp, synthetic construct
  source 1..80: mol_type = other DNA
aaagtcacttttaaagaccctctatggggaaaatttttggttaccaaagaatttgtttattctcacactagcaatactct

SEQ ID NO: 37407 - DNA, 80 bp, synthetic construct
  source 1..80: mol_type = other DNA
ttttgatcgaaattataccttaatgctaaaagacctgtttctatctcgattcaactctttgatgattctaatatcccccc

SEQ ID NO: 37408 - DNA, 80 bp, synthetic construct
  source 1..80: mol_type = other DNA
ccgaacctagatactctgatgatttgattgccaatctgtgtcatctttacatcgcaggtgacaagattatatccacatgt

SEQ ID NO: 37409 - DNA, 80 bp, synthetic construct
  source 1..80: mol_type = other DNA
ggaaactctggttatgacataatcaagatgctagaaccttatgttgtaaacctcttagtacaaaaggcagagacatttcg

SEQ ID NO: 37410 - DNA, 80 bp, synthetic construct
  source 1..80: mol_type = other DNA
acccttgatccattctttgggagagtttccagcatttataaaggataaaaccacccagttaattgggactttcggaccct

SEQ ID NO: 37411 - DNA, 80 bp, synthetic construct
  source 1..80: mol_type = other DNA
gtgcatctcaatttttctcccaacttgaccaatttgaaaacatccacgatcttgtattcgtttatgggtgctatcgacac

SEQ ID NO: 37412 - DNA, 80 bp, synthetic construct
  source 1..80: mol_type = other DNA
tggggacatccttacattgattacagaaaaggtctgactaagttgtttgaccaagttcacatgaagaaaacaatagatat

SEQ ID NO: 37413 - DNA, 80 bp, synthetic construct
  source 1..80: mol_type = other DNA
aactacacagacttggcctcctaaacacattgtagatctccttggtgattcttggcatttgttaccaataacccaaatct

SEQ ID NO: 37414 - DNA, 80 bp, synthetic construct
  source 1..80: mol_type = other DNA
aagctgacatattggctttccgagaataggggcgggcctgttccaagtgagaaagtcatcattactgccttatctaaacc

SEQ ID NO: 37415 - DNA, 80 bp, synthetic construct
  source 1..80: mol_type = other DNA
ccaagtgagaaagtcatcattactgccttatctaaacctcccgtcaatccgagagaatttttgaaggcaatagatcaggg

SEQ ID NO: 37416 - DNA, 80 bp, synthetic construct
  source 1..80: mol_type = other DNA
gagagaatttttgaaggcaatagatcagggggggttacctgaggatgacttgatcattgggctcaaaccgaaagaacgag

SEQ ID NO: 37417 - DNA, 80 bp, synthetic construct
  source 1..80: mol_type = other DNA
agaaactgctagcaaatcatattcttcctctttttgatgccctgacaatgacagataacctaaacaaggtttttaaaaag

SEQ ID NO: 37418 - DNA, 80 bp, synthetic construct
  source 1..80: mol_type = other DNA
gccctcagagtaggtacagtggtgacggcttatgaagactgctcaggattggtatctttcacaggcttcatcaaacagat

SEQ ID NO: 37419 - DNA, 80 bp, synthetic construct
  source 1..80: mol_type = other DNA
ggatgtctaaggtgttctccaggacacatgaattcttccagaggtcatggatctattattcggacagatctgacctcata

SEQ ID NO: 37420 - DNA, 80 bp, synthetic construct
  source 1..80: mol_type = other DNA
ctttaacagttgcacaacactcacagtctttagttaaacctatgcgagacttcctgctaatgtcagtccaagcaatatat

SEQ ID NO: 37421 - DNA, 80 bp, synthetic construct
  source 1..80: mol_type = other DNA
gccccatcctgaaagacagagtctacaaagttctaaattccaaaggagatgatttcctcttggcaatgtcaaggattatt

SEQ ID NO: 37422 - DNA, 80 bp, synthetic construct
  source 1..80: mol_type = other DNA
taatttgtccgcaagagatgcacttctttatttctttcacaaaaacttcgaggaggagatcaagaggatgttcgaaccag

SEQ ID NO: 37423 - DNA, 80 bp, synthetic construct
  source 1..80: mol_type = other DNA
ctttgggaggggtttcaggcatgtcattagggaggtttcatatcagacaattttctgatccggtgtctgagggcttagct

SEQ ID NO: 37424 - DNA, 80 bp, synthetic construct
  source 1..80: mol_type = other DNA
ttttggaaagaaatatggtccagctcatccgagacttggatccatcacctttgtcaagaggcggggaatcctgatctagg

SEQ ID NO: 37425 - DNA, 80 bp, synthetic construct
  source 1..80: mol_type = other DNA
ttctgttcttgagatcaatagaacctttatttccaagattcttaagtgagttgttcagctcttcctttttggggataccg

SEQ ID NO: 37426 - DNA, 80 bp, synthetic construct
  source 1..80: mol_type = other DNA
tcaggaggagcttatcaaggaccttggaagaatctttttaccattctgaaatccatggaattagtaggatgactcaaact

SEQ ID NO: 37427 - DNA, 80 bp, synthetic construct
  source 1..80: mol_type = other DNA
cctcaacggttaggaagagtatggtcatgttctgccgagagagcagatcaactgagagaaatctcttggggaagaaaagt

SEQ ID NO: 37428 - DNA, 80 bp, synthetic construct
  source 1..80: mol_type = other DNA
cagtatcttgtggttgtaacattagggagacatataatccccggatttcagtatctgtgttgccttcttttgatcactct

SEQ ID NO: 37429 - DNA, 80 bp, synthetic construct
  source 1..80: mol_type = other DNA
ttcttctctagaggccctctcaaagggtatctgggatcatctacatccgtttccactcaactatttcatgcgtgggagaa

SEQ ID NO: 37430 - DNA, 80 bp, synthetic construct
  source 1..80: mol_type = other DNA
agttacaaacgtccatgtggttaagagagccctatctcttaaagagtctatcaactggtttgtatcaagagattccaatt

SEQ ID NO: 37431 - DNA, 80 bp, synthetic construct
  source 1..80: mol_type = other DNA
tagcaaggacactcatcaaaaacattttgtccctgacaggtccttcgtttcctattgaggaggctcctgtttttaagaga

SEQ ID NO: 37432 - DNA, 80 bp, synthetic construct
  source 1..80: mol_type = other DNA
ttcagaaagataatcggctgaaagactctacattccattggcacctaagatgtcccaaatgcattagacctatagaagaa

SEQ ID NO: 37433 - DNA, 80 bp, synthetic construct
  source 1..80: mol_type = other DNA
aagtccgcaatcaggtggtgtcagttaaaccagaaatcatttcagatcagtacgagtataaataccctgcaatcacagat

SEQ ID NO: 37434 - DNA, 80 bp, synthetic construct
  source 1..80: mol_type = other DNA
gcagtccctcaatttagaaaattgccagacattgagctcagacctggagacttaatgactttaaccaacagtgaaaggtc

SEQ ID NO: 37435 - DNA, 80 bp, synthetic construct
  source 1..80: mol_type = other DNA
atatcacataggcacagcccaaggcttgttgtattctatcttggtggcagttcatgatccggggtacaatgataactcct

SEQ ID NO: 37436 - DNA, 80 bp, synthetic construct
  source 1..80: mol_type = other DNA
tatttcctgttagtatttacggaaaggtctctccaaggagctacttgagagggttagcacgtggagttctgattgggtcg

SEQ ID NO: 37437 - DNA, 80 bp, synthetic construct
  source 1..80: mol_type = other DNA
tctatctgtttcttaacaagaatgaccaacatcaatattaatcgaccacttgaattgatatcaggggtaatatcatacat

SEQ ID NO: 37438 - DNA, 80 bp, synthetic construct
  source 1..80: mol_type = other DNA
ttcaacaggttttgaggtatgaaagagacagtatgtcttcctcaccagaaagtgagctcttatggattttctctgacttc

SEQ ID NO: 37439 - DNA, 80 bp, synthetic construct
  source 1..80: mol_type = other DNA
tagaaaaaaacatctgcaagtgtctgaacgtctctccatgtgattgtttttaatttttattcgttttttttgttaagcgt

SEQ ID NO: 37440 - DNA, 80 bp, synthetic construct
  source 1..80: mol_type = other DNA
cgaaactgaccaatattctggcggtaggcggtaacgcggtgattaccgcagaagcccacaccgaactggggcagctttgc

SEQ ID NO: 37441 - DNA, 80 bp, synthetic construct
  source 1..80: mol_type = other DNA
cctccaggagaaagaggaatgtcaatgatgaaaaaagaaatcgtattaacagcagcaacgatgttattcagcatggtagc

SEQ ID NO: 37442 - DNA, 80 bp, synthetic construct
  source 1..80: mol_type = other DNA
gaaacctttccgggcattgcggtgtagccatggctgagctagcttgcttttgttatcctcatttggagaacgatagctat

SEQ ID NO: 37443 - DNA, 80 bp, synthetic construct
  source 1..80: mol_type = other DNA
acgcttaacagcaaaatcagagaagatatagacatctacaatgagcgaatcaaaatgtaacactactaaaatggattcgg

SEQ ID NO: 37444 - DNA, 80 bp, synthetic construct
  source 1..80: mol_type = other DNA
aagagacagtatgtcctcatctccaggaagcgagctgttgtggatattctcagatttccgaagtattaaaatgacttact

SEQ ID NO: 37445 - DNA, 80 bp, synthetic construct
  source 1..80: mol_type = other DNA
taactttgatcacttatcaagctcatctctggttgcaaaaagtagaaaagaatctatcaaagcaaatgagagccaaactg

SEQ ID NO: 37446 - DNA, 80 bp, synthetic construct
  source 1..80: mol_type = other DNA
cgtcaattaaactccctaatgcggcaggttttgggagggcatggagaagacaatgtagagtcagatgatgagattcactc

SEQ ID NO: 37447 - DNA, 80 bp, synthetic construct
  source 1..80: mol_type = other DNA
ggagcccgaccttaatccggcacccagaatatccagaaaagtggggtcatcagagtggatctgttctgcccagcaaattg

SEQ ID NO: 37448 - DNA, 80 bp, synthetic construct
  source 1..80: mol_type = other DNA
ctatttcaacttctcttaatccagcatctacttctgatattgatatcagggctttgtctcgtcaattccaaaaccctctt

SEQ ID NO: 37449 - DNA, 80 bp, synthetic construct
  source 1..80: mol_type = other DNA
atgtccggattgagagtagtccagtgggcaactggggctcattataaaatcaaacccatactgaatgatttggaggtgtg

SEQ ID NO: 37450 - DNA, 80 bp, synthetic construct
  source 1..80: mol_type = other DNA
cccttgtttttctttagttataggagatggatctggtggtatatccagagttgtactcagcatgtttccggactctaagt

SEQ ID NO: 37451 - DNA, 80 bp, synthetic construct
  source 1..80: mol_type = other DNA
gaagtacttccactcagtgcaaactaaaatgaaaacccaatttgacctaatagtttgtgacgctgaagtcacagacattg

SEQ ID NO: 37452 - DNA, 80 bp, synthetic construct
  source 1..80: mol_type = other DNA
agtctgtcaacaaaataactctcctgctgtctgacttctctatgtcaataagaggacccctatgcctaatcttcaaaacc

SEQ ID NO: 37453 - DNA, 80 bp, synthetic construct
  source 1..80: mol_type = other DNA
tatggaaccatgttgatcaatccaagttataaggcaattcatcacttgtctagagcctttccatgtgtcaccggttttgt

SEQ ID NO: 37454 - DNA, 80 bp, synthetic construct
  source 1..80: mol_type = other DNA
tgacacagatgacttcatctttttcttcagaaatctatctaaggttctcgaagacaggttatttcttcagagatcatgaa

SEQ ID NO: 37455 - DNA, 80 bp, synthetic construct
  source 1..80: mol_type = other DNA
aggtcatgcttctaaaatggcaataatactcgccataactattttgttttcgaatcgagtattcaatgtatctaaatctc

SEQ ID NO: 37456 - DNA, 80 bp, synthetic construct
  source 1..80: mol_type = other DNA
agaggaggttctttagagatgagaaagagatgcaagattatgcggacttagagggagcaagaatagaagcatctcttgca

SEQ ID NO: 37457 - DNA, 80 bp, synthetic construct
  source 1..80: mol_type = other DNA
tcaaagataagaagtttttccctccctcagatcccaaacttctgagacacttcaatatatgctctagtacactcttattt

SEQ ID NO: 37458 - DNA, 80 bp, synthetic construct
  source 1..80: mol_type = other DNA
gatccatgaactctacaactcccctataacatattatttcaagaaacagaccatcaggagtaagaaattcctatcatgga

SEQ ID NO: 37459 - DNA, 80 bp, synthetic construct
  source 1..80: mol_type = other DNA
gctgggaggatcaaagtcctatctttaagaaagttgcttgcaactcttccatgagtctttctgcacattggattaggttg

SEQ ID NO: 37460 - DNA, 80 bp, synthetic construct
  source 1..80: mol_type = other DNA
atttacaagatagtcaagaccaccagactaaattgtggaccaaaagaactgatgaaagagattgaattgtatttgaggag

SEQ ID NO: 37461 - DNA, 80 bp, synthetic construct
  source 1..80: mol_type = other DNA
ttataatagatggatcacaatgaaggacattagatcaaggacatccattttagactattgttgcctataaactcgtctca

SEQ ID NO: 37462 - DNA, 80 bp, synthetic construct
  source 1..80: mol_type = other DNA
agacactggcctttatactatccctaaatgtgacaagcatgccaaagaaattttatagaaaaaaacatataccaatatcc

SEQ ID NO: 37463 - DNA, 80 bp, synthetic construct
  source 1..80: mol_type = other DNA
tagaaaaaaacatataccaatatccgaaagtctcactatgtgactgtttttaatttttttaatgtttttttgttaagcgt

SEQ ID NO: 37464 - DNA, 80 bp, synthetic construct
  source 1..80: mol_type = other DNA
tatgatgaacaatggcaggttgaagaaatctcacatccgcagatatgtctctgtaagttctaaccatcaggctaggccga

SEQ ID NO: 37465 - DNA, 80 bp, synthetic construct
  source 1..80: mol_type = other DNA
actcatttgcagaatttctcaacaaggtgtattcggagagctcataggctccacatgaggggcttcgggacacagggtca

SEQ ID NO: 37466 - DNA, 80 bp, synthetic construct
  source 1..80: mol_type = other DNA
aaatgtcatctcatatgaaataggaatagaaaaaaactcaacatctctcctcagttcatctcctcgccatgagcaagggg

SEQ ID NO: 37467 - DNA, 80 bp, synthetic construct
  source 1..80: mol_type = other DNA
ctcatacatcccagttccatccgttccggtttagtagacttagaaatggcagaggagactgtagatctagtccacaagaa

SEQ ID NO: 37468 - DNA, 80 bp, synthetic construct
  source 1..80: mol_type = other DNA
tctcacggatggtcaagcacacctgcagggggagccattcagtgtagattcgttgccagaagatgtgaggagaatgagga

SEQ ID NO: 37469 - DNA, 80 bp, synthetic construct
  source 1..80: mol_type = other DNA
tcgtggatgcatcaggagagagggaggtggttgaagaagacgaggaagaatacagctctgaagatgagtactatttgcct

SEQ ID NO: 37470 - DNA, 80 bp, synthetic construct
  source 1..80: mol_type = other DNA
tgggaagaaacctggtattacattgggaagggctccagatttgagcactgcatataagtctatattatctggaatgaacg

SEQ ID NO: 37471 - DNA, 80 bp, synthetic construct
  source 1..80: mol_type = other DNA
caggggctagaccctatggtgcccttccagagctttttggatgagcttggaactttgattgtacgaaggatgaagtccgg

SEQ ID NO: 37472 - DNA, 80 bp, synthetic construct
  source 1..80: mol_type = other DNA
agatggattctttaaaatctggtcagcagcctcagaagacataaaaggatatgtgttgtctaccttcatgaagtcggaag

SEQ ID NO: 37473 - DNA, 80 bp, synthetic construct
  source 1..80: mol_type = other DNA
ccaagatcactgataacaagcaaacacagactgatccgatgaatctcccaaaacctcttcccaaggcaaatcctgtacaa

SEQ ID NO: 37474 - DNA, 80 bp, synthetic construct
  source 1..80: mol_type = other DNA
aaagaagaacagtccaaacctggatctgctggaggcagagtcaagcccaaaatcccacccaagtctgagtgggccaaaac

SEQ ID NO: 37475 - DNA, 80 bp, synthetic construct
  source 1..80: mol_type = other DNA
cactgaagaagtcagcgatatagaaggagaagttgcacaccaggttgcagagagcttttcaaagagatataagttcccat

SEQ ID NO: 37476 - DNA, 80 bp, synthetic construct
  source 1..80: mol_type = other DNA
ataccaggagtggacaaaatagcagaaattggaggaaaattgcctttgagatgtattcttgggtttgtctctcttgattc

SEQ ID NO: 37477 - DNA, 80 bp, synthetic construct
  source 1..80: mol_type = other DNA
ttctaaaaagtttcgactcctagcagatactgacaaagtggccaggctcatgcaagatgatatcaacaattatatgacca

SEQ ID NO: 37478 - DNA, 80 bp, synthetic construct
  source 1..80: mol_type = other DNA
gacttgaagaaatagaccaaaattaggaaacttaaaacacagaaggtttatgatcataacatatatgaccgtaaaaaaaa

SEQ ID NO: 37479 - DNA, 80 bp, synthetic construct
  source 1..80: mol_type = other DNA
catgtaacacccctaaaagaatgaattttctacggaagatagtaaagaactgtaaggatgatgagctcccaaagccagga

SEQ ID NO: 37480 - DNA, 80 bp, synthetic construct
  source 1..80: mol_type = other DNA
accccttctgctcctccagatgatgatgatctttggatgcctcctccggagtatgtaccattgactcaaattaaaggcaa

SEQ ID NO: 37481 - DNA, 80 bp, synthetic construct
  source 1..80: mol_type = other DNA
aggagaatgttagaaatttctgtataaatggagaagtcaaaatttgcagtccaaatggttattctttcaggattctaaga

SEQ ID NO: 37482 - DNA, 80 bp, synthetic construct
  source 1..80: mol_type = other DNA
cacattttgaagtcttttgatagtgtttattcaggaaatagaaggatgatcggtctagtcaaagtagttattggattggt

SEQ ID NO: 37483 - DNA, 80 bp, synthetic construct
  source 1..80: mol_type = other DNA
aacaatcccaggaggatgaaaatacttcacttttactggagtaatttcaagcctagtgaatatgtctttacctgttacct

SEQ ID NO: 37484 - DNA, 80 bp, synthetic construct
  source 1..80: mol_type = other DNA
ccatctcaagtagatataatctgtgagcaatagaacaattacagtaatggtgcctgctttcagcacaacatctatgatat

SEQ ID NO: 37485 - DNA, 80 bp, synthetic construct
  source 1..80: mol_type = other DNA
gagtctgcccagaagattggatgagttatgggatccttatagcgaaaaagggagaaactattactcctgatgtcttaata

SEQ ID NO: 37486 - DNA, 80 bp, synthetic construct
  source 1..80: mol_type = other DNA
gatcacggattaacagccctccctaatcgtcatcatgagtcagctaattctgataccatttttgtgtgtggttatagtga

SEQ ID NO: 37487 - DNA, 80 bp, synthetic construct
  source 1..80: mol_type = other DNA
catcagtgggagattttcctttatatactatcccggaaaagataggcacctggactccaatcgatctgattcatctaact

SEQ ID NO: 37488 - DNA, 80 bp, synthetic construct
  source 1..80: mol_type = other DNA
tgtcctaacaatctgctgtcaggggatgatgggtgcagtgatactgccacttttagttatatagatcttaaaacaggtta

SEQ ID NO: 37489 - DNA, 80 bp, synthetic construct
  source 1..80: mol_type = other DNA
cctcactcatcaaaaagtttctggctttacatgcacaggtgtagttaatgaggctgtcacttacaccaactttgtaggat

SEQ ID NO: 37490 - DNA, 80 bp, synthetic construct
  source 1..80: mol_type = other DNA
aaaggaagcatttcaaacccacagccttagcgtgtagagacgcctttcattggaaaatctctggagacccgagatatgag

SEQ ID NO: 37491 - DNA, 80 bp, synthetic construct
  source 1..80: mol_type = other DNA
agtccttgctaataatctcccccagtatagttgagatggacgtttatagcagaacccttcactctcctatgtttcctggt

SEQ ID NO: 37492 - DNA, 80 bp, synthetic construct
  source 1..80: mol_type = other DNA
ggggtatgctctaaattctatccatcatccccttcctgtcctactaatcatgattacaccctatggcttcctgaggatgc

SEQ ID NO: 37493 - DNA, 80 bp, synthetic construct
  source 1..80: mol_type = other DNA
caatctaagtatggcctgtgatatatttgttaccagtacagggaaaaagtcaatgaatggttcaagaatgtgtggattca

SEQ ID NO: 37494 - DNA, 80 bp, synthetic construct
  source 1..80: mol_type = other DNA
gacataactagaacgaatgtggaaggaaactgggctcagacaggaggggcagatatgacgcgagatcctacagttgctga

SEQ ID NO: 37495 - DNA, 80 bp, synthetic construct
  source 1..80: mol_type = other DNA
gattgaggttatatgatggaacatgggtatctttcacacgcccagagattaacgtatggtgttctcccaaccaactagtc

SEQ ID NO: 37496 - DNA, 80 bp, synthetic construct
  source 1..80: mol_type = other DNA
aatgttcataacaatcgattggatgagatagaacatctaattgtgggagacctcattcggaagagagaagagtgtctgga

SEQ ID NO: 37497 - DNA, 80 bp, synthetic construct
  source 1..80: mol_type = other DNA
cactctagagaccattctgatgtccaaatctataagctttaggcgactcagtcatttcagaaagttggtgcctgggtatg

SEQ ID NO: 37498 - DNA, 80 bp, synthetic construct
  source 1..80: mol_type = other DNA
ggaaagcttatacaattattaacgggagtctgatggaaaccaatgttcactaccttagggttgacagttggaatgatata

SEQ ID NO: 37499 - DNA, 80 bp, synthetic construct
  source 1..80: mol_type = other DNA
ttgccttccaaaggatgcttgaaaatgaacaaacaatgtgtcgattcctacaaaggagtcttcttcaatgggattatcaa

SEQ ID NO: 37500 - DNA, 80 bp, synthetic construct
  source 1..80: mol_type = other DNA
aggactggatggacatattttgattccagagatgcagtccagtctactgaaacagcatatggatctcttaaaggcagcag

SEQ ID NO: 37501 - DNA, 80 bp, synthetic construct
  source 1..80: mol_type = other DNA
tttttcctctacgacaccccttaatagaccaaaattctttgtttaagaaggatggtgatgcagatgattttgtggaagtt

SEQ ID NO: 37502 - DNA, 80 bp, synthetic construct
  source 1..80: mol_type = other DNA
cacatgccagatatacaaaagttgatctctgatgtagacctcggattgccaagttggagtctctacgtcctgataggagc

SEQ ID NO: 37503 - DNA, 80 bp, synthetic construct
  source 1..80: mol_type = other DNA
tgctgtaatagctttcctgatcctgatatgcttaatccacatttgctgcaagaagaggggtcgcacgcgcccctcgatag

SEQ ID NO: 37504 - DNA, 80 bp, synthetic construct
  source 1..80: mol_type = other DNA
aaagaccagatcctcccctaagcttgtccactactccccagtctcgggctaaagtagtgtcgtcttgggagtcctacaag

SEQ ID NO: 37505 - DNA, 80 bp, synthetic construct
  source 1..80: mol_type = other DNA
ggaacttcaaatgtgtagcaacacactctccaagaaacttataatgtataacatacaacccaactaactgcctcttcatc

SEQ ID NO: 37506 - DNA, 80 bp, synthetic construct
  source 1..80: mol_type = other DNA
ttcgaacattccacggtacaatcatctcattagatgctgaaccattgtggttcatgttatctaaacattgcgatttattc

SEQ ID NO: 37507 - DNA, 80 bp, synthetic construct
  source 1..80: mol_type = other DNA
aggatcatttattggaatgatgtagatagttgatcaagtatctaggtgtaatataatagatgactctttttcttctgttc

SEQ ID NO: 37508 - DNA, 80 bp, synthetic construct
  source 1..80: mol_type = other DNA
caagctaatgcgatgacaatcagcaattaagcaaacgtggggatatccctgtagggtcttttccaaatttacctgtttta

SEQ ID NO: 37509 - DNA, 80 bp, synthetic construct
  source 1..80: mol_type = other DNA
tggcatatattcaccttagcctttacgattttgaggtgcaacaatcaatgaacaaagcaatcatacattctttatacttc

SEQ ID NO: 37510 - DNA, 80 bp, synthetic construct
  source 1..80: mol_type = other DNA
ctttcattctaaatctccaggaagtgtattattgttctatcaaagaacggcgcacaatatagagctttctgttttcttgt

SEQ ID NO: 37511 - DNA, 80 bp, synthetic construct
  source 1..80: mol_type = other DNA
tcctttgtttctgtttgtcatatgtttgtttttgtcaaatttacataacataattaacatgaaaaaaacatattgtctct

SEQ ID NO: 37512 - DNA, 80 bp, synthetic construct
  source 1..80: mol_type = other DNA
aacacggcaagcagtaacaaccctcctattttttcattcaacatgattgactcatcagaggtatatgatgatcccattga

SEQ ID NO: 37513 - DNA, 80 bp, synthetic construct
  source 1..80: mol_type = other DNA
cccggcagagccggagtgtgagtggaatggaaactcggtcattccaaatattttgagaaattcagattacaatttaaatt

SEQ ID NO: 37514 - DNA, 80 bp, synthetic construct
  source 1..80: mol_type = other DNA
ctccattgctagaggatccttctgtcctgatgatgcaatggcttttgtcaggtaaccgtccaacaagaatagctttgaca

SEQ ID NO: 37515 - DNA, 80 bp, synthetic construct
  source 1..80: mol_type = other DNA
gaaaatgtgtcaagatctcataaggttctcaaggcattcttcaaaaagattgatgctgcacttataaaaataggaggtga

SEQ ID NO: 37516 - DNA, 80 bp, synthetic construct
  source 1..80: mol_type = other DNA
gagtgcccaagctatgatgggattgtgggttttagggtctcatgcagagtcatctcgcagtagaaagtgcctgtcagact

SEQ ID NO: 37517 - DNA, 80 bp, synthetic construct
  source 1..80: mol_type = other DNA
tgtctgccttttatcagagatctttgcctattgaatctattctgaactatacactgcttaatagggggctacaaactccg

SEQ ID NO: 37518 - DNA, 80 bp, synthetic construct
  source 1..80: mol_type = other DNA
aaagagggagttttagctggtctgagtagggtcagttatgatcagtcattcgggagatatctcggaaacctctattcctc

SEQ ID NO: 37519 - DNA, 80 bp, synthetic construct
  source 1..80: mol_type = other DNA
gaaagatatagcagtcatagatgtgaaaagtgataaagtttcattcaaagaccccttgtggggaaagtttttggtgacca

SEQ ID NO: 37520 - DNA, 80 bp, synthetic construct
  source 1..80: mol_type = other DNA
aagaattcgtttattcccattctagtaacagtctgtttgacaggaattacaccttgatgctcaaagacttgtttctctca

SEQ ID NO: 37521 - DNA, 80 bp, synthetic construct
  source 1..80: mol_type = other DNA
gacttggtggctaatctgtgtcgactgtatatcacaggagaccgtgttttatccacatgtgggaattcaggctatgacat

SEQ ID NO: 37522 - DNA, 80 bp, synthetic construct
  source 1..80: mol_type = other DNA
aatcaagatgctggagccttatgtagttgaccttttagtcaggagagcagaaacttttcgccctttgattcattctcttg

SEQ ID NO: 37523 - DNA, 80 bp, synthetic construct
  source 1..80: mol_type = other DNA
gagagttccccatgttcataagagacaagaccaatcagttgataggaacttttggaccctgtgcggcgcaattcttctct

SEQ ID NO: 37524 - DNA, 80 bp, synthetic construct
  source 1..80: mol_type = other DNA
atgttgaatcagtttgaaaatattcatgacttagtgttcatttatggatgttataggcattggggacatccctatattga

SEQ ID NO: 37525 - DNA, 80 bp, synthetic construct
  source 1..80: mol_type = other DNA
ctattgataaaaaatatcaagaatgtttggcaagtgacttagccaaaaaaatcctcagatggggctttgataaatactcc

SEQ ID NO: 37526 - DNA, 80 bp, synthetic construct
  source 1..80: mol_type = other DNA
cacaaggttgctcccaagggatcatcccttggccccatacatagccacccagacctggcctccgaaacacatagtggatc

SEQ ID NO: 37527 - DNA, 80 bp, synthetic construct
  source 1..80: mol_type = other DNA
ccaagctcatgtattggttatctgagaataagggaggacctgtccctagtgagaaagttataatcactgccctgtcaaaa

SEQ ID NO: 37528 - DNA, 80 bp, synthetic construct
  source 1..80: mol_type = other DNA
cctcctgtaaatccgagagaatttctaaaatcaattgatcaagatggattgaaagatgatgaccttataatagggttaaa

SEQ ID NO: 37529 - DNA, 80 bp, synthetic construct
  source 1..80: mol_type = other DNA
tggaacctcagattgtactttgtgattactgagaagctgctggccaatcatattcttccattgtttgatgcactcactat

SEQ ID NO: 37530 - DNA, 80 bp, synthetic construct
  source 1..80: mol_type = other DNA
cggctatcagggttggtacagttgtgacagcttatgaagattgctcagggcttgtatcttttacagggtttattaaacaa

SEQ ID NO: 37531 - DNA, 80 bp, synthetic construct
  source 1..80: mol_type = other DNA
ggcgatctaccattatttgttatttagccccattttaaaggacagagtatataaggtactgaattctaagggggatgagt

SEQ ID NO: 37532 - DNA, 80 bp, synthetic construct
  source 1..80: mol_type = other DNA
ccagattgctggaagatcccaccactctgaatataagggggggtgcaagccctactatactgctgaaagaggcaattaga

SEQ ID NO: 37533 - DNA, 80 bp, synthetic construct
  source 1..80: mol_type = other DNA
gggtgcaagccctactatactgctgaaagaggcaattagaaaggccctttatgacgaagtggacaaagtggagaattccg

SEQ ID NO: 37534 - DNA, 80 bp, synthetic construct
  source 1..80: mol_type = other DNA
ttctgtccaagacccatcgtgacaattttatcttgtttttaaaatctatagaacccttgttccctagatttttgagcgag

SEQ ID NO: 37535 - DNA, 80 bp, synthetic construct
  source 1..80: mol_type = other DNA
ctctttagctcttcttttctgggcataccagagtctataatcggacttatccagaactcaagaacagtgagaagacagtt

SEQ ID NO: 37536 - DNA, 80 bp, synthetic construct
  source 1..80: mol_type = other DNA
agaggaatcattcttccactctgagattcatgggataagtcgaatgactcagactcctcaacggctggggagagtgtggc

SEQ ID NO: 37537 - DNA, 80 bp, synthetic construct
  source 1..80: mol_type = other DNA
ttgttggaacaactgttcctcacccggcagaaatgctggtgctgattcccaagtcatctgtagcttgtggttgtaacata

SEQ ID NO: 37538 - DNA, 80 bp, synthetic construct
  source 1..80: mol_type = other DNA
cgggaggcttataacccccgaatatcagtatcaattttaccttcttttgatcactctttcttttcacggggtcctttgaa

SEQ ID NO: 37539 - DNA, 80 bp, synthetic construct
  source 1..80: mol_type = other DNA
gggttatttaggatcttcgacatcagtctctactcagttgtttcatgcatgggagaaagtaacaaatgttcatgttgtta

SEQ ID NO: 37540 - DNA, 80 bp, synthetic construct
  source 1..80: mol_type = other DNA
tggtttgtatctcgagattcaaatttggctcagacattaattaaaaacatcttatctctgaccggtcccacttttccgat

SEQ ID NO: 37541 - DNA, 80 bp, synthetic construct
  source 1..80: mol_type = other DNA
tttccgattgaagaggctccagttttcaagcgcaccggatctgccttgcaccgtttcaaatctgccagatacagtgaggg

SEQ ID NO: 37542 - DNA, 80 bp, synthetic construct
  source 1..80: mol_type = other DNA
tgaagaggctccagttttcaagcgcaccggatctgccttgcaccgtttcaaatctgccagatacagtgaggggggttact

SEQ ID NO: 37543 - DNA, 80 bp, synthetic construct
  source 1..80: mol_type = other DNA
ttcaaaaagatggaaggttgaaagattcgactttccattggcatctgagatgcaagaaatgtattagacccatagaagag

SEQ ID NO: 37544 - DNA, 80 bp, synthetic construct
  source 1..80: mol_type = other DNA
agggtgcataatcaagtagtgtcagttaaaccggaaatcatcttagatcaatatgagtataaatatcctgcaattacaga

SEQ ID NO: 37545 - DNA, 80 bp, synthetic construct
  source 1..80: mol_type = other DNA
gtatcattggaagctcctcagagtttcacatttccagatatatccacaagaatatcaagaatggtatcaggggcagtccc

SEQ ID NO: 37546 - DNA, 80 bp, synthetic construct
  source 1..80: mol_type = other DNA
acaatttaggaaactaccggacattgagctcaaagtaggtgatttgatgatattgagtaatggggagagatcttaccata

SEQ ID NO: 37547 - DNA, 80 bp, synthetic construct
  source 1..80: mol_type = other DNA
taggcactgcacaaggtttgttgtactctatattagtagccatccatgatcctgggtataatgataactctttatttcct

SEQ ID NO: 37548 - DNA, 80 bp, synthetic construct
  source 1..80: mol_type = other DNA
gtgaacatttacggaaaaatatctgcacgtaattatctaagagggctggcccgcggtgttttaatcggatcatctatatg

SEQ ID NO: 37549 - DNA, 80 bp, synthetic construct
  source 1..80: mol_type = other DNA
ttttttaacaaggatgacaaacattaatataaataggccactagagttgatctctggggtgatatcatacatcctactta

SEQ ID NO: 37550 - DNA, 80 bp, synthetic construct
  source 1..80: mol_type = other DNA
ggttagataatcatccatctctctatgtaatgttaaaagagccggaattgagatcagagatattttcgataccccagaag

SEQ ID NO: 37551 - DNA, 80 bp, synthetic construct
  source 1..80: mol_type = other DNA
gtgcctgctgcataccctaccactatggaagagggaaatcgatctgttttatgctacctacaacaggttctgagatatga

SEQ ID NO: 37552 - DNA, 80 bp, synthetic construct
  source 1..80: mol_type = other DNA
aggtatgaaggcatacgcgtccctaaagagacacaccgcatatagctaggaatcaacagataagtatagatcaaagggct

SEQ ID NO: 37553 - DNA, 80 bp, synthetic construct
  source 1..80: mol_type = other DNA
gaacaacccctgaatagtaacaaaatataaaaatcaacaaaaatcataaaatagaaaactagaaatagaagtaggtgaga

SEQ ID NO: 37554 - DNA, 80 bp, synthetic construct
  source 1..80: mol_type = other DNA
tcaaagattataaaaccctgaacagtaataaaatataaaattaataatgagtaccataattggcaaatggaagagacgta

SEQ ID NO: 37555 - DNA, 80 bp, synthetic construct
  source 1..80: mol_type = other DNA
taggcatagcataccgaactcttccacaattctccgtacccatagggacgtaggagatgttattttgtttttaatatttc

SEQ ID NO: 37556 - DNA, 80 bp, synthetic construct
  source 1..80: mol_type = other DNA
aggtatgaaggcacacgcgtccctaaagagacacaccacatatagctaagaatcaatagataagtatagtaacaaaatat

SEQ ID NO: 37557 - DNA, 80 bp, synthetic construct
  source 1..80: mol_type = other DNA
atgagtgacttgacagatattcaagaggatataacccgccatgaacaacagcttgttgttgccagacaaaaacttaaaga

SEQ ID NO: 37558 - DNA, 80 bp, synthetic construct
  source 1..80: mol_type = other DNA
aggttcgcaacattatgagcccagtcatgggggtcataggcttctcattctttgtcaaggactggccagaaaggattgga

SEQ ID NO: 37559 - DNA, 80 bp, synthetic construct
  source 1..80: mol_type = other DNA
agcacgctgtccatatggatcatcaacatttttcaatgtcttaagggcaaatgagtcagtatttttttttatattttccg

SEQ ID NO: 37560 - DNA, 80 bp, synthetic construct
  source 1..80: mol_type = other DNA
gagtcagtatttttttttatattttccgatgtcaaggacttataactagtcaaatgctctatatttcccacaatcaattc

SEQ ID NO: 37561 - DNA, 80 bp, synthetic construct
  source 1..80: mol_type = other DNA
ttgaaacaagaccttttaatatcttcttggattaagtgtataacagcttgtaaagactttgcaagcatcaatgacaaggt

SEQ ID NO: 37562 - DNA, 80 bp, synthetic construct
  source 1..80: mol_type = other DNA
atggctgcgtgagatacacgtagcctatcagtttcttactgctctactctgcaaagcaagagatcaataacccatcatgg

SEQ ID NO: 37563 - DNA, 80 bp, synthetic construct
  source 1..80: mol_type = other DNA
gcaaactataaataatttgaatatcgcatacaaatacttatccacaggaaaagctaaagtatgttgtgttaaaatgactg

SEQ ID NO: 37564 - DNA, 80 bp, synthetic construct
  source 1..80: mol_type = other DNA
gagacaaattatttaagacgctagtatcagatcacagtagagtagttaacgttggaccaagaaatgaatctatgtttact

SEQ ID NO: 37565 - DNA, 80 bp, synthetic construct
  source 1..80: mol_type = other DNA
tttctagatcacccgtcaataaagcaattttcaaatggaccctatttagttaaagatacgataaagcttaaacaagagag

SEQ ID NO: 37566 - DNA, 80 bp, synthetic construct
  source 1..80: mol_type = other DNA
atggctcggtaagagactatcgcaatttgacattggtcagtataagaacatgctaaatgtattaacaactttataccaat

SEQ ID NO: 37567 - DNA, 80 bp, synthetic construct
  source 1..80: mol_type = other DNA
ctcaggtgattgatggtcagtatgtgaccaaccccaggttcaatatctccgattactttgagattgtgcggcagcctggt

SEQ ID NO: 37568 - DNA, 80 bp, synthetic construct
  source 1..80: mol_type = other DNA
cttaatcagccaatgcaaggcagtaaaagagcttgttaacagtacaggcctctcagatctggaactggagagcttgctca

SEQ ID NO: 37569 - DNA, 80 bp, synthetic construct
  source 1..80: mol_type = other DNA
gttcgcagaaggctttttgctgatggggtcgttcgtcacgctgtttaattacatcggctataggttgatgcttttaagtg

SEQ ID NO: 37570 - DNA, 80 bp, synthetic construct
  source 1..80: mol_type = other DNA
atgcgtccccaaagataaaactggcatcgaaccaggttcagacagaaaggtccctaatgagctggattggttaaacggga

SEQ ID NO: 37571 - DNA, 80 bp, synthetic construct
  source 1..80: mol_type = other DNA
ggaaccttgattggactcaggtgattgctggtcagtatgtgaccaaccctaggttcaatatctccgattactttgagatt

SEQ ID NO: 37572 - DNA, 80 bp, synthetic construct
  source 1..80: mol_type = other DNA
gcatttctcacagtcaactcagctgcccctattgatctattttgccatcctaccgttcttctttctctactattcatacc

SEQ ID NO: 37573 - DNA, 80 bp, synthetic construct
  source 1..80: mol_type = other DNA
ctattttgccatcctaccgttcttctttctctactattcataccagtttcattatttgaagggtgtggggggaacgattt

SEQ ID NO: 37574 - DNA, 80 bp, synthetic construct
  source 1..80: mol_type = other DNA
ctaactgctctgtacttctcactgtcaattcagctgcctccgttaatctatttgccatcctgccattcttctttctctaa

SEQ ID NO: 37575 - DNA, 80 bp, synthetic construct
  source 1..80: mol_type = other DNA
atgttaattaagtgaggaccagactaactatctggtatccaatcttagttagcatgtagctatatcaagtcattcagact

SEQ ID NO: 37576 - DNA, 80 bp, synthetic construct
  source 1..80: mol_type = other DNA
tcaaagtggctataaaaccctgaacagtaataaaacataaaattaataaggatcaaatgagtaccataattggcaaacgg

SEQ ID NO: 37577 - DNA, 80 bp, synthetic construct
  source 1..80: mol_type = other DNA
aggccttcagtaagtgggcaaaggagtgccggaaggacatggaagatgagaagcttctgggggtcagagaaagaacacta

SEQ ID NO: 37578 - DNA, 80 bp, synthetic construct
  source 1..80: mol_type = other DNA
ttacccacgttgacacagacagctctagtagtggttctttatcattattaaaccatggactttttaagaaaccttgactg

SEQ ID NO: 37579 - DNA, 80 bp, synthetic construct
  source 1..80: mol_type = other DNA
ctttgtgtgctttctattttcagaatgagtgcagtaagagagaagggcctaggtgttcattcgcagcattgttaagctta

SEQ ID NO: 37580 - DNA, 80 bp, synthetic construct
  source 1..80: mol_type = other DNA
agacctagtactgtgacaccaactacacgtgaagacgagcaaggtcaggagcagataagcctagatgatctaatggcaag

SEQ ID NO: 37581 - DNA, 80 bp, synthetic construct
  source 1..80: mol_type = other DNA
agcacactgtccatatggatcatcaacatttttcaatgtcttaaggacaaatgagtcagtctgcaccatactattttccg

SEQ ID NO: 37582 - DNA, 80 bp, synthetic construct
  source 1..80: mol_type = other DNA
atgtcaaggccttcaaactagtcaactgctctatatttcccacaatcaattcatctattttagtccaattctttcaacca

SEQ ID NO: 37583 - DNA, 80 bp, synthetic construct
  source 1..80: mol_type = other DNA
tttcccacaatcaattcatctattttagtccaattctttcaaccatcagtttacttttactgtcttaccattttccttcc

SEQ ID NO: 37584 - DNA, 80 bp, synthetic construct
  source 1..80: mol_type = other DNA
aaaggttatatgctctacaggaagattcagaagtagagccaatagccataatttgtcacggcatagagagcaacatgaag

SEQ ID NO: 37585 - DNA, 80 bp, synthetic construct
  source 1..80: mol_type = other DNA
gtaaaccctcaaccaagaaaaaaaatgaagatccaacagaacaagacagtcagcaaaatgctgttgaacatgagagttca

SEQ ID NO: 37586 - DNA, 80 bp, synthetic construct
  source 1..80: mol_type = other DNA
aacatcttggctttcaaggactatggtgagagaggaatagttgaagaaaatcacatgaggtttagtgaagaggaccagct

SEQ ID NO: 37587 - DNA, 80 bp, synthetic construct
  source 1..80: mol_type = other DNA
actagtgaaaagatgctattaagctggataagtgaagacattaaatcatcgagatgtagtgagtgccttgataacataaa

SEQ ID NO: 37588 - DNA, 80 bp, synthetic construct
  source 1..80: mol_type = other DNA
aaagacggttgatgaaactgccaacctatcagaaaagatcgaactgcttgcttataatttgcaacttactagccattgca

SEQ ID NO: 37589 - DNA, 80 bp, synthetic construct
  source 1..80: mol_type = other DNA
gtaactgtcaccccagcggtgtgaacattagcaacatatcaaatgtgtgcaagaggtgtcccaaaatagaagtagttaat

SEQ ID NO: 37590 - DNA, 80 bp, synthetic construct
  source 1..80: mol_type = other DNA
aagagttagttaagaaaagcattgatgaagttttgcttactgaggatggaaatctgatattctgctggctaaaaacgata

SEQ ID NO: 37591 - DNA, 80 bp, synthetic construct
  source 1..80: mol_type = other DNA
tcctcctcagtcaaggggagcttaaagaagagacttaagttcatgaatatacattctccagaactgataccagaaaactg

SEQ ID NO: 37592 - DNA, 80 bp, synthetic construct
  source 1..80: mol_type = other DNA
ttacctggtaagacatccggagatacttgactgtgggtccaaggaggattgtaggctcactctactcgatctgtcagtct

SEQ ID NO: 37593 - DNA, 80 bp, synthetic construct
  source 1..80: mol_type = other DNA
ctaaactcttagtctgtttgtatcaaaaagatgatgaagaactagcaagtggcttgggtttaaaacttgggtttttagta

SEQ ID NO: 37594 - DNA, 80 bp, synthetic construct
  source 1..80: mol_type = other DNA
cgagcctagatgagatcactctatctaagaaacaagcagagatattgaggcagaaagcatctcagttatctaaactggtt

SEQ ID NO: 37595 - DNA, 80 bp, synthetic construct
  source 1..80: mol_type = other DNA
gacggccttacaaacccacatcttaaagagacgatccttaatgtggggttagactgtcttaccaacatgcggcatttcgg

SEQ ID NO: 37596 - DNA, 80 bp, synthetic construct
  source 1..80: mol_type = other DNA
ccatgcaacctcttcagtattgacttctttagctgccgtgctcttcgaagagttagcaatttcttaccttaaaaggagcc

SEQ ID NO: 37597 - DNA, 80 bp, synthetic construct
  source 1..80: mol_type = other DNA
tacctcagacaacagtgcatgttgagcatgctggcagttctgatgattacgcaaaatgtatagtggtaactggtataatt

SEQ ID NO: 37598 - DNA, 80 bp, synthetic construct
  source 1..80: mol_type = other DNA
cagacactaacagcccgaaatgttttacacgggttagctggaggaataaaagagctctcgcttcctatatatacaatatt

SEQ ID NO: 37599 - DNA, 80 bp, synthetic construct
  source 1..80: mol_type = other DNA
tcctaatagtcataatctacgtggcatttaacaaacactaacatcaaaaagtgggcaaaggatatgaacagacacttctc

SEQ ID NO: 37600 - DNA, 80 bp, synthetic construct
  source 1..80: mol_type = other DNA
ctagaaccggccctagacgacggggcgatacatacgaccggaaaccttgcggccgtgtctgactgggtaatgagcaccgt

SEQ ID NO: 37601 - DNA, 80 bp, synthetic construct
  source 1..80: mol_type = other DNA
gtaattgtggatatagacgctgacagcgcatttttgaaagctttgcaacgtgcgtaccctgtggtcgaagtggaacctag

SEQ ID NO: 37602 - DNA, 80 bp, synthetic construct
  source 1..80: mol_type = other DNA
cggcccccttgcacacccggctgctacgaaaaagagccggagaaaaccttgcgcatgcttgaagacaatgtcatgagccc

SEQ ID NO: 37603 - DNA, 80 bp, synthetic construct
  source 1..80: mol_type = other DNA
atgagtgacttaaaagatatacaggaggatatcacccgccatgaacaacaacttgttgtcgccaggcaaaagcttaggga

SEQ ID NO: 37604 - DNA, 80 bp, synthetic construct
  source 1..80: mol_type = other DNA
agcaaaggaggttgaaatactaaaaaggaataaaatttatttcatgcataggcaggatgtgcttgataaaaatcatgtcc

SEQ ID NO: 37605 - DNA, 80 bp, synthetic construct
  source 1..80: mol_type = other DNA
ttcttgatgtgaatgcaatagacattgaggagccgagtggacaaacggctgactggtatacaatcggtgtctacataatg

SEQ ID NO: 37606 - DNA, 80 bp, synthetic construct
  source 1..80: mol_type = other DNA
atctattttatgcaccgccaagatgttcttgataagaaccatgtccctgatattgataagctgatagactatgctgcctc

SEQ ID NO: 37607 - DNA, 80 bp, synthetic construct
  source 1..80: mol_type = other DNA
atgagcgacttgaaggatatacaagaggatataacccgccatgaacaacaactggttgttgccaggcaaaagcttagaga

SEQ ID NO: 37608 - DNA, 80 bp, synthetic construct
  source 1..80: mol_type = other DNA
gaattcaactcgatcagaggatcattcttctatacatgcttgaatggggtaaggaaataattgaccatttccacttgggt

SEQ ID NO: 37609 - DNA, 80 bp, synthetic construct
  source 1..80: mol_type = other DNA
taccgatcattctaaaagctctttatatgctttcaactagagggaggcagacagtcaaagaaaataaggggacacgaata

SEQ ID NO: 37610 - DNA, 80 bp, synthetic construct
  source 1..80: mol_type = other DNA
ctgctgcagagattgaaattttaaagaggaataaaatttattttatgcatcgccaagacgtacttgaccagaatcatgtg

SEQ ID NO: 37611 - DNA, 80 bp, synthetic construct
  source 1..80: mol_type = other DNA
accactctgcatacttctcagtcaactcaattgcttcaactgatctattttactagcttatcgatcctctctttcttaac

SEQ ID NO: 37612 - DNA, 80 bp, synthetic construct
  source 1..80: mol_type = other DNA
ctcacctaccgaactattaaagaaaaaaccctatctaggaacaacctgcaagttcaatacttggggggattcaaacaggt

SEQ ID NO: 37613 - DNA, 80 bp, synthetic construct
  source 1..80: mol_type = other DNA
atctaggaacaacctgcaagttcaatacttggagggattcaaacaggtctgggaaatttacatacagcagcagatccggg

SEQ ID NO: 37614 - DNA, 80 bp, synthetic construct
  source 1..80: mol_type = other DNA
aagctacatattcatctctcgtctgagtcagttgccctgctatgtgagactgagagacaagtactatcctggatgagcaa

SEQ ID NO: 37615 - DNA, 80 bp, synthetic construct
  source 1..80: mol_type = other DNA
agggtaaaagtagcttgttgcacaagtacctcagatcaggtggtgtcaggcagcggaacactgagctgcttttcagggaa

SEQ ID NO: 37616 - DNA, 80 bp, synthetic construct
  source 1..80: mol_type = other DNA
acactcgtatcttatgtcagcaccgaaaccattcctaaattcctgcttgcatttcttctttacgaggaagtgttaatgaa

SEQ ID NO: 37617 - DNA, 80 bp, synthetic construct
  source 1..80: mol_type = other DNA
ttatggcaagtgatatagctacagatttgcctgacaaggaggcggaagccctccgaacaggcaatcttggtttcaattgg

SEQ ID NO: 37618 - DNA, 80 bp, synthetic construct
  source 1..80: mol_type = other DNA
gactcggattgaacaaaccactcatgcggatcaacagcatccttgaatgttataaagaaagattcgacaatttccaccga

SEQ ID NO: 37619 - DNA, 80 bp, synthetic construct
  source 1..80: mol_type = other DNA
actattcgttggcacagaagcatgcatgcaagtagacaatcctaccatacattagtttactttagccaatccatcacttc

SEQ ID NO: 37620 - DNA, 80 bp, synthetic construct
  source 1..80: mol_type = other DNA
cattagtttactttagccaatccatcacttctcttctttgtgcattcacctcagtttgattatttccagggtgtggggga

SEQ ID NO: 37621 - DNA, 80 bp, synthetic construct
  source 1..80: mol_type = other DNA
aaccttgggaatgagcttttgtacaaatcacctagaaaagctctagcaaccgtttgtagtgccttgtttgggaagcaggt

SEQ ID NO: 37622 - DNA, 80 bp, synthetic construct
  source 1..80: mol_type = other DNA
tgagggtgatatcacccgcagaagcacaagaaacattacaaatgcagaagaatttgttatttctgaattctttaagaaaa

SEQ ID NO: 37623 - DNA, 80 bp, synthetic construct
  source 1..80: mol_type = other DNA
aggacattatgaagttcattagtacttcaggaagggcaatgagtgcaggtaaggttggtaatgtcctctcctatgcacac

SEQ ID NO: 37624 - DNA, 80 bp, synthetic construct
  source 1..80: mol_type = other DNA
gtatcaagtatcccacaggccagctcatcacccatggaagggtgagtgtaaaacacagcaatgaaagtttgaaagatagg

SEQ ID NO: 37625 - DNA, 80 bp, synthetic construct
  source 1..80: mol_type = other DNA
agtgatgacgaccagagacttgctgagaagattgataccgttagaaaagagctatcggaagctaaactgaaggactattc

SEQ ID NO: 37626 - DNA, 80 bp, synthetic construct
  source 1..80: mol_type = other DNA
tactcaatccctcaagttgatgaaaaacaagcagcctatacccttccaggctgactgcatactatttaaagaggtagcag

SEQ ID NO: 37627 - DNA, 80 bp, synthetic construct
  source 1..80: mol_type = other DNA
ctgaatgcatgaagaggtacattggtacaccttatgaaggaatcatagacaccttagtttcactaatcaatgtattaaca

SEQ ID NO: 37628 - DNA, 80 bp, synthetic construct
  source 1..80: mol_type = other DNA
agacgtcaatatactgctctgttagagatgtagaagataacataaagcactggaaacagagagacttatgccccgaggta

SEQ ID NO: 37629 - DNA, 80 bp, synthetic construct
  source 1..80: mol_type = other DNA
accattccttgcttcacggtctatggcaccttcgttaacagtgacagacaactgatctttgacatctacaacgttcatat

SEQ ID NO: 37630 - DNA, 80 bp, synthetic construct
  source 1..80: mol_type = other DNA
aatactgccacagtttgaggccgacacaaaagagaccttaagtctggtggacaaggtcatggctgtagaccagttaacat

SEQ ID NO: 37631 - DNA, 80 bp, synthetic construct
  source 1..80: mol_type = other DNA
aattaaagcaggaccttttaatatcttcttggatcaagtgcataacagcaggtaaggactttgcaaacatcaatgaaaaa

SEQ ID NO: 37632 - DNA, 80 bp, synthetic construct
  source 1..80: mol_type = other DNA
gcctgtcagggaatggctatgactttatctggaccactcagatgattgcaaatagcaacttcaatgtctgcaagaggtta

SEQ ID NO: 37633 - DNA, 80 bp, synthetic construct
  source 1..80: mol_type = other DNA
catcatgcaacttcttcagtgttaacttcattggctgctgtactttttgaagaactaacaatcttttatctaaagaggag

SEQ ID NO: 37634 - DNA, 80 bp, synthetic construct
  source 1..80: mol_type = other DNA
cctacctcagacaacagtacatgttgaacatgctggcagctccgatgattatgcaaagtgcatagtggtgactggcgtgc

SEQ ID NO: 37635 - DNA, 80 bp, synthetic construct
  source 1..80: mol_type = other DNA
ccgacaccttggtcttgcggccagaatctaaggaaagaatcggggaagttatgtcattgcggcagctaggacataaactg

SEQ ID NO: 37636 - DNA, 80 bp, synthetic construct
  source 1..80: mol_type = other DNA
tttccatcaacagacacactacagtcaaagagccttccctatttaacccaaatattaggtgcgttaacctaatcactttt

SEQ ID NO: 37637 - DNA, 80 bp, synthetic construct
  source 1..80: mol_type = other DNA
gaagatggtttaagggagctctcagtgatacagagtcatctcaaagtctttgaaaatgaatttacaaacctgaaccttca

SEQ ID NO: 37638 - DNA, 80 bp, synthetic construct
  source 1..80: mol_type = other DNA
gttctctgatccaaatagacagaaactcaggatagttgagtctagacctgcagagtctgagttggaagcgaaccgtgcag

SEQ ID NO: 37639 - DNA, 80 bp, synthetic construct
  source 1..80: mol_type = other DNA
cagtttttcccttcagtgttcaccctaatcaagatgctgacagatgagtcatcagactcagagaaaaatggtattagccc

SEQ ID NO: 37640 - DNA, 80 bp, synthetic construct
  source 1..80: mol_type = other DNA
tgatctgcagcaagttgcaaggtattcaaatcacttgaccttgctcagcagaatgatacaacaggcaaagccaactgtca

SEQ ID NO: 37641 - DNA, 80 bp, synthetic construct
  source 1..80: mol_type = other DNA
tggacatcaggaccactgactgtccactatctaaccacgaggcaggcattctaagtgagtttgatggacaggtcattgct

SEQ ID NO: 37642 - DNA, 80 bp, synthetic construct
  source 1..80: mol_type = other DNA
aacatccttgccagtgaactgagttctgtgaaacgagactctgagcgtgaaggtctgactgaccttcttgattacttgaa

SEQ ID NO: 37643 - DNA, 80 bp, synthetic construct
  source 1..80: mol_type = other DNA
gttacccacattaatacagagagctccagtagcggtctttgtctgtgcgaagccatggacttcttgagaaaccttgattg

SEQ ID NO: 37644 - DNA, 80 bp, synthetic construct
  source 1..80: mol_type = other DNA
aatccaactgctttaattgatctatttactatcccaccaatcctcttcctctctactattcacctcagtctcatcatcat

SEQ ID NO: 37645 - DNA, 80 bp, synthetic construct
  source 1..80: mol_type = other DNA
gaacatccctgatgcaatacgcaacggctttgcagtccatcgcacttttgcttggaatgatcgaatgcccacgggaactt

SEQ ID NO: 37646 - DNA, 80 bp, synthetic construct
  source 1..80: mol_type = other DNA
gcacttttgcttggaatgatcgaatgcccacgggaacttatcttggatctctttcacttcatccctaacataatccgtat

SEQ ID NO: 37647 - DNA, 80 bp, synthetic construct
  source 1..80: mol_type = other DNA
aacacattatctgtatgaatcattaatgcctctcagtgtcttaaggaaaaataagtcagtctgcaccaaactattttccg

SEQ ID NO: 37648 - DNA, 80 bp, synthetic construct
  source 1..80: mol_type = other DNA
tctattttagtccaattctttcaaccatcagtttacttttactgtcttaccattttccttcctttacctttcatttcagt

SEQ ID NO: 37649 - DNA, 80 bp, synthetic construct
  source 1..80: mol_type = other DNA
aaaatggtctgagggaactttcagtgatacaaagtcacctcaaagtcttcgagaatgaatttaccaatttaaatcttcag

SEQ ID NO: 37650 - DNA, 80 bp, synthetic construct
  source 1..80: mol_type = other DNA
ttctctgacccaaacagacagaaacttagaatagttgaatccagacctgcagaatctgagttggaggcaaatcgtgcagt

SEQ ID NO: 37651 - DNA, 80 bp, synthetic construct
  source 1..80: mol_type = other DNA
agccattgtgaaaataaaggctttgaggatagcaatgaatgcttaacagatttggataggcttgtcaggctcacattacc

SEQ ID NO: 37652 - DNA, 80 bp, synthetic construct
  source 1..80: mol_type = other DNA
tttctgctatcgggtgcctacctctgagccaagcagataagtcctcactgctcatgagttttttaaactggagagtgaat

SEQ ID NO: 37653 - DNA, 80 bp, synthetic construct
  source 1..80: mol_type = other DNA
tcccccctttacccacgttgacacagatagctttagtagtgctttcctgcctttgctggaccatggaattcttgagaaac

SEQ ID NO: 37654 - DNA, 80 bp, synthetic construct
  source 1..80: mol_type = other DNA
ttaagaagcagattttgacagtaaagaaacagattgtatttgacgccgaaagtgagcccaggctacagtgggggcacggc

SEQ ID NO: 37655 - DNA, 80 bp, synthetic construct
  source 1..80: mol_type = other DNA
acacttgtgtcctatgtaagcaccgaaaccattcccaaattcttacttgcatttcttctttacgaagaagtattaatgaa

SEQ ID NO: 37656 - DNA, 80 bp, synthetic construct
  source 1..80: mol_type = other DNA
cctaattaaccagtgcaaagcagttaaggagctcatcaatagtacagggctttcagacttagaactggagagcctactca

SEQ ID NO: 37657 - DNA, 80 bp, synthetic construct
  source 1..80: mol_type = other DNA
tcaacatcattttggtgcctctcaaggacatgtctaagccgaaacctgagagagtgattatagctaggaggtcattaaat

SEQ ID NO: 37658 - DNA, 80 bp, synthetic construct
  source 1..80: mol_type = other DNA
acaagaataaaaagaagtttatcactaactgcctgcttagtacagctttatccgggaagaaagtgtacaaggtacttggc

SEQ ID NO: 37659 - DNA, 80 bp, synthetic construct
  source 1..80: mol_type = other DNA
agatggggagccttgaaggacaagaatgttttgaattcaccgtcctaaaagataatagcacaaggttggactataataaa

SEQ ID NO: 37660 - DNA, 80 bp, synthetic construct
  source 1..80: mol_type = other DNA
ttggttgaccattgtgtggatatggagaaaaaaagagacgcagttagagcagtggaggacctagttctgatgttgacagg

SEQ ID NO: 37661 - DNA, 80 bp, synthetic construct
  source 1..80: mol_type = other DNA
caggtctactaagcctagcaccgtaacaccattttcatgtgaggaagagcaatgccaagagcaaataagcttggatgatc

SEQ ID NO: 37662 - DNA, 80 bp, synthetic construct
  source 1..80: mol_type = other DNA
ttatggtaagtgacatagcaacagatctgcctgacaaggaggcagaagccctcagaacaggtaatcttggtttcaactgg

SEQ ID NO: 37663 - DNA, 80 bp, synthetic construct
  source 1..80: mol_type = other DNA
gactcagactgaacatactactcatgcgaattaacagcatccttgaatgctatgaacaaaagtttgacaattttcactaa

SEQ ID NO: 37664 - DNA, 80 bp, synthetic construct
  source 1..80: mol_type = other DNA
actatttgctgacacaggagcatgaatacaagtggacaatcttaccatacattgattaactctagctaaaccatcacttc

SEQ ID NO: 37665 - DNA, 80 bp, synthetic construct
  source 1..80: mol_type = other DNA
ccatacattgattaactctagctaaaccatcacttctcttctttaagcattctcctcagtttgattatttccagggtgtg

SEQ ID NO: 37666 - DNA, 80 bp, synthetic construct
  source 1..80: mol_type = other DNA
tctagctaaaccatcacttctcttctttaagcattctcctcagtttgattatttccagggtgtggggggaacgatttctt

SEQ ID NO: 37667 - DNA, 80 bp, synthetic construct
  source 1..80: mol_type = other DNA
aacctcgggaatgagctcttgtacaagtcacccagaaaggctttggcaaccgtttgcagtgccttgtttgggaagcaggt

SEQ ID NO: 37668 - DNA, 80 bp, synthetic construct
  source 1..80: mol_type = other DNA
acaacctctacttaagtaagtctagcctaaacatgacttctgaggatgtctcacagctcttaattgagatcaagaggctg

SEQ ID NO: 37669 - DNA, 80 bp, synthetic construct
  source 1..80: mol_type = other DNA
tatgccctacaagaagattctgaggtagaacctatagccataatttgtgatggtatagagagcaacatgaaacagttatt

SEQ ID NO: 37670 - DNA, 80 bp, synthetic construct
  source 1..80: mol_type = other DNA
gctacacccagaattcagggatttgacacctgacttctccctgactcaaaaggttcatttcaagagaaatcagataccta

SEQ ID NO: 37671 - DNA, 80 bp, synthetic construct
  source 1..80: mol_type = other DNA
gcgttgagaatgtgcaaatctccattgatgcaacattgcctgagtctgtggaggcagtgccggtgacagaaagaaagatg

SEQ ID NO: 37672 - DNA, 80 bp, synthetic construct
  source 1..80: mol_type = other DNA
ggaagccttcagctaagaaaagaaatgcagaatcggcagagctggacagtcagcacgatgtcactggacatgagaattct

SEQ ID NO: 37673 - DNA, 80 bp, synthetic construct
  source 1..80: mol_type = other DNA
ggcatcatggctttcaaagattatggagaaagaggcatagtcgaggagaatcatatgagatttagcgaagaagatcaact

SEQ ID NO: 37674 - DNA, 80 bp, synthetic construct
  source 1..80: mol_type = other DNA
ggaaacaaggcaactactgttagtagaggttggctttcagactgatattgatgggaaaataaggacagactacaaaaaat

SEQ ID NO: 37675 - DNA, 80 bp, synthetic construct
  source 1..80: mol_type = other DNA
tgctaaaagagaatttggaccgaataactgacgagtttgaacggacaaagttcaaacatgagctcacacaaaatatcacc

SEQ ID NO: 37676 - DNA, 80 bp, synthetic construct
  source 1..80: mol_type = other DNA
actagtgagagaatgttattgagttggttgagtgaagacattaagtcaacaagatgtgatgagtgtcttgccaccataaa

SEQ ID NO: 37677 - DNA, 80 bp, synthetic construct
  source 1..80: mol_type = other DNA
gaagactattgatgaaacagcaaacctatcggagaaaattgagttacttgcttacaaccttcagctcatcagccactgcg

SEQ ID NO: 37678 - DNA, 80 bp, synthetic construct
  source 1..80: mol_type = other DNA
gaaactgtcatcctaacggtattagcattagcaacacatctaatgtcggcaagaggtgccctaaattagaggtagtcagt

SEQ ID NO: 37679 - DNA, 80 bp, synthetic construct
  source 1..80: mol_type = other DNA
cattgcgaaaacaaaggctttgaagatagcaatgaatgcctaacagatttagataggcttgtcagactcacactaccagg

SEQ ID NO: 37680 - DNA, 80 bp, synthetic construct
  source 1..80: mol_type = other DNA
ggtcttggcttgaaaagattctatttgatttaaaagtgcctactaaggatgaagaagtgttaataaacattagaaattct

SEQ ID NO: 37681 - DNA, 80 bp, synthetic construct
  source 1..80: mol_type = other DNA
ctaaaggctagatctgagttcgttaggaataatgacaaactgctcataaggtcaaaagaagaaataaaaaaatactttga

SEQ ID NO: 37682 - DNA, 80 bp, synthetic construct
  source 1..80: mol_type = other DNA
ttaacagatcgggaattaaattagtgaaggtaagacactgtgatatcaacttgtcagttaaactgccatcaaacaaaaaa

SEQ ID NO: 37683 - DNA, 80 bp, synthetic construct
  source 1..80: mol_type = other DNA
gagaatatgctgtgttgcgtatacagcagcaacatggagctcttacaaggacctttctatctaaacagaagacaagccgt

SEQ ID NO: 37684 - DNA, 80 bp, synthetic construct
  source 1..80: mol_type = other DNA
atagcatgaacgagaagacattgcaggacatcgagaatcactccatgaccctactagatgatgcattcaaagaactcgtt

SEQ ID NO: 37685 - DNA, 80 bp, synthetic construct
  source 1..80: mol_type = other DNA
gctgcccttgaaggtagatttgaagagtcttataagatacgagcttcaaggtgcaaaaccagtgggaactttctaaacag

SEQ ID NO: 37686 - DNA, 80 bp, synthetic construct
  source 1..80: mol_type = other DNA
gtaaggaaagcagcaaacaaagaagggaaaaggctactaaaattaaatagcgacacatccactgatacacaaagtattgc

SEQ ID NO: 37687 - DNA, 80 bp, synthetic construct
  source 1..80: mol_type = other DNA
ttctgaagtgtcagacaggagatcttacagttcaagcaaaagcagaatccgcagcatttttggaagatacaattctcaga

SEQ ID NO: 37688 - DNA, 80 bp, synthetic construct
  source 1..80: mol_type = other DNA
atacgatgggctccttcgaattaatccaagcaatttcagaatttggaatgagtaaatttcctcctgagaatatagataaa

SEQ ID NO: 37689 - DNA, 80 bp, synthetic construct
  source 1..80: mol_type = other DNA
gcaagaagagatccaaagaactgggttagtatctctgaggtgacagaaacaacaagtatagttgcatcacctaaaacaca

SEQ ID NO: 37690 - DNA, 80 bp, synthetic construct
  source 1..80: mol_type = other DNA
ctcttttctaatgaggagtttaacgaactgatcaagttaaaaaagcttctcctcaacgaacaacaagatgaacaagaatt

SEQ ID NO: 37691 - DNA, 80 bp, synthetic construct
  source 1..80: mol_type = other DNA
aaagcaggaccttttaatatcttcctgggttaagtgcatatcagcatgtaaggactttgcaaacattaatgaaaaagtgc

SEQ ID NO: 37692 - DNA, 80 bp, synthetic construct
  source 1..80: mol_type = other DNA
catcttcgagcgatgaattgcaagactatgaagaccttgccttagcactcacaggttcggaagagccttatagaaagtct

SEQ ID NO: 37693 - DNA, 80 bp, synthetic construct
  source 1..80: mol_type = other DNA
aaaagttcatctaccgcctctcagaagagctatatgacataaggcttcagcacttagaactgtcaaagcttaaacaagag

SEQ ID NO: 37694 - DNA, 80 bp, synthetic construct
  source 1..80: mol_type = other DNA
caccccagtgttagcttcactaaggaagaggtcttgataaaaagattggaaaaaaacttccttaagcagcacaatcagga

SEQ ID NO: 37695 - DNA, 80 bp, synthetic construct
  source 1..80: mol_type = other DNA
aattatggaaacagtgaatctcattttctttgctgcactttcggctccctggtgcctgcactataaagcactggagtctt

SEQ ID NO: 37696 - DNA, 80 bp, synthetic construct
  source 1..80: mol_type = other DNA
atctagtgaggcatccagagatacttgactgtggctcaaaagaggattataagctaaccttacttgatctatcagtttcc

SEQ ID NO: 37697 - DNA, 80 bp, synthetic construct
  source 1..80: mol_type = other DNA
aagctcttagtttgtttatatcaaaaagatgacgaagaaccggcaaacaacacaagtttgaagcttggttttctagtgaa

SEQ ID NO: 37698 - DNA, 80 bp, synthetic construct
  source 1..80: mol_type = other DNA
agtacgctgtcactctgttcacatccaatggtgagccattctcacttagcctaaacgatggtggcttggatcttgacctg

SEQ ID NO: 37699 - DNA, 80 bp, synthetic construct
  source 1..80: mol_type = other DNA
agtctagatgaggtcactttatccaaaaaacaagcagaaatacttaggcagaaagcatctcagttgtctaaactagtcaa

SEQ ID NO: 37700 - DNA, 80 bp, synthetic construct
  source 1..80: mol_type = other DNA
cggaaagcctataagtgagggcagcagtttagtcaatttttataaggtcatttgcatctcaggtgacaacaccaaatggg

SEQ ID NO: 37701 - DNA, 80 bp, synthetic construct
  source 1..80: mol_type = other DNA
gaggcgtggagcaacatagtgaggaggacttgagaaagctgttggtggacaatttagacagttgggatggaaatgacacg

SEQ ID NO: 37702 - DNA, 80 bp, synthetic construct
  source 1..80: mol_type = other DNA
gtcaagttcttggtaacaacctatataagtaaagggctgatggcactaaacagctacaatcatatgggacagggcatcca

SEQ ID NO: 37703 - DNA, 80 bp, synthetic construct
  source 1..80: mol_type = other DNA
tctagagagctgtactcccagtatgatgagacattctggaaacatgcctgcaggctgaaaaacttcacagctgctgtgca

SEQ ID NO: 37704 - DNA, 80 bp, synthetic construct
  source 1..80: mol_type = other DNA
caaaagtcagaatataccaactagagttggcagagttctggactgcatgttcaactgcaaattgtgtgttgagatttctg

SEQ ID NO: 37705 - DNA, 80 bp, synthetic construct
  source 1..80: mol_type = other DNA
gagatgctgtcagatgaaagacagcgcaaaaaccttggtaagtgactgtttcctcgagttttacagcgagttcatgatgg

SEQ ID NO: 37706 - DNA, 80 bp, synthetic construct
  source 1..80: mol_type = other DNA
atgcaagcatgtcaggtttcatcccagcaagccatgtacaacagtgtcccacttgttaccaatgctgcctttacactgct

SEQ ID NO: 37707 - DNA, 80 bp, synthetic construct
  source 1..80: mol_type = other DNA
cagacagcagattttcttcaaccatgttgaagatttcattagaaggtatggtatactgactcttggcaccttgtctccct

SEQ ID NO: 37708 - DNA, 80 bp, synthetic construct
  source 1..80: mol_type = other DNA
gtcacagtcagacaagctctacggctgaagatagcagcagtgtgagcgacaccaccatcgcttctcatgactcaggatct

SEQ ID NO: 37709 - DNA, 80 bp, synthetic construct
  source 1..80: mol_type = other DNA
tcatcttctagcttctcttttgaactcaataggcccctatctgagaccgaactgcagttcattaaagcactaaatagcct

SEQ ID NO: 37710 - DNA, 80 bp, synthetic construct
  source 1..80: mol_type = other DNA
agctaattccagagaaattaaggagagagctggagaggctaggagtttcaagaatggaagttgatgaattgatgccgagt

SEQ ID NO: 37711 - DNA, 80 bp, synthetic construct
  source 1..80: mol_type = other DNA
attaaccctgatgacaccttggctcagcttgtagcaaaaaaactcatcagcctcaatgtttcgacggaagagtactctgc

SEQ ID NO: 37712 - DNA, 80 bp, synthetic construct
  source 1..80: mol_type = other DNA
ggtaggttctacaggctgtctgacacaggaattgatgcaagcacatactctgtaaagtactggaagattctccattgcat

SEQ ID NO: 37713 - DNA, 80 bp, synthetic construct
  source 1..80: mol_type = other DNA
ctctgccatcgggtgcctccccttgagccaggcagataagtcttcactgctcatgagtttcttaaactggagggtgaaca

SEQ ID NO: 37714 - DNA, 80 bp, synthetic construct
  source 1..80: mol_type = other DNA
aacatgccatctgtacgagctattaatgtctttcaatgtctcaggggcaaacgaggcagtccataacacatcagttacta

SEQ ID NO: 37715 - DNA, 80 bp, synthetic construct
  source 1..80: mol_type = other DNA
acatcaaagctctcaaacgagctaactgccctgtatttctcacggtcaattcagctgcgatctatcttgccatcctgcca

SEQ ID NO: 37716 - DNA, 80 bp, synthetic construct
  source 1..80: mol_type = other DNA
agctgcgatctatcttgccatcctgccattcttctttctctactattcattccagtttcattgtttgaagggtgtggggg

SEQ ID NO: 37717 - DNA, 80 bp, synthetic construct
  source 1..80: mol_type = other DNA
gaagaccttcagccaaggaaaaagatggaggtcttgcggagcaaggcaaccagcaaggcgccgttgaacacgagagacca

SEQ ID NO: 37718 - DNA, 80 bp, synthetic construct
  source 1..80: mol_type = other DNA
tttgacttaaaggtgcccactaaagatgaggaagtacttataaacatcagaaactctctgaaagccagatctgagtatgt

SEQ ID NO: 37719 - DNA, 80 bp, synthetic construct
  source 1..80: mol_type = other DNA
tacaatcattaaagctaatgaaaaacaagcaacctgtgccttttcaagttgattgtatactgtttaaagaggtggcagct

SEQ ID NO: 37720 - DNA, 80 bp, synthetic construct
  source 1..80: mol_type = other DNA
gagtgcatgaagagatacattggcacaccttatgaaggaattatcgacaccttagtttctctgattaatgttctgacaag

SEQ ID NO: 37721 - DNA, 80 bp, synthetic construct
  source 1..80: mol_type = other DNA
aattatggagacagtaaaccttatattctttgccgctctttcagctccctggtgcttacactacaaagcactagagtctt

SEQ ID NO: 37722 - DNA, 80 bp, synthetic construct
  source 1..80: mol_type = other DNA
ttcccacagccaattcatctattttagtgctattctttcaaccattagtttgcctttaccatcctgcctttcttctcctt

SEQ ID NO: 37723 - DNA, 80 bp, synthetic construct
  source 1..80: mol_type = other DNA
ttacccacgttgacacagtcagctccagtggtgactttttgtctctgtggtacaatggacttcttgaggaaccttgattg

SEQ ID NO: 37724 - DNA, 80 bp, synthetic construct
  source 1..80: mol_type = other DNA
actagtgaaaaaatgctgtttagctggttgagtgaagatatcagatcgtcgagatgcactgagtgcctcaccaacataaa

SEQ ID NO: 37725 - DNA, 80 bp, synthetic construct
  source 1..80: mol_type = other DNA
acaacaaagcactcaaacaagctaactgctctgtacttctcactgtcaattcagctgcctccgttaatctattttgccgt

SEQ ID NO: 37726 - DNA, 80 bp, synthetic construct
  source 1..80: mol_type = other DNA
tcaatcccccctttacccacgttgacacagtcagctccagtggtggatttttgtctctgtggtactatggacttcttgag

SEQ ID NO: 37727 - DNA, 80 bp, synthetic construct
  source 1..80: mol_type = other DNA
acatcaacaaacgagctagctgctctgcatttctcacagtcaactcagctgcccctatttatctattttgccatcctgcc

SEQ ID NO: 37728 - DNA, 80 bp, synthetic construct
  source 1..80: mol_type = other DNA
tgcccctatttatctattttgccatcctgccgttcttctttctctactattcataccagtttcattatttaaagggtgtg

SEQ ID NO: 37729 - DNA, 80 bp, synthetic construct
  source 1..80: mol_type = other DNA
aagagttgatgagaaagaacattgatgaagttttacttactgaagatggaaatctaatcttctgctggctaaaaacaatc

SEQ ID NO: 37730 - DNA, 80 bp, synthetic construct
  source 1..80: mol_type = other DNA
aacacattatctgtatgaatcattaatacctctcaatagcttgaggacaaatgagtcagtctgcaccatactattttccg

SEQ ID NO: 37731 - DNA, 80 bp, synthetic construct
  source 1..80: mol_type = other DNA
gtccaattctttcaaacatattttttatttttactttcttacaatttttattaatttacctttcatttcagtttgattat

SEQ ID NO: 37732 - DNA, 80 bp, synthetic construct
  source 1..80: mol_type = other DNA
atctggtaagacacccagagatacttgactgtggttataaggaggattgtaggctcactctacttgatctatcagtctct

SEQ ID NO: 37733 - DNA, 80 bp, synthetic construct
  source 1..80: mol_type = other DNA
aaactcttagtttgtttgtatcgaagaggtgatgaagaactaacaaacagctcaagtttaaaacttggattcttagtgaa

SEQ ID NO: 37734 - DNA, 80 bp, synthetic construct
  source 1..80: mol_type = other DNA
cctccgttaatctatttgccatcctgccattcttctttctctaatattcatactagtttcattatttgcagggtgtgggg

SEQ ID NO: 37735 - DNA, 80 bp, synthetic construct
  source 1..80: mol_type = other DNA
acatcaaggctctcaaacgagctggctgctctgcatttctcacagtcaactcagctgcccctattgatctatattgccat

SEQ ID NO: 37736 - DNA, 80 bp, synthetic construct
  source 1..80: mol_type = other DNA
aaaaaactgttgacgagaccgccaacctgtctgagaagattgagctgcttgcatataatcttcaactcgttagtcattgc

SEQ ID NO: 37737 - DNA, 80 bp, synthetic construct
  source 1..80: mol_type = other DNA
aacacattatctgtatgaatctttaatgcctctcaatgtcttaagggcaagtaagacaatttataccataccattttccg

SEQ ID NO: 37738 - DNA, 80 bp, synthetic construct
  source 1..80: mol_type = other DNA
agatattatttgatttaaaggtgcccactaaagatgaagaagtactgataaatatcagaaattcactgaaggctagatct

SEQ ID NO: 37739 - DNA, 80 bp, synthetic construct
  source 1..80: mol_type = other DNA
taaatgtgagtgacgacagtcaaaatgattatgagtaattaaaaaagcgggacaagtcaaaatgtcattccctgaaggaa

SEQ ID NO: 37740 - DNA, 80 bp, synthetic construct
  source 1..80: mol_type = other DNA
aacctagcactgtgacaccggttgcacatgagaatgagcaatgtcaagaacaaataagcctagatgatctaatggcaagt

SEQ ID NO: 37741 - DNA, 80 bp, synthetic construct
  source 1..80: mol_type = other DNA
aatatgccgtctgtgtgtgtcatcaacatcttttaatgtctcaaggacaaataagtcagtttgcatcataccatttgccg

SEQ ID NO: 37742 - DNA, 80 bp, synthetic construct
  source 1..80: mol_type = other DNA
acgttaaaaccttcaaacaagtcaactgctccacatctcccacaatcagttcatctatcttagtgcaattctttcaacca

SEQ ID NO: 37743 - DNA, 80 bp, synthetic construct
  source 1..80: mol_type = other DNA
ttctttcaaccattagttcacttttacggtattaccattctccttccttcaccgctcatttcagtttgattatttctagg

SEQ ID NO: 37744 - DNA, 80 bp, synthetic construct
  source 1..80: mol_type = other DNA
ccatactgccccctgactgcgcaaaggaatgtgaggttctttttgacgacattagaaactctccaacgcacagtacagct

SEQ ID NO: 37745 - DNA, 80 bp, synthetic construct
  source 1..80: mol_type = other DNA
tggaagcatgctcttcggctaaaagggactgcatacgagggcttgtttgcaaactgctatggatggcaatacatcccgga

SEQ ID NO: 37746 - DNA, 80 bp, synthetic construct
  source 1..80: mol_type = other DNA
gaaggccttcaaccaagaaaaaagataaagaacctgcaaaacagggtaatcatcaagatgccattgaacatgagagctca

SEQ ID NO: 37747 - DNA, 80 bp, synthetic construct
  source 1..80: mol_type = other DNA
ccggacagatggtggattactgaagacagagtacgagttttgaagaactcagtcagctttctcttcaacaagctctctag

SEQ ID NO: 37748 - DNA, 80 bp, synthetic construct
  source 1..80: mol_type = other DNA
gaactcaccgacagaggtaactgatatagttgttggagctataagcacccaaaaggttagaagttacctaaaggcaggga

SEQ ID NO: 37749 - DNA, 80 bp, synthetic construct
  source 1..80: mol_type = other DNA
tttgacctaaaggtgcctactaaagatgaagaagtgctcataaacatcaggaattcgctgaaggctagatctgagtttgt

SEQ ID NO: 37750 - DNA, 80 bp, synthetic construct
  source 1..80: mol_type = other DNA
atctggtgaggcatccggaaatacttgactgtgggtcgaaggaggattataggctccctttactcgatttgtcagtttcc

SEQ ID NO: 37751 - DNA, 80 bp, synthetic construct
  source 1..80: mol_type = other DNA
tttctaaagaactttattcccagtatgatgaaacgttttggaagcatgcctgtaggcttaaaaacttcacagctgctgtg

SEQ ID NO: 37752 - DNA, 80 bp, synthetic construct
  source 1..80: mol_type = other DNA
caaagatgctgtcaaatgaaagatagcgctaaaactttggtgagcgactgcttccttgaattttacagcgagtttatgat

SEQ ID NO: 37753 - DNA, 80 bp, synthetic construct
  source 1..80: mol_type = other DNA
gacacagtggcagacctgcctgatgaggaggcagaagccctcagaacaggcaatcttggcttcaactgggattcagattg

SEQ ID NO: 37754 - DNA, 80 bp, synthetic construct
  source 1..80: mol_type = other DNA
aatatgccttctgtgtgtgtcatctacacctttcaatgtcttgaggacaaacgggtcagtttgcaccgtactatttgccg

SEQ ID NO: 37755 - DNA, 80 bp, synthetic construct
  source 1..80: mol_type = other DNA
acgtaaaactttcaaacatgtcgaccactctacatttcccacaatcaattcatctattttagtgcaattctttcaaccat

SEQ ID NO: 37756 - DNA, 80 bp, synthetic construct
  source 1..80: mol_type = other DNA
caattcagctgcctccgttaatctattttgccatcctgccattcttctttctctaacattcataccagtttcattatttg

SEQ ID NO: 37757 - DNA, 80 bp, synthetic construct
  source 1..80: mol_type = other DNA
tgttaaaggaaaacttggaccgaataactgatgagtttgaacggacaaaatttaagcatgagcttacacagaatgtcaca

SEQ ID NO: 37758 - DNA, 80 bp, synthetic construct
  source 1..80: mol_type = other DNA
actggtgaaaagatgctattgagttggctaagtgaagatattaagtcatcgagatgcagtgagtgcctctccagcataaa

SEQ ID NO: 37759 - DNA, 80 bp, synthetic construct
  source 1..80: mol_type = other DNA
ttttaaacagaagcagcagagatcactttgtaagcactgtttcaggcttaaacttggtatatggcttcctcataaaagac

SEQ ID NO: 37760 - DNA, 80 bp, synthetic construct
  source 1..80: mol_type = other DNA
aacttattagctaactcacagcaacaaaacaaacaactccagatgcttcgttttggcatgcttgcagggctcagcaggct

SEQ ID NO: 37761 - DNA, 80 bp, synthetic construct
  source 1..80: mol_type = other DNA
ttacccacgttgacacagacagctccagtagtggttttcctgtccttgtttagccatggactttttgagaaaccttgact

SEQ ID NO: 37762 - DNA, 80 bp, synthetic construct
  source 1..80: mol_type = other DNA
tctttcaaccattagtttacttttactgtcttaccattcttcttcctttaccattcatttcagtttgattatttctaggg

SEQ ID NO: 37763 - DNA, 80 bp, synthetic construct
  source 1..80: mol_type = other DNA
gaaagccttcaaccaaggaggaaggtaaagaaccggcagaacagggtaatcatcaaaatgccattgaacatgagagctca

SEQ ID NO: 37764 - DNA, 80 bp, synthetic construct
  source 1..80: mol_type = other DNA
gtaactgtcaccccaatggcataaacattagcaacgtatcaaatgtgtgcaagaggtgtcccaagatagagacagttagt

SEQ ID NO: 37765 - DNA, 80 bp, synthetic construct
  source 1..80: mol_type = other DNA
acagtgtgaatgaaaaaacattgcaagacattgaaaatcactccttgactttgctggaagatgcattcaaagaacttacc

SEQ ID NO: 37766 - DNA, 80 bp, synthetic construct
  source 1..80: mol_type = other DNA
gaagcaagacctcttgatatcttcttggattaaatgcatgacggcctgtaaagattttgcaagcatcaatgataaggtcc

SEQ ID NO: 37767 - DNA, 80 bp, synthetic construct
  source 1..80: mol_type = other DNA
agaaattcatttatcacctttccgaagagctatatgacataaggctgcagcacctggaattgtcaaagcttaaacaggag

SEQ ID NO: 37768 - DNA, 80 bp, synthetic construct
  source 1..80: mol_type = other DNA
catcaatcccccctttacccacattgacacaggcagctccagtggtggttttttcttttgttaaaccatggacttcttga

SEQ ID NO: 37769 - DNA, 80 bp, synthetic construct
  source 1..80: mol_type = other DNA
gcagaagctctcaaaacaggcaatctcggctttaactgggattcagactgaacatgccatctgtatgggttattaatagt

SEQ ID NO: 37770 - DNA, 80 bp, synthetic construct
  source 1..80: mol_type = other DNA
tttcaatgtcttaaggacaagtaagactgtttgtaccatgccatttgctgttattaaaaccttcaaacggatcaactgca

SEQ ID NO: 37771 - DNA, 80 bp, synthetic construct
  source 1..80: mol_type = other DNA
gatcaactgcactgcatctcccacggtcatttcaactgctttaacgcaatcccttcaaatatcctgcctactaccatttg

SEQ ID NO: 37772 - DNA, 80 bp, synthetic construct
  source 1..80: mol_type = other DNA
ctgcatctcccacggtcatttcaactgctttaacgcaatcccttcaaatatcctgcctactaccatttgtttcagtttca

SEQ ID NO: 37773 - DNA, 80 bp, synthetic construct
  source 1..80: mol_type = other DNA
ttaacgcaatcccttcaaatatcctgcctactaccatttgtttcagtttcactatttctagggtgtggggggaacgattt

SEQ ID NO: 37774 - DNA, 80 bp, synthetic construct
  source 1..80: mol_type = other DNA
gaaagccttcagctataaaaagggatgaagatctggctgaacaagatggccggcaaaacgccgttgaacatgaaagctct

SEQ ID NO: 37775 - DNA, 80 bp, synthetic construct
  source 1..80: mol_type = other DNA
aattttctctgttactggttaacctttgctatcctactattccactttctttgctgtacatgtccgttttattatttcta

SEQ ID NO: 37776 - DNA, 80 bp, synthetic construct
  source 1..80: mol_type = other DNA
atcccccctttacccacgttgacacagacagctctagtagtggttctttatcattattaaaccatggactttttaagaaa

SEQ ID NO: 37777 - DNA, 80 bp, synthetic construct
  source 1..80: mol_type = other DNA
tgtcagttatacctgatggcagcaatcctcgactattaaaatttgtacctctcaagaaggggctggcagtggtaaaagtt

SEQ ID NO: 37778 - DNA, 80 bp, synthetic construct
  source 1..80: mol_type = other DNA
tagttcatgaggattggcaaaggatagggaaaaatattcttattcgtgcaaacaatgagctgggtgatgtatcactgaag

SEQ ID NO: 37779 - DNA, 80 bp, synthetic construct
  source 1..80: mol_type = other DNA
acctttgagttttgaattaagtcagctgctctgcacctcccatagttaatccaattgtttcgctacaattctctcaacca

SEQ ID NO: 37780 - DNA, 80 bp, synthetic construct
  source 1..80: mol_type = other DNA
attctctcaaccactagttaacattactatcttagatttccactttctttgctgttcatatcagttttattaattccagg

SEQ ID NO: 37781 - DNA, 80 bp, synthetic construct
  source 1..80: mol_type = other DNA
cattgtgaaaataaaggctttgaagacagtaatgagtgcttaacagatttggataggcttgttaggctcacattaccagg

SEQ ID NO: 37782 - DNA, 80 bp, synthetic construct
  source 1..80: mol_type = other DNA
actatcccatgttttacagtctacggcacctttgttaacagcgacagacagctaatttttgacatttataatgtgcatat

SEQ ID NO: 37783 - DNA, 80 bp, synthetic construct
  source 1..80: mol_type = other DNA
aatactgccacagtttgaggctgacacaagagagactttaagcctagtagacaaggtcatagctgtggaccagttaacct

SEQ ID NO: 37784 - DNA, 80 bp, synthetic construct
  source 1..80: mol_type = other DNA
aagagttagttaagaaaaacatagatgaggtcttgcttactgaggatggaaatctgatcttctgttggttaaaaacaatc

SEQ ID NO: 37785 - DNA, 80 bp, synthetic construct
  source 1..80: mol_type = other DNA
tcgtcttcagttaaaggaagtctgaagaagaagctcaagtttatgaatatacattctccagaactgataccagaaaactg

SEQ ID NO: 37786 - DNA, 80 bp, synthetic construct
  source 1..80: mol_type = other DNA
tggatattagagcttctgactgtccattgtctagccatgaagcaagtatacttagtgaatttgatggacaggttattgct

SEQ ID NO: 37787 - DNA, 80 bp, synthetic construct
  source 1..80: mol_type = other DNA
atgccttgtctttgatattcttggatgagatgtcattgcctgaactaaaatccttctctgtaaattgcaagatggggaac

SEQ ID NO: 37788 - DNA, 80 bp, synthetic construct
  source 1..80: mol_type = other DNA
cttgaaggacaggagtgttttgaattcactgtcctaaaagatagtagcactaggttggactataataaattagttgacca

SEQ ID NO: 37789 - DNA, 80 bp, synthetic construct
  source 1..80: mol_type = other DNA
ctgtgtggatatggagaaaaaaagggacgcagttagagcagtggaggacctagttctaatgttgacaggcaggtctacca

SEQ ID NO: 37790 - DNA, 80 bp, synthetic construct
  source 1..80: mol_type = other DNA
agcccagcaccataacactattttcacgtgaggaagagcagtgccaagagcaaataagcttagatgaccttatggcaagt

SEQ ID NO: 37791 - DNA, 80 bp, synthetic construct
  source 1..80: mol_type = other DNA
gacatagcggcagacctgcctgacaaggaggcagaagccctcaaaacaggtaatctcggcttcaactgggactcagattg

SEQ ID NO: 37792 - DNA, 80 bp, synthetic construct
  source 1..80: mol_type = other DNA
atcatactactcatgagaatcaacagcatccttgaatgttatgaagaaaattttgacaatcttctccgaactgttcgttg

SEQ ID NO: 37793 - DNA, 80 bp, synthetic construct
  source 1..80: mol_type = other DNA
gcacagaagcatgcatacaagtggacaatctaactatacattggttaactttagctgatccaacacttctattctttaag

SEQ ID NO: 37794 - DNA, 80 bp, synthetic construct
  source 1..80: mol_type = other DNA
atacattggttaactttagctgatccaacacttctattctttaagcattgacctcagtttgattatttccagggtgtggg

SEQ ID NO: 37795 - DNA, 80 bp, synthetic construct
  source 1..80: mol_type = other DNA
ctgatccaacacttctattctttaagcattgacctcagtttgattatttccagggtgtggggggaacgatttctttgaga

SEQ ID NO: 37796 - DNA, 80 bp, synthetic construct
  source 1..80: mol_type = other DNA
gccgacctgaatcagttaacttctcgacttagtacgctaagaaaagagaaagacactgatctcctcaagcagtggtttcc

SEQ ID NO: 37797 - DNA, 80 bp, synthetic construct
  source 1..80: mol_type = other DNA
acaacctctatctgagtaaatctagtttaaacatgacttctgaggatgtctcacagctcttaatagagatcaagaggctt

SEQ ID NO: 37798 - DNA, 80 bp, synthetic construct
  source 1..80: mol_type = other DNA
ggaaaccttcagcaatgaaaagaaatgcagaaccgacagagttggatagtcagcacagtaccactggacatgagaattct

SEQ ID NO: 37799 - DNA, 80 bp, synthetic construct
  source 1..80: mol_type = other DNA
tcttggcttgaaaagattctatttgatctgaaagtgcctactaaggatgaggaagtactaataaacatcagaaattctct

SEQ ID NO: 37800 - DNA, 80 bp, synthetic construct
  source 1..80: mol_type = other DNA
ggcttgaagtttggcgatggtgatgtgttcacagctgtgaatcttctacattctgggcagacgcactttgatgcacttag

SEQ ID NO: 37801 - DNA, 80 bp, synthetic construct
  source 1..80: mol_type = other DNA
gctcattctataaattaacatttatcaaaaacttatgtagacaagtagaaatacctgctggcagcatcaagaagatcttg

SEQ ID NO: 37802 - DNA, 80 bp, synthetic construct
  source 1..80: mol_type = other DNA
ggcacaatgtgatttatagtagtagaattgcagactcttgtgattggttgagagatgggaaaagaagaggaaatttagag

SEQ ID NO: 37803 - DNA, 80 bp, synthetic construct
  source 1..80: mol_type = other DNA
aagatggtctgagggagctctcgataatacagagtcatctcaaagtttttgaaaatgaatttacaaacttgaaccttcag

SEQ ID NO: 37804 - DNA, 80 bp, synthetic construct
  source 1..80: mol_type = other DNA
tttaactgatccactttgcaaacctaccagtcctctctttctcaaccatttattacagtttcatcattgttattattttg

SEQ ID NO: 37805 - DNA, 80 bp, synthetic construct
  source 1..80: mol_type = other DNA
tgaataataacaaaatataaaaaccaataaaaatcataaaatagaaaatcaacaaaaatcataaaatagaaaactagaaa

SEQ ID NO: 37806 - DNA, 80 bp, synthetic construct
  source 1..80: mol_type = other DNA
tagaagtaggtaagaaggtatatgtgtcccctaagagacacaccatatatagctaagaatcaatagataagcatagatca

SEQ ID NO: 37807 - DNA, 80 bp, synthetic construct
  source 1..80: mol_type = other DNA
ctttaattgatctatttactatcctaccaatcctcttcctctctaccattcacctcagtctcatcatcatcattattatt

SEQ ID NO: 37808 - DNA, 80 bp, synthetic construct
  source 1..80: mol_type = other DNA
gattcagaattagctggattgttatcaatgtcatcagcttcaaatggtgaatcaaggcaacttaaatttggtcgcaaaac

SEQ ID NO: 37809 - DNA, 80 bp, synthetic construct
  source 1..80: mol_type = other DNA
ccctttacccattttgacacagtcagctccagtggtggccttttgtctttgtggtaccatggacttcttgaggaaccttg

SEQ ID NO: 37810 - DNA, 80 bp, synthetic construct
  source 1..80: mol_type = other DNA
tcaaccattagtttgcttttaccgtcttgccattcttcttccttcaccgttcatttcagtttgattatttctagggtggg

SEQ ID NO: 37811 - DNA, 80 bp, synthetic construct
  source 1..80: mol_type = other DNA
ccctttacccacgttaacacagacagctttagtagtgtttttcctgtccttgtttaaccatggactttttgagaaacctt

SEQ ID NO: 37812 - DNA, 80 bp, synthetic construct
  source 1..80: mol_type = other DNA
gcggaagccctcagaacaggcaatcttggcttcaactgggattcagattgaacatgccgtctgtgtatatcatcaacacc

SEQ ID NO: 37813 - DNA, 80 bp, synthetic construct
  source 1..80: mol_type = other DNA
ttttaatgtcttgaggacaaataagtcagtttgcaccatgccattttccgacgttaaggccttcaaattagtcaactgct

SEQ ID NO: 37814 - DNA, 80 bp, synthetic construct
  source 1..80: mol_type = other DNA
ctatatatttcccacaatcaattcatctattttagtgcaattctttctaccattagtttgcttttactgtcttaccattc

SEQ ID NO: 37815 - DNA, 80 bp, synthetic construct
  source 1..80: mol_type = other DNA
taccattagtttgcttttactgtcttaccattcttcttcctttgccattcatttcagtttgattatttctagggtgtggg

SEQ ID NO: 37816 - DNA, 80 bp, synthetic construct
  source 1..80: mol_type = other DNA
gaaagccttcaaccaagggaaaaggtaaagaaccggcagaacaggataactatcaaaatgccatcgaacatgagagttca

SEQ ID NO: 37817 - DNA, 80 bp, synthetic construct
  source 1..80: mol_type = other DNA
agcatcatggccttcaaggactacggagaaagaggaatagttgaggagaaccacatgaggcttagtgaagaagatcaact

SEQ ID NO: 37818 - DNA, 80 bp, synthetic construct
  source 1..80: mol_type = other DNA
aatgtatgaaaagatatattggtacaccttatgaaggaattatagacactttggtttccttaatcaatgtattaacaaga

SEQ ID NO: 37819 - DNA, 80 bp, synthetic construct
  source 1..80: mol_type = other DNA
tctgctcttgaaggtagattcgaagaatcttacaaaatacggactacaaggtgtaagactagcgggaactttttgaacag

SEQ ID NO: 37820 - DNA, 80 bp, synthetic construct
  source 1..80: mol_type = other DNA
attactgccacagtttgaagctgacacgagagagaccttaagtttggtagataaagtcatagcagtggatcagttgacct

SEQ ID NO: 37821 - DNA, 80 bp, synthetic construct
  source 1..80: mol_type = other DNA
cgtcctcaagtgatgaactgcaagactatgaagatcttgcattagcacttacaagtgtagaggaaccgtatagacggtct

SEQ ID NO: 37822 - DNA, 80 bp, synthetic construct
  source 1..80: mol_type = other DNA
atcccccctttacccacattgacacagacagctttagtagtggttttcctgtccttgcttaaccatggattttttgagaa

SEQ ID NO: 37823 - DNA, 80 bp, synthetic construct
  source 1..80: mol_type = other DNA
aacatgccgtctgtgtatatcatcaacaccttttaatgtcttgaggacaaataagtcagtttgcaccatactattttccg

SEQ ID NO: 37824 - DNA, 80 bp, synthetic construct
  source 1..80: mol_type = other DNA
acgttaaagccttcaaactagtcaactgatctatatatttctcacaatcaattcatctattttggtgcaattctttcaac

SEQ ID NO: 37825 - DNA, 80 bp, synthetic construct
  source 1..80: mol_type = other DNA
ggcataaaatttggagacggtgatgtattcacagccgtaaacctattacattctggacaaactcattttgacgctcttag

SEQ ID NO: 37826 - DNA, 80 bp, synthetic construct
  source 1..80: mol_type = other DNA
gggcagctcaaacacttcatacgaacagtgtatcaatccagtccaatagcttgactacattagacagtttgggtcgtagt

SEQ ID NO: 37827 - DNA, 80 bp, synthetic construct
  source 1..80: mol_type = other DNA
tttcaattaacaggcacaccgctgtcagggaaccttccctgtttaacccaaatattagatgtgtcaatctaatcacattt

SEQ ID NO: 37828 - DNA, 80 bp, synthetic construct
  source 1..80: mol_type = other DNA
gaggacggcctaagggaactttcagtgatacaaagtcatctcaaagtttttgagagtgaattcaccaacttaaatcttca

SEQ ID NO: 37829 - DNA, 80 bp, synthetic construct
  source 1..80: mol_type = other DNA
cccccctttacccacgttgacacagtcagctccagtggtgatttttttgtctctgtagtacaatggacttcttgaggaac

SEQ ID NO: 37830 - DNA, 80 bp, synthetic construct
  source 1..80: mol_type = other DNA
gacagctagggcacaaattgctgacacgagacaaacaaattaagcaggaattctctagaatgaaacttcatgttaccaaa

SEQ ID NO: 37831 - DNA, 80 bp, synthetic construct
  source 1..80: mol_type = other DNA
ggaaagatatattaaagctgttggaattactggggatcaaatgctctttcatagcctgtgctgactgttcgtctacaccg

SEQ ID NO: 37832 - DNA, 80 bp, synthetic construct
  source 1..80: mol_type = other DNA
ccagacagatggtggatcactgaggatagagtgcgagtcctgaagaactcagtcagcttcctctttaacaaactctctag

SEQ ID NO: 37833 - DNA, 80 bp, synthetic construct
  source 1..80: mol_type = other DNA
gtagctccacaatctgaggcattgagaaagctagccggtattaaatttaaaagaataaacttcaataattcatcagaata

SEQ ID NO: 37834 - DNA, 80 bp, synthetic construct
  source 1..80: mol_type = other DNA
tatagaaaatggctttaaaacgaagtcttcgacatggaggttctgtattcattgtcaaaaactcttaaagatgctaggga

SEQ ID NO: 37835 - DNA, 80 bp, synthetic construct
  source 1..80: mol_type = other DNA
tcccccctttacccacgttgacacagatagctccagtagtggttccttgtcctcatcaaactatggactttttaagaaac

SEQ ID NO: 37836 - DNA, 80 bp, synthetic construct
  source 1..80: mol_type = other DNA
aacacattatctgtatgaatcattaatacctctcagtatcttaagggtaagtaagacaatttataccatgccatttgctg

SEQ ID NO: 37837 - DNA, 80 bp, synthetic construct
  source 1..80: mol_type = other DNA
acatctgaactttcaaataagtcagttgttctgcagtttttttagtcaattcaattgtttcactacaactttctcagcta

SEQ ID NO: 37838 - DNA, 80 bp, synthetic construct
  source 1..80: mol_type = other DNA
ttggttaacctttactatcctactattccactttctttgctgttcatgtccgttttattatttctggggtgtggtgggaa

SEQ ID NO: 37839 - DNA, 80 bp, synthetic construct
  source 1..80: mol_type = other DNA
acaacctctatttaagcaagtccagcctaaacatgacttctgaagatatttcacaacttctgatcgagatcaagaggtta

SEQ ID NO: 37840 - DNA, 80 bp, synthetic construct
  source 1..80: mol_type = other DNA
tatgcgctacaggaagattctgaagtagagccaatagccataatttgtgatggcatagaaagcaatatgaagcagttatt

SEQ ID NO: 37841 - DNA, 80 bp, synthetic construct
  source 1..80: mol_type = other DNA
gaaagtcttcaaccaagaaaaaagatgaagatccaacaggacaggacagtcagcagagtgctgctgaacatgagggccca

SEQ ID NO: 37842 - DNA, 80 bp, synthetic construct
  source 1..80: mol_type = other DNA
agcattctggctttcaaggattatggcgaaaggggaatagttgaggagaatcacatgaggtttagtgaagaggatcagct

SEQ ID NO: 37843 - DNA, 80 bp, synthetic construct
  source 1..80: mol_type = other DNA
ctactggtgaaaagatgctgttaagttggttaagtgaggacattaaatcatcaaggtgtagcgagtgccttgctaacata

SEQ ID NO: 37844 - DNA, 80 bp, synthetic construct
  source 1..80: mol_type = other DNA
aagaaaactgttgatgaaactgccaacctttcagagaagattgaacttcttgcttataatttgcagcttgccagccactg

SEQ ID NO: 37845 - DNA, 80 bp, synthetic construct
  source 1..80: mol_type = other DNA
gtaactgtcaccccaatggtgtgaatattagcaacatatcaaatgtacacaagaggtgtccaaaaatagaagtgatcagc

SEQ ID NO: 37846 - DNA, 80 bp, synthetic construct
  source 1..80: mol_type = other DNA
aatttattggttaactctcaacaacaaaacaaacaacttcaaatgcttcgttttggtatgcttgcagggcttagtaggct

SEQ ID NO: 37847 - DNA, 80 bp, synthetic construct
  source 1..80: mol_type = other DNA
actattccatgtttcacagtctatggcacctttgttaatagcgacagacagctgatttttgatatttacaatgtgcacat

SEQ ID NO: 37848 - DNA, 80 bp, synthetic construct
  source 1..80: mol_type = other DNA
tccagggagttgtattcccagtatgatgaaacattttggaagcatgcctgtagacttaagaacttcacagctgctgtaca

SEQ ID NO: 37849 - DNA, 80 bp, synthetic construct
  source 1..80: mol_type = other DNA
aaggtgttgtcaaatgaaagatagtgccaaaacattagtaagcgactgttttcttgagttttacagcgagttcatgatgg

SEQ ID NO: 37850 - DNA, 80 bp, synthetic construct
  source 1..80: mol_type = other DNA
gacagctagggcacaaattgctaacacgagataaacaaatcaagcaggaattctcaaagatgaagctctacgttaccaaa

SEQ ID NO: 37851 - DNA, 80 bp, synthetic construct
  source 1..80: mol_type = other DNA
cagttcttcccttctgttttcactttaatcaaaatgctaacagatgagtcatcagactcagaaaagaccggtcttagtcc

SEQ ID NO: 37852 - DNA, 80 bp, synthetic construct
  source 1..80: mol_type = other DNA
agatttgcaacaggttgcaagatactccaaccatttaaccctacttagtagaatgatacaacaagcaaaaccaactgtaa

SEQ ID NO: 37853 - DNA, 80 bp, synthetic construct
  source 1..80: mol_type = other DNA
tgagggttatctcactcgtagaagcaccaggaatgttgcaaatgcagaagaatttgttatatctgagttctttaagaaga

SEQ ID NO: 37854 - DNA, 80 bp, synthetic construct
  source 1..80: mol_type = other DNA
ctttgtgtactttctatttccaaaatgagtgtagcaagagagatggacctaggtgttcattcgcagcactgttaagctta

SEQ ID NO: 37855 - DNA, 80 bp, synthetic construct
  source 1..80: mol_type = other DNA
gttcatgaagattggcaaaaggtagggaaaaacatccttgttcgtgcaaacaatgagctgggtgatgtgtcgctgaaggt

SEQ ID NO: 37856 - DNA, 80 bp, synthetic construct
  source 1..80: mol_type = other DNA
gtggtaattgtcaccccgatggtgtgaatattagcaacatttcaaacgtacacaagaggtgtccaaaaatagaagtggtc

SEQ ID NO: 37857 - DNA, 80 bp, synthetic construct
  source 1..80: mol_type = other DNA
tgtacttctcactgtcaattcagctgcctccgttaatctattttgccatcctgccattcttctttctctaatattcatac

SEQ ID NO: 37858 - DNA, 80 bp, synthetic construct
  source 1..80: mol_type = other DNA
ttttgccatcctgccattcttctttctctaatattcatactagtttcattatttgcagggtgtgggggggaacgatttct

SEQ ID NO: 37859 - DNA, 80 bp, synthetic construct
  source 1..80: mol_type = other DNA
gaaaaccgttgacgagactaccaacttgtctgagaagattgagctgcttgcatataatcttcaactcgttaaccattgca

SEQ ID NO: 37860 - DNA, 80 bp, synthetic construct
  source 1..80: mol_type = other DNA
aacaccctagtgttagcttcactaaggaagaggtcttaataaagcgactagagaaaaccttcctaaagcagcacaatctg

SEQ ID NO: 37861 - DNA, 80 bp, synthetic construct
  source 1..80: mol_type = other DNA
tcaaagatatcaatcccccctctatccacattgtcactggtggcatagatagcaggccttgacctttgtcaaacaatgga

SEQ ID NO: 37862 - DNA, 80 bp, synthetic construct
  source 1..80: mol_type = other DNA
aaggaggacggaagtggtgacaaaagagcagcatcaactattcttgagcctccttcctcagtctcacgagtgtctacaga

SEQ ID NO: 37863 - DNA, 80 bp, synthetic construct
  source 1..80: mol_type = other DNA
aacataaggacggtagcgcaatgtcagtcatacctgataacagcaatccccgacttctcaagtttgtgcctctcaagaaa

SEQ ID NO: 37864 - DNA, 80 bp, synthetic construct
  source 1..80: mol_type = other DNA
gctccactgacaggaaaaaacttttgcctcagtcggtgttttcagattctaaagttgtgctgtcaagaatcaggtttaaa

SEQ ID NO: 37865 - DNA, 80 bp, synthetic construct
  source 1..80: mol_type = other DNA
aatgggtagcctagagggacaggaatgctttgagttcacgattctaaaagacaacagcaccaagctggactataacaaac

SEQ ID NO: 37866 - DNA, 80 bp, synthetic construct
  source 1..80: mol_type = other DNA
agagcagtgaggcctagcattgtggctccagcagcgcctgagtctgagcagtgtcaagagcagataagcctggatgactt

SEQ ID NO: 37867 - DNA, 80 bp, synthetic construct
  source 1..80: mol_type = other DNA
attcagactgagcatagttctgagtttataaaagggctgtccacttctcacatggaattcacggaacccagcatgtctat

SEQ ID NO: 37868 - DNA, 80 bp, synthetic construct
  source 1..80: mol_type = other DNA
actcaacacaccacacacatcaaactatgcaaaggagcctgcgtcatggtcaattctagccagcattattcccaaatact

SEQ ID NO: 37869 - DNA, 80 bp, synthetic construct
  source 1..80: mol_type = other DNA
ctgatcgtctagcttactctgcctcatatctacttgtttcttttacttccaccttagtattatgcctgttatttgcaagg

SEQ ID NO: 37870 - DNA, 80 bp, synthetic construct
  source 1..80: mol_type = other DNA
gctgacctcaaccaacttacatctcggcttatcacattgagaaaagaaaaggacactgacctacttaaacaatggtaccc

SEQ ID NO: 37871 - DNA, 80 bp, synthetic construct
  source 1..80: mol_type = other DNA
tggaagcatgcgcttcgcctgaaagggactgcatatgaaggcctgtttgcaagttgctatggctggcaatacatcccaga

SEQ ID NO: 37872 - DNA, 80 bp, synthetic construct
  source 1..80: mol_type = other DNA
gcagctcaccagtcattgtggcagctgtcatcccagcggcgttagcatcaacaacacctctaacgtggacaaaaggtgtc

SEQ ID NO: 37873 - DNA, 80 bp, synthetic construct
  source 1..80: mol_type = other DNA
cttgtgttgaagtcgtcagtcactgtgaaaacaggggctttgaggacagtaacgaatgcctaactgacctagacaggctt

SEQ ID NO: 37874 - DNA, 80 bp, synthetic construct
  source 1..80: mol_type = other DNA
aacctgcttgcaaactcccaacaacagaacaaacagttacaaatgcttagattcggtatgcttgcagggctcagcagact

SEQ ID NO: 37875 - DNA, 80 bp, synthetic construct
  source 1..80: mol_type = other DNA
gttagaaaggctgcaaacaaggaagggaagaagttaatgaagttgagtgatgatgcgtccactgacacgaacagcatcgc

SEQ ID NO: 37876 - DNA, 80 bp, synthetic construct
  source 1..80: mol_type = other DNA
agtgctgccacagcttgagactgatactagaggaacactgagtctggtagacaaagttatagctgtagatcagctaacat

SEQ ID NO: 37877 - DNA, 80 bp, synthetic construct
  source 1..80: mol_type = other DNA
gcatcttttccgaaactgagttccaagaactaataaaacttaagaagcttcttctcaatgaacagcaggaagaacaggaa

SEQ ID NO: 37878 - DNA, 80 bp, synthetic construct
  source 1..80: mol_type = other DNA
gaagtaatggagacagtcaacctcatcttttttgcagcattgtcagccccttggtgtcttcattataaggcactagaatc

SEQ ID NO: 37879 - DNA, 80 bp, synthetic construct
  source 1..80: mol_type = other DNA
ttacctggtcagacatccagaaatactcgactgcgggctgaaagaagattgtaggctccccctgctggatctgtctgttt

SEQ ID NO: 37880 - DNA, 80 bp, synthetic construct
  source 1..80: mol_type = other DNA
caaaattattggtgtctctgtaccgaaaagatggtgaagaattggtacaaaactccggtttaaagattggatttctggtg

SEQ ID NO: 37881 - DNA, 80 bp, synthetic construct
  source 1..80: mol_type = other DNA
ccataaaaccaccgatgaaaaattactgcatcagaccaaaatagtttttgctaaaataggcttatcaggaaatggatatg

SEQ ID NO: 37882 - DNA, 80 bp, synthetic construct
  source 1..80: mol_type = other DNA
caagagacttgttggtgcaggaaactggtacaaaagtcatgcatgctaccactgaaatgtttagcaggaaccttttgaaa

SEQ ID NO: 37883 - DNA, 80 bp, synthetic construct
  source 1..80: mol_type = other DNA
atggaaaacccattagtgaaggcagcaatctagttaacttctacaaagttatttgcatctccggagataacaccaagtgg

SEQ ID NO: 37884 - DNA, 80 bp, synthetic construct
  source 1..80: mol_type = other DNA
agatacaaattgtgttctaagggaggcgtggagcagcatagtgaagaagacctgaggaagctgctgatagataatctgga

SEQ ID NO: 37885 - DNA, 80 bp, synthetic construct
  source 1..80: mol_type = other DNA
cagctgggatggaaatgacactgttaagttcttagtgactacttacataagcaaaggactcatggcgcttaatagctaca

SEQ ID NO: 37886 - DNA, 80 bp, synthetic construct
  source 1..80: mol_type = other DNA
gttcttgaggagccttgactggacccaagtgctggctggtcaatatgtgacaaatcccagattcagcatatctgactact

SEQ ID NO: 37887 - DNA, 80 bp, synthetic construct
  source 1..80: mol_type = other DNA
ccgagactctcatgctgaggccagaatcaaaagaaaggattggggaagtcatgtcactgcgacagctaggacacaaactg

SEQ ID NO: 37888 - DNA, 80 bp, synthetic construct
  source 1..80: mol_type = other DNA
aagacggccttagggaactctccgtgattcaaagccacttaaaggtcttcgaaaatgagttcacgaatttgaatcttcaa

SEQ ID NO: 37889 - DNA, 80 bp, synthetic construct
  source 1..80: mol_type = other DNA
ttttcagaccccaatagacagaagctcaggatagtagaatcaagaccagcggaatctgagctagaagcaaaccgagctgt

SEQ ID NO: 37890 - DNA, 80 bp, synthetic construct
  source 1..80: mol_type = other DNA
gatagttaagaccaagctgttctcagcaactgagcaggtccgcctttccaacaatcccgcagttgtcataggttatctgt

SEQ ID NO: 37891 - DNA, 80 bp, synthetic construct
  source 1..80: mol_type = other DNA
ctgacaagagacaagcagatcaagcaagaattttccagaatgaaactacatgttaccaaggacctgcttgatcatctgga

SEQ ID NO: 37892 - DNA, 80 bp, synthetic construct
  source 1..80: mol_type = other DNA
cccccctttacccacgttgtcacgaacggctccagtagtggttctttgtccttatcaaaccatggacttcttgagaaacc

SEQ ID NO: 37893 - DNA, 80 bp, synthetic construct
  source 1..80: mol_type = other DNA
aagggcaaccttgagcaaggtgtagaagaagaaattgagttctgcaacaacctgaccaagactgtttcggagaatccgct

SEQ ID NO: 37894 - DNA, 80 bp, synthetic construct
  source 1..80: mol_type = other DNA
accactcagctgttggtctgaagttcaaaactatatcgaggacataggcttcaacaatgtgcttgtaaacgttgatagaa

SEQ ID NO: 37895 - DNA, 80 bp, synthetic construct
  source 1..80: mol_type = other DNA
ctttgtgtgctttctatttccagaatgagtgcagtaaaagagatgggcctagatgctcattcgcagcactgctgagctta

SEQ ID NO: 37896 - DNA, 80 bp, synthetic construct
  source 1..80: mol_type = other DNA
agacctagcactatgacaccagctacacatgaagacaagcaatgtcaagagcaaataagcctggatgatctaatggcaag

SEQ ID NO: 37897 - DNA, 80 bp, synthetic construct
  source 1..80: mol_type = other DNA
taaacatgctgtccatatgaatcaccaatatctttcaatgtcttaagggcaagtgagatagtttacaccatgccatttgc

SEQ ID NO: 37898 - DNA, 80 bp, synthetic construct
  source 1..80: mol_type = other DNA
taaactctgaactttcagttaagttagctgccctgcatcacttacaatcaacctaattgcttcaccacaattccctcaag

SEQ ID NO: 37899 - DNA, 80 bp, synthetic construct
  source 1..80: mol_type = other DNA
caacctaattgcttcaccacaattccctcaagtgctggtcaatcttccctatcctgctaatacactttcctcactgttct

SEQ ID NO: 37900 - DNA, 80 bp, synthetic construct
  source 1..80: mol_type = other DNA
tgctggtcaatcttccctatcctgctaatacactttcctcactgttcttatcagttttatcattttgttatttccagggt

SEQ ID NO: 37901 - DNA, 80 bp, synthetic construct
  source 1..80: mol_type = other DNA
aatcttccctatcctgctaatacactttcctcactgttcttatcagttttatcattttgttatttccagggtgtggggtg

SEQ ID NO: 37902 - DNA, 80 bp, synthetic construct
  source 1..80: mol_type = other DNA
gaaagcctcaaaccaaaggaaaaggtaaagatccaacaaggcaggacagtcagcaaaatgctgctgagcatgagaattca

SEQ ID NO: 37903 - DNA, 80 bp, synthetic construct
  source 1..80: mol_type = other DNA
ggagacaaggcagctgttgttagtagaagttggttttcaaactgacattgatgggaaaataaggacagaccataaaaaat

SEQ ID NO: 37904 - DNA, 80 bp, synthetic construct
  source 1..80: mol_type = other DNA
aaactcttagtttgtttataccgcagagatgacgaagaattaacaaacaactcaagcttaaaactcgggttcttagtaaa

SEQ ID NO: 37905 - DNA, 80 bp, synthetic construct
  source 1..80: mol_type = other DNA
ctgacactctgattctgcgacctgaatccaaggaaagaataggtgaagttatgtcgttgcggcagctagggcacaagttg

SEQ ID NO: 37906 - DNA, 80 bp, synthetic construct
  source 1..80: mol_type = other DNA
catcaatcccccctttacccacattgacacagatagctccagtagtggttctttgtcctcattaaaccatggacttttta

SEQ ID NO: 37907 - DNA, 80 bp, synthetic construct
  source 1..80: mol_type = other DNA
ttcaatgtctcaagggcaaatgaggcagtccataccatttcagttgctatcatcagagctctcaaacgagctaactgctc

SEQ ID NO: 37908 - DNA, 80 bp, synthetic construct
  source 1..80: mol_type = other DNA
ctcacagtcaattcagctgcctctattgatccattttatcattctgtcattcttctttctctactattcattccagtttc

SEQ ID NO: 37909 - DNA, 80 bp, synthetic construct
  source 1..80: mol_type = other DNA
tcattctgtcattcttctttctctactattcattccagtttcattatttgaagggtgtggggggaacgatttctttgaga

SEQ ID NO: 37910 - DNA, 80 bp, synthetic construct
  source 1..80: mol_type = other DNA
gaaaactttcaaccaaggaaaaggaaggagatcttgtggaacaaggcaaccagcagagcgccgttgaacacgagagccca

SEQ ID NO: 37911 - DNA, 80 bp, synthetic construct
  source 1..80: mol_type = other DNA
gaaaaccgttgacgagactgccaacctatctgagaagattgagctacttgcatacaaccttcaactcgttagtcactgca

SEQ ID NO: 37912 - DNA, 80 bp, synthetic construct
  source 1..80: mol_type = other DNA
gcaactgtcaccccaatggtgtgaacattagcaatacatctaacgtatgcaagaggtgccctaaaatagaagtggttagt

SEQ ID NO: 37913 - DNA, 80 bp, synthetic construct
  source 1..80: mol_type = other DNA
gtgagaaaagctgcaaacaaagaagggaaaaagctattaaagtcaaacagcgatacatcaactgacacacaaagcatcac

SEQ ID NO: 37914 - DNA, 80 bp, synthetic construct
  source 1..80: mol_type = other DNA
ttccgaggtgtcagacagaaggtcctatagctcaagcaagagtagaatccgtagtatttttggtagatacaactcccaga

SEQ ID NO: 37915 - DNA, 80 bp, synthetic construct
  source 1..80: mol_type = other DNA
aacacgccatctgtactagccattaacgtctttcaatgtcttaagagcaaacgagacagtccatgccatatcagttgcca

SEQ ID NO: 37916 - DNA, 80 bp, synthetic construct
  source 1..80: mol_type = other DNA
gctgcctccgttaatctattttgccgtcccgccattcttctttctctaatatccataccagtttcattatttgcagggtg

SEQ ID NO: 37917 - DNA, 80 bp, synthetic construct
  source 1..80: mol_type = other DNA
ccgtcccgccattcttctttctctaatatccataccagtttcattatttgcagggtgtgggggggaacgatttctttgag

SEQ ID NO: 37918 - DNA, 80 bp, synthetic construct
  source 1..80: mol_type = other DNA
ccctctgcctgaaactccactgagtgaggtgcattcaatagagcgcattatggaaaatttttcccgccttatgcatagtg

SEQ ID NO: 37919 - DNA, 80 bp, synthetic construct
  source 1..80: mol_type = other DNA
ctcaaagatatcaatcccccctttacccacgttgacacagtcagctccagtggtgatttttttgtctctgtggtacaatg

SEQ ID NO: 37920 - DNA, 80 bp, synthetic construct
  source 1..80: mol_type = other DNA
gacttcttgaggaaccttgattggactcaggtgattgctggtcaatatgtgaccaaccctaggttcaatatctccgatta

SEQ ID NO: 37921 - DNA, 80 bp, synthetic construct
  source 1..80: mol_type = other DNA
aacatgccatctgtacgagcctttaatgtctttcaatgtctcaagggcaaacgagacagtccataccatattagttgcca

SEQ ID NO: 37922 - DNA, 80 bp, synthetic construct
  source 1..80: mol_type = other DNA
acaacaaagatctcaaacgagctaactgctttgcacttctcacagtcaattcagctgcctccgctgatccattttgccat

SEQ ID NO: 37923 - DNA, 80 bp, synthetic construct
  source 1..80: mol_type = other DNA
ctcacagtcaattcagctgcctccgctgatccattttgccatcctgccattcttctttctttaatatttatactagtttc

SEQ ID NO: 37924 - DNA, 80 bp, synthetic construct
  source 1..80: mol_type = other DNA
ccatcctgccattcttctttctttaatatttatactagtttcattatttgaagggtgtggggggaacgatttctttgaga

SEQ ID NO: 37925 - DNA, 80 bp, synthetic construct
  source 1..80: mol_type = other DNA
gaacactttcagccaaagaaaaagatggagatcttgcagaacaaggcaaccagcaaagcgccgttgaacacgagagccca

SEQ ID NO: 37926 - DNA, 80 bp, synthetic construct
  source 1..80: mol_type = other DNA
acggcttaagtagcagtaggacaaattccacagttgaagatagcagcagtgtgagcgacaccactgttgcttctcatgat

SEQ ID NO: 37927 - DNA, 80 bp, synthetic construct
  source 1..80: mol_type = other DNA
atcaaaaccttcaaacaagccaactgctctgcattcctctcagtcaactcaattgctttaactgatccactctgcaaacc

SEQ ID NO: 37928 - DNA, 80 bp, synthetic construct
  source 1..80: mol_type = other DNA
gtcaactcaattgctttaactgatccactctgcaaacctgccagtcctctccttctcaaccatttatttcagtttcatca

SEQ ID NO: 37929 - DNA, 80 bp, synthetic construct
  source 1..80: mol_type = other DNA
tgccagtcctctccttctcaaccatttatttcagtttcatcattgttattattttggggtgtggggggaacgatttcttt

SEQ ID NO: 37930 - DNA, 80 bp, synthetic construct
  source 1..80: mol_type = other DNA
gaaaactttcagccaagaaaaaagatggagatccagcagaacagggaagccagcagagtaccactgaacatgagggcacc

SEQ ID NO: 37931 - DNA, 80 bp, synthetic construct
  source 1..80: mol_type = other DNA
agcatctctgcctttaaagactacggagagagagggatagtcgaggaaaaccacatgaggtttagtgaagaagatcagct

SEQ ID NO: 37932 - DNA, 80 bp, synthetic construct
  source 1..80: mol_type = other DNA
ctgcaacaaaaacccctgtgtcgactaaagacgttctggagacttgggaaaagatgaaggagcacatactcaacaggcca

SEQ ID NO: 37933 - DNA, 80 bp, synthetic construct
  source 1..80: mol_type = other DNA
aaggacaatcttgaacaaggtgtggaggaagagattgagttctgtaataacctaaccaaaactgtttcagagaacccgct

SEQ ID NO: 37934 - DNA, 80 bp, synthetic construct
  source 1..80: mol_type = other DNA
gcctctcagctgttggtctgaagttcagaactatattgaggatataggcttcaacaatgtgcttgtcaacattgacagaa

SEQ ID NO: 37935 - DNA, 80 bp, synthetic construct
  source 1..80: mol_type = other DNA
actctagtatcttatgtcagcactgaaaccatccctaagtttctgcttgcatttcttctttatgaggaagtgttaacaaa

SEQ ID NO: 37936 - DNA, 80 bp, synthetic construct
  source 1..80: mol_type = other DNA
cttaatcagccagtgcaaggcagtaaaggaacttatcaacagcacaggactctcagacttagagctagaaagcttgctta

SEQ ID NO: 37937 - DNA, 80 bp, synthetic construct
  source 1..80: mol_type = other DNA
agcctagcaatgtgacacaaattgcatatgaagatgagcagtaccaagagcaaatcagcttggacgatctaatggcaagt

SEQ ID NO: 37938 - DNA, 80 bp, synthetic construct
  source 1..80: mol_type = other DNA
aacatgccttctgtatgggttattaatggctttcaatgtcttggagacaagtaagactgtttgcatcatgccatttgctg

SEQ ID NO: 37939 - DNA, 80 bp, synthetic construct
  source 1..80: mol_type = other DNA
ctatcaaaaccttcaaacaaatcaactgctccgcatctcgcacagtcatttcaactgctttgcaatcccttttctgacat

SEQ ID NO: 37940 - DNA, 80 bp, synthetic construct
  source 1..80: mol_type = other DNA
gctttgcaatcccttttctgacatcccgcctttcttctttctctaccatttgtttcagtttcattatttccagggtgtgg

SEQ ID NO: 37941 - DNA, 80 bp, synthetic construct
  source 1..80: mol_type = other DNA
atcccgcctttcttctttctctaccatttgtttcagtttcattatttccagggtgtggggggaacgattttctttgagaa

SEQ ID NO: 37942 - DNA, 80 bp, synthetic construct
  source 1..80: mol_type = other DNA
aactgttttccatattgcctccaagctgtgcaagagagtgtgaggtcctctttgatgacataagaaactctccaacacac

SEQ ID NO: 37943 - DNA, 80 bp, synthetic construct
  source 1..80: mol_type = other DNA
gaaagccttcagccacaaaaaaggaggaagacctggctgaacaagatggccaacaaaatgccattgaacatgagagctca

SEQ ID NO: 37944 - DNA, 80 bp, synthetic construct
  source 1..80: mol_type = other DNA
ggcatctcggccttcaaggactatggagagagaggaatagttgaggagaatcacatgaggttcagtgaagaggatcagct

SEQ ID NO: 37945 - DNA, 80 bp, synthetic construct
  source 1..80: mol_type = other DNA
actagtgaaaagatgctgttgagctggttaagtgaagatattaagtcatcgaggtgtagtgaatgcctcgtcaacataaa

SEQ ID NO: 37946 - DNA, 80 bp, synthetic construct
  source 1..80: mol_type = other DNA
gaagactgttgatgaaactgctaacttgtcagaaaagattgagctgctcgcttataacctgcaacttacaagtcattgtg

SEQ ID NO: 37947 - DNA, 80 bp, synthetic construct
  source 1..80: mol_type = other DNA
gtaactgtcaccccaatggtgttaacattagcaacacatccaatgtgtgcaagaggtgtcccaagattgaggtagttagt

SEQ ID NO: 37948 - DNA, 80 bp, synthetic construct
  source 1..80: mol_type = other DNA
tttgacttgaaggtgcccactaaagatgaagaagtgctaataaatattagaaattcgctaaaggctagatctgagtttgt

SEQ ID NO: 37949 - DNA, 80 bp, synthetic construct
  source 1..80: mol_type = other DNA
acagtgtaaatgaaaaaacactgcaagacattgagaatcactctatgactctgctagaagatgcattcaaagaacttaca

SEQ ID NO: 37950 - DNA, 80 bp, synthetic construct
  source 1..80: mol_type = other DNA
aacttgttggttaactctcaacagcagaataaacaactccaaatgctccgctttggcatgcttgcagggctcagtaggct

SEQ ID NO: 37951 - DNA, 80 bp, synthetic construct
  source 1..80: mol_type = other DNA
tgtttgtcccaatgagctaggaaaaaagttttcaacaagctgtagaaggattgaggacaacattgcaagactttacctgc

SEQ ID NO: 37952 - DNA, 80 bp, synthetic construct
  source 1..80: mol_type = other DNA
ttctgaagtatcagacaggaggtcctacagctcaagcagaagcaggatccgaagtattttcggaaggtacaactcccaaa

SEQ ID NO: 37953 - DNA, 80 bp, synthetic construct
  source 1..80: mol_type = other DNA
aaaaaccatttgaactaaggtcaggccttgaagtcttcaatgatcccttcaatgactatcaacaggcaataacagacatc

SEQ ID NO: 37954 - DNA, 80 bp, synthetic construct
  source 1..80: mol_type = other DNA
atcaaaaccttcaaacaagccaactgctctgcattcctctcagtcggctcaattgatttgactgatccgctttgcaggcc

SEQ ID NO: 37955 - DNA, 80 bp, synthetic construct
  source 1..80: mol_type = other DNA
aacttgctgtctgtatgagccattaacgcccttcaatatctcaagggcgaataaggcagctttaaccgcaccattcattg

SEQ ID NO: 37956 - DNA, 80 bp, synthetic construct
  source 1..80: mol_type = other DNA
acatcaaagctctccaacaagccgactgctctgcatccttcacagtcaattcaactgcattaattaatctcttttactat

SEQ ID NO: 37957 - DNA, 80 bp, synthetic construct
  source 1..80: mol_type = other DNA
ttactatcccaccaatcctctctttctctactgttcatttcagtttcatcatcattattatctggggtgtggggggaacg

SEQ ID NO: 37958 - DNA, 80 bp, synthetic construct
  source 1..80: mol_type = other DNA
gaaacccttcagccaagaaaaaggatggagatctggcagaacagggcagccagcagagcaccactgaacacgagagctcc

SEQ ID NO: 37959 - DNA, 80 bp, synthetic construct
  source 1..80: mol_type = other DNA
agcatctctgctttcaaagattacggagagagaggaatagtcgaggaaaatcacatgagatttagtgaagaggaccagct

SEQ ID NO: 37960 - DNA, 80 bp, synthetic construct
  source 1..80: mol_type = other DNA
aacctagtaatgtgacacaaattgcacgcgaagatgagcagtgccaagagcaaataagcttagacgatctaatggcaagt

SEQ ID NO: 37961 - DNA, 80 bp, synthetic construct
  source 1..80: mol_type = other DNA
atcatgctctctgtatgagttattaatagctttcaatgtcttgaggacaagtaagactatttgcatcatgccatttgctg

SEQ ID NO: 37962 - DNA, 80 bp, synthetic construct
  source 1..80: mol_type = other DNA
acattaaaactttcaaacaaatcaactgctctgcatttcccacagtcaattcaactgcctcaatgcaacctttttaattc

SEQ ID NO: 37963 - DNA, 80 bp, synthetic construct
  source 1..80: mol_type = other DNA
ttctactattccgccgttcttccctctctatcattcatttcagtttcactatttccagggtgtggggggaacgaatttct

SEQ ID NO: 37964 - DNA, 80 bp, synthetic construct
  source 1..80: mol_type = other DNA
gaaagccctcagccacaaaaaaggatgaagatctgacagagcaagatagccaacaaaacgccattgaacatgagagctcg

SEQ ID NO: 37965 - DNA, 80 bp, synthetic construct
  source 1..80: mol_type = other DNA
aggcttctatatactgctcagttagagatgtggaagataatattaagcactggaagcaaagagatctatgccctgaggtg

SEQ ID NO: 37966 - DNA, 80 bp, synthetic construct
  source 1..80: mol_type = other DNA
accattccatgttttacagtctatggcacctttgttaacagcgacagacaactgatctttgacatttacaatgtacatat

SEQ ID NO: 37967 - DNA, 80 bp, synthetic construct
  source 1..80: mol_type = other DNA
cgagcctagatgaagtcactttgtctaagaaacaagcagagatgttgaggcaaaaggcatctcagttgtctaaactggtc

SEQ ID NO: 37968 - DNA, 80 bp, synthetic construct
  source 1..80: mol_type = other DNA
aacaaaagtcagaatataccaactagagtcggcagggttctagactgcatgttcaattgcaaactatgtgttgagatatc

SEQ ID NO: 37969 - DNA, 80 bp, synthetic construct
  source 1..80: mol_type = other DNA
atcaaagccttcaagcaagccaactgctccgcatccttcacagtcaatccaactgctttaatcgatccatttactattct

SEQ ID NO: 37970 - DNA, 80 bp, synthetic construct
  source 1..80: mol_type = other DNA
gaaaaccttcagccaagagaagagacggagatctggcagaacaaggcagccagcaaagcaccactgaatacaagggctcc

SEQ ID NO: 37971 - DNA, 80 bp, synthetic construct
  source 1..80: mol_type = other DNA
ctggggagactcgaatagatctggaaagttcacatacagcagcagatctggagaatccattggaatcttcattgcaggga

SEQ ID NO: 37972 - DNA, 80 bp, synthetic construct
  source 1..80: mol_type = other DNA
ctgcagtgggggcatggctgcttgtccattgtttatgacgaaactgatacacagaccacataccatgaaaatcttttgaa

SEQ ID NO: 37973 - DNA, 80 bp, synthetic construct
  source 1..80: mol_type = other DNA
acggaacttctcctcaactcattgacgctgctccactgtttcctaaaacatgctcctagtgatgccataatggaggtaga

SEQ ID NO: 37974 - DNA, 80 bp, synthetic construct
  source 1..80: mol_type = other DNA
aatggggaactttgaagggcaggagtgctttgagttcactattctgaaggacaatagcgcaaggctagattacaacaagt

SEQ ID NO: 37975 - DNA, 80 bp, synthetic construct
  source 1..80: mol_type = other DNA
aacccagtgctgtaacacagtttgtacacgaggacgaacagtgtcaagagcaaataagcttagatgatctgatggcaaac

SEQ ID NO: 37976 - DNA, 80 bp, synthetic construct
  source 1..80: mol_type = other DNA
tcaattgcttcaactgatctattttactagcctatcgatcctctctttctcaaccattcatttcagcttcatcatcatcg

SEQ ID NO: 37977 - DNA, 80 bp, synthetic construct
  source 1..80: mol_type = other DNA
cctatcgatcctctctttctcaaccattcatttcagcttcatcatcatcgttattatcttggggtgtggggggaacgatt

SEQ ID NO: 37978 - DNA, 80 bp, synthetic construct
  source 1..80: mol_type = other DNA
cctctctttctcaaccattcatttcagcttcatcatcatcgttattatcttggggtgtggggggaacgatttctttgaga

SEQ ID NO: 37979 - DNA, 80 bp, synthetic construct
  source 1..80: mol_type = other DNA
acaggactaacactgcccaccagtttggaacaggcaatgcgcaaaggactggtcgaaggtgtggtcatctctaaggaagg

SEQ ID NO: 37980 - DNA, 80 bp, synthetic construct
  source 1..80: mol_type = other DNA
aacttatgcaaggggagtgatatcaaattcactaaaaaacctctcgaggcaaggtaaatcaaagtgttctgtgccaagat

SEQ ID NO: 37981 - DNA, 80 bp, synthetic construct
  source 1..80: mol_type = other DNA
ggatcaactctagaagcatctatgttggctaaagaaatgggcattaccatcatcatttggactgttgctgccagtgatga

SEQ ID NO: 37982 - DNA, 80 bp, synthetic construct
  source 1..80: mol_type = other DNA
ttaataggtcaggggtcaaactggttaagataaggcactgtgacattaacctatcagtcaaattgccatcaaataagaaa

SEQ ID NO: 37983 - DNA, 80 bp, synthetic construct
  source 1..80: mol_type = other DNA
gggtttggatcttgatttacacaagactactgacgaaaagctactacatcaaacaaagatagtttttgctaaaattggtt

SEQ ID NO: 37984 - DNA, 80 bp, synthetic construct
  source 1..80: mol_type = other DNA
ctggggaaaggctccctagaagcgttagaagcaaggtcatatatgagatggtaaaattagtgggagaaacaggcatggca

SEQ ID NO: 37985 - DNA, 80 bp, synthetic construct
  source 1..80: mol_type = other DNA
agagatttattagtgcaagagactgggactaaagtcatgcatgcaaccactgaaatgtttagtagaaatcttttaaaaac

SEQ ID NO: 37986 - DNA, 80 bp, synthetic construct
  source 1..80: mol_type = other DNA
accaagtgggggccgatacactgctgttctttcttttctggcatgatgcaacaggttctaaaaaatgtaccagactggtg

SEQ ID NO: 37987 - DNA, 80 bp, synthetic construct
  source 1..80: mol_type = other DNA
aaattaacattcattaaaaacttatgtagacaggtagaaatacctgctggcagtattaagaagatcttaaatgttcttag

SEQ ID NO: 37988 - DNA, 80 bp, synthetic construct
  source 1..80: mol_type = other DNA
ggaggggaaggaaccgagaaacaggtaaaggcatcactgaatagagacgacaataaaatcatagaggatcctatgataca

SEQ ID NO: 37989 - DNA, 80 bp, synthetic construct
  source 1..80: mol_type = other DNA
ggcagttggggcataaactgctaacacgagacaaacaaattaagcaagagttctccagaatgaaactctacgtcactaag

SEQ ID NO: 37990 - DNA, 80 bp, synthetic construct
  source 1..80: mol_type = other DNA
atgtcggtggtctattaagagcaaccttccctggaacggggatagaaagacatatgcaattgctacactctgaaatgata

SEQ ID NO: 37991 - DNA, 80 bp, synthetic construct
  source 1..80: mol_type = other DNA
aaacggagcttctccttaactcattgacgttgctccactgtttcttaaaacatgctcgcccttatataggaagcgagagc

SEQ ID NO: 37992 - DNA, 80 bp, synthetic construct
  source 1..80: mol_type = other DNA
aaaagtagcctactgcacaagtacctcaaatcagggggtgtcaggcagcggaacactgaggtgctttttagagaaaagtt

SEQ ID NO: 37993 - DNA, 80 bp, synthetic construct
  source 1..80: mol_type = other DNA
aacatgctgtctatgtgagtcaataataccctccaatgtttcaaggtcaagtaagacggtttataccgtgccatttgctg

SEQ ID NO: 37994 - DNA, 80 bp, synthetic construct
  source 1..80: mol_type = other DNA
atatctggacctttaaccaagtcggctgctctgcacttcttataaccaattcaattgttttactgcaattctctcaatta

SEQ ID NO: 37995 - DNA, 80 bp, synthetic construct
  source 1..80: mol_type = other DNA
caattattcattagcctttaccattctgctattctactttctttgctgttcatgtcagtttcattacttccagggtgtgg

SEQ ID NO: 37996 - DNA, 80 bp, synthetic construct
  source 1..80: mol_type = other DNA
gaaaatcttcaaccaagaaaaaagatgaagaaccaacggaacaggacagtcaacaaaatgctgctgaacatgagagctca

SEQ ID NO: 37997 - DNA, 80 bp, synthetic construct
  source 1..80: mol_type = other DNA
ctactagtgaaaagatgctgttaagttggttaagtgaagacataaagtcatcgaggtgcaatgagtgtcttactaacata

SEQ ID NO: 37998 - DNA, 80 bp, synthetic construct
  source 1..80: mol_type = other DNA
aagaaaactgttgatgaaactgccaacctatcagaaaagatcgaactgcttgcttataatttgcaactcactagtcactg

SEQ ID NO: 37999 - DNA, 80 bp, synthetic construct
  source 1..80: mol_type = other DNA
catcctcagttaaaggaagtttgaagaagaagcttaagtttatgaacatacattccccggaactgataccagagaactgc

SEQ ID NO: 38000 - DNA, 80 bp, synthetic construct
  source 1..80: mol_type = other DNA
ctcttttctagtgaagagtttaatgaattgattaagttgaagaagcttctcctcaacgaacaacaagatgaacaggagtt

SEQ ID NO: 38001 - DNA, 80 bp, synthetic construct
  source 1..80: mol_type = other DNA
aaactcttagtttgtttgtatcgaagagatgacgatgagctaacaaacagtacaagcttaaaactcgggtttttggtgaa

SEQ ID NO: 38002 - DNA, 80 bp, synthetic construct
  source 1..80: mol_type = other DNA
ttctgctatcggatgcctgcctctgagtcaagcagacaagtcttcactactcatgagtttcctaaactggagggtgaaca

SEQ ID NO: 38003 - DNA, 80 bp, synthetic construct
  source 1..80: mol_type = other DNA
ctattccactttctttgctgttcatgtccgttttattatttctggggtgtggggggaacgagatcggaagagacacgtct

SEQ ID NO: 38004 - DNA, 80 bp, synthetic construct
  source 1..80: mol_type = other DNA
tctcaaagatatcaatcccccctttacccacgttgacacagatagccccagtagtggttctttgtcctcatcaaactatg

SEQ ID NO: 38005 - DNA, 80 bp, synthetic construct
  source 1..80: mol_type = other DNA
taaagaacaacatcaattattcctgagcctccttccacaatcacatgaatgtttacaaatgcacaaagatggcagcgcac

SEQ ID NO: 38006 - DNA, 80 bp, synthetic construct
  source 1..80: mol_type = other DNA
gattttttaagaaaccttgactggactcaggtgattgatggtcagtatgtgaccaaccccaggttcaacatctccgatta

SEQ ID NO: 38007 - DNA, 80 bp, synthetic construct
  source 1..80: mol_type = other DNA
acatctgggctttcgggcaattcagttgttctgcaattttttcagccaattcaattgtttcactacaatttctcagctat

SEQ ID NO: 38008 - DNA, 80 bp, synthetic construct
  source 1..80: mol_type = other DNA
ttgtttcactacaatttctcagctattggttaacctttactatcctactattccactttctttgctgttcatgtccgttt

SEQ ID NO: 38009 - DNA, 80 bp, synthetic construct
  source 1..80: mol_type = other DNA
ctatcctactattccactttctttgctgttcatgtccgttttattatttctggggtgtggggggaacgatttctttgaga

SEQ ID NO: 38010 - DNA, 80 bp, synthetic construct
  source 1..80: mol_type = other DNA
gtaaggaaagctgcaaataaagaagggaaaaagctattaaagttaaacagcgatgcatccactgacacacaaagtgttgc

SEQ ID NO: 38011 - DNA, 80 bp, synthetic construct
  source 1..80: mol_type = other DNA
ttctgaagtgtcagacaggaggtcctatagctcaagcaagagtagaattcgtagcatttttggaagatacaattctcaaa

SEQ ID NO: 38012 - DNA, 80 bp, synthetic construct
  source 1..80: mol_type = other DNA
acacctgaattttcaaataagtcagctgttctgcattttctacagccaactcaattgtttcactacaattttctcagtta

SEQ ID NO: 38013 - DNA, 80 bp, synthetic construct
  source 1..80: mol_type = other DNA
tgtcagtcatacctgatggtagcaatcctcggctattaaaatttgtgcctctcaagaaggggctagcagtggtgaagatt

SEQ ID NO: 38014 - DNA, 80 bp, synthetic construct
  source 1..80: mol_type = other DNA
ggtcttggcttgaaaagatattatttgacttaaaggtgcccactaaagatgaagaagtactgataaacatcagaaattca

SEQ ID NO: 38015 - DNA, 80 bp, synthetic construct
  source 1..80: mol_type = other DNA
ctaaaggctagatctgagtttgttagaaacaatgacaaactacttataagatctaaagaagagctgaaaaaatgtttcga

SEQ ID NO: 38016 - DNA, 80 bp, synthetic construct
  source 1..80: mol_type = other DNA
aatgtgctgtctatgtgtgtcatcaacaccttttgatgtcttgagaacaaacaggtcagtttgcactgtactatttgccg

SEQ ID NO: 38017 - DNA, 80 bp, synthetic construct
  source 1..80: mol_type = other DNA
acataaaactttcaaacaagtcaaatactctatatttcccacagtcaattcatctattttagtgctattctttcaaccat

SEQ ID NO: 38018 - DNA, 80 bp, synthetic construct
  source 1..80: mol_type = other DNA
tagtttgcctttaccatcctgcctttcttctcctttcaccgttcatttcagtttgattatttctagggtgtggggggaac

SEQ ID NO: 38019 - DNA, 80 bp, synthetic construct
  source 1..80: mol_type = other DNA
ccatcctgcctttcttctcctttcaccgttcatttcagtttgattatttctagggtgtggggggaacgatttctttgaga

SEQ ID NO: 38020 - DNA, 80 bp, synthetic construct
  source 1..80: mol_type = other DNA
gaaagccttcaactaagggaaaagataaagaaccagtggaacaggacaatcatcagaatgccattgaacatgagagctca

SEQ ID NO: 38021 - DNA, 80 bp, synthetic construct
  source 1..80: mol_type = other DNA
agcatcctggccttcaaggactatggagaaagaggaatagttgaagaaaatcatatgaggcttagtgaggaggatcaact

SEQ ID NO: 38022 - DNA, 80 bp, synthetic construct
  source 1..80: mol_type = other DNA
taaaagtcagaacataccgacaagagtcggcagggttctggactgcatgttcaactgcaaactatgtgttgagatatcag

SEQ ID NO: 38023 - DNA, 80 bp, synthetic construct
  source 1..80: mol_type = other DNA
ctttgtgtgctttttattttcagaatgagtgcagtaaaagggaggggcctagatgttcatttgcagcactgttaagcttg

SEQ ID NO: 38024 - DNA, 80 bp, synthetic construct
  source 1..80: mol_type = other DNA
gttcacgaggattggcaaaggataggaaaaaatatccttgttcgtgcaaacaatgagctaggtgatgtgtcactgaaggt

SEQ ID NO: 38025 - DNA, 80 bp, synthetic construct
  source 1..80: mol_type = other DNA
aacctagcactgtgacaccagctgcacatgaaggcgagcagtgtcaggagcaaataagcctagatgatctaatggcaagt

SEQ ID NO: 38026 - DNA, 80 bp, synthetic construct
  source 1..80: mol_type = other DNA
aatgcgctgtctgtataaaccatcaatacctttcaatgtcttaagggcaagtatgacagtttataccatgccatttgcca

SEQ ID NO: 38027 - DNA, 80 bp, synthetic construct
  source 1..80: mol_type = other DNA
acctctaaacttccaattaagtcagttgctctgcatctcttatagtcaatcaaatcgcttcatcacagttctcacaacta

SEQ ID NO: 38028 - DNA, 80 bp, synthetic construct
  source 1..80: mol_type = other DNA
tcgcttcatcacagttctcacaactattggttaacatttaccatcctgctatttcactttctttgctgtttatatcagtt

SEQ ID NO: 38029 - DNA, 80 bp, synthetic construct
  source 1..80: mol_type = other DNA
ttggttaacatttaccatcctgctatttcactttctttgctgtttatatcagtttcattatttccagggtgtggggggaa

SEQ ID NO: 38030 - DNA, 80 bp, synthetic construct
  source 1..80: mol_type = other DNA
ccatcctgctatttcactttctttgctgtttatatcagtttcattatttccagggtgtggggggaacgatttctttgaga

SEQ ID NO: 38031 - DNA, 80 bp, synthetic construct
  source 1..80: mol_type = other DNA
aacctttatttgagcaagtccagcctaaacatgacctctgaagacatttcacagcttctgatcgagatcaaaaggttata

SEQ ID NO: 38032 - DNA, 80 bp, synthetic construct
  source 1..80: mol_type = other DNA
tgctctacaagaagattctgaagtcgagccaatagccataatttgtgacggcatagagagcaacatgaagcagttatttg

SEQ ID NO: 38033 - DNA, 80 bp, synthetic construct
  source 1..80: mol_type = other DNA
gagggaaagccttcaaccaagaaaaaggatgaagatccaacaggacaggacagtcagcaaaatgctgctgaacatgaagg

SEQ ID NO: 38034 - DNA, 80 bp, synthetic construct
  source 1..80: mol_type = other DNA
ttcaagcatcttggctttcaaggactatggagagaggggaatagttgaggaaaatcacatgaggtttagtgaagaggatc

SEQ ID NO: 38035 - DNA, 80 bp, synthetic construct
  source 1..80: mol_type = other DNA
tcaatagatcaggggttaagttagtcaaggtgagacactgtgacattaacctatcagtaaagctgccatcaaacaaaaaa

SEQ ID NO: 38036 - DNA, 80 bp, synthetic construct
  source 1..80: mol_type = other DNA
aaacatctatatactgctcagttagagatgtggaagataacatcaagcattggaagcaaagagatttgtgccctgaagtg

SEQ ID NO: 38037 - DNA, 80 bp, synthetic construct
  source 1..80: mol_type = other DNA
aatactgccacagtttgaggttgacacaagaggaaccttaagtctggtagacaaggtcatagctgtggatcagttgacct

SEQ ID NO: 38038 - DNA, 80 bp, synthetic construct
  source 1..80: mol_type = other DNA
catcccagtgttagcttcaccaaggaggaggtcttaataaagcggttggagaaaaatttccttaagcaacacaatctgga

SEQ ID NO: 38039 - DNA, 80 bp, synthetic construct
  source 1..80: mol_type = other DNA
catcctctagtgatgaactgcaggactatgaagaccttgctttagcacttactagtgcggaagaaccgtatagacggtct

SEQ ID NO: 38040 - DNA, 80 bp, synthetic construct
  source 1..80: mol_type = other DNA
aatcatggaaacagtgaacctcatattctttgctgcactttcagctccttggtgtttacactacaaagcactagagtctt

SEQ ID NO: 38041 - DNA, 80 bp, synthetic construct
  source 1..80: mol_type = other DNA
aaactcttagtgtgtttatttcgaaaagatgacgaagaactaacaaacagctcaagtttaaaactcgggttcttagtgaa

SEQ ID NO: 38042 - DNA, 80 bp, synthetic construct
  source 1..80: mol_type = other DNA
gacggtcttacaaacccacacctaaaagaggcaatacttaatgtaggattggattgtcttaccaatatgcgaaaccttga

SEQ ID NO: 38043 - DNA, 80 bp, synthetic construct
  source 1..80: mol_type = other DNA
aacatgccgcttgcatgcgccattaatgcccttcagtgtctcaagtacaaatgaggcagttttaattgcaccatattgac

SEQ ID NO: 38044 - DNA, 80 bp, synthetic construct
  source 1..80: mol_type = other DNA
atcaaagccttcaaacaagccagctgctctgcactccccactgtcaatttaactgctttaattgattcatttcactacat

SEQ ID NO: 38045 - DNA, 80 bp, synthetic construct
  source 1..80: mol_type = other DNA
taccaatcctctctttctctctctttctttgccactcatttcagtttcattaccattgttattattttggggtgtggtgg

SEQ ID NO: 38046 - DNA, 80 bp, synthetic construct
  source 1..80: mol_type = other DNA
ctaattcaacaatttaaccaaatgataattactatgaatggaaatgagttccaaactggaggaattggcaatctaccaat

SEQ ID NO: 38047 - DNA, 80 bp, synthetic construct
  source 1..80: mol_type = other DNA
acactagtatcttacgtcagcactgaaacaatccctaagtttctacttgcatttcttctttatgaagaagtgttgatgaa

SEQ ID NO: 38048 - DNA, 80 bp, synthetic construct
  source 1..80: mol_type = other DNA
cttaatcaaccagtgtaaggcagtaaaggaactcattaacagcacaggactctcagatctggaactggagagcttgctca

SEQ ID NO: 38049 - DNA, 80 bp, synthetic construct
  source 1..80: mol_type = other DNA
aacacgctgtccatatgaatcaccaatacctttcaatgtcttaaaggcaagtgagacagtttataccatgccacctgcca

SEQ ID NO: 38050 - DNA, 80 bp, synthetic construct
  source 1..80: mol_type = other DNA
acctccgaaccttcagccaagttagctgctctgcatcacccacaatcaacccaattgcttcaccacaattccctcaagtg

SEQ ID NO: 38051 - DNA, 80 bp, synthetic construct
  source 1..80: mol_type = other DNA
ccacaattccctcaagtgctggccaatctttgctatactgctattacactttctttattgttctcatcagttttattatt

SEQ ID NO: 38052 - DNA, 80 bp, synthetic construct
  source 1..80: mol_type = other DNA
ctggccaatctttgctatactgctattacactttctttattgttctcatcagttttattatttaattgtttccagggtgt

SEQ ID NO: 38053 - DNA, 80 bp, synthetic construct
  source 1..80: mol_type = other DNA
ctattacactttctttattgttctcatcagttttattatttaattgtttccagggtgtggggggaacgatttctttgaga

SEQ ID NO: 38054 - DNA, 80 bp, synthetic construct
  source 1..80: mol_type = other DNA
tctcaaagacatcaatcccccctttacccacattgtcgcagacggctccagtagtggttctttgtccttgtcaaactatg

SEQ ID NO: 38055 - DNA, 80 bp, synthetic construct
  source 1..80: mol_type = other DNA
gatttcctgagaagcctcgactggactcaggtgattgccggtcagtacgtgaccaacccaaggttcaatatctctgatta

SEQ ID NO: 38056 - DNA, 80 bp, synthetic construct
  source 1..80: mol_type = other DNA
tctttgctgttcatgtccgttttattatttctggggtgtggggggaacgatctgaagagcacacttatgaactcaagtaa

SEQ ID NO: 38057 - DNA, 80 bp, synthetic construct
  source 1..80: mol_type = other DNA
tcaaagtgactataaaaccctgaacagtaacaaaatataaaactaataaaaatcaaacgaataccataattggcaatcgg

SEQ ID NO: 38058 - DNA, 80 bp, synthetic construct
  source 1..80: mol_type = other DNA
tttaagaagcttaagtacctacatctcttccataattctccgaacccatagggacgtaggagatgttcaaagtgactata

SEQ ID NO: 38059 - DNA, 80 bp, synthetic construct
  source 1..80: mol_type = other DNA
aaaaaggcgctgtcagtttcttactgctctactctgcaaagcaagagattaataacccatcatggattctgtgtacgtgg

SEQ ID NO: 38060 - DNA, 80 bp, synthetic construct
  source 1..80: mol_type = other DNA
tcaaagtgactataaaaccctgaacagtaataaaatataaaaaccaataaaaatcataaaatagaaaaccacaaatagaa

SEQ ID NO: 38061 - DNA, 80 bp, synthetic construct
  source 1..80: mol_type = other DNA
cctgaatagtaacaaaatataaaactaataaaaatcaaacgaataccataattctccgaacccatagggacgtaggagat

SEQ ID NO: 38062 - DNA, 80 bp, synthetic construct
  source 1..80: mol_type = other DNA
cgaccaaggcggccacatattacgaggctgcggcatatctatggaacgaacagcagcccctgttctggttgcaggctctt

SEQ ID NO: 38063 - DNA, 80 bp, synthetic construct
  source 1..80: mol_type = other DNA
atcccgctggccgccttgatcgtcctgtgcaactgtctgaaactcttgccatgctgctgtaagaccctggcttttttagc

SEQ ID NO: 38064 - DNA, 80 bp, synthetic construct
  source 1..80: mol_type = other DNA
ttgtgtttgatctctcagggtcttctgcgctgcgcataggtacgcactacatggctgcgtgagacacacgtagcctacca

SEQ ID NO: 38065 - DNA, 80 bp, synthetic construct
  source 1..80: mol_type = other DNA
aggaatgggaagtggaacatgcttcaataatggcgggtatctgtaaccaccaaggacctcaaacacaaggttaggtaact

SEQ ID NO: 38066 - DNA, 80 bp, synthetic construct
  source 1..80: mol_type = other DNA
tcaagcatggatctgatcgaaacagtgaacgcatgcgtaaaattgcaaaagcgagtacttggtttggctccaaatacgaa

SEQ ID NO: 38067 - DNA, 80 bp, synthetic construct
  source 1..80: mol_type = other DNA
ccttgactggactcaaagacatcaatcccccctttacccacgttgacacagacagcttcagtagtggtttttctgtcctt

SEQ ID NO: 38068 - DNA, 80 bp, synthetic construct
  source 1..80: mol_type = other DNA
cagtttacttttactgtcttaccattttccttcctttacctttcatttcagtttgattatttctagggtgtggggggaac

SEQ ID NO: 38069 - DNA, 80 bp, synthetic construct
  source 1..80: mol_type = other DNA
tcagtttgattatttctagggtgtggggggaacgatttctttacaggcaatcttggcttcaactgggattcagattgaac

SEQ ID NO: 38070 - DNA, 80 bp, synthetic construct
  source 1..80: mol_type = other DNA
tagggtgtggggggaacgatttctttacaggcaatcttggcttcaactgggattcagattgaacatgccgtctgtgtgta

SEQ ID NO: 38071 - DNA, 80 bp, synthetic construct
  source 1..80: mol_type = other DNA
gtggaacatgttggtaacggaaatattcaatcaattagatccaataaagttaaatgaggatagctatgttttgttaaatt

SEQ ID NO: 38072 - DNA, 80 bp, synthetic construct
  source 1..80: mol_type = other DNA
tatctgactttgatgagtatgtagctacgtcaagctgtttgaactctgtaagtaaggatgcgtctacgtattcgctacac

SEQ ID NO: 38073 - DNA, 80 bp, synthetic construct
  source 1..80: mol_type = other DNA
aggcgtcggtttaggtcagggttacgtgacaggttcagtggaaactacacctattctcttaacgcaggtagctgatctta

SEQ ID NO: 38074 - DNA, 80 bp, synthetic construct
  source 1..80: mol_type = other DNA
ctacatttgaagctgcatataaatcaaggaagacagtaatttgttatgatttagcctgtaatcaaacacattgtcttcct

SEQ ID NO: 38075 - DNA, 80 bp, synthetic construct
  source 1..80: mol_type = other DNA
ctctttccctggctcaaagacatcaatcccccctttacccacgttgacacagatagcttcagtagtggttctttgtcctc

SEQ ID NO: 38076 - DNA, 80 bp, synthetic construct
  source 1..80: mol_type = other DNA
ccacgggcttgacactgcctaccagtttggagcaggcaatgcgcaaaggactagtcgagggtgtggtcatctccaaggag

SEQ ID NO: 38077 - DNA, 80 bp, synthetic construct
  source 1..80: mol_type = other DNA
atggaggttctgtactcattgtcaaaaactcttaaagatgctagggacaaaattgttgaaggtacattatattctaatgt

SEQ ID NO: 38078 - DNA, 80 bp, synthetic construct
  source 1..80: mol_type = other DNA
tttcacagtagcttccattagaagcatgttgattaagtgaggaccagactaaacatctggtatccaagcttaattggcat

SEQ ID NO: 38079 - DNA, 80 bp, synthetic construct
  source 1..80: mol_type = other DNA
taggtactagcataccgaactcttccacaattctccgtacccatagggacgtaggagatgttcaaagtgactataaaacc

SEQ ID NO: 38080 - DNA, 80 bp, synthetic construct
  source 1..80: mol_type = other DNA
cctgaatagtaacaaaatataaaactaataaaaatcaaacgaataccataattggcaatcggaagagttcggtgtgctac

SEQ ID NO: 38081 - DNA, 80 bp, synthetic construct
  source 1..80: mol_type = other DNA
gagttcggctgcttttaagaagcttagtacctacgtctcttccatttgccaattatggtactaagcttcttaaaagcagc

SEQ ID NO: 38082 - DNA, 80 bp, synthetic construct
  source 1..80: mol_type = other DNA
tctttaaagaaaccagagattaaaaggggttgctatcgcaccatcggtgtttttagatataaaagtagatgttatgtggg

SEQ ID NO: 38083 - DNA, 80 bp, synthetic construct
  source 1..80: mol_type = other DNA
aatcagtgggtaaggcctacaaaatcatctcattaaagtacacccgcaaagtttgtatccaattgggcacagagcaaact

SEQ ID NO: 38084 - DNA, 80 bp, synthetic construct
  source 1..80: mol_type = other DNA
gatgctagagacaagattgtcgaaggcacgttatactctaatgtgagtgatctaattcaacaatttaaccaaatgataat

SEQ ID NO: 38085 - DNA, 80 bp, synthetic construct
  source 1..80: mol_type = other DNA
ctagaagacccaggaatggcgtattttccttatattgcatctgttctaacagttttgttcactttacatagagcgtcaat

SEQ ID NO: 38086 - DNA, 80 bp, synthetic construct
  source 1..80: mol_type = other DNA
actggcggattataaagaacaaattactactaaagatgaaatagaaaagcagatggacagagtcgccaaagaaatgagac

SEQ ID NO: 38087 - DNA, 80 bp, synthetic construct
  source 1..80: mol_type = other DNA
atgtgagaatcactctaatgaacagtacattgcatacaatactagaagacccaggaatggcgtattttccttatattgca

SEQ ID NO: 38088 - DNA, 80 bp, synthetic construct
  source 1..80: mol_type = other DNA
tccccggagggacccccccatttcttactgctctactctgcaaagcaagagattaataacccatcatggatcctgtgtac

SEQ ID NO: 38089 - DNA, 80 bp, synthetic construct
  source 1..80: mol_type = other DNA
gctttttacccaccccccctcatcctctcccctctatttaaacaactgctccactactacatccttatctctcacacccc

SEQ ID NO: 38090 - DNA, 80 bp, synthetic construct
  source 1..80: mol_type = other DNA
ccctctattccgctaagcgatgtctctacccatctctcaccaatatacatcaacccctccatcactctcctcactttcta

SEQ ID NO: 38091 - DNA, 80 bp, synthetic construct
  source 1..80: mol_type = other DNA
ttccctacccaccttacatccatccccctcacactgctcttatccttccaaacctacctcattaataccccccttaccat

SEQ ID NO: 38092 - DNA, 80 bp, synthetic construct
  source 1..80: mol_type = other DNA
attcctctcatcaacatccctcctccacatttcccttcttctatcttcttatcccttatccttacccacattctcatcta

SEQ ID NO: 38093 - DNA, 80 bp, synthetic construct
  source 1..80: mol_type = other DNA
tctttcatcatcacatcttatctatctctcttattcttcttccattattctcctcttttcttttcttttctattatctct

SEQ ID NO: 38094 - DNA, 80 bp, synthetic construct
  source 1..80: mol_type = other DNA
ttcattgttattcattttttcccttttctctttccccttctcattcccatacctatttgctttcaccttttattctctgc

SEQ ID NO: 38095 - DNA, 80 bp, synthetic construct
  source 1..80: mol_type = other DNA
cccaaccaccctccctaccctctctgcttccagtctttctcctcaccccctctccaaacttcaattcctaacccctttct

SEQ ID NO: 38096 - DNA, 80 bp, synthetic construct
  source 1..80: mol_type = other DNA
aacattctaccttccctctacttcctcttctctatacccctactaaccattccccaatctcacactcttaacctccccca

SEQ ID NO: 38097 - DNA, 80 bp, synthetic construct
  source 1..80: mol_type = other DNA
tcttccatctacagtctacatccactattccacaactcccctgatcctcaatcctctctgtacgatatatcaagcacctg

SEQ ID NO: 38098 - DNA, 80 bp, synthetic construct
  source 1..80: mol_type = other DNA
ctattccacaactcccctgatcctcaatcctctctgtaccatatatcaagcacctgacatagcttctctatttttcccac

SEQ ID NO: 38099 - DNA, 80 bp, synthetic construct
  source 1..80: mol_type = other DNA
tctacatgctccattggggaaaggaagcagtaaaccactttcaccttggtgatgacatggatcctgagctaaggcagtta

SEQ ID NO: 38100 - DNA, 80 bp, synthetic construct
  source 1..80: mol_type = other DNA
aactctcaaagatgctagagacaaaattgtcgaaggcacattatactccaatgtaagtgatctaattcaacaatttaatc

SEQ ID NO: 38101 - DNA, 80 bp, synthetic construct
  source 1..80: mol_type = other DNA
gctaaccacttggtatccgactttggtgagtatgtagctacgtcaagctgcttgaactctgtaagtaaggatgcgtctac

SEQ ID NO: 38102 - DNA, 80 bp, synthetic construct
  source 1..80: mol_type = other DNA
tcacattgaacagatcacaaccggctcatgacaacttgatgggtacgatgtggcttaatgcgggatcagaaattcaggtt

SEQ ID NO: 38103 - DNA, 80 bp, synthetic construct
  source 1..80: mol_type = other DNA
atatctgaactttcaaataggtcagctgttctgcactttccacagccaaatcaactgctccaccacaacttcccaaccgc

SEQ ID NO: 38104 - DNA, 80 bp, synthetic construct
  source 1..80: mol_type = other DNA
ggtgtggggggaacgatttctcctcacttactccgtagctccagcttcaccagatctcggaatggaccccaactgctcct

SEQ ID NO: 38105 - DNA, 80 bp, synthetic construct
  source 1..80: mol_type = other DNA
gggaacgatttctcctcacttactccgtagctccagcttcaccagatctcggaatggaccccaactgctcctgctccacc

SEQ ID NO: 38106 - DNA, 80 bp, synthetic construct
  source 1..80: mol_type = other DNA
gctccaccggcggctcctgcacttgcaccagctcctgcgcctgcaagaactgcaagtgcacctcctgcaagaagagctgc

SEQ ID NO: 38107 - DNA, 80 bp, synthetic construct
  source 1..80: mol_type = other DNA
tgctcctgctgccctgccggatgtgagaagtgtgccaaggactgtgtgtgcaaaggtgaagagggggccaaggcagaggc

SEQ ID NO: 38108 - DNA, 80 bp, synthetic construct
  source 1..80: mol_type = other DNA
cgagaaatgcagctgctgccagtgaggacccagaccctcccacacagcctatgtaaatagtgctgggtgtcgctggtgtg

SEQ ID NO: 38109 - DNA, 80 bp, synthetic construct
  source 1..80: mol_type = other DNA
cacaactgttgttccccccccccccccggccccctgctccgggagtggaaaaaatcccatccacagtccggaaaagagtc

SEQ ID NO: 38110 - DNA, 80 bp, synthetic construct
  source 1..80: mol_type = other DNA
ccccccccccccggccccctgctccggggggggaaaaaatcgcatacacagtccgaaaaggggtcgggtggagaaaaggg

SEQ ID NO: 38111 - DNA, 80 bp, synthetic construct
  source 1..80: mol_type = other DNA
aagaattaatcaaaaaaaacatagacgaagttttgcttactgaggatggaaatctgatcttttgctggctaaagacgatc

SEQ ID NO: 38112 - DNA, 80 bp, synthetic construct
  source 1..80: mol_type = other DNA
agaataatcattctctacatgctccattggggaaaagaagcagtaaaccactttcaccttggtgatgacatggatcctga

SEQ ID NO: 38113 - DNA, 80 bp, synthetic construct
  source 1..80: mol_type = other DNA
acgggacaaataaaaatgtctcttcaagggattcacctaagtgatctgtcatataaacatgctatattaaaagagtctca

SEQ ID NO: 38114 - DNA, 80 bp, synthetic construct
  source 1..80: mol_type = other DNA
gtatcatgcgacggactgcaatataaagttaccattttttgtaaggtctgtatctacttttattatgcaaggaagcaaat

SEQ ID NO: 38115 - DNA, 80 bp, synthetic construct
  source 1..80: mol_type = other DNA
tatcaccctacatgaacagcagcttgttactgcacggcaaaagcttaaagatgccgagagagcagttgaagtggacccgg

SEQ ID NO: 38116 - DNA, 80 bp, synthetic construct
  source 1..80: mol_type = other DNA
tggacacgcagttcaatgacgtttcttttacgaatagaccagctgtagactggaatattcaaagtctgctcacatcaaat

SEQ ID NO: 38117 - DNA, 80 bp, synthetic construct
  source 1..80: mol_type = other DNA
tgtggtgtcaaaaaatagcgatgcttattgccgcgttcgctgccaagatctagatcgacatcggatccaaaaaaaggatt

SEQ ID NO: 38118 - DNA, 80 bp, synthetic construct
  source 1..80: mol_type = other DNA
tcgctgccaagatctagatcgacatcggatccaaaaaaaggattgcttcgaaaggtgcgaaaaaataagcaataaaaccc

SEQ ID NO: 38119 - DNA, 80 bp, synthetic construct
  source 1..80: mol_type = other DNA
cactccttataccataaatgcgccaattatatctctggctgtacgaatctctactgatgattacgatgatatgcgatctg

SEQ ID NO: 38120 - DNA, 80 bp, synthetic construct
  source 1..80: mol_type = other DNA
tatcttagacgtgttggctgctgctattcgaactgaaggatcacggcctacacgagtgattgaaagacgcgttttggaac

SEQ ID NO: 38121 - DNA, 80 bp, synthetic construct
  source 1..80: mol_type = other DNA
acaattggttgacgatttacgtttgaaaagtctcatttctgatttatcaatcgcaaatttagccgccgtcgacactgcaa

SEQ ID NO: 38122 - DNA, 80 bp, synthetic construct
  source 1..80: mol_type = other DNA
taaaggggttgtaacttgtatgtcaggtatggattctgaacatagatttacagtagaactcaaaacacgcacttgcggaa

SEQ ID NO: 38123 - DNA, 80 bp, synthetic construct
  source 1..80: mol_type = other DNA
gaaccatactaattccgatgcctgccggtagaaatagagaaggtgatttaatagatgtatcagctgaaatgatggcagat

SEQ ID NO: 38124 - DNA, 80 bp, synthetic construct
  source 1..80: mol_type = other DNA
tagattttatggacgatgataaaattattcaaactgagactggagttggagtgtattcctttcctatgtgcaataggatc

SEQ ID NO: 38125 - DNA, 80 bp, synthetic construct
  source 1..80: mol_type = other DNA
tggtttagctccaaatacgaatttaaatacagctgaacaaagcgtgttaaatgattacaacgcactgccttctcgagtga

SEQ ID NO: 38126 - DNA, 80 bp, synthetic construct
  source 1..80: mol_type = other DNA
taaatccatggaatacccaaaaggatgatgataatttaggaacggtgcatatgatcaattgggctcaagggactgctcca

SEQ ID NO: 38127 - DNA, 80 bp, synthetic construct
  source 1..80: mol_type = other DNA
ctatatcttttatgtttgaaactcgtcgaacgtttacagaaggaaactatcaacatttgtcaagatgcgctcctaaagcg

SEQ ID NO: 38128 - DNA, 80 bp, synthetic construct
  source 1..80: mol_type = other DNA
tgtgatgaaactgagaaattcttagaggcaatttacagcacccttatccaagtttggatcatggtgtgcaaaagcatgac

SEQ ID NO: 38129 - DNA, 80 bp, synthetic construct
  source 1..80: mol_type = other DNA
ccaagtttggatcatggtgtgcaaaagcatgaccaactttgaccagcctaccgggtcagacgaacgtagagttgcaaaat

SEQ ID NO: 38130 - DNA, 80 bp, synthetic construct
  source 1..80: mol_type = other DNA
agtgcaggaaactatcaccctacatgaacagcagcttgttactgcacggcaaaagcttaaagatgccgagagagcagttg

SEQ ID NO: 38131 - DNA, 80 bp, synthetic construct
  source 1..80: mol_type = other DNA
ggctttttttatgaaaagtcttgtgtgagccatggcgacttttaaagacgcttgttatcactataaaaagttgaataagt

SEQ ID NO: 38132 - DNA, 80 bp, synthetic construct
  source 1..80: mol_type = other DNA
tacaaagaagatacaaagtgcaataatatttgactggtttgacacaagatatatgagagaaacaccaatgacaacgtcaa

SEQ ID NO: 38133 - DNA, 80 bp, synthetic construct
  source 1..80: mol_type = other DNA
caacaaaccaacttcggacgctaaataagaagaatgagcttatagatgagtacgatttagaactttcagatgttgaataa

SEQ ID NO: 38134 - DNA, 80 bp, synthetic construct
  source 1..80: mol_type = other DNA
gttgaataagtatggtcacaactacgccagcacaagaccgtctgcactagagtagcgcctaggcagcataaaatgtgacc

SEQ ID NO: 38135 - DNA, 80 bp, synthetic construct
  source 1..80: mol_type = other DNA
gattgctgtcaatatacaaatttgacatattgcaggggatgcgccctataccatgtatgtcagtggtgcagtcagtataa

SEQ ID NO: 38136 - DNA, 80 bp, synthetic construct
  source 1..80: mol_type = other DNA
caggtgtttcttagatgaagaacctcatttgttaagaatgcgaacatttaaagatgtaataacaaaagaagacatagaag

SEQ ID NO: 38137 - DNA, 80 bp, synthetic construct
  source 1..80: mol_type = other DNA
gactgctaaccatgtatgaaacattgttcccaataaatgagaagttagtgaataaattcataaactctgtaaagcagcgt

SEQ ID NO: 38138 - DNA, 80 bp, synthetic construct
  source 1..80: mol_type = other DNA
aagtgtagaaatgagtatctgttagaatggtataatcatttgctaatgccagtaacattatacgcaactgcatcagtata

SEQ ID NO: 38139 - DNA, 80 bp, synthetic construct
  source 1..80: mol_type = other DNA
catatgaatgattgtgaatggaataaagcatgtacgcttatagttgatattagaaattatattagtattatgaactcatc

SEQ ID NO: 38140 - DNA, 80 bp, synthetic construct
  source 1..80: mol_type = other DNA
ctacactgagcattatagtgtgtcgcaaagatgtaaattgtttactaagtataaatttgggattatatcaagattagtga

SEQ ID NO: 38141 - DNA, 80 bp, synthetic construct
  source 1..80: mol_type = other DNA
aaccgaattacattttttccagccataaatcatgcgcattaaatgtacataattgtaaatggtgccaaatcaacaaccat

SEQ ID NO: 38142 - DNA, 80 bp, synthetic construct
  source 1..80: mol_type = other DNA
tacaaagtgtgggaagattttagacttaagaaaatatataataatataatggattttatcagggcacttgtgaagtcgaa

SEQ ID NO: 38143 - DNA, 80 bp, synthetic construct
  source 1..80: mol_type = other DNA
taaacagcttagtactcaaactaggagcaaatgatgaatggaggccagcaccagtgacaaaatataaaggatggtgttta

SEQ ID NO: 38144 - DNA, 80 bp, synthetic construct
  source 1..80: mol_type = other DNA
cggaaatgttggacattgttcgtcacaggaatcagtgtataaatatataccagatatatttttaatctgtaaaacggaaa

SEQ ID NO: 38145 - DNA, 80 bp, synthetic construct
  source 1..80: mol_type = other DNA
aatggaatgaagctgtcgaaatcttatttaattatctagaaccagtggatataaatggaacagagtatgtattattggac

SEQ ID NO: 38146 - DNA, 80 bp, synthetic construct
  source 1..80: mol_type = other DNA
tatgaagtgaactgggaagtgagaggactagtcatgcaaaatatggatgggaaagtaccgagaattttgaatatgaatga

SEQ ID NO: 38147 - DNA, 80 bp, synthetic construct
  source 1..80: mol_type = other DNA
ggtataataatagtgtaccctctgtgcaagtctgggaaacctatggggagcagccaatccagtttgcaatctcagataca

SEQ ID NO: 38148 - DNA, 80 bp, synthetic construct
  source 1..80: mol_type = other DNA
tgaagtcgtgagttttttcaatcgagaatggccatacaacataacaataactccaatttcaaggggtaaagtagctgtat

SEQ ID NO: 38149 - DNA, 80 bp, synthetic construct
  source 1..80: mol_type = other DNA
ccaacaattactcgagaactattgtgccgttttcaactaatgatgaactttttttaattattaacaagaaattgctgcaa

SEQ ID NO: 38150 - DNA, 80 bp, synthetic construct
  source 1..80: mol_type = other DNA
tgcaatggaggcttgcttgatcatagaatgagagttccagatctctaaccagacacagtcgatcactatattgaataccc

SEQ ID NO: 38151 - DNA, 80 bp, synthetic construct
  source 1..80: mol_type = other DNA
ttgttaccgttggggccgtagtaatagcattactattaactacattgatattcagctgtgtttgtaattgttatctgtat

SEQ ID NO: 38152 - DNA, 80 bp, synthetic construct
  source 1..80: mol_type = other DNA
tcaaaactgagaaatggaattcaaatcgtttctagaaacagcaaaggggaagaaagacatcgtaccactgtacaaagacc

SEQ ID NO: 38153 - DNA, 80 bp, synthetic construct
  source 1..80: mol_type = other DNA
gcaacttcgatcagacatgcttgtctaagaaacctgaaaaaaccacaaagatactgtacccttctccaattcatgaatcc

SEQ ID NO: 38154 - DNA, 80 bp, synthetic construct
  source 1..80: mol_type = other DNA
ccgcatgtggcgggtgagtcgatcttaatcgaagatgtgtgtccatttaatcatgaacatttttgtggtgccgtccacat

SEQ ID NO: 38155 - DNA, 80 bp, synthetic construct
  source 1..80: mol_type = other DNA
cccagcgcaaagcaacatgaatccaagaggcagaatcgtacatgcaacagcagaaaaaattgtttggccaagtggtgtga

SEQ ID NO: 38156 - DNA, 80 bp, synthetic construct
  source 1..80: mol_type = other DNA
aatccattatagttgaaaataaagttattaacggatctgtgtttgtgaagtgtaggtgtgatcaattgtatccaacagtt

SEQ ID NO: 38157 - DNA, 80 bp, synthetic construct
  source 1..80: mol_type = other DNA
atagatcagcaatcagacttctttttcctcacatgctgctctaatgacaccaagtcaattcaattgtgtgttaatgagcg

SEQ ID NO: 38158 - DNA, 80 bp, synthetic construct
  source 1..80: mol_type = other DNA
atacgattgtccaagctgtggaaaaaagttagatggtttactgttggaaaaggaatgttgacaaaaacaaaattttattt

SEQ ID NO: 38159 - DNA, 80 bp, synthetic construct
  source 1..80: mol_type = other DNA
cagtacaaatatccattcccaacactcaagcatacatttgcagggcacgtcaacagcttcatttactacccaacatatca

SEQ ID NO: 38160 - DNA, 80 bp, synthetic construct
  source 1..80: mol_type = other DNA
gccggcgcaaatttgtccatcttgctcaccattcagagacttggtatcaactatgtcattactgaataaagttgaattca

SEQ ID NO: 38161 - DNA, 80 bp, synthetic construct
  source 1..80: mol_type = other DNA
ttggaccagatctcaaggagatgcgaaataactatgggtggaagcatgctatagaaaatatttgtgaacaagcttttaga

SEQ ID NO: 38162 - DNA, 80 bp, synthetic construct
  source 1..80: mol_type = other DNA
gctttaaatttcacacatatacttagtagaattttcattcactcaaaagttgagccatcgatgtcaataaatacattgac

SEQ ID NO: 38163 - DNA, 80 bp, synthetic construct
  source 1..80: mol_type = other DNA
tgaatttaaaataatcccgattaaccgcacgaaagtgctttttaaagactattacagagggaagtctatcattttccatg

SEQ ID NO: 38164 - DNA, 80 bp, synthetic construct
  source 1..80: mol_type = other DNA
tctacacaatcagatactattgacattaactgactggcatttcctatagactgatggttccagacatctaacctatcctc

SEQ ID NO: 38165 - DNA, 80 bp, synthetic construct
  source 1..80: mol_type = other DNA
cattaactgactggcatttcctatagactgatggttccagacatctaacctatcctcactacatatctaaataaaaaccc

SEQ ID NO: 38166 - DNA, 80 bp, synthetic construct
  source 1..80: mol_type = other DNA
ggagactgaaaagaacgaatggagtatcatcacttcttgagcgaaatcttaggcaaaacggatcttctgccaaaatatat

SEQ ID NO: 38167 - DNA, 80 bp, synthetic construct
  source 1..80: mol_type = other DNA
caatccagcacaatcatcgaggaagcctgagaaagtatccttccttaagtatgaaaattctttgcgtgagtgtcctgaga

SEQ ID NO: 38168 - DNA, 80 bp, synthetic construct
  source 1..80: mol_type = other DNA
ttcaattttaattagcgatatttgcccactcaatcatgaacatttttgcggtggtattcacatacctcaacaagaaaaca

SEQ ID NO: 38169 - DNA, 80 bp, synthetic construct
  source 1..80: mol_type = other DNA
aggtaggcttgcacacgctgcagcggataagataatatggccttgtggactaaaatcaataaaaatcaatgacagaaaaa

SEQ ID NO: 38170 - DNA, 80 bp, synthetic construct
  source 1..80: mol_type = other DNA
tatattcgttaaatgccgttgcggtaatctatatccaacatggatacctggagaggaaaacttctttttcatcacatgtt

SEQ ID NO: 38171 - DNA, 80 bp, synthetic construct
  source 1..80: mol_type = other DNA
caccgctacagttaagttaggaaaaactgatggggacaaatgtcaaaactgttcaaaatttaacagatggtactttccag

SEQ ID NO: 38172 - DNA, 80 bp, synthetic construct
  source 1..80: mol_type = other DNA
taattcaaatataagtcaatataaaattcaatttttctgtcctgcatgtactccaattcgtgacttagtatcaaatatga

SEQ ID NO: 38173 - DNA, 80 bp, synthetic construct
  source 1..80: mol_type = other DNA
tcatatcaactctcaaaattcaaaccttttcatttcagatagtaagacagcagtgtttcatacacaacacattttattag

SEQ ID NO: 38174 - DNA, 80 bp, synthetic construct
  source 1..80: mol_type = other DNA
tgatatgctaaagaattatgtgtggaaaaggaatcttccgaacaatagtgaaattgcgtttcgtgctcttaattcacctt

SEQ ID NO: 38175 - DNA, 80 bp, synthetic construct
  source 1..80: mol_type = other DNA
ttccataaccgcctacagtaaaattgatgtagacgtgaattcgatgacagttacagagcttgttgcttcagtgaacagaa

SEQ ID NO: 38176 - DNA, 80 bp, synthetic construct
  source 1..80: mol_type = other DNA
ttccataactacctacaataaaattgacacagacgtgaattcaatgacagttactgagcttgttgcttcagtgaatagaa

SEQ ID NO: 38177 - DNA, 80 bp, synthetic construct
  source 1..80: mol_type = other DNA
tgatatgctaaaaaattatgagtggaaaaggaatcttccaaacaatagtgaaatcgcatttcgcgcccttaattcgcctt

SEQ ID NO: 38178 - DNA, 80 bp, synthetic construct
  source 1..80: mol_type = other DNA
tgaatttaagataattccagttaaccgtacaaaagtgctttttaaagactattacagagggaaatctatcatatttcatg

SEQ ID NO: 38179 - DNA, 80 bp, synthetic construct
  source 1..80: mol_type = other DNA
ctaaaaagaacgaatggagtatcatcacttcttgagcgaaatctcagacaaaacggatcttctgccaaaatatatgtcaa

SEQ ID NO: 38180 - DNA, 80 bp, synthetic construct
  source 1..80: mol_type = other DNA
caatccagcacaatcatcgaagaagcctgaaaaaatatcattcattatgtatgataattccttgcatgaatgtcctgaga

SEQ ID NO: 38181 - DNA, 80 bp, synthetic construct
  source 1..80: mol_type = other DNA
aggtagactcgcacacgccacagcagataaaataatatggccttgtggactaagatcaatgaaaatcaatgacagagaaa

SEQ ID NO: 38182 - DNA, 80 bp, synthetic construct
  source 1..80: mol_type = other DNA
ataccgctgcagttaagttgggaaagactgatggagacaaatgtcaaaactgttcaaaacttaacagatggtacttccca

SEQ ID NO: 38183 - DNA, 80 bp, synthetic construct
  source 1..80: mol_type = other DNA
taactcagatgtaagtcaatataaaacgcgattcttctgtcctgcatgtactccaattcgcgacttggtatcaaatatga

SEQ ID NO: 38184 - DNA, 80 bp, synthetic construct
  source 1..80: mol_type = other DNA
tcacatcaactctcagaattcaaatctttttatttcagacagtaagacagcagtatttcacacacaacatattttattag

SEQ ID NO: 38185 - DNA, 80 bp, synthetic construct
  source 1..80: mol_type = other DNA
gatgagtatgtagctacgtcaagctgtttgaactctgtaagtaaggatgcgtctacgtattcgctacacagatagccgga

SEQ ID NO: 38186 - DNA, 80 bp, synthetic construct
  source 1..80: mol_type = other DNA
gccttaggattaaagaatcctatcacaccagaatatagagtggtaaatttagaatctgcttgcaactcagtcaatagaga

SEQ ID NO: 38187 - DNA, 80 bp, synthetic construct
  source 1..80: mol_type = other DNA
tattcattgtcaagaactcttaaagatgctagggataagattgttgaaggtacattatattctaatgttagcgatcttat

SEQ ID NO: 38188 - DNA, 80 bp, synthetic construct
  source 1..80: mol_type = other DNA
tcattgtcaaaaactctcaaagatgctagggataaaattgttgaaggtacattatattctaatgttagtgatctcattca

SEQ ID NO: 38189 - DNA, 80 bp, synthetic construct
  source 1..80: mol_type = other DNA
tccttgtcaaaaactcttaaagatgctagagacaaaattgtcgaaggcacattatactccaatgtgagtgatctaattca

SEQ ID NO: 38190 - DNA, 80 bp, synthetic construct
  source 1..80: mol_type = other DNA
actttggtgagtatgtagctacgtcaagctgtttgaactctgtaagtaaggatacgtctacgtattcgctacacagatac

SEQ ID NO: 38191 - DNA, 80 bp, synthetic construct
  source 1..80: mol_type = other DNA
gctggattcgactattcatgtgcaatcaatgcgccagccaatacacaacaatttgagcacgttgtacagctccgaagagt

SEQ ID NO: 38192 - DNA, 80 bp, synthetic construct
  source 1..80: mol_type = other DNA
atggcaactatggaggaattacagagagagatcaatgcccatgagggtcaactggtgatagccaggcagaaggtaagaga

SEQ ID NO: 38193 - DNA, 80 bp, synthetic construct
  source 1..80: mol_type = other DNA
gcaaccggaaagaaccttggaaaggaacaggatccaacaggggttgaacctggagaccatctgaaggaaagatcaatgct

SEQ ID NO: 38194 - DNA, 80 bp, synthetic construct
  source 1..80: mol_type = other DNA
aggccagacagatgattagcccagtcatgagtgtaattggtttcctggcactggctaaagactggagtgaccgaattgag

SEQ ID NO: 38195 - DNA, 80 bp, synthetic construct
  source 1..80: mol_type = other DNA
catggaggccctgcaacaaacagggactatctacggcaaagacaggtggcactgggtaatatggaaacaaaagagtcaaa

SEQ ID NO: 38196 - DNA, 80 bp, synthetic construct
  source 1..80: mol_type = other DNA
tgattacgaaactcattctaaatatttagctggtgcaacatatctgatgggcacaactttttcagaagattcatttattg

SEQ ID NO: 38197 - DNA, 80 bp, synthetic construct
  source 1..80: mol_type = other DNA
attgcatgtatgattgcagctttctcctgcaaaatctgattagtcaggtctggtcacgcgctgcaaaggcgcttccgtag

SEQ ID NO: 38198 - DNA, 80 bp, synthetic construct
  source 1..80: mol_type = other DNA
tcctgcaaaatctgattagtcaggtctggtcacgcgctgcaaaggcgcttccgtagtagtatagaaataaaatatacccc

SEQ ID NO: 38199 - DNA, 80 bp, synthetic construct
  source 1..80: mol_type = other DNA
aatgattataatgctattgcatctagatgcaatggaaaagtgtacaatttaagagatcaaattgctcagttatctccatt

SEQ ID NO: 38200 - DNA, 80 bp, synthetic construct
  source 1..80: mol_type = other DNA
atgccagtgattccaatttcaactattttatcaacagatgatcatgaaacaatgtcagcgggaattgaatcattgtttga

SEQ ID NO: 38201 - DNA, 80 bp, synthetic construct
  source 1..80: mol_type = other DNA
gcagctattagaactgagggatctagacaaaatagagctgtagttactaaatctattgagcctgaagttctaaaagcagt

SEQ ID NO: 38202 - DNA, 80 bp, synthetic construct
  source 1..80: mol_type = other DNA
ggaattagatctcagttttcagaaaatccatatgcgaatatgctacaagttgacacggcaaaaatggaacagcaactcga

SEQ ID NO: 38203 - DNA, 80 bp, synthetic construct
  source 1..80: mol_type = other DNA
gatccacttgcaagtcagaaaattaacatgctagcagctggaggtgctacaaataacactggtggagggtatcacgcatt

SEQ ID NO: 38204 - DNA, 80 bp, synthetic construct
  source 1..80: mol_type = other DNA
gcaacaggaaaaacaggcgtagttacaattattcaaggtagaccaggagctgtaacattcaatttaaatatgaaagtacc

SEQ ID NO: 38205 - DNA, 80 bp, synthetic construct
  source 1..80: mol_type = other DNA
acatgcagaatgtgttgacgtatcaacagtgtttgctgaaggagatatcgtcataaggtttgaattagcaggaagagttg

SEQ ID NO: 38206 - DNA, 80 bp, synthetic construct
  source 1..80: mol_type = other DNA
ctaataaactgggaacactcaactttcctttatgtgatcgtattagcatcacaattgaaccttggaatgccaataaacaa

SEQ ID NO: 38207 - DNA, 80 bp, synthetic construct
  source 1..80: mol_type = other DNA
tgccaattttaataattggccggctggaacagcacaaagacaaccaactgtgtcattatttgttaacattattaatgcat

SEQ ID NO: 38208 - DNA, 80 bp, synthetic construct
  source 1..80: mol_type = other DNA
atgagcaacctccaagaagttcaggaaggtattactcttcatgagcagcagcttgttgcagctcgtcagaagcttaaaga

SEQ ID NO: 38209 - DNA, 80 bp, synthetic construct
  source 1..80: mol_type = other DNA
attggatggagcggattgatgatttcttagcagcagactgcccgtttcttcccaaaccaagagttcaatctgaagcattt

SEQ ID NO: 38210 - DNA, 80 bp, synthetic construct
  source 1..80: mol_type = other DNA
ggcttgcaagaggcagaggtgcgggaataccaggtgggccggtgaatccctttgttcctccagttcaacaacaacaacct

SEQ ID NO: 38211 - DNA, 80 bp, synthetic construct
  source 1..80: mol_type = other DNA
cgaatacattattcacaaggtaggagctgatacatgtgcattggtccatgtggatttggagggtgtgcccggctcaatga

SEQ ID NO: 38212 - DNA, 80 bp, synthetic construct
  source 1..80: mol_type = other DNA
gcaacaggaaaaacaggtataattacgattatccagggtagaccaggagccgtaacattcaatttaaatatgaaagtgcc

SEQ ID NO: 38213 - DNA, 80 bp, synthetic construct
  source 1..80: mol_type = other DNA
cagagcttcgtagcctggctcagatcctgattgaccagaaagtgaaggaaatctcaaaccaggaacctatgaaattataa

SEQ ID NO: 38214 - DNA, 80 bp, synthetic construct
  source 1..80: mol_type = other DNA
ctgagctaaggacattggcacaaagcctgattgatgtaaaagtgaaggaaatctctaaccaagagcctttaaaactataa

SEQ ID NO: 38215 - DNA, 80 bp, synthetic construct
  source 1..80: mol_type = other DNA
aaagcttatgaccctcaaagaagtgcaggaaaatatcaccctacatgaacagcagcttgttactgcacggcaaaagctta

SEQ ID NO: 38216 - DNA, 80 bp, synthetic construct
  source 1..80: mol_type = other DNA
gtgccaccctatttaaagacattgctgtccctcactctgtgtgggtttttgcctgtgcaccagaccggtgtccaccaaca

SEQ ID NO: 38217 - DNA, 80 bp, synthetic construct
  source 1..80: mol_type = other DNA
catgaaagtattagctttaagacatagtgtggctcaggtatatgcagacactcaggtgtacacacatgatgattctaaag

SEQ ID NO: 38218 - DNA, 80 bp, synthetic construct
  source 1..80: mol_type = other DNA
ttgacaatgtgcaaaaacttaaagataattcgatactgtatatagatataagaacagacagaggaaatatggattggaag

SEQ ID NO: 38219 - DNA, 80 bp, synthetic construct
  source 1..80: mol_type = other DNA
atggcaacattggaggaactccaaaaggaaatcaacaaccatgaaggccaactggtgatcgccaggcagaaggtgaagga

SEQ ID NO: 38220 - DNA, 80 bp, synthetic construct
  source 1..80: mol_type = other DNA
atgaaccaacagggcaaactgctgactggctgagtattgtggtctatcttacatcatttgtggttccaatacttctgaag

SEQ ID NO: 38221 - DNA, 80 bp, synthetic construct
  source 1..80: mol_type = other DNA
ggttgttatctaggatattgtcagtaataattaatagtatagaaataccagttaagcctaatggcagattgatatgctgt

SEQ ID NO: 38222 - DNA, 80 bp, synthetic construct
  source 1..80: mol_type = other DNA
tcaggattaagaataccaataaacaaaaaggagttaaatagacaaaagaaactgttaacactacagagcaatcattcttc

SEQ ID NO: 38223 - DNA, 80 bp, synthetic construct
  source 1..80: mol_type = other DNA
agcttacattattaaaacaatttttaacaagaagtaaaaacattagctctctaaaattaagtatgatatgtgattggtta

SEQ ID NO: 38224 - DNA, 80 bp, synthetic construct
  source 1..80: mol_type = other DNA
cagacgagcacacaacactgttgagatcaatcaacaggcagaccacccaaacaaccacaaagaaaaagctagctggagca

SEQ ID NO: 38225 - DNA, 80 bp, synthetic construct
  source 1..80: mol_type = other DNA
caatttacaggcatgtcaattaaaaaatgaatcagacaaaaaagacacaaaactaaataccacatcaacaacgatcagac

SEQ ID NO: 38226 - DNA, 80 bp, synthetic construct
  source 1..80: mol_type = other DNA
gtttagcaactggtataatctcaataaattaatattagagtttagaagggaggaagtaataagaactggttcaattttat

SEQ ID NO: 38227 - DNA, 80 bp, synthetic construct
  source 1..80: mol_type = other DNA
cttattgcattaaaactaatattggctttattaactttctttacagtaacaattactgttaactatataaaagtagaaaa

SEQ ID NO: 38228 - DNA, 80 bp, synthetic construct
  source 1..80: mol_type = other DNA
aattcttaaactggagagcttaacagagctaagaggagcatttatcttaagaattataaaagggtttgtagataataaca

SEQ ID NO: 38229 - DNA, 80 bp, synthetic construct
  source 1..80: mol_type = other DNA
acatgcaataaccaatggtcaaaccactgttacaaactcacccataatataatcactgaataatacaaaacaggaaaatg

SEQ ID NO: 38230 - DNA, 80 bp, synthetic construct
  source 1..80: mol_type = other DNA
acaaccaaaaaagaaagaaccacaactcaagccacaagcacagctgcaacccaaacacccaacaccaccaaccaaaccag

SEQ ID NO: 38231 - DNA, 80 bp, synthetic construct
  source 1..80: mol_type = other DNA
tctgcagcagaaagctatgccagaagcttaagagaaagtaacaaaatcaacttctcctcactagggctcacagatgaaga

SEQ ID NO: 38232 - DNA, 80 bp, synthetic construct
  source 1..80: mol_type = other DNA
aaaagaagctgcagaacacttcttaaacatgagtgatgacaatcaagatgattatgagtaattaaaaaactgggacaagt

SEQ ID NO: 38233 - DNA, 80 bp, synthetic construct
  source 1..80: mol_type = other DNA
aagtagcaagtgctataggaatgctacactgatccttattgggttaacagcattaagtatggcacttaatatttttctaa

SEQ ID NO: 38234 - DNA, 80 bp, synthetic construct
  source 1..80: mol_type = other DNA
agacagcagacccaagctccaaaccataccatacacagacaagcacaacaacagcatacaatgcagacacatcatctcca

SEQ ID NO: 38235 - DNA, 80 bp, synthetic construct
  source 1..80: mol_type = other DNA
agtcctcaatcctaaccttcgaggagagagacacatcatcactaagcgtcgaagccagactagaatcaatagaagagaag

SEQ ID NO: 38236 - DNA, 80 bp, synthetic construct
  source 1..80: mol_type = other DNA
cgatctttggtgtcataaatacaccttgttggataatcaaggcagctccctcttgttcagagaaagatggaaattatgct

SEQ ID NO: 38237 - DNA, 80 bp, synthetic construct
  source 1..80: mol_type = other DNA
cagagtgttaagtgatgcgctcaaaagataccctagggtagatataccaaagattgctagatccttttatgaactatttg

SEQ ID NO: 38238 - DNA, 80 bp, synthetic construct
  source 1..80: mol_type = other DNA
agcagaaagtgtattacaggagtttattcattgagtatgggaaagctttaggctcatcttcaacaggaagcaaagcagaa

SEQ ID NO: 38239 - DNA, 80 bp, synthetic construct
  source 1..80: mol_type = other DNA
cattattaccatggcagcatgtaaacaggtataattttgtctttagctcaacaggatgtaaaataagcttgaagacatgc

SEQ ID NO: 38240 - DNA, 80 bp, synthetic construct
  source 1..80: mol_type = other DNA
gcactcttcaatacaagttcgtcaccaatgtttagtctaactcaagttatcgatcctacaacacagctagactatttccc

SEQ ID NO: 38241 - DNA, 80 bp, synthetic construct
  source 1..80: mol_type = other DNA
tcattgattatgcaaaattaaaaaacatgaccaaattagaactctgtgtcaacatgccacaggtagaaccaagcaggaag

SEQ ID NO: 38242 - DNA, 80 bp, synthetic construct
  source 1..80: mol_type = other DNA
cagcaacaggagagaggcaaccacaacatcagccagatccagaaacggtgccacaactcagaacaacgaccaaacaaccc

SEQ ID NO: 38243 - DNA, 80 bp, synthetic construct
  source 1..80: mol_type = other DNA
atctaaaaaaggataatactgctaaagttgctatagaaagccctgtcattgaacatgtcagacttagaaatgcagtcatg

SEQ ID NO: 38244 - DNA, 80 bp, synthetic construct
  source 1..80: mol_type = other DNA
ccaaaccagcaatagaagagaggcaaccacaacatccgccagatccagaaacgatgccacaactcaaaacagtaatcaaa

SEQ ID NO: 38245 - DNA, 80 bp, synthetic construct
  source 1..80: mol_type = other DNA
ataaccaaaaaagaaaaagaaagagaaaccacaactcgaaccacaagcacagctgcaacccaaacactcaacaccaccaa

SEQ ID NO: 38246 - DNA, 80 bp, synthetic construct
  source 1..80: mol_type = other DNA
atcattgcagcaagagataacacttttgtgtggagagattctttacaccaaacatactgattacaaatatgctgcagaga

SEQ ID NO: 38247 - DNA, 80 bp, synthetic construct
  source 1..80: mol_type = other DNA
caactcaagcagcagacccaagctccaaaccataccacacacagaaaagcacaacaacagcatacaacgcagacacgtct

SEQ ID NO: 38248 - DNA, 80 bp, synthetic construct
  source 1..80: mol_type = other DNA
ccaaaccagcaacaggagagaggcaaccacaacatcagccagatccagaaacggcgccacaactcaaaacaacgatcaaa

SEQ ID NO: 38249 - DNA, 80 bp, synthetic construct
  source 1..80: mol_type = other DNA
tctccaagtagttaacaaaaaatatataaaataaccatgaaaactaaaaaactagaaaaattaatttgaactcagaaaaa

SEQ ID NO: 38250 - DNA, 80 bp, synthetic construct
  source 1..80: mol_type = other DNA
ctgagctgaggagtctggcgcaggcattgattgatcagaaggttaaggagatctccaaccaggagcccttaaagatatga

SEQ ID NO: 38251 - DNA, 80 bp, synthetic construct
  source 1..80: mol_type = other DNA
tgcctataatactcaaagccctgtacatgctgtcaacaaggggaaggcagactgttaaagaaaataaagggacacggatc

SEQ ID NO: 38252 - DNA, 80 bp, synthetic construct
  source 1..80: mol_type = other DNA
cgtttcaaggatgacacttcttttgaggatgtgaatgggatcaggcgaccaaaacatctctatgtgtcaatgccaactgc

SEQ ID NO: 38253 - DNA, 80 bp, synthetic construct
  source 1..80: mol_type = other DNA
tcaagtgagaaatatcatgagccccgtaatgggagtaatcggattctccttctttgcaaaggattggccagataggatca

SEQ ID NO: 38254 - DNA, 80 bp, synthetic construct
  source 1..80: mol_type = other DNA
aagaatttatggagaaagaatgtccctttataaaacctgaagtcaagcctggaacaccagcaaaggaagttgaaatatta

SEQ ID NO: 38255 - DNA, 80 bp, synthetic construct
  source 1..80: mol_type = other DNA
aagaggaataagatctatttcatgcagaggcaggatgtgcttgacaagaatcatgtcccagatattgataaactaataga

SEQ ID NO: 38256 - DNA, 80 bp, synthetic construct
  source 1..80: mol_type = other DNA
ctgaacttaggggccttgctcaggctcttattgatcaaaaagtgaaggaaatctccaaccaggagcccttgaagatatga

SEQ ID NO: 38257 - DNA, 80 bp, synthetic construct
  source 1..80: mol_type = other DNA
ggaattcatggaaaaagagtgcccttttatcaaaccagaggtgaagccaggaacaccagcccaggaagttgaattcctaa

SEQ ID NO: 38258 - DNA, 80 bp, synthetic construct
  source 1..80: mol_type = other DNA
agaggaacaaaatatactttatgcagaggcaggacgtactggataaaaaccatgttgctgatattgataagttgattgac

SEQ ID NO: 38259 - DNA, 80 bp, synthetic construct
  source 1..80: mol_type = other DNA
atgagtgacttaacagatatccaggaggttataacccgccatgaacaacaacttgttgttgcaagacaaaagctcaagga

SEQ ID NO: 38260 - DNA, 80 bp, synthetic construct
  source 1..80: mol_type = other DNA
ctgaacttagaggccttgcccaagcactgattgatcagaaagttaaagaaatatcaaaccaggagcccctaaaaatatga

SEQ ID NO: 38261 - DNA, 80 bp, synthetic construct
  source 1..80: mol_type = other DNA
agtcaaagaagctgagttcttaaaaaagaacagggtgtacttcatgcaacgccaagatgtacttgataaaaatcatgtag

SEQ ID NO: 38262 - DNA, 80 bp, synthetic construct
  source 1..80: mol_type = other DNA
ctgagcttaggggccttgcccaagcacttattgatcagaaagtgaaagagatttctaatcaggaacccttaaaaatatga

SEQ ID NO: 38263 - DNA, 80 bp, synthetic construct
  source 1..80: mol_type = other DNA
ggaatttatggagaaggagtgcccctttattaaaccagagataaaaccgggaacaccagctcaggaagctgaattcttaa

SEQ ID NO: 38264 - DNA, 80 bp, synthetic construct
  source 1..80: mol_type = other DNA
agaggaataagatatactttatgcagcgtcaagatgtgctagataaaaatcatgtagctgacattgataagctgattgat

SEQ ID NO: 38265 - DNA, 80 bp, synthetic construct
  source 1..80: mol_type = other DNA
atcgctgttcttgggttaaccatgatttcagtgagcatcatcatcataatcaaaaaaacaagaaagctcgcaggggcacc

SEQ ID NO: 38266 - DNA, 80 bp, synthetic construct
  source 1..80: mol_type = other DNA
atctctagcagcaacttcagagaatcatctacacacagagacaactccaacacaagatgcaacaatctctcagcaagcca

SEQ ID NO: 38267 - DNA, 80 bp, synthetic construct
  source 1..80: mol_type = other DNA
aagcattagagaacacataccccaatatgatcaagcttatagataacctgggaaatgcagagataaaaaaactaatcaaa

SEQ ID NO: 38268 - DNA, 80 bp, synthetic construct
  source 1..80: mol_type = other DNA
atcttatccaaatctattaatataatattttagttatttaaactctaaatattgtctagatttcacaacactttgcggtc

SEQ ID NO: 38269 - DNA, 80 bp, synthetic construct
  source 1..80: mol_type = other DNA
accccaatgacctctgcagtagacttaaacactaaactcaacccacagcaggcaacacagttgaccacagaggattcaac

SEQ ID NO: 38270 - DNA, 80 bp, synthetic construct
  source 1..80: mol_type = other DNA
cagacgagcccacaacactgctgagatcaatcaacagacagaccacccaaacagccacagagaaaaagccaaccggagca

SEQ ID NO: 38271 - DNA, 80 bp, synthetic construct
  source 1..80: mol_type = other DNA
caccaatcaaaccagcaacagaagagaggcaaccacaacaccagccagatccagaaatggtgccacaactcaaaacagcg

SEQ ID NO: 38272 - DNA, 80 bp, synthetic construct
  source 1..80: mol_type = other DNA
atcaaacaacccaggcagcagacccaagctccaaaccacaccatacacagaaaagcacaacaacagcatacaacgcagac

SEQ ID NO: 38273 - DNA, 80 bp, synthetic construct
  source 1..80: mol_type = other DNA
acatcttctccaagtagttaacaaaaaatatataaaataaccatgaaaaccaaaaaactagaaaagttaatttgaactca

SEQ ID NO: 38274 - DNA, 80 bp, synthetic construct
  source 1..80: mol_type = other DNA
gaaaaaaccacaaacactatatgaattgtttgagcgtatatactaatgaaatagcatctgtttgtgcatcaacaacacta

SEQ ID NO: 38275 - DNA, 80 bp, synthetic construct
  source 1..80: mol_type = other DNA
tcactattcaagaaataagaagaagctaaaattcaagggataaataacaatggatccattttgtgaatccactgtcaatg

SEQ ID NO: 38276 - DNA, 80 bp, synthetic construct
  source 1..80: mol_type = other DNA
tttatcttcctgactcatatctcaaaggagtaatatctttcagtgaaaccaatgcaattggctcatgccttttgaaaaga

SEQ ID NO: 38277 - DNA, 80 bp, synthetic construct
  source 1..80: mol_type = other DNA
cagttaaaaaccacctcagataacacatcgattcttaattttatagatgtagagtttatacccgtttgggtgagcaattg

SEQ ID NO: 38278 - DNA, 80 bp, synthetic construct
  source 1..80: mol_type = other DNA
tcagccatgtggatttattgttaaaagtctcgaacaatattaaaaatgaggctaaggtacgattctttaaagccttatta

SEQ ID NO: 38279 - DNA, 80 bp, synthetic construct
  source 1..80: mol_type = other DNA
aaaaggcgaattaaattatgatttttttgaagcattagagaacacttaccctaatatgattaagctaatagataacctag

SEQ ID NO: 38280 - DNA, 80 bp, synthetic construct
  source 1..80: mol_type = other DNA
tagatgttataaaaagtgatgggtcctcagaaacgtgtaatcaactcaaaaaacaattaaaaaaacactcaggtaaagtt

SEQ ID NO: 38281 - DNA, 80 bp, synthetic construct
  source 1..80: mol_type = other DNA
cttattgtactaaaactgatattggctttactgacatttttcacagtaacaattactgttaactatataaaagtagaaaa

SEQ ID NO: 38282 - DNA, 80 bp, synthetic construct
  source 1..80: mol_type = other DNA
acatagacactatacaaggggtttgggcacatgcaccaataagatggcatccgttcatgtatcaatggcgccaccactat

SEQ ID NO: 38283 - DNA, 80 bp, synthetic construct
  source 1..80: mol_type = other DNA
ccagacaatcaaggtttgtcctaggtgcaatagctcttggagttgctacagcagcagcagtcacagcaggcattgcaata

SEQ ID NO: 38284 - DNA, 80 bp, synthetic construct
  source 1..80: mol_type = other DNA
tttcggcagcaaccccagagggccatccttacacagagacaactcaaacaccagacacaacagctcctcaacaaaccaca

SEQ ID NO: 38285 - DNA, 80 bp, synthetic construct
  source 1..80: mol_type = other DNA
acaacctgggcaacaggaccaggctccccaccaaactatgcacggaaaagtgcagggcccaggcgaatgaaacacacagg

SEQ ID NO: 38286 - DNA, 80 bp, synthetic construct
  source 1..80: mol_type = other DNA
tatctcacccaagtagttaacaaaaaaccacaaaataactttgaaaaccaaaactaaaatataaatttagaaccagggaa

SEQ ID NO: 38287 - DNA, 80 bp, synthetic construct
  source 1..80: mol_type = other DNA
tcatacaaacatgctatattaaaagagtctcaatacacaataaaaagagatgtaggcaccacaactgcagtgacaccttc

SEQ ID NO: 38288 - DNA, 80 bp, synthetic construct
  source 1..80: mol_type = other DNA
aactcaaaaaaaggaaagaaggaaagaaaacacaaaccaaaccacaagcacagctgcaacccaaacaaccaacaccacca

SEQ ID NO: 38289 - DNA, 80 bp, synthetic construct
  source 1..80: mol_type = other DNA
cacctcatccaagtagttaacaaaaaaccacaaaataaccttgaaaaccaaaactaaaatatgaatttagacccagaaaa

SEQ ID NO: 38290 - DNA, 80 bp, synthetic construct
  source 1..80: mol_type = other DNA
acataaacactatatagggggtttgggcatatgcaccaatgagatggcatctgttcatgtatcaatggcgccaccattac

SEQ ID NO: 38291 - DNA, 80 bp, synthetic construct
  source 1..80: mol_type = other DNA
gcagtaggtgctatagatatgctacattgatccttgttgggctaacagcactaagcatggcacttaatattttcctggtc

SEQ ID NO: 38292 - DNA, 80 bp, synthetic construct
  source 1..80: mol_type = other DNA
gtaacaacctgaacaaaaatcaggaaggactgggacttagaagcaatctgcaaggtatgttaaccaataaattatacgaa

SEQ ID NO: 38293 - DNA, 80 bp, synthetic construct
  source 1..80: mol_type = other DNA
actgttgattacatgctaagcctatgctgcaatgaagggttctctctggtgaaagagttcgaaggatttattatgagtga

SEQ ID NO: 38294 - DNA, 80 bp, synthetic construct
  source 1..80: mol_type = other DNA
gaagacgagagtacaagcggtgaatcagaagaggaagaagaatcaaaagaaactcaggataacaatcagggagaagatat

SEQ ID NO: 38295 - DNA, 80 bp, synthetic construct
  source 1..80: mol_type = other DNA
gacaaacatatagcactaccaaaatcaatctatgaacagatcacccatacaaccacagagaaaaagacaaccagagcaac

SEQ ID NO: 38296 - DNA, 80 bp, synthetic construct
  source 1..80: mol_type = other DNA
gtcactgtctacatataaccgagtgggggtgccattatttttataataacatggcttttaacattgaaatcagaacaaat

SEQ ID NO: 38297 - DNA, 80 bp, synthetic construct
  source 1..80: mol_type = other DNA
gacaaacacacagcaccaccaaaatcaacccacgaacagatcacccagacaaccacagggaaaaagacaaccagagcaac

SEQ ID NO: 38298 - DNA, 80 bp, synthetic construct
  source 1..80: mol_type = other DNA
cctactcaggtttattaatgcagtgttttagttatttaaaaaccgaatattgtctaggctgcacaacattctgctataat

SEQ ID NO: 38299 - DNA, 80 bp, synthetic construct
  source 1..80: mol_type = other DNA
tgaacaaaacattaacctctgtacaaagattttttgaactgaggaaagaaaatgatgtggttgacctatggatgaatata

SEQ ID NO: 38300 - DNA, 80 bp, synthetic construct
  source 1..80: mol_type = other DNA
ccaatgcagtttggagggggagatccagtagttttttacagatctttttacagaaggactcccgatttcctaactgaagc

SEQ ID NO: 38301 - DNA, 80 bp, synthetic construct
  source 1..80: mol_type = other DNA
ttatgtagatcactaggcaagttagtttttattgtatcatcttacggatgtgtagtaaaaagcaacaaaagtaaaagagt

SEQ ID NO: 38302 - DNA, 80 bp, synthetic construct
  source 1..80: mol_type = other DNA
cccaatgacctccacagcaggcccaaacaccaaacccaatccacagcaagcaacacagtggaccacagagagcccaacat

SEQ ID NO: 38303 - DNA, 80 bp, synthetic construct
  source 1..80: mol_type = other DNA
acctccggagctgaatggtgttaccaacggcggttttataccgcatagttagttaattaaaaaatgggacaaatcatcat

SEQ ID NO: 38304 - DNA, 80 bp, synthetic construct
  source 1..80: mol_type = other DNA
aatcctaataggggtctacggaagctccgtgatttacatggttcaattaccgatctttggtgtcatagatacaccttgct

SEQ ID NO: 38305 - DNA, 80 bp, synthetic construct
  source 1..80: mol_type = other DNA
aacagacaacctgggcaacaagaccaggttccccaccaaactatgcacggaaaagtgcagggcccaggcgaatgcaacac

SEQ ID NO: 38306 - DNA, 80 bp, synthetic construct
  source 1..80: mol_type = other DNA
ctatcatataagcatgctatattaaaagagtctcagtacacaataaagagagatgtaggcacaacaacagcagtgacacc

SEQ ID NO: 38307 - DNA, 80 bp, synthetic construct
  source 1..80: mol_type = other DNA
aagaacaaaagcttcaaagaaaaacaccattttccatattaagtctgattttaattccactgattatgacgagcccccaa

SEQ ID NO: 38308 - DNA, 80 bp, synthetic construct
  source 1..80: mol_type = other DNA
aaaatcaactaagaaccaggccacaagtggcatcggagtttaatttgttcattccatgcggaattaaaaacttgaaaatt

SEQ ID NO: 38309 - DNA, 80 bp, synthetic construct
  source 1..80: mol_type = other DNA
agatccaacatggattgttggaacaaagtttcggaagtgtatgtgtttgaaaccagtaatggtagcagcgacaataattg

SEQ ID NO: 38310 - DNA, 80 bp, synthetic construct
  source 1..80: mol_type = other DNA
cggtaaataaaaatttaattacattttgttcatctgactatattcaagttatagtcaataggaatagagaaggatcatgt

SEQ ID NO: 38311 - DNA, 80 bp, synthetic construct
  source 1..80: mol_type = other DNA
aacatggacgtccttttttcattgtccaaaactcttaaagatgctagagacaaaattgtcgaaggcacactatactctaa

SEQ ID NO: 38312 - DNA, 80 bp, synthetic construct
  source 1..80: mol_type = other DNA
taaccggcatgtagctatatcaagctgctcagactctataagtaaggatgtgatttcacattcgctacgtagagtaactg

SEQ ID NO: 38313 - DNA, 80 bp, synthetic construct
  source 1..80: mol_type = other DNA
catcaatgtttctaatttccttgttgcagcaaggatgactagtgcattcaatgtatgattagcgacctatcatatacccc

SEQ ID NO: 38314 - DNA, 80 bp, synthetic construct
  source 1..80: mol_type = other DNA
aaaaacaaaagcttcaaagaaaaatacaattttccacatcaagtctgactttaattccactgaatatgacgaacctccaa

SEQ ID NO: 38315 - DNA, 80 bp, synthetic construct
  source 1..80: mol_type = other DNA
taaaatgtttactcaacattgctgccaacgtatagatgaacatttctgtggagcccttcaccctgtgattagtaatattg

SEQ ID NO: 38316 - DNA, 80 bp, synthetic construct
  source 1..80: mol_type = other DNA
taatcaattaaaaactagaccacaagtggcatcagagcttaatctgttcattccatgtggaattaaaaatttaaaaatag

SEQ ID NO: 38317 - DNA, 80 bp, synthetic construct
  source 1..80: mol_type = other DNA
aaaatcaacatggattgttggaacaaaatttcgaaagtgtatgtgtttgaaaccagtgatagtggcagcaacaataattg

SEQ ID NO: 38318 - DNA, 80 bp, synthetic construct
  source 1..80: mol_type = other DNA
aaataaaaatttgatcacattttgttcatctgactatattcaagttatagttaatagaaatagagaaggatcatgtggta

SEQ ID NO: 38319 - DNA, 80 bp, synthetic construct
  source 1..80: mol_type = other DNA
gaaacatggggagaggaatttagcttagacttaaaattatgttataagtgcacgcccgttgcatttatattttcattaat

SEQ ID NO: 38320 - DNA, 80 bp, synthetic construct
  source 1..80: mol_type = other DNA
tttgaagaaaatagaagaaagtgggaaagagtcttaaattacaaaatctgtaaagaaaatcttgactcacatttagcttg

SEQ ID NO: 38321 - DNA, 80 bp, synthetic construct
  source 1..80: mol_type = other DNA
tccttagggaagggcaaaaacagtaaaggggaagagctgcagatgttagatatacatgcggtagaaaagagttgggtaga

SEQ ID NO: 38322 - DNA, 80 bp, synthetic construct
  source 1..80: mol_type = other DNA
caaattctactcaggtttattaatacagtgtcttagttatttaaaaaccggatactgtctaggttgtatgacacttcgca

SEQ ID NO: 38323 - DNA, 80 bp, synthetic construct
  source 1..80: mol_type = other DNA
ccacagacaaacacacagcactgccaaaaccaaccagtgaacagatcacccagacgaccacagagaaaaagacaatcaga

SEQ ID NO: 38324 - DNA, 80 bp, synthetic construct
  source 1..80: mol_type = other DNA
gcaacagcccaaaaaaagaaaaaaggaaaagaagacacaacccaaaccacaagcacagctgcaacccaaacaaccaacac

SEQ ID NO: 38325 - DNA, 80 bp, synthetic construct
  source 1..80: mol_type = other DNA
catcaaccaaaccagaaatgcaagtgagacaatcacaacatccgacagacccagaattgacaccaccacccaaagcagtg

SEQ ID NO: 38326 - DNA, 80 bp, synthetic construct
  source 1..80: mol_type = other DNA
aacagacaacccggacaacagaaccaagctccccaccgtaccatgcacggagaagtgcagggcccaggcgaacgtaacac

SEQ ID NO: 38327 - DNA, 80 bp, synthetic construct
  source 1..80: mol_type = other DNA
ataggtatcccatccaagtagttaacaaaaaaccacaaaatacccttaaaaaccaaaaactaaaatataaatttagatcc

SEQ ID NO: 38328 - DNA, 80 bp, synthetic construct
  source 1..80: mol_type = other DNA
ttccagaaatcactaaaaaactcaggtcacaagagaactcaatccattgtaggggaaaaaataaacactatatcagaatc

SEQ ID NO: 38329 - DNA, 80 bp, synthetic construct
  source 1..80: mol_type = other DNA
gaatcaccaaaatcacagaaaacctagcaaccaaaacaacggatcctgttgaagaagaggaaatcaacgaaaagaaagta

SEQ ID NO: 38330 - DNA, 80 bp, synthetic construct
  source 1..80: mol_type = other DNA
caaattctcattatgaacccaaagccagtgttttagttatttaaaaaccgaatattgtctaggctgtacaacactttgca

SEQ ID NO: 38331 - DNA, 80 bp, synthetic construct
  source 1..80: mol_type = other DNA
aacagacaacctgggcaacagaaccaggctccccacctcaccatgcacggagaggtgtacgacccaggcgaacgtaacac

SEQ ID NO: 38332 - DNA, 80 bp, synthetic construct
  source 1..80: mol_type = other DNA
gcaacaaccccaaaaagggaaagagggaaagaaaacacaaaccaaaccacaagcacagctgcaaaccaaacaaccaacac

SEQ ID NO: 38333 - DNA, 80 bp, synthetic construct
  source 1..80: mol_type = other DNA
agtgaaaatgtctcttcaggggattcacctgagtgatctatcatacaagcatgccatattaaaagagtctcaatacacaa

SEQ ID NO: 38334 - DNA, 80 bp, synthetic construct
  source 1..80: mol_type = other DNA
aaagggtaataggtgatctaaatagagtggtagatagtggtgaaggattatcaatggaaaccactgatgcaactcaaaaa

SEQ ID NO: 38335 - DNA, 80 bp, synthetic construct
  source 1..80: mol_type = other DNA
acccattgggacttgatacacagaataagtaaagatgccttattgataacattgtgtgatgcagaattcaaaaacagaga

SEQ ID NO: 38336 - DNA, 80 bp, synthetic construct
  source 1..80: mol_type = other DNA
agaatagcagtgtgtaatgatttctatgcctcaaagaaaatggacaacaaatcaattgaagcaaactgcaaatctctcct

SEQ ID NO: 38337 - DNA, 80 bp, synthetic construct
  source 1..80: mol_type = other DNA
ataatatgaaacagtcaatagtcaaaccactgctgcaaactcatccataatataatcaatgagtaatacaaaacaagaaa

SEQ ID NO: 38338 - DNA, 80 bp, synthetic construct
  source 1..80: mol_type = other DNA
aacatctccggcagcaacccccgaggaccatccacacacagggacaactcaaacactagacacaacagctccccagcaaa

SEQ ID NO: 38339 - DNA, 80 bp, synthetic construct
  source 1..80: mol_type = other DNA
aagctaatagataacctagggaatgcagagattaaaaaattgatcaaagtaactggatatatgctttacttacaagcatg

SEQ ID NO: 38340 - DNA, 80 bp, synthetic construct
  source 1..80: mol_type = other DNA
cagagataaaaaaactaatcaaagttaccgggtatatgcttgtgagtaagaagtaataagcatatacccggtaactttga

SEQ ID NO: 38341 - DNA, 80 bp, synthetic construct
  source 1..80: mol_type = other DNA
ctagggaatgcagagattaaaaaactgatcaaagtaacaggatacatgcttgtaagtaaaaaatgaaaaaagatgaagat

SEQ ID NO: 38342 - DNA, 80 bp, synthetic construct
  source 1..80: mol_type = other DNA
tctctctaaaacaacaacaacatcatgtcaactttgttcaaatctccctgggagaaccttttgccctcatactgacaaca

SEQ ID NO: 38343 - DNA, 80 bp, synthetic construct
  source 1..80: mol_type = other DNA
attatctacacaattcacagatttcgtatcattaaattcattacggtttagatttagtttgacagtggatgaaccatctt

SEQ ID NO: 38344 - DNA, 80 bp, synthetic construct
  source 1..80: mol_type = other DNA
atcaaagtaacaggatacatgcttgtaagtaaaaaatgaaaaatgatgaagatgacaaaatagatgacaacttcatacta

SEQ ID NO: 38345 - DNA, 80 bp, synthetic construct
  source 1..80: mol_type = other DNA
taataattaatagcttaattataattaaaacgttgtttaaaaccgtaactatttaatttacaaagtaaaaacaaaaatgt

SEQ ID NO: 38346 - DNA, 80 bp, synthetic construct
  source 1..80: mol_type = other DNA
catgtaactatatcaagtcattcagactctacaagtaagaacatggctccatgttcgctacgtagagtaactgcatgaat

SEQ ID NO: 38347 - DNA, 80 bp, synthetic construct
  source 1..80: mol_type = other DNA
aagtcttcaacatggatgtcctatactcactgtcaatgcctctgaaagtttttttggaccgggtgggtcttggaacatta

SEQ ID NO: 38348 - DNA, 80 bp, synthetic construct
  source 1..80: mol_type = other DNA
ataatttgcagcgtgtttttacggtggctggctttagaagaaggctgatcaagtgaggcctagcctaattccctggccca

SEQ ID NO: 38349 - DNA, 80 bp, synthetic construct
  source 1..80: mol_type = other DNA
aattcttgattttcctgcgtgtgagtctagacctccagagtcggcccgtgtgctcctgaacacatggcagtcaaacacga

SEQ ID NO: 38350 - DNA, 80 bp, synthetic construct
  source 1..80: mol_type = other DNA
aataggtactttgccaatcagaaattggactttcgatttcggattacttggtacaaccttacttaatttagatgcaaatt

SEQ ID NO: 38351 - DNA, 80 bp, synthetic construct
  source 1..80: mol_type = other DNA
acgttgaaaatgcaagaactacaattgaatactttattgatttcattgataatgtgtgtatggatgagatggcgagagaa

SEQ ID NO: 38352 - DNA, 80 bp, synthetic construct
  source 1..80: mol_type = other DNA
aatcacaacgaaatggaattgctccacaatccgaagcattgcggaaactatcaggtatcagatttaagagaatcaatttt

SEQ ID NO: 38353 - DNA, 80 bp, synthetic construct
  source 1..80: mol_type = other DNA
gataattcatcagagtatatcggaaactggaatctacagaatagacgacagcgtactggatttattttccatagacggga

SEQ ID NO: 38354 - DNA, 80 bp, synthetic construct
  source 1..80: mol_type = other DNA
catatttccatactcatcatcatttactttgaatagatcgcaaccagtgcatgataatttaatgggaactatgtggttaa

SEQ ID NO: 38355 - DNA, 80 bp, synthetic construct
  source 1..80: mol_type = other DNA
tgttccggcgttagtaatctgatacagcaatttaaccaaatgatggacactctgcatcctaaccatttccagagaggagg

SEQ ID NO: 38356 - DNA, 80 bp, synthetic construct
  source 1..80: mol_type = other DNA
caccaaatatgacgccagcagtcactaatatattcccacaggcaccaccattcatttttcacgctacagtcggactcaca

SEQ ID NO: 38357 - DNA, 80 bp, synthetic construct
  source 1..80: mol_type = other DNA
ttacgtatagattccgcagtatgtgaatcagtgcttgcagacgcaacagaacctttgttggcacatgtaacagcagtacg

SEQ ID NO: 38358 - DNA, 80 bp, synthetic construct
  source 1..80: mol_type = other DNA
atcaaagttaccgggtatatgcttgtgagtaagaagtaataataataataatcataatcagtcataatctcacacaactg

SEQ ID NO: 38359 - DNA, 80 bp, synthetic construct
  source 1..80: mol_type = other DNA
atattcagaatttttggacaccctatggtagatgagagggaagcaatggatgctgttaaattaaataatgagattacaaa

SEQ ID NO: 38360 - DNA, 80 bp, synthetic construct
  source 1..80: mol_type = other DNA
aacaggatatatgcttgtaagtaaaaaatgaaaaatgatgaagatgacaaaatagatgacaacttcatactattctaaat

SEQ ID NO: 38361 - DNA, 80 bp, synthetic construct
  source 1..80: mol_type = other DNA
cttcaacatggatgtattatacgacttatcaatcactcttaaagatgccagagacaaaattgtcgaaggcacattatacc

SEQ ID NO: 38362 - DNA, 80 bp, synthetic construct
  source 1..80: mol_type = other DNA
gagtatgtagctacgtcaagctgtttgaactctgtaagtaaggatgcgtctacgcattcgctacagctagaaacaaaaaa

SEQ ID NO: 38363 - DNA, 80 bp, synthetic construct
  source 1..80: mol_type = other DNA
attaaaagagtctcaatacacaataaaaagagatgtaggcaccacaactgcagtgacaccttcatcattgcaacaagaaa

SEQ ID NO: 38364 - DNA, 80 bp, synthetic construct
  source 1..80: mol_type = other DNA
cacacagctgagaaaataattgtctaacagtttagttgatcattagttatttaaaattataaattagtaactaactgata

SEQ ID NO: 38365 - DNA, 80 bp, synthetic construct
  source 1..80: mol_type = other DNA
tatatgcttgtgagtaagaagtaataataataaccataatcagtcataacctcacacaaccgagaaaatgattatctaac

SEQ ID NO: 38366 - DNA, 80 bp, synthetic construct
  source 1..80: mol_type = other DNA
ttagatgtcataaaaagtgatggatcctcaaaaacatgtaatcaactcaaaaaaataataaaaaaccattcaggtaaatt

SEQ ID NO: 38367 - DNA, 80 bp, synthetic construct
  source 1..80: mol_type = other DNA
aaaaggataacactgctaaagttgctgtagaaaaaccctgttattgaacatgtcagacttagaaatgcggtcatgaccaa

SEQ ID NO: 38368 - DNA, 80 bp, synthetic construct
  source 1..80: mol_type = other DNA
caaaaaaacatgggacaagtgaaaatgtctcttcaggggattcacctgagtgatctatcatacaagcatgctatattaaa

SEQ ID NO: 38369 - DNA, 80 bp, synthetic construct
  source 1..80: mol_type = other DNA
tcaatagagaaaaatgagcgtgctacactgacaacactaatgagagatcctcaggctgttggatcagaacgacaagcaaa

SEQ ID NO: 38370 - DNA, 80 bp, synthetic construct
  source 1..80: mol_type = other DNA
aaaaaattgatcaaagtaactggatacatgcttgtaagtaaaaaatgagaaatgatgaagatgataaaatagatgacaac

SEQ ID NO: 38371 - DNA, 80 bp, synthetic construct
  source 1..80: mol_type = other DNA
caatctgcaaatatgccagtcaaaaactgagtcagataaagaagactcaccatcaaataccacatctgtcacaaccaaga

SEQ ID NO: 38372 - DNA, 80 bp, synthetic construct
  source 1..80: mol_type = other DNA
gacagaagtagttatggaggtgaaggtagagaacattcgagcaatagacatgctcaaagcaagagttaaaaatcgtgtgg

SEQ ID NO: 38373 - DNA, 80 bp, synthetic construct
  source 1..80: mol_type = other DNA
atattcagaatttttggtcacccaatggtagatgaaagagatgcaatggatgctgtaaaactaaataatgaaatcacaaa

SEQ ID NO: 38374 - DNA, 80 bp, synthetic construct
  source 1..80: mol_type = other DNA
acacattgtctcattaactggaaaagaaagggaattaagtgtaggtagaatgtttgctatgcaaccagggaaacagcgac

SEQ ID NO: 38375 - DNA, 80 bp, synthetic construct
  source 1..80: mol_type = other DNA
acatgcttgtaagtaaaaaatgaaaaatgatgaagatgataaaatagatgacaacttcataccattctaaagtaattgtt

SEQ ID NO: 38376 - DNA, 80 bp, synthetic construct
  source 1..80: mol_type = other DNA
gtttagtaattggtacaatctcaacaagttaattttagaattcagaagagaggaagtaataagaactggttcaatcttgt

SEQ ID NO: 38377 - DNA, 80 bp, synthetic construct
  source 1..80: mol_type = other DNA
ctgtagattatatgttaagtttatgttgcaatgaaggtttctcacttgtgaaagagttcgaaggttttattatgagtgaa

SEQ ID NO: 38378 - DNA, 80 bp, synthetic construct
  source 1..80: mol_type = other DNA
aaaattaaaaaataaaaacaggctcagagttcatggtaccgtattagaaaataatgattatccaatgtatgaggttgtac

SEQ ID NO: 38379 - DNA, 80 bp, synthetic construct
  source 1..80: mol_type = other DNA
aaatacaaatattagcagagaaattgttagctgataacattgtacctttcttcccagaaactttaacaaagtatggtgat

SEQ ID NO: 38380 - DNA, 80 bp, synthetic construct
  source 1..80: mol_type = other DNA
tgagtaagaagtaataataataatcataatcagtcataatctcacacaactgagaaaatgattgtctaacagtttaattg

SEQ ID NO: 38381 - DNA, 80 bp, synthetic construct
  source 1..80: mol_type = other DNA
gtagttaacaaaaaaatacataaaataaccatgaaaaccaaaaaaccagaaaagtcaatctgaactcaaaaaaaccacaa

SEQ ID NO: 38382 - DNA, 80 bp, synthetic construct
  source 1..80: mol_type = other DNA
acactacatgaattgtttgagcatatataccaatgaaacagcatctgtttgtgcatcgacaacaccaccaccattcaaga

SEQ ID NO: 38383 - DNA, 80 bp, synthetic construct
  source 1..80: mol_type = other DNA
agtagaatgccattgtatatacacaatcgaatggaagtgctatcattattcaatagataagactcaatcttgaatgttaa

SEQ ID NO: 38384 - DNA, 80 bp, synthetic construct
  source 1..80: mol_type = other DNA
gcaataatcaataacccaattacacttaaaacattattcaaaaccataactaatcaatttacaaagtaaaaacaaaaata

SEQ ID NO: 38385 - DNA, 80 bp, synthetic construct
  source 1..80: mol_type = other DNA
atgagaaatgatgaagatgataaaatagataacaaattcataccattctaaaataattgtttgattatgcaattatatgg

SEQ ID NO: 38386 - DNA, 80 bp, synthetic construct
  source 1..80: mol_type = other DNA
tgtgctccttcgatctatgtctcttcaagggattcacctaagtgatctgtcatataaacatgctatattaaaagagtctc

SEQ ID NO: 38387 - DNA, 80 bp, synthetic construct
  source 1..80: mol_type = other DNA
aagtaataataataaccataatcagtcataacctcacacaaccgagaaaatgattatctaacagtttaactgaccattag

SEQ ID NO: 38388 - DNA, 80 bp, synthetic construct
  source 1..80: mol_type = other DNA
gttgacggagcaactacatggtattttaacccagtaattcttagaccaaacaacgttgaagtggagtttttactaaacgg

SEQ ID NO: 38389 - DNA, 80 bp, synthetic construct
  source 1..80: mol_type = other DNA
attggtaatttaccaatcagaaattggaattttgattttggattacttggaacaactctactaaatttagacgccaacta

SEQ ID NO: 38390 - DNA, 80 bp, synthetic construct
  source 1..80: mol_type = other DNA
gttaattaaaaattataaattagtaactaattaataaaaaataagaaattgaaattgaatgtattagatgatcatcctct

SEQ ID NO: 38391 - DNA, 80 bp, synthetic construct
  source 1..80: mol_type = other DNA
agatcatattgtttcattaactgggaaagaaagagaattaagtgtaggcaggatgtttgcaatgcaacctggcaaacaaa

SEQ ID NO: 38392 - DNA, 80 bp, synthetic construct
  source 1..80: mol_type = other DNA
taatcataatcagtcataatctcacacaactgagaaaatgattgtctaacagtttaattgaccattagttaattaaaaat

SEQ ID NO: 38393 - DNA, 80 bp, synthetic construct
  source 1..80: mol_type = other DNA
gacatggaagttttatattcattgtcaaaaactcttaaagatgctagggacaagattgttgaaggtacattatattctaa

SEQ ID NO: 38394 - DNA, 80 bp, synthetic construct
  source 1..80: mol_type = other DNA
cttttaaatggtcaaattatcaatacttatcaagcaagatttggaactattactgctaggaactttgacacaataagatt

SEQ ID NO: 38395 - DNA, 80 bp, synthetic construct
  source 1..80: mol_type = other DNA
gacatggaggttctgtattcattgtccaaaactcttaaagatgctagggataaaatcgttgaaggtacactatattctaa

SEQ ID NO: 38396 - DNA, 80 bp, synthetic construct
  source 1..80: mol_type = other DNA
aacatggatgtccttttttcgttatcaaagactcttaaagatgccagagacaaaatcgtcgaaggcactctctactctaa

SEQ ID NO: 38397 - DNA, 80 bp, synthetic construct
  source 1..80: mol_type = other DNA
acgccaatgaaacgatgcttgctaatgttacatcagtgagacaagagtatgctattccagtcggacctgtttttccacca

SEQ ID NO: 38398 - DNA, 80 bp, synthetic construct
  source 1..80: mol_type = other DNA
aatttgcagcgcgtattcactgtggcttccattagaagcatgcttgttaagtgaggactgaactaatcattcggtatcca

SEQ ID NO: 38399 - DNA, 80 bp, synthetic construct
  source 1..80: mol_type = other DNA
gctatattaagctattcagactctacaagtaagattgtgatttcacattcgctacgtagagtaactgtatagataatata

SEQ ID NO: 38400 - DNA, 80 bp, synthetic construct
  source 1..80: mol_type = other DNA
atgttgagacagctagaaccactattgatttctttgttgattttgttgataatgtgtgtatggacgaaatggtgcgggaa

SEQ ID NO: 38401 - DNA, 80 bp, synthetic construct
  source 1..80: mol_type = other DNA
tctcaaagaaacggtattgctccacaatctgacgctcttagaaaattgtctggaattaagtttaagagaattaactttga

SEQ ID NO: 38402 - DNA, 80 bp, synthetic construct
  source 1..80: mol_type = other DNA
taattcatcagaatacatagaaaattggaatctacaaaatagaaggcagagaacaggatttacatttcataaaccaaaca

SEQ ID NO: 38403 - DNA, 80 bp, synthetic construct
  source 1..80: mol_type = other DNA
ttttcccatactcattttcgttcacattgaataggtcgcaacctcagcatgataatctgatgggtacaatgtggttgaat

SEQ ID NO: 38404 - DNA, 80 bp, synthetic construct
  source 1..80: mol_type = other DNA
gcaggctcagagatacaagttgcaggatttgattattcatgtgctatcaacgctccagctaatactcaacaatttgaaca

SEQ ID NO: 38405 - DNA, 80 bp, synthetic construct
  source 1..80: mol_type = other DNA
tattgttcagttgcgtcgtgtgcttacaacagctactattactctacttcctgatgcagaaagattcagttttccgagag

SEQ ID NO: 38406 - DNA, 80 bp, synthetic construct
  source 1..80: mol_type = other DNA
tcgttaattcagctgacggcgcgacaacatggtacttcaatcctgtagtattgagaccaaataatgtagaagttgaattc

SEQ ID NO: 38407 - DNA, 80 bp, synthetic construct
  source 1..80: mol_type = other DNA
ttactgctaggaactttgacacaataagattatcattccaactaatgagaccaccaaacatgacacctgcagtcgccgct

SEQ ID NO: 38408 - DNA, 80 bp, synthetic construct
  source 1..80: mol_type = other DNA
gctataccaagtcattcagactcttcaagtaaggacatgatttcatgttcgctacgtagagtaactgtctgaatggtata

SEQ ID NO: 38409 - DNA, 80 bp, synthetic construct
  source 1..80: mol_type = other DNA
aacatggatgtcctgtactctttgtcaaaaactctcaaagatgctagagacaagattgtcgaaggcacattatactctaa

SEQ ID NO: 38410 - DNA, 80 bp, synthetic construct
  source 1..80: mol_type = other DNA
tatttccatactcagcgtcatttactttaaatagatctcaaccaatgcatgacaatttaatgggaaccatgtggcttaat

SEQ ID NO: 38411 - DNA, 80 bp, synthetic construct
  source 1..80: mol_type = other DNA
gctatatcaagtcatccagactctataagtaaggacatggttccatgttcgctacgtagagtaactgtatgaatgatata

SEQ ID NO: 38412 - DNA, 80 bp, synthetic construct
  source 1..80: mol_type = other DNA
gtatgtaactatgtcaagctgtttgaactctgtaagtaaggatgcgtctacgtgttcactacacagagtaatcactcaga

SEQ ID NO: 38413 - DNA, 80 bp, synthetic construct
  source 1..80: mol_type = other DNA
gctacgttaagctgtttgaactctgtaagtaaggatgcgtctacgtattcgctacacagagtaatcactcagataacgta

SEQ ID NO: 38414 - DNA, 80 bp, synthetic construct
  source 1..80: mol_type = other DNA
aacatggaggttctgtattcattgtcaaaaactttaaaagatgctagagataagattgttgaaggtacattatattctaa

SEQ ID NO: 38415 - DNA, 80 bp, synthetic construct
  source 1..80: mol_type = other DNA
gctatgtcaagtcattcagactctacaagtaaggacatgacttcatgttcactacgtagagtaactgcatgaatgatgta

SEQ ID NO: 38416 - DNA, 80 bp, synthetic construct
  source 1..80: mol_type = other DNA
gcagtggatttgtctgatgagatacagtcagttggatcagagaagaaccagcgcgttacagtgaatccaggaccatttgc

SEQ ID NO: 38417 - DNA, 80 bp, synthetic construct
  source 1..80: mol_type = other DNA
tgtggtctatgtgcgatcattggcagcgaatttgaatgacgtaatgtgttctggcggagattacagcttcgcgctacctg

SEQ ID NO: 38418 - DNA, 80 bp, synthetic construct
  source 1..80: mol_type = other DNA
tcggacaatggccagtgatgaaagggggagcggtgacgttgcacacagcaggagtaacattatctacacaattcactgac

SEQ ID NO: 38419 - DNA, 80 bp, synthetic construct
  source 1..80: mol_type = other DNA
tacgtatcactgaactcactaaggtttagatttagactggcagtcgaagaaccatcattcacgataactagaacacgtgt

SEQ ID NO: 38420 - DNA, 80 bp, synthetic construct
  source 1..80: mol_type = other DNA
tagactggcagtcgaagaaccatcattcacgataactagaacacgtgtatcaaaactgtatggtttaccagcggcgaacc

SEQ ID NO: 38421 - DNA, 80 bp, synthetic construct
  source 1..80: mol_type = other DNA
cgtatcagccagcgtcgttcgatctaccagtaggaaattggatgttgttagcgccaacaggaccaggtgtggtagtggaa

SEQ ID NO: 38422 - DNA, 80 bp, synthetic construct
  source 1..80: mol_type = other DNA
gggacggacaattctggcagatggttatctgtaattctgattgaaccaggtgtcacatcagaaactaggacgtatacgat

SEQ ID NO: 38423 - DNA, 80 bp, synthetic construct
  source 1..80: mol_type = other DNA
gtttggatcaagtaaacaggtgttagtgtcgaacgcgtctgatacgaaatggaaatttgttgaaatgatgaagacggcga

SEQ ID NO: 38424 - DNA, 80 bp, synthetic construct
  source 1..80: mol_type = other DNA
ttgatggtgactatgcggaatggggaacattactatcagacaccaaactctatgggatgatgaaatatggaaagagacta

SEQ ID NO: 38425 - DNA, 80 bp, synthetic construct
  source 1..80: mol_type = other DNA
ttcatatacgaaggagaaaccccaaatgccacgaccaaaagatacattgtgacgaagtatgcatcagttgaggtaaggcc

SEQ ID NO: 38426 - DNA, 80 bp, synthetic construct
  source 1..80: mol_type = other DNA
atatagtgacttttatataatttcaagatcacaggaatcagcatgcactgagtatataaacaacggactgccacccatcc

SEQ ID NO: 38427 - DNA, 80 bp, synthetic construct
  source 1..80: mol_type = other DNA
aaaataccaggaatgtagtgcctgtggcaatatcgtcaagatcaattgaaccaagaaaagtgcaggctaatgaagatatt

SEQ ID NO: 38428 - DNA, 80 bp, synthetic construct
  source 1..80: mol_type = other DNA
gtagtttctaagacgtcactatggaaagaaatgcaatataatagagatatcataattagatttaggtttgataactcaat

SEQ ID NO: 38429 - DNA, 80 bp, synthetic construct
  source 1..80: mol_type = other DNA
gcagacagtatatgcgccagtgaactggggacccggtgaagtgaatgactcgactgtagtacaacctgtgttggacggac

SEQ ID NO: 38430 - DNA, 80 bp, synthetic construct
  source 1..80: mol_type = other DNA
catgtggcgctccacaacttgatattatcatatatggagatgagcaaaactcctgcatctctaattaataacctaaagaa

SEQ ID NO: 38431 - DNA, 80 bp, synthetic construct
  source 1..80: mol_type = other DNA
aaacacagacaccatatagggggtttgggcacatgcaccaataagatggcatccgttcatgtatcaacggcgccaccatt

SEQ ID NO: 38432 - DNA, 80 bp, synthetic construct
  source 1..80: mol_type = other DNA
attatatctagatctattaatataataatttagttatttaaaaactctaaatattgtctataatataatcacttagtaat

SEQ ID NO: 38433 - DNA, 80 bp, synthetic construct
  source 1..80: mol_type = other DNA
acaaaacaaaaaaatgggacaagtggccatggaagtaagagtggagaacattcgggcaatagacatgttcaaagcaaaga

SEQ ID NO: 38434 - DNA, 80 bp, synthetic construct
  source 1..80: mol_type = other DNA
tgaaaaaccgtataagaagtagcaagtgctatagaaatgctacactgatccttattggattatcagcactaagtatggca

SEQ ID NO: 38435 - DNA, 80 bp, synthetic construct
  source 1..80: mol_type = other DNA
cttaatatttttttaatcattgattatgcaaaatcaaaaaacatgaccaaggtggaacactgtgttaatacgccgccggt

SEQ ID NO: 38436 - DNA, 80 bp, synthetic construct
  source 1..80: mol_type = other DNA
agaaccaagcaagaagaccccaatgacctctgcagtagacttaaacaccaaacccaatccacagtgggcaacacagttga

SEQ ID NO: 38437 - DNA, 80 bp, synthetic construct
  source 1..80: mol_type = other DNA
ccacagaggattcaacatctctagcagcaaccctggagggccatctacacacagggacaactccaacaccagatgcaaca

SEQ ID NO: 38438 - DNA, 80 bp, synthetic construct
  source 1..80: mol_type = other DNA
gtctcccagcaaaccacagacgagcacacaacactgctgagatcagccaacagacagaccacccaaacaaccgcagagaa

SEQ ID NO: 38439 - DNA, 80 bp, synthetic construct
  source 1..80: mol_type = other DNA
aaagccaaccagagcaacaaccaaaaaagaaaccacaactcgaaccacaagcacagctgcaacccaaacactcaatacca

SEQ ID NO: 38440 - DNA, 80 bp, synthetic construct
  source 1..80: mol_type = other DNA
ctaaccaaaccagcaatggaagagaggcaaccacaacatctgccagatccagaaacaatgccacaactcaaagcagcgac

SEQ ID NO: 38441 - DNA, 80 bp, synthetic construct
  source 1..80: mol_type = other DNA
caaacaacccaggctgcagacccaagctcccaatcacaacatacacagaaaagcacaacaacaacatacaacacagacac

SEQ ID NO: 38442 - DNA, 80 bp, synthetic construct
  source 1..80: mol_type = other DNA
attatttaagaattaagaagaagctaaaattcaagggacaaataacaatggatccgttttgtgaatccactgttaatgtc

SEQ ID NO: 38443 - DNA, 80 bp, synthetic construct
  source 1..80: mol_type = other DNA
caaattctacccaggtttattaataaagtgtcctagttatttaaaaaccgaatattgtctaggctgcatgacactttgca

SEQ ID NO: 38444 - DNA, 80 bp, synthetic construct
  source 1..80: mol_type = other DNA
tcttgagaaactcaggcagtgaagttcaggtggttctaaccaaaacatactccttagggaaaggcaaaaacagtaaaggg

SEQ ID NO: 38445 - DNA, 80 bp, synthetic construct
  source 1..80: mol_type = other DNA
aaaggctgctcatacataactaaccaggatgcagacactgtgacaattgacaataccgtgtatcaactaagcaaagttga

SEQ ID NO: 38446 - DNA, 80 bp, synthetic construct
  source 1..80: mol_type = other DNA
atagttagttaattaaaaaatgggacaaatcatcatgtctcgtaaggctccatgcaaatatgaagtgcggggcaaatgca

SEQ ID NO: 38447 - DNA, 80 bp, synthetic construct
  source 1..80: mol_type = other DNA
aagaccccaatgacttccacagcaggcccaagcaccaagcccaatccacagcaagcaacacagtggaccacagagaactc

SEQ ID NO: 38448 - DNA, 80 bp, synthetic construct
  source 1..80: mol_type = other DNA
gcaacaactcaaaaaaagggaaaaggaaaagaaaacacaaaccaaaccacaagtacagctgcaatccaaacaaccaacac

SEQ ID NO: 38449 - DNA, 80 bp, synthetic construct
  source 1..80: mol_type = other DNA
aacagacaacccgggcaacagaaccaggctcctcaccataccatgcacggagaagcgcaggacccaggtgaacacaacac

SEQ ID NO: 38450 - DNA, 80 bp, synthetic construct
  source 1..80: mol_type = other DNA
agaggtatctcatccaagtagttaacaaaaaaaccacaaaataaccttgaaaactaaaaaactaaaatatgaatttagat

SEQ ID NO: 38451 - DNA, 80 bp, synthetic construct
  source 1..80: mol_type = other DNA
ccaggaaaacatagacactatatgaagggtttgggcatatgcaccaatgagatggcatctgatcatgtatcaatagcgcc

SEQ ID NO: 38452 - DNA, 80 bp, synthetic construct
  source 1..80: mol_type = other DNA
aacaatccaggcagcagacccaagctccaaaccataccatacacagacaaacacaacaacagcacacaacacagacacat

SEQ ID NO: 38453 - DNA, 80 bp, synthetic construct
  source 1..80: mol_type = other DNA
catctaacagtttaattgaccattagttaattaaaaattataaattagtaactaattaataaaaaatcagaaattgaaat

SEQ ID NO: 38454 - DNA, 80 bp, synthetic construct
  source 1..80: mol_type = other DNA
ggagccaccaaaaccacagaaaaacaaacaaccaaaacaacagatcctgttgaagaagaggaactcaatgaaaagaagat

SEQ ID NO: 38455 - DNA, 80 bp, synthetic construct
  source 1..80: mol_type = other DNA
atcaccttccagtgatgggaagactcctgcagagaaaaaatcaaaatctccaaccaatgtaaaaaagaaagtttccttca

SEQ ID NO: 38456 - DNA, 80 bp, synthetic construct
  source 1..80: mol_type = other DNA
atgaatacagcaaacttgactttgataagttaacggtttgcgatgttaaaacagtttatttgacaaccatgaaaccatat

SEQ ID NO: 38457 - DNA, 80 bp, synthetic construct
  source 1..80: mol_type = other DNA
gggatggtgtcaaaatttgtgagttcagccaaatcagttggcaaaaagacacacgatctaattgcactgtgtgacttcat

SEQ ID NO: 38458 - DNA, 80 bp, synthetic construct
  source 1..80: mol_type = other DNA
caactgtcctaatcaataattgcccatataatcctaaggatcaatgagcttattattatagttatataaaaataatttag

SEQ ID NO: 38459 - DNA, 80 bp, synthetic construct
  source 1..80: mol_type = other DNA
aactaggaaggtattaatagaaagcgggacaagtaaaaatgtcttggaaagtgatgattatcatttcattactcataaca

SEQ ID NO: 38460 - DNA, 80 bp, synthetic construct
  source 1..80: mol_type = other DNA
cctcagcacggactaaaagaaggttatttagaagaatcatgtagtactataactgaaggatatctcagtgttttaagaac

SEQ ID NO: 38461 - DNA, 80 bp, synthetic construct
  source 1..80: mol_type = other DNA
gccaaaaccataaggcttgagagtgaagtgaatgcaatcaaaggtgctctcaaaacaaccaacgaggcagtatccacact

SEQ ID NO: 38462 - DNA, 80 bp, synthetic construct
  source 1..80: mol_type = other DNA
aggaaatggagtgcgagtcctagccaccgcagtaagagagctgaaagaatttgtgagcaaaaacctgactagtgcaatta

SEQ ID NO: 38463 - DNA, 80 bp, synthetic construct
  source 1..80: mol_type = other DNA
ccattcctgatctaaatgcaatacagtacttgaaaaggctaattcagaaacataccaactttgtcataaaagacagagat

SEQ ID NO: 38464 - DNA, 80 bp, synthetic construct
  source 1..80: mol_type = other DNA
acctgttggagagtacacacgaatcaatgcacaaatataaaaatatacaagttcttatgttttgggtttatgaattcaac

SEQ ID NO: 38465 - DNA, 80 bp, synthetic construct
  source 1..80: mol_type = other DNA
aaatacagactgtgaagaactaacagttttatgcaacaaaaagtcaaaagccatgacagaaagacataggaaagcagagt

SEQ ID NO: 38466 - DNA, 80 bp, synthetic construct
  source 1..80: mol_type = other DNA
gtcactgtctacatacaaccgagtggtggtgttattatctttaagagaaaacttggttttcaacattaaaatcagaacaa

SEQ ID NO: 38467 - DNA, 80 bp, synthetic construct
  source 1..80: mol_type = other DNA
atcatatctagatctattaatataatagtttagttatttaaaaactctaaatattgtctagactccacaacactttgcgg

SEQ ID NO: 38468 - DNA, 80 bp, synthetic construct
  source 1..80: mol_type = other DNA
tcatatgcaataatcaatggtcaaaccactgttgtaaactcacctacaatataatcgcttagtaatacaaaacaagaaaa

SEQ ID NO: 38469 - DNA, 80 bp, synthetic construct
  source 1..80: mol_type = other DNA
tgggacaagtggccatggaagtaagagtggagaacattcgggcaattgacatgttcaaagcaaagatgaaaaaccgttta

SEQ ID NO: 38470 - DNA, 80 bp, synthetic construct
  source 1..80: mol_type = other DNA
agaagtagcaagtgctatagaaatgctacactgatccttattggattatcagcactaagcatggcacttaatattttttt

SEQ ID NO: 38471 - DNA, 80 bp, synthetic construct
  source 1..80: mol_type = other DNA
aatcattgattatgcaacatcaaaaaacatgaccaaagtggaacactgtgttaatatgccgccggtagaaccaagcaaga

SEQ ID NO: 38472 - DNA, 80 bp, synthetic construct
  source 1..80: mol_type = other DNA
agaccccaatgacctctgcagtagacccaaacaccaaacccaatccacagtggacaacacagttgaccacagaggactca

SEQ ID NO: 38473 - DNA, 80 bp, synthetic construct
  source 1..80: mol_type = other DNA
acatctctagcagtaaccctagaggaccatctacacacagggacaactccaacaccagatgcaacagtctctcagcaaat

SEQ ID NO: 38474 - DNA, 80 bp, synthetic construct
  source 1..80: mol_type = other DNA
cacaggcgagcacacaacactgctgagatcaaccaacagacagaccacccaaacaaccgcagagaaaaagccaaccagag

SEQ ID NO: 38475 - DNA, 80 bp, synthetic construct
  source 1..80: mol_type = other DNA
caacaatcaaaaaagaaaccacaactcgaaccacaagcacagctgcaatccaaacactcaacaccaccaaccaaaccagc

SEQ ID NO: 38476 - DNA, 80 bp, synthetic construct
  source 1..80: mol_type = other DNA
aatggaagggaggcaaccacaacatctgccagatccagaaacaatgccacaactcaaagcagcaaccaaacaacccagac

SEQ ID NO: 38477 - DNA, 80 bp, synthetic construct
  source 1..80: mol_type = other DNA
agcagacccaagctcccaatcacaacacacacagaaaagcacaacaacaacatacaacacagacacatcttctccaagta

SEQ ID NO: 38478 - DNA, 80 bp, synthetic construct
  source 1..80: mol_type = other DNA
gttaacaaaaaaactataaaataaccatgaaaaccaaaaaactagaaaagttaatttgaactcagaaaagaacacaaaca

SEQ ID NO: 38479 - DNA, 80 bp, synthetic construct
  source 1..80: mol_type = other DNA
ctatatgaattgtttgagcgtatatactaatgaaatagcatctgtttgtgcatcaataatactatcattatttaagaatt

SEQ ID NO: 38480 - DNA, 80 bp, synthetic construct
  source 1..80: mol_type = other DNA
aagaagaagctaaaattcaagggacaaataacaatggatccgttttgtgaatccactgtcaatgtctatcttcctgattc

SEQ ID NO: 38481 - DNA, 80 bp, synthetic construct
  source 1..80: mol_type = other DNA
gcagatcactaggcaagttagttttcattgtatcatcttatgggtgtgtagtaaaaagcaacaaaagtaaaagagtaagt

SEQ ID NO: 38482 - DNA, 80 bp, synthetic construct
  source 1..80: mol_type = other DNA
tttttcacatataaccaactgttaacatggaaagatgtgatgttgagtaggttcaatgcaaacttttgtatatgggtaag

SEQ ID NO: 38483 - DNA, 80 bp, synthetic construct
  source 1..80: mol_type = other DNA
atctacctgaaattataaaaaatcaatatttagaagaggtcttcaatgcaagtgacagtcaaagaacaaggagagtctta

SEQ ID NO: 38484 - DNA, 80 bp, synthetic construct
  source 1..80: mol_type = other DNA
aacagcatccgttagctggaaaacaactgtttaaacaattgaacaaaacactaacatctgtgcaaagattttttgagctg

SEQ ID NO: 38485 - DNA, 80 bp, synthetic construct
  source 1..80: mol_type = other DNA
tgaagtaattgtttgattatgcgattacatgatagttaattaaaaaattcaattaaaaatcaaaagttaaaatttaaaac

SEQ ID NO: 38486 - DNA, 80 bp, synthetic construct
  source 1..80: mol_type = other DNA
gtcactgtctacatataaccgagtgggggtgctattatctttaaaaaataaaataacaacacggctttcaacattgaaat

SEQ ID NO: 38487 - DNA, 80 bp, synthetic construct
  source 1..80: mol_type = other DNA
cagaacaaattccacccaggtttattaatacagtgttttagttatttaaaaaccgaatattgtctaggttgcacgacact

SEQ ID NO: 38488 - DNA, 80 bp, synthetic construct
  source 1..80: mol_type = other DNA
tcgcaataatatgcaataatcaatagtcaaaccactgctgcaaacttatccataatataatcactgagtaatacaaaaca

SEQ ID NO: 38489 - DNA, 80 bp, synthetic construct
  source 1..80: mol_type = other DNA
agaaagtgggacaagtggctatggaagtaagagtggagaacattcgagcgatagacatgttcaaagcaaagataaagaac

SEQ ID NO: 38490 - DNA, 80 bp, synthetic construct
  source 1..80: mol_type = other DNA
cgtataagaagcagcaggtgctatagaaatgctacactgatccttattggactaacagcactaagcatggcacttaatat

SEQ ID NO: 38491 - DNA, 80 bp, synthetic construct
  source 1..80: mol_type = other DNA
tttcctgatcattgatcatgcaacactaagaaacatgatcaaaacagaaaactgtgctaacatgccgtcggcagaaccaa

SEQ ID NO: 38492 - DNA, 80 bp, synthetic construct
  source 1..80: mol_type = other DNA
gcaaaaagaccctaatgacctctacagcaggcccaagcaccaaacctaatccacagcaagcaacacagtggaccacagag

SEQ ID NO: 38493 - DNA, 80 bp, synthetic construct
  source 1..80: mol_type = other DNA
aattcaacatctccggcagcaaccctagagggccatccatacacagagacaactcaaacaccagacacaacagcccccca

SEQ ID NO: 38494 - DNA, 80 bp, synthetic construct
  source 1..80: mol_type = other DNA
gcaaaccacagacaagcatacagcactaccaaaatcaaccaatgaacggatcactcagacaaccacagagaaaaagacaa

SEQ ID NO: 38495 - DNA, 80 bp, synthetic construct
  source 1..80: mol_type = other DNA
ccagagcaacaacccaaagaagggaaaaagggaaagaaaatacaaaccaaaccacaagcacagctgcaacccaaacaacc

SEQ ID NO: 38496 - DNA, 80 bp, synthetic construct
  source 1..80: mol_type = other DNA
aacaccaccaaccaaatcagaaatgcaagtgagacaatcacaacatccgacagacccagaactgacatcacaacccaaag

SEQ ID NO: 38497 - DNA, 80 bp, synthetic construct
  source 1..80: mol_type = other DNA
cagtgaacagacaacccgggcaacagaaccaggctccccaccacatcatgcacgggaaagtgcaggacccaggtgaacgc

SEQ ID NO: 38498 - DNA, 80 bp, synthetic construct
  source 1..80: mol_type = other DNA
aacacacaggtatctcatccaagtagttaacaaaaaaccacaaaataaccttgaaaaccaaaaaactaaaatataaattt

SEQ ID NO: 38499 - DNA, 80 bp, synthetic construct
  source 1..80: mol_type = other DNA
cgccaacattatttaaggaataagaagaggcaaaaattcaagggataaatgacaatggatcccttttgtgagtctactgt

SEQ ID NO: 38500 - DNA, 80 bp, synthetic construct
  source 1..80: mol_type = other DNA
taatgtttatctccctgattcatatctcaaaggagtaatatcttttagtgaaaccaacgcaattggatcatgtcttttga

SEQ ID NO: 38501 - DNA, 80 bp, synthetic construct
  source 1..80: mol_type = other DNA
aaatgattatctaacagtttaattgaccattagttaattaaaaattataaattagtaactaatgataaaaaatagaacta

SEQ ID NO: 38502 - DNA, 80 bp, synthetic construct
  source 1..80: mol_type = other DNA
agttgatcattagttatttaaaattataaattagtaactaactgataaaaaatcagaaactataattgaatgtatccgga

SEQ ID NO: 38503 - DNA, 80 bp, synthetic construct
  source 1..80: mol_type = other DNA
aattgggggcctggggtaacgaatgattccactactgttgagccagtgttggatggaccatatcagccgacgactttcaa

SEQ ID NO: 38504 - DNA, 80 bp, synthetic construct
  source 1..80: mol_type = other DNA
tgcttctagcaccaacatcagaaggggtagttgttgaaggtactaatggtacggatagatggctagctacaatacttata

SEQ ID NO: 38505 - DNA, 80 bp, synthetic construct
  source 1..80: mol_type = other DNA
cctgtgatgagtggtggctcagtatcattgcgttcagctggagtaacgttatcaactcaatttacagactttgtgtcatt

SEQ ID NO: 38506 - DNA, 80 bp, synthetic construct
  source 1..80: mol_type = other DNA
tcagtttagcagtagaagaaccgccattctctattttaaggacacggatatcagggttatatgggttaccggcagccaat

SEQ ID NO: 38507 - DNA, 80 bp, synthetic construct
  source 1..80: mol_type = other DNA
ccaaataatggaagagacttctatgaaattgcgggtagattttcattaattttattagtaccatcaaatgatgattatca

SEQ ID NO: 38508 - DNA, 80 bp, synthetic construct
  source 1..80: mol_type = other DNA
aaattgcgggtagattttcattaattttattagtaccatcaaatgatgattatcaaactcctataaagaactcagggacg

SEQ ID NO: 38509 - DNA, 80 bp, synthetic construct
  source 1..80: mol_type = other DNA
gaaccaaatgtgcctgagacgactagaaattacacattatttggggaaacagcgagtatatcagtagcaaacccatcaca

SEQ ID NO: 38510 - DNA, 80 bp, synthetic construct
  source 1..80: mol_type = other DNA
aagtaaatggcgttttgttgacgtagctaagaccactgcaaatggaacatattcacaatatggaccattactatcagata

SEQ ID NO: 38511 - DNA, 80 bp, synthetic construct
  source 1..80: mol_type = other DNA
caaaactgtatggagtaatgaaatacaacgggaagttgtatacgtataatggtgaaactccgaatgctacaacaaattat

SEQ ID NO: 38512 - DNA, 80 bp, synthetic construct
  source 1..80: mol_type = other DNA
tattcaactacaaattatgactcagtgaatatgacatcttattgcgatttttacattataccaagagcacaagaatcaaa

SEQ ID NO: 38513 - DNA, 80 bp, synthetic construct
  source 1..80: mol_type = other DNA
gtgcacagaatacgtaaataatggattaccaccaatacaaaacaccagaaatgtcgtaccattagctttatcttcacgat

SEQ ID NO: 38514 - DNA, 80 bp, synthetic construct
  source 1..80: mol_type = other DNA
caatagttgctagaagagctgcagtgaacgaagacatagttatatcgaaaacgtcattgtggaaagaaatgcaatataat

SEQ ID NO: 38515 - DNA, 80 bp, synthetic construct
  source 1..80: mol_type = other DNA
tgagatcattagctgcggacttaaatgaagtgacatgtgcagggggtacttataatttccgactaccagttggacaatgg

SEQ ID NO: 38516 - DNA, 80 bp, synthetic construct
  source 1..80: mol_type = other DNA
tgtttgattatgcgattacatgatagttaattaaaaaattcaattaaaaatcaaaagttaaaatttaaaacctatcatta

SEQ ID NO: 38517 - DNA, 80 bp, synthetic construct
  source 1..80: mol_type = other DNA
ccattcccgatccaaatgcagtacagcacttgaaaaggccgactcagaaacacaccaactttgtcataaaagacagagat

SEQ ID NO: 38518 - DNA, 80 bp, synthetic construct
  source 1..80: mol_type = other DNA
gtcactgtctacatacaaccgagtggtggtgtcatcatccccaagagaaaactcggctttcaacaccaaaatcagaacaa

SEQ ID NO: 38519 - DNA, 80 bp, synthetic construct
  source 1..80: mol_type = other DNA
gtttagttgatcattagttatttaaaattataaattagtaactaactgataaaaaatcagaaattgaagttgaatgtata

SEQ ID NO: 38520 - DNA, 80 bp, synthetic construct
  source 1..80: mol_type = other DNA
acaggtatcttacccaattagttaacaaaaaaccacaaaataactttgaaaaccaaaatataaatttaaaaccagggaaa

SEQ ID NO: 38521 - DNA, 80 bp, synthetic construct
  source 1..80: mol_type = other DNA
ccaaaaaaacgggacaataaaatgtctcttcaagggattcacctaagtgatctgtcatacaaacatgctatattaaaaga

SEQ ID NO: 38522 - DNA, 80 bp, synthetic construct
  source 1..80: mol_type = other DNA
ggctaaaggagagttatttggaagaatcatgcagtactataactgagggatacctcagtgttttaagaacaggctggtat

SEQ ID NO: 38523 - DNA, 80 bp, synthetic construct
  source 1..80: mol_type = other DNA
cattttcggcagcaaccctagagggccatccatacacagagacaactcaaacaccaaacacaacagctccccagcaaacc

SEQ ID NO: 38524 - DNA, 80 bp, synthetic construct
  source 1..80: mol_type = other DNA
acagacaaacatacagcaccaccgaaatcaatccatgaacagatcacccagacaaccacagagaaaaagacaaccagagc

SEQ ID NO: 38525 - DNA, 80 bp, synthetic construct
  source 1..80: mol_type = other DNA
gaccacattgtctcgttaactgggaaagaaagagaattaagtgtaggtaggatgtttgcaatgcaaccaggaaaacaaag

SEQ ID NO: 38526 - DNA, 80 bp, synthetic construct
  source 1..80: mol_type = other DNA
taaaaacaaaaatatgggacaagtagttatggaggtgaaggtagagaacattcgagccatagacatgctcaaagcaagag

SEQ ID NO: 38527 - DNA, 80 bp, synthetic construct
  source 1..80: mol_type = other DNA
taaaatgaaaatatcagattacaaggtagtagaaccagtaaacatgcaacatgaaataatgaagaatgtacacagttgtg

SEQ ID NO: 38528 - DNA, 80 bp, synthetic construct
  source 1..80: mol_type = other DNA
gtcactgtctacatacaaccgagtggcggtgccattatcttcaagagaaaactcggctctcaacatcaaaaccagaacaa

SEQ ID NO: 38529 - DNA, 80 bp, synthetic construct
  source 1..80: mol_type = other DNA
atcccatccagatccaccaatacaatattttagtcattcaaaaactctaaatattgtctagacttcacaacactttgcgg

SEQ ID NO: 38530 - DNA, 80 bp, synthetic construct
  source 1..80: mol_type = other DNA
agaagtagcaagtgccacagaaatgctacactgatccccattggatcaacagcattaagtatggcacttaatattttttt

SEQ ID NO: 38531 - DNA, 80 bp, synthetic construct
  source 1..80: mol_type = other DNA
tttgattatgcaattatttgatagttaattaaaaattaaaattaaaaatcaaaagttaaaatttaaaacctatcattaag

SEQ ID NO: 38532 - DNA, 80 bp, synthetic construct
  source 1..80: mol_type = other DNA
gatccacaacacaaccaagtgaaagcagaacaaagacaaactcgacagtccacaaaaaaaacaaaaaaaacatctcaagt

SEQ ID NO: 38533 - DNA, 80 bp, synthetic construct
  source 1..80: mol_type = other DNA
tagacaggtccacagcacaaccaagtgaaaacagaacagagacaaaaccgacagcccacacaagaaacaacctaagcaca

SEQ ID NO: 38534 - DNA, 80 bp, synthetic construct
  source 1..80: mol_type = other DNA
acattccgcatgagcagcacagaaaaaagaacaaccacaacattagtccagtccgatagcagcactacaacccaaaatca

SEQ ID NO: 38535 - DNA, 80 bp, synthetic construct
  source 1..80: mol_type = other DNA
tgaagaaacaggttcagcgaacccacaggcatctgcaagcacaatacaaaactagcacaccaacaatataaaaccaaatt

SEQ ID NO: 38536 - DNA, 80 bp, synthetic construct
  source 1..80: mol_type = other DNA
accctccgcacaagcagcgcaataacaaatcgtctgtcctctgtagacagatccacaacacaaccaagtgaaagcagaac

SEQ ID NO: 38537 - DNA, 80 bp, synthetic construct
  source 1..80: mol_type = other DNA
aaattccaaacaaaacgggacaaataaaaatgtctcttcaagggattcacctaaatgatctgtcatataaacatgctata

SEQ ID NO: 38538 - DNA, 80 bp, synthetic construct
  source 1..80: mol_type = other DNA
tctatagaaaagaatgaacgtgctacattaacaacactaatgagagaccctcaggcagtaggatcagaacgacaagctaa

SEQ ID NO: 38539 - DNA, 80 bp, synthetic construct
  source 1..80: mol_type = other DNA
aaatttctaagaccttgagagaaaaatcatggaacaatatggaaatagtaggagtgacatctcctagtattgtgacatgt

SEQ ID NO: 38540 - DNA, 80 bp, synthetic construct
  source 1..80: mol_type = other DNA
atggatgttgtgtatgcaactagttctcatttaaaaggaataattattgaaaaattcagtactgacaagaccacaagagg

SEQ ID NO: 38541 - DNA, 80 bp, synthetic construct
  source 1..80: mol_type = other DNA
tgccactggtgtggaatattaacagaacagtgtatagaaaacaatatctttaggaaagattggggtgatgggttcatctc

SEQ ID NO: 38542 - DNA, 80 bp, synthetic construct
  source 1..80: mol_type = other DNA
gattgtcaatgctgaaggagagttagttgaaattaaatcaatcaaaatttatctgcagttaatagaacaaagtctatctt

SEQ ID NO: 38543 - DNA, 80 bp, synthetic construct
  source 1..80: mol_type = other DNA
tgagaataactgtattgaattatacagatatggcacatgctcttacacgattaattaggaaaaaattgatgtgtgataat

SEQ ID NO: 38544 - DNA, 80 bp, synthetic construct
  source 1..80: mol_type = other DNA
gcactcttcaatccaagttcatcaccaatgtttaatctaacccaggttattgatcctacaacacaactagactattttcc

SEQ ID NO: 38545 - DNA, 80 bp, synthetic construct
  source 1..80: mol_type = other DNA
taggataatatttgagaggttaaaaagttatgataccagttcagactacaacaaagggaagttaacaaggaattacatga

SEQ ID NO: 38546 - DNA, 80 bp, synthetic construct
  source 1..80: mol_type = other DNA
cattattaccatggcaacacgtaaacaggtacaattttgtctttagttctacaggttgtaaaatcagtttgaagacatgc

SEQ ID NO: 38547 - DNA, 80 bp, synthetic construct
  source 1..80: mol_type = other DNA
atcgggaaattgataaaagatttaaatcctaaagttctttactttattggagaaggagcaggtaactggatggcaagaac

SEQ ID NO: 38548 - DNA, 80 bp, synthetic construct
  source 1..80: mol_type = other DNA
tcaagcttatagataatttgggaaatgcagaaataaagaaactaatcaaggtcactgggtatatgcttgtgagtaagaag

SEQ ID NO: 38549 - DNA, 80 bp, synthetic construct
  source 1..80: mol_type = other DNA
taataataataataatgattaaccataatctcacacaactgagaaaataatcgtctaacagtttagttgatcattagtta

SEQ ID NO: 38550 - DNA, 80 bp, synthetic construct
  source 1..80: mol_type = other DNA
aatcgtctaacagtttagttgatcattagttatttaaaattataaattagtaactaactgataaaaaatcagaaattgaa

SEQ ID NO: 38551 - DNA, 80 bp, synthetic construct
  source 1..80: mol_type = other DNA
ctctagaactacccaccatcagcaaacccgcacgatcatctacactgctggaaccaaaattagcatgggcagacaacagc

SEQ ID NO: 38552 - DNA, 80 bp, synthetic construct
  source 1..80: mol_type = other DNA
ggaatcaccaaaatcacagaaaaatcagcaaccaaaacagcagatcctgttgaagaagaggaattcaatgaaaagaaagt

SEQ ID NO: 38553 - DNA, 80 bp, synthetic construct
  source 1..80: mol_type = other DNA
attgccttccagtgatgggaagactcccgcagaaaaaaaatcaaagtcttcaaccagtgtaaaaaagaaagtttccttta

SEQ ID NO: 38554 - DNA, 80 bp, synthetic construct
  source 1..80: mol_type = other DNA
catcaaatgaaccagggaaatacaccaaactagagaaagatgctctagacttgctctcagacaatgaggaagaagacgca

SEQ ID NO: 38555 - DNA, 80 bp, synthetic construct
  source 1..80: mol_type = other DNA
aatcctcaatcttaacctttgaggagaaagacacatcatcgctaagtattgaagctagactagaatctatagaagagaag

SEQ ID NO: 38556 - DNA, 80 bp, synthetic construct
  source 1..80: mol_type = other DNA
ttgagcatgatattaggactgcttcgtacacttaacattgcaacagcaggaccaacagctgcacgagatggaatcagaga

SEQ ID NO: 38557 - DNA, 80 bp, synthetic construct
  source 1..80: mol_type = other DNA
ttcaggctgagagcatcagtagaatctgcaagagctggagtcaccaaggaacaagatacgtactaaaatctagataaaaa

SEQ ID NO: 38558 - DNA, 80 bp, synthetic construct
  source 1..80: mol_type = other DNA
taactgtcctaatcaataattgcctatataactctagagattaataagcttattattatagttatataaaaataaattag

SEQ ID NO: 38559 - DNA, 80 bp, synthetic construct
  source 1..80: mol_type = other DNA
aattataagggcatcaatagaaagcgggacaaataaaaatgtcttggaaagtgatgatcatcatttcgttactcataaca

SEQ ID NO: 38560 - DNA, 80 bp, synthetic construct
  source 1..80: mol_type = other DNA
actaatgttttcacattagaagttggtgatgttgaaaatcttacatgtactgatggacctagcttaatcaaaacagaact

SEQ ID NO: 38561 - DNA, 80 bp, synthetic construct
  source 1..80: mol_type = other DNA
tgacctaacaaaaagtgctttaagggaactcaaaacagtctctgctgatcagttagcaagagaggagcaaattgaaaatc

SEQ ID NO: 38562 - DNA, 80 bp, synthetic construct
  source 1..80: mol_type = other DNA
gcctcctaagagaggatcaagggtggtattgtaaaaatgcaggatccactgtttactacccaaatgaaaaagactgtgaa

SEQ ID NO: 38563 - DNA, 80 bp, synthetic construct
  source 1..80: mol_type = other DNA
tcggtgctttggtggcttgctacaaaggggtaagctgctcgattggcagcaatcgggttggaatcatcaaacaattaccc

SEQ ID NO: 38564 - DNA, 80 bp, synthetic construct
  source 1..80: mol_type = other DNA
ggcactggtggaacagtcaaacaaaattctaaacagtgcagaaaaaggaaacactggtttcattattgtaataattttgg

SEQ ID NO: 38565 - DNA, 80 bp, synthetic construct
  source 1..80: mol_type = other DNA
ttgctgttcttggtttaaccatgatttcagtgagcatcatcatcataatcaagaaaacaaggaagcccacaggagcacct

SEQ ID NO: 38566 - DNA, 80 bp, synthetic construct
  source 1..80: mol_type = other DNA
ccagagctgaatggtgtcaccaacggcggtttcataccacatagttagttaattaaaaaatgggacaaatcatcatgtct

SEQ ID NO: 38567 - DNA, 80 bp, synthetic construct
  source 1..80: mol_type = other DNA
gactttgttcttggttctactaatgtggttcaagggtacattgatgacaatcaaggaataaccaaggctgcagcttgcta

SEQ ID NO: 38568 - DNA, 80 bp, synthetic construct
  source 1..80: mol_type = other DNA
tagtctacacaacataatcaagcaactacaagaaacagaagtaagacaggctagagacaacaagctttctgatagcaaac

SEQ ID NO: 38569 - DNA, 80 bp, synthetic construct
  source 1..80: mol_type = other DNA
caatttgcaggcatgtcaatcaaaaaatgaatcagacaaaaaggtcacaaagttaaatactacatcaacaacaattagac

SEQ ID NO: 38570 - DNA, 80 bp, synthetic construct
  source 1..80: mol_type = other DNA
ccatacctgatctaactgtagtacattatttgaaaagactgattcagagacacaccaactttgtcataaaagacagtgac

SEQ ID NO: 38571 - DNA, 80 bp, synthetic construct
  source 1..80: mol_type = other DNA
acttgttggaaaatacacaagaatcaatgtacaaatataaaaatatacaagttcttatgctttgggttcataaattcaac

SEQ ID NO: 38572 - DNA, 80 bp, synthetic construct
  source 1..80: mol_type = other DNA
aggtacagattgtgaggaactaacaaccttatgcgacaaaaagttaaaaaccatggtagaaaaacatagaaaggcagaat

SEQ ID NO: 38573 - DNA, 80 bp, synthetic construct
  source 1..80: mol_type = other DNA
gtcactgtctacatataaccgagtgggggtgctattatccttaaaaaataacacggctttcaacattgaaatcagaacaa

SEQ ID NO: 38574 - DNA, 80 bp, synthetic construct
  source 1..80: mol_type = other DNA
attctacccaggtttattaatacagtgttttagttatttaaaaaccgaatattgtctaggctgcacgacacttcgcaata

SEQ ID NO: 38575 - DNA, 80 bp, synthetic construct
  source 1..80: mol_type = other DNA
atatgcaataatcaatagtcaaaccactgctgcaaactcatctataatataatcactgagtaatacaaaacaagaaaatg

SEQ ID NO: 38576 - DNA, 80 bp, synthetic construct
  source 1..80: mol_type = other DNA
ggacaagtggctatggaagtaagagtggagaacattcgagcgatagacatgttcaaagcaaagataaagaaccgtataag

SEQ ID NO: 38577 - DNA, 80 bp, synthetic construct
  source 1..80: mol_type = other DNA
aagcagcaggtgctatagaaatgccacactgatccttattggactaacagcattaagcatggcacttaatattttcctga

SEQ ID NO: 38578 - DNA, 80 bp, synthetic construct
  source 1..80: mol_type = other DNA
tcattgatcatgcaacattaagaaacatgatcaaaacagaaaactgtgctaacatgccgtcggcagaaccaagcaaaaag

SEQ ID NO: 38579 - DNA, 80 bp, synthetic construct
  source 1..80: mol_type = other DNA
accccaatgacctctacagcaggcacaagcaccaaacctaatccacagcaagcaacacagtggaccacagagaactcaac

SEQ ID NO: 38580 - DNA, 80 bp, synthetic construct
  source 1..80: mol_type = other DNA
atctccggcagcaacctcagagggccatccatacacagggacaacccaaacaccagacacaacagctccccagcaaacca

SEQ ID NO: 38581 - DNA, 80 bp, synthetic construct
  source 1..80: mol_type = other DNA
cagacaaacacacagcactgccaaaatcaaccaatgaacagatcaaccagacagccacagagaaaaagacaaccagagca

SEQ ID NO: 38582 - DNA, 80 bp, synthetic construct
  source 1..80: mol_type = other DNA
acaacccaaaaaagggaaaaaggaaaagaaaacacaaatcaaaccacaagcacagctgcaacccaaacaaccaacaccac

SEQ ID NO: 38583 - DNA, 80 bp, synthetic construct
  source 1..80: mol_type = other DNA
caaccaaatcagaaatgcaagcgagacaatcacaacatccgacagacccagaactgacaccacaacccaaagcagcgaac

SEQ ID NO: 38584 - DNA, 80 bp, synthetic construct
  source 1..80: mol_type = other DNA
agacaacccgggcagcagaaccaggatccccaccacaccatgcacggagaggtgcaggacccaggtgaacgcaacacaca

SEQ ID NO: 38585 - DNA, 80 bp, synthetic construct
  source 1..80: mol_type = other DNA
ggtatctcatccaagtagttaacaaaaaaccacaaaataaccttgaaaaccaaaaaaccaaaacacaaattcagacccag

SEQ ID NO: 38586 - DNA, 80 bp, synthetic construct
  source 1..80: mol_type = other DNA
aaaaacacagacactatatggagggtttgggcatatgcaccaatgagatggcatctgttcatgtatcaatagcgccatca

SEQ ID NO: 38587 - DNA, 80 bp, synthetic construct
  source 1..80: mol_type = other DNA
ttatttaaggaataagaagaggcaaaaattcaagggataaatgacaatggatcccttttgtgagtctactgtcaatgttt

SEQ ID NO: 38588 - DNA, 80 bp, synthetic construct
  source 1..80: mol_type = other DNA
atctccctgattcatatctcaaaggagtaatatcttttagtgaaaccaacgcaattggatcatgtcttttgaaaagaccc

SEQ ID NO: 38589 - DNA, 80 bp, synthetic construct
  source 1..80: mol_type = other DNA
atctaaaaaatgataacactgccaaagttgctgtagaaaaccctgttgttgaacatgtaaggcttagaaatgcagtcatg

SEQ ID NO: 38590 - DNA, 80 bp, synthetic construct
  source 1..80: mol_type = other DNA
accaaaatgaagatatcagattataaagtggttgaaccagttaatatgcagcatgaaataatgaaaaatatgcatagttg

SEQ ID NO: 38591 - DNA, 80 bp, synthetic construct
  source 1..80: mol_type = other DNA
gttacagttaaaatccacttcagataacacatcaattctcaattttatagatgtggagttcatacccgtttgggttagca

SEQ ID NO: 38592 - DNA, 80 bp, synthetic construct
  source 1..80: mol_type = other DNA
attggttcagtaactggtataatctcaataaattaatcttagagtttagaagagaagaagtaataagaactggttcaatt

SEQ ID NO: 38593 - DNA, 80 bp, synthetic construct
  source 1..80: mol_type = other DNA
agtgttgaaagctaagaacagatctagagttcttggaactatattagaaaacaataattaccctatgtatgaagtagtac

SEQ ID NO: 38594 - DNA, 80 bp, synthetic construct
  source 1..80: mol_type = other DNA
ttaaattattaggggacaccttgaaaagcataaagttattaattaacaagaatttagaaaatgctgcagaattatattat

SEQ ID NO: 38595 - DNA, 80 bp, synthetic construct
  source 1..80: mol_type = other DNA
aattcttaaattagagagtttaacagaactaagaggagcatttatactaagaattataaaagggtttgtagacaataata

SEQ ID NO: 38596 - DNA, 80 bp, synthetic construct
  source 1..80: mol_type = other DNA
cctgcctgaaactataaaaaatcagtatttagaagaggctttcaatgcaagtgacagccaaagaacaaggagagtcttag

SEQ ID NO: 38597 - DNA, 80 bp, synthetic construct
  source 1..80: mol_type = other DNA
aattttacttaaaagattgtaattttgatcaaaaagaacttaaacgttatgtaattaaacaagagtatttaaatgacaaa

SEQ ID NO: 38598 - DNA, 80 bp, synthetic construct
  source 1..80: mol_type = other DNA
aacagcacccgttagctgggaagcaactattcaagcaattgaacaaaacattaacatctgtgcagagattttttgaactg

SEQ ID NO: 38599 - DNA, 80 bp, synthetic construct
  source 1..80: mol_type = other DNA
tcagccatgtggatttactgttaaaagtgtcaaacaatatcaaagatgagactaagatacgatttttcaaagccttatta

SEQ ID NO: 38600 - DNA, 80 bp, synthetic construct
  source 1..80: mol_type = other DNA
atggaaataacttaattgaatctttatctgcagcacttgcatgccactggtgtggaatattaacagaacagtgtatagaa

SEQ ID NO: 38601 - DNA, 80 bp, synthetic construct
  source 1..80: mol_type = other DNA
aacaatatctttaggaaagattggggtgatgggttcatctcagatcatgccttcatggatttcaaggtatttctatgtgt

SEQ ID NO: 38602 - DNA, 80 bp, synthetic construct
  source 1..80: mol_type = other DNA
tcaggattgagaatacctataaacaaaaaggagttgaatagacaaaagaaattgttgacactacaaagtaaccattcttc

SEQ ID NO: 38603 - DNA, 80 bp, synthetic construct
  source 1..80: mol_type = other DNA
ggtcataaactcaaagaaggtgagacatatatatcaagggatctccaatttataagtaaggtgattcaatctgaaggggt

SEQ ID NO: 38604 - DNA, 80 bp, synthetic construct
  source 1..80: mol_type = other DNA
tgcaagctgaactgaagcaagttccagaggtttatgatttggtgagagaaatgggtcctgaatctggacttttacatcta

SEQ ID NO: 38605 - DNA, 80 bp, synthetic construct
  source 1..80: mol_type = other DNA
agacaaagtccaacggcgggactgttgtcgttgcctaattgccccaattttgctagtgttgttcttggtaatgcttcagg

SEQ ID NO: 38606 - DNA, 80 bp, synthetic construct
  source 1..80: mol_type = other DNA
aatgcagtttggagggggagacccagtagttttttacagatctttttacagaaggactcctgattgcttcagtcaggaaa

SEQ ID NO: 38607 - DNA, 80 bp, synthetic construct
  source 1..80: mol_type = other DNA
ttataattaatagcccaattataattaaaacattatttaaaaccataaatattcaatttacagagtaaaacaaaaatatg

SEQ ID NO: 38608 - DNA, 80 bp, synthetic construct
  source 1..80: mol_type = other DNA
gggcaatcagaactgaagcaaagcaaataatcaaagttatggatcccattgaagaagaagagttcactgagaaaagagcg

SEQ ID NO: 38609 - DNA, 80 bp, synthetic construct
  source 1..80: mol_type = other DNA
ctgccctccagtgatgggaaaactcctgcagaaaagaagttgaaaccatcaaccagcaccaaaaagaaggtctcatttac

SEQ ID NO: 38610 - DNA, 80 bp, synthetic construct
  source 1..80: mol_type = other DNA
cgcccctcgcatgagcagcacaagagaaagaccaaccacaacatcagttcagtccgacagcagcaccacaacccaaaatc

SEQ ID NO: 38611 - DNA, 80 bp, synthetic construct
  source 1..80: mol_type = other DNA
tacgagcacgcgaccacgatgccggaccaagcggggatctcgtataacaccatagttaacagagcaggttacgcaccact

SEQ ID NO: 38612 - DNA, 80 bp, synthetic construct
  source 1..80: mol_type = other DNA
ttaggctccaaatatgcacgtcatttgtcacgtgcaaaggagattgtcaccccccgaaagatcatattgtgacacatcca

SEQ ID NO: 38613 - DNA, 80 bp, synthetic construct
  source 1..80: mol_type = other DNA
ggtcagccgtaattattataattggtttagtgctggctacccttgtggccatgtatgtgctgaccaaccagaaacgtaat

SEQ ID NO: 38614 - DNA, 80 bp, synthetic construct
  source 1..80: mol_type = other DNA
agtgctgtggatcgcaggaatgcaccccgacctataggcccgatgagcagtgtaaagtctttgcgggggtttacccgttt

SEQ ID NO: 38615 - DNA, 80 bp, synthetic construct
  source 1..80: mol_type = other DNA
atgtggggaggtgcatattgcttttgcgataccgagaacacccaaatcagcaaggcctacgtaatgaaatcagaggattg

SEQ ID NO: 38616 - DNA, 80 bp, synthetic construct
  source 1..80: mol_type = other DNA
tcacagtaggagaacactccaccgtgaccactgtgtatgtgaacggagaaactcctgtgaactttaacggagtcaaacta

SEQ ID NO: 38617 - DNA, 80 bp, synthetic construct
  source 1..80: mol_type = other DNA
ccctttgaccgaaaaattgtgcagtacgccggggagatctataactatgatttccccgagtacggggcaggacagccgtg

SEQ ID NO: 38618 - DNA, 80 bp, synthetic construct
  source 1..80: mol_type = other DNA
cccgcagcaaatgcttcaaaaatgcttctttaatcctcataggaataactgctatgagtatagccctcaatatctatctg

SEQ ID NO: 38619 - DNA, 80 bp, synthetic construct
  source 1..80: mol_type = other DNA
aattatatggtagttaattaaaaattaaaattaaaaatcaaaagttaaagtttaaaacctatcattaagtttattaaaaa

SEQ ID NO: 38620 - DNA, 80 bp, synthetic construct
  source 1..80: mol_type = other DNA
gggacaagtgaaaatgtctcttcaagggattcacctgagtgatctatcatacaagcatgctatattaaaagagtctcagt

SEQ ID NO: 38621 - DNA, 80 bp, synthetic construct
  source 1..80: mol_type = other DNA
atagttaattaaaattaaaaattaaaaatcaaaagttaaaatttaaaacctatcattaagtttattaagaataagaaatt

SEQ ID NO: 38622 - DNA, 80 bp, synthetic construct
  source 1..80: mol_type = other DNA
gactcacactctaccctgcatcctcgatgagcccctcagaaacagaaccagcatcaacaccaggcataacaaaccgcctg

SEQ ID NO: 38623 - DNA, 80 bp, synthetic construct
  source 1..80: mol_type = other DNA
ctgtccaagttgacctggtagaaaaagatttactgccagcaagtttgacaatatggtttcctttatttcaggctaacaca

SEQ ID NO: 38624 - DNA, 80 bp, synthetic construct
  source 1..80: mol_type = other DNA
ccaccagcagttttgcttgatcaactaaaaaccttaacaataacaactctgtatgctgcatcacagaatggtccaatact

SEQ ID NO: 38625 - DNA, 80 bp, synthetic construct
  source 1..80: mol_type = other DNA
cagaaaacatagacactatataggaggtttgggcatatgcaccaatgagatggcatctgttcatgtatcaatggcgccac

SEQ ID NO: 38626 - DNA, 80 bp, synthetic construct
  source 1..80: mol_type = other DNA
cattagttatttaaaattataaattagtaactaactgataaaaaatcagaaattgaaattggatgtatccggttttttat

SEQ ID NO: 38627 - DNA, 80 bp, synthetic construct
  source 1..80: mol_type = other DNA
gcactctttaatcccagttcatcaccgatgtttagtctaactcaagttattgatcctacacaacagctagactattttcc

SEQ ID NO: 38628 - DNA, 80 bp, synthetic construct
  source 1..80: mol_type = other DNA
catctctagcagcaaccctaggggaccatccgcacacagggacaactccaacaccagatgcaacagcctcccagcaaacc

SEQ ID NO: 38629 - DNA, 80 bp, synthetic construct
  source 1..80: mol_type = other DNA
tcggcaaacatgggacagtgaaatgtctcttcaggggattcacctgagtgatttatcatacaagcatgctatattaaagg

SEQ ID NO: 38630 - DNA, 80 bp, synthetic construct
  source 1..80: mol_type = other DNA
cttcaacatggatgtcctgtattccttgtcaaaaactcttaaagatgctagagacaaaattgtcgaaggcacgttatact

SEQ ID NO: 38631 - DNA, 80 bp, synthetic construct
  source 1..80: mol_type = other DNA
gctgacggagcgactacatggtacttcaatccagtgatcctcagaccaaataatgttgaggtagagtttctactaaatgg

SEQ ID NO: 38632 - DNA, 80 bp, synthetic construct
  source 1..80: mol_type = other DNA
attggtaatctcccgattaggaattggaactttgattttggactacttggaacaactctactaaatttagacgctaacta

SEQ ID NO: 38633 - DNA, 80 bp, synthetic construct
  source 1..80: mol_type = other DNA
gcccgcaatacaattgattattttgtagattttgtagataatgtatgtatggatgaaatggttagagagtcacaaagaaa

SEQ ID NO: 38634 - DNA, 80 bp, synthetic construct
  source 1..80: mol_type = other DNA
gagcgactacatggtacttcaatccagtgattctcagaccaaataacgttgagatagagtttctactaaacgggcagata

SEQ ID NO: 38635 - DNA, 80 bp, synthetic construct
  source 1..80: mol_type = other DNA
tcaagcttatagataacctgggaaatgcagagataaaaaaactaatcaaagttaccgggtatatgcttgtgagtgagaag

SEQ ID NO: 38636 - DNA, 80 bp, synthetic construct
  source 1..80: mol_type = other DNA
cttattgcatcaaaaccgacattggccttattgacgtccttcacagtaacaattactgtcaactatacaaaagtagaaaa

SEQ ID NO: 38637 - DNA, 80 bp, synthetic construct
  source 1..80: mol_type = other DNA
agaagtagcaagtgccatagaaatgctacactgatccttattggatcaacagcaccaagtatggcactcaacaccctttt

SEQ ID NO: 38638 - DNA, 80 bp, synthetic construct
  source 1..80: mol_type = other DNA
cgtaaagctccatgcaaatatgaagtacggggcaagtgcaacaggggaagtgagtgcaaattcaaccacaattactggag

SEQ ID NO: 38639 - DNA, 80 bp, synthetic construct
  source 1..80: mol_type = other DNA
gtaggcaccgcaactgcagtgacaccttcatcattgcagcaagagataacacttttgtgtggagagattctttacactaa

SEQ ID NO: 38640 - DNA, 80 bp, synthetic construct
  source 1..80: mol_type = other DNA
acatactgattacaaatatgctgcagagatagggatacaatatatttgcacggctctaggatcagaaagagtacaacaga

SEQ ID NO: 38641 - DNA, 80 bp, synthetic construct
  source 1..80: mol_type = other DNA
taactgtccgaaccaataattgcttatataatcctaaagatcaatgagctcattattatagttatataaaaatgatttag

SEQ ID NO: 38642 - DNA, 80 bp, synthetic construct
  source 1..80: mol_type = other DNA
ctcattgcattgaagctgatattggccttattgacgtttttcacagtaacaattactgttaactatataaaagtagaaaa

SEQ ID NO: 38643 - DNA, 80 bp, synthetic construct
  source 1..80: mol_type = other DNA
atcctatccagatctattaatacagtagtttagttatttaaaaactctgaatattgtctagactgcacgacactttgcaa

SEQ ID NO: 38644 - DNA, 80 bp, synthetic construct
  source 1..80: mol_type = other DNA
gaattttacttaaaggattgcaaatttgatcaaaaagacctcaaacgttatgtaactaaacaagagtatctaaatgacaa

SEQ ID NO: 38645 - DNA, 80 bp, synthetic construct
  source 1..80: mol_type = other DNA
ctagtgttgttcttggtaatgcttcaggtctaggtataatcggaatgtacagaggaagagtgccaaacacagagctattt

SEQ ID NO: 38646 - DNA, 80 bp, synthetic construct
  source 1..80: mol_type = other DNA
taaagtaatatttgaaaggttgaaaagttttggtaccagttcggattacaacaaagggaagttaacaagaaattacatga

SEQ ID NO: 38647 - DNA, 80 bp, synthetic construct
  source 1..80: mol_type = other DNA
taataataataatcataatcagtcataatctcacacaactgagaaaatgattgtctaacagtttaattgaccattagtta

SEQ ID NO: 38648 - DNA, 80 bp, synthetic construct
  source 1..80: mol_type = other DNA
ctctagagctacctaccatcagcaaacctgcacgatcatctacaccgctagaaccaaaattggcatgggcagacagtagc

SEQ ID NO: 38649 - DNA, 80 bp, synthetic construct
  source 1..80: mol_type = other DNA
ttcaagccgagagcatcagcaggatctgcaagagttggagtcacaaaggaacaagatatgtactaaaatccagataaaaa

SEQ ID NO: 38650 - DNA, 80 bp, synthetic construct
  source 1..80: mol_type = other DNA
ttttaagaaattcaggtagtgaagttcaggtggttctaaccaagacatactctttagggaaaggtaaaaatagtaaaggg

SEQ ID NO: 38651 - DNA, 80 bp, synthetic construct
  source 1..80: mol_type = other DNA
tcggtgctttggtagcttgctacaaaggagttagctgctcgactggcagtaatcaggttggaataatcaaacaactacct

SEQ ID NO: 38652 - DNA, 80 bp, synthetic construct
  source 1..80: mol_type = other DNA
tggacacacaaagaattaaaggagacactgtctgatgggatagtaaaatcacacaccaatatttacagttgctatttaga

SEQ ID NO: 38653 - DNA, 80 bp, synthetic construct
  source 1..80: mol_type = other DNA
aaacgcagactgtgaagaattaacagttctatgcgacaaaaagtcaaaaaccatgacagaaaaatataagaaagcagagt

SEQ ID NO: 38654 - DNA, 80 bp, synthetic construct
  source 1..80: mol_type = other DNA
gccactgtctacatacaactgaatggtggtgtcattatctttaagagaaaaatcggctttcaacattaaagtcagaacaa

SEQ ID NO: 38655 - DNA, 80 bp, synthetic construct
  source 1..80: mol_type = other DNA
aatcattgattatgcaaaattaaaaaacatgactaaagtggaactctgtgtcaacatgccaccggcagaaccaagcaaga

SEQ ID NO: 38656 - DNA, 80 bp, synthetic construct
  source 1..80: mol_type = other DNA
agactccaatgacctctgcagtagactcaaacaccaaactcaatccacagcaggcaacacagctgaccacagaagattca

SEQ ID NO: 38657 - DNA, 80 bp, synthetic construct
  source 1..80: mol_type = other DNA
acatccccagcagcaacctcagagaatcatctacacacagagacaactccaacaccagacgcaacaatctcccagcaagc

SEQ ID NO: 38658 - DNA, 80 bp, synthetic construct
  source 1..80: mol_type = other DNA
cacagacgagcacacaacaccgccgagatcaatcaacaggcagaccacccaaacaaccacagagaaaaagctaaccggag

SEQ ID NO: 38659 - DNA, 80 bp, synthetic construct
  source 1..80: mol_type = other DNA
aatggaagagaggcaaccacaacatccgccagatccagaaacggtgccacaactcaaaacagcgatcaaacaatccaggc

SEQ ID NO: 38660 - DNA, 80 bp, synthetic construct
  source 1..80: mol_type = other DNA
agcagacccaagctccaaaccataccatacactgaaaagcacaacaacagcatacaacgcagacacatcttctctaagta

SEQ ID NO: 38661 - DNA, 80 bp, synthetic construct
  source 1..80: mol_type = other DNA
ctatatgaattgtttgagcatatatactaatgaaatagcatctgtttgtgcatcgacaacaccatcactattcaagaaat

SEQ ID NO: 38662 - DNA, 80 bp, synthetic construct
  source 1..80: mol_type = other DNA
actgttgattatatgttaagtctatgtagtaatgaagggttctcactagtgaaagagttcgaaggctttatcatgagtga

SEQ ID NO: 38663 - DNA, 80 bp, synthetic construct
  source 1..80: mol_type = other DNA
gggtcctgaatctgggctcttacatctaagacaaagtccaaaggcaggactgttgtcgttggctaattgccccaattttg

SEQ ID NO: 38664 - DNA, 80 bp, synthetic construct
  source 1..80: mol_type = other DNA
aaagtacagatgaagtaaaagcagattatagcttagcaattaaaatgcttaaggagataagagatgcctataaaaacatt

SEQ ID NO: 38665 - DNA, 80 bp, synthetic construct
  source 1..80: mol_type = other DNA
aagaaagaaaatgatgtggttgacctatggatgaatataccaatgcagtttggagggggagacccagtagttttttacag

SEQ ID NO: 38666 - DNA, 80 bp, synthetic construct
  source 1..80: mol_type = other DNA
ggtaacaagtgatataaatagaacagcagttactagtatactgagtctatctccgaatcagctcttttgtgatagtgcta

SEQ ID NO: 38667 - DNA, 80 bp, synthetic construct
  source 1..80: mol_type = other DNA
acatctctagcagcaaccccagagggtcatccacacacagggacaactccaacatcagatgcaacagtctcccagcaaac

SEQ ID NO: 38668 - DNA, 80 bp, synthetic construct
  source 1..80: mol_type = other DNA
ggatcagaatgttacatacttttaacattaggtcatcacaataatctgccatgtcacggagaaatacaaaattccaaaat

SEQ ID NO: 38669 - DNA, 80 bp, synthetic construct
  source 1..80: mol_type = other DNA
taacaagaacaaatgtgacattgctgatctgaagatggctgtcagcttcagtcaattcaacagaagattcctaaatgttg

SEQ ID NO: 38670 - DNA, 80 bp, synthetic construct
  source 1..80: mol_type = other DNA
caataaccaaaaagaaacccacaactcgaaccacaagcacagccgaaacccaaacactcaacaccaccaaccaaaccagc

SEQ ID NO: 38671 - DNA, 80 bp, synthetic construct
  source 1..80: mol_type = other DNA
atatctcagaggagtaatatctttcagtgaaaccaatgcaattggctcatgccttttgaaaagaccctatctaaagaaag

SEQ ID NO: 38672 - DNA, 80 bp, synthetic construct
  source 1..80: mol_type = other DNA
ataacactgctaaagttgctgtggaaaaccctgttgttgaacatgtcagacttagaaatgcagtcatgaccaagatgaag

SEQ ID NO: 38673 - DNA, 80 bp, synthetic construct
  source 1..80: mol_type = other DNA
cattagttaattaaaaattataaattagtaactaattgataaaaaataagaaactgtagttgaatgtatccggttttttc

SEQ ID NO: 38674 - DNA, 80 bp, synthetic construct
  source 1..80: mol_type = other DNA
cagacaacccaggcaacaggaccaagctctccaccaaactatgcacggaaaagtgcagggcccaggcgaatgcaacacac

SEQ ID NO: 38675 - DNA, 80 bp, synthetic construct
  source 1..80: mol_type = other DNA
caaaaaagcgcccccgcaactgggacagtgaaatgtctcttcaggggattcacctgagtgatctatcatacaagcatgct

SEQ ID NO: 38676 - DNA, 80 bp, synthetic construct
  source 1..80: mol_type = other DNA
ggtagttaattaaaaattaaaattaaaaatcaaaaattaaagtttaaaaattatcattaagttataaaaatagagccagt

SEQ ID NO: 38677 - DNA, 80 bp, synthetic construct
  source 1..80: mol_type = other DNA
acatctctagaagcaacctcagagaatcatctacacacagggacaactccaatatcagatgcaacaatctctcagcaaac

SEQ ID NO: 38678 - DNA, 80 bp, synthetic construct
  source 1..80: mol_type = other DNA
aggcagcagacccaagcttcaaaccacaccatacacagaaaagtacaacaacaacacacaacacagacacatcttctcta

SEQ ID NO: 38679 - DNA, 80 bp, synthetic construct
  source 1..80: mol_type = other DNA
aagcactagtagaccagtcaaacaaaatcctgaacagtgcagaaaaaggaaacactggtttcattattgtaataatttta

SEQ ID NO: 38680 - DNA, 80 bp, synthetic construct
  source 1..80: mol_type = other DNA
tatagtctgcataacataataaaacagctacaagaaatagaagtaagacaggctagagataataagctttctgacaacaa

SEQ ID NO: 38681 - DNA, 80 bp, synthetic construct
  source 1..80: mol_type = other DNA
acctttcgcacgagcagcacaggagaaagaccaaccacaacatcagtccagtccaacagcagcaccacaactcaaaatca

SEQ ID NO: 38682 - DNA, 80 bp, synthetic construct
  source 1..80: mol_type = other DNA
aaagggtaatgggtgatttaaatagggtaatagatggtggtgatggactatcaatggaaaccacagatgcaactcaaaag

SEQ ID NO: 38683 - DNA, 80 bp, synthetic construct
  source 1..80: mol_type = other DNA
tacagacgggcacacaacactgctgagaccaatcaacagacagactacccaaacaaccacagagaaaaagccaaccggaa

SEQ ID NO: 38684 - DNA, 80 bp, synthetic construct
  source 1..80: mol_type = other DNA
agttgcttattgcattaaaactgatattagctttattgactttctttacagtaacaattactgttaactatataaaagta

SEQ ID NO: 38685 - DNA, 80 bp, synthetic construct
  source 1..80: mol_type = other DNA
cagacccattcctgatctaaatgcagcacagtacttgaaaaggctgattcagaaacataccaacttcgtcataaaagaca

SEQ ID NO: 38686 - DNA, 80 bp, synthetic construct
  source 1..80: mol_type = other DNA
agagtgccactgtctacatacaactgaatggtggtgttattatctttaagagaaaactcggctttcaacattaaaatcag

SEQ ID NO: 38687 - DNA, 80 bp, synthetic construct
  source 1..80: mol_type = other DNA
aacaaatcctatccagatctattaatataatattttagttatttaaaaactctaaatattgtctagatttcacaacactt

SEQ ID NO: 38688 - DNA, 80 bp, synthetic construct
  source 1..80: mol_type = other DNA
tgcggtcatatgcaataatcaatggtcaaaccactgttacaaactcacccataatataatcactgaataatacaaaacaa

SEQ ID NO: 38689 - DNA, 80 bp, synthetic construct
  source 1..80: mol_type = other DNA
caagaagaccccaatgacctctgcagtagactcaaacaccaaactcaatccacagcaggcaacacagttgaccacagagg

SEQ ID NO: 38690 - DNA, 80 bp, synthetic construct
  source 1..80: mol_type = other DNA
attcaacatctccagcagcaacctcagagaatcatctacacacagagacaactccaacaccagatgcaacagtctctcag

SEQ ID NO: 38691 - DNA, 80 bp, synthetic construct
  source 1..80: mol_type = other DNA
caagctacagacgagcacacaacactgctgagatcaatcaacagacagaccacccaaacaaccacagagaaaaagccaac

SEQ ID NO: 38692 - DNA, 80 bp, synthetic construct
  source 1..80: mol_type = other DNA
tcatatgcaacaatcaatggtcaaaccactgttacaaactcacccacaatacaatcactgaataatacaaaacaagaaaa

SEQ ID NO: 38693 - DNA, 80 bp, synthetic construct
  source 1..80: mol_type = other DNA
caacaaccaaaaaagaaaaagaaaccacaactcgaactacaagcacagctgcaacccaaacactcaacaccaccaaccaa

SEQ ID NO: 38694 - DNA, 80 bp, synthetic construct
  source 1..80: mol_type = other DNA
accagcaatggaagagaggcaaccacaacatccgccagatccagaaacggcgccacaactcaaaacagtgatcaaacaat

SEQ ID NO: 38695 - DNA, 80 bp, synthetic construct
  source 1..80: mol_type = other DNA
ccaggcagcagacccaagctccaaaccataccacacacagaaaagcacaacaacagcacacaacgcagacacatcttctc

SEQ ID NO: 38696 - DNA, 80 bp, synthetic construct
  source 1..80: mol_type = other DNA
taagtagttaacaaaaaaaatataaaataaccatgaaaaccaaaaaactagaaaagttaatttgaactcagaaaaaacca

SEQ ID NO: 38697 - DNA, 80 bp, synthetic construct
  source 1..80: mol_type = other DNA
caaacactatatgaattgtttgagcgtatatactaatgaaatagcatctgtttgtgcatcaacaacaccatcactattca

SEQ ID NO: 38698 - DNA, 80 bp, synthetic construct
  source 1..80: mol_type = other DNA
agaaataagaagaagctaaaattcaagggataaataacaatggatccattttgtgaatccactgtcaatgtttatcttcc

SEQ ID NO: 38699 - DNA, 80 bp, synthetic construct
  source 1..80: mol_type = other DNA
ctgttcaagttgatctggtagaaaaagacttactaccagcaagtttgacaatatggtttcctctattccaagccaacacg

SEQ ID NO: 38700 - DNA, 80 bp, synthetic construct
  source 1..80: mol_type = other DNA
ttaattaaaaattataaattagtaactaattgataaaaaataagaaattgaaattggatgtatacggtttttttgccgtt

SEQ ID NO: 38701 - DNA, 80 bp, synthetic construct
  source 1..80: mol_type = other DNA
ccaggcagcagacccaagctcccgaccacaccatacacagaaaagcacaacaacaacatacaacacagacacatcctctc

SEQ ID NO: 38702 - DNA, 80 bp, synthetic construct
  source 1..80: mol_type = other DNA
gcatactgattacaaatatgctgcagaaataggaatacaatatatcagcacagctctagggtcagagagagtacagcaga

SEQ ID NO: 38703 - DNA, 80 bp, synthetic construct
  source 1..80: mol_type = other DNA
ggaatggtatcaaaatttgtgagctcagccaaatcagttggcaaaaaaacacatgatctaattgcattatgtgattttat

SEQ ID NO: 38704 - DNA, 80 bp, synthetic construct
  source 1..80: mol_type = other DNA
ttgaagctgcaataagcagtgaagcagaccaagctctaacacaagctaaaattgcaccttatgcgggactgatcatgatt

SEQ ID NO: 38705 - DNA, 80 bp, synthetic construct
  source 1..80: mol_type = other DNA
gtccaggctgaaagcataagtaaaatatgcaagacttggagccatcaagggacaagatatgtgctgaagtccagataaca

SEQ ID NO: 38706 - DNA, 80 bp, synthetic construct
  source 1..80: mol_type = other DNA
atgtggcactccataacttaatcttatcttacatggagatgagcaaaactcccgcatccttaatcaacaatcttaaaaga

SEQ ID NO: 38707 - DNA, 80 bp, synthetic construct
  source 1..80: mol_type = other DNA
gacagactgacagatttatgcagaaacaaatcaaaatcagcagttgaagcatatcacacagtagaatgccattgtatata

SEQ ID NO: 38708 - DNA, 80 bp, synthetic construct
  source 1..80: mol_type = other DNA
caattaaagtctacatcagatgatacctcaatcctaggttttatagatgtagaatttatacctagttgggtaagcaactg

SEQ ID NO: 38709 - DNA, 80 bp, synthetic construct
  source 1..80: mol_type = other DNA
tactatttgaaagataataaatttgatcaaagagaacttaaaagttatgtagttagacaagaatatttaaatgataaaga

SEQ ID NO: 38710 - DNA, 80 bp, synthetic construct
  source 1..80: mol_type = other DNA
agggaatggggtgcgagtgctagccactgcagtaagagagctgaaagaatttgtgagcaaaaacctgaccagcgcgatca

SEQ ID NO: 38711 - DNA, 80 bp, synthetic construct
  source 1..80: mol_type = other DNA
cagcaaccaaaaaaggaaaagaaaaagaaaccacaacccgaactacaagcacagctgcaacccaaacactcaacaccacc

SEQ ID NO: 38712 - DNA, 80 bp, synthetic construct
  source 1..80: mol_type = other DNA
aaccaaaccagcaatggaagagaggcaaccacaacatcagccagatccagaaatggtgccacaactcaaaacagcgatca

SEQ ID NO: 38713 - DNA, 80 bp, synthetic construct
  source 1..80: mol_type = other DNA
actctgatgtcctccacagcaggcccaaacaccaaacccgatccacagcaagcaacacagtggaccacagagaactcaac

SEQ ID NO: 38714 - DNA, 80 bp, synthetic construct
  source 1..80: mol_type = other DNA
atccctagcagcaacctcagaaggctatctatacacagggacaattcaaacaccagacacaacagctccccagcaaacca

SEQ ID NO: 38715 - DNA, 80 bp, synthetic construct
  source 1..80: mol_type = other DNA
agacaacccagacaacagacccaagctccccaccacactatgcgcagagaggcgcacaactcaaacaaacacaacacaca

SEQ ID NO: 38716 - DNA, 80 bp, synthetic construct
  source 1..80: mol_type = other DNA
aacatcccatccaagtagttaacaaaaaaccacaaaataaccttgaaaaccaaaaaaccaaaatgtaaatttaaacccag

SEQ ID NO: 38717 - DNA, 80 bp, synthetic construct
  source 1..80: mol_type = other DNA
aaaaacataaacactatatggatggtttgagcatatacaccaatgaaatagcatctgttcatgtatcaatagtactacca

SEQ ID NO: 38718 - DNA, 80 bp, synthetic construct
  source 1..80: mol_type = other DNA
tgcaatgattggtataagagaagagctaatagcagagataattaaggaagccaagggaaaagcagctgaaatgatggaag

SEQ ID NO: 38719 - DNA, 80 bp, synthetic construct
  source 1..80: mol_type = other DNA
ccccagcacgggctaaaggagagttatttggaagaatcatgtagtactataactgagggatacctcagtgttttaagaac

SEQ ID NO: 38720 - DNA, 80 bp, synthetic construct
  source 1..80: mol_type = other DNA
ccccagtagcaaccccagagggccatccatacacagggacaactcaaacatcagacacaacagctccccagcaaaccaca

SEQ ID NO: 38721 - DNA, 80 bp, synthetic construct
  source 1..80: mol_type = other DNA
acaacccgggcaacagacccaagctccccaccacaccatgcatagagaggtgcaaaactcaaatgagcacaacacacaaa

SEQ ID NO: 38722 - DNA, 80 bp, synthetic construct
  source 1..80: mol_type = other DNA
catcccatccaagtagtcaacaaaaaaccacaaaataaccttgaaaaccaaaaaaccaaaacataaacccagacccagaa

SEQ ID NO: 38723 - DNA, 80 bp, synthetic construct
  source 1..80: mol_type = other DNA
aaacatagacaccatatggaaggttttagcatatgcaccaatgagatggcatctgttcatgtatcaatagcaccaccatc

SEQ ID NO: 38724 - DNA, 80 bp, synthetic construct
  source 1..80: mol_type = other DNA
ggtagttaattaaaaattaaaattaaaaatcaaaaattaaagtttaaaacctatcattaagtttattaaaaataagaaac

SEQ ID NO: 38725 - DNA, 80 bp, synthetic construct
  source 1..80: mol_type = other DNA
atggccatgaacaatccaaaaggtatattcaagaaactaggagctggaacacaagtgatagtagagctgggggcatatgt

SEQ ID NO: 38726 - DNA, 80 bp, synthetic construct
  source 1..80: mol_type = other DNA
gacaaatacacagcactgctgaaatcaaccaacgaacagatcacccagacaaccacagagaaaaagacaaccagagcagc

SEQ ID NO: 38727 - DNA, 80 bp, synthetic construct
  source 1..80: mol_type = other DNA
aacccaaaaagggaaaaaagggaaagaaaacacaaaccaaactacaagtacagctgcaacccaaacaaccaacaccacca

SEQ ID NO: 38728 - DNA, 80 bp, synthetic construct
  source 1..80: mol_type = other DNA
tcagaggggaccaaaaagcccctgggtaggatcaagcactcaagagaaaaaattggttcctgtttataatagacaaattc

SEQ ID NO: 38729 - DNA, 80 bp, synthetic construct
  source 1..80: mol_type = other DNA
gtcattgaccatgcaacattaagaaacatgatcaaaacagaaagctgtgctgatatgctgtcagcggaaccaagcaaaaa

SEQ ID NO: 38730 - DNA, 80 bp, synthetic construct
  source 1..80: mol_type = other DNA
aggaaacatagacactacatagggggttcgggcacatgcaccaatgagatggcatccgttcatgtatcaatggtgccacc

SEQ ID NO: 38731 - DNA, 80 bp, synthetic construct
  source 1..80: mol_type = other DNA
tgcaatctgaattgaagcaagttacagaggtttatgacctagtgagagaaatgggtcctgaatctgggcttttacaccta

SEQ ID NO: 38732 - DNA, 80 bp, synthetic construct
  source 1..80: mol_type = other DNA
aacccaagaaaaagggggaaaaggaaaagaaaacacaaaccaaaccacaaacacagctgcaactcaaacaaccaacacca

SEQ ID NO: 38733 - DNA, 80 bp, synthetic construct
  source 1..80: mol_type = other DNA
cagacaacccgggcaacagaaccaggctcctcaccacaccatgtacggggaagtgcaggacacaggtgaacgcaacacac

SEQ ID NO: 38734 - DNA, 80 bp, synthetic construct
  source 1..80: mol_type = other DNA
acgcgaaaaaaacgcgtataaattaagttccaaacaaaacgggacaaataaaaatgtctcttcaagggattcacctaagt

SEQ ID NO: 38735 - DNA, 80 bp, synthetic construct
  source 1..80: mol_type = other DNA
ctaatctattacaaagaacatctgctatcaatggtgaagatattgatagagcagtgtctatgatgttagagaacttaggg

SEQ ID NO: 38736 - DNA, 80 bp, synthetic construct
  source 1..80: mol_type = other DNA
ttgttatctaggatattgtcagcaataatcaatagtatagaaataccaatcaagtccaatggcagattgatatgctgtca

SEQ ID NO: 38737 - DNA, 80 bp, synthetic construct
  source 1..80: mol_type = other DNA
gcggtggactgcaatataaaattaccattttttgtaagatctgtagctacttttattatgcaaggaagcaaattatcagg

SEQ ID NO: 38738 - DNA, 80 bp, synthetic construct
  source 1..80: mol_type = other DNA
gtcagaatgttatatacttttaacattaggtcatcataataatctaccctgtcatggagaaatacaaaattccaaaatga

SEQ ID NO: 38739 - DNA, 80 bp, synthetic construct
  source 1..80: mol_type = other DNA
tctctcaggactgagaattcctataaacaaaaaggagttgaatagacaaaagaaactgttaacattacaaagtaaccatt

SEQ ID NO: 38740 - DNA, 80 bp, synthetic construct
  source 1..80: mol_type = other DNA
cttctatagcaacagttggcggcagtaagattatagaatccaaatggttaaagaataaagcaagtacaataattgattgg

SEQ ID NO: 38741 - DNA, 80 bp, synthetic construct
  source 1..80: mol_type = other DNA
agttatttaaaattataaattagtaactaactgataaaaaatcagaaattgaagttgaatgtatacggtttttttgccgt

SEQ ID NO: 38742 - DNA, 80 bp, synthetic construct
  source 1..80: mol_type = other DNA
tagccaaaaccataaggcttgagagtgaggtgaatgcaatcaaaggtgctctcaaacaaactaatgaagcagtatccaca

SEQ ID NO: 38743 - DNA, 80 bp, synthetic construct
  source 1..80: mol_type = other DNA
ttaggaaatggtgtgcgggtcccagccactgcagtgagagagctaaaagaatttgtgagcaaaaatctgactagtgcaat

SEQ ID NO: 38744 - DNA, 80 bp, synthetic construct
  source 1..80: mol_type = other DNA
ctaccaagggaaaaactgaagaaattagcaagattaattattgatttatcagcaggaactgacaatgacccttcatatgc

SEQ ID NO: 38745 - DNA, 80 bp, synthetic construct
  source 1..80: mol_type = other DNA
cttgcaagacagtgaaagcactaatcaagtgcagtaaacatggtcccaaattcattaccatagaggcagatgatatgata

SEQ ID NO: 38746 - DNA, 80 bp, synthetic construct
  source 1..80: mol_type = other DNA
tggactcacaaagaattaaaagagacactatctgatggaatagtaaaatcacacaccaatatctacagttgttacctaga

SEQ ID NO: 38747 - DNA, 80 bp, synthetic construct
  source 1..80: mol_type = other DNA
aaacatagaaataatatatgttaaaacttacttaagttagtaaaaaataaaaataaaatgggataaatgacaatgaaaac

SEQ ID NO: 38748 - DNA, 80 bp, synthetic construct
  source 1..80: mol_type = other DNA
cagacaacctgggcaacagaaccaggctccccaccaaaccatgcacggaaaagtgcagggcccaggtgaacgcaacacac

SEQ ID NO: 38749 - DNA, 80 bp, synthetic construct
  source 1..80: mol_type = other DNA
aaactcgctgccagatgacttctctattaaacggagataatcagtcaatagatgttagtaaaccagtaaaattgtctgaa

SEQ ID NO: 38750 - DNA, 80 bp, synthetic construct
  source 1..80: mol_type = other DNA
ggtatagatgaagtaaaagcagactatagcttagcaattagaatgcttaaagaaataagagatgcttataaaaacattgg

SEQ ID NO: 38751 - DNA, 80 bp, synthetic construct
  source 1..80: mol_type = other DNA
atggggtcgatggtgtgtgatatctgtcattatgagtgtgaaacggctaaagaacttgaatcacataagcagagttgcat

SEQ ID NO: 38752 - DNA, 80 bp, synthetic construct
  source 1..80: mol_type = other DNA
catataacaacgaacaagcttgagtgggttgatccagatggtaacacacgtgaccatgtgaatcttgttttaaatagaga

SEQ ID NO: 38753 - DNA, 80 bp, synthetic construct
  source 1..80: mol_type = other DNA
attagagttaattgtatgggcagctagtgcagagactccattacttgaatcaggttggtcggatacagcacatggtgtgg

SEQ ID NO: 38754 - DNA, 80 bp, synthetic construct
  source 1..80: mol_type = other DNA
tgaaaagaggttgttatcgaacattaggagttttccgctataaaagcaggtgctatgtgggtctagtgtggtgtttactg

SEQ ID NO: 38755 - DNA, 80 bp, synthetic construct
  source 1..80: mol_type = other DNA
gtcttcgacatggaggttctgtattcattgtcaaaaactctcaaggatgctagggataaaattgttgaaggtacattata

SEQ ID NO: 38756 - DNA, 80 bp, synthetic construct
  source 1..80: mol_type = other DNA
gtagatcattgggcaagttagtttttattgtatcatcatatggatgtatcgtcaagagcaacaaaagcaaaagagtgagc

SEQ ID NO: 38757 - DNA, 80 bp, synthetic construct
  source 1..80: mol_type = other DNA
ttaaattattaggagatactctgagatgcatcaaattattaatcaataaaaacttagagaacgctgcagaattatactat

SEQ ID NO: 38758 - DNA, 80 bp, synthetic construct
  source 1..80: mol_type = other DNA
cattgcaagagcatccatagtaactgatttaagcaagttcaaccaagcctttagatatgaaactacagcaatctgcgcag

SEQ ID NO: 38759 - DNA, 80 bp, synthetic construct
  source 1..80: mol_type = other DNA
cacaattgagtggaagtgctattaccactcaatagattaaatctagtcttgaatgccaaaaccagactaggatccgtcta

SEQ ID NO: 38760 - DNA, 80 bp, synthetic construct
  source 1..80: mol_type = other DNA
tgctggaaaataagtagaaatcaatgcacaaatataacaacatataaatttttatgttttaaacctgaagactcaaaaat

SEQ ID NO: 38761 - DNA, 80 bp, synthetic construct
  source 1..80: mol_type = other DNA
cgctcttcgcacgagcagcacaggagaaagaccaaccacaacaccagtccagcctgacagcagcaccacaacacaaaacc

SEQ ID NO: 38762 - DNA, 80 bp, synthetic construct
  source 1..80: mol_type = other DNA
gagcagaactgggacagtgaaatgtctcttcaggggattcacctgagtgatctatcatacaagcatgctatattaaaaga

SEQ ID NO: 38763 - DNA, 80 bp, synthetic construct
  source 1..80: mol_type = other DNA
acagcaacgacaccatgtcagctttgctcaaatctctctggagaaacttttgcccacatactaacaacatcacaaccatc

SEQ ID NO: 38764 - DNA, 80 bp, synthetic construct
  source 1..80: mol_type = other DNA
ttaattaaaatttaaattaaaattcaaaagttaaaatttaaaatctatcattaagtttattaaaaataagaaattataat

SEQ ID NO: 38765 - DNA, 80 bp, synthetic construct
  source 1..80: mol_type = other DNA
gatccacaacacaatcaaatgaaaatagaacaaagacaaactcgacagtccacaaaagaaacatctcaaatacaatttct

SEQ ID NO: 38766 - DNA, 80 bp, synthetic construct
  source 1..80: mol_type = other DNA
acaggaaggcatcccatcagtatggttgcactgtctcctctcggagctctggttgcctgttacaaaggagtaagctgctc

SEQ ID NO: 38767 - DNA, 80 bp, synthetic construct
  source 1..80: mol_type = other DNA
gagaaagaccaaccacaacatcagtccagtttgacagcagcaccacaacccgaaatcatgaagaaacaggttcagcaaac

SEQ ID NO: 38768 - DNA, 80 bp, synthetic construct
  source 1..80: mol_type = other DNA
tgttaatgtctatctccctgattcgtaccttaaaggagtaatttcttttagtgagactaatgcaattggttcatgtctct

SEQ ID NO: 38769 - DNA, 80 bp, synthetic construct
  source 1..80: mol_type = other DNA
ttgaagttgaatgtatacggtttttttgccagttagttactaatttacaatttttaaataactaatgatcaactaaactg

SEQ ID NO: 38770 - DNA, 80 bp, synthetic construct
  source 1..80: mol_type = other DNA
caaattctactcgggtttattaatgaagtgttttagttatttaaaaaccgaatattgtctaggctacacaacactctgca

SEQ ID NO: 38771 - DNA, 80 bp, synthetic construct
  source 1..80: mol_type = other DNA
agttaacaaaaaatacgagatagctctaaagtaaagcatgtaggcaccaacaatcacaatctctccaaaacagcaacgac

SEQ ID NO: 38772 - DNA, 80 bp, synthetic construct
  source 1..80: mol_type = other DNA
accatgtcagctttgctcaaatctctctgggagaaacttttgcccacatactaacaacatcacaaccatctcaagaaaag

SEQ ID NO: 38773 - DNA, 80 bp, synthetic construct
  source 1..80: mol_type = other DNA
tgcggcaacgatatcttaaagacatcaatccccccctttacccacattgatacagatagctccagaagtggtttttgtcc

SEQ ID NO: 38774 - DNA, 80 bp, synthetic construct
  source 1..80: mol_type = other DNA
atatctgaactttcaaataggtcagctgttctgcattttctatagccaaatcaattgtttcactacaatttctcaactgt

SEQ ID NO: 38775 - DNA, 80 bp, synthetic construct
  source 1..80: mol_type = other DNA
tagttaactctcaccatcccactattccactttctttgctgtttacatccgtctcattatttccgttttattatttctgg

SEQ ID NO: 38776 - DNA, 80 bp, synthetic construct
  source 1..80: mol_type = other DNA
ggtgtggggggaacgatttcttagacttctgggttacaggctgtgctggccacctaaaagataatcagtgaattctacct

SEQ ID NO: 38777 - DNA, 80 bp, synthetic construct
  source 1..80: mol_type = other DNA
tagacttctgggttacaggctgtgctggccacctaaaagataatcagtgaattctacctgaagtactgagggacactgcc

SEQ ID NO: 38778 - DNA, 80 bp, synthetic construct
  source 1..80: mol_type = other DNA
gaagtactgagggacactgccttcaaaagggcatactatcccagcatgggcatgagcagcctgaaattgctgaaatatgt

SEQ ID NO: 38779 - DNA, 80 bp, synthetic construct
  source 1..80: mol_type = other DNA
tctgtttatctttaacttgcttttttgggtctgtggctgttgcattttgggctttggcatctatttcctggtccaaaata

SEQ ID NO: 38780 - DNA, 80 bp, synthetic construct
  source 1..80: mol_type = other DNA
cctatggagtactcttccgtaaccttcccttcctgacacttggcaacattctggtcattgtgggatccattatcatggta

SEQ ID NO: 38781 - DNA, 80 bp, synthetic construct
  source 1..80: mol_type = other DNA
gttgccttcttgggttgcatgggctcaatcaaggaaaataagtgcctgcttatgtcgttttttgttctgctgctgattat

SEQ ID NO: 38782 - DNA, 80 bp, synthetic construct
  source 1..80: mol_type = other DNA
tctccttgctgaggtgaccatagccatcctgctctttgtgtatgaacaaaaactcaacactttagtggctgagggtctga

SEQ ID NO: 38783 - DNA, 80 bp, synthetic construct
  source 1..80: mol_type = other DNA
atgacagcatccaacattatcactctgacaacagcactatgaaggcatgggacttcatccagacacaactgcagtgttgt

SEQ ID NO: 38784 - DNA, 80 bp, synthetic construct
  source 1..80: mol_type = other DNA
ggtgtaaatggctcaagtgattggaccagtggtccaccatcttcctgcccatcaggtgcagatgttcagggttgctataa

SEQ ID NO: 38785 - DNA, 80 bp, synthetic construct
  source 1..80: mol_type = other DNA
taaggcaaaatcgtggtttcactccaatttcttgtatattggaatcattaccatctgtgtatgtgtgatacaggtgctgg

SEQ ID NO: 38786 - DNA, 80 bp, synthetic construct
  source 1..80: mol_type = other DNA
gaatgtcctttgcactgacactcaactgccagattgacaaaacaagccaggctttagggctgtgacttgcaacttccccc

SEQ ID NO: 38787 - DNA, 80 bp, synthetic construct
  source 1..80: mol_type = other DNA
tgcttaagtgacttattcctctctagaaagtcaaagcatccattccatgagaacttaaacaattacctgcctgactggca

SEQ ID NO: 38788 - DNA, 80 bp, synthetic construct
  source 1..80: mol_type = other DNA
ttttggcttcttcttattccatctttgactggatctctgtcttatacacatccactgaagagaatatttgtcatggactt

SEQ ID NO: 38789 - DNA, 80 bp, synthetic construct
  source 1..80: mol_type = other DNA
cccatatcaagcagaagacaaacattaaccaactgatagcagtaaccatatcccttaaagatggtgaaacatacctgggt

SEQ ID NO: 38790 - DNA, 80 bp, synthetic construct
  source 1..80: mol_type = other DNA
tttttttttattttttttaaagagatactttttcttttttttcttttgttccactttctgcttcttttttgtttttttct

SEQ ID NO: 38791 - DNA, 80 bp, synthetic construct
  source 1..80: mol_type = other DNA
tgtctgtcctaatgagttggggaaaaagttttcaacaagttgtagaagaattgaggacaatattgcaagactttatttac

SEQ ID NO: 38792 - DNA, 80 bp, synthetic construct
  source 1..80: mol_type = other DNA
agcctggaggaggttgccttgtccaagaaacaagcagagattttgaggcagaaggcatcccagctgtctaaactggttaa

SEQ ID NO: 38793 - DNA, 80 bp, synthetic construct
  source 1..80: mol_type = other DNA
tcatcaaaccatggactttttaagaaaccttgactggactcaggtggttgatggtcagtatgtgaccaaccccaggttca

SEQ ID NO: 38794 - DNA, 80 bp, synthetic construct
  source 1..80: mol_type = other DNA
caaatcgattcaagcttgtgagataattcagaacaggattacaggtctttattgtaatagcaatgaaggacctcttgata

SEQ ID NO: 38795 - DNA, 80 bp, synthetic construct
  source 1..80: mol_type = other DNA
gacacaatgttatttacagcagtagaatggcagactcctgtgattggctaagagatggtaagagaagagggaatctggaa

SEQ ID NO: 38796 - DNA, 80 bp, synthetic construct
  source 1..80: mol_type = other DNA
acctctcgcacgagcagcgcaggaggagaaccaactgcaactccagtccagcctgacagcagcatcacagctcaaaatca

SEQ ID NO: 38797 - DNA, 80 bp, synthetic construct
  source 1..80: mol_type = other DNA
ttcgtgcgaaaaaaacgcgtataaattaagttacaaaaaaatatgggacaagtgaaaatgtctcttcaagggattcacct

SEQ ID NO: 38798 - DNA, 80 bp, synthetic construct
  source 1..80: mol_type = other DNA
acacagtccccaccacggacaacagcaaaggtgatccccagagccaccgctcttcgcacgagcagcacaggagaaagacc

SEQ ID NO: 38799 - DNA, 80 bp, synthetic construct
  source 1..80: mol_type = other DNA
aaccacaacaccagtccagcctgacagcaacaccacaacacaaaatcatgaagaagcaggctcagcaaacccacaggcat

SEQ ID NO: 38800 - DNA, 80 bp, synthetic construct
  source 1..80: mol_type = other DNA
gatccacaacacaaccaagtgaaaacagaacaaagacaaactcaacagtccacaaaaaacatctcaaatacaacttccag

SEQ ID NO: 38801 - DNA, 80 bp, synthetic construct
  source 1..80: mol_type = other DNA
aacacagtccccaccgcggacaacagcgaaggcggtccccagaaccaccgtctttcgcacaagcagcacaggaaaaagac

SEQ ID NO: 38802 - DNA, 80 bp, synthetic construct
  source 1..80: mol_type = other DNA
caactacaacatcagtccagtctgacagcagcaccacagtccaaaatcatgaggaaacaggttcaacgaacccgcaggca

SEQ ID NO: 38803 - DNA, 80 bp, synthetic construct
  source 1..80: mol_type = other DNA
tctctctaaaacagcaacgacaccatgtcagctttgctcaaatctctctgggagaaacttttgcccacataccaacaaca

SEQ ID NO: 38804 - DNA, 80 bp, synthetic construct
  source 1..80: mol_type = other DNA
gataataattaatagcttaattataattaaaacattatttaaaaccataactactcaatttacaaagtaaaaccaaaaat

SEQ ID NO: 38805 - DNA, 80 bp, synthetic construct
  source 1..80: mol_type = other DNA
atgggacaagtagttatggaggtgaaagtagagaacatccgagcagtagacatgctcaaagcaagagttaaaaatcgtgt

SEQ ID NO: 38806 - DNA, 80 bp, synthetic construct
  source 1..80: mol_type = other DNA
tctccccaagacagcaacaacatcatgtcagcttcactcaaatctccctaggagaaactctcgcccacatactaacaaca

SEQ ID NO: 38807 - DNA, 80 bp, synthetic construct
  source 1..80: mol_type = other DNA
tacctgaagcgataaaaaatcgatatttagaagaaactttcaatgcaagtgatagtctcaaaacaagaagagtactagag

SEQ ID NO: 38808 - DNA, 80 bp, synthetic construct
  source 1..80: mol_type = other DNA
cgcctttcgcacaagcagcacaggagaaagaccaaccacaacatcagtccagtctgacagcagcaccacagcccaacatc

SEQ ID NO: 38809 - DNA, 80 bp, synthetic construct
  source 1..80: mol_type = other DNA
tcacaaccatctcaagaaaagaaactgggcaaaacagcatccaagagacaaataacaatggatcctctcaatgaacccac

SEQ ID NO: 38810 - DNA, 80 bp, synthetic construct
  source 1..80: mol_type = other DNA
acactcagcccagcagcatcagcgagcccatcagaaacagaatcagcatcaacaccagatacaacaaaccgcctgtcctc

SEQ ID NO: 38811 - DNA, 80 bp, synthetic construct
  source 1..80: mol_type = other DNA
ttccccaaaaacagcaacgacaccatgtcagccttgctcaaatctctctgggagaaacctctgcccacacactaacaaca

SEQ ID NO: 38812 - DNA, 80 bp, synthetic construct
  source 1..80: mol_type = other DNA
atgaagaaacaggttcagcgaacccacaggcatctgcaagcacaatgtaaacccagcacaccaacattgcaaaaccaaat

SEQ ID NO: 38813 - DNA, 80 bp, synthetic construct
  source 1..80: mol_type = other DNA
tctctctaaaacatcaacaacatcatgttaactttgctcatttctctctgggagaaaccttcacccccatactggcaaca

SEQ ID NO: 38814 - DNA, 80 bp, synthetic construct
  source 1..80: mol_type = other DNA
acgcgaaaaaaacgcgtataaattaggttacaaaaaacatgggacaagtgaaaatgtctcttcaagggattcacctgagt

SEQ ID NO: 38815 - DNA, 80 bp, synthetic construct
  source 1..80: mol_type = other DNA
tcaattaaaaataaagattaaaaatcaaaaattaaaatttaaaacttatcattaagtttattaaaaataagaaattataa

SEQ ID NO: 38816 - DNA, 80 bp, synthetic construct
  source 1..80: mol_type = other DNA
tctctccaaaacagcaacgacaccatgtcagctccgctcaaatctctctgagagaaaccctcgcctacatactaacaaca

SEQ ID NO: 38817 - DNA, 80 bp, synthetic construct
  source 1..80: mol_type = other DNA
acacaatcaccaccacgggcaacaacgaaggcggtcctcagagacaccgccttccacacgagcagcacaggaaaaagacc

SEQ ID NO: 38818 - DNA, 80 bp, synthetic construct
  source 1..80: mol_type = other DNA
cttacactcaactccgcagcctcggtgagcccatcagaaacagaaccagcatcaacatcagacacaacaaatcgtctgtc

SEQ ID NO: 38819 - DNA, 80 bp, synthetic construct
  source 1..80: mol_type = other DNA
catgaagcaacaggttcaacgaacccacaggcatctgcaagcacaatataaacccagcacaacaaaactgcaaaacaaaa

SEQ ID NO: 38820 - DNA, 80 bp, synthetic construct
  source 1..80: mol_type = other DNA
gcgaaagatcgacagatccatgcagaaacaaatcaaaatcagcagccgaagcacatcacacagtagaatgccattgcaca

SEQ ID NO: 38821 - DNA, 80 bp, synthetic construct
  source 1..80: mol_type = other DNA
cacacaactgagtggaagtgccaccaccactcaacagatcaaacccaatcttgaatgccaaaaccagactaggatccgtc

SEQ ID NO: 38822 - DNA, 80 bp, synthetic construct
  source 1..80: mol_type = other DNA
caagaccatcagctcaatagtctagccatttaaaaatatttgagaacaggcaagtctccatggcacttcatagcaacagg

SEQ ID NO: 38823 - DNA, 80 bp, synthetic construct
  source 1..80: mol_type = other DNA
caacaatcaacagcccaactacaatcaaaacatcacttaaaaccgcaaccatttaacttacaaagcaaaaacaaaaacat

SEQ ID NO: 38824 - DNA, 80 bp, synthetic construct
  source 1..80: mol_type = other DNA
gggacaagtagctatggaggtgaaagcagagaacactcgagcaatagacatgcccaaagcaagagtgaaaaatcgtgtgg

SEQ ID NO: 38825 - DNA, 80 bp, synthetic construct
  source 1..80: mol_type = other DNA
aacttccagaacacagtccccaccacggacaacagcgaaggcggtccccagaaccaccgtctttccgcacaagcagcaca

SEQ ID NO: 38826 - DNA, 80 bp, synthetic construct
  source 1..80: mol_type = other DNA
aggcagagaagataggacacaagattttgtcctaggttccaccaatgtggttcaaggttatattgatgataaccaaagca

SEQ ID NO: 38827 - DNA, 80 bp, synthetic construct
  source 1..80: mol_type = other DNA
agattccaaaaaaatatgggacaagtgaaaatgtctcttcaagggattcacctgagtgatttatcatacaagcatgctat

SEQ ID NO: 38828 - DNA, 80 bp, synthetic construct
  source 1..80: mol_type = other DNA
atcataaactatacaatgcaagaaaacacatccgaatcagaacatcacaccagcacatcacccatggaatccagcaggga

SEQ ID NO: 38829 - DNA, 80 bp, synthetic construct
  source 1..80: mol_type = other DNA
caataacagcaaaattacttcatcatccaactactgaagttagatcagaattttatgcaatcttggatgtatgggatatt

SEQ ID NO: 38830 - DNA, 80 bp, synthetic construct
  source 1..80: mol_type = other DNA
aaagtaattgtttgattatgcaattatatggtagttaattaaaaattaaaattaaaaatcaaaagttaaagtttaaaacc

SEQ ID NO: 38831 - DNA, 80 bp, synthetic construct
  source 1..80: mol_type = other DNA
atccaaactgtcgaatatgttgagcacattcagattgagaagacaaacatcagaaggatgattattgaaccaaaattaac

SEQ ID NO: 38832 - DNA, 80 bp, synthetic construct
  source 1..80: mol_type = other DNA
tcacaaaggaacggagtagctccacaatctgaagcgttgaggaaactggcaggtatcaagttcaaaagaataaatttcga

SEQ ID NO: 38833 - DNA, 80 bp, synthetic construct
  source 1..80: mol_type = other DNA
taattcgtcagagtatatagaaaattggaatttacaaaatagaaggcagcgcaccggattcgttttccataaacctaaca

SEQ ID NO: 38834 - DNA, 80 bp, synthetic construct
  source 1..80: mol_type = other DNA
atggactttgctcccgggggctacccattgatattcagttatgctatgggagtcggtacagtcctagatgtccaaatgcg

SEQ ID NO: 38835 - DNA, 80 bp, synthetic construct
  source 1..80: mol_type = other DNA
actgctctgaatagagcgcgcaccctgaatgaacaggggttttcacttatcccacctgaattagtgagtgagtactggag

SEQ ID NO: 38836 - DNA, 80 bp, synthetic construct
  source 1..80: mol_type = other DNA
cgcgtataaattaagttacaaaaaaacatgggacaagtgaaaatgtctcttcaagggattcacctgagtgatctatcata

SEQ ID NO: 38837 - DNA, 80 bp, synthetic construct
  source 1..80: mol_type = other DNA
acattagggaaaatgctcatgcccactataaagggtcagaaaacagatcagttcttaaataagagagagaattatttcca

SEQ ID NO: 38838 - DNA, 80 bp, synthetic construct
  source 1..80: mol_type = other DNA
tagttggggatcccaagggaaaaacattaaagatgaagatataatagatgaatcaatagataaattgttaaggattgata

SEQ ID NO: 38839 - DNA, 80 bp, synthetic construct
  source 1..80: mol_type = other DNA
agaaggagcaggaaattggatggctagaacagcatgtgaatatcctgatatcaagtttgtatatagaagtctgaaagatg

SEQ ID NO: 38840 - DNA, 80 bp, synthetic construct
  source 1..80: mol_type = other DNA
tgatttttttaagatggtaattctatggagaaaacatgtattatcatgcagaatttgcactacttatgggacagacctct

SEQ ID NO: 38841 - DNA, 80 bp, synthetic construct
  source 1..80: mol_type = other DNA
aaatcaaaagttaaagtttaaaacctatcattaagtttattaaaaataagaaactataattgaatgtatacggttttttt

SEQ ID NO: 38842 - DNA, 80 bp, synthetic construct
  source 1..80: mol_type = other DNA
ttaccagttaattatgtagtttaataaaaataaacaatgggacaagtaaaaatggagtcctatctggtagacacctatca

SEQ ID NO: 38843 - DNA, 80 bp, synthetic construct
  source 1..80: mol_type = other DNA
caagcaacctgaccaagaactatcaactctattctatagactaaaaagttgctgttttagttatataaaaatcaagttag

SEQ ID NO: 38844 - DNA, 80 bp, synthetic construct
  source 1..80: mol_type = other DNA
agtaagaattaaatcaatcaagagtgggacaaataaaaatgtcttggaaagtggtgattattttttcattgctaataaca

SEQ ID NO: 38845 - DNA, 80 bp, synthetic construct
  source 1..80: mol_type = other DNA
tctttggggaaagttaaaaacaataaaggagaagatttacagatgctagacatacatggagtggaaaaaagctgggtgga

SEQ ID NO: 38846 - DNA, 80 bp, synthetic construct
  source 1..80: mol_type = other DNA
atctttggcgttatagatacgccttgctggatagtgaaagcagccccttcttgctctgaaaagaagggaaactatgcttg

SEQ ID NO: 38847 - DNA, 80 bp, synthetic construct
  source 1..80: mol_type = other DNA
ttggggctctggttgcttgttacaaaggagtaagctgttccattggcagcaatagagtagggatcatcaagcagctgaac

SEQ ID NO: 38848 - DNA, 80 bp, synthetic construct
  source 1..80: mol_type = other DNA
aacaaaatttgggacaaatcataatgtctcgcaaggctccgtgcaaatatgaagtgcggggcaaatgcaatagaggaagt

SEQ ID NO: 38849 - DNA, 80 bp, synthetic construct
  source 1..80: mol_type = other DNA
aattatctattaaatcagcttttaaggaacactgatagagctgatggcctatcaataatatcaggcgcaggcagagaaga

SEQ ID NO: 38850 - DNA, 80 bp, synthetic construct
  source 1..80: mol_type = other DNA
ccactctagaccatgatataacacagtattttaaaagattgattcaaaggtatacagattctgtaataaacaaggacaca

SEQ ID NO: 38851 - DNA, 80 bp, synthetic construct
  source 1..80: mol_type = other DNA
cacaatcgaatggaagtgctatcattattcaatagacaagactcaatcttgaatgttaagactagattaggatccgtcta

SEQ ID NO: 38852 - DNA, 80 bp, synthetic construct
  source 1..80: mol_type = other DNA
agactattagttcaatagtttagttatttaaaaatattttgaaaacaggtaggtttctatgacaccttacagcaataggt

SEQ ID NO: 38853 - DNA, 80 bp, synthetic construct
  source 1..80: mol_type = other DNA
atcataaactatacaatacaaaaaactgcatctgaatcagaacaccatactagctctccacccacagaatccaacaaaga

SEQ ID NO: 38854 - DNA, 80 bp, synthetic construct
  source 1..80: mol_type = other DNA
aacttcaacaatccctatagataacccagacatcaatccaagctcacagcttccaactcaacagtccacagaaagcccca

SEQ ID NO: 38855 - DNA, 80 bp, synthetic construct
  source 1..80: mol_type = other DNA
tccgcagcctcgatgagcccatcagaaacagagccaacatcaacatcagacacaacaaatcgtctgtcctctgtagacag

SEQ ID NO: 38856 - DNA, 80 bp, synthetic construct
  source 1..80: mol_type = other DNA
atccacaacacaaccaagtgaaagcagaacaaagacaaaatcgacagcccacagaagaaacatcccaagtacagtctcca

SEQ ID NO: 38857 - DNA, 80 bp, synthetic construct
  source 1..80: mol_type = other DNA
acacaactcccatcacgggcaacaacgaaggcggcccccagagctaccaccctcagaacaaagacaaaatcgacagccca

SEQ ID NO: 38858 - DNA, 80 bp, synthetic construct
  source 1..80: mol_type = other DNA
caaaagaaacatcccaagtacagtctccagaacacaattcccatcacgagcaacaacgaaggcggcccccagagccacca

SEQ ID NO: 38859 - DNA, 80 bp, synthetic construct
  source 1..80: mol_type = other DNA
ccctccacacgagcagcgcaacaaggagaccaactgcaacatcagtccagtccgacagcagcaccacagctcaaaaccat

SEQ ID NO: 38860 - DNA, 80 bp, synthetic construct
  source 1..80: mol_type = other DNA
gaagaaacaggttcagtgaacccacaggcatctgtaagcacaatgcaaaaatagcacaccaacattgtaaaaacaaatta

SEQ ID NO: 38861 - DNA, 80 bp, synthetic construct
  source 1..80: mol_type = other DNA
gttaacaaaaaaatatgaaacagctctaaagtaaaacatgtaggtactaacaatcaagaaatcaaaagacaactcataat

SEQ ID NO: 38862 - DNA, 80 bp, synthetic construct
  source 1..80: mol_type = other DNA
ccacctaaaacagctacaacatcatatcaactttgctcaaatcatcctgagaaaaactttcacccctatactgacaatat

SEQ ID NO: 38863 - DNA, 80 bp, synthetic construct
  source 1..80: mol_type = other DNA
cacaatcatctcaagaaaataatctgggcaaaacagcaccaaagagacaaataacaatggatcctcttaatgaatccact

SEQ ID NO: 38864 - DNA, 80 bp, synthetic construct
  source 1..80: mol_type = other DNA
tacaggcagcaaagcagaaagtttattcgttaatatattcatgcaagcttatggtgctggtcaaacaatgctgaggtggg

SEQ ID NO: 38865 - DNA, 80 bp, synthetic construct
  source 1..80: mol_type = other DNA
atggtgctggtcaaacaatgctgaggtggggggtcatcgccagatcatctaacaatataatgttaggacatgtatctgta

SEQ ID NO: 38866 - DNA, 80 bp, synthetic construct
  source 1..80: mol_type = other DNA
aatccttaggttggagagcttgactgaactaagaggggcattcatattaaggatcatcaaaggatttgtggataacaata

SEQ ID NO: 38867 - DNA, 80 bp, synthetic construct
  source 1..80: mol_type = other DNA
ccataaacttaaagaaggggaaacatatatatcaagggatcttcagtttataagcaaggtgattcaatctgaaggggtaa

SEQ ID NO: 38868 - DNA, 80 bp, synthetic construct
  source 1..80: mol_type = other DNA
gaatttaggggagaaagcataatagttagtctgatattaagaaatttctggctgtataacttatacatgcatgaatcaaa

SEQ ID NO: 38869 - DNA, 80 bp, synthetic construct
  source 1..80: mol_type = other DNA
aataattaataacttaattacacttaaaacattatttaaacccataactaattaatttataaagtaaaaacaaaaatatg

SEQ ID NO: 38870 - DNA, 80 bp, synthetic construct
  source 1..80: mol_type = other DNA
atgtatcatgtatgtcaatggtgtagtcaatatgatagatgttttcttgatagtcaaccacatctattgagaatgagaac

SEQ ID NO: 38871 - DNA, 80 bp, synthetic construct
  source 1..80: mol_type = other DNA
acaagagtatgcaattcctgttggaccagtttttccacctggtatgaattggactgatctaatcactaattattctccat

SEQ ID NO: 38872 - DNA, 80 bp, synthetic construct
  source 1..80: mol_type = other DNA
ataatttacagcgtgtatttactgtggcttccataagaagcatgcttattaagtgagaactgggctaacaccctagtatt

SEQ ID NO: 38873 - DNA, 80 bp, synthetic construct
  source 1..80: mol_type = other DNA
cgatcttaatgagcatgtagctatgtcaagctgcttagacttcataagtaaggatacgatattcgtgttcgctacgtgaa

SEQ ID NO: 38874 - DNA, 80 bp, synthetic construct
  source 1..80: mol_type = other DNA
agctgcttagacttcataagtaaggatacgatattcgtgttcgctacgtgaagtaactattcagatgatgtagtgagagg

SEQ ID NO: 38875 - DNA, 80 bp, synthetic construct
  source 1..80: mol_type = other DNA
attggcaatttgcctttaagaacttggagtttcgactttggtttgctgggaaccactctacttaacttggatgccaacta

SEQ ID NO: 38876 - DNA, 80 bp, synthetic construct
  source 1..80: mol_type = other DNA
cgttgagacagctagaacgacgattgaatattttgtggattttatagacaatgtgtgtatggatgaaatggtacgagagt

SEQ ID NO: 38877 - DNA, 80 bp, synthetic construct
  source 1..80: mol_type = other DNA
tctcaacgtaacggtatagctccacaatctgaggcactcagaaagttgtcagggataaagtttaaaagaataaattttga

SEQ ID NO: 38878 - DNA, 80 bp, synthetic construct
  source 1..80: mol_type = other DNA
taactcatctgaatatatagagaattggaacttacagagcagaagacagagaactggattcacctttcacaaaccaaaca

SEQ ID NO: 38879 - DNA, 80 bp, synthetic construct
  source 1..80: mol_type = other DNA
tcacattaaataggtcacagcctcaacatgataatctgatgggcacgatgtggcttaatgctgggtctgaaattcaagtt

SEQ ID NO: 38880 - DNA, 80 bp, synthetic construct
  source 1..80: mol_type = other DNA
gctggatttgactacgcatgcgctattaatgctccagccaatattcaacagtttgaacacgttgtacaattgcgtcgcgt

SEQ ID NO: 38881 - DNA, 80 bp, synthetic construct
  source 1..80: mol_type = other DNA
tttgacaacagcaactattactttgcttccagatgccgaaagattcagttttcctagagtcattaattcagcggatggcg

SEQ ID NO: 38882 - DNA, 80 bp, synthetic construct
  source 1..80: mol_type = other DNA
caacaacatggtattttaatccagtagtactaagacctagtaatgtggaagtcgaatttctgttaaacggtcaagttatt

SEQ ID NO: 38883 - DNA, 80 bp, synthetic construct
  source 1..80: mol_type = other DNA
ctccaaatatgactccagcagttgccgcgttatttccaaacgcacaaccattcgaacatcatgctaccgttggtttaact

SEQ ID NO: 38884 - DNA, 80 bp, synthetic construct
  source 1..80: mol_type = other DNA
ttaagaattgattcagctatatgtgaatcggttctcgctgatgcaacagaaactatgcttgctaatgtgacatcaatcag

SEQ ID NO: 38885 - DNA, 80 bp, synthetic construct
  source 1..80: mol_type = other DNA
tcgggcatgccattcaccagtgttgtcaactctctcaaccatataaaatactttgctgctgcagagtacaaggcctatga

SEQ ID NO: 38886 - DNA, 80 bp, synthetic construct
  source 1..80: mol_type = other DNA
atgtctcagtcagttcaaatcatcaagctcgtccaaactcatttgctgattttctaaacaagacatattcgaacgattca

SEQ ID NO: 38887 - DNA, 80 bp, synthetic construct
  source 1..80: mol_type = other DNA
tgtttgaactctgtaagtaaggatgcgtctacgtattcgctacacagagtaatcactcagatgacgtagtaagaggatgt

SEQ ID NO: 38888 - DNA, 80 bp, synthetic construct
  source 1..80: mol_type = other DNA
attcagcgatgccagctggaactgtttttcaaccgggatttccatgggaacacacactatccaattatactgttgctcaa

SEQ ID NO: 38889 - DNA, 80 bp, synthetic construct
  source 1..80: mol_type = other DNA
tagagagattattgttaatcgcatctgtgaagagaatggtaatgtagataagctagaagactaaacatcttctatgcggc

SEQ ID NO: 38890 - DNA, 80 bp, synthetic construct
  source 1..80: mol_type = other DNA
ggtttagtccatgcttgcataggggcaaatatgcatgatatggatgatccccagaaggatgaaatgtgaactatgaggct

SEQ ID NO: 38891 - DNA, 80 bp, synthetic construct
  source 1..80: mol_type = other DNA
tgataattatgttcaatcaactagaggcataattgattttttatcatcttttatagaagctgtatgtgatgatgaaattg

SEQ ID NO: 38892 - DNA, 80 bp, synthetic construct
  source 1..80: mol_type = other DNA
ttcaagaaatggtatgcaacctcaatcaccagcccttatattattatcttcatcaaaatttaaaacaattaattttaata

SEQ ID NO: 38893 - DNA, 80 bp, synthetic construct
  source 1..80: mol_type = other DNA
atctatcaaaaattggaatgctcaatcaagacgtgagaatcctgtatatgagtacaaaaatccaatgttgtttgaatata

SEQ ID NO: 38894 - DNA, 80 bp, synthetic construct
  source 1..80: mol_type = other DNA
tattttacagcgcgcaaatccacaatttggaagcgttatgggtttaagatattatacaacaagtaatacttgtcaaattg

SEQ ID NO: 38895 - DNA, 80 bp, synthetic construct
  source 1..80: mol_type = other DNA
ttttaatgaaaatagaacctggtgctccaaatataagcaacccaactattttacctgatcctaataatcaaacaacttgg

SEQ ID NO: 38896 - DNA, 80 bp, synthetic construct
  source 1..80: mol_type = other DNA
cggtacaattaatgaatggaacatttaccattgaattttataataatggtcaactaattgatatggttcgaaatatggga

SEQ ID NO: 38897 - DNA, 80 bp, synthetic construct
  source 1..80: mol_type = other DNA
gaacaatttatactaatgtagaagatgttgtacaacagacgaatgaattgattagaactttgaaaggaaatatttttcat

SEQ ID NO: 38898 - DNA, 80 bp, synthetic construct
  source 1..80: mol_type = other DNA
taagaacttttgattcttatagaataacaattgacatgattagaccagctgctatgacccaatacgttcaacgaattttt

SEQ ID NO: 38899 - DNA, 80 bp, synthetic construct
  source 1..80: mol_type = other DNA
taacattaagtatattagatgctaccacagaatccgttctatgtgattctcattcagtagaatattcaatagtagcaaac

SEQ ID NO: 38900 - DNA, 80 bp, synthetic construct
  source 1..80: mol_type = other DNA
gctggattcgactattcgtgtgcaattaatgcgccagcttattcccaacaatttgaacatattggacagctccgaagagt

SEQ ID NO: 38901 - DNA, 80 bp, synthetic construct
  source 1..80: mol_type = other DNA
tataagcatgtagctatgtcaagctatttgaactttgtaagtaaggatgtatttatacattcgctacacaaagtaatcac

SEQ ID NO: 38902 - DNA, 80 bp, synthetic construct
  source 1..80: mol_type = other DNA
ctgcacgtaatacaattgattattttgtcgattttgtggataatgtatgcatggatgagatggttagggaatcacaaaga

SEQ ID NO: 38903 - DNA, 80 bp, synthetic construct
  source 1..80: mol_type = other DNA
agtatattgaaaattggaatctgcagaatagaagacagagaacaggtttcacattccacaagccgaacatctttccttat

SEQ ID NO: 38904 - DNA, 80 bp, synthetic construct
  source 1..80: mol_type = other DNA
ttgctggatttgattattcatgtgctattaacgctccagctaatacacaacaatttgaacatattgtacagctccggaga

SEQ ID NO: 38905 - DNA, 80 bp, synthetic construct
  source 1..80: mol_type = other DNA
gagcaactacatggtattttaatccagtgattcttaggccaaataacgttgaagtagagtttctgttgaatgggcaaata

SEQ ID NO: 38906 - DNA, 80 bp, synthetic construct
  source 1..80: mol_type = other DNA
tccaccaggaatgaattggacagaattgatcactaactattctccatcgcgtgaagataatttacagcgcgtatttactg

SEQ ID NO: 38907 - DNA, 80 bp, synthetic construct
  source 1..80: mol_type = other DNA
gacgaacatgtagctatatcaagctactcagactttacaagtaaggatgcgcagaggcattcgctacgtaaagaactggc

SEQ ID NO: 38908 - DNA, 80 bp, synthetic construct
  source 1..80: mol_type = other DNA
cagactttacaagtaaggatgcgcagaggcattcgctacgtaaagaactggctcagatggtatagtgagaggatgtgacc

SEQ ID NO: 38909 - DNA, 80 bp, synthetic construct
  source 1..80: mol_type = other DNA
ataggtaatttaccagttaggaattggaatttcgattttggattgcttggcacaacattactaaatcttgacgcaaatta

SEQ ID NO: 38910 - DNA, 80 bp, synthetic construct
  source 1..80: mol_type = other DNA
ctccgcaatcagatgcattaagaaaactgtctggaataaaatttaaaagaattaatttcgataactcatcagaatacata

SEQ ID NO: 38911 - DNA, 80 bp, synthetic construct
  source 1..80: mol_type = other DNA
agctggattcgattattcatgtgccattaatgctcccgctaacactcaacagtttgagcatatagttcaactacgtcgtg

SEQ ID NO: 38912 - DNA, 80 bp, synthetic construct
  source 1..80: mol_type = other DNA
tcctacctacagcgactattactctcctcccagacgccgaaagattcagctttccaagagtaattaattccgctgatggc

SEQ ID NO: 38913 - DNA, 80 bp, synthetic construct
  source 1..80: mol_type = other DNA
gctacgacatggtatttcaatccagtagtactgaggccaaataatgttgaagttgaatttctattaaatggacaaataat

SEQ ID NO: 38914 - DNA, 80 bp, synthetic construct
  source 1..80: mol_type = other DNA
acgctcaaccattcattcatcatgcaactgttggactgacattgcgcattgattcagctatttgtgaatcagttcttgct

SEQ ID NO: 38915 - DNA, 80 bp, synthetic construct
  source 1..80: mol_type = other DNA
ataatttacaacgtgtatttacagtagcttccattagaagcatgcttgttaaatgaggaccgagctaattacttggtatc

SEQ ID NO: 38916 - DNA, 80 bp, synthetic construct
  source 1..80: mol_type = other DNA
gacaagtatgtagctacgttaagctgtttgaactctacaagtaagggtacgtttacgtattcgctacgtagagtaatcac

SEQ ID NO: 38917 - DNA, 80 bp, synthetic construct
  source 1..80: mol_type = other DNA
attggtaatctaccaaccagaaattggagttttgattttggtttacttggaactacgcttttgaacttagacgctaacta

SEQ ID NO: 38918 - DNA, 80 bp, synthetic construct
  source 1..80: mol_type = other DNA
gctggatttgattattcttgcgccatcaatgcaccagccaacatacagcaatttgaacatatagttcagctccgcagagt

SEQ ID NO: 38919 - DNA, 80 bp, synthetic construct
  source 1..80: mol_type = other DNA
ggattggtaatctaccggttagaaattggaattttgactttggattacttggaacaactctgctaaatttagacgctaat

SEQ ID NO: 38920 - DNA, 80 bp, synthetic construct
  source 1..80: mol_type = other DNA
ttgctggattcgactattcgtgtgcaattaatgcgccagctaatacacagcaatttgagcacattgtacagcttcgaaga

SEQ ID NO: 38921 - DNA, 80 bp, synthetic construct
  source 1..80: mol_type = other DNA
gagcaactacatggtactttaacccagtaattcttagaccaaataacgttgaagtggagtttctactaaacgggcagata

SEQ ID NO: 38922 - DNA, 80 bp, synthetic construct
  source 1..80: mol_type = other DNA
ggataggaaatttgccaaccaggaattggacttttgattttggattacttggtactactttgcttaatctagatgcaaat

SEQ ID NO: 38923 - DNA, 80 bp, synthetic construct
  source 1..80: mol_type = other DNA
tacgttgagaatgctagaactaccattgaatactttattgattttatagataatgtatgtatggatgaaatggctagaga

SEQ ID NO: 38924 - DNA, 80 bp, synthetic construct
  source 1..80: mol_type = other DNA
tacttccatactcagcatcatttactctaaatcgatcgcagccagctcatgataacttaatgggaactatgtggattaac

SEQ ID NO: 38925 - DNA, 80 bp, synthetic construct
  source 1..80: mol_type = other DNA
ctctcacaacggctacgattactctgttgccagatgcagaaagattcagtttcccgagagtgattaattcagccgacggt

SEQ ID NO: 38926 - DNA, 80 bp, synthetic construct
  source 1..80: mol_type = other DNA
actaccacatggtacttcaatccagttatcctaagaccaagtaatgtagaggttgaatttctattgaatggacagataat

SEQ ID NO: 38927 - DNA, 80 bp, synthetic construct
  source 1..80: mol_type = other DNA
caagagtatgctataccagttggaccagtattcccaccaggcatgaactggaccgagctgattactaactattcaccatc

SEQ ID NO: 38928 - DNA, 80 bp, synthetic construct
  source 1..80: mol_type = other DNA
ataatttgcaacgtgtctttacggtagcctctatcagaagcatgttgattaagtgaggaccagactaaccatctggtatc

SEQ ID NO: 38929 - DNA, 80 bp, synthetic construct
  source 1..80: mol_type = other DNA
caatcttagttaacatgtagctatgtcaagtcattcagactctacaagtaaggacatgacttcatgttcgctacgtagag

SEQ ID NO: 38930 - DNA, 80 bp, synthetic construct
  source 1..80: mol_type = other DNA
cagactctacaagtaaggacatgacttcatgttcgctacgtagagtaactgcatgaatgatgtagtgagaggatgtgacc

SEQ ID NO: 38931 - DNA, 80 bp, synthetic construct
  source 1..80: mol_type = other DNA
attggcaatttgcctattagaaattggacatttgactttggtctactaggtactacgcttttaaatcttgatgctaatta

SEQ ID NO: 38932 - DNA, 80 bp, synthetic construct
  source 1..80: mol_type = other DNA
tgttgagactgcaagaactacgattgagtattttattgatttcattgataatgtatgtatggatgaaatggcaagagagt

SEQ ID NO: 38933 - DNA, 80 bp, synthetic construct
  source 1..80: mol_type = other DNA
ctcaaagaaatggagtagctccacaatctgaggcgttgaggaagctagctggtattaaatttaaaagaataaactttaat

SEQ ID NO: 38934 - DNA, 80 bp, synthetic construct
  source 1..80: mol_type = other DNA
aattcatcagaatatatagaaaattggaatttacaaaatagaagacagcgtactggatttatttttcataaacctaatat

SEQ ID NO: 38935 - DNA, 80 bp, synthetic construct
  source 1..80: mol_type = other DNA
ttactttaaatagatctcaaccaatgcatgacaatttaatgggaaccatgtggcttaatgctggatcagaaattcaagta

SEQ ID NO: 38936 - DNA, 80 bp, synthetic construct
  source 1..80: mol_type = other DNA
gctggatttgactactcgtgtgctctaaatgctccagcaaatattcagcagtttgaacatattgtccagctaaggcgtgc

SEQ ID NO: 38937 - DNA, 80 bp, synthetic construct
  source 1..80: mol_type = other DNA
actaactacagccactataactttgttacctgatgcagaaagatttagttttccaagagttattaattcagcagatggtg

SEQ ID NO: 38938 - DNA, 80 bp, synthetic construct
  source 1..80: mol_type = other DNA
caactacatggttctttaatccaattatactaagaccaaataatgtagaggtagaatttttactgaatggacaaattatt

SEQ ID NO: 38939 - DNA, 80 bp, synthetic construct
  source 1..80: mol_type = other DNA
ggtacattatattctaatgttagcgatctaattcaacaatttaatcaaatgatagtaaccatgaatggaaatgactttca

SEQ ID NO: 38940 - DNA, 80 bp, synthetic construct
  source 1..80: mol_type = other DNA
aatacataccaagctagatttggcactattatcgcaagaaattttgatacaattcgtctatcattccaattaatgcgtcc

SEQ ID NO: 38941 - DNA, 80 bp, synthetic construct
  source 1..80: mol_type = other DNA
accaaacatgacgccagccgtaaatgcattatttccgcaagcgcaaccttttcaacatcatgcaacagttggacttacgt

SEQ ID NO: 38942 - DNA, 80 bp, synthetic construct
  source 1..80: mol_type = other DNA
tacgtattgagtctgcagtttgtgaatcagtgcttgcggattcaaatgaaactttattggcgaatgttaccgcagtacgt

SEQ ID NO: 38943 - DNA, 80 bp, synthetic construct
  source 1..80: mol_type = other DNA
gtatgtagctatatcaagctgattgaactctgtaagtaaggatgtatttatacattcgctacacggagtaatcactcaga

SEQ ID NO: 38944 - DNA, 80 bp, synthetic construct
  source 1..80: mol_type = other DNA
tgaactctgtaagtaaggatgtatttatacattcgctacacggagtaatcactcagatggtatagtgagaggatgtgacc

SEQ ID NO: 38945 - DNA, 80 bp, synthetic construct
  source 1..80: mol_type = other DNA
ggattggcaacttacccgttagaaattggaacttcgattttggtctgctcggaactactctactaaatttagatgcaaat

SEQ ID NO: 38946 - DNA, 80 bp, synthetic construct
  source 1..80: mol_type = other DNA
tatgttgaaactgcgcgtaatgcaattgattattttgtagattttgtggataatgtatgtatggatgagatggttaggga

SEQ ID NO: 38947 - DNA, 80 bp, synthetic construct
  source 1..80: mol_type = other DNA
gacaagaatacgctgttccagttggaccagtctttcctccaggtatgaattggacagaacttatcactaattactcacca

SEQ ID NO: 38948 - DNA, 80 bp, synthetic construct
  source 1..80: mol_type = other DNA
cccgtgaagataatttgcagcgtgtattcactgtggcttccattagaagcatgcttgttaagtgagggctgaactaacaa

SEQ ID NO: 38949 - DNA, 80 bp, synthetic construct
  source 1..80: mol_type = other DNA
ttcagtatccgatcttaaccggcatgtagctatatcaagctgcccagactctataagtaaggatgtgatttcacattcgc

SEQ ID NO: 38950 - DNA, 80 bp, synthetic construct
  source 1..80: mol_type = other DNA
attggtaacctacccgtcagaaattggaatttcgattttggattgttaggcacaactctattaaatttggatgctaatta

SEQ ID NO: 38951 - DNA, 80 bp, synthetic construct
  source 1..80: mol_type = other DNA
cgttgaaacagccagaactacaattgattactttgttgattttgtagataatgtctgtatggatgagatggcaagagagt

SEQ ID NO: 38952 - DNA, 80 bp, synthetic construct
  source 1..80: mol_type = other DNA
ttgcaggatttgactactcatgtgcacttaatgctccagctaatactcaacaatttgagcacatagttcaattgcgccga

SEQ ID NO: 38953 - DNA, 80 bp, synthetic construct
  source 1..80: mol_type = other DNA
gtattgacaacagctaccattactctgctccctgacgcagaaagattcggctttccaagagttgttaattctgcagatgg

SEQ ID NO: 38954 - DNA, 80 bp, synthetic construct
  source 1..80: mol_type = other DNA
tgcaacaacgtggtattttaatcctgtagtattgcgaccgaacaatgttgaagttgaatttcttttaaacggccagatta

SEQ ID NO: 38955 - DNA, 80 bp, synthetic construct
  source 1..80: mol_type = other DNA
taaatacttatcaagcgagatttggcaccattacggctaggaattttgatacaatacgactgtcatttcaactgatgagg

SEQ ID NO: 38956 - DNA, 80 bp, synthetic construct
  source 1..80: mol_type = other DNA
cctccaaatatgacacctgcagtcgcagctctatttccaaatgctcaaccatttattcatcatgctacagttggactaac

SEQ ID NO: 38957 - DNA, 80 bp, synthetic construct
  source 1..80: mol_type = other DNA
tcttcgaattgactcagcgatttgtgaatctgtcttggcggatgctaatgaaacgatgttggctaacgttacatcagttc

SEQ ID NO: 38958 - DNA, 80 bp, synthetic construct
  source 1..80: mol_type = other DNA
tcgcaacgaaatgggatagctccacaatctgaagcactaagaaagttgtcaggtattaaatttaaaagaattaatttcga

SEQ ID NO: 38959 - DNA, 80 bp, synthetic construct
  source 1..80: mol_type = other DNA
ctctcacaacagctacaattactctattaccagacgctgaaagattcagttttccgagagttattaattctgctgacggt

SEQ ID NO: 38960 - DNA, 80 bp, synthetic construct
  source 1..80: mol_type = other DNA
taacacatatcaggcacgatttggaactatcatagccagaaattttgatactatccgcttgtcatttcagttagtaagac

SEQ ID NO: 38961 - DNA, 80 bp, synthetic construct
  source 1..80: mol_type = other DNA
caaatctatttccgcaagcaccgccattcatattccatgccacagtcggacttacgttacgaattgaatctgcagtttgt

SEQ ID NO: 38962 - DNA, 80 bp, synthetic construct
  source 1..80: mol_type = other DNA
ataggtaatctgccaattagaaattggactttcgatttcggattacttggcacaactctacttaatctagatgcaaatta

SEQ ID NO: 38963 - DNA, 80 bp, synthetic construct
  source 1..80: mol_type = other DNA
aatcacagcgaaatggaattgcgccgcaatctgaggcactacgaaagttgtcaggtattaaatttaaaagaataaatttt

SEQ ID NO: 38964 - DNA, 80 bp, synthetic construct
  source 1..80: mol_type = other DNA
gcacaaccacatggttctttaatccagtcatctttaggccaagtaatgtagagatagaatttctattgaatggacaagta

SEQ ID NO: 38965 - DNA, 80 bp, synthetic construct
  source 1..80: mol_type = other DNA
gtagctagaaactttgacacaatccgtttatcattccaactagtacgtccaccaaacatgacaccagcagttactaatat

SEQ ID NO: 38966 - DNA, 80 bp, synthetic construct
  source 1..80: mol_type = other DNA
actcccacaagcgccgccgttcatttttcatgctacggttggaattacattacgtatagattctgcagtttgtgaatcag

SEQ ID NO: 38967 - DNA, 80 bp, synthetic construct
  source 1..80: mol_type = other DNA
gctggattcgactactcatgtgcaataaacgcgccagctaatacgcaacaatttgagcatattgtacagcttcgaagggt

SEQ ID NO: 38968 - DNA, 80 bp, synthetic construct
  source 1..80: mol_type = other DNA
ataggaaatttgccaattaggaattggacttttgattttggattacttggtacgactttactcaatttagatgctaatta

SEQ ID NO: 38969 - DNA, 80 bp, synthetic construct
  source 1..80: mol_type = other DNA
caccgaatatgacaccagcagttgcaaacctatttccgcaagcaccaccatttatatttcatgctacagttggactcacg

SEQ ID NO: 38970 - DNA, 80 bp, synthetic construct
  source 1..80: mol_type = other DNA
cagcccgtaacacaattgattactttgtagattttgtggataatgtgtgtatggatgaaatggttagagaatcacaaaga

SEQ ID NO: 38971 - DNA, 80 bp, synthetic construct
  source 1..80: mol_type = other DNA
gctggattcgactattcatgcgcaattaatgcaccagctaacacacaacaatttgaacatattgtacagctccgaagagt

SEQ ID NO: 38972 - DNA, 80 bp, synthetic construct
  source 1..80: mol_type = other DNA
catagcatgggaagagatgctaggagtggtgggagaccgaagcgaggagaaaagtaaagaaagcaacggggctagccggt

SEQ ID NO: 38973 - DNA, 80 bp, synthetic construct
  source 1..80: mol_type = other DNA
cccccgggcgctcccctcgatgctcccccggaggggttcacacccccaaccgacgggccggctactcttcttttcctttc

SEQ ID NO: 38974 - DNA, 80 bp, synthetic construct
  source 1..80: mol_type = other DNA
ataacttgcagcgcgtctttacagtggcttccattagaagcatgcttgtcaaatgaggaccaagctaaccacttggtatc

SEQ ID NO: 38975 - DNA, 80 bp, synthetic construct
  source 1..80: mol_type = other DNA
gtatgtagctacgtcaagctgtttgaactctgtaagtaagaatacgtttacgtattcgctacacagagtaatcacccaga

SEQ ID NO: 38976 - DNA, 80 bp, synthetic construct
  source 1..80: mol_type = other DNA
tgaactctgtaagtaagaatacgtttacgtattcgctacacagagtaatcacccagatgacgtagtgagaggatgtgacc

SEQ ID NO: 38977 - DNA, 80 bp, synthetic construct
  source 1..80: mol_type = other DNA
attggtaatctaccaattagaaattggaattttgattttggactgcttggaacaactctattgaatttagatgctaacta

SEQ ID NO: 38978 - DNA, 80 bp, synthetic construct
  source 1..80: mol_type = other DNA
cgtcgaaacagcccgcaacacaattgattattttgtagattttgtagacaatgtatgcatggatgaaatggttagggaat

SEQ ID NO: 38979 - DNA, 80 bp, synthetic construct
  source 1..80: mol_type = other DNA
ccacagtcggattcacttagaaaactatcaggtgttaagtttaaaagaataaactttgataattcatcagaatatataga

SEQ ID NO: 38980 - DNA, 80 bp, synthetic construct
  source 1..80: mol_type = other DNA
gctgggtttgactattcatgtgcaattaatgcgccagctaatacacaacaatttgagcatatcgtacagcttcgaagagt

SEQ ID NO: 38981 - DNA, 80 bp, synthetic construct
  source 1..80: mol_type = other DNA
gagcgactacatggtacttcaacccagtgattctcagaccgaataatgttgaagtagagtttttactaaatgggcaaata

SEQ ID NO: 38982 - DNA, 80 bp, synthetic construct
  source 1..80: mol_type = other DNA
aatatgtatgatacattatttcctataaatcaaaaaatagttaataagtttgcaaacacaattaaacaacataaatgtag

SEQ ID NO: 38983 - DNA, 80 bp, synthetic construct
  source 1..80: mol_type = other DNA
tcaacatacggacttgacttactgccaaggatgcttaatatatcatgtgtgtgaatggtgtagtcaatatagcagatgct

SEQ ID NO: 38984 - DNA, 80 bp, synthetic construct
  source 1..80: mol_type = other DNA
cacaaatattaactttaaatgatgttgtcacaatcatgcagtctattatatatgaatggtttgatattagatatatgaga

SEQ ID NO: 38985 - DNA, 80 bp, synthetic construct
  source 1..80: mol_type = other DNA
ccattcaggaaaggaataataatgggactggacatattagctaatatgaccaatgatgctaaagttattcaaacactaaa

SEQ ID NO: 38986 - DNA, 80 bp, synthetic construct
  source 1..80: mol_type = other DNA
atctaatttcattaggtataccaaaaatagacgctgatacatacgttcgggtcaaaaatttattctcaagataaatatag

SEQ ID NO: 38987 - DNA, 80 bp, synthetic construct
  source 1..80: mol_type = other DNA
tgcttttttcaaaaaacaatatagtatctagaggaatagctttgaccgaaaaagcgaagctgaattcgtatgcaccaata

SEQ ID NO: 38988 - DNA, 80 bp, synthetic construct
  source 1..80: mol_type = other DNA
tgctgtttgatcatgagattaattgggaagttagaggcttaatttcacagtgtatgaatggaaatattccgaggatatta

SEQ ID NO: 38989 - DNA, 80 bp, synthetic construct
  source 1..80: mol_type = other DNA
aatttaagtgatattagattgatattgagctcgttaatatatgactggtttgatataagatacatgagagagacgccaat

SEQ ID NO: 38990 - DNA, 80 bp, synthetic construct
  source 1..80: mol_type = other DNA
gacaacatcaaccacgaatgaattacgtaaattaaatagaaagaatgaactgattgatgaatatgatctggagctatcag

SEQ ID NO: 38991 - DNA, 80 bp, synthetic construct
  source 1..80: mol_type = other DNA
acgttgaataaatagtcatacatggtcacaatttagccaacacaagaccatctgcactggagtagcgcctaggcagcata

SEQ ID NO: 38992 - DNA, 80 bp, synthetic construct
  source 1..80: mol_type = other DNA
taaccgatgttttctagatgaagagccacacttactgaggatgagaacatttaaaaacgatataaataaagaagatgttg

SEQ ID NO: 38993 - DNA, 80 bp, synthetic construct
  source 1..80: mol_type = other DNA
atctgataaacaactatgatagactgctattggatgatagaaactttagtaggatggcacatttaccaccaatattgcaa

SEQ ID NO: 38994 - DNA, 80 bp, synthetic construct
  source 1..80: mol_type = other DNA
agataatttaatggaagataggcacagtccaacttcattaatgcaagtaactcgtattcataattgtaaatggtgtcaga

SEQ ID NO: 38995 - DNA, 80 bp, synthetic construct
  source 1..80: mol_type = other DNA
ttaccagctgctataaaatatgggaggattttagaattaaaaagatatataataatgtgctagattttattagagcatta

SEQ ID NO: 38996 - DNA, 80 bp, synthetic construct
  source 1..80: mol_type = other DNA
tctaaatcaaatgggatggcaggacattgttcttcgcaggaagagatttataaatatgtatctaaattgtttttaatata

SEQ ID NO: 38997 - DNA, 80 bp, synthetic construct
  source 1..80: mol_type = other DNA
tgataaggagcaatggactggatccatagatagactgtttaaatgtttagaacctgttgacataaatgaagtagaatatg

SEQ ID NO: 38998 - DNA, 80 bp, synthetic construct
  source 1..80: mol_type = other DNA
atggctgggctactaagtacttttgacacattcagctccaggaggagtgagagcatcaataagtctggcggaggagcaat

SEQ ID NO: 38999 - DNA, 80 bp, synthetic construct
  source 1..80: mol_type = other DNA
atagtagacacgaaaaattgtattatcacttttgatagagtattgagagatacaatctttgagtggactaggataaaaga

SEQ ID NO: 39000 - DNA, 80 bp, synthetic construct
  source 1..80: mol_type = other DNA
aacaaattcaagaggaaatagattcatctagagatcttcataaacggttttcagaataccagaaagaacagaactcactc

SEQ ID NO: 39001 - DNA, 80 bp, synthetic construct
  source 1..80: mol_type = other DNA
aagtaagaaaaacttagggttaaagacaatccagccaacccacaaggtaacgacatctgactatacaaacgatggctgaa

SEQ ID NO: 39002 - DNA, 80 bp, synthetic construct
  source 1..80: mol_type = other DNA
tagacttgcatgacgaaatagagcagattggatcggagaaaactcaaaatgtgacggtaattcctggcccttttgcacag

SEQ ID NO: 39003 - DNA, 80 bp, synthetic construct
  source 1..80: mol_type = other DNA
caacgcatgatggcaactcgagattctttccaatcattcaatgtgacagaaccacatattaccagcaatcgactggaatg

SEQ ID NO: 39004 - DNA, 80 bp, synthetic construct
  source 1..80: mol_type = other DNA
taccagcaatcgactggaatggattgatccagacagtagtattaaagaccatatcaacatggttttgaatagagatgttt

SEQ ID NO: 39005 - DNA, 80 bp, synthetic construct
  source 1..80: mol_type = other DNA
cagcgcatgatggcaacccgagactcttttcaatcatttaatgtaacagagccacacattactagtaaccgacttgagtg

SEQ ID NO: 39006 - DNA, 80 bp, synthetic construct
  source 1..80: mol_type = other DNA
tcatttatagacagcttctcactaattcatattcagtagatttacatgatgaaatagagcaaattggatcagaaaaaact

SEQ ID NO: 39007 - DNA, 80 bp, synthetic construct
  source 1..80: mol_type = other DNA
atttatacggattaccagctgctaatccaaataagggaaaggaacattacgaaatatcaggaaggttttcacctatttct

SEQ ID NO: 39008 - DNA, 80 bp, synthetic construct
  source 1..80: mol_type = other DNA
atgggccaagtccgacgaagagtccggagatgggagaggagcggaacccccaaggaggcaaagccgagagagcggagact

SEQ ID NO: 39009 - DNA, 80 bp, synthetic construct
  source 1..80: mol_type = other DNA
ggaatgaggaaaacaggcaggatggtagagaagagcgagcctcccgatccgaggatcccctgaacttattggatctggag

SEQ ID NO: 39010 - DNA, 80 bp, synthetic construct
  source 1..80: mol_type = other DNA
tgcgagaggagcaagacaagaaagcaacggggctagcgagtggatgttccgccccccgttggctccccgaggggaccgtc

SEQ ID NO: 39011 - DNA, 80 bp, synthetic construct
  source 1..80: mol_type = other DNA
cctcggtaatggcgaatgggacccaagacctccaagattcccagagagaatcgggaggtgactgggcattccctttgcca

SEQ ID NO: 39012 - DNA, 80 bp, synthetic construct
  source 1..80: mol_type = other DNA
ctctgaggaaagaactcccaagaaggacaagaggcgctcaagatccgggaacgaatccccaaaacgccggtgaagctctc

SEQ ID NO: 39013 - DNA, 80 bp, synthetic construct
  source 1..80: mol_type = other DNA
cacaactgcgtcagcttttgttgtggtgacagtcattgtggggtcaatttggctgatcgggactattatactcttagtgt

SEQ ID NO: 39014 - DNA, 80 bp, synthetic construct
  source 1..80: mol_type = other DNA
ttgacgaggagctatccttaatacccaggaaggggttcattggagaaattcgctgccctaatgaagcgtctgcccttgct

SEQ ID NO: 39015 - DNA, 80 bp, synthetic construct
  source 1..80: mol_type = other DNA
gcaagtagcagttgtgtcatggctgaggacctgataaagtacaagcccatgacagatagcattgactgcacttcctctct

SEQ ID NO: 39016 - DNA, 80 bp, synthetic construct
  source 1..80: mol_type = other DNA
agtggatccattcttattgttcaacatggggatgctgccacagacacgaaatgggaagaccttcactaagtccaaggatg

SEQ ID NO: 39017 - DNA, 80 bp, synthetic construct
  source 1..80: mol_type = other DNA
gccaaacaatccaggccatggccaactcagtggtggaagccagtctctctctgacttttgataatctggagatagaattt

SEQ ID NO: 39018 - DNA, 80 bp, synthetic construct
  source 1..80: mol_type = other DNA
tctctgacttttgataatctggagatagaatttgttgtgaaccagccagactgcacggcaaccttctttgaatataagat

SEQ ID NO: 39019 - DNA, 80 bp, synthetic construct
  source 1..80: mol_type = other DNA
atagcaaagagagctctagcagagagacacaatgaactcaacagaaggataggatggcaagctgatgaagaaggagggag

SEQ ID NO: 39020 - DNA, 80 bp, synthetic construct
  source 1..80: mol_type = other DNA
agttgacatggctctcccagttcagaatgctagaagagccccaagaatcatccccggaggaggcctggtgaggtatagca

SEQ ID NO: 39021 - DNA, 80 bp, synthetic construct
  source 1..80: mol_type = other DNA
cttatctctctctaattttgatgctctctcctggagcctttggttgctctgagactgttcttgcaagttcaaagataaag

SEQ ID NO: 39022 - DNA, 80 bp, synthetic construct
  source 1..80: mol_type = other DNA
aaatgctattcagagtcaggaaaggacaagtgtgtactgagtgggtctgttttgctaagagcaggcccgataggatccag

SEQ ID NO: 39023 - DNA, 80 bp, synthetic construct
  source 1..80: mol_type = other DNA
ctcctgtgtattaatccaaggcctctcagagaaccagaaggagtttatatccataagaacggcttctagtgaattggtct

SEQ ID NO: 39024 - DNA, 80 bp, synthetic construct
  source 1..80: mol_type = other DNA
gcagagaaggacaaggattctggacaaccctgtacaaaccaaaatgcatgagctctcggagatgccatttggtaggagaa

SEQ ID NO: 39025 - DNA, 80 bp, synthetic construct
  source 1..80: mol_type = other DNA
tgccacgggaatacatgtcaggcgtggaatgagactaggctctcatctgaattctctgggctcgagaacaacaaagtgat

SEQ ID NO: 39026 - DNA, 80 bp, synthetic construct
  source 1..80: mol_type = other DNA
gcaggaaaacaaatgctttgaacaatgtggtggcattggatgtggttgtttcaacatcaacccctcctgtctcatggttc

SEQ ID NO: 39027 - DNA, 80 bp, synthetic construct
  source 1..80: mol_type = other DNA
tgaaacacctcggaaaagccccgagcaagcttagagcccctgccaaatgggtgactctcttgctgaagtgggtggtcaga

SEQ ID NO: 39028 - DNA, 80 bp, synthetic construct
  source 1..80: mol_type = other DNA
acacagagctgtccacagtgaagcctgaagcagtgagagtgttttcatgctctgattgggtccatagggtggagttacaa

SEQ ID NO: 39029 - DNA, 80 bp, synthetic construct
  source 1..80: mol_type = other DNA
gtgaaagtcccagactcagaggtgcagactatatctcttggggcactgtcaacagtgtcaacaacatggggtagtattgg

SEQ ID NO: 39030 - DNA, 80 bp, synthetic construct
  source 1..80: mol_type = other DNA
gctaggcctggatgctgagggaataacaggctccaactcatacagcttcatgaggtctagctcaggggaatttgcacttc

SEQ ID NO: 39031 - DNA, 80 bp, synthetic construct
  source 1..80: mol_type = other DNA
cactttgacactaccttgaaaatgtcgtccgtgctcaaagcatttgagcgattcactatagaacaggaacttcaagacag

SEQ ID NO: 39032 - DNA, 80 bp, synthetic construct
  source 1..80: mol_type = other DNA
aatacaacacaaaaccttagctgctatctcaattgtgctccgaccgctcgaaagatggagccctcgaaattcttcacaat

SEQ ID NO: 39033 - DNA, 80 bp, synthetic construct
  source 1..80: mol_type = other DNA
aattcatatacagttgatttatcagatgaaattacatcaattggatcagaaaagactcaaagtacaactataaatccggg

SEQ ID NO: 39034 - DNA, 80 bp, synthetic construct
  source 1..80: mol_type = other DNA
ctctaaattcgctccgatttaggtttagtctgactgtcgaagaaccatcattttcaatacttcgaacgagagtttctaat

SEQ ID NO: 39035 - DNA, 80 bp, synthetic construct
  source 1..80: mol_type = other DNA
ttatatggacttccagcagctaatccaaataatggtaatgattattacgaaatagctggtagattttcattaatatcatt

SEQ ID NO: 39036 - DNA, 80 bp, synthetic construct
  source 1..80: mol_type = other DNA
aacttcaagaacagttatacataagagagcacaagttaatgaagatatcataatttcgaaagcctcgctatggaaagaaa

SEQ ID NO: 39037 - DNA, 80 bp, synthetic construct
  source 1..80: mol_type = other DNA
tgcagtataatagagatattataatcagatttaaatttaataacagtgttataaaattaggcggtttaggttataaatgg

SEQ ID NO: 39038 - DNA, 80 bp, synthetic construct
  source 1..80: mol_type = other DNA
tctgaagtttcattcaaagcagcaaattatcagtacacctacttacgtgacggtgagcaagtaactgcgcatactacttg

SEQ ID NO: 39039 - DNA, 80 bp, synthetic construct
  source 1..80: mol_type = other DNA
ttcagttaatggtgttaataattttaattataatggtggttctttacctacggactttaatatatctagatatgaagtga

SEQ ID NO: 39040 - DNA, 80 bp, synthetic construct
  source 1..80: mol_type = other DNA
atgattattacgaaatagctggtagattttcattaatatcattagttccaactaatgatgattatcaaactccaattatg

SEQ ID NO: 39041 - DNA, 80 bp, synthetic construct
  source 1..80: mol_type = other DNA
ttatgatcaggaaactatgttgcagaacggcagaaacaattcgacaattgaagaccttgtccacacgtttgggtatccat

SEQ ID NO: 39042 - DNA, 80 bp, synthetic construct
  source 1..80: mol_type = other DNA
atattcgagtgactcataaggagttgaatgacaggctgccggaaatctatcgattgtgtatatcaatcatgaaaaaaact

SEQ ID NO: 39043 - DNA, 80 bp, synthetic construct
  source 1..80: mol_type = other DNA
acaaagtaggagctgatacatgtgcattggtccatgtggatttggagggtgtgcccggctcaatgaacagcatgttggag

SEQ ID NO: 39044 - DNA, 80 bp, synthetic construct
  source 1..80: mol_type = other DNA
aactcagggtcacaatacaacacaaaaccctagctgctatctcaattgtgatccgaccgctcgaaagatggagccctcga

SEQ ID NO: 39045 - DNA, 80 bp, synthetic construct
  source 1..80: mol_type = other DNA
ggcttgttgccacgagttagagccagaacaatcattttcttggcatccttctcccagtcagccccaccatactgctttaa

SEQ ID NO: 39046 - DNA, 80 bp, synthetic construct
  source 1..80: mol_type = other DNA
ctgagagagagatcaatgttgagttacgggaatgtgctagatctcaacaatcttgatattgaggagccaacaggacagac

SEQ ID NO: 39047 - DNA, 80 bp, synthetic construct
  source 1..80: mol_type = other DNA
aaactctaaatgaacatattaactacatcatagtaatcaatagaaactaattattaagaataaataaggtaataagtaat

SEQ ID NO: 39048 - DNA, 80 bp, synthetic construct
  source 1..80: mol_type = other DNA
aagtaagtaattaatacaagattaacatataggataagtttaaccataggaattaagtaaatgatataactttattaatg

SEQ ID NO: 39049 - DNA, 80 bp, synthetic construct
  source 1..80: mol_type = other DNA
attacaatatactgtagtaattaggttaagtaagttgactaattaagttaattagttaagttagttaacctgattgaaaa

SEQ ID NO: 39050 - DNA, 80 bp, synthetic construct
  source 1..80: mol_type = other DNA
gggcaccatgtaagtttctacctgatctttcaacccaaagtttgcatgcaagcccaccaacaaatgcagattatattgcc

SEQ ID NO: 39051 - DNA, 80 bp, synthetic construct
  source 1..80: mol_type = other DNA
gcaagggatgctggctgtacccttgttgatcatctcgattctccatcttcaatctgggtctttgcaggtgcacctgatcg

SEQ ID NO: 39052 - DNA, 80 bp, synthetic construct
  source 1..80: mol_type = other DNA
ttgtccacctacatgcctcttcgttgcaggaatggctgaactaggggcctttttttcaatcctgcaagacatgaggaaca

SEQ ID NO: 39053 - DNA, 80 bp, synthetic construct
  source 1..80: mol_type = other DNA
atactccgacccgaataatcacgaggtatacataatagctacactagcagttgatcccaccacgtcctcctttacaactg

SEQ ID NO: 39054 - DNA, 80 bp, synthetic construct
  source 1..80: mol_type = other DNA
catatttgattggagatgatgatgttgttttagtttctaaaattatacctacaatcactccgacattgtgtctaaaatac

SEQ ID NO: 39055 - DNA, 80 bp, synthetic construct
  source 1..80: mol_type = other DNA
agaaaagatatatgaatctattaaggatattttaaatgtatgtgaagaaaacgaatggaacatgctagtaacggaaatat

SEQ ID NO: 39056 - DNA, 80 bp, synthetic construct
  source 1..80: mol_type = other DNA
tcaaccaattagatccaataaagttaaaggaggatagctatgttttgttgaattatgaaataaattggaatgttatgaat

SEQ ID NO: 39057 - DNA, 80 bp, synthetic construct
  source 1..80: mol_type = other DNA
gtattaattaatagtattggtaaagtaccaaaaatactaactttgagtgactttatttcgattttacgtataataatata

SEQ ID NO: 39058 - DNA, 80 bp, synthetic construct
  source 1..80: mol_type = other DNA
aattatatgaaaaagataggactgcagaatatgattcaggtatatccgacgttgaataatttcagagaaattatgttcgc

SEQ ID NO: 39059 - DNA, 80 bp, synthetic construct
  source 1..80: mol_type = other DNA
gagatatatactatatatttggttactatgacgatatgcataagattaatcagactcccttctcattcacaaatttaatt

SEQ ID NO: 39060 - DNA, 80 bp, synthetic construct
  source 1..80: mol_type = other DNA
tgcacttagatatttttcaaaatcaagattcattactgaaagaaggaaatgtattgaaatttcacatttttcagataata

SEQ ID NO: 39061 - DNA, 80 bp, synthetic construct
  source 1..80: mol_type = other DNA
gcatgtaatcttattaaaaatataagtaattatttcaatatactcaaatcgtcacatactgagttttataatgtatctcc

SEQ ID NO: 39062 - DNA, 80 bp, synthetic construct
  source 1..80: mol_type = other DNA
tagatgtagagtattcacacaatataaattaaaaatagcatctaaattaattaaaccaaattatgtagcatcaaatcata

SEQ ID NO: 39063 - DNA, 80 bp, synthetic construct
  source 1..80: mol_type = other DNA
attccttggctactgaagtacacaattgcaaatggtgttcaattaataataattctattgtatggactgatttcagaatt

SEQ ID NO: 39064 - DNA, 80 bp, synthetic construct
  source 1..80: mol_type = other DNA
aaaaatgtttataacgatatatttaattttattagggctttagtgaaatcaaatctttacgtgggacattgttcttcaga

SEQ ID NO: 39065 - DNA, 80 bp, synthetic construct
  source 1..80: mol_type = other DNA
gggaactctataatttcaaaaatgttgagcctatttgatacatttaatgcacgtaggcaagaaaacataacaaaatcagc

SEQ ID NO: 39066 - DNA, 80 bp, synthetic construct
  source 1..80: mol_type = other DNA
ttcaacatgcagtcctctcgcaaagcaccaaaccctcgatctagcaatgacgaggaaatggagatagacaccaaaaggtc

SEQ ID NO: 39067 - DNA, 80 bp, synthetic construct
  source 1..80: mol_type = other DNA
tgccagcggacgactgcttttcgaggcataggcctggctctgctttgtttggcttgatctcttttcgcgctttttgtgtt

SEQ ID NO: 39068 - DNA, 80 bp, synthetic construct
  source 1..80: mol_type = other DNA
aaccctcaaagatgcaagaaaagggatacgattattgggctttaaaacgaagtcttcgacatggaggttctgtattcatt

SEQ ID NO: 39069 - DNA, 80 bp, synthetic construct
  source 1..80: mol_type = other DNA
taactgtatgaatgatgtagtgagaggatgtgacccgttgacgttggactggtatacttccttcactttggatgtgacca

SEQ ID NO: 39070 - DNA, 80 bp, synthetic construct
  source 1..80: mol_type = other DNA
tgcaacaatatgtaactggaagaacatatttggacatggaaatgtttttacttggacaagctgtagctaaagatgctgac

SEQ ID NO: 39071 - DNA, 80 bp, synthetic construct
  source 1..80: mol_type = other DNA
agtgttataagaattacatacttgattggagatgatgatgttgttttagtttctaaaattatacctacaatcactccgaa

SEQ ID NO: 39072 - DNA, 80 bp, synthetic construct
  source 1..80: mol_type = other DNA
acagtaagcccggaagtggtgttttgcgatttcgaggccgggctcgattctcacctttcattgtcaataggggacacttt

SEQ ID NO: 39073 - DNA, 80 bp, synthetic construct
  source 1..80: mol_type = other DNA
cttgattggagatgatgacgttgttttagtttctaaaattatacctacaatcactccgaattggtctagaatactttctc

SEQ ID NO: 39074 - DNA, 80 bp, synthetic construct
  source 1..80: mol_type = other DNA
atggaaaacaaaatcgaggtgaacagcaaagatgagatgaacaagtggtttgaggagttcaagaaaggaaatggacttat

SEQ ID NO: 39075 - DNA, 80 bp, synthetic construct
  source 1..80: mol_type = other DNA
tttatctgtacaagttatattggaaagatgtaagtgtaatatcacttaaaacttctaatcctgcatcaacagaattatat

SEQ ID NO: 39076 - DNA, 80 bp, synthetic construct
  source 1..80: mol_type = other DNA
aagatgtaagtataatatcacttaaaacctctaatcctgcatcaacagaattatatctgatctcgaaagacgcatattgt

SEQ ID NO: 39077 - DNA, 80 bp, synthetic construct
  source 1..80: mol_type = other DNA
atttagaatctgcttgcaactcagtcaatagagagttgatggaaagcgatgctaaaaactatcaaatcatggattcttgg

SEQ ID NO: 39078 - DNA, 80 bp, synthetic construct
  source 1..80: mol_type = other DNA
ggaaatacactagagaatgatgtacaagtcaaatcagagatattaagttcatacaatgagtcgaatgcaacaagactaat

SEQ ID NO: 39079 - DNA, 80 bp, synthetic construct
  source 1..80: mol_type = other DNA
ctgtgtctgacatactctatcctgagtgtcaccttaactctcctatcgttaaaggtaaaatagcacaattacacacaatt

SEQ ID NO: 39080 - DNA, 80 bp, synthetic construct
  source 1..80: mol_type = other DNA
atactactgattggtgaatgtatttgcactaggggttgggttgggtgggccatttatccgttatataatctcaggttggt

SEQ ID NO: 39081 - DNA, 80 bp, synthetic construct
  source 1..80: mol_type = other DNA
gcatcaacagaattatacctaatctcgaaagacgcatattgtactataatggaacctagtgaagttgttttatcaaaact

SEQ ID NO: 39082 - DNA, 80 bp, synthetic construct
  source 1..80: mol_type = other DNA
ttccaagagcgaccggtaacacaacaagcaccgaacacaatgctaatctcaatattgttaattatcacaactatgatcat

SEQ ID NO: 39083 - DNA, 80 bp, synthetic construct
  source 1..80: mol_type = other DNA
acggaattatatctgatctcgaaagacgcatattgtactataatggaacctagtgaagttgttttatcaaaacttaaaag

SEQ ID NO: 39084 - DNA, 80 bp, synthetic construct
  source 1..80: mol_type = other DNA
taggattaaagacattgactagaaggtcaagaaaagggaactctacaatttcaaaaatgttgagcctatttgatacattt

SEQ ID NO: 39085 - DNA, 80 bp, synthetic construct
  source 1..80: mol_type = other DNA
aaaatcaaacaatggaattaacaatcttcatcctgatccagatatacccattaagctagagcaaataagggataatcaaa

SEQ ID NO: 39086 - DNA, 80 bp, synthetic construct
  source 1..80: mol_type = other DNA
aacttaggacaaaagaagtcaacaccaataaccatcatcagtcatacctgtctgaacaaaaaagaagggacaaaaaaagt

SEQ ID NO: 39087 - DNA, 80 bp, synthetic construct
  source 1..80: mol_type = other DNA
ttcaaaaaaagaccagcaacacaacaagcaccgaacacaatgctaatttcaatattgtcaattatcacaaccatgatcat

SEQ ID NO: 39088 - DNA, 80 bp, synthetic construct
  source 1..80: mol_type = other DNA
agggataatcaaaaacttaggacaaaagaagtcaacaccaacaaccgtcagcagtcatacctgtcggaacaataaagaaa

SEQ ID NO: 39089 - DNA, 80 bp, synthetic construct
  source 1..80: mol_type = other DNA
taaagacattgactagaaggtcaagaaaagggggctctacaatttcaaaaatgttgagcctatttgatacatttaatgca

SEQ ID NO: 39090 - DNA, 80 bp, synthetic construct
  source 1..80: mol_type = other DNA
gcttgttattattataagagaattaacaaattgaatcatgcagtcttgaagttaggagttaatgatacatggagaccatc

SEQ ID NO: 39091 - DNA, 80 bp, synthetic construct
  source 1..80: mol_type = other DNA
aagacagttatgtacagaagtgaagactgttaattatgatttcggcatatctgacgttgaataatgaaatagagatcaca

SEQ ID NO: 39092 - DNA, 80 bp, synthetic construct
  source 1..80: mol_type = other DNA
tttgttaagttttgttaagtccttagagtcatgttaagtctttagagttttgttaagtatagttgattgtatgggttatt

SEQ ID NO: 39093 - DNA, 80 bp, synthetic construct
  source 1..80: mol_type = other DNA
catgttaagtctaatatatggggttgtttagtgttaagtcattgtttattagttgtttaatgttaagtttatatatgatt

SEQ ID NO: 39094 - DNA, 80 bp, synthetic construct
  source 1..80: mol_type = other DNA
tattaattaaagtaagatttatacatttaatacttcattatcatttctaatcagggtctttgaagatttctcaggtctat

SEQ ID NO: 39095 - DNA, 80 bp, synthetic construct
  source 1..80: mol_type = other DNA
tttgttaagtccttagagtcatgttaagtctttagagttttgttaagtcttgttaagtatagttgattgtatgggttatt

SEQ ID NO: 39096 - DNA, 80 bp, synthetic construct
  source 1..80: mol_type = other DNA
attgctaatcttagattatcctatatattcagggatttattaattgtttactaattcaaatatacgggtttgacaattat

SEQ ID NO: 39097 - DNA, 80 bp, synthetic construct
  source 1..80: mol_type = other DNA
tcatcattattgtcatcctccttggatatgcaggcctcatgctactcaccaatgttcttaaggcaattggggtttggtgg

SEQ ID NO: 39098 - DNA, 80 bp, synthetic construct
  source 1..80: mol_type = other DNA
ttacagttgataaattaagacagttatgcgcaggagtgaagactgttgattatgattccggtatatctgacgttgaataa

SEQ ID NO: 39099 - DNA, 80 bp, synthetic construct
  source 1..80: mol_type = other DNA
atggctacttttaaagatgcttgttatcattacaaaagaattaataaattgaataatacagtcttaaaattaggagttaa

SEQ ID NO: 39100 - DNA, 80 bp, synthetic construct
  source 1..80: mol_type = other DNA
ttacaattgataaattaagacgattatatacaggattaaagactgttgaatatgattctggtatatctgatattgaatag

SEQ ID NO: 39101 - DNA, 80 bp, synthetic construct
  source 1..80: mol_type = other DNA
tcacagttaataaattgaaacaattatatgaaaaggatagaactgcagaatatgattcaggtatatccgatgttgaataa

SEQ ID NO: 39102 - DNA, 80 bp, synthetic construct
  source 1..80: mol_type = other DNA
atattttaaacgtatgtaaagaaaatgaatggagcacgttggtaacggaaatatttaatcaattagatccaataaagtta

SEQ ID NO: 39103 - DNA, 80 bp, synthetic construct
  source 1..80: mol_type = other DNA
ttacagtcgataaactaagacggttgtgtatagaaccaaaaactgtcgactatgattctggcatatctgatgttgaataa

SEQ ID NO: 39104 - DNA, 80 bp, synthetic construct
  source 1..80: mol_type = other DNA
cgaaagacgcatattgtactataatggaacctagtgaagttgttttatcaaaacttaaaagattgtcactcttggaagaa

SEQ ID NO: 39105 - DNA, 80 bp, synthetic construct
  source 1..80: mol_type = other DNA
atgcttgctatcaatataaaaaattaaacaaattaaataatgcagttttaaagttaggagctaatgatgtttggagacct

SEQ ID NO: 39106 - DNA, 80 bp, synthetic construct
  source 1..80: mol_type = other DNA
aagcaattatatgaaaaggatagaactgcagaatatgattcaggtatatccgatgttgactaatttcagagaaattatgt

SEQ ID NO: 39107 - DNA, 80 bp, synthetic construct
  source 1..80: mol_type = other DNA
atatcacgtttgtgaatggtgtagtcaatatagcagatgctttcttgataatgatccgcatttactgagaatgcgaactt

SEQ ID NO: 39108 - DNA, 80 bp, synthetic construct
  source 1..80: mol_type = other DNA
ttagaaatgaaatcacaaagagtgacttagaaaacttaattaatatgtatggtacattatttcctataaatcaaaaaata

SEQ ID NO: 39109 - DNA, 80 bp, synthetic construct
  source 1..80: mol_type = other DNA
gttaataagtttgcaaacacaattaaacaacataaatgtagaaatgagtatttgatacaatggtataatcattttttaat

SEQ ID NO: 39110 - DNA, 80 bp, synthetic construct
  source 1..80: mol_type = other DNA
tctactctaacaaaacgtaaaggatggtgcttagattgttgtcaacacacagatttgacttactgccaaggatgcttaat

SEQ ID NO: 39111 - DNA, 80 bp, synthetic construct
  source 1..80: mol_type = other DNA
ttataaggatattaccattagattgtaacagagataaaagagaaatattgagtatggaaaacctaagtattactgaatta

SEQ ID NO: 39112 - DNA, 80 bp, synthetic construct
  source 1..80: mol_type = other DNA
gtaagtactaatttagctggacattggattcttattatacaacttatgaaagattctaagggtatttttgaaaaggattg

SEQ ID NO: 39113 - DNA, 80 bp, synthetic construct
  source 1..80: mol_type = other DNA
accagaaaccctagaaaatatactaaccaatccggttaaaggtaatggaaaaaagacactgagtgactattgtataggta

SEQ ID NO: 39114 - DNA, 80 bp, synthetic construct
  source 1..80: mol_type = other DNA
gaaagccctataacatcaaattcaaccattataaatccaataaatgagatagatgatgctgtagggaacaagcccaatta

SEQ ID NO: 39115 - DNA, 80 bp, synthetic construct
  source 1..80: mol_type = other DNA
gcgtctctatgtaaaaggtgaaccaataataaatttctatgatccattagtgttcccctctgatgaatttgatgcatcaa

SEQ ID NO: 39116 - DNA, 80 bp, synthetic construct
  source 1..80: mol_type = other DNA
aatgaagagccaaactcacccaaagtaagagtgtacaatactgtcatatcatatattgaaagcaacaggaagaacaataa

SEQ ID NO: 39117 - DNA, 80 bp, synthetic construct
  source 1..80: mol_type = other DNA
tatttgatacatttaatgcacgtaggcaagaaaacataacaaaatcagctggtggagctatcatccctggacagaaaaat

SEQ ID NO: 39118 - DNA, 80 bp, synthetic construct
  source 1..80: mol_type = other DNA
aagaaaataatctattaaaatggatcattttatcaaagaagaggaataatgaatggttacatcatgaaatcaaagaaggg

SEQ ID NO: 39119 - DNA, 80 bp, synthetic construct
  source 1..80: mol_type = other DNA
gcggatccatggagaacaaaatcgaggtgagtaacaaagatgagatgaacaagtggtttgaagagttcaagaaaggaaat

SEQ ID NO: 39120 - DNA, 80 bp, synthetic construct
  source 1..80: mol_type = other DNA
tttattaagttttgttaagtccttagagtcatgttaagtctttagagttttgttaagtcttgttaagtatagttgattgt

SEQ ID NO: 39121 - DNA, 80 bp, synthetic construct
  source 1..80: mol_type = other DNA
atgggttattcatgttaagtctaatatatggggttgtttagtgttaagtcattgtttattagttgtttaatgttaagttt

SEQ ID NO: 39122 - DNA, 80 bp, synthetic construct
  source 1..80: mol_type = other DNA
atatatgatttattaattaaagtaagatttatacatttaatacttcattatcatttctaatcagggtctttgaagatttc

SEQ ID NO: 39123 - DNA, 80 bp, synthetic construct
  source 1..80: mol_type = other DNA
tcaggtctatccatatattagaggattgttctattaactattcaaactggaactaacactgtgactctgtaaagtccaga

SEQ ID NO: 39124 - DNA, 80 bp, synthetic construct
  source 1..80: mol_type = other DNA
atctaagtgaattgttaaacagcttgacaaccaatgaacttaaaaaactgattaaaatcacaggtagtttgttatacaac

SEQ ID NO: 39125 - DNA, 80 bp, synthetic construct
  source 1..80: mol_type = other DNA
ccacaggaaatccagaacacacaagtcaagaggaaaccctccactcaaccacctctgaaggcaatctaagcccatcacaa

SEQ ID NO: 39126 - DNA, 80 bp, synthetic construct
  source 1..80: mol_type = other DNA
ttaatgaccaatgacagactagaagctatggcaagactcaggaatgaagaaagtgaaaagatggcaaaagacacatcaga

SEQ ID NO: 39127 - DNA, 80 bp, synthetic construct
  source 1..80: mol_type = other DNA
tccacacaacatccgagcacccatcacaatctccatcctcatccaacacgataaaatggtagtcattaaaaagcgtattg

SEQ ID NO: 39128 - DNA, 80 bp, synthetic construct
  source 1..80: mol_type = other DNA
acacaaaccttccaaccacattcctcactccacaatcacaatcaccaaccctccgtggttcaaccaaccaaacaaaaatc

SEQ ID NO: 39129 - DNA, 80 bp, synthetic construct
  source 1..80: mol_type = other DNA
tatacattaaaaataaaaataaacacaagttcaatgatgagttttatacttctaatctgttttacattaattataacttc

SEQ ID NO: 39130 - DNA, 80 bp, synthetic construct
  source 1..80: mol_type = other DNA
atggcgacttttaaagacgcttgctatcattacaaaaaactgaataaattaaatagcttagtacttaaactaggagcaaa

SEQ ID NO: 39131 - DNA, 80 bp, synthetic construct
  source 1..80: mol_type = other DNA
tgtgatggattttatcagggcacttgtaaagtcaaacggaaatgttgggcattgttcgtcacaagaatcagtgtataaat

SEQ ID NO: 39132 - DNA, 80 bp, synthetic construct
  source 1..80: mol_type = other DNA
gtataccagatatatttttaatttgtaaaatggaaaaatggaatgaagctgtcgaagtattatttaattatctagaacca

SEQ ID NO: 39133 - DNA, 80 bp, synthetic construct
  source 1..80: mol_type = other DNA
gtggatataaatggaacggagtatgtgctattggactatgaagtgaactgggaagtgagaggattagttatgcagagtat

SEQ ID NO: 39134 - DNA, 80 bp, synthetic construct
  source 1..80: mol_type = other DNA
ggatggaaaagtaccaagaattttgaacatagatgatacaaagaagatattaagtacaataatatttgattggtttgacg

SEQ ID NO: 39135 - DNA, 80 bp, synthetic construct
  source 1..80: mol_type = other DNA
taagatacatgagagaaacgccaatgacgacgtcaacaacgaatcagcttagaacactgaataaaaggaatgagctcata

SEQ ID NO: 39136 - DNA, 80 bp, synthetic construct
  source 1..80: mol_type = other DNA
caacgaatcagcttagaacactgaataaaaggaatgagctcatagatgagtacgacttagaactttcagatgttgaataa

SEQ ID NO: 39137 - DNA, 80 bp, synthetic construct
  source 1..80: mol_type = other DNA
gcagaggatgtgctttgtaccatgtatgtcagtggtgcagtcaatataataggtgtttcttagatgaagaacctcacttg

SEQ ID NO: 39138 - DNA, 80 bp, synthetic construct
  source 1..80: mol_type = other DNA
ttaagaatgcgaacattcaaggatgtaataacgaaagaggatatagaaggattgctgaccatgtatgaaatattgtttcc

SEQ ID NO: 39139 - DNA, 80 bp, synthetic construct
  source 1..80: mol_type = other DNA
aataaatgaaaaattagtgaataaattcataaattctgtgaaacaacgtaaatgcaggaatgagtatctgttagaatggt

SEQ ID NO: 39140 - DNA, 80 bp, synthetic construct
  source 1..80: mol_type = other DNA
ataatcatctactgatgccaataacattacaagcattaactataaaacttgaagatagcacatactatatatttggatac

SEQ ID NO: 39141 - DNA, 80 bp, synthetic construct
  source 1..80: mol_type = other DNA
tatgactgtatggaacatgagaaccagacaccattccagtttattaatttattagaaaagtatgacaaattactattaga

SEQ ID NO: 39142 - DNA, 80 bp, synthetic construct
  source 1..80: mol_type = other DNA
tgatagaaatttcaatagaatgttacatttaccaacaatattgcagcaagaatatgcgttaagatatttttcaaaatcaa

SEQ ID NO: 39143 - DNA, 80 bp, synthetic construct
  source 1..80: mol_type = other DNA
gatttttaagtaaaggaaagaaaagattgaataggaacgatttttcagataatcttgtggaagacagacatagtccaaca

SEQ ID NO: 39144 - DNA, 80 bp, synthetic construct
  source 1..80: mol_type = other DNA
tcattaatacaggtggtacgtaactgtattagtacacatccaaatgattatgaatggaataaggcatgtacgtttgtggt

SEQ ID NO: 39145 - DNA, 80 bp, synthetic construct
  source 1..80: mol_type = other DNA
tgatgaatggagaccagcaccagtgacaaaatacgaagggtggtgtttagactgctgtcaatatacaaatttaacatatt

SEQ ID NO: 39146 - DNA, 80 bp, synthetic construct
  source 1..80: mol_type = other DNA
tgatgctagaaattatattaacattatgaactcatcgtataccgaacattatagtgtttcacaaagatgtaagctgttta

SEQ ID NO: 39147 - DNA, 80 bp, synthetic construct
  source 1..80: mol_type = other DNA
ctaaatataaatttgggattatatcaaaattggtaaagccaaattacattttttctagtcatgaatcatgtgcattaaat

SEQ ID NO: 39148 - DNA, 80 bp, synthetic construct
  source 1..80: mol_type = other DNA
gtacataattgtagatggtgtcagataaacagccattacaaagtgtgggaggattttagactgaagaagatatataataa

SEQ ID NO: 39149 - DNA, 80 bp, synthetic construct
  source 1..80: mol_type = other DNA
aagctttggccttagcttaatgtctgtagtagaacaatttactaatgtatgtcctaacagaattattctcatacccaagc

SEQ ID NO: 39150 - DNA, 80 bp, synthetic construct
  source 1..80: mol_type = other DNA
gcactgcttgtaagacaaaactttatgttaaacagaatacttaagtctatggataaaagcatagatactttgtcagaaat

SEQ ID NO: 39151 - DNA, 80 bp, synthetic construct
  source 1..80: mol_type = other DNA
tgaatcaatatggttgtatagtttatcataaggaactcaaaagaattactgtgacaacttataatcaattcttgacatgg

SEQ ID NO: 39152 - DNA, 80 bp, synthetic construct
  source 1..80: mol_type = other DNA
attactacaaaagattaaataaattgaatcatgcagtcctaaaattaggagttaatgatgcatggagaccttcacctcca

SEQ ID NO: 39153 - DNA, 80 bp, synthetic construct
  source 1..80: mol_type = other DNA
acttatttaactgtctagatccagtagaattgaacaatactcattatattttactaaatcatgaagtaagttgggatgtt

SEQ ID NO: 39154 - DNA, 80 bp, synthetic construct
  source 1..80: mol_type = other DNA
gccaatatattaattcagcatattggaaagattccgcagatattaactttaaatgacgttatgacagccttacattctat

SEQ ID NO: 39155 - DNA, 80 bp, synthetic construct
  source 1..80: mol_type = other DNA
aatttacgactggtttgatattaggtacatgagaaatacaccactcaccacagtcacagtcgataaattgaggcgactgc

SEQ ID NO: 39156 - DNA, 80 bp, synthetic construct
  source 1..80: mol_type = other DNA
atgcaagacgaaagatcgttgactctgattcaggtctgtccgatgttgagtaaaagaagaagaaggtcacattggccacc

SEQ ID NO: 39157 - DNA, 80 bp, synthetic construct
  source 1..80: mol_type = other DNA
gttgactctgattcaggtctgtccgatgttgagtaaaagaagaagaaggtcacattggccaccacaagactccctgcact

SEQ ID NO: 39158 - DNA, 80 bp, synthetic construct
  source 1..80: mol_type = other DNA
ttagttgatatgtatgataagctactacttgatgacgtaaatttcaatagaatgtcatttttaccagcagtgctgcagca

SEQ ID NO: 39159 - DNA, 80 bp, synthetic construct
  source 1..80: mol_type = other DNA
agaatatgctcttcgatatttttcaacatcaaggtttattagtgaagggaagagacgtattagtgatttccacttttcaa

SEQ ID NO: 39160 - DNA, 80 bp, synthetic construct
  source 1..80: mol_type = other DNA
ccaacacattggagaacttacataatccaaaccttaagatgcaaattactcggaattgcagtactatgtctgtcagatgg

SEQ ID NO: 39161 - DNA, 80 bp, synthetic construct
  source 1..80: mol_type = other DNA
ttctcccagatgtagaatgtttacccaatataagctaaaagcagtagctaaaataactaagccaaattacattacatcaa

SEQ ID NO: 39162 - DNA, 80 bp, synthetic construct
  source 1..80: mol_type = other DNA
agactgcggagtatttatgataatatactaagttttattagagctctagcaaaatcaaatactagcattgggcactgttc

SEQ ID NO: 39163 - DNA, 80 bp, synthetic construct
  source 1..80: mol_type = other DNA
agcaacaacaagcagttgttcaacatgcagtcctctcgcaaagcaccaaaccctcgatctagcaatgacgaggaaatgga

SEQ ID NO: 39164 - DNA, 80 bp, synthetic construct
  source 1..80: mol_type = other DNA
ctttgggaaattctgctcatcctcagacctcaaagtccttggctcacagaagatccaataccacttctggtctaaaccac

SEQ ID NO: 39165 - DNA, 80 bp, synthetic construct
  source 1..80: mol_type = other DNA
aaagaggtgcaccaaggaatctagggggtgcaagaagaggccagatttctacaagacccagcttccgtggtgtgaggaca

SEQ ID NO: 39166 - DNA, 80 bp, synthetic construct
  source 1..80: mol_type = other DNA
acctacaatcagtattcaagcctggagcagctggaaaaggcatgtggcactggtaccagtgagagcttggtggatgctct

SEQ ID NO: 39167 - DNA, 80 bp, synthetic construct
  source 1..80: mol_type = other DNA
gaatgctgaattcgaggagtactctcgtctgacgcaggaaggcacagggcacttcttcgagaagggtggtgaaaatgaat

SEQ ID NO: 39168 - DNA, 80 bp, synthetic construct
  source 1..80: mol_type = other DNA
tcaagggctctgtggttgccagcggacgactgcttttcgaggcataggcctggctctgctttgtttggcttgatctcttt

SEQ ID NO: 39169 - DNA, 80 bp, synthetic construct
  source 1..80: mol_type = other DNA
ggcataggcctggctctgctttgtttggcttgatctcttttcgcgctttttgtgtttgaaaaaactgctttgatttctct

SEQ ID NO: 39170 - DNA, 80 bp, synthetic construct
  source 1..80: mol_type = other DNA
tgtcgctggctaacaaagcgaaagtggatatgactgtccattacaatgccagcgtcataggctctattgtgatggctgcg

SEQ ID NO: 39171 - DNA, 80 bp, synthetic construct
  source 1..80: mol_type = other DNA
tgtactgatgggaccttaagggatggaagcaaatactcatttttctttaagacccaggacaacgaatgggaaatgaaaga

SEQ ID NO: 39172 - DNA, 80 bp, synthetic construct
  source 1..80: mol_type = other DNA
ggttgtgattgattgcagctcggtgcaggaatgggctaagacaaccatcaatgatgctacaagaaaggactggtatccgt

SEQ ID NO: 39173 - DNA, 80 bp, synthetic construct
  source 1..80: mol_type = other DNA
tcctctcatccttgcaactctgtgtaaagagtgaagacgccatcctgtggcaaagaaatgtagtgaccaaaaacttgggc

SEQ ID NO: 39174 - DNA, 80 bp, synthetic construct
  source 1..80: mol_type = other DNA
gtgtctcctgtgtgtgagccttacgccgttggatacaacataaaagacaaacttaaaaagagccgtcccttgtcaattgg

SEQ ID NO: 39175 - DNA, 80 bp, synthetic construct
  source 1..80: mol_type = other DNA
accactcaaccatctagaccactggctagggctatacactgagcgctctgtcgggaaagggaaaaaactttctcagagag

SEQ ID NO: 39176 - DNA, 80 bp, synthetic construct
  source 1..80: mol_type = other DNA
cagcagctgggatccgtgagcgtcttgaaaagaatctcatgcgccagacaataggccagtcccaaaaagctatgctaaga

SEQ ID NO: 39177 - DNA, 80 bp, synthetic construct
  source 1..80: mol_type = other DNA
caaatcttcgatgggaaaacctcctacatcagaacattggcacacagctactgctcaataaagccgcacatcgagaatca

SEQ ID NO: 39178 - DNA, 80 bp, synthetic construct
  source 1..80: mol_type = other DNA
gatagacaccaaaaggtccaaaatcgaagtcgaccctctcgcaaacaagcgaaagtatgaggaatttaaggcacaaatgg

SEQ ID NO: 39179 - DNA, 80 bp, synthetic construct
  source 1..80: mol_type = other DNA
gtttgtactgccttactctgtgatcgctgtcactgacaactttgacggggcaaatatgtctgacgagtgggtattcaaga

SEQ ID NO: 39180 - DNA, 80 bp, synthetic construct
  source 1..80: mol_type = other DNA
agatctcagaggcaagcgagaagatactcctcactgggcccagccaagaatggaagccatttatggcacaaatactcatc

SEQ ID NO: 39181 - DNA, 80 bp, synthetic construct
  source 1..80: mol_type = other DNA
cattgcaccttccgcagtatgcatgaagacttgggagtcctctctgcaatgtttggtatggagttccagccgagaaaagc

SEQ ID NO: 39182 - DNA, 80 bp, synthetic construct
  source 1..80: mol_type = other DNA
aacttttagaaatgaaatcacaaagagtgatttagaaaacttaattaatatgtatgaaacattatttcctataaatcaaa

SEQ ID NO: 39183 - DNA, 80 bp, synthetic construct
  source 1..80: mol_type = other DNA
gaccttctactctaacaaaatgtaaaggatggtgcttagattgttgtcaacacacggacttgacttactgccaaggatgt

SEQ ID NO: 39184 - DNA, 80 bp, synthetic construct
  source 1..80: mol_type = other DNA
acaattatatacaggattaaagactgttgaatatgattctggcatatctgatattgaatagtaaagaaagatcacgtttg

SEQ ID NO: 39185 - DNA, 80 bp, synthetic construct
  source 1..80: mol_type = other DNA
ttctactagatgtagaatattcacccaacataaactcaaaatgacatctaaattaatcaaaccaaactatataacctcga

SEQ ID NO: 39186 - DNA, 80 bp, synthetic construct
  source 1..80: mol_type = other DNA
atcataaaacattagctactgaggtacgtaattgcaagtggtgttcagttaataacaattatactgtatggaatgatttt

SEQ ID NO: 39187 - DNA, 80 bp, synthetic construct
  source 1..80: mol_type = other DNA
atgttaagtctttagagttttattaagtcttcagagttttgttaagttttgttaggttttgttaagtgtagttaattgta

SEQ ID NO: 39188 - DNA, 80 bp, synthetic construct
  source 1..80: mol_type = other DNA
tgggttgttagtgttaagtctaatatagggggttgtttagtattaagtcattgttataagttgtttagtgttaagtttgt

SEQ ID NO: 39189 - DNA, 80 bp, synthetic construct
  source 1..80: mol_type = other DNA
atatgatttactaattaaaataagatttatatataaatatgtttaatgtttcattatcatctctaatcagtttatcaggt

SEQ ID NO: 39190 - DNA, 80 bp, synthetic construct
  source 1..80: mol_type = other DNA
ttttcaaaaaaattctcaggtctatccgtatattagaggattgttctattaaccattcaaactggaactaacactgtgac

SEQ ID NO: 39191 - DNA, 80 bp, synthetic construct
  source 1..80: mol_type = other DNA
ttccgttaatagtacatgacactaatgcttgctttgctactaattgatttcttcactacaacaatctacctcattgtccc

SEQ ID NO: 39192 - DNA, 80 bp, synthetic construct
  source 1..80: mol_type = other DNA
taatcagtgttactatgatattatgtatgtattcatttattctctatattagtgttaagttttgttaaatccttatagtc

SEQ ID NO: 39193 - DNA, 80 bp, synthetic construct
  source 1..80: mol_type = other DNA
ctcttactccttttgtgaaaatgtaccgaacttggacagatttgtataccaaatggccagtgcaaccgatgatgcacaaa

SEQ ID NO: 39194 - DNA, 80 bp, synthetic construct
  source 1..80: mol_type = other DNA
gctcttcgagattcagaagacaggctttgacataaaggacatggacattgttgcttctgagcacctgctgcatcagtctt

SEQ ID NO: 39195 - DNA, 80 bp, synthetic construct
  source 1..80: mol_type = other DNA
tggttgggaagcagtcaccctttcagaatgcctacaatgttaagggtaacgccaccagcgccaacatcatctagctactc

SEQ ID NO: 39196 - DNA, 80 bp, synthetic construct
  source 1..80: mol_type = other DNA
aagagttctacactccacccctccaactctggatcagtgctttcagctgcaatcagtaatcatgcttgcttcaaacactg

SEQ ID NO: 39197 - DNA, 80 bp, synthetic construct
  source 1..80: mol_type = other DNA
agctgcaatcagtaatcatgcttgcttcaaacactgctttactaaatttttattctttcttcatttttacacataaaggg

SEQ ID NO: 39198 - DNA, 80 bp, synthetic construct
  source 1..80: mol_type = other DNA
tctccagctatcagcaggctgccctcaagtggagaaaggacataggtttccgtatcaatgcgaacacaacggcattgagc

SEQ ID NO: 39199 - DNA, 80 bp, synthetic construct
  source 1..80: mol_type = other DNA
aaggttcctggagatatcttggtgcctgtcaaagagatgctgtcagacatgataaggaggagaaacatcatcctcaacag

SEQ ID NO: 39200 - DNA, 80 bp, synthetic construct
  source 1..80: mol_type = other DNA
agaagactgtggaggcactcaaggattaccttgataaacatagagatgaagtcgacaaggcaagtgctgacaacatggtg

SEQ ID NO: 39201 - DNA, 80 bp, synthetic construct
  source 1..80: mol_type = other DNA
aagccctgctcagcactcccatgaagtggggaaagaagctctatgagctcttcgcagatgactctttccagcagaacagg

SEQ ID NO: 39202 - DNA, 80 bp, synthetic construct
  source 1..80: mol_type = other DNA
gaacctattaaggatattttaaacgtatgtaaagaaaatgaatggaacacgttagtaatggaaatatttaatcaattaga

SEQ ID NO: 39203 - DNA, 80 bp, synthetic construct
  source 1..80: mol_type = other DNA
tccaataaagttaaatgaggatagctatgttttgttgaattatgaaataaattggaatgttatgaatgtattaattaata

SEQ ID NO: 39204 - DNA, 80 bp, synthetic construct
  source 1..80: mol_type = other DNA
aattgaaacaattatatgaaaaggatagaactgcagaatatgattcaggtatatccgatgttgaataatttcagataaat

SEQ ID NO: 39205 - DNA, 80 bp, synthetic construct
  source 1..80: mol_type = other DNA
ttaatacaatggtataatcattttttaatgccaattacactacagtctttatcaatagaattagatggagatatatatta

SEQ ID NO: 39206 - DNA, 80 bp, synthetic construct
  source 1..80: mol_type = other DNA
tatatttggttactatgacgatatgcataaaattaatcagactcccttctcattcacgaatttaattagtaaatatgatg

SEQ ID NO: 39207 - DNA, 80 bp, synthetic construct
  source 1..80: mol_type = other DNA
ttcacacaatataaattaaaaatagcatctaaattgattaaaccaaattatgtagcatcaaatcataattccttggctac

SEQ ID NO: 39208 - DNA, 80 bp, synthetic construct
  source 1..80: mol_type = other DNA
tggccacatcgggacacacaacccaacagcaatctctctactcaaccatccccgaaagcacacccaactccgcacaaaca

SEQ ID NO: 39209 - DNA, 80 bp, synthetic construct
  source 1..80: mol_type = other DNA
tacaatcatttatacatgatagagtccacatatccttacttgagtgaattattaaatagtttaacaaccaatgagctcaa

SEQ ID NO: 39210 - DNA, 80 bp, synthetic construct
  source 1..80: mol_type = other DNA
acaaccacatcaaaacacacaacccaacagcaatctctctactcaaccatccccgaaaacacacccaactccacacaaac

SEQ ID NO: 39211 - DNA, 80 bp, synthetic construct
  source 1..80: mol_type = other DNA
tgaatgagatacatttgatgaaacctcctatatttacaggagatgttgatatcatcaagttgaagcaagtgatacaaaaa

SEQ ID NO: 39212 - DNA, 80 bp, synthetic construct
  source 1..80: mol_type = other DNA
ttgcagaacggcagaaacaattcaacaattgaagaccttgtccacacatttgggtatccatcatgtttaggagctcttat

SEQ ID NO: 39213 - DNA, 80 bp, synthetic construct
  source 1..80: mol_type = other DNA
ttgatatcgattaagacacaaatacaataaagatatatctgaacccttatcttcaagcctaaggatagacaaaaagtaag

SEQ ID NO: 39214 - DNA, 80 bp, synthetic construct
  source 1..80: mol_type = other DNA
ggggaaatggtcaaactcagggtctaagaggctgatggcacttcaagagaaatatggactggttgagagggctgaaacca

SEQ ID NO: 39215 - DNA, 80 bp, synthetic construct
  source 1..80: mol_type = other DNA
ttgttaagtctttagagtcatgttaagtctttagcgttttgttaagtctttagagttttattaagtcttgttaagtatag

SEQ ID NO: 39216 - DNA, 80 bp, synthetic construct
  source 1..80: mol_type = other DNA
taaattgtatgggttattcatgttaagtctaatatatgggttgtttagtgttaagtcattgtttattagttgtttaatgt

SEQ ID NO: 39217 - DNA, 80 bp, synthetic construct
  source 1..80: mol_type = other DNA
ttgatacttcattatcatctctaatcagggttctcgaaaatttctcaggtctatccatatattagaggattgttctatta

SEQ ID NO: 39218 - DNA, 80 bp, synthetic construct
  source 1..80: mol_type = other DNA
taatcagtgttattgtagtattatgtatgtactcatttattctttatattagtgttaagttgtattaaatcctgttaagt

SEQ ID NO: 39219 - DNA, 80 bp, synthetic construct
  source 1..80: mol_type = other DNA
tcataaatgataaggctatatcacctcctaaaaatttaatatggactagtttccctagaaattatatgccgtcacacata

SEQ ID NO: 39220 - DNA, 80 bp, synthetic construct
  source 1..80: mol_type = other DNA
tagtttgacacaagaattagaatatagaggtgaaagtctattatgcagtttaatatttagaaatgtatggttatataatc

SEQ ID NO: 39221 - DNA, 80 bp, synthetic construct
  source 1..80: mol_type = other DNA
atcccaacttgctatatcgaagtttctatagaagaactcctgatttcctcacagaggctatagttcactctgtgttcata

SEQ ID NO: 39222 - DNA, 80 bp, synthetic construct
  source 1..80: mol_type = other DNA
accataaaaatactcaaagatgcgggatatcatgttaaggcaaatggagtggatgtaacaacacatcgacaagacatcaa

SEQ ID NO: 39223 - DNA, 80 bp, synthetic construct
  source 1..80: mol_type = other DNA
atcatattaatagattcaattttgtatttagttctacaggttgtaaaattagtatagagtatattttaaaagatcttaaa

SEQ ID NO: 39224 - DNA, 80 bp, synthetic construct
  source 1..80: mol_type = other DNA
aatgaagttttcagcaataaacttataaatcataagcatatgaacatcttaaagtggttcaatcatgttttaaatttcag

SEQ ID NO: 39225 - DNA, 80 bp, synthetic construct
  source 1..80: mol_type = other DNA
tgattgatgcaactcaaaattttctacaacatctaggtattgctgatgatatatacacaatatatatattagtgtcataa

SEQ ID NO: 39226 - DNA, 80 bp, synthetic construct
  source 1..80: mol_type = other DNA
aggcttaagatgtggattcaataatgttatcttgacacaattattcctttatggagattgtatactaaaactattccaca

SEQ ID NO: 39227 - DNA, 80 bp, synthetic construct
  source 1..80: mol_type = other DNA
attaggtaagagggtgcagggggctagatttaagcctttaattaagtaatttgtttgtagttttcattatcgtaaggtgg

SEQ ID NO: 39228 - DNA, 80 bp, synthetic construct
  source 1..80: mol_type = other DNA
agacgcttgttatcattataaaaagttgaataagttaaatagtttagtgctcaaactaggagcaaatgatgaatggaggc

SEQ ID NO: 39229 - DNA, 80 bp, synthetic construct
  source 1..80: mol_type = other DNA
tcagggcacttgtgaaatcgaatggaaatgttggacattgttcatcacaggaatcagtgtataagtatataccagattta

SEQ ID NO: 39230 - DNA, 80 bp, synthetic construct
  source 1..80: mol_type = other DNA
tttttaatttgtaaaacggaaaaatggaatgaagctgttgaaatgttatttaattatctagaaccaatggatataaatgg

SEQ ID NO: 39231 - DNA, 80 bp, synthetic construct
  source 1..80: mol_type = other DNA
aacggagtatgtattattagactatgaagtgaactgggaggtgaggggactagtcatgcaaaacatggatgggaaagtac

SEQ ID NO: 39232 - DNA, 80 bp, synthetic construct
  source 1..80: mol_type = other DNA
caagaattctgaatatgaatgatacaaagaagatactgagtgcaatgatatttgactggtttgacacaagatatatgaga

SEQ ID NO: 39233 - DNA, 80 bp, synthetic construct
  source 1..80: mol_type = other DNA
gaaacgccaatgacgacgtcaacaacaaatcaacttcgaacactgaacaaaaggaatgagctcatagatgagtacgattt

SEQ ID NO: 39234 - DNA, 80 bp, synthetic construct
  source 1..80: mol_type = other DNA
aggaatgagctcatagatgagtacgatttagaactttcagatgttgagtaaatatggtcacaaccacgccagcacaagac

SEQ ID NO: 39235 - DNA, 80 bp, synthetic construct
  source 1..80: mol_type = other DNA
ctataccatgtatgtcagtggtgcagtcagtataacaggtgtttcttagatgaagaacctcatttgctgagaatgcggac

SEQ ID NO: 39236 - DNA, 80 bp, synthetic construct
  source 1..80: mol_type = other DNA
atttaaagatgtagtaacaaaagaagatatagaaggactgttaaccatgtatgaaacattgtttccaataaatgagaagt

SEQ ID NO: 39237 - DNA, 80 bp, synthetic construct
  source 1..80: mol_type = other DNA
tagtgaataaatttataaattctgtgaagcagcgtaagtgtaggaatgaatatttgttagaatggtataaccacttacta

SEQ ID NO: 39238 - DNA, 80 bp, synthetic construct
  source 1..80: mol_type = other DNA
atgccaataacattgcaagcattgactataaatcttgaggataatgtatattatatatttggatactatgattgcatgga

SEQ ID NO: 39239 - DNA, 80 bp, synthetic construct
  source 1..80: mol_type = other DNA
acatgaaaaccaaacaccattccaatttattaatctactagaaaaatatgacaaattgctactagatgatagaaatttca

SEQ ID NO: 39240 - DNA, 80 bp, synthetic construct
  source 1..80: mol_type = other DNA
atagaatgtcacacttgccagtaatattgcaacaagagtatgcgttgagatatttttcaaaatcaagatttttaagtaaa

SEQ ID NO: 39241 - DNA, 80 bp, synthetic construct
  source 1..80: mol_type = other DNA
gagaagaaaagattgagcagggatgatttctcagataatcttatggaaggtagacatagtccaacatcattaatgcaagt

SEQ ID NO: 39242 - DNA, 80 bp, synthetic construct
  source 1..80: mol_type = other DNA
ggtgcgtaactgcatcagtatacacatgaatgattgtgaatggaataaagcgtgcacgcttatagttgatgctagaaact

SEQ ID NO: 39243 - DNA, 80 bp, synthetic construct
  source 1..80: mol_type = other DNA
cagcaccagtgacaaaatataaaggatggtgtttagattgttgtcaatatacaaatttgacatattgcagagggtgtgca

SEQ ID NO: 39244 - DNA, 80 bp, synthetic construct
  source 1..80: mol_type = other DNA
atattagtattgtgaactcatcgtatactgagcattacagtgtgtcacaaagatgtaaattgtttactaagtataaattt

SEQ ID NO: 39245 - DNA, 80 bp, synthetic construct
  source 1..80: mol_type = other DNA
gggattgtatcaagattagtgaaaccgaattatattttttctagccataaatcatgcgcattaaacgtacataattgtaa

SEQ ID NO: 39246 - DNA, 80 bp, synthetic construct
  source 1..80: mol_type = other DNA
atggtgtcagatcaataaccattacaaagtgtgggaagattttagacttaggaaaatatataataatataatggaattta

SEQ ID NO: 39247 - DNA, 80 bp, synthetic construct
  source 1..80: mol_type = other DNA
ctgtttgacaatgatgaagtagcattgttaaaaataacatgctatactgacaaattaatacagttaactaatgctttggc

SEQ ID NO: 39248 - DNA, 80 bp, synthetic construct
  source 1..80: mol_type = other DNA
ggaggaacttagcataggaactcttgggttaacatatgagaaggccaaaaaattattcccacaatatttaagtgttaact

SEQ ID NO: 39249 - DNA, 80 bp, synthetic construct
  source 1..80: mol_type = other DNA
acatccgagtacctatcacaatctctatcttcctccaacacaacaaaatgatagtcattaaaaaaaagtgtattgttgca

SEQ ID NO: 39250 - DNA, 80 bp, synthetic construct
  source 1..80: mol_type = other DNA
atgagtgatatctttgaagaggcggctagttttaggagttatcaatctaagttagggagagatgggagagctagtgcagc

SEQ ID NO: 39251 - DNA, 80 bp, synthetic construct
  source 1..80: mol_type = other DNA
aagaagtttggatagtagatttatcgaatcgagaagttaaaatctggtggaagataatcggatacatatctattatctga

SEQ ID NO: 39252 - DNA, 80 bp, synthetic construct
  source 1..80: mol_type = other DNA
aagggctaaatggtagttatacttgacaagagatgttattctaatcttttaatattgattttgatgatctcggagtgtag

SEQ ID NO: 39253 - DNA, 80 bp, synthetic construct
  source 1..80: mol_type = other DNA
gacctacaagcagtggggatctctactacattgggacatagatgccggcagaaaacaagaaagttagattcgaaaatact

SEQ ID NO: 39254 - DNA, 80 bp, synthetic construct
  source 1..80: mol_type = other DNA
gtacataaatggccgacgaattatcaatatccgacatcatttaccctgaatgtcatttggatagtcctatagtctctggt

SEQ ID NO: 39255 - DNA, 80 bp, synthetic construct
  source 1..80: mol_type = other DNA
ctacttttaaagacgcttgctatcaatataaaaaattaaacaaattaaataacgcagttttgaagttaggagctaatgac

SEQ ID NO: 39256 - DNA, 80 bp, synthetic construct
  source 1..80: mol_type = other DNA
ctgcagaatatgattcaggtatatccgatgttgaataatttcagataaattatgttcgccaccatgagactctctgcact

SEQ ID NO: 39257 - DNA, 80 bp, synthetic construct
  source 1..80: mol_type = other DNA
aggatgtttaatatatcacgtttgtgaatggtgtagtcaatatagcagatgctttcttgataatgatccgcatttactaa

SEQ ID NO: 39258 - DNA, 80 bp, synthetic construct
  source 1..80: mol_type = other DNA
gaatgagaacttttagaaatgaaatcacaaagaatgacttagaaaacttaattaatatgtatgatacattatttcctata

SEQ ID NO: 39259 - DNA, 80 bp, synthetic construct
  source 1..80: mol_type = other DNA
aatcaaaaaatagttaataagtttgcaaacacaattaaacaacataaatgtagaaatgagtatttgatacaatggtataa

SEQ ID NO: 39260 - DNA, 80 bp, synthetic construct
  source 1..80: mol_type = other DNA
ttggttagtaaatatgatgtgttactactagatagcataaattttaatagaatggcatttttaccattaacgttacagca

SEQ ID NO: 39261 - DNA, 80 bp, synthetic construct
  source 1..80: mol_type = other DNA
gtttggagaccttctactctaacaaaacgtaaaggatggtgcttagattgttgtcaacacacggacttgacttactgcca

SEQ ID NO: 39262 - DNA, 80 bp, synthetic construct
  source 1..80: mol_type = other DNA
taaacagcttgactaccaatgaacttaaaaaactgattaaaatcacaggtagtttgttatacaacttttataatgaataa

SEQ ID NO: 39263 - DNA, 80 bp, synthetic construct
  source 1..80: mol_type = other DNA
tacaaagatggctcttagcaaagtcaagttgaatgatacattaaataaggatcagctgctgtcatccagcaaatacacta

SEQ ID NO: 39264 - DNA, 80 bp, synthetic construct
  source 1..80: mol_type = other DNA
tccatcacagctctgataaatggtgataatcagtcaattgatataagtaaaccagttagacttatagagggtcagaccca

SEQ ID NO: 39265 - DNA, 80 bp, synthetic construct
  source 1..80: mol_type = other DNA
tgctcaagcagattatttgttagcattaaatagccttaaattgctatataaagagtatgcaggcataggccataagctta

SEQ ID NO: 39266 - DNA, 80 bp, synthetic construct
  source 1..80: mol_type = other DNA
aaattgccctgcaactccgaaatcatgctttatgtaataataagctatatttagatatattgaaagtattaaaacactta

SEQ ID NO: 39267 - DNA, 80 bp, synthetic construct
  source 1..80: mol_type = other DNA
aaaaccttttttaatcttgatagtatcgatacggcgttatcattgtatatgaacttgcctatgctgtttggtggtggtga

SEQ ID NO: 39268 - DNA, 80 bp, synthetic construct
  source 1..80: mol_type = other DNA
tcctaatttgttatatcgaagcttttataggagaactccagacttccttacagaagctatagtacattcagtgtttgtgt

SEQ ID NO: 39269 - DNA, 80 bp, synthetic construct
  source 1..80: mol_type = other DNA
tgagctattatactggtcacgatctacaagataagctccaggatcttccagatgatagactgaacaaattcttgacttgt

SEQ ID NO: 39270 - DNA, 80 bp, synthetic construct
  source 1..80: mol_type = other DNA
gtcatcacatttgataaaaatccaaatgccgagtttgtaacattgatgagggatccacaggctttagggtctgaaaggca

SEQ ID NO: 39271 - DNA, 80 bp, synthetic construct
  source 1..80: mol_type = other DNA
ggaagaactgagtactggaacacttggactgtcatatgaaaaggccaaaaagttgtttccacaatatctaagtgtcaatt

SEQ ID NO: 39272 - DNA, 80 bp, synthetic construct
  source 1..80: mol_type = other DNA
atttacaccggttaacagtcagtagtagaccatgcgaattccctgcctcaataccagcttatagaacaacaaattatcat

SEQ ID NO: 39273 - DNA, 80 bp, synthetic construct
  source 1..80: mol_type = other DNA
atggtaaagcaaaattagaatgtgatatgaacacttcagatcttctttgtgttttggagttaatagacagtagctactgg

SEQ ID NO: 39274 - DNA, 80 bp, synthetic construct
  source 1..80: mol_type = other DNA
aaatctatgtctaaagttttcctagaacaaaaagtcataaaatacatagtcaatcaagacacaagtttgcatagaataaa

SEQ ID NO: 39275 - DNA, 80 bp, synthetic construct
  source 1..80: mol_type = other DNA
aggttgtcacagttttaagttgtggtttttaaaacgccttaataatgctaaatttaccgtatgcccttgggttgttaaca

SEQ ID NO: 39276 - DNA, 80 bp, synthetic construct
  source 1..80: mol_type = other DNA
tagattatcacccaacacacatgaaagctatattatcttacatagatttagttagaatggggttaataaatgtagataaa

SEQ ID NO: 39277 - DNA, 80 bp, synthetic construct
  source 1..80: mol_type = other DNA
ccccagaagctttagaaaatgtatccttaatccctgttaaaagtaataatagaaacaaacctaaattttgtataagtgga

SEQ ID NO: 39278 - DNA, 80 bp, synthetic construct
  source 1..80: mol_type = other DNA
agtactgaatctatgatgacgtcaacattctctaataaaatgcatattaaatcttccactgttaccacaagattcaatta

SEQ ID NO: 39279 - DNA, 80 bp, synthetic construct
  source 1..80: mol_type = other DNA
tagcagacaagacttgtacaatttatttccaattgttgtgatagacaggattatagatcattcaggtaatacagaaaaat

SEQ ID NO: 39280 - DNA, 80 bp, synthetic construct
  source 1..80: mol_type = other DNA
gccaattggagtaaaatcataattgaatggagtaagcatgtaagaaagtgcaaatactgttcttctgtaaatagatgcat

SEQ ID NO: 39281 - DNA, 80 bp, synthetic construct
  source 1..80: mol_type = other DNA
tttaattgcaaaataccatgctcaagatgatattgatttcaaattagataacattactatattaaaaacttatgtgtgcc

SEQ ID NO: 39282 - DNA, 80 bp, synthetic construct
  source 1..80: mol_type = other DNA
cctaggtagcaagttaaaaggatctgaagtttacttagtccttacaataggtcctgcaaatatacttcctgtttttgatg

SEQ ID NO: 39283 - DNA, 80 bp, synthetic construct
  source 1..80: mol_type = other DNA
aataacaggtagtgtactatacaaccttcctaatgaacagtaacttaaaatatcattaacaagtttggtcaaatttagat

SEQ ID NO: 39284 - DNA, 80 bp, synthetic construct
  source 1..80: mol_type = other DNA
cagcaggagatagatcaggtcttacagcagtaattaggagggcaaacaatgtcttaaaaaacgaaataaaacgctacaag

SEQ ID NO: 39285 - DNA, 80 bp, synthetic construct
  source 1..80: mol_type = other DNA
tgtttgaaaaataccctcatcttatagatgtttttgtgcactttggcatagcacaatcatccacaagagggggcagtaga

SEQ ID NO: 39286 - DNA, 80 bp, synthetic construct
  source 1..80: mol_type = other DNA
aagatggggagttttagccaaatctgtaaaaaatatcatgctaggacatgctagtgtccaagcagaaatggagcaagttg

SEQ ID NO: 39287 - DNA, 80 bp, synthetic construct
  source 1..80: mol_type = other DNA
attggaagccataaagcatcaactcaaccccaaagaagatgacgtagagctttaagttaacaaaaaatacggggcaaata

SEQ ID NO: 39288 - DNA, 80 bp, synthetic construct
  source 1..80: mol_type = other DNA
agtcaacatggagaagtttgcacctgaatttcatggagaagatgcaaataacaaagctaccaaattcctagaatcaataa

SEQ ID NO: 39289 - DNA, 80 bp, synthetic construct
  source 1..80: mol_type = other DNA
gagagcccgataacatctggcaccaacattatcaatccaacaagtgaagccgacagtaccccagaaactaaagccaacta

SEQ ID NO: 39290 - DNA, 80 bp, synthetic construct
  source 1..80: mol_type = other DNA
cccaagaaaacccctagtaagcttcaaagaagatctcaccccaagtgataaccctttctctaagttgtacaaagaaacca

SEQ ID NO: 39291 - DNA, 80 bp, synthetic construct
  source 1..80: mol_type = other DNA
tgatttttgatcagtgatcaactcactcagcaatcaacaacatcaataaaacagacaccaatccattgaatcaattgcca

SEQ ID NO: 39292 - DNA, 80 bp, synthetic construct
  source 1..80: mol_type = other DNA
gactgaaaaaacaaacatccatcagcagaaccaccaaccaatcaatcaaccaattgatcaatcagcaccctgacaaaatt

SEQ ID NO: 39293 - DNA, 80 bp, synthetic construct
  source 1..80: mol_type = other DNA
attggaagcatacagctacacgtttttcaatcaaaccactagaggattaaactcaattatcaacattgaatgacaggttc

SEQ ID NO: 39294 - DNA, 80 bp, synthetic construct
  source 1..80: mol_type = other DNA
acttgggcttgatctccattcatgaattatgtttagtctaattcaatagacatgtgtttattaccattttagttaatata

SEQ ID NO: 39295 - DNA, 80 bp, synthetic construct
  source 1..80: mol_type = other DNA
acatatatcctcaactgcacactatatctaaacatcataaacatctacactacacacttcatcacacaaaccaatcccac

SEQ ID NO: 39296 - DNA, 80 bp, synthetic construct
  source 1..80: mol_type = other DNA
tcaaaatctaaaatcacttccagccattgtctgccagacctagagtgcgaataggtaaataaaacaagaatatggggtaa

SEQ ID NO: 39297 - DNA, 80 bp, synthetic construct
  source 1..80: mol_type = other DNA
atagatatcagttagagttcaaccaatctcaacaaccatctataccgccaatccaatacatacattgcaaatcttaaaat

SEQ ID NO: 39298 - DNA, 80 bp, synthetic construct
  source 1..80: mol_type = other DNA
gggaaacacatccatcacaatagaattcacaagcaaattttggccctattttacactaatacatatgatcttaactctaa

SEQ ID NO: 39299 - DNA, 80 bp, synthetic construct
  source 1..80: mol_type = other DNA
tactaattataatcactattatgattgcaatactaaataagctaagtgaacataaaatattctgcaacaaaactcttgaa

SEQ ID NO: 39300 - DNA, 80 bp, synthetic construct
  source 1..80: mol_type = other DNA
caaggacagatgtatcaaatcgacacatagtgttctcccattatgctgtatcaaatcacaatcctgtgtatataaataaa

SEQ ID NO: 39301 - DNA, 80 bp, synthetic construct
  source 1..80: mol_type = other DNA
caaatccaatcttctcacagagtcatggcatcacaaaaccatgccaaccatcatggtagcatagagtagttattaaaaaa

SEQ ID NO: 39302 - DNA, 80 bp, synthetic construct
  source 1..80: mol_type = other DNA
ttaacataatgatgaattattagtatgggatcaaaaacaacattggggcaaatgcaacaatgtccaaaaacaagaatcaa

SEQ ID NO: 39303 - DNA, 80 bp, synthetic construct
  source 1..80: mol_type = other DNA
cacaaatagcactatcagttttggcaatgataatctcaacctctcttataattgcagccataatattcatcatctctgcc

SEQ ID NO: 39304 - DNA, 80 bp, synthetic construct
  source 1..80: mol_type = other DNA
aaacctcatcaaagggaaatggggcaaataaactcacccaatcaatcaaaccatgagcactacaaacgacaacaccacca

SEQ ID NO: 39305 - DNA, 80 bp, synthetic construct
  source 1..80: mol_type = other DNA
aatcacaaagttacactaacaactgtcacagttcaaacaataaaaaaccacactgagaaaaacataaccacttaccttac

SEQ ID NO: 39306 - DNA, 80 bp, synthetic construct
  source 1..80: mol_type = other DNA
tcaagtctcaccagaaagggtcagcccatccaaacaacccacagccacaccaccaatccacacaaactcagccacaatat

SEQ ID NO: 39307 - DNA, 80 bp, synthetic construct
  source 1..80: mol_type = other DNA
cacccaatacaaaatcagaaacacaccatacaacaacacaaaccaaaggcacaatctctactccaacacagaacaacaag

SEQ ID NO: 39308 - DNA, 80 bp, synthetic construct
  source 1..80: mol_type = other DNA
ccaagcacaaaaccacgtccaaaaaatccaccaaaaaaagatgattaccattttgaagtgttcaactttgttccctgtag

SEQ ID NO: 39309 - DNA, 80 bp, synthetic construct
  source 1..80: mol_type = other DNA
tatatgtggcaacaatcaactctgcaaatccatttgcaaaacaataccaggcaataaaccaaagaaaaaaccaactacaa

SEQ ID NO: 39310 - DNA, 80 bp, synthetic construct
  source 1..80: mol_type = other DNA
aacccacaaacaaaccacctaccaaaaccacaaacaaaagagaccccaaaacactagccaaaacaccgaaaaaagaaacc

SEQ ID NO: 39311 - DNA, 80 bp, synthetic construct
  source 1..80: mol_type = other DNA
accattaacctaacaaaaaaaccaacccccaagactacagaaagagacaccagcaccccacaatccactgtgctcgacat

SEQ ID NO: 39312 - DNA, 80 bp, synthetic construct
  source 1..80: mol_type = other DNA
aaccacatcaaaacacacagaaagggacaccagcacctcacaatccattgcgcgtgacacaaccacatcaaaacacacaa

SEQ ID NO: 39313 - DNA, 80 bp, synthetic construct
  source 1..80: mol_type = other DNA
cccaacagcaatctctctactcaaccatccccgaaaacacacccaactccacacaaacacccacagcatccgagccctcc

SEQ ID NO: 39314 - DNA, 80 bp, synthetic construct
  source 1..80: mol_type = other DNA
acatcaaattctatctaaagactccagtcatatgcttagttatttaaaaactacatcttagcagagaaccgtgatccctc

SEQ ID NO: 39315 - DNA, 80 bp, synthetic construct
  source 1..80: mol_type = other DNA
tgcaaagattgatgatcacagacatgagacccctgtcgatggattcaataataacatctctcaccaaagaaatcatcaca

SEQ ID NO: 39316 - DNA, 80 bp, synthetic construct
  source 1..80: mol_type = other DNA
aagcaagaacgaaattaaatctggggcaaataaccatggagttgctgatccatagatcaagtgcaatcttcctaactctt

SEQ ID NO: 39317 - DNA, 80 bp, synthetic construct
  source 1..80: mol_type = other DNA
gctattaatgcattgtaccttacctcaagtcagaacataactgaggagttttaccaatcaacatgtagtgcagttagcag

SEQ ID NO: 39318 - DNA, 80 bp, synthetic construct
  source 1..80: mol_type = other DNA
aagtaatataaaggaaaccaaatgcaatggaactgacactaaagttaaacttataaaacaagaattagataagtataaga

SEQ ID NO: 39319 - DNA, 80 bp, synthetic construct
  source 1..80: mol_type = other DNA
aaaacacaccagctgtcaacaaccgggccagaagagaagcaccacagtatatgaactacacaatcaataccactaaaaac

SEQ ID NO: 39320 - DNA, 80 bp, synthetic construct
  source 1..80: mol_type = other DNA
ctaaatgtatcaataagcaagaagaggaaacgaagatttctgggcttcttgttaggtgtaggatctgcaatagcaagtgg

SEQ ID NO: 39321 - DNA, 80 bp, synthetic construct
  source 1..80: mol_type = other DNA
gtatagctgtatccaaagttctacaccttgaaggagaagtgaacaagatcaaaaatgctttgcagcttacaaacaaagct

SEQ ID NO: 39322 - DNA, 80 bp, synthetic construct
  source 1..80: mol_type = other DNA
gtagtcagtctatcaaatggggtcagtgttttaaccagcagagtgttagatctcaagaattatataaacaaccaattatt

SEQ ID NO: 39323 - DNA, 80 bp, synthetic construct
  source 1..80: mol_type = other DNA
acctatggtaaatcgacagagttgtcgcatatccaacattgagacagttatagaattccagcagaagaacagcagattgt

SEQ ID NO: 39324 - DNA, 80 bp, synthetic construct
  source 1..80: mol_type = other DNA
tggaaatcaccagagaatttagtgtcaatgcaggtgtaacgacacctttaagcacttacatgttaacaaacagtgagtta

SEQ ID NO: 39325 - DNA, 80 bp, synthetic construct
  source 1..80: mol_type = other DNA
tgtgtcaaacaaaggagtagatactgtatcagtgggcaacactttatattatgtcaacaagctggaaggcaaaaaccttt

SEQ ID NO: 39326 - DNA, 80 bp, synthetic construct
  source 1..80: mol_type = other DNA
ctactacaaatattatgataactgcaattattatagtaatcattgtagtattgttatcattaatagctattggtttactg

SEQ ID NO: 39327 - DNA, 80 bp, synthetic construct
  source 1..80: mol_type = other DNA
ttgtattgcaaagccaaaaacacaccagttacattaagcaaagaccaactaagtggaatcaataatattgcattcagcaa

SEQ ID NO: 39328 - DNA, 80 bp, synthetic construct
  source 1..80: mol_type = other DNA
aatagacaaaaaaccacctgatcatgttccaacaacaatctgctgaccatcaatcccaaatcaacttacaacagatactt

SEQ ID NO: 39329 - DNA, 80 bp, synthetic construct
  source 1..80: mol_type = other DNA
caacatcacagcacaggctgaatcatctcctcgcatcatgctacccacacaactaagctagatccttaattcatagttac

SEQ ID NO: 39330 - DNA, 80 bp, synthetic construct
  source 1..80: mol_type = other DNA
ataaaagcctcaaatatcgcaatcaacactaaatcaacacatcattcacaaaactaacagctggggcaaatatgtcgcga

SEQ ID NO: 39331 - DNA, 80 bp, synthetic construct
  source 1..80: mol_type = other DNA
agaaatccctgcaaatttgagattagaggtcattgcttgaatggtagaagatgccactacagtcataattactttgaatg

SEQ ID NO: 39332 - DNA, 80 bp, synthetic construct
  source 1..80: mol_type = other DNA
tgctgaacttgatagaacagaagaatatgctcttggtatagttggagtgctagagagttacataggatctataaacaaca

SEQ ID NO: 39333 - DNA, 80 bp, synthetic construct
  source 1..80: mol_type = other DNA
taacaaaacaatcagcatgtgttgctatgagtaaacttcttattgagatcaatagtgatgacattaaaaagctgagagat

SEQ ID NO: 39334 - DNA, 80 bp, synthetic construct
  source 1..80: mol_type = other DNA
atatccttgtagtatatcatccatattgatctcaagtgaaagcatgattgctacattcaatcataaagacatattacaat

SEQ ID NO: 39335 - DNA, 80 bp, synthetic construct
  source 1..80: mol_type = other DNA
ttaaccacaaccatttagataaccaccagtgtttattaaatcatatatttgatgaaattcattggacacctaaaaactta

SEQ ID NO: 39336 - DNA, 80 bp, synthetic construct
  source 1..80: mol_type = other DNA
ttagatgccactcaacaatttctccaacatcttaacatccctgaagatatatatacagtatatatattagtgtcataatg

SEQ ID NO: 39337 - DNA, 80 bp, synthetic construct
  source 1..80: mol_type = other DNA
cttgatcataacgattctatatcatccaaccataaaactgtcttaataaagttatgggacaaaatggatcccattattaa

SEQ ID NO: 39338 - DNA, 80 bp, synthetic construct
  source 1..80: mol_type = other DNA
taatatacaaatatgacctcaacccgtaacttccaacaaaaaaaccaactcatccaaaccaagccattctccaaacaaca

SEQ ID NO: 39339 - DNA, 80 bp, synthetic construct
  source 1..80: mol_type = other DNA
taaactaggactaaaggaaaaggacagagttaagcccaacaacaattcaggtgatgaaaactcagtacttacaaccataa

SEQ ID NO: 39340 - DNA, 80 bp, synthetic construct
  source 1..80: mol_type = other DNA
ttaaagatgatatactctcagctgtggaaaacaatcaatcatatacaaattcagataaaaattactcagtaaatcaaaat

SEQ ID NO: 39341 - DNA, 80 bp, synthetic construct
  source 1..80: mol_type = other DNA
atcaatatcaaaacaacactcttaaaaaagttgatgtgttcaatgcaacatcctccatcatggttaatacactggttcaa

SEQ ID NO: 39342 - DNA, 80 bp, synthetic construct
  source 1..80: mol_type = other DNA
atgaaggcttttacataataaaagaagtagaaggatttattatgtctttaattctaaacataacagaagaagatcaattt

SEQ ID NO: 39343 - DNA, 80 bp, synthetic construct
  source 1..80: mol_type = other DNA
atgctcaacagttaagaaggagctaatccattttagtaattaaaaataagggtgaaaccagtaacataaattggggcaaa

SEQ ID NO: 39344 - DNA, 80 bp, synthetic construct
  source 1..80: mol_type = other DNA
gtagcctaagtacgttgagaggtgctttcatttatagaatcataaaagggtttgtaaatacctacaacagatggcccact

SEQ ID NO: 39345 - DNA, 80 bp, synthetic construct
  source 1..80: mol_type = other DNA
ttaaggaatgctattgtcctacctctaagatggttaaactattataaacttaatacttatccatctctacttgaaatcac

SEQ ID NO: 39346 - DNA, 80 bp, synthetic construct
  source 1..80: mol_type = other DNA
agaaaatgacttgattattttatcaggattgcggttctatcgtgagtttcatctgcctaaaaaagtggatcttgaaatga

SEQ ID NO: 39347 - DNA, 80 bp, synthetic construct
  source 1..80: mol_type = other DNA
ctctaacaccaaaggaaatccagaacacacaagtcaaaaggaaaccctccactcaaccacctccgaaggctatctaagcc

SEQ ID NO: 39348 - DNA, 80 bp, synthetic construct
  source 1..80: mol_type = other DNA
caacatatgtttttaccagacaaaataagtttaactcaatatgtggaattattcttaagtaataaaacactcaaatctgg

SEQ ID NO: 39349 - DNA, 80 bp, synthetic construct
  source 1..80: mol_type = other DNA
accaatgtaacattaagtaagaaaaggaaaaggagatttcttggatttttgttaggtgttggatctgcaattgccagtgg

SEQ ID NO: 39350 - DNA, 80 bp, synthetic construct
  source 1..80: mol_type = other DNA
acaatatcgatctagtgaggtaaaaaaccatggttttatactaatagataatcatactcttagtggattccaatttattt

SEQ ID NO: 39351 - DNA, 80 bp, synthetic construct
  source 1..80: mol_type = other DNA
gcttgacaaccaatgaacttaaaaaactgattaaaatcacaggtagtttattatacaacttttataatgaataatgagca

SEQ ID NO: 39352 - DNA, 80 bp, synthetic construct
  source 1..80: mol_type = other DNA
ttactccttttgtgagagtgtccctaaccttgataggtttgtgttccagatggctagtgcaactgacgatgcacaaaagg

SEQ ID NO: 39353 - DNA, 80 bp, synthetic construct
  source 1..80: mol_type = other DNA
ttggaaagcaatctccgttccaggacgcctacaacgtcaaaggcaacgccaccagtgccaacatcatctgaaatttgtac

SEQ ID NO: 39354 - DNA, 80 bp, synthetic construct
  source 1..80: mol_type = other DNA
cattctgcacttgaactcttttcttattcgcttttatctataactgcaatcaataatcttgttcatgtcaatcagttaca

SEQ ID NO: 39355 - DNA, 80 bp, synthetic construct
  source 1..80: mol_type = other DNA
ttcatgtcaatcagttacaaaatccagttttactaactttactttacttgctttgattttaaacacttaaaaggctgtgc

SEQ ID NO: 39356 - DNA, 80 bp, synthetic construct
  source 1..80: mol_type = other DNA
atacatacaattaaattaaacggcatagtttttatacatgttataacaagcagtgaagtgtgccctgataacaatattgt

SEQ ID NO: 39357 - DNA, 80 bp, synthetic construct
  source 1..80: mol_type = other DNA
atcacatcaaactagccatgcattcaccagaagccagcatagatagagtagaaataacagggtttgagaataattcattc

SEQ ID NO: 39358 - DNA, 80 bp, synthetic construct
  source 1..80: mol_type = other DNA
cacttaaatttaactcctttggttagagatgggcagcaattcattgagtatgataaaagttagattacaaaatttgtttg

SEQ ID NO: 39359 - DNA, 80 bp, synthetic construct
  source 1..80: mol_type = other DNA
tagctacacactaacactgcattcaattatagttatttaaaattaaaaattatataattttttaataacttttagtgaac

SEQ ID NO: 39360 - DNA, 80 bp, synthetic construct
  source 1..80: mol_type = other DNA
tgttagccatggcaacattcaaggatgcatgttatcactataagaaattgagtaagttaaacggattagtacttagatta

SEQ ID NO: 39361 - DNA, 80 bp, synthetic construct
  source 1..80: mol_type = other DNA
tataataatatgatgaattttattagagcactggtgaaatcaaatacgaacgttggacattgttcttcacatgaattagt

SEQ ID NO: 39362 - DNA, 80 bp, synthetic construct
  source 1..80: mol_type = other DNA
gtacaaatgcatatcaagtatcttcattgtctggaaagctgaaaaatggaatgattcaattagagcattgtttacatatc

SEQ ID NO: 39363 - DNA, 80 bp, synthetic construct
  source 1..80: mol_type = other DNA
tagagccagtagaaataaatcatgttgagtatgtgctattggatcatgagttaagttgggaaatgagtggcataacaatg

SEQ ID NO: 39364 - DNA, 80 bp, synthetic construct
  source 1..80: mol_type = other DNA
caaattatgaatggaaagataccaagaatcctaagttttgatgatgttaagaagatattgagtgcgataatttatgattg

SEQ ID NO: 39365 - DNA, 80 bp, synthetic construct
  source 1..80: mol_type = other DNA
gtttgacgtaagatatatgagggagacgccaatgattgtgtcaacaacgaatgaattgcgaaaattgaataaagataacg

SEQ ID NO: 39366 - DNA, 80 bp, synthetic construct
  source 1..80: mol_type = other DNA
attgaataaagataacgctcttatggataggtacgattatgagctgtctgatattgaataaagtacattgtaattatgcc

SEQ ID NO: 39367 - DNA, 80 bp, synthetic construct
  source 1..80: mol_type = other DNA
aacatattgtagaggttgtgctttatttcatgtatgtcaatggtgcagtcagtataataggtgtttcctagatgaagaac

SEQ ID NO: 39368 - DNA, 80 bp, synthetic construct
  source 1..80: mol_type = other DNA
cacatctattaagaatgcggactttccgcaatgaaataagtaaggaagatgttgaaggattaataaacatgtataacata

SEQ ID NO: 39369 - DNA, 80 bp, synthetic construct
  source 1..80: mol_type = other DNA
atctttccaataaacgagagggtggtagataaatttattagtaatgtgaagcaacgcaaatgtagaaatgaattattaat

SEQ ID NO: 39370 - DNA, 80 bp, synthetic construct
  source 1..80: mol_type = other DNA
agaatggtataaccatttactattacctataactttgcaagcattatcaatagaattggaaggtgatatatattacatat

SEQ ID NO: 39371 - DNA, 80 bp, synthetic construct
  source 1..80: mol_type = other DNA
ttggatactatgactgcatggagaaagagaatcaaaccccttttcattttgtaaatatgataaatagatacgacagacta

SEQ ID NO: 39372 - DNA, 80 bp, synthetic construct
  source 1..80: mol_type = other DNA
ttattagatgataaaaactttgatagaatgatgtatttaccaatgatattgcagcaggaatacgcacttagatatttttc

SEQ ID NO: 39373 - DNA, 80 bp, synthetic construct
  source 1..80: mol_type = other DNA
aaagtcgagatttataaacaaagttaaaagagagatgaacagacatgatttctcagataacctaatggaagaaagggata

SEQ ID NO: 39374 - DNA, 80 bp, synthetic construct
  source 1..80: mol_type = other DNA
atccaacatcatttatgcaagtaacacgtaactgtgttgatatgcgtatgagcgacaacgattggaatgaaagatgtaaa

SEQ ID NO: 39375 - DNA, 80 bp, synthetic construct
  source 1..80: mol_type = other DNA
ggagcaaatgatgcatggagacctgcaccagtagcaaaatataaagggtggtgtcttgactgctgtcagtacactgattt

SEQ ID NO: 39376 - DNA, 80 bp, synthetic construct
  source 1..80: mol_type = other DNA
ttgattggtaatgtgaagaactatatggaattaatgaaatcagcctatactgagcattatagtatttcacaaagatgcaa

SEQ ID NO: 39377 - DNA, 80 bp, synthetic construct
  source 1..80: mol_type = other DNA
attgttcacagtgtataaactgaacattatatcaaaattagttaaacctaattatatcttttctaatcacggagtatatg

SEQ ID NO: 39378 - DNA, 80 bp, synthetic construct
  source 1..80: mol_type = other DNA
cattagatgtgaataactgcaaatggtgtaaaactgataaccattataagatatggaatgatttcagattaagaaagata

SEQ ID NO: 39379 - DNA, 80 bp, synthetic construct
  source 1..80: mol_type = other DNA
gaagccagcatagatagagtagagataacagggtttgagaataattcattccgagttattccagatgctcgatcaactat

SEQ ID NO: 39380 - DNA, 80 bp, synthetic construct
  source 1..80: mol_type = other DNA
caaccttctttaactctcactcagtccttcctctccaccgtccataccaaaaacaaatatggaaagccttaggtagtgta

SEQ ID NO: 39381 - DNA, 80 bp, synthetic construct
  source 1..80: mol_type = other DNA
ttagtgaaatcaaatctttacgtgggacattgttcttcagaagaaaagatatatgaatttattaaagatattttaaatgt

SEQ ID NO: 39382 - DNA, 80 bp, synthetic construct
  source 1..80: mol_type = other DNA
aatgccatttacactacagtctttatcaatagaattagatggagatatatattatatatttggttactatgacgatatgc

SEQ ID NO: 39383 - DNA, 80 bp, synthetic construct
  source 1..80: mol_type = other DNA
ataaaattaatcagactcccttctcattcacaaatttaattagtaaatatgatgtattactgctagatagtataaatttt

SEQ ID NO: 39384 - DNA, 80 bp, synthetic construct
  source 1..80: mol_type = other DNA
gacagaatggcatttttaccattaacattacagcaagagtatgcacttagatatttttcaaaatcaagattcattactga

SEQ ID NO: 39385 - DNA, 80 bp, synthetic construct
  source 1..80: mol_type = other DNA
aagaaggaaatgtattgaaatttcaaatttttcagataatatattaaatgatttacataatccgaattttacattacaag

SEQ ID NO: 39386 - DNA, 80 bp, synthetic construct
  source 1..80: mol_type = other DNA
tgattagaaattgcagtaatatgtcagttgaatggaataaagcatgtaatcttattaaaaatataaataattatttcaat

SEQ ID NO: 39387 - DNA, 80 bp, synthetic construct
  source 1..80: mol_type = other DNA
atactcaaatcgtcacatactgagtcttataatgtatctcctagatgtagagtattcacacaatataaattaaaaatagc

SEQ ID NO: 39388 - DNA, 80 bp, synthetic construct
  source 1..80: mol_type = other DNA
atctaaattaattaaaccaaattatgtagcatcaaatcataattccttggctactgaagtacacaattgcaaatggtgtt

SEQ ID NO: 39389 - DNA, 80 bp, synthetic construct
  source 1..80: mol_type = other DNA
gcgtcaagagtgcctgcgttaggcttcccatcgtggttcttgagcctaatctggccgagctcagcacctcatatgttggc

SEQ ID NO: 39390 - DNA, 80 bp, synthetic construct
  source 1..80: mol_type = other DNA
tagccaggtttgtcatcctctcagcgcctttcttagacatcttgccacatgctttcactatcttattccctctggtgaga

SEQ ID NO: 39391 - DNA, 80 bp, synthetic construct
  source 1..80: mol_type = other DNA
gagctaaaattactagtgagattaatagattagcagtaacagaagtcttaagtatagctccaaacaaaatattttctaaa

SEQ ID NO: 39392 - DNA, 80 bp, synthetic construct
  source 1..80: mol_type = other DNA
atatacttgaaaaaacatcagcgatagatacaactgatattaatagggctactgatatgatgaggaaaaatataacctta

SEQ ID NO: 39393 - DNA, 80 bp, synthetic construct
  source 1..80: mol_type = other DNA
cttataaggatacttccattagattgtaacaaagacaaaagagagttattaagtctagagaatcttagcataactgaatt

SEQ ID NO: 39394 - DNA, 80 bp, synthetic construct
  source 1..80: mol_type = other DNA
ctatgttttcatagaggttatggtaaagcaaaattagaatgtgatatgaacacttcagatcttctttgtgttttggagtt

SEQ ID NO: 39395 - DNA, 80 bp, synthetic construct
  source 1..80: mol_type = other DNA
attaaggatcccagttgtatagcattcataggtgaaggagctggtaacttattattacgtacggtagtagaacttcatcc

SEQ ID NO: 39396 - DNA, 80 bp, synthetic construct
  source 1..80: mol_type = other DNA
aacatacattggtcttatttacatataaaatttgcagaacctattagtatctttgtttgcgatgctgaattacctgtcac

SEQ ID NO: 39397 - DNA, 80 bp, synthetic construct
  source 1..80: mol_type = other DNA
tgtgcaaaatgctaaattgattctttcaagaactaaaaatctcattatgcctaaaaagattgacaaggaatctatcgatg

SEQ ID NO: 39398 - DNA, 80 bp, synthetic construct
  source 1..80: mol_type = other DNA
tggctcaaatgcctagtaatttcatcataagtgcaaatgtatcattagatgaaagaagcaaattagcatatgatgtaact

SEQ ID NO: 39399 - DNA, 80 bp, synthetic construct
  source 1..80: mol_type = other DNA
acaccttgtgaaatcaaagcatgcagtctaacatgcttaaaagtaaaaagtatgttaactacagtcaaagatctaaccat

SEQ ID NO: 39400 - DNA, 80 bp, synthetic construct
  source 1..80: mol_type = other DNA
agtctaatctttttaatcagaaatggggtgcaattcactgagcatgataaaggttagattacaaaatttatttgacaatg

SEQ ID NO: 39401 - DNA, 80 bp, synthetic construct
  source 1..80: mol_type = other DNA
gacgcttgttattattataaaagaattaataaattaaatcatacagtcttaaaattaggagttaatgatacatggagacc

SEQ ID NO: 39402 - DNA, 80 bp, synthetic construct
  source 1..80: mol_type = other DNA
actgattaaaatcacaggtagtttgttatacaacttttataatgaataatgagcaaaaatcttataacaaaaatagctac

SEQ ID NO: 39403 - DNA, 80 bp, synthetic construct
  source 1..80: mol_type = other DNA
tgttgattatgattccggcatatctgacgttgaatagcgaaatagagatcacatttgccaccataagactccctgcacta

SEQ ID NO: 39404 - DNA, 80 bp, synthetic construct
  source 1..80: mol_type = other DNA
gcatcgaagggtggtgtcaaaaactatggaccatagaagctatatcactattagatctaatatcactcaaagggaaattc

SEQ ID NO: 39405 - DNA, 80 bp, synthetic construct
  source 1..80: mol_type = other DNA
ccaatgaacttaaaaaactgattaaaatcacaggtagtttgttatacaacttttataatgaataatgagcaaaaatctta

SEQ ID NO: 39406 - DNA, 80 bp, synthetic construct
  source 1..80: mol_type = other DNA
acagactactagagattaccagagaatttagtgttaatgcaggtgtaactacacctgtaagcacttatatgttaactaat

SEQ ID NO: 39407 - DNA, 80 bp, synthetic construct
  source 1..80: mol_type = other DNA
cgtataaagaaagtcctaagagtgggaccgtggataaacactatacttgatgactttaaagtgagtctagaatctatagg

SEQ ID NO: 39408 - DNA, 80 bp, synthetic construct
  source 1..80: mol_type = other DNA
taatcacagaagatgctaatcataaattcactgggttaataggtatgttatatgctatgtctagattaggaagagaagac

SEQ ID NO: 39409 - DNA, 80 bp, synthetic construct
  source 1..80: mol_type = other DNA
cggcagagcaaagctggagtgtgatatgaatacttcagatctcctatgtgtattggaattaatagacagtagttattgga

SEQ ID NO: 39410 - DNA, 80 bp, synthetic construct
  source 1..80: mol_type = other DNA
aaaatgttgattcaataatgttaccttcgttaactaataagaagcttgttaaatcgtctacaatgattagaaccaattac

SEQ ID NO: 39411 - DNA, 80 bp, synthetic construct
  source 1..80: mol_type = other DNA
ctactttcaaagatgcttgttattattataagagaattaacaaattgaatcatgcagtcttgaagttaggagttaatgat

SEQ ID NO: 39412 - DNA, 80 bp, synthetic construct
  source 1..80: mol_type = other DNA
tttataatgaataatgagcaaaaatcttataacaaaaatagctacacactaacactgtattcaattatagttatttaaaa

SEQ ID NO: 39413 - DNA, 80 bp, synthetic construct
  source 1..80: mol_type = other DNA
attcactgagcatgataaaggttagattacaaaatttgtttgataatgacgaagtagcattgttaaaaataacatgttat

SEQ ID NO: 39414 - DNA, 80 bp, synthetic construct
  source 1..80: mol_type = other DNA
ttatattatagttattaaaaaatatatatgcaaacttttcaataatttagcatattgattccaaaattatcattttagtc

SEQ ID NO: 39415 - DNA, 80 bp, synthetic construct
  source 1..80: mol_type = other DNA
aaaattatataatttttaataacttttagtggattaatactaaaattatcattttgatctaggaggaataaatttaaatc

SEQ ID NO: 39416 - DNA, 80 bp, synthetic construct
  source 1..80: mol_type = other DNA
gaaggaaggtgggtaagaaaggtgcgggccccccgatccgaggggcccaaccaccaatttggagagcactccggccccaa

SEQ ID NO: 39417 - DNA, 80 bp, synthetic construct
  source 1..80: mol_type = other DNA
cgactagaggcggggctccctagttctcttactcttttctataaagaggagactgtgggagtccccgcccaagttcgagc

SEQ ID NO: 39418 - DNA, 80 bp, synthetic construct
  source 1..80: mol_type = other DNA
ggcttccccttatgtccagcccctccccggtcctggagaagggagactccgggattccctgcatggagggaacgaagccg

SEQ ID NO: 39419 - DNA, 80 bp, synthetic construct
  source 1..80: mol_type = other DNA
aatacaccatccaacggagcacaggagatagtattgatactcctaattatgatgtgcagaaacacatcaacaagttatgt

SEQ ID NO: 39420 - DNA, 80 bp, synthetic construct
  source 1..80: mol_type = other DNA
taatctctttgctaatcataatctccatcatgattgcaatactaaacaaactctgtgaatataacttattccataacaaa

SEQ ID NO: 39421 - DNA, 80 bp, synthetic construct
  source 1..80: mol_type = other DNA
ggactgagtgccagattaactcactatttgtaaaaattagaaatggggcaaatatgtcacgaaggaatccttgcaaattt

SEQ ID NO: 39422 - DNA, 80 bp, synthetic construct
  source 1..80: mol_type = other DNA
aaggcggaagagaaggaggcgggctctccgatccgaggggcccgacgccccgatctggaggaatctccggcccgaagggt

SEQ ID NO: 39423 - DNA, 80 bp, synthetic construct
  source 1..80: mol_type = other DNA
ttttctcgtcttcctcggtcaacctcttaagttcctcttcttcctccctgctgaggctctttccccctgcggagagttgc

SEQ ID NO: 39424 - DNA, 80 bp, synthetic construct
  source 1..80: mol_type = other DNA
ctctatcttctttcttccattgacccactgctcgaggacgtcctcccttccttctcgcttactcctcgacccggaccggc

SEQ ID NO: 39425 - DNA, 80 bp, synthetic construct
  source 1..80: mol_type = other DNA
gctctctcacgcggtggagaaaagaccatagcgatggggggagatgctaggagttagaggagaccgaagcgaggaggaaa

SEQ ID NO: 39426 - DNA, 80 bp, synthetic construct
  source 1..80: mol_type = other DNA
tgagtagcacccagagggaggaatccacacggaggtgagcagacaaatcacctccagaggaccccttcagcgaacagaag

SEQ ID NO: 39427 - DNA, 80 bp, synthetic construct
  source 1..80: mol_type = other DNA
cccccggttcccctcacgtctagcccctccccagttctgctgaaggtggactccggaactccttgcatgctggggacgaa

SEQ ID NO: 39428 - DNA, 80 bp, synthetic construct
  source 1..80: mol_type = other DNA
gccgcccccgggcgctcccctctgtccaccttcgaggaggttcacacctccagtcgacgggccggctgttcttctttccc

SEQ ID NO: 39429 - DNA, 80 bp, synthetic construct
  source 1..80: mol_type = other DNA
cattaaatatacaactagcactatagccagtggtataattatagaaaaatataatgttaatggtttaactcgtggtgaaa

SEQ ID NO: 39430 - DNA, 80 bp, synthetic construct
  source 1..80: mol_type = other DNA
gtgctggacattggattctgattattcaacttatgaaagattcaaaaggtatttttgaaaaagactggggagaggggtat

SEQ ID NO: 39431 - DNA, 80 bp, synthetic construct
  source 1..80: mol_type = other DNA
aaaaatatgcaaacttttcaataatttagcatattgattccaaaattatcattttagtcttaagggattaaataaaagtc

SEQ ID NO: 39432 - DNA, 80 bp, synthetic construct
  source 1..80: mol_type = other DNA
gacgggtggaaaagaaggtgcgggcctcccgatccgaggggcccaaccaccaagtttggagagcactccggcccgaaggt

SEQ ID NO: 39433 - DNA, 80 bp, synthetic construct
  source 1..80: mol_type = other DNA
ggctcatctcgacaaggggcggcagtcctcagatctcttgatcttcttcgaaaaagaggagtctgctggatctgccgccc

SEQ ID NO: 39434 - DNA, 80 bp, synthetic construct
  source 1..80: mol_type = other DNA
gacaaggggcggcagtcctcagatctcttgatcttcttcgaaaaagaggagtctgctggatctgccgcccaagttcgagc

SEQ ID NO: 39435 - DNA, 80 bp, synthetic construct
  source 1..80: mol_type = other DNA
ggcttatcccggggaactcgacttatcgtccccacatagcagagcccggacccccttccaaaaagactgagggaggtggc

SEQ ID NO: 39436 - DNA, 80 bp, synthetic construct
  source 1..80: mol_type = other DNA
ttgagtagcactcagagggagagctccactcggagtagaacagagaaatcacctccagaggaccccttcagcgaacagaa

SEQ ID NO: 39437 - DNA, 80 bp, synthetic construct
  source 1..80: mol_type = other DNA
tggggcaaatacaaaaatggctcttagcaaagtcaagttgaacgatacactcaacaaagatcaacttctgtcatccagca

SEQ ID NO: 39438 - DNA, 80 bp, synthetic construct
  source 1..80: mol_type = other DNA
aagattggggagagggatacataactgatcatatgttcattaatttgaaagttttcttcaatgcttataagacctatctc

SEQ ID NO: 39439 - DNA, 80 bp, synthetic construct
  source 1..80: mol_type = other DNA
taggcagtaagttaaaggggtctgaagtttacttagtccttacaataggtcctgcaaatgtgttcccagtatttaatgta

SEQ ID NO: 39440 - DNA, 80 bp, synthetic construct
  source 1..80: mol_type = other DNA
cagcaggggatagatctggtcttacagccgtgattaggagagctaataatgttctaaaaaatgaaatgaaacgttataaa

SEQ ID NO: 39441 - DNA, 80 bp, synthetic construct
  source 1..80: mol_type = other DNA
tgtttgaaaaatatcctcactttatagatgtttttgttcattttggtatagcacaatcttctaccagaggtggcagtaga

SEQ ID NO: 39442 - DNA, 80 bp, synthetic construct
  source 1..80: mol_type = other DNA
cggtggggagtcttagcaaaatcagttaaaaatattatgctaggacacgctagtgtgcaagcagaaatggaacaagttgt

SEQ ID NO: 39443 - DNA, 80 bp, synthetic construct
  source 1..80: mol_type = other DNA
aaaagtggggcaaataaatcatcatggaaaagtttgctcctgaatttcatggagaagacgcaaacaacagagccactaaa

SEQ ID NO: 39444 - DNA, 80 bp, synthetic construct
  source 1..80: mol_type = other DNA
aaccaaacatccatctgccaatcagccaaccagccaaaaaaacaaccagccaatacaaaattagtcacccggaaaaaatc

SEQ ID NO: 39445 - DNA, 80 bp, synthetic construct
  source 1..80: mol_type = other DNA
gatactatagttacaaaaaaagatggggcaaatatggaaacatacgtgaacaaacttcacgaaggctccacatacacagc

SEQ ID NO: 39446 - DNA, 80 bp, synthetic construct
  source 1..80: mol_type = other DNA
acccacatggggcaaataatcatcggaggaaatccaaccaatcacaatatctgtcaacatagaccagtcaacacgccaaa

SEQ ID NO: 39447 - DNA, 80 bp, synthetic construct
  source 1..80: mol_type = other DNA
ctaatcataatctccatcatgattgcaatactaaacaaactctgtgaatataacgtattccataacaaaacctttgagct

SEQ ID NO: 39448 - DNA, 80 bp, synthetic construct
  source 1..80: mol_type = other DNA
aactaagatattaagactaacaacaacgttggggcaaatgcaaacatgtccaaaaccaaggaccaacgcgccgccaagac

SEQ ID NO: 39449 - DNA, 80 bp, synthetic construct
  source 1..80: mol_type = other DNA
aaacttgacagaagataaaaatggggcaaataaataaactcagctgacccaaccatggacacaacacacaatggtactac

SEQ ID NO: 39450 - DNA, 80 bp, synthetic construct
  source 1..80: mol_type = other DNA
atcaacatgcagtgcagttagcaaaggctatcttagtgctttaagaactggttggtatactagtgttataactatagaat

SEQ ID NO: 39451 - DNA, 80 bp, synthetic construct
  source 1..80: mol_type = other DNA
aagtaatatcaaggaaaataagtgtaatggaacagacgctaaggtaaaattgataaaacaagaattagataaatataaaa

SEQ ID NO: 39452 - DNA, 80 bp, synthetic construct
  source 1..80: mol_type = other DNA
cattgctgtatctaaagtcctgcacctagaaggggaagtgaacaaaatcaaaagtgctctactatccacaaacaaggctg

SEQ ID NO: 39453 - DNA, 80 bp, synthetic construct
  source 1..80: mol_type = other DNA
tgtatctaataagggggtggacactgtatctgtaggtaatacattatattatgtaaataagcaagaaggaaaaagtctct

SEQ ID NO: 39454 - DNA, 80 bp, synthetic construct
  source 1..80: mol_type = other DNA
tgaataaaaatagtacctaatcatgttcttacaatggttcatcatccgaccatagatgacccatctatcattggattttc

SEQ ID NO: 39455 - DNA, 80 bp, synthetic construct
  source 1..80: mol_type = other DNA
ttgaaattcgaggtcattgcttgaatggtaagaggtgtcattttagtcataattattttgaatggccacctcatgcactg

SEQ ID NO: 39456 - DNA, 80 bp, synthetic construct
  source 1..80: mol_type = other DNA
ttaatgtgttcgatgcaacatcctccatcatggttaatacattggtttaatttatacacaaaattaaacaacatattaac

SEQ ID NO: 39457 - DNA, 80 bp, synthetic construct
  source 1..80: mol_type = other DNA
atgaagggttctacataataaaagaggtagagggttttattatgtctctaattttaaacataacagaagaagatcaattc

SEQ ID NO: 39458 - DNA, 80 bp, synthetic construct
  source 1..80: mol_type = other DNA
gtaaaccaaaaaaatggggcaaataagaatttgataggtaccacttaaatttaactcctttggtaagagatgggcagcaa

SEQ ID NO: 39459 - DNA, 80 bp, synthetic construct
  source 1..80: mol_type = other DNA
tatataattttttaataacttttagtgaactaatcctaaaattatcgatttgatctagaaggaataaattaaaaccaaac

SEQ ID NO: 39460 - DNA, 80 bp, synthetic construct
  source 1..80: mol_type = other DNA
atcgaatcgggtattttgtgacacaatgaacagtttaacattaccaagtgaggtaaatctctgcaacattgacatattca

SEQ ID NO: 39461 - DNA, 80 bp, synthetic construct
  source 1..80: mol_type = other DNA
taacaaaaatagctacacactaacattgcattcaattatagttatttaaaattaataattatataatttttaataacttc

SEQ ID NO: 39462 - DNA, 80 bp, synthetic construct
  source 1..80: mol_type = other DNA
atcattaacaagtttggtcaaatttagatgctaacacattattatattatagttattaaaaaatatgcaaacttttcaat

SEQ ID NO: 39463 - DNA, 80 bp, synthetic construct
  source 1..80: mol_type = other DNA
agcaaatgcaattaccgcaatccttgctgcagtcttactctgtttcgcttccagtcaaaacatcactgaagaattttatc

SEQ ID NO: 39464 - DNA, 80 bp, synthetic construct
  source 1..80: mol_type = other DNA
attttcagtcattactcatgacatacaagagtatgacctcgtcagaacaaattgctaccactaatttacttaaaaagata

SEQ ID NO: 39465 - DNA, 80 bp, synthetic construct
  source 1..80: mol_type = other DNA
atgaaaagtcttgtggaagccatggctactttcaaagatgcatgctaccattacaaaagaatgaataaattgaatggttc

SEQ ID NO: 39466 - DNA, 80 bp, synthetic construct
  source 1..80: mol_type = other DNA
aatcaaaaagatatataataatgtgttagattttattagagcattatctaaatcaaatggaatggcaggacattgttctt

SEQ ID NO: 39467 - DNA, 80 bp, synthetic construct
  source 1..80: mol_type = other DNA
cacaggaagagatttataaatatggatctcggttgttcttaatatatgatgaagagcaatgggctgaatccataaataaa

SEQ ID NO: 39468 - DNA, 80 bp, synthetic construct
  source 1..80: mol_type = other DNA
ctatttaaatgtttagagcctgttgacataaatggagtagaatatgtgctgtttgatcatgagattaattgggaagttag

SEQ ID NO: 39469 - DNA, 80 bp, synthetic construct
  source 1..80: mol_type = other DNA
aggtttaattttacagtgtatgaatggaaatattccgagaatattaaatttaagtgatattcgattgatattaagctcgt

SEQ ID NO: 39470 - DNA, 80 bp, synthetic construct
  source 1..80: mol_type = other DNA
taatatatgactggtttgatataagatacatgagagagacaccaatgataacatcaactacgaatgaattgcgtaaatta

SEQ ID NO: 39471 - DNA, 80 bp, synthetic construct
  source 1..80: mol_type = other DNA
gtaaattaaataaaaagaatgagctgattgatgaatatgatctggaactatcagacgttgaataagcagtcatacatggt

SEQ ID NO: 39472 - DNA, 80 bp, synthetic construct
  source 1..80: mol_type = other DNA
aatatacaaatctaacatactgtagaggatgtgctctatatcatgagtgtcaatggtgtaggcaatataatcgatgtttt

SEQ ID NO: 39473 - DNA, 80 bp, synthetic construct
  source 1..80: mol_type = other DNA
ctagatgaagagccacacttactgagtatgagaacatttaaaaacgatgtaataagagaagatgttgaaaatttacttaa

SEQ ID NO: 39474 - DNA, 80 bp, synthetic construct
  source 1..80: mol_type = other DNA
tatgtatgacactctattcccaatacatgcaaaaatagtgaataagtttattaataatgttaagcaacgtaagtgcagga

SEQ ID NO: 39475 - DNA, 80 bp, synthetic construct
  source 1..80: mol_type = other DNA
atgagtatttattggaatggtataatcatctattacttccacttactttgcaagcattagctataaaactagaaaacagc

SEQ ID NO: 39476 - DNA, 80 bp, synthetic construct
  source 1..80: mol_type = other DNA
acatattatatatttggatactatgactgcatggagcaagaaaaccaaacaccattctattttgtaaatctgataaataa

SEQ ID NO: 39477 - DNA, 80 bp, synthetic construct
  source 1..80: mol_type = other DNA
ttatgacaggctgctattggatgatagaaactttaataggatggcacatttaccaccaatattacaacaagaatatgcat

SEQ ID NO: 39478 - DNA, 80 bp, synthetic construct
  source 1..80: mol_type = other DNA
taagatacttttcaaagtcaaggtttataaataaaccgaaaagagagctggaaagaaatgattttgcagataatttaatg

SEQ ID NO: 39479 - DNA, 80 bp, synthetic construct
  source 1..80: mol_type = other DNA
gaagatagacacagtccaacttcattaatgcaagtaactcgtaattgcatcgctgaacatttggatgataataaatggaa

SEQ ID NO: 39480 - DNA, 80 bp, synthetic construct
  source 1..80: mol_type = other DNA
cattttaaaattaggagctaatgatgaatggagaccagcaccaataacgaaattcaaaggttggtgtctagattgttgcc

SEQ ID NO: 39481 - DNA, 80 bp, synthetic construct
  source 1..80: mol_type = other DNA
tgaagcttgcacacaggttataaacgctaagaattatatggagctgataaattctgcatatactgaacattatagtgtgt

SEQ ID NO: 39482 - DNA, 80 bp, synthetic construct
  source 1..80: mol_type = other DNA
cacagagatgcaagatttataccaaaagtaagcttgacatattagctcgactaactaaaccaaactacattctttcaaat

SEQ ID NO: 39483 - DNA, 80 bp, synthetic construct
  source 1..80: mol_type = other DNA
catgagacgtgtgcactgaatgttcataattgtaaatggtgtcaaattaccagctgctataaaatatgggaggactttag

SEQ ID NO: 39484 - DNA, 80 bp, synthetic construct
  source 1..80: mol_type = other DNA
acttggatttgacctcaatccataaatcataataaatatcagctagcaaatcaatgtcactaacaccattcgttaatata

SEQ ID NO: 39485 - DNA, 80 bp, synthetic construct
  source 1..80: mol_type = other DNA
tatgattctggtatatctgatattgaatagtaaaagaaagatcacgtttgccactacaagactccctgcactagagtagc

SEQ ID NO: 39486 - DNA, 80 bp, synthetic construct
  source 1..80: mol_type = other DNA
aactgtataagctttggccttagcttaatgtctgtagtagaacaatttactaatgtatgtcctaacagaattattctcat

SEQ ID NO: 39487 - DNA, 80 bp, synthetic construct
  source 1..80: mol_type = other DNA
acacataaatttatatacttgataaatcatgaatgcatagtgagaaaacttaatgaaagacaggccacatttacatttct

SEQ ID NO: 39488 - DNA, 80 bp, synthetic construct
  source 1..80: mol_type = other DNA
aaaaagcaaagagaccaaatagatttattagcaaaattagactgggtatatgcatccatagacaacaaagatgaattcat

SEQ ID NO: 39489 - DNA, 80 bp, synthetic construct
  source 1..80: mol_type = other DNA
aaatttagatgctaacacatcattatattatagttattaaaaaatatgcaaacttttcaataatttagcatattgattcc

SEQ ID NO: 39490 - DNA, 80 bp, synthetic construct
  source 1..80: mol_type = other DNA
agctaataatgtcctaaaaaatgaaatgaaacgttataaaggtttattacccaaggatatagccaacagcttctatgaag

SEQ ID NO: 39491 - DNA, 80 bp, synthetic construct
  source 1..80: mol_type = other DNA
aaaattatcattttagtcttaagggattaaataaaagtctaaaactaacaatcacatatgtgcatttacaacaaaacgag

SEQ ID NO: 39492 - DNA, 80 bp, synthetic construct
  source 1..80: mol_type = other DNA
tacagagagtgtatagggtcaatatcgtattggtttctaaccaaggaaatcaaaatacttatgaaattgattggtggtgc

SEQ ID NO: 39493 - DNA, 80 bp, synthetic construct
  source 1..80: mol_type = other DNA
gaatctaaaaaaactaactataacacagtcattaatatctagataccataaaggtgaactgaaattagaagaaccaactt

SEQ ID NO: 39494 - DNA, 80 bp, synthetic construct
  source 1..80: mol_type = other DNA
aaaaaaatggggcaaataagaatttgataagtgctatttaagtctaacctttttaatcagaaatggggtgcaattcactg

SEQ ID NO: 39495 - DNA, 80 bp, synthetic construct
  source 1..80: mol_type = other DNA
atagttattaaaaaatatatatgcaaacttttcaataatttagcatattgattccaaagttatcattttagtcttaaggg

SEQ ID NO: 39496 - DNA, 80 bp, synthetic construct
  source 1..80: mol_type = other DNA
ccatggctactttcaaagatgcttgttattattataagagaactaacaagttgaatcacgcagtcttgaagttaggagtt

SEQ ID NO: 39497 - DNA, 80 bp, synthetic construct
  source 1..80: mol_type = other DNA
gattccggtatatctgacgttgaataatgaaatagagatcacatttgtcaccataagactccctgcactagagtagcgcc

SEQ ID NO: 39498 - DNA, 80 bp, synthetic construct
  source 1..80: mol_type = other DNA
tcatatatgaatggtttgacttaagatacatgagaaatacaccgatggttacatttacagttgataaattaagacaatta

SEQ ID NO: 39499 - DNA, 80 bp, synthetic construct
  source 1..80: mol_type = other DNA
tatacaggattaatgactgttgaatatgattctggcatatctgatattgaatagtaaagaaagatcacgtttgccactac

SEQ ID NO: 39500 - DNA, 80 bp, synthetic construct
  source 1..80: mol_type = other DNA
ttaatgtgttagagaatttacataatccaagcttcaaaatacagattacacgtaattgcagcgaactgtcttttgattgg

SEQ ID NO: 39501 - DNA, 80 bp, synthetic construct
  source 1..80: mol_type = other DNA
aatgaagcatgtaagcttgttaaaaacgtcagtgcgtattttgacatgctgaaaacatcacatatcgaattttatagcgt

SEQ ID NO: 39502 - DNA, 80 bp, synthetic construct
  source 1..80: mol_type = other DNA
tgatacatggaggccgtcacctccaactaaatgtaaaggatggtgtttggattgttgtcaacacactgatttaacttatt

SEQ ID NO: 39503 - DNA, 80 bp, synthetic construct
  source 1..80: mol_type = other DNA
gaagccatggctacttttaaagatgcttgctattattataagagaattaacaaactaaatcatgtagtattaaaattggg

SEQ ID NO: 39504 - DNA, 80 bp, synthetic construct
  source 1..80: mol_type = other DNA
catcacaggaaaagatatatgagtttgttgaaaatgttttagatgtatgtgataacgagaaatggaaaacatcgataaca

SEQ ID NO: 39505 - DNA, 80 bp, synthetic construct
  source 1..80: mol_type = other DNA
gaaatatttaattatctagaaccagtagaactcaatactattaagtatgctttattcaatcatgaagtgaattgggacgt

SEQ ID NO: 39506 - DNA, 80 bp, synthetic construct
  source 1..80: mol_type = other DNA
gtacaggaccaaaaaccgttgaatacgattcttgtgtatccgatattgaataataaaagaaagagaaaagtcttgtggaa

SEQ ID NO: 39507 - DNA, 80 bp, synthetic construct
  source 1..80: mol_type = other DNA
atacgattcttgtgtatccgatattgaataataaaagaaagagaaaagtcttgtggaagacagagcttacgtactgaagt

SEQ ID NO: 39508 - DNA, 80 bp, synthetic construct
  source 1..80: mol_type = other DNA
tagatggtgatgtttattacgggggtggatattatgatgacatgaataacatcaatcagactccgttttcatttataaac

SEQ ID NO: 39509 - DNA, 80 bp, synthetic construct
  source 1..80: mol_type = other DNA
ttagtagatgtgtgtgataagctgatacttgatgatgtcaatttcgccagaatgtcatttttgccaatgcctttacaaca

SEQ ID NO: 39510 - DNA, 80 bp, synthetic construct
  source 1..80: mol_type = other DNA
agaatatgcatttagatatttttctaaatcaaggtttaagggtgaacaaaggaaatgtgttaatgattcacatttctcca

SEQ ID NO: 39511 - DNA, 80 bp, synthetic construct
  source 1..80: mol_type = other DNA
attaacatactagaaaatttacataatccaagttttaaaatgcagattacacgtaattgcagcaaaatttcttctgactg

SEQ ID NO: 39512 - DNA, 80 bp, synthetic construct
  source 1..80: mol_type = other DNA
gaatggagcgtgtaaactcactaaagatgtaaatgcctattttgatatattaaaaacgtcacatattgaattttatagta

SEQ ID NO: 39513 - DNA, 80 bp, synthetic construct
  source 1..80: mol_type = other DNA
agaaaatgatacatggagaccatcacctccgactaagtataaaggatggtgcttagactgctgccagcatactgatttaa

SEQ ID NO: 39514 - DNA, 80 bp, synthetic construct
  source 1..80: mol_type = other DNA
tcttgtgtgagccatggcgacttttaaagatgcttgctatcattatagaaggttaaataaattaaataatttagtgctca

SEQ ID NO: 39515 - DNA, 80 bp, synthetic construct
  source 1..80: mol_type = other DNA
aaatatataataatatgatggactttgttagagcacttgcaaaatcaaacggaaacgttggacattgttcgtcacaagaa

SEQ ID NO: 39516 - DNA, 80 bp, synthetic construct
  source 1..80: mol_type = other DNA
tcagtatacaaatgtataccggatatatttctgatttgtgaaatggaaaaatggaatggagctgttagggtgttgtttag

SEQ ID NO: 39517 - DNA, 80 bp, synthetic construct
  source 1..80: mol_type = other DNA
atatctagaaccagtggatataaatggagattattatgtatttggatattatgaagtgaactgggaagtgaggggactga

SEQ ID NO: 39518 - DNA, 80 bp, synthetic construct
  source 1..80: mol_type = other DNA
ttatgcaaaacatggatggaagagtgccaaggattttgaatatggatgatgtaaagaaaatattaagcgcaataatattt

SEQ ID NO: 39519 - DNA, 80 bp, synthetic construct
  source 1..80: mol_type = other DNA
gattggtttgacgtgagatgtatgagagaaacaccgctgacaacgttaacgacaaaccaactccgagcactgaataggaa

SEQ ID NO: 39520 - DNA, 80 bp, synthetic construct
  source 1..80: mol_type = other DNA
ggaagaacgagctcatagacgagtacgacttagaactttcagatgtcgagtaaatgtggtcataactgcgccaacacaag

SEQ ID NO: 39521 - DNA, 80 bp, synthetic construct
  source 1..80: mol_type = other DNA
aatttgacatattgcagaggatgtgctctataccacgtatgtcaatggtgtagtcagtataataggtgtttcttagatga

SEQ ID NO: 39522 - DNA, 80 bp, synthetic construct
  source 1..80: mol_type = other DNA
agaaccccattttttgagaatgcgaacatttaaaaatataatgacgaaagaagacatagagggcttgttgacaatgtatg

SEQ ID NO: 39523 - DNA, 80 bp, synthetic construct
  source 1..80: mol_type = other DNA
aaacgctgtttccaataaacgaaaaattggtgaacaaattcacagactttgtgaaacaacgcaaatgtagaaatgaatat

SEQ ID NO: 39524 - DNA, 80 bp, synthetic construct
  source 1..80: mol_type = other DNA
ttgctagagtggtacaatcatttactaatgccaataacgttacaagcattaactgtaaaacttgaggataatatatacta

SEQ ID NO: 39525 - DNA, 80 bp, synthetic construct
  source 1..80: mol_type = other DNA
tatatttggatattatgactgtatggaacatgagaatcaaacaccatttcagtttatcaatctgttagataaatatgata

SEQ ID NO: 39526 - DNA, 80 bp, synthetic construct
  source 1..80: mol_type = other DNA
aattgctactggataatagaaattttaatagaatgtcatacctaccaacaatactacagcaggaatatgcattaagatac

SEQ ID NO: 39527 - DNA, 80 bp, synthetic construct
  source 1..80: mol_type = other DNA
ttttcaaaatcaaggtttttaagcaaaaaagagaaaaaattgaacaggaacgatttttcagacaatcttatggaagacaa

SEQ ID NO: 39528 - DNA, 80 bp, synthetic construct
  source 1..80: mol_type = other DNA
acatagtccaatatcgttaatacaagtgatgcgcaactgcatcagcacacacgtgaatgatagtgaatggaataaagcgt

SEQ ID NO: 39529 - DNA, 80 bp, synthetic construct
  source 1..80: mol_type = other DNA
aactaggagcaaacgatgaatggagaccagcaccagtgacgaaatacaaaggatggtgtctagattgctgtcagcataca

SEQ ID NO: 39530 - DNA, 80 bp, synthetic construct
  source 1..80: mol_type = other DNA
gcacgcttgtagtcgattccaaaaactatgttaacattgtaaactcctcatacactgaacattacagcgtttcacaaaga

SEQ ID NO: 39531 - DNA, 80 bp, synthetic construct
  source 1..80: mol_type = other DNA
tgtaaattgtttactaaatataaacttgggattgtgtcaaagctggtaagaccgaattacattttctctagtcatgaatc

SEQ ID NO: 39532 - DNA, 80 bp, synthetic construct
  source 1..80: mol_type = other DNA
gtgcgcattaaatgtacacaattgtaaatggtgccagacaaacaatcattataaagtatgggacgattttaggctcaaga

SEQ ID NO: 39533 - DNA, 80 bp, synthetic construct
  source 1..80: mol_type = other DNA
ttaaaaggaactgagacttatatatcaagagatatgcaatttatgagtaaaacgatccaacataacggtgtatattaccc

SEQ ID NO: 39534 - DNA, 80 bp, synthetic construct
  source 1..80: mol_type = other DNA
gtgttgttagtggagatatactatcatattctatagctggacgtaatgaagttttcagcaataaacttataaatcataag

SEQ ID NO: 39535 - DNA, 80 bp, synthetic construct
  source 1..80: mol_type = other DNA
tatgaattatacactcaacaataccaaaaacaccaatataacattaaataagaaaaggaaaagaagatttcttggatttt

SEQ ID NO: 39536 - DNA, 80 bp, synthetic construct
  source 1..80: mol_type = other DNA
caacaaacttgcgtaaaccaaaaaaatggggcaaataagaatttgataagtaccacttaaatttaactcctttggttaga

SEQ ID NO: 39537 - DNA, 80 bp, synthetic construct
  source 1..80: mol_type = other DNA
tttaactcctttggttagagatgggcagcaactcattgagtatgataaaagttagattgcaaaatctgtttgacaatgat

SEQ ID NO: 39538 - DNA, 80 bp, synthetic construct
  source 1..80: mol_type = other DNA
atattattattttggcaaataagaatttgataagtaccacttaaatttaactcctttggttagagatgggcagcaactca

SEQ ID NO: 39539 - DNA, 80 bp, synthetic construct
  source 1..80: mol_type = other DNA
aatattagaattgaaagcaggaataagtaacaaatcaaatcgttacaatgataattacaacaattacattagtaagtgct

SEQ ID NO: 39540 - DNA, 80 bp, synthetic construct
  source 1..80: mol_type = other DNA
tcatgctatggcaaaaccaaatgtacagcatccaataaaaatcgtgggatcataaagacattctctaacgggtgtgatta

SEQ ID NO: 39541 - DNA, 80 bp, synthetic construct
  source 1..80: mol_type = other DNA
aaacttttcaataatttagcatattgattccaaaattatcattttagtcttaagggattaaataattgtcaaaaactaac

SEQ ID NO: 39542 - DNA, 80 bp, synthetic construct
  source 1..80: mol_type = other DNA
acattgactagaaggtcaagaaaagggaactctataatttcaaaaatgttgagcctatttgatacatttaatgcacgtag

SEQ ID NO: 39543 - DNA, 80 bp, synthetic construct
  source 1..80: mol_type = other DNA
gaaaaacatcattaagaattacagagagtgtatagggtcaatatcgtattggtttctaaccaaggaaatcaaaatactta

SEQ ID NO: 39544 - DNA, 80 bp, synthetic construct
  source 1..80: mol_type = other DNA
ggggcaaataagaatttgataagtgctatttaagtctaacctttttaatcagaaatggggtgtaattcactgagcatgat

SEQ ID NO: 39545 - DNA, 80 bp, synthetic construct
  source 1..80: mol_type = other DNA
cataaaagcctcacaaaactaacagctggggcaaatatgtcgcgaagaaatccctgcaaatttgagattagaggtcattg

SEQ ID NO: 39546 - DNA, 80 bp, synthetic construct
  source 1..80: mol_type = other DNA
tatttaagtctaaccttttcaatcagaaatggggtgcaattcactgagcatgataaaggttagattacaaaatttatttg

SEQ ID NO: 39547 - DNA, 80 bp, synthetic construct
  source 1..80: mol_type = other DNA
acctcctttcataaaggatcatgttgtcaatcttaatgaagttgatgaacaaagtggattatacagatatcatatgggtg

SEQ ID NO: 39548 - DNA, 80 bp, synthetic construct
  source 1..80: mol_type = other DNA
aaaattaataattatataatttttaataacttctagtgaactaatcctaaaattatctttttaatctaggaagaataagt

SEQ ID NO: 39549 - DNA, 80 bp, synthetic construct
  source 1..80: mol_type = other DNA
ttatttaaaattaataattatataattttttaataacttctagtgaaccaatcctaaaattatcattttgatctaggaag

SEQ ID NO: 39550 - DNA, 80 bp, synthetic construct
  source 1..80: mol_type = other DNA
tctatacaacatccggtcaagaggaaaccctccactcaaccacctccgaaggccatccaagcccatcacaagtccataca

SEQ ID NO: 39551 - DNA, 80 bp, synthetic construct
  source 1..80: mol_type = other DNA
aatgatacatggaggccgtcatctccaactaaatataaaggatggtgtttagattgctgtcaatatactgatttaactta

SEQ ID NO: 39552 - DNA, 80 bp, synthetic construct
  source 1..80: mol_type = other DNA
atgaatgtattaattaacagtatcggtaaagtaccaagaatattaactttgagcgacgttatttcgattttacgtatgat

SEQ ID NO: 39553 - DNA, 80 bp, synthetic construct
  source 1..80: mol_type = other DNA
ggtagatgttttcttgataatgagccacatctgttaagaatgagaacctttaaaaatgaagtgacaaaagatgatctgat

SEQ ID NO: 39554 - DNA, 80 bp, synthetic construct
  source 1..80: mol_type = other DNA
aaatttaattaatatgtatgatacattatttcctatgaatcagaagatagtggataaattcattaataacacaagacaac

SEQ ID NO: 39555 - DNA, 80 bp, synthetic construct
  source 1..80: mol_type = other DNA
tattaatatattgattcagagcattggtaaagtaccacaaatattaactttgaaaaatgttattacaatcatacaatcta

SEQ ID NO: 39556 - DNA, 80 bp, synthetic construct
  source 1..80: mol_type = other DNA
ttatatatgaatggtttgatataagatacatgaggaatacaccaatggttacatttacaattgataaattaagacgattg

SEQ ID NO: 39557 - DNA, 80 bp, synthetic construct
  source 1..80: mol_type = other DNA
cgattgcatacagaattaaagactgctggatatgattctggtatatctgatgttgaatagaaaaagaaaagtcacatttg

SEQ ID NO: 39558 - DNA, 80 bp, synthetic construct
  source 1..80: mol_type = other DNA
tctggcatatctgatattgaatagtaaaagaaagattacgtttgccaccgcaggactccctgtactagagtagcgcctag

SEQ ID NO: 39559 - DNA, 80 bp, synthetic construct
  source 1..80: mol_type = other DNA
agaatatgcacttagatatttttctaaatcaagatttgtaagtgaacaaaggaaatgtgttaatgcttcacacttttcaa

SEQ ID NO: 39560 - DNA, 80 bp, synthetic construct
  source 1..80: mol_type = other DNA
tccggtatatctgacggtgaataatgaaatagaggttacacttgccactacaagactccctgcactagagtagcgcctag

SEQ ID NO: 39561 - DNA, 80 bp, synthetic construct
  source 1..80: mol_type = other DNA
ccatggctacttttaaagacgcttgctatcaatataaaaaattaaataaattaaataatgcagttttaaagttaggagct

SEQ ID NO: 39562 - DNA, 80 bp, synthetic construct
  source 1..80: mol_type = other DNA
ttcagaagaaaagatatatgaatctattaaggatattttaaatatatgtaaagaaaacgaatggaacatgttggtaacgg

SEQ ID NO: 39563 - DNA, 80 bp, synthetic construct
  source 1..80: mol_type = other DNA
aatatatgattggtttgacataaggtttatgagaaatactccaatgactacgttcacagttaataaattgaagcaattat

SEQ ID NO: 39564 - DNA, 80 bp, synthetic construct
  source 1..80: mol_type = other DNA
tatggaaaggataaaactgcagaatatgattcaggtatatccgatgttgaataatttcagagaagttatgttcgccacca

SEQ ID NO: 39565 - DNA, 80 bp, synthetic construct
  source 1..80: mol_type = other DNA
tcaggtatatccgatgttgaataatttcagagaagttatgttcgccaccataagactctctgcactagagtagcgcctag

SEQ ID NO: 39566 - DNA, 80 bp, synthetic construct
  source 1..80: mol_type = other DNA
ctgccaaggatgtttaatataccatgtttgtgaatggtgtagtcaatatagcagatgctttcttgataatgatccgcatt

SEQ ID NO: 39567 - DNA, 80 bp, synthetic construct
  source 1..80: mol_type = other DNA
tactaagaatgcgaacttttagaaatgaaatcacaaagagtgacttagaaaacttaattaatatgtatgatacattattt

SEQ ID NO: 39568 - DNA, 80 bp, synthetic construct
  source 1..80: mol_type = other DNA
cctataaatcaaaaaatggttaataagtttgcaaacacaattaaacagcataaatgtagaaatgagtatttgatacaatg

SEQ ID NO: 39569 - DNA, 80 bp, synthetic construct
  source 1..80: mol_type = other DNA
atagtatattaaatgatttacataacccgaattttacattacaagtgattagaaattgcagtaatatgtcagttgaatgg

SEQ ID NO: 39570 - DNA, 80 bp, synthetic construct
  source 1..80: mol_type = other DNA
aataaagcatgtaatcttattaggaatataagcaattatttcgatatactcaaatcgtcacatactgagtcttataatgt

SEQ ID NO: 39571 - DNA, 80 bp, synthetic construct
  source 1..80: mol_type = other DNA
aatgatgtttggagaccttccactctaacaaaacgtaaaggatggtgcttagattgttgtcaacacacggacttgactca

SEQ ID NO: 39572 - DNA, 80 bp, synthetic construct
  source 1..80: mol_type = other DNA
atcataattccttggctactgaagtacacaattgcaaatggtgttcaactaataataattccattgtatggactgatttc

SEQ ID NO: 39573 - DNA, 80 bp, synthetic construct
  source 1..80: mol_type = other DNA
agaattaagaaaatatatgataatatttttaattttctacgagctttaattaaatcaaatgttaatattggacattgctc

SEQ ID NO: 39574 - DNA, 80 bp, synthetic construct
  source 1..80: mol_type = other DNA
ttaatgtattagagaacatacataatccaagtttcaaaatacaaattacacgtaattgtagtgaattatcttttagttgg

SEQ ID NO: 39575 - DNA, 80 bp, synthetic construct
  source 1..80: mol_type = other DNA
aatttaattgatatgtatgaaacactattccctatgaatcataaaatagtatgtagattcattaacaatacgaaacaaca

SEQ ID NO: 39576 - DNA, 80 bp, synthetic construct
  source 1..80: mol_type = other DNA
taaatgtagaaacgaatgtatgatacagtggtacaatcatttactaatgccaataacgttacaatccctgtcaattgaat

SEQ ID NO: 39577 - DNA, 80 bp, synthetic construct
  source 1..80: mol_type = other DNA
ccatggctacttttaaagacgcttgttattattataaaagaattaataaattaaatcatgcagtcttaaaattaggagtt

SEQ ID NO: 39578 - DNA, 80 bp, synthetic construct
  source 1..80: mol_type = other DNA
tgcatacagaattaaagactgctgaatatgattctggtatatctgatgtcgaatagtataagaaaggtcacatttgccac

SEQ ID NO: 39579 - DNA, 80 bp, synthetic construct
  source 1..80: mol_type = other DNA
tctggtatatctgatgtcgaatagtataagaaaggtcacatttgccactacaagactccctgtactagagtagcgcctag

SEQ ID NO: 39580 - DNA, 80 bp, synthetic construct
  source 1..80: mol_type = other DNA
tagtagatgcttccttgatgatgaaccacatttattaaggatgagaacttttaaaaatgaaataacaaaagatgatttga

SEQ ID NO: 39581 - DNA, 80 bp, synthetic construct
  source 1..80: mol_type = other DNA
agaatttaattgatatgtatagtacattattccctatgaatcataaaatagtatgtaaattcattaataatacgaaacaa

SEQ ID NO: 39582 - DNA, 80 bp, synthetic construct
  source 1..80: mol_type = other DNA
caattaatgtattagaaaatttacataatccaagtttcaaagtacagattacacgtaactgtagtgaactgcttcttggc

SEQ ID NO: 39583 - DNA, 80 bp, synthetic construct
  source 1..80: mol_type = other DNA
tggaacgaagcatgcaaactcgttaaaaatattagagcttattttgatatactgaaaacgtcacgtactgaattttatag

SEQ ID NO: 39584 - DNA, 80 bp, synthetic construct
  source 1..80: mol_type = other DNA
ccatggctacttttaaagatgcttgctattattataagagaattaacaaactaaatcatacagtcttgaaattgggagtt

SEQ ID NO: 39585 - DNA, 80 bp, synthetic construct
  source 1..80: mol_type = other DNA
gtacagaaccaaagactgtcgactatgattctggcatatctgatgttgaataatgaaagaaaggtcacattcgccaccac

SEQ ID NO: 39586 - DNA, 80 bp, synthetic construct
  source 1..80: mol_type = other DNA
tctggcatatctgatgttgaataatgaaagaaaggtcacattcgccaccacaagactccctgcactagagtagcgcctag

SEQ ID NO: 39587 - DNA, 80 bp, synthetic construct
  source 1..80: mol_type = other DNA
attaacgtgcttgaaaatttacacaatccaagtttcaaaatacagatcacgcgcaattgcagtgagctgtcttccgattg

SEQ ID NO: 39588 - DNA, 80 bp, synthetic construct
  source 1..80: mol_type = other DNA
gaatggagcatgtaaacttgttaaagatacaagtgcttattttaatatactaaagacatcacatgttgagttctatagcg

SEQ ID NO: 39589 - DNA, 80 bp, synthetic construct
  source 1..80: mol_type = other DNA
tttccactagatgcagaatgttcacgcaacgtaaacttcaaatagcatctaaactaatgaaaccaaattatatgacatca

SEQ ID NO: 39590 - DNA, 80 bp, synthetic construct
  source 1..80: mol_type = other DNA
aattttattagggctttagtgaaatcaaatctttacgtgggacattgttcttcagaagaaaagatatatgaatctattaa

SEQ ID NO: 39591 - DNA, 80 bp, synthetic construct
  source 1..80: mol_type = other DNA
ggatattttaaatgtatgtgaagaaaacgaatggaacatgttggtaacgaaaatattcaaccaattagatccaataaagt

SEQ ID NO: 39592 - DNA, 80 bp, synthetic construct
  source 1..80: mol_type = other DNA
taaatgaggatagctatgttttgttgaattatgaaataaattggaatgttatgaatgtattaattaatagtattggtaaa

SEQ ID NO: 39593 - DNA, 80 bp, synthetic construct
  source 1..80: mol_type = other DNA
gtaccaaaaatattaactttgagtgacgttatttcgattttacgtataataatatatgattggtttgacataaggtttat

SEQ ID NO: 39594 - DNA, 80 bp, synthetic construct
  source 1..80: mol_type = other DNA
gtataatcattttttaatgccagttacactacagtctttatcaatagaattagatggagatatatattatatatttggtt

SEQ ID NO: 39595 - DNA, 80 bp, synthetic construct
  source 1..80: mol_type = other DNA
actatgacgatatgcataaaattaatcagactcccttctcattcacgaatttaattagtaaatatgatgtattactgcta

SEQ ID NO: 39596 - DNA, 80 bp, synthetic construct
  source 1..80: mol_type = other DNA
gatagtataaattttgacagaatggcatttttaccattaacattacagcaagagtatgcacttagatatttttcaaaatc

SEQ ID NO: 39597 - DNA, 80 bp, synthetic construct
  source 1..80: mol_type = other DNA
aagattcattactgaaagaaggaaatgtattgaaatttcacatttttcagataatatattaaatgatttacataatccga

SEQ ID NO: 39598 - DNA, 80 bp, synthetic construct
  source 1..80: mol_type = other DNA
attttacattacaagtgattagaaattgcagtaatatgtcagttgaatggaataaagcatgtaatcttattaaaaatata

SEQ ID NO: 39599 - DNA, 80 bp, synthetic construct
  source 1..80: mol_type = other DNA
agtaattatttcaatatactcaaatcgtcacatactgagtcttataatgtatctcctagatgtagagtattcacacaata

SEQ ID NO: 39600 - DNA, 80 bp, synthetic construct
  source 1..80: mol_type = other DNA
taaattaaaaatagcatctaaattaattaaaccaaattatgtagcatcaaatcataattccttggctactgaagtacaca

SEQ ID NO: 39601 - DNA, 80 bp, synthetic construct
  source 1..80: mol_type = other DNA
attgcaaatggtgttcaattaataataattctattgtatggactgatttcagaattaaaaatgtttataacgatatagtt

SEQ ID NO: 39602 - DNA, 80 bp, synthetic construct
  source 1..80: mol_type = other DNA
tcctaaagttatcattttgatctaggaggaataaatttaaatcccaatctaattggtttatatgtgtattaactaaacta

SEQ ID NO: 39603 - DNA, 80 bp, synthetic construct
  source 1..80: mol_type = other DNA
ttatataatttttaataacttctagtgaactaatcctaaaattatctttttaatctaggaagaataagtttaaatccaaa

SEQ ID NO: 39604 - DNA, 80 bp, synthetic construct
  source 1..80: mol_type = other DNA
atctaatgttaattctaatttaatattggcgcataagatatctgactattttcataatacttacattttaagtactaatt

SEQ ID NO: 39605 - DNA, 80 bp, synthetic construct
  source 1..80: mol_type = other DNA
attaatagtaaaatatcatgctcaagatgatatcgatttcaaattagacaacataactatattaaaaacttatgtatgct

SEQ ID NO: 39606 - DNA, 80 bp, synthetic construct
  source 1..80: mol_type = other DNA
ataattatataatttttttaataacttctagtgaaccaatcctaaaattatcattttgatctaggaagaataagtttaaa

SEQ ID NO: 39607 - DNA, 80 bp, synthetic construct
  source 1..80: mol_type = other DNA
aagaatttgataagtgctatttaagtctaacctttttaatcagaaatggggtgcaattcactgagcatgataaaggttag

SEQ ID NO: 39608 - DNA, 80 bp, synthetic construct
  source 1..80: mol_type = other DNA
aatgcagtaactgaattacagttacttatgcaaaacacaccagctgtcaacaaccgggccagaagagaagcaccacagta

SEQ ID NO: 39609 - DNA, 80 bp, synthetic construct
  source 1..80: mol_type = other DNA
agacttaggagtgtctatgataacatactgagtttcattagagctttagtaaaatcaaatactagtattggacattgctc

SEQ ID NO: 39610 - DNA, 80 bp, synthetic construct
  source 1..80: mol_type = other DNA
atcacaggaaaaaatacatgattatatcaaagatattttcgatatatgtgatgaaaataaatggaatcaatctgtagcag

SEQ ID NO: 39611 - DNA, 80 bp, synthetic construct
  source 1..80: mol_type = other DNA
gctaatatattaattcaacacattggaaaaattccacaggtattaactttaaatgacgttgtaacagctttacattctat

SEQ ID NO: 39612 - DNA, 80 bp, synthetic construct
  source 1..80: mol_type = other DNA
aatctgattgatatgtataatacattatttcctatgaatcagaaagtagtagataaattcattaataacacaaaacagca

SEQ ID NO: 39613 - DNA, 80 bp, synthetic construct
  source 1..80: mol_type = other DNA
agaatatgcccttcggtatttttcaacatcaagatttattagtgaagggaagaaacatgtcagtgattttcatttttcaa

SEQ ID NO: 39614 - DNA, 80 bp, synthetic construct
  source 1..80: mol_type = other DNA
aatgaagcatgcaaacttgttaaagatattaaggtctactttgatgtcatgaaaacatcacacattgaattttatgatat

SEQ ID NO: 39615 - DNA, 80 bp, synthetic construct
  source 1..80: mol_type = other DNA
aatgaagaacccaattcacctaagataagagtatacaatactgttatatcatacatcgagagtaatagaaaaaacagcaa

SEQ ID NO: 39616 - DNA, 80 bp, synthetic construct
  source 1..80: mol_type = other DNA
gcaaaccatccatctactcaaacgattaccagcagacgtgctgaagaagacaataaagaacacattagatatccacaaaa

SEQ ID NO: 39617 - DNA, 80 bp, synthetic construct
  source 1..80: mol_type = other DNA
gtaagtttgcatcatccaaagatcctaagaagaaagatagcataatatctgtcaactcaatagacatagaagtcactaaa

SEQ ID NO: 39618 - DNA, 80 bp, synthetic construct
  source 1..80: mol_type = other DNA
atgtcacactttattagacaagacagtgtctgataatatcataaatggtaaatggataattctattaagtaaatttctta

SEQ ID NO: 39619 - DNA, 80 bp, synthetic construct
  source 1..80: mol_type = other DNA
gcataaccataagcaaccccaaagagccaaccataagtgatcaaaatgaccaaaccaaaaataatgatattaccggataa

SEQ ID NO: 39620 - DNA, 80 bp, synthetic construct
  source 1..80: mol_type = other DNA
tggggcaaataagaatttgataagtaccacttgaatttaactcctttggttagagatgggcagcaactcattgagtatga

SEQ ID NO: 39621 - DNA, 80 bp, synthetic construct
  source 1..80: mol_type = other DNA
aaatacttatgaaattgattggtggtgctaaattattaggaattcctagacaatataaagaacccgaagaacagttatta

SEQ ID NO: 39622 - DNA, 80 bp, synthetic construct
  source 1..80: mol_type = other DNA
ttcaataatttagcatattgattccaaaattatcattttagtcttaagggattaaataaaagtctaaaactaacaatcac

SEQ ID NO: 39623 - DNA, 80 bp, synthetic construct
  source 1..80: mol_type = other DNA
taattgatacaccttgctggaaattacacacgtcacctctgtgcaccaccaacatcagagaaggttcaaatatttgttta

SEQ ID NO: 39624 - DNA, 80 bp, synthetic construct
  source 1..80: mol_type = other DNA
acgtaggcaagaaaacataacaaaatcagctggtggagctatcatccctggacagaaaaatactgtctctatattcgctc

SEQ ID NO: 39625 - DNA, 80 bp, synthetic construct
  source 1..80: mol_type = other DNA
gggttgaataaaagtctaaaactaacaatgatacatgtgcatttacaacacaacgagacattagtttttgacactttttt

SEQ ID NO: 39626 - DNA, 80 bp, synthetic construct
  source 1..80: mol_type = other DNA
acggtatagtttttatacatgttataacaagcagtgaagtgtgccctgataacaacattgtagtaaaatctaactttaca

SEQ ID NO: 39627 - DNA, 80 bp, synthetic construct
  source 1..80: mol_type = other DNA
acaatgccaatattacaaaacggaggatacatatgggaattgattgagttgacacactgctctcaattaaacggtctaat

SEQ ID NO: 39628 - DNA, 80 bp, synthetic construct
  source 1..80: mol_type = other DNA
ggatgataattgtgaaatcaaattttctaaaagactaagtgactcagtaatgactaattatatgaatcaaatatctgatt

SEQ ID NO: 39629 - DNA, 80 bp, synthetic construct
  source 1..80: mol_type = other DNA
ctacatcaaattccacccaaaatacccaatcacatgcttagttattcaaaaactacatcttagcagaaaaccgtgaccta

SEQ ID NO: 39630 - DNA, 80 bp, synthetic construct
  source 1..80: mol_type = other DNA
ccttactagtgaggcaaaacttcatgttaaacaagatactcaagtcaatggacaaaagcatagacactttgtctgaaata

SEQ ID NO: 39631 - DNA, 80 bp, synthetic construct
  source 1..80: mol_type = other DNA
agggctgagatgtggattcaataatgttgtgttatcacaattatttctttatggagattgtatactgaaattatttcata

SEQ ID NO: 39632 - DNA, 80 bp, synthetic construct
  source 1..80: mol_type = other DNA
acaaggactgatagaggatggtactgtgataatgcaggatcagtatccttttttccacaggctgacacttgtaaaataca

SEQ ID NO: 39633 - DNA, 80 bp, synthetic construct
  source 1..80: mol_type = other DNA
gtccaatcgagtattttgtgacactatgaacagtttgacattaccaagtgaagtcagcctttgtaacactgacatattca

SEQ ID NO: 39634 - DNA, 80 bp, synthetic construct
  source 1..80: mol_type = other DNA
aaaaaaatggggcaaataagaatttgataagtaccacttaaatttaactcctttggttagagatgggcagcaactcattg

SEQ ID NO: 39635 - DNA, 80 bp, synthetic construct
  source 1..80: mol_type = other DNA
ctcactaccaagcctacaggaaagccaaccatcaacaccactaaaacaaacagcagaactaaactgctcacatccaacac

SEQ ID NO: 39636 - DNA, 80 bp, synthetic construct
  source 1..80: mol_type = other DNA
acactcgaaaaaaatggggcaaataagaatttgataagtgctatttaagtctaaccttttttatcagaaatggggtgcaa

SEQ ID NO: 39637 - DNA, 80 bp, synthetic construct
  source 1..80: mol_type = other DNA
attccaaaattatcattttagtcttaagggattaaataaaagtctaaaactaacaattacacatgtgcatttacaacaca

SEQ ID NO: 39638 - DNA, 80 bp, synthetic construct
  source 1..80: mol_type = other DNA
taaatcaatatggttgcattgttcatcataaagggctcaaaaaaatcacaactactacatacaatcaatttttgacatgg

SEQ ID NO: 39639 - DNA, 80 bp, synthetic construct
  source 1..80: mol_type = other DNA
aaagacatcagccttagcagattaaatgtttgcttaattacttggataagtaattgtttaaatacattaaataaaagctt

SEQ ID NO: 39640 - DNA, 80 bp, synthetic construct
  source 1..80: mol_type = other DNA
gtagtttgttatacaacttttataatgaataatgagcaaaaatcttataacaaaaatagctacacactaatattgtattc

SEQ ID NO: 39641 - DNA, 80 bp, synthetic construct
  source 1..80: mol_type = other DNA
atcatgtcaatagatttaactttgtatttagttccacaggatgcaagatcagtatagaatatattttaaaagatctcaag

SEQ ID NO: 39642 - DNA, 80 bp, synthetic construct
  source 1..80: mol_type = other DNA
aacttctagtgaactaatcctaaaattatcattttgatctaggaagaataagtttaaatccaaatctaattggtttatct

SEQ ID NO: 39643 - DNA, 80 bp, synthetic construct
  source 1..80: mol_type = other DNA
tgctaacacattattatattatagttattaaaaaataaaaaatatgcaaacttttcaataatttagcatattgattccaa

SEQ ID NO: 39644 - DNA, 80 bp, synthetic construct
  source 1..80: mol_type = other DNA
acatccgagtacccatcacaatctctatcttcatccaacatagcaaaatgatagtcattaaaaagcgtattgttgcaaaa

SEQ ID NO: 39645 - DNA, 80 bp, synthetic construct
  source 1..80: mol_type = other DNA
tcagacttagaaatatctatgataatatactgagttttattagagctttagtaaaatcaaatactagcattggacattgt

SEQ ID NO: 39646 - DNA, 80 bp, synthetic construct
  source 1..80: mol_type = other DNA
tcatcacaggagaaagtacataattatgtcaaagatatttttgatgtgtgtgatgagaataaatggaatcaatctgtagc

SEQ ID NO: 39647 - DNA, 80 bp, synthetic construct
  source 1..80: mol_type = other DNA
agacttgtttgactgtttagatccagtagaattgaacaacacccattacattttactaaatcatgaagtaagttgggatg

SEQ ID NO: 39648 - DNA, 80 bp, synthetic construct
  source 1..80: mol_type = other DNA
ttgccaacatattaattcaacacattggaaaaattccacagatattgactttaaatgatgttataacagccttacattct

SEQ ID NO: 39649 - DNA, 80 bp, synthetic construct
  source 1..80: mol_type = other DNA
ataatctatgattggtttgatattagatacatgagacatacaccattaaccacattaacagttgatagattgaggcagtt

SEQ ID NO: 39650 - DNA, 80 bp, synthetic construct
  source 1..80: mol_type = other DNA
gcatgcaagacgaaagaccattgaccatgattcaggcgtatccgatgttgagtaataaaagagaggtcacattagccacc

SEQ ID NO: 39651 - DNA, 80 bp, synthetic construct
  source 1..80: mol_type = other DNA
taagtgtagaaatgaatacgcaccacaatggtataatcacttattaatgccaataacgctgcaagctttatcagtagaat

SEQ ID NO: 39652 - DNA, 80 bp, synthetic construct
  source 1..80: mol_type = other DNA
ttgatggtgacatttattatgtttttggttattatgaaaacatgaagaatattaaccagactccattttcatttgtgaat

SEQ ID NO: 39653 - DNA, 80 bp, synthetic construct
  source 1..80: mol_type = other DNA
ttaattgatatgtatgatagattactgcttgatgacgtgaatttcagtagaatgtcatttctaccagtagtgctacaaca

SEQ ID NO: 39654 - DNA, 80 bp, synthetic construct
  source 1..80: mol_type = other DNA
ctaatacattggaaaacttacataatccaaaccttaagatgcaaattacccggaattgtagtactatgtttgccaaatgg

SEQ ID NO: 39655 - DNA, 80 bp, synthetic construct
  source 1..80: mol_type = other DNA
aatgaagcatgtaaacttgtcaaagacactaaagcctactttgataccatgaaaacatcacacatcgaattttatgatat

SEQ ID NO: 39656 - DNA, 80 bp, synthetic construct
  source 1..80: mol_type = other DNA
ctcccccagatgcagaatgtttactcaatataaattgaaagcagtagcaaaaataaccaagccaaattacgttacatcga

SEQ ID NO: 39657 - DNA, 80 bp, synthetic construct
  source 1..80: mol_type = other DNA
atcacagagcattggccactgaagtgcataattgtaaatggtgctcagttaataacaattttattgtgtggaatgatttc

SEQ ID NO: 39658 - DNA, 80 bp, synthetic construct
  source 1..80: mol_type = other DNA
acaaccacatcagatcacacagtccagcagcaatccctccactcaaccacccccgaaaacacacccaactccacacaaac

SEQ ID NO: 39659 - DNA, 80 bp, synthetic construct
  source 1..80: mol_type = other DNA
aatagaaaaaaaccacctgatcatgtttcaataacaatccgctgaccactaatcccaaatcaatccacaacaaacatttc

SEQ ID NO: 39660 - DNA, 80 bp, synthetic construct
  source 1..80: mol_type = other DNA
acaatatcgatcaaatgaggtaaaaagtcatgggtttatattaatagataatcaaactttaagtggttttcagtttattc

SEQ ID NO: 39661 - DNA, 80 bp, synthetic construct
  source 1..80: mol_type = other DNA
cgactaaagactcctctagcacgatacgtcaccaaaaggtgccacaccggcgtcaaaactcctctagaccgcacacgacc

SEQ ID NO: 39662 - DNA, 80 bp, synthetic construct
  source 1..80: mol_type = other DNA
tcacaaaaggccttgaccaacttaaacagaatcaaaataaactctggggcaaataacaatggagttgctaatcctcaaag

SEQ ID NO: 39663 - DNA, 80 bp, synthetic construct
  source 1..80: mol_type = other DNA
tagtgaactaatcctaaaattatctttttaatctaggaagaataagtttaaatccaaatctaattggtttatatgtatat

SEQ ID NO: 39664 - DNA, 80 bp, synthetic construct
  source 1..80: mol_type = other DNA
ctagagactcctccggcacgatacgtcaccaacaggtgccacaccggcatcaaaactcctctagaccgcacacgacctcg

SEQ ID NO: 39665 - DNA, 80 bp, synthetic construct
  source 1..80: mol_type = other DNA
acgcgaaaaaatgcgtacaacaaacttgcgtaaaccaaaaaaatggggcaaataagaatttgataagtaccacttaaatt

SEQ ID NO: 39666 - DNA, 80 bp, synthetic construct
  source 1..80: mol_type = other DNA
aatttaaatcccaatctaattggtttatatgtgtattaactaaactacgagatattagtttttgacactttttttctcgt

SEQ ID NO: 39667 - DNA, 80 bp, synthetic construct
  source 1..80: mol_type = other DNA
aaccaaacatccatccgccaatcagccaaacagccaacaaaacaaccagccaatccaaaaccagccacctggaaaaaatc

SEQ ID NO: 39668 - DNA, 80 bp, synthetic construct
  source 1..80: mol_type = other DNA
gacaatatagttacaaaaaaagaaaagggtggggcaaatatggaaacatacgtgaacaagcttcacgaaggctccgcata

SEQ ID NO: 39669 - DNA, 80 bp, synthetic construct
  source 1..80: mol_type = other DNA
tacacatggggcaaataatcatcggaggaaatccaactaatcacaatatctgttaacatagacaagtcaacacaccagac

SEQ ID NO: 39670 - DNA, 80 bp, synthetic construct
  source 1..80: mol_type = other DNA
actctggggcaaataacaatggagttgccaatcctcaaagcaaatgcaattaccacaatcctcgctgcagtcacattttg

SEQ ID NO: 39671 - DNA, 80 bp, synthetic construct
  source 1..80: mol_type = other DNA
aaacttaacagaagacaaaaatggggcaaataaatcaactcagccaacccaaccatggacacaacccacaatgataccac

SEQ ID NO: 39672 - DNA, 80 bp, synthetic construct
  source 1..80: mol_type = other DNA
tgaataaaaatagcacctaatcatgttcttacaatggtttactatctgctcatagacaacccatctatcattggattttc

SEQ ID NO: 39673 - DNA, 80 bp, synthetic construct
  source 1..80: mol_type = other DNA
actggggcaaatatgtcacgaaggaatccttgcaaatttgaaattcgaggtcattgcttgaatggtaagagatgtcattt

SEQ ID NO: 39674 - DNA, 80 bp, synthetic construct
  source 1..80: mol_type = other DNA
taaactagggcttaaagaaaaggacaagattaaatccaacaatggacaggatgaagacaactcagttattacgaccataa

SEQ ID NO: 39675 - DNA, 80 bp, synthetic construct
  source 1..80: mol_type = other DNA
tttgatactagtcctatcaatcatgtattaacagaaaagtatggagatgaagatatcgacattgtgtttcaaaattgcat

SEQ ID NO: 39676 - DNA, 80 bp, synthetic construct
  source 1..80: mol_type = other DNA
gatgccaggctttatgatgtcattgaatccatccgaaggttatgtgacgaccttgggatcaataacagggtagcatctgc

SEQ ID NO: 39677 - DNA, 80 bp, synthetic construct
  source 1..80: mol_type = other DNA
agccatggctacttttaaagatgcttgttatcattataaaagaattaacaaattgaatcatacagtcttaaaattagggg

SEQ ID NO: 39678 - DNA, 80 bp, synthetic construct
  source 1..80: mol_type = other DNA
catcacaagaaaagatatatgaatatgtaaaaaatgttctgaacgtgtgtgataccgaaaaatgggaaacatcaataacg

SEQ ID NO: 39679 - DNA, 80 bp, synthetic construct
  source 1..80: mol_type = other DNA
gaaatctttaactatctagaaccagtggaccttgatgatgttaagtatgttttatttaatcatgaaataaactgggatgt

SEQ ID NO: 39680 - DNA, 80 bp, synthetic construct
  source 1..80: mol_type = other DNA
attaatgtattggttaatagtattggtaaagtaccacaaatattaactttaaaaaatgttcttacaattatgcaatctat

SEQ ID NO: 39681 - DNA, 80 bp, synthetic construct
  source 1..80: mol_type = other DNA
cgattgcatgcagaatcaaagactgttgaatatgattctggcgtatctgacgttgaatagagaaaaagaaaggtcgtatt

SEQ ID NO: 39682 - DNA, 80 bp, synthetic construct
  source 1..80: mol_type = other DNA
tggcgtatctgacgttgaatagagaaaaagaaaggtcgtatttgccaccacaagactccctgcactagagtagcgcctag

SEQ ID NO: 39683 - DNA, 80 bp, synthetic construct
  source 1..80: mol_type = other DNA
tagatggtgacgtttattacgtatttggatactatgataacatgaatagtattaatcagactccattctcattcacgaac

SEQ ID NO: 39684 - DNA, 80 bp, synthetic construct
  source 1..80: mol_type = other DNA
ttggtagatatatatgatagattgttacttgatgatataaattttgttagaatgtcattcttaccaacatctttacgaca

SEQ ID NO: 39685 - DNA, 80 bp, synthetic construct
  source 1..80: mol_type = other DNA
agaatatgcacttagatatttttctaaatcaagatttattagcgaaaggaggaaatgtgttaatgattcgcatttttcaa

SEQ ID NO: 39686 - DNA, 80 bp, synthetic construct
  source 1..80: mol_type = other DNA
aatgaagtatgtaagcttgtcaaaaacatcagtacttattttgagatattaaaaatgtcacacgttgaattttatagtgt

SEQ ID NO: 39687 - DNA, 80 bp, synthetic construct
  source 1..80: mol_type = other DNA
ttccactagatgcagaatatttacacaacgtaaacttaaaatagtatctaattcaatcaaaccaaactacatagtctcga

SEQ ID NO: 39688 - DNA, 80 bp, synthetic construct
  source 1..80: mol_type = other DNA
atcataaagcatcagctactgaggtacacaattgcaaatggtgctcagttaataacagttatactgtgtggaatgatttt

SEQ ID NO: 39689 - DNA, 80 bp, synthetic construct
  source 1..80: mol_type = other DNA
gtcttaagggattaaataaaagtctaaaactaacaatcacacatgtgcatttacaacacaacgagacattagttttagac

SEQ ID NO: 39690 - DNA, 80 bp, synthetic construct
  source 1..80: mol_type = other DNA
atggcagaggagcaggcacgccatgtcaagaacggactggaatgcatccgggctctcaaagccgagcccatcggctcact

SEQ ID NO: 39691 - DNA, 80 bp, synthetic construct
  source 1..80: mol_type = other DNA
tgactctccttgatgatatcaaaggagccaacgatcttgccaagttccaccagatgctgatgaaaataataatgaagtag

SEQ ID NO: 39692 - DNA, 80 bp, synthetic construct
  source 1..80: mol_type = other DNA
tggaagccatggctacttttaaagacgcttgttatcaatataaaaaattaaacaaattaaataatgtagttttaaagtta

SEQ ID NO: 39693 - DNA, 80 bp, synthetic construct
  source 1..80: mol_type = other DNA
atatttaattttattagggctttagtgaaatcaaatctttatgtaggacattgttcttcagaagaaaagatatatgaatc

SEQ ID NO: 39694 - DNA, 80 bp, synthetic construct
  source 1..80: mol_type = other DNA
tattaagaatgttttaaacgtatgtaaagaaaatgaatggaacacgttggtaacggaaatatttaatcaattagatccaa

SEQ ID NO: 39695 - DNA, 80 bp, synthetic construct
  source 1..80: mol_type = other DNA
ggtaaagtaccaagaatattaactttaagtgacgttatttcgattttacgtataataatatatgattggcttgacataag

SEQ ID NO: 39696 - DNA, 80 bp, synthetic construct
  source 1..80: mol_type = other DNA
gtttatgagaaatactccaatgactacgctcacagttaataaattgaaacaattatatgaaaaggatagaactgcagaat

SEQ ID NO: 39697 - DNA, 80 bp, synthetic construct
  source 1..80: mol_type = other DNA
atgattcaggtatatccgatattgaataatttcagataaattatgttcgccaccatgagactctctgcactagagtagcg

SEQ ID NO: 39698 - DNA, 80 bp, synthetic construct
  source 1..80: mol_type = other DNA
gacttactgccaaggatgtttaatatatcatgtgtgcgaatggtgtagtcaatatagcagatgctttcttgataatgatc

SEQ ID NO: 39699 - DNA, 80 bp, synthetic construct
  source 1..80: mol_type = other DNA
cgcatttactaagaatgcgaacttttagaaatgaaatcacaaagagtgacctagaaaatttaattaatatgtatgatgca

SEQ ID NO: 39700 - DNA, 80 bp, synthetic construct
  source 1..80: mol_type = other DNA
ttatttcctataaatcaaaaaatagttaataagtttgcaaacacaattaaacaacataaatgtagaaatgagtatttaat

SEQ ID NO: 39701 - DNA, 80 bp, synthetic construct
  source 1..80: mol_type = other DNA
ctgctagatagcataaattttgacagaatggcatttttaccattaacattacaacaggagtatgcacttagatatttttc

SEQ ID NO: 39702 - DNA, 80 bp, synthetic construct
  source 1..80: mol_type = other DNA
aaaatcaagatttattactgaaagaaggaaatgtattgaactttcacatttttcagataatatattaactgatttacata

SEQ ID NO: 39703 - DNA, 80 bp, synthetic construct
  source 1..80: mol_type = other DNA
acccgaattttacattacaagtgattagaaattgcagtaatatgtcagttgaatggaataaagcatgtaatcttattagg

SEQ ID NO: 39704 - DNA, 80 bp, synthetic construct
  source 1..80: mol_type = other DNA
ggagctaatgatgtttggagaccttctactctaacaaaacgcaaaggatggtgcttagattgttgtcaacatacggactt

SEQ ID NO: 39705 - DNA, 80 bp, synthetic construct
  source 1..80: mol_type = other DNA
aatataagtaattatttcaatatattcaaatcatcacatacagagtcttataatgtatctcctagatgtagagtattcac

SEQ ID NO: 39706 - DNA, 80 bp, synthetic construct
  source 1..80: mol_type = other DNA
tacgcaattgcaaatggtgttcaattaataataattctattgtattgactgatttcagaattaaaaatgtttatgatgat

SEQ ID NO: 39707 - DNA, 80 bp, synthetic construct
  source 1..80: mol_type = other DNA
tcctaggcaatataaagaacccgaagaacagttattagaaaactacaatcaacatgatgaatttgatatcgattaagaca

SEQ ID NO: 39708 - DNA, 80 bp, synthetic construct
  source 1..80: mol_type = other DNA
tatcattttagtcttaagggattaaataaaagtctaaaactaacaatcacacatgtgcatttacaacaagaccagacatt

SEQ ID NO: 39709 - DNA, 80 bp, synthetic construct
  source 1..80: mol_type = other DNA
gaaaatgtcgtccgtgctcaaagcatttgagcgattcacgatagaacaggaacttcaagacaggggtgaggagggttcaa

SEQ ID NO: 39710 - DNA, 80 bp, synthetic construct
  source 1..80: mol_type = other DNA
aacttcacaactttcatctattaaccatctcacttacactttccaagtggattcctattttatagttatataaaacaatt

SEQ ID NO: 39711 - DNA, 80 bp, synthetic construct
  source 1..80: mol_type = other DNA
gcgtactacaaacttgcacactcgaaaaaaatggggcaaataagaatttgataagtgctatttaagtctaacctttttaa

SEQ ID NO: 39712 - DNA, 80 bp, synthetic construct
  source 1..80: mol_type = other DNA
aagggaactgagacctatatatcccgagatatgcagttcatgagcaaaacaatccagcacaatggagtgtactatccagc

SEQ ID NO: 39713 - DNA, 80 bp, synthetic construct
  source 1..80: mol_type = other DNA
cagtatcaaaaaagtcctgagagtaggtccatggataaatacaatacttgatgattttaaagttagtttagaatctatag

SEQ ID NO: 39714 - DNA, 80 bp, synthetic construct
  source 1..80: mol_type = other DNA
gtgcgcagcactatactaccactgagattgatctaaatgacattatgcaaaatatagaaccaacttaccctcatggatta

SEQ ID NO: 39715 - DNA, 80 bp, synthetic construct
  source 1..80: mol_type = other DNA
atcccacatcaactctaatttaatattagtacataaaatgtctgattattttcataatgcgtatattttaagtactaatt

SEQ ID NO: 39716 - DNA, 80 bp, synthetic construct
  source 1..80: mol_type = other DNA
tgctaacacatcattatattatagttattaaaaaatatgcaaacttttcaataatttagcatattgattccaaaattatc

SEQ ID NO: 39717 - DNA, 80 bp, synthetic construct
  source 1..80: mol_type = other DNA
attttagtcttaagggattaaataaaagtctaaaactaacaattacacatgtgtatttacaacacaacgagacattagtt

SEQ ID NO: 39718 - DNA, 80 bp, synthetic construct
  source 1..80: mol_type = other DNA
gatcccgcatcactaacaatatgggtgcctatgttccagtcatctgtgccagcagacttgctcataaaagaacttgcaag

SEQ ID NO: 39719 - DNA, 80 bp, synthetic construct
  source 1..80: mol_type = other DNA
catcaacatactagtaaagcagatctctacgcccaaaggaccttcactacgagtcacgatcaactcaagaagtgctgtgc

SEQ ID NO: 39720 - DNA, 80 bp, synthetic construct
  source 1..80: mol_type = other DNA
gctatcaccaatgctaaaattattccctatgcaggattagtattggttatcacggttactgataataaaggagcattcaa

SEQ ID NO: 39721 - DNA, 80 bp, synthetic construct
  source 1..80: mol_type = other DNA
atatatcaagccacagagtcaatttatagtggatcttggtgcctacctagaaaaagagagcatatattatgtgactacta

SEQ ID NO: 39722 - DNA, 80 bp, synthetic construct
  source 1..80: mol_type = other DNA
tcagaaatggggtgcaattcactgagcatgataaaggttagattacaaaatttatttgacaatgacgaagtagcattgtt

SEQ ID NO: 39723 - DNA, 80 bp, synthetic construct
  source 1..80: mol_type = other DNA
agcaagtatgtaagagaaagatcttggtcattatccaatatagtaggagtaacatcgccaagtattatgttcacaatgga

SEQ ID NO: 39724 - DNA, 80 bp, synthetic construct
  source 1..80: mol_type = other DNA
aacttgcacactcgaaaaaaatggggcaaataagaatttgataagtgctatttaagtctaacctttttaatcagaaatgg

SEQ ID NO: 39725 - DNA, 80 bp, synthetic construct
  source 1..80: mol_type = other DNA
agcaatagaaaaaacagcaagcaaaccatccatctgcttaaacgattaccagcagacgtgctgaagaagacaataaagaa

SEQ ID NO: 39726 - DNA, 80 bp, synthetic construct
  source 1..80: mol_type = other DNA
atacgaagagctatagaaataagtgatgtaaaggtgtacgccatcttgaataaactaggacttaaggaaaaggacagagt

SEQ ID NO: 39727 - DNA, 80 bp, synthetic construct
  source 1..80: mol_type = other DNA
ctcactaccaagcctacaggaaagtcaaccatcaacaccaccaaaacaaacatcagaactacaccgctcatctctaacac

SEQ ID NO: 39728 - DNA, 80 bp, synthetic construct
  source 1..80: mol_type = other DNA
caaaggaaatccagaacacacaagccaaaaggaaaccctccactcaaccacctccaaaggctatccaagcccatcacaag

SEQ ID NO: 39729 - DNA, 80 bp, synthetic construct
  source 1..80: mol_type = other DNA
atgagtttattaattaatagtatcgtagaagtaccaagaatattacctttgagtgacattatttcgattttccgtataat

SEQ ID NO: 39730 - DNA, 80 bp, synthetic construct
  source 1..80: mol_type = other DNA
ggatagaactgcagaatatgattcaggtatatccgatgttgaataatttcagagaaattatgttcgccaccatgagactc

SEQ ID NO: 39731 - DNA, 80 bp, synthetic construct
  source 1..80: mol_type = other DNA
ggcttttttaatggaaagtcttgtggaagccatggccgcttttaaaggcgcgtgttatcaatataaaaaattaaacaaat

SEQ ID NO: 39732 - DNA, 80 bp, synthetic construct
  source 1..80: mol_type = other DNA
aggattaaaaatgtttataatgatatatttaattttattagggctttagtgaaatcaaatctttatgtaggacactgtcc

SEQ ID NO: 39733 - DNA, 80 bp, synthetic construct
  source 1..80: mol_type = other DNA
aaatatccaatcaattagatcaaataaagttaagtgatgagagcttgtttgtgattgataatgaaataaaatggaatgtt

SEQ ID NO: 39734 - DNA, 80 bp, synthetic construct
  source 1..80: mol_type = other DNA
aaatattcaatcaattagatccaataaggttgaatgagcagagctatgtttttgtgaattatgaaataaaatggaatgtt

SEQ ID NO: 39735 - DNA, 80 bp, synthetic construct
  source 1..80: mol_type = other DNA
aagcatcctggaaggggaaagaggacggagggaacaaaaggtgcgggcctcccgatccgaggggcccaactacccgattg

SEQ ID NO: 39736 - DNA, 80 bp, synthetic construct
  source 1..80: mol_type = other DNA
ggaccccttcagcgaacagagagctctgagccgcgaggagttagagcgtagcaagggggagatgctaggagttagaggag

SEQ ID NO: 39737 - DNA, 80 bp, synthetic construct
  source 1..80: mol_type = other DNA
actccgctttattcactggggtcgacaactctgtggagaaaagggaggatcggcaggaaagagtagatcccatgggaatc

SEQ ID NO: 39738 - DNA, 80 bp, synthetic construct
  source 1..80: mol_type = other DNA
gagagcactccggcccgaagggttgagagtaccccagagggagaaatccacacggagaaaggagacaaatcacctccaga

SEQ ID NO: 39739 - DNA, 80 bp, synthetic construct
  source 1..80: mol_type = other DNA
taggaattcctagacaatataaagaaaccgaagaacagttattagaaaactacaatcaacatgatgaatttgatatcgat

SEQ ID NO: 39740 - DNA, 80 bp, synthetic construct
  source 1..80: mol_type = other DNA
ctgaattaagcaaatatgttagagaaagatcttggtctttatccaatatagttggtgttacatcacccagtatcatgtat

SEQ ID NO: 39741 - DNA, 80 bp, synthetic construct
  source 1..80: mol_type = other DNA
tagaaacatttgataacaatgaagaagaatctagctattcatatgaagaaataaatgatcagacaaacgataatataaca

SEQ ID NO: 39742 - DNA, 80 bp, synthetic construct
  source 1..80: mol_type = other DNA
caaccaaacatccatctgctgatcagccaaccagccaaaaaaacaaccagccaatctaaaactagccaaccggaaaaaat

SEQ ID NO: 39743 - DNA, 80 bp, synthetic construct
  source 1..80: mol_type = other DNA
gaagtggtgttttgcgatttcgaggccgggctcgatcctcacctttcattgtcgataggggacattttgacactaccttg

SEQ ID NO: 39744 - DNA, 80 bp, synthetic construct
  source 1..80: mol_type = other DNA
cgatacatcaccaaaaggtgccacaccagtatccaaactcctctagaccgcacacgacctcgaacaatcacaaccacatc

SEQ ID NO: 39745 - DNA, 80 bp, synthetic construct
  source 1..80: mol_type = other DNA
tccatacaacatctggtcaagaggataccctccactcaactacccccgaaggctatctaagcccatcacaaatccataca

SEQ ID NO: 39746 - DNA, 80 bp, synthetic construct
  source 1..80: mol_type = other DNA
gaggacctactaagccatgggtaggttcatctacacaggagaaaaaaacaatgccagtgtacaatagacaagttttaacc

SEQ ID NO: 39747 - DNA, 80 bp, synthetic construct
  source 1..80: mol_type = other DNA
tttaatcagaaatggggtgcagttcactgagcatgataaaggttagattacaaaatttgtttgataatgacgaagtagca

SEQ ID NO: 39748 - DNA, 80 bp, synthetic construct
  source 1..80: mol_type = other DNA
ttagaaaactacaatcaacatgatgaatttgatatcgattaagacacaaatacaataaagatatatctgaaccattatct

SEQ ID NO: 39749 - DNA, 80 bp, synthetic construct
  source 1..80: mol_type = other DNA
actgcatggggtgcaatctctattctcttggttgcatttaacaatacctcttgtcacaataatatgtacatatagacatg

SEQ ID NO: 39750 - DNA, 80 bp, synthetic construct
  source 1..80: mol_type = other DNA
aataaaagtctaaaactaacaatcacacatgtgcatttacaacacaacgagacattagtttttgacactttttttctcgt

SEQ ID NO: 39751 - DNA, 80 bp, synthetic construct
  source 1..80: mol_type = other DNA
aaactacaatcaacatgatgaatttgatatcgattaagacacaaatacaatagagatacatcctaacctttatccccaaa

SEQ ID NO: 39752 - DNA, 80 bp, synthetic construct
  source 1..80: mol_type = other DNA
aaatagtgtaagaaacagtaagcccggaagtggtgttttgcgatttcgaggccgggctcgatcctcaccttctattgtcg

SEQ ID NO: 39753 - DNA, 80 bp, synthetic construct
  source 1..80: mol_type = other DNA
tggcacaatacaccaccagaaggtgccacaccagcacccaaagtcctctagaccgcacgcgacctcgacaaatcagaacc

SEQ ID NO: 39754 - DNA, 80 bp, synthetic construct
  source 1..80: mol_type = other DNA
tggcacgatacgtcaccaacaggtgccacaccggcatcaaaactcctctagaccgcacacgacctcgaacaatcacaacc

SEQ ID NO: 39755 - DNA, 80 bp, synthetic construct
  source 1..80: mol_type = other DNA
ttatgattccggcatatctgacgttgaataataaaatagaggtcacatttgccaccacaagactccctgcactagagtag

SEQ ID NO: 39756 - DNA, 80 bp, synthetic construct
  source 1..80: mol_type = other DNA
aagcccggaagtggtgttttgcgatttcgaggccgggctcgatcctcaccttccattgtcgataggggacattttgacac

SEQ ID NO: 39757 - DNA, 80 bp, synthetic construct
  source 1..80: mol_type = other DNA
cacaccagcatccaaattcctctagaccgcacacgacctcgagcaatcacaaccacatcagtattaaatccataatatca

SEQ ID NO: 39758 - DNA, 80 bp, synthetic construct
  source 1..80: mol_type = other DNA
cagaggaccccttcagcgaacagagagctctgacgcgcgaggagtaagagcgtagcgataggaggggatgctaggagtag

SEQ ID NO: 39759 - DNA, 80 bp, synthetic construct
  source 1..80: mol_type = other DNA
gaggcgaccgaagcgaggaggaaagcaaagaaagcaacggggctagccggtaggtgttccgcctcccgagaggggacgag

SEQ ID NO: 39760 - DNA, 80 bp, synthetic construct
  source 1..80: mol_type = other DNA
tttggagagcacttcgggccgaagggttgagctctccccagagggagggagccacacggagaaagcagacaaaccacctc

SEQ ID NO: 39761 - DNA, 80 bp, synthetic construct
  source 1..80: mol_type = other DNA
gtaagaaacagtaagcccggaagtggtgttttgcgatttcgagaccgggctcgatcctcaccctccattgtcgatagggg

SEQ ID NO: 39762 - DNA, 80 bp, synthetic construct
  source 1..80: mol_type = other DNA
gtgccacaccagcattcaaattcttctagaccgcacacgacctcgaacaatcataaccacatcagtattaaatccatatt

SEQ ID NO: 39763 - DNA, 80 bp, synthetic construct
  source 1..80: mol_type = other DNA
agcatatcaatccagaatctacattagaattaattagatatcctgaaagtaacgaatttatttatgataaagacccgctc

SEQ ID NO: 39764 - DNA, 80 bp, synthetic construct
  source 1..80: mol_type = other DNA
gtgccacaccggcgtcaaaactcctctaaaccgcacacgacctcgaacaatcacaaccacatcagtattaaatccataat

SEQ ID NO: 39765 - DNA, 80 bp, synthetic construct
  source 1..80: mol_type = other DNA
gtcaaatagaagaagtcaaaacaaaaagcatagaacaccagatcaacaagatcaaaacatccaactaactcaaaataaaa

SEQ ID NO: 39766 - DNA, 80 bp, synthetic construct
  source 1..80: mol_type = other DNA
tgttgaatatgattctggcgtatctgacgttgaatagagaaaaagaaaggtcgtatttgccaccacaagactccctgcac

SEQ ID NO: 39767 - DNA, 80 bp, synthetic construct
  source 1..80: mol_type = other DNA
ccatggcgacttttaaagatgcttgctatcattatagaaggttaaataagttaaataatttagtgctcaaactaggagca

SEQ ID NO: 39768 - DNA, 80 bp, synthetic construct
  source 1..80: mol_type = other DNA
aacatgatggactttgttagagcgcttgcaaagtcaaacggaaacgttggacactgttcgtcacaagaattagtatgcga

SEQ ID NO: 39769 - DNA, 80 bp, synthetic construct
  source 1..80: mol_type = other DNA
atgtatcccggatatatttctcatttgtgaaatggaaaaatggaatggagctgttagaacgttgtttagatatctggaac

SEQ ID NO: 39770 - DNA, 80 bp, synthetic construct
  source 1..80: mol_type = other DNA
cagtggatataaatggagaggaatatgtgctattggactatgaagtgaactgggaagtgaggggactgattatgcaaaac

SEQ ID NO: 39771 - DNA, 80 bp, synthetic construct
  source 1..80: mol_type = other DNA
atggatggaagagtgccaaggatcttgaatatggatggtgtaaagaaaatactaagcgcaataatatttgattggtttga

SEQ ID NO: 39772 - DNA, 80 bp, synthetic construct
  source 1..80: mol_type = other DNA
cataagatatatgagagaaacaccgttgacaacgttaacgacaaaccaacttcgaacactgaataggaagaatgagctca

SEQ ID NO: 39773 - DNA, 80 bp, synthetic construct
  source 1..80: mol_type = other DNA
tagacgagtacgacttgcaactttcagatgttgagtaaatgtggtcataactgcgccaacacaaggctctctgcactaga

SEQ ID NO: 39774 - DNA, 80 bp, synthetic construct
  source 1..80: mol_type = other DNA
gacttgcaactttcagatgttgagtaaatgtggtcataactgcgccaacacaaggctctctgcactagagtagcgcctag

SEQ ID NO: 39775 - DNA, 80 bp, synthetic construct
  source 1..80: mol_type = other DNA
ttttgagaatgcgaacatttaagaatgtagtgacaaaagaagacatagagggattgttgacaatgtatgaaacgctgttt

SEQ ID NO: 39776 - DNA, 80 bp, synthetic construct
  source 1..80: mol_type = other DNA
ccaataaacgaaaaattagtgaacaaattcacagacgtcgtgaaacaacgtaaatgtagaaatgaatatttgctagagtg

SEQ ID NO: 39777 - DNA, 80 bp, synthetic construct
  source 1..80: mol_type = other DNA
gtacaatcatttactaatgccaataacgttacaagcattaactataaaacttgaggataacatatattatatatttggat

SEQ ID NO: 39778 - DNA, 80 bp, synthetic construct
  source 1..80: mol_type = other DNA
attatgactgtatggaacatgagaatcaaacgccattccagtttattaatctgttagagaagtatgataggttgttgttg

SEQ ID NO: 39779 - DNA, 80 bp, synthetic construct
  source 1..80: mol_type = other DNA
gatgatagaaattttaataggatgtcatacctaccaacaatactacagcaggaatatgcattaagatacttttcaaaatc

SEQ ID NO: 39780 - DNA, 80 bp, synthetic construct
  source 1..80: mol_type = other DNA
aaggtttttaagtaaaaaaaagaaaagattgagcaggaacgatttttcagacaatcttatggaggacaaacatagtccaa

SEQ ID NO: 39781 - DNA, 80 bp, synthetic construct
  source 1..80: mol_type = other DNA
tatcgttaatacaagtgatacgcagttgcactagcacacacatggatgatagtgaatggaataaagcgtgtgcacttata

SEQ ID NO: 39782 - DNA, 80 bp, synthetic construct
  source 1..80: mol_type = other DNA
gtcgatcctaaaaactatgttgacattataaactcctcatacactgaacattacagcgtttcacaaagatgcagattgtt

SEQ ID NO: 39783 - DNA, 80 bp, synthetic construct
  source 1..80: mol_type = other DNA
tactaaatataaacttgggattgtatcaaaactagtaagaccgaattacattttctccagtcacgaatcgtgcgcattaa

SEQ ID NO: 39784 - DNA, 80 bp, synthetic construct
  source 1..80: mol_type = other DNA
atgtacataattgtaaatggtgtcagacaacaaaccattataaagtatgggacgatttcaggctcaagaaaatatataat

SEQ ID NO: 39785 - DNA, 80 bp, synthetic construct
  source 1..80: mol_type = other DNA
ccatggcgacttttaaagacgcttgttatcactataaaaaattgaataagttaaatagcttagtgctcaaactaggagta

SEQ ID NO: 39786 - DNA, 80 bp, synthetic construct
  source 1..80: mol_type = other DNA
aatgtaatggattttaccagggcacttgtgaaatcgaatggaaatgttggacattgttcatcacaggaatcagtgtatga

SEQ ID NO: 39787 - DNA, 80 bp, synthetic construct
  source 1..80: mol_type = other DNA
gtatataccagatttatttttaatttgtaaaacggaaaaatggaacgaagctgtcgaaatgttatttaactatctagaac

SEQ ID NO: 39788 - DNA, 80 bp, synthetic construct
  source 1..80: mol_type = other DNA
cagtggacataaatggaacggagtatgtattattagactatgaattgaactgggaagtgaggggactagtcatgcaaaac

SEQ ID NO: 39789 - DNA, 80 bp, synthetic construct
  source 1..80: mol_type = other DNA
atggatgggaaagtaccaagaattttgagtataaatgatacaaagaagatactgagtgtaatgatatttgactggttcga

SEQ ID NO: 39790 - DNA, 80 bp, synthetic construct
  source 1..80: mol_type = other DNA
cacaagatatatgagagaaacgccaatgacgacgtcaacaacaaaccaacttcgaatgctgaacaagaggaatgagctca

SEQ ID NO: 39791 - DNA, 80 bp, synthetic construct
  source 1..80: mol_type = other DNA
tagatgagtacgatttggaattttcagatgttgagtaaatatggtcacaactacgccagcacaagaccgtctgcactaga

SEQ ID NO: 39792 - DNA, 80 bp, synthetic construct
  source 1..80: mol_type = other DNA
gatttggaattttcagatgttgagtaaatatggtcacaactacgccagcacaagaccgtctgcactagagtagcgcctag

SEQ ID NO: 39793 - DNA, 80 bp, synthetic construct
  source 1..80: mol_type = other DNA
ttgcagagggtgctctttataccatgtatgtcagtggtgcagtcagtataacaggtgtttcttagatgaagaaccccatt

SEQ ID NO: 39794 - DNA, 80 bp, synthetic construct
  source 1..80: mol_type = other DNA
tgctgagaatgcgaacatttaaagatatagtaacaaaggaagatatagaaggactgctaactatgtatgaaacgctgttt

SEQ ID NO: 39795 - DNA, 80 bp, synthetic construct
  source 1..80: mol_type = other DNA
ccaataaatgaaaagttagtgaataaattcataaactctgtaaagcagcgtaagtgtagaaatgaatatttgctagagtg

SEQ ID NO: 39796 - DNA, 80 bp, synthetic construct
  source 1..80: mol_type = other DNA
gtataaccacttgctaatgccaataacattgcaagcactgactataaatcttgaggataatgtatattacatatttggat

SEQ ID NO: 39797 - DNA, 80 bp, synthetic construct
  source 1..80: mol_type = other DNA
actatgattacatggagtatgaaaatcaaacgccattccaattcattaatctactagaaaaatatgataaattactacta

SEQ ID NO: 39798 - DNA, 80 bp, synthetic construct
  source 1..80: mol_type = other DNA
gatgatagaaatttccatagaatgtcgcacttaccagtaatattgcaacaagagtatgcgttgagatatttttcaaaatc

SEQ ID NO: 39799 - DNA, 80 bp, synthetic construct
  source 1..80: mol_type = other DNA
aagatttttaagtaaagggaagaaaagcttgagcaggagtgatttctcagataatcttatggaagatagacatagtccga

SEQ ID NO: 39800 - DNA, 80 bp, synthetic construct
  source 1..80: mol_type = other DNA
catcattaattcaagtggtacgtaattgcgtcagtgtacacataaatgattgtgaatggaataaggcgtgtacgcttata

SEQ ID NO: 39801 - DNA, 80 bp, synthetic construct
  source 1..80: mol_type = other DNA
aatgatgaatggagaccagcaccagtgacaaaatataaaggatggtgtttagattgttgtcaatatacgaatttgacata

SEQ ID NO: 39802 - DNA, 80 bp, synthetic construct
  source 1..80: mol_type = other DNA
gttgatgctagaaattatattaatattatgaactcatcgtatactgagcattacagtgtatcacaaagatgtaaattgtt

SEQ ID NO: 39803 - DNA, 80 bp, synthetic construct
  source 1..80: mol_type = other DNA
tactaagtataaatttgggattgtatcaagattggtgaaaccaaattacattttttctagccatgaatcatgcgcgttaa

SEQ ID NO: 39804 - DNA, 80 bp, synthetic construct
  source 1..80: mol_type = other DNA
atgtacataattgtaaatggtgtcaaaccaacagccattacaaagtgtgggaagactttagacttaggaaaatatataat

SEQ ID NO: 39805 - DNA, 80 bp, synthetic construct
  source 1..80: mol_type = other DNA
cgacaattgaagaccttgtccacacgtttgggtatccatcatgtttaggagctatcatccctggacagaaaaatactgtc

SEQ ID NO: 39806 - DNA, 80 bp, synthetic construct
  source 1..80: mol_type = other DNA
gaaggtcaagaaaagggaaccctacaatttcaaaaatgttgagcctatttgatacatttaatgcacgtaggcaagaaaac

SEQ ID NO: 39807 - DNA, 80 bp, synthetic construct
  source 1..80: mol_type = other DNA
aaaattacaatcaacatgatgaatttgatatcgattaagacacaaatacaatagagatatatcgtaacctttatctttga

SEQ ID NO: 39808 - DNA, 80 bp, synthetic construct
  source 1..80: mol_type = other DNA
acatgatgaatttgatatcgattaagacacaaatacaataaagatatatctgaacccttatcttcaagcctaaggataga

SEQ ID NO: 39809 - DNA, 80 bp, synthetic construct
  source 1..80: mol_type = other DNA
ttaagacacaaatacaataaagatatatctgaacccttatctccaagcctaaggatagacaaaaagtaagaaaaacatgt

SEQ ID NO: 39810 - DNA, 80 bp, synthetic construct
  source 1..80: mol_type = other DNA
tatcgattaagacacaaatacaatagagatatatcttaacctttatccccaagcctaaggatagataaaaagtaagaaaa

SEQ ID NO: 39811 - DNA, 80 bp, synthetic construct
  source 1..80: mol_type = other DNA
atcaagagataaatcaactaatatctcctcggccctcaacatcattgaattcatactcagcaccgacccccaagaagacc

SEQ ID NO: 39812 - DNA, 80 bp, synthetic construct
  source 1..80: mol_type = other DNA
gtcaaatagaataaatcaaaacaaaacgcatagaacaccagaacaacaagataaaaaaatccaattcactcaaaacaaaa

SEQ ID NO: 39813 - DNA, 80 bp, synthetic construct
  source 1..80: mol_type = other DNA
cattatacatgcaatttcaatatgtactgcaattacaatagcagatactatgtcacaattggatcgagataatctaaaag

SEQ ID NO: 39814 - DNA, 80 bp, synthetic construct
  source 1..80: mol_type = other DNA
atttctcgggtatggaggtcttgaacatccaataaatgagaatgcaatctgcaacacaactgggtgtcctgggaaaacac

SEQ ID NO: 39815 - DNA, 80 bp, synthetic construct
  source 1..80: mol_type = other DNA
caagacatggtttaccatcaagtatgatatgaggagactacaaaaagctcgaaatgaggtcacctttaatatgggaaaag

SEQ ID NO: 39816 - DNA, 80 bp, synthetic construct
  source 1..80: mol_type = other DNA
aatggttatctaattactcctgaattagtattgatgtattgtgacgtaatcgaaggccgatggaatataagtgcatgcgc

SEQ ID NO: 39817 - DNA, 80 bp, synthetic construct
  source 1..80: mol_type = other DNA
tttttagaacatttgggcatcctccattagaggctagtattgcagcagaaaaggttagaaaatatatgtatattgagaaa

SEQ ID NO: 39818 - DNA, 80 bp, synthetic construct
  source 1..80: mol_type = other DNA
aaaagtcttgtggaagccatggctacttttaaagacgcttgctatcaatataaaaaattaaacaaattaaataatgcagt

SEQ ID NO: 39819 - DNA, 80 bp, synthetic construct
  source 1..80: mol_type = other DNA
acacggacttgacttactgccaaggatgtttaatatatcacgtttgtgaatggtgtagtcaatatagcagatgctttctt

SEQ ID NO: 39820 - DNA, 80 bp, synthetic construct
  source 1..80: mol_type = other DNA
gataatgatccgcatttactaagaatgcgaacttttagaaatgaaatcacaaagagtgacttagaaaacttaattaatat

SEQ ID NO: 39821 - DNA, 80 bp, synthetic construct
  source 1..80: mol_type = other DNA
gtatgaaacattatttcctataaatcaaaaaatagttaataagtttgcaaacacagtcaaacaacataaatgtagaaatg

SEQ ID NO: 39822 - DNA, 80 bp, synthetic construct
  source 1..80: mol_type = other DNA
tttaaagttaggagctaacgatgtttggagaccttctactctaacaaaatgtaaaggatggtgcttagattgttgtcaac

SEQ ID NO: 39823 - DNA, 80 bp, synthetic construct
  source 1..80: mol_type = other DNA
aaaatcaaacaatggaattaataatctttattttgatctagatatacccactaagttagagcaaattaaggataatcaaa

SEQ ID NO: 39824 - DNA, 80 bp, synthetic construct
  source 1..80: mol_type = other DNA
gaatttgatatcgattaagacacaaatacaatagagatatatcttaacctttatccccaagcctaaagatagataaaaag

SEQ ID NO: 39825 - DNA, 80 bp, synthetic construct
  source 1..80: mol_type = other DNA
aagaaaagggaactctacaatttcaaaaatgttgagcctatttgatacatttaatgcacgtaggcaagaaaacataacaa

SEQ ID NO: 39826 - DNA, 80 bp, synthetic construct
  source 1..80: mol_type = other DNA
attggtagaacaaatagtgtaagaaacagtaagcccggaagtggtgttttgcgatttcgaggccgggctcgatcctcacc

SEQ ID NO: 39827 - DNA, 80 bp, synthetic construct
  source 1..80: mol_type = other DNA
ttaaaacataaatacaataaagatatatcctaacctttatctttaagcctattgatagataaaaagtaagaaaaacatgt

SEQ ID NO: 39828 - DNA, 80 bp, synthetic construct
  source 1..80: mol_type = other DNA
agtcgagaaatcaaaacaaaaggtacaaaatacccgaacaaaaaaatcaaaacatccaatccattctaaataaaaattct

SEQ ID NO: 39829 - DNA, 80 bp, synthetic construct
  source 1..80: mol_type = other DNA
gggtcagaaggaaggttacttctattaggtaacaagatctatatatatacgagatccacaagttggcatagcaagttaca

SEQ ID NO: 39830 - DNA, 80 bp, synthetic construct
  source 1..80: mol_type = other DNA
tacaatcaacacgatgaatttgacatcgattaaaacataaatacaataaagatatatcctaacctttatctttaagccta

SEQ ID NO: 39831 - DNA, 80 bp, synthetic construct
  source 1..80: mol_type = other DNA
agtcaaacaagagaaatcaaaacaaaaggtacagaacacccgaacaaaaaaatcgaaacatccaatccatcctaaacaaa

SEQ ID NO: 39832 - DNA, 80 bp, synthetic construct
  source 1..80: mol_type = other DNA
aattccaaaagagaccggcaacacaacaagcatcaaacacaatgccaacttcaatactgctaattattacaacaatgatc

SEQ ID NO: 39833 - DNA, 80 bp, synthetic construct
  source 1..80: mol_type = other DNA
gagcagtcaaattatttggggcaagacaaagcacatctgctgatatcactaatattgatacatctgactccatacagtga

SEQ ID NO: 39834 - DNA, 80 bp, synthetic construct
  source 1..80: mol_type = other DNA
ataacacaatacagaatattagctgctatcacaactgtgttccggccactaagaaaatggagccctcgaaactatttata

SEQ ID NO: 39835 - DNA, 80 bp, synthetic construct
  source 1..80: mol_type = other DNA
atgttggacaatgccacctttgcacctggacctgttgttaatgcggctggtaagaagacattccgaacctgtttccgaat

SEQ ID NO: 39836 - DNA, 80 bp, synthetic construct
  source 1..80: mol_type = other DNA
atcaagcgagacattatacgaagcgccatatgaattcatcagaaataccggacccatggaagaactcataaactgaaagc

SEQ ID NO: 39837 - DNA, 80 bp, synthetic construct
  source 1..80: mol_type = other DNA
ctataacgctggagacatcctggaaggggaaagaggatggagggaaaagaaggcgcgggccccccgatccgaacggccca

SEQ ID NO: 39838 - DNA, 80 bp, synthetic construct
  source 1..80: mol_type = other DNA
ctctaacttctttcttccattcacccactgctcgagaacctcttctcttccccggtgacgaatcttcgattcggaacggc

SEQ ID NO: 39839 - DNA, 80 bp, synthetic construct
  source 1..80: mol_type = other DNA
ggaagcagaaaaatcacctccagaggaccccttcagcgaacagagagcgccagacgcgataggagtaagaccatagcgat

SEQ ID NO: 39840 - DNA, 80 bp, synthetic construct
  source 1..80: mol_type = other DNA
aatcacctccagaggaccccttcagcgaacagagagcgccagacgcgataggagtaagaccatagcgatggggggagatg

SEQ ID NO: 39841 - DNA, 80 bp, synthetic construct
  source 1..80: mol_type = other DNA
accaccaagtttggaaagcactccgggccgaatggtcgagtagcactcagagggaggaagccacacggaggaagcagaaa

SEQ ID NO: 39842 - DNA, 80 bp, synthetic construct
  source 1..80: mol_type = other DNA
aatgtcaaaagaaatgttcaaattacatatacccggcattaacagtaaagtgaccgaactattacttaaagcagatagaa

SEQ ID NO: 39843 - DNA, 80 bp, synthetic construct
  source 1..80: mol_type = other DNA
acaatagagatatatcttaacctttatccccaagcctaaagatagataaaaaataagaaaaacatgtaatatatatatac

SEQ ID NO: 39844 - DNA, 80 bp, synthetic construct
  source 1..80: mol_type = other DNA
atttatatgaaagataaagcattatctccaaaaaaatcaaactgggacaccgtttatcctgcatctaatttactgtatcg

SEQ ID NO: 39845 - DNA, 80 bp, synthetic construct
  source 1..80: mol_type = other DNA
atcaagcgagacatcataaggagcgcaatatgaattcgccaggaacaccagactaacgagaaaatccacaaactgaaagc

SEQ ID NO: 39846 - DNA, 80 bp, synthetic construct
  source 1..80: mol_type = other DNA
accaaggggaaaaagaagatgggatattgatagaacaaatagtgtaagaaacagtaagcccggaagtggtgttttgcgat

SEQ ID NO: 39847 - DNA, 80 bp, synthetic construct
  source 1..80: mol_type = other DNA
gaggatgacagattcgatcctattaaagagcttgagtatgtcaccagtggagaatatcttagggaccctgaattttgtgc

SEQ ID NO: 39848 - DNA, 80 bp, synthetic construct
  source 1..80: mol_type = other DNA
atcttactctctcaaagagaaggagataaaggctacaggtcgtatatttgcaaagatgacaaagagaatgagatcgtgcc

SEQ ID NO: 39849 - DNA, 80 bp, synthetic construct
  source 1..80: mol_type = other DNA
aagtaattgcggaatcattgttggccaatcatgcaggtaaattaatgagagagaatggagttgtcttagaccagttaaaa

SEQ ID NO: 39850 - DNA, 80 bp, synthetic construct
  source 1..80: mol_type = other DNA
ttgaccaagtctttgttaacgatgaaccaaattggtattatatcagagcacagccgaagatccaccgctgacaacatgac

SEQ ID NO: 39851 - DNA, 80 bp, synthetic construct
  source 1..80: mol_type = other DNA
tttggcacactccggttcaaataagcacagaattaataatagtcaattcaagaagaataaagacagtaaacatgagatgc

SEQ ID NO: 39852 - DNA, 80 bp, synthetic construct
  source 1..80: mol_type = other DNA
tgatgatgttatatcgaggtctcggagaacaagccagataccttgctttgttggaggctccccaaataatggactttgca

SEQ ID NO: 39853 - DNA, 80 bp, synthetic construct
  source 1..80: mol_type = other DNA
ctgatgatgggtttgagatagcagcctgctttcttacaactgacctcacaaaatactgcttaaattggaggtaccaagtc

SEQ ID NO: 39854 - DNA, 80 bp, synthetic construct
  source 1..80: mol_type = other DNA
atcatcccctttgcgcgtacattgaattcaatgtatggtgtaccccacctgttcgaatggatacatttgaggctaatgcg

SEQ ID NO: 39855 - DNA, 80 bp, synthetic construct
  source 1..80: mol_type = other DNA
aagcactctctatgttggtgatcccttcaatcccccatcagatcctactcaacttgaccttgatacagctctgaatgatg

SEQ ID NO: 39856 - DNA, 80 bp, synthetic construct
  source 1..80: mol_type = other DNA
atatatttatagtttctcctcgtggaggaatcgagggcttatgtcaaaaattatggactatgatttccatctcaacaatc

SEQ ID NO: 39857 - DNA, 80 bp, synthetic construct
  source 1..80: mol_type = other DNA
atattatccgcaactgaggcaaacactagagttatgagcatggttcagggtgacaaccaagcaattgcaatcaccactag

SEQ ID NO: 39858 - DNA, 80 bp, synthetic construct
  source 1..80: mol_type = other DNA
agtagtacgctcgctcagtcataccgagaagaaggagcaagcttataaagcaagtaaattgttctttgaaaggcttagag

SEQ ID NO: 39859 - DNA, 80 bp, synthetic construct
  source 1..80: mol_type = other DNA
ctaacaaccatggaattggacaccacttaaaagaacaagaaacaatccttagttctgatttcttcatatacagtaaaagg

SEQ ID NO: 39860 - DNA, 80 bp, synthetic construct
  source 1..80: mol_type = other DNA
gtgttttacaaaggtcgaattttgactcaagcattaaagaacgtgagcaagatgtgcttaacagctgatatactagggga

SEQ ID NO: 39861 - DNA, 80 bp, synthetic construct
  source 1..80: mol_type = other DNA
atgttcacaagcatcatgctccaatttagctactactgtaatgcgcctgactgagaatggagttgagaaagatttgtgtt

SEQ ID NO: 39862 - DNA, 80 bp, synthetic construct
  source 1..80: mol_type = other DNA
attttctaaatgcattcatgacaatcagacaattatgttatgatctagtatttccccaaactaaatctcttagtcaggac

SEQ ID NO: 39863 - DNA, 80 bp, synthetic construct
  source 1..80: mol_type = other DNA
cttagtcaggacatcactaatgcttatctgaaccatccaatacttatctcaagattgtgtctattaccatctcaattggg

SEQ ID NO: 39864 - DNA, 80 bp, synthetic construct
  source 1..80: mol_type = other DNA
cccgggggctacccattgatattcagttatgctatgggagtcggtacagtcctagatgtccaaatgcgaaattacactta

SEQ ID NO: 39865 - DNA, 80 bp, synthetic construct
  source 1..80: mol_type = other DNA
atcactaatgcttatctgaaccatccaatacttatctcaagattgtgtctattaccatctcaattggggggcctaaactt

SEQ ID NO: 39866 - DNA, 80 bp, synthetic construct
  source 1..80: mol_type = other DNA
tttttcatgtagtcgcctgttcaatagaaacataggagacccattagtgtctgcaattgctgatgtgaaacgattaatta

SEQ ID NO: 39867 - DNA, 80 bp, synthetic construct
  source 1..80: mol_type = other DNA
aggctggctgtctagacatctgggtcctgtataacatccttggaaggaggcctggaaaaggtaagtggagcactctggca

SEQ ID NO: 39868 - DNA, 80 bp, synthetic construct
  source 1..80: mol_type = other DNA
gctgatccttatactttaaacatagattatttagttccttcaacaacttttttaaagaagcatgcccaatatacattgat

SEQ ID NO: 39869 - DNA, 80 bp, synthetic construct
  source 1..80: mol_type = other DNA
ggaacggagtgttaatcccatgcttcgtggagtgttcagcgaaaatgcagctgaggaagaagaggaactcgcacagtatc

SEQ ID NO: 39870 - DNA, 80 bp, synthetic construct
  source 1..80: mol_type = other DNA
tattagatcgtgaggtggtcatgcccagggttgcacatgtgatacttgcccagtctagttgcggtagaagaaaacagatt

SEQ ID NO: 39871 - DNA, 80 bp, synthetic construct
  source 1..80: mol_type = other DNA
caaggttacttggattccactagaactattatcaggtattcactggaggtgagaccattgtcagcaaagaagctgaatac

SEQ ID NO: 39872 - DNA, 80 bp, synthetic construct
  source 1..80: mol_type = other DNA
agtaatagaatataatttattgtatctgtcctacaatttggaaattattgaaaagcccaatatagtccaaccttttttga

SEQ ID NO: 39873 - DNA, 80 bp, synthetic construct
  source 1..80: mol_type = other DNA
atgcaatcaatgttgatacttgtagcatcgatatcgctaggtcccttagaaaactatcctgggcaactttactcaatgga

SEQ ID NO: 39874 - DNA, 80 bp, synthetic construct
  source 1..80: mol_type = other DNA
cgtcccatcgagggattagaaacacctgatcccattgaattggtacatgggtgtttgataattgggtcagatgaatgtga

SEQ ID NO: 39875 - DNA, 80 bp, synthetic construct
  source 1..80: mol_type = other DNA
tgcacgacctttcttaaacggttattatttccagattggggttgagacagcacgacggcaacaaggcactgttgacaaca

SEQ ID NO: 39876 - DNA, 80 bp, synthetic construct
  source 1..80: mol_type = other DNA
gcattgcagtagtggtgatgacaaattcacctggtttttcctacccaaggggataaggctagataatgatccggcattca

SEQ ID NO: 39877 - DNA, 80 bp, synthetic construct
  source 1..80: mol_type = other DNA
acccacccatcagagtaccttatattggatctaaaacagatgagcggagggttgcatcaatggcttacatcaaaggagca

SEQ ID NO: 39878 - DNA, 80 bp, synthetic construct
  source 1..80: mol_type = other DNA
tctgtatcacttaaatcagcactcaggttagcgggagtatatatttgggctttcggagatacagaggaatcatggcagga

SEQ ID NO: 39879 - DNA, 80 bp, synthetic construct
  source 1..80: mol_type = other DNA
tgcctatgagttagcttccactcgtgttaatctcacactagagcaattgcaatctctcactcctttaccaacatctgcta

SEQ ID NO: 39880 - DNA, 80 bp, synthetic construct
  source 1..80: mol_type = other DNA
acctagtccacagattggatgatggcactactcaattaaaatttaccccggcaagctcctatgcattctctagctttgtt

SEQ ID NO: 39881 - DNA, 80 bp, synthetic construct
  source 1..80: mol_type = other DNA
catatatctaacgactgtcaagttcttgagatcgatgatcaggtaacagattctaacctaatttaccagcaagttatgat

SEQ ID NO: 39882 - DNA, 80 bp, synthetic construct
  source 1..80: mol_type = other DNA
tactggccttgccttaattgagacatggaacaatcctccaatcaacttctccgtttatgaaactacactacacttgcaca

SEQ ID NO: 39883 - DNA, 80 bp, synthetic construct
  source 1..80: mol_type = other DNA
caggctcatcttgctgtataagacctgtcgagtcttgtgtagtaaatcctcccttgcttcctgtccccttcattaatgtt

SEQ ID NO: 39884 - DNA, 80 bp, synthetic construct
  source 1..80: mol_type = other DNA
cctcaaatgaataaatttgtatatgaccctgaaccactcagtttgctggagatggaaaaaattgaggatattgcttatca

SEQ ID NO: 39885 - DNA, 80 bp, synthetic construct
  source 1..80: mol_type = other DNA
aaccagaattggtggtttagatcaaatcccacttctggaaaaaatacccttactagctcacctcactgccaagcagatgg

SEQ ID NO: 39886 - DNA, 80 bp, synthetic construct
  source 1..80: mol_type = other DNA
gagtagcagatgatctaggcctaactcctgaacagagaactgaggttactcagcttgttgacaggcttgcaaggggcaga

SEQ ID NO: 39887 - DNA, 80 bp, synthetic construct
  source 1..80: mol_type = other DNA
taaatagcatcactgggcttgatgaagcaacatctatagtgaatgatgctgtagttcaagcagactatactagcaattgg

SEQ ID NO: 39888 - DNA, 80 bp, synthetic construct
  source 1..80: mol_type = other DNA
attagtgaatgctgctacacttacattgattctgtgtttgtttactctggctgggcattattattagaactttcgtacca

SEQ ID NO: 39889 - DNA, 80 bp, synthetic construct
  source 1..80: mol_type = other DNA
aatgtactacttaaggattcaaggcatccaaggaattctagactatgtgtatatgaccttgaggaggataccaggaatgg

SEQ ID NO: 39890 - DNA, 80 bp, synthetic construct
  source 1..80: mol_type = other DNA
ctataacaggcatctcatccacaattagtcaccctcgtatactcagaagatgcatcaatttggatgtcatagccccaatc

SEQ ID NO: 39891 - DNA, 80 bp, synthetic construct
  source 1..80: mol_type = other DNA
aattctccacacatagcttcactggattacacaaaattgagcatagatgcagtgatgtggggaactaagcaggttttgac

SEQ ID NO: 39892 - DNA, 80 bp, synthetic construct
  source 1..80: mol_type = other DNA
caacatttcgcaaggtatcgattatgagatagttgttccttctgaaagccaactcacactcagtgatagagttctaaatc

SEQ ID NO: 39893 - DNA, 80 bp, synthetic construct
  source 1..80: mol_type = other DNA
tagttgctcgaaaattatcactactggcaatcatctgggccaattataactatcctccaaaggttaaaggtatgtcacct

SEQ ID NO: 39894 - DNA, 80 bp, synthetic construct
  source 1..80: mol_type = other DNA
gaagacaaatgtcaagctttaactacacatctactccaaactgtcgaatatgttgagcacattcagattgaaaagacaaa

SEQ ID NO: 39895 - DNA, 80 bp, synthetic construct
  source 1..80: mol_type = other DNA
catcaggaggatggttattgaaccaaaattaactgcctaccctagtaatttgttttatctatctcgaaagctgcttaatg

SEQ ID NO: 39896 - DNA, 80 bp, synthetic construct
  source 1..80: mol_type = other DNA
ctattcgagattctgaagaaggacaatttctgattgcatcctattataacagttttggatatctggaaccaatactaatg

SEQ ID NO: 39897 - DNA, 80 bp, synthetic construct
  source 1..80: mol_type = other DNA
ggcgcggggataccaggtgggcccgtgaatccttttgttcctcccgttcaacagcaacaacctgctgccgtatatgagga

SEQ ID NO: 39898 - DNA, 80 bp, synthetic construct
  source 1..80: mol_type = other DNA
gaatctaaaatattcaatctaagttcatccgaatcagcatctcttacagaattcgatttcatcctcaacttggaattgtc

SEQ ID NO: 39899 - DNA, 80 bp, synthetic construct
  source 1..80: mol_type = other DNA
tgaaaccagccttgagaaatactctctcccaagtttgcttatgacggctgagaatatggataatccatttcctcaacccc

SEQ ID NO: 39900 - DNA, 80 bp, synthetic construct
  source 1..80: mol_type = other DNA
cccttcatcatgttctcagaccactaggtttatcatccacctcatggtataaaacaatcagtgttttgaattatattagc

SEQ ID NO: 39901 - DNA, 80 bp, synthetic construct
  source 1..80: mol_type = other DNA
catatgaagatatatgacggtgcccatctatacttggcagagggaagtggagcctctatgtcacttatagagaccttctt

SEQ ID NO: 39902 - DNA, 80 bp, synthetic construct
  source 1..80: mol_type = other DNA
gcccggtgaaacaatatggtacaacagcctgttcaatagtggtgagaatcctccccaacgcaatttcgcccctttgccca

SEQ ID NO: 39903 - DNA, 80 bp, synthetic construct
  source 1..80: mol_type = other DNA
ctcagtttattgaaagtgtcccttacagattgattcaagcaggtatagcagcaggaagcggtgtagtgcaaagtttctat

SEQ ID NO: 39904 - DNA, 80 bp, synthetic construct
  source 1..80: mol_type = other DNA
ccactctggaacggtaacagcgatatcactgacttaagcacgaaaactagtgtcgaatatattatccacaaggtaggagc

SEQ ID NO: 39905 - DNA, 80 bp, synthetic construct
  source 1..80: mol_type = other DNA
tgatacatgtgcattggttcatgtggatttggagggtgtacccggttcaatgaacagcatgttggagagagcccaagtac

SEQ ID NO: 39906 - DNA, 80 bp, synthetic construct
  source 1..80: mol_type = other DNA
atgcgctactgatcacggtaactgtactaaagccaggtggcttactaatcttgaaagcttcatgggaaccttttaatcga

SEQ ID NO: 39907 - DNA, 80 bp, synthetic construct
  source 1..80: mol_type = other DNA
ttttcctttttactcacaatactctggcaattcttttccacaataaggatcctgcgatcctcatactccgacccgaataa

SEQ ID NO: 39908 - DNA, 80 bp, synthetic construct
  source 1..80: mol_type = other DNA
cattcctgcattggaggaatcagatgacgacggtgatgaagatggaggtgcaggattccaacatggagcacaagcaccag

SEQ ID NO: 39909 - DNA, 80 bp, synthetic construct
  source 1..80: mol_type = other DNA
tcacgaggtatacataatagctacattagcagttgatcccaccacatcctcctttacaactgctctgaatagggcgcgca

SEQ ID NO: 39910 - DNA, 80 bp, synthetic construct
  source 1..80: mol_type = other DNA
ccctgaatgaacagggcttttcactcatcccgcctgaattagtgagtgagtactggaggaggcgtgttgaacaagggcag

SEQ ID NO: 39911 - DNA, 80 bp, synthetic construct
  source 1..80: mol_type = other DNA
attatacaggatcgtatagataaagtcatatcagagtgtgtcagagaccaatatctggcagacaacaacattatccttca

SEQ ID NO: 39912 - DNA, 80 bp, synthetic construct
  source 1..80: mol_type = other DNA
ggcaggagggactccaagcacaagaaaatggttggatctacctgactatccgtcgttcaatgaattacaatcggagatgg

SEQ ID NO: 39913 - DNA, 80 bp, synthetic construct
  source 1..80: mol_type = other DNA
ccagactcataacaattcatctcaaagaggtaatagaaatcctaaagggccaatcatcagatcatgacaccctattattt

SEQ ID NO: 39914 - DNA, 80 bp, synthetic construct
  source 1..80: mol_type = other DNA
acttcatacaatgtaggtcccctcgggaaaataaacacaatactcagattgattgttgagagaattcttatgtacactgt

SEQ ID NO: 39915 - DNA, 80 bp, synthetic construct
  source 1..80: mol_type = other DNA
aaggaactggtgcatcttgcccacccaaactcgtctcaccttacgacaatctatcgagcttggagagtttagattaagag

SEQ ID NO: 39916 - DNA, 80 bp, synthetic construct
  source 1..80: mol_type = other DNA
acgtgataacacccatggagatccttaaactatcccccaacaggaaatatctgaagtctgcattaaaccaatcaacattc

SEQ ID NO: 39917 - DNA, 80 bp, synthetic construct
  source 1..80: mol_type = other DNA
aatcatctaatgggagaaacatctgacatattgttaaatcgagcctatcagaagagaatttggaaagccattgggtgtgt

SEQ ID NO: 39918 - DNA, 80 bp, synthetic construct
  source 1..80: mol_type = other DNA
aatctattgctttggtttgcttaccccggatgttgaagattccgagcgcattgatattgacaatgatatacctgattatg

SEQ ID NO: 39919 - DNA, 80 bp, synthetic construct
  source 1..80: mol_type = other DNA
ctgtaagacagggaggtcaaaatgactttagagcacagccgttacaggatccaattcaagcacagcttttcatgccatta

SEQ ID NO: 39920 - DNA, 80 bp, synthetic construct
  source 1..80: mol_type = other DNA
atatccacggggacataatttaaatcgaccaaagactcctctggcatgatacatcaccaaaaggtgccacaccagcatcc

SEQ ID NO: 39921 - DNA, 80 bp, synthetic construct
  source 1..80: mol_type = other DNA
aaattcttctagaccgcacacgacctcgaacaatcataaccacatcagtattaaatccataatatcattttaagaaaaaa

SEQ ID NO: 39922 - DNA, 80 bp, synthetic construct
  source 1..80: mol_type = other DNA
ctcgaacaatcataaccacatcagtattaaatccataatatcattttaagaaaaaattgattttactttctccccttggt

SEQ ID NO: 39923 - DNA, 80 bp, synthetic construct
  source 1..80: mol_type = other DNA
gcacagccgttacaggatccaattcaagcacagcttttcatgccattatatcctcaagtcagtaacatcccaaatcatca

SEQ ID NO: 39924 - DNA, 80 bp, synthetic construct
  source 1..80: mol_type = other DNA
aaagcatttgagcgattcacgatagaacaagaacttcaagacaggggtgaggagggttcaattccgccggagactttaaa

SEQ ID NO: 39925 - DNA, 80 bp, synthetic construct
  source 1..80: mol_type = other DNA
tatcctcaagtcagtaacatcccaaatcatcagaatcatcagatcaatcgcatcggggggatggaacaccaagatttatt

SEQ ID NO: 39926 - DNA, 80 bp, synthetic construct
  source 1..80: mol_type = other DNA
acgatacaacgagaatggtgattctcaacaagatgcaaggggcgaacacgggaataccttcccaaacaatcctaatcaaa

SEQ ID NO: 39927 - DNA, 80 bp, synthetic construct
  source 1..80: mol_type = other DNA
atgcacagtcgcaagtgggcgactgggatgagtaaatcactgacatgatcaaactacccccaactgcaacaaccccagga

SEQ ID NO: 39928 - DNA, 80 bp, synthetic construct
  source 1..80: mol_type = other DNA
caatctagccacagctaactgcccaaatccactacattccattcatatttagtctttaagaaaaaattaggcccggaaag

SEQ ID NO: 39929 - DNA, 80 bp, synthetic construct
  source 1..80: mol_type = other DNA
aattagttctacaggcatcagcacaattatcttgatcgtgtttctttccgggcaagccatggatcaatttataaaacaag

SEQ ID NO: 39930 - DNA, 80 bp, synthetic construct
  source 1..80: mol_type = other DNA
atgagactggtgatttaattgagacaggaatgaatgttgcaaatcacttcctatccgcccccattcagggaaccaactcg

SEQ ID NO: 39931 - DNA, 80 bp, synthetic construct
  source 1..80: mol_type = other DNA
ttaagcaaggccacaatcatccctggtgttgcaccagtactcattggcaatccagagcaaaagaacattcagtaccccac

SEQ ID NO: 39932 - DNA, 80 bp, synthetic construct
  source 1..80: mol_type = other DNA
cgcatcacatcagggatccaagtcaaagggcagaggctcaggggccaagcccatcatagtctcatcctccgaaggaggca

SEQ ID NO: 39933 - DNA, 80 bp, synthetic construct
  source 1..80: mol_type = other DNA
ctggagggactcagattcctgagccccttttcgcacaaacaggacaaggcggagttgtcaccaccgtttatcaggatcca

SEQ ID NO: 39934 - DNA, 80 bp, synthetic construct
  source 1..80: mol_type = other DNA
actatccaaccaacaggttcatatcgaagtgtggaattggctaagataggaaaagagagaatgatcaatcgatttgttga

SEQ ID NO: 39935 - DNA, 80 bp, synthetic construct
  source 1..80: mol_type = other DNA
gtcagcagtcaaagtcttcgttattaacacacccaatcccaccacacgctatcagatgctaaacttttgcctaagaataa

SEQ ID NO: 39936 - DNA, 80 bp, synthetic construct
  source 1..80: mol_type = other DNA
aaaacccagaacctcaacgccagtaacagaatttaagaggggggccgggaacggctccccaaggccagacaatccaagag

SEQ ID NO: 39937 - DNA, 80 bp, synthetic construct
  source 1..80: mol_type = other DNA
gggaacggctccccaaggccagacaatccaagaggagggcatagacgggaatggagccttagctgggtccaaggagaggt

SEQ ID NO: 39938 - DNA, 80 bp, synthetic construct
  source 1..80: mol_type = other DNA
gagggcatagacgggaatggagccttagctgggtccaaggagaggtccgggtctttgagtggtgcaaccccatatgctca

SEQ ID NO: 39939 - DNA, 80 bp, synthetic construct
  source 1..80: mol_type = other DNA
cctatcactgccgcagcaagattccactcctgcaaatgtgggaattgccccgcaaagtgcgatcagtgcgaacgagatta

SEQ ID NO: 39940 - DNA, 80 bp, synthetic construct
  source 1..80: mol_type = other DNA
tggacctccttagagggatggatgctcgcctgcaacatcttgaacaaaaggtggacaaggtgcttgcacagggcagcatg

SEQ ID NO: 39941 - DNA, 80 bp, synthetic construct
  source 1..80: mol_type = other DNA
gtgacccaaataaagaatgaattatcaacagtaaagacaacactagctacaattgaaggaatgatggcgacagtaaagat

SEQ ID NO: 39942 - DNA, 80 bp, synthetic construct
  source 1..80: mol_type = other DNA
catggatcctggaaacccgacaggggtcccagttgatgagcttagaagaagttttagtgatcatgtaacaattgttagtg

SEQ ID NO: 39943 - DNA, 80 bp, synthetic construct
  source 1..80: mol_type = other DNA
gaccaggagatgtgtcattcagctccggtgaagaacccacactgtatttggatgaactagcgaggcctgtccccaagcct

SEQ ID NO: 39944 - DNA, 80 bp, synthetic construct
  source 1..80: mol_type = other DNA
cgtcctgcaaagcagccaaaaccccaaccagtaaaggatttagcaggacggaaagtgatgataaccaaaatgatcactga

SEQ ID NO: 39945 - DNA, 80 bp, synthetic construct
  source 1..80: mol_type = other DNA
ctgtgtggccaatcctcaaatgaagcaggcgtttgagcaacgattggcaaaggccagcaccgaggatgctctgaatgata

SEQ ID NO: 39946 - DNA, 80 bp, synthetic construct
  source 1..80: mol_type = other DNA
tcaagcgagacatcatacgaagcgccatatgaacccaccaggaatgccagactcacgagaaaatccatgaactgagggcc

SEQ ID NO: 39947 - DNA, 80 bp, synthetic construct
  source 1..80: mol_type = other DNA
tctgtagtcaaaatgctagggcatctcacagagtaggtgcattgataacattattctcacttccctcagcaggcatgcaa

SEQ ID NO: 39948 - DNA, 80 bp, synthetic construct
  source 1..80: mol_type = other DNA
acaatgattccctgtttaataaaaaataagcacgaacacaagtccaatccaatcatagcagcaatggccggatcacagat

SEQ ID NO: 39949 - DNA, 80 bp, synthetic construct
  source 1..80: mol_type = other DNA
caaaattcctcttccgaagccccccgattcagattctcaaagactaaatgcattccctataatcatggctcaagaaggca

SEQ ID NO: 39950 - DNA, 80 bp, synthetic construct
  source 1..80: mol_type = other DNA
aaggacgactcctcagacagatcagacttaggaaaatattatcaggggatccgtctgatcagcaaattacatttgtgaat

SEQ ID NO: 39951 - DNA, 80 bp, synthetic construct
  source 1..80: mol_type = other DNA
acatatggattcatccgtgccactccagaaacatccgagttcatctctgaatcatcaccacaaaaggtaactcctgtagt

SEQ ID NO: 39952 - DNA, 80 bp, synthetic construct
  source 1..80: mol_type = other DNA
gacggcgtgcatgctgtccttcggtgctggaccagtactagaagacccacaacatatgctgaaagctcttgatcagacag

SEQ ID NO: 39953 - DNA, 80 bp, synthetic construct
  source 1..80: mol_type = other DNA
acatcagggttcggaagacagcgagtgataaagagcagatcttattcgagatcaaccgcatccccaatctattcaggcat

SEQ ID NO: 39954 - DNA, 80 bp, synthetic construct
  source 1..80: mol_type = other DNA
catcaaatatctgcggaccatctgattcaggccagctccgataaatatgtcaagtcaccagcaaagttgattgcaggagt

SEQ ID NO: 39955 - DNA, 80 bp, synthetic construct
  source 1..80: mol_type = other DNA
aaattacatctactgtgtcacatttctatctgtgacagtttgttctgcctcactcaagtttcgagttgcgcgcccattgc

SEQ ID NO: 39956 - DNA, 80 bp, synthetic construct
  source 1..80: mol_type = other DNA
ttgctgcacgatctagattagtaagagcagttcagatggaagttttgcttcgggtaacttgcaaaaaagattcccaaatg

SEQ ID NO: 39957 - DNA, 80 bp, synthetic construct
  source 1..80: mol_type = other DNA
gcaaagagcatgttaaatgaccctgaaggagaagggtgcattgcatccgtgtggttccacctgtgtaatctatgcaaagg

SEQ ID NO: 39958 - DNA, 80 bp, synthetic construct
  source 1..80: mol_type = other DNA
aatcatattagattagcagatagatcacccgaagctcagatagaacgctgtgagattgatggttttgagcctggcacata

SEQ ID NO: 39959 - DNA, 80 bp, synthetic construct
  source 1..80: mol_type = other DNA
caggaataaacttagaagttacgatgaaaattattttgcatctaagtgccgcaagatgaatctgacagtcagcatagggg

SEQ ID NO: 39960 - DNA, 80 bp, synthetic construct
  source 1..80: mol_type = other DNA
acatgtggggaccaaccatcctagtccatgcaggcggtcacattccaacaactgcaaaaccttttttcaactcaagaggc

SEQ ID NO: 39961 - DNA, 80 bp, synthetic construct
  source 1..80: mol_type = other DNA
tgggtctgccaccccatccaccaatcatcaccatcgttggcgaagaccctatggtcatctgggtgtgaaatcaaggctgc

SEQ ID NO: 39962 - DNA, 80 bp, synthetic construct
  source 1..80: mol_type = other DNA
cagtgctatcctccagggttcagactatgcgtcactcgcaaaaactgatgacataatatattcaaagataaaagtcgata

SEQ ID NO: 39963 - DNA, 80 bp, synthetic construct
  source 1..80: mol_type = other DNA
aagatgcggccaactacaaaggagtatcttggagtccattcaggaagtctgcctcaatgagcaacctatgagaatttcct

SEQ ID NO: 39964 - DNA, 80 bp, synthetic construct
  source 1..80: mol_type = other DNA
ctattctcactgatgcctccaggaggatcaacaatcagtccgatttgaccggtggaaacttgattaaaattatagaaaaa

SEQ ID NO: 39965 - DNA, 80 bp, synthetic construct
  source 1..80: mol_type = other DNA
ataagcctagaaggatatcttacatctcgactttccaattttgaaaatagaattgatcagtaatcatgaaggctttttca

SEQ ID NO: 39966 - DNA, 80 bp, synthetic construct
  source 1..80: mol_type = other DNA
gttacttgcttgggctttgcagtcttttcatcttctatatgtgtgaatatcaacatcttgcagcaaattggatatatcaa

SEQ ID NO: 39967 - DNA, 80 bp, synthetic construct
  source 1..80: mol_type = other DNA
gcaacaagtcaggcaactaagctattactcacaaagttcaagctcctacatagtggtcaagcttttaccgaatatccaac

SEQ ID NO: 39968 - DNA, 80 bp, synthetic construct
  source 1..80: mol_type = other DNA
ccactgataacagctgtgaatttaagagtgtaactcaatataataagaccttgagtaatttgcttcttccaattgcagaa

SEQ ID NO: 39969 - DNA, 80 bp, synthetic construct
  source 1..80: mol_type = other DNA
taggctgattccgaatgcacgcgccaatcttactgccaatgaaattgctgcttatgccttgcttgcagatgacctccctc

SEQ ID NO: 39970 - DNA, 80 bp, synthetic construct
  source 1..80: mol_type = other DNA
aacataaacaatattgcatcgccctcacctgggtcaagacgtcataaaaggtttgctggcattgccattggcatcgctgc

SEQ ID NO: 39971 - DNA, 80 bp, synthetic construct
  source 1..80: mol_type = other DNA
gctcggtgttgcgaccgcagcacaagtaactgccgctgtctcattagttcaagcacagacaaatgcacgtgcaatagcgg

SEQ ID NO: 39972 - DNA, 80 bp, synthetic construct
  source 1..80: mol_type = other DNA
ctatgaagaattcaatacaggcaactaatcgggcaatcttcgaagtgaaagaaggcacccaacagttagctatagcagtg

SEQ ID NO: 39973 - DNA, 80 bp, synthetic construct
  source 1..80: mol_type = other DNA
caagcaatccaagaccacatcaatactattatgaacactcaattaaataatatgacttgtcagattctggataaccagct

SEQ ID NO: 39974 - DNA, 80 bp, synthetic construct
  source 1..80: mol_type = other DNA
tgcaactttcttaggattatacctaacggaattaacaacagtgtttcagccacaattaattaatccggcattgtcaccga

SEQ ID NO: 39975 - DNA, 80 bp, synthetic construct
  source 1..80: mol_type = other DNA
ttagtatacaagccttgaggtctttgcttggaagtatgacgcctgcagtggttcaagcaacattatctacttcaatttct

SEQ ID NO: 39976 - DNA, 80 bp, synthetic construct
  source 1..80: mol_type = other DNA
gctgctgagatactaagtgccggtctaatggagggtcaaattgtttctgttctgctagatgagatgcagatgatagttaa

SEQ ID NO: 39977 - DNA, 80 bp, synthetic construct
  source 1..80: mol_type = other DNA
ggtaaatattccaaccattgtcacacaatcaaatgcattggtgattgacttctactcaatttcgagctttattaataatc

SEQ ID NO: 39978 - DNA, 80 bp, synthetic construct
  source 1..80: mol_type = other DNA
aggaatccataattcaattgccagacaggatcttggagatcgggaatgaacaatggagctatccagcaaaaaattgtaag

SEQ ID NO: 39979 - DNA, 80 bp, synthetic construct
  source 1..80: mol_type = other DNA
ttgactagacaccacatattctgccaatacaatgaggcagagaggctgagcctagaatcaaaactatgccttgcaggcaa

SEQ ID NO: 39980 - DNA, 80 bp, synthetic construct
  source 1..80: mol_type = other DNA
caaccatcaacaatggaactccttatgtacatgcagatgttgaaggacagccatgtgatgagattgagcaattcttggat

SEQ ID NO: 39981 - DNA, 80 bp, synthetic construct
  source 1..80: mol_type = other DNA
tataagtgcctgtgtgttctcacccatagcagggagttatatgaggcgatttgttgcactggatggaacaattgttgcaa

SEQ ID NO: 39982 - DNA, 80 bp, synthetic construct
  source 1..80: mol_type = other DNA
actgtcgaagtctaacgtgtctatgcaagagtccatcttatcccatataccaacctgaccatcatgcagtcacaaccatt

SEQ ID NO: 39983 - DNA, 80 bp, synthetic construct
  source 1..80: mol_type = other DNA
gatctaaccgcatgccaaacattgtccctagacggattggatttcagcattgtctctctaagcaacatcacttacgctga

SEQ ID NO: 39984 - DNA, 80 bp, synthetic construct
  source 1..80: mol_type = other DNA
gaaccttaccatttcattgtctcagacaatcaatactcaacccattgacatatcaactgaactgagtaaggttaatgcat

SEQ ID NO: 39985 - DNA, 80 bp, synthetic construct
  source 1..80: mol_type = other DNA
ccctccaaaatgccgttaagtacataaaggagagcaaccatcaactcctatctgtgagtgtaaattccaagatcggagct

SEQ ID NO: 39986 - DNA, 80 bp, synthetic construct
  source 1..80: mol_type = other DNA
ataattgtaacagccttagttttgagcatcctgtcaattatcatttcgctattgttttgctgctgggcttacattgcaac

SEQ ID NO: 39987 - DNA, 80 bp, synthetic construct
  source 1..80: mol_type = other DNA
caaagaaatcagaagaatcaacttcaaaacaaatcatatcaacacaatatcaagtagtgtcgatgatctcatcaggtact

SEQ ID NO: 39988 - DNA, 80 bp, synthetic construct
  source 1..80: mol_type = other DNA
aatcctaacatggtgattcatccagcatttagaaaagatttagaaaaaaactaaattaagaatgaatctcctggggtcgt

SEQ ID NO: 39989 - DNA, 80 bp, synthetic construct
  source 1..80: mol_type = other DNA
aacgtctcgtgaccctgccgttgcactatgccggcgatccaacctcccttatacctaacatttctattgctaattcttct

SEQ ID NO: 39990 - DNA, 80 bp, synthetic construct
  source 1..80: mol_type = other DNA
ttatctgatcataactttgtatgtctggattatattaactattacttataagactgctgtgcgacatgcagcactgcacc

SEQ ID NO: 39991 - DNA, 80 bp, synthetic construct
  source 1..80: mol_type = other DNA
cgatgctacagtgtactaatccaggcttgggtgatggtctgtaaatgtatgacagcatacgaccaacctgctgggtctgc

SEQ ID NO: 39992 - DNA, 80 bp, synthetic construct
  source 1..80: mol_type = other DNA
agagatccttctttcgctggagtttcgatcactcactctagaaagatctccatctaggacaaatcccaatccatcatgcg

SEQ ID NO: 39993 - DNA, 80 bp, synthetic construct
  source 1..80: mol_type = other DNA
agaacaagctgcatccaaatgatgccgctcaatcatgagacataaagaaaaaagcaagccagaacaaacttaggatcaca

SEQ ID NO: 39994 - DNA, 80 bp, synthetic construct
  source 1..80: mol_type = other DNA
atacaacacagaaccccggctgctatcacaaccgtgctccggccgctcaaaagatggagccctcgaaactcttcacaata

SEQ ID NO: 39995 - DNA, 80 bp, synthetic construct
  source 1..80: mol_type = other DNA
tcggacaatgccacctttgcacctgggcctgttatcaatgtggctgacaagaagacattccgaacctgcttccgaatatt

SEQ ID NO: 39996 - DNA, 80 bp, synthetic construct
  source 1..80: mol_type = other DNA
ggtactatctgtacaagctgttacccttatattagttattgtcaatctaggtgagcttgtgaggatgatcaatgatcaag

SEQ ID NO: 39997 - DNA, 80 bp, synthetic construct
  source 1..80: mol_type = other DNA
gcttgagcaatcagttgtcttcaattacagacaagataagagagtcagctaatatgattgcatctgctgtgggagtaatg

SEQ ID NO: 39998 - DNA, 80 bp, synthetic construct
  source 1..80: mol_type = other DNA
aatcaagttattcatggagtaacggtatccttacccctacaaattgagggaaaccaaaatcaattgttatccacacttgc

SEQ ID NO: 39999 - DNA, 80 bp, synthetic construct
  source 1..80: mol_type = other DNA
cacaatctgcacaagcaaaaaacaagtctcaaactgctctacaaacatccccttagttaatgaccttaggtttataaatg

SEQ ID NO: 40000 - DNA, 80 bp, synthetic construct
  source 1..80: mol_type = other DNA
ggatcaataaattcatcatcgaagattatgcaactcatgatttctctatcggccatccactcaacatgcctagctttatc

SEQ ID NO: 40001 - DNA, 80 bp, synthetic construct
  source 1..80: mol_type = other DNA
ccaactgcaacttcacccaatggttgcacaagaattccatccttttctctaggtaagacacactggtgctacacacataa

SEQ ID NO: 40002 - DNA, 80 bp, synthetic construct
  source 1..80: mol_type = other DNA
tgatcggcgatttgcgaaataccagcagcaaggtcgccttgaagcaagatacatgctgcagccggaggcccaaaggttga

SEQ ID NO: 40003 - DNA, 80 bp, synthetic construct
  source 1..80: mol_type = other DNA
tgtaattaatgccaactgcaaggatcatacttcgtccaaccaatatgtttccatggggattctcgttcagaccgcgtcag

SEQ ID NO: 40004 - DNA, 80 bp, synthetic construct
  source 1..80: mol_type = other DNA
ggtatcctatgttcaaaaccttgaaaatccaatatctcagtgatggcctgaatcggaaaagctgctcgattgcaacagtc

SEQ ID NO: 40005 - DNA, 80 bp, synthetic construct
  source 1..80: mol_type = other DNA
cctgatggatgcgcaatgtactgttacatctcaactcagcttgaaacagacgactatgcggggtccagcccacctaccca

SEQ ID NO: 40006 - DNA, 80 bp, synthetic construct
  source 1..80: mol_type = other DNA
gaaacttaccctgttattctataatgacaccgtcacagaaaggacaatatctccatctggtcttgaagggaattgggcta

SEQ ID NO: 40007 - DNA, 80 bp, synthetic construct
  source 1..80: mol_type = other DNA
cgttggtgccaggagtggggagtggaatatatttcgagaataaattgatctttcctgcatatggtggtgtcttgcccaat

SEQ ID NO: 40008 - DNA, 80 bp, synthetic construct
  source 1..80: mol_type = other DNA
agtacactcggagttaaatcagcaagagaatttttccggcctgttaatccatataatccatgttcagggccacaacaaga

SEQ ID NO: 40009 - DNA, 80 bp, synthetic construct
  source 1..80: mol_type = other DNA
tttagatcagcgtgctttgagatcatatttcccaagttacttctctaatcgaagagtacagagtgcatttcttgtctgtg

SEQ ID NO: 40010 - DNA, 80 bp, synthetic construct
  source 1..80: mol_type = other DNA
cctggaatcagatcctagttacaaattgcgagctagttgtcccttcaaacaatcagacactgatgggtgcagaaggaaga

SEQ ID NO: 40011 - DNA, 80 bp, synthetic construct
  source 1..80: mol_type = other DNA
gttttattgattaataatcgactattatattatcagagaagtaccagctggtggccgtatgaactcctctatgagatatc

SEQ ID NO: 40012 - DNA, 80 bp, synthetic construct
  source 1..80: mol_type = other DNA
attcacatttacaaactctggtcaatcatctgtgaatatgtcctggatacctatatattcattcactcgtcctggttcag

SEQ ID NO: 40013 - DNA, 80 bp, synthetic construct
  source 1..80: mol_type = other DNA
ttcgaggccgggctcgatcctcaccttccattgtcgataggggacattttgacactacctggaaaatgtcgtctgtgctc

SEQ ID NO: 40014 - DNA, 80 bp, synthetic construct
  source 1..80: mol_type = other DNA
ttcaaactgccatcaggaaaagtcttgttgttaggcagtaccttaccttcgaactccagttggcaagacggcaggggttg

SEQ ID NO: 40015 - DNA, 80 bp, synthetic construct
  source 1..80: mol_type = other DNA
gcaactgcagtggtgaaaatgtgtgcccgactgcttgtgtatcaggggtttatcttgatccctggccattaactccatat

SEQ ID NO: 40016 - DNA, 80 bp, synthetic construct
  source 1..80: mol_type = other DNA
agccaccaatcaggcattaatagaaatttctatttcacaggtgcactattaaattcaagcacaaccagagtgaatcctac

SEQ ID NO: 40017 - DNA, 80 bp, synthetic construct
  source 1..80: mol_type = other DNA
cctttatgtctctgccctcaataatcttaaagtactagccccatatggtactcaaggactttttgcctcgtacaccacaa

SEQ ID NO: 40018 - DNA, 80 bp, synthetic construct
  source 1..80: mol_type = other DNA
ccacctgctttcaagataccggtgatgctagtgtgtattgtgtttatattatggaactagcatcgaatatcgttggggaa

SEQ ID NO: 40019 - DNA, 80 bp, synthetic construct
  source 1..80: mol_type = other DNA
ttccaaattctacctgtgctaaccagattgactatcacctgagtcatagtgaatgcagcgggaggccctatgggcgtgtc

SEQ ID NO: 40020 - DNA, 80 bp, synthetic construct
  source 1..80: mol_type = other DNA
tcaatttttatcgattattaagaaaaaacaggccagaatggcgggcctaaatgagatactcttacctgaagtacatttaa

SEQ ID NO: 40021 - DNA, 80 bp, synthetic construct
  source 1..80: mol_type = other DNA
actcacccatcgtcagatataagcttttctactatatattgcatggccaattaccaaatgatttggagccagatgacttg

SEQ ID NO: 40022 - DNA, 80 bp, synthetic construct
  source 1..80: mol_type = other DNA
ggcccactagcaaatcagaattggaaggcaattcgagctgaagaatcccaggttcatgcacgtttaaaacagatcagagt

SEQ ID NO: 40023 - DNA, 80 bp, synthetic construct
  source 1..80: mol_type = other DNA
agaactcattgcaaggattcctagcctccggtggacccgctctcaaagggagattgccatactcatttggccaagaatac

SEQ ID NO: 40024 - DNA, 80 bp, synthetic construct
  source 1..80: mol_type = other DNA
ttccaatcctgcaagcatatgatctccggcaaagtatgcaattgcccacagtatgggagaaattgactcaatccacagtt

SEQ ID NO: 40025 - DNA, 80 bp, synthetic construct
  source 1..80: mol_type = other DNA
ctatcaaacagatactatgcaatggtgggtgacattggaaagtatattgagaattcaggccttactgccttctttctcac

SEQ ID NO: 40026 - DNA, 80 bp, synthetic construct
  source 1..80: mol_type = other DNA
aatcttataagtgatggtctagaacgggttgtattacacatcagcaatcaactgacaggtaagcctaacttgtttaccag

SEQ ID NO: 40027 - DNA, 80 bp, synthetic construct
  source 1..80: mol_type = other DNA
atctcgagcaggacaagacgcaaaggattactcaattccatccactagagagctgtctcaaatatggtttaacaatgagt

SEQ ID NO: 40028 - DNA, 80 bp, synthetic construct
  source 1..80: mol_type = other DNA
ggagtggatctgtaaagacctggctaatgatcaaatatagaatgaggcagctaatcacaaaccagaaaacaggtgagtta

SEQ ID NO: 40029 - DNA, 80 bp, synthetic construct
  source 1..80: mol_type = other DNA
acagatttagtaactattgtggatactaggtccactctatgcattattaccccagaattagttgctttatactccaatga

SEQ ID NO: 40030 - DNA, 80 bp, synthetic construct
  source 1..80: mol_type = other DNA
gcacaaagcattaacgtacctcacctttgaaatggtattaatggtcactgatatgttagagggacgactgaatgtttctt

SEQ ID NO: 40031 - DNA, 80 bp, synthetic construct
  source 1..80: mol_type = other DNA
ctttgtgcacagctagtcattatctgtcccctctaaagaagagaatcgaaattctcctaacattagttgatgaccttgct

SEQ ID NO: 40032 - DNA, 80 bp, synthetic construct
  source 1..80: mol_type = other DNA
ctactcatgggggacaaagtatacggtgttgtctcttcacttgagagttttgtctacgcccaattacagtatggtgaccc

SEQ ID NO: 40033 - DNA, 80 bp, synthetic construct
  source 1..80: mol_type = other DNA
tgttgtagacattaagggtacattctatggatttatatgtaatgagattctcgacctactgactgaagacaacatcttta

SEQ ID NO: 40034 - DNA, 80 bp, synthetic construct
  source 1..80: mol_type = other DNA
ctgaagaggaggcaaacaaggttcttctggacttgacatcacagtttgacaatctatcccctgatttaactgctgagctc

SEQ ID NO: 40035 - DNA, 80 bp, synthetic construct
  source 1..80: mol_type = other DNA
ctctgcattatgagactttggggccatcccacattaactgccagccaagcagcatccaaggtccgagagtccatgtgcgc

SEQ ID NO: 40036 - DNA, 80 bp, synthetic construct
  source 1..80: mol_type = other DNA
cctcaaatatgcactcggtaccaagtggagtcctctgtcattggccgcattcaccggtgaactcactaagctccgatcct

SEQ ID NO: 40037 - DNA, 80 bp, synthetic construct
  source 1..80: mol_type = other DNA
tccgaaggtgttagatttccaaacaataatgaagaccctggctttctttcatgcaatcctgattaacggttataggagga

SEQ ID NO: 40038 - DNA, 80 bp, synthetic construct
  source 1..80: mol_type = other DNA
gccataatggaatctggcctcctaccactcttcatggcaatgcccccaaaagcctcattgaaatgcggcatgataattca

SEQ ID NO: 40039 - DNA, 80 bp, synthetic construct
  source 1..80: mol_type = other DNA
gagcttaagtatgagtacgtcctcaagaattggaaaagtatatccatgttaagaatacacaaatgctttgatgcatcacc

SEQ ID NO: 40040 - DNA, 80 bp, synthetic construct
  source 1..80: mol_type = other DNA
tgatgaagatctcagcatattcatgaaggataaggcaataagctgtccaaagcaagactggatgggagtatttagaagga

SEQ ID NO: 40041 - DNA, 80 bp, synthetic construct
  source 1..80: mol_type = other DNA
gcctgataaaacagcggtatcgtgatgcgaatcgacctctaccgcaaccattcaaccgacggctactgttgaattttcta

SEQ ID NO: 40042 - DNA, 80 bp, synthetic construct
  source 1..80: mol_type = other DNA
acatcaagcgagacatcatacgaagcgccatatgaatcaaccagaaacacaagacctacggggaaatccacaaatcaaga

SEQ ID NO: 40043 - DNA, 80 bp, synthetic construct
  source 1..80: mol_type = other DNA
gaattaggtccacgatcacaggcacaatcattctgatcgtgtttctttccgggcaagccatggatcaatttataaaacag

SEQ ID NO: 40044 - DNA, 80 bp, synthetic construct
  source 1..80: mol_type = other DNA
taattttaaattggtgattcgtcctgcaattaaaaaagatttagaagaaaactaaaataagaatgaatctcctagggtcg

SEQ ID NO: 40045 - DNA, 80 bp, synthetic construct
  source 1..80: mol_type = other DNA
gaacatttcttaatttttatcgattattaagaaaaaacaggccagaatggcgggcctaaatgagatactcttacctgaag

SEQ ID NO: 40046 - DNA, 80 bp, synthetic construct
  source 1..80: mol_type = other DNA
ataaagatatatctgaacccttatcttcaagcctaaggatagacaaaaagtaagaaaaacatgtaatatatatataccaa

SEQ ID NO: 40047 - DNA, 80 bp, synthetic construct
  source 1..80: mol_type = other DNA
ccaaatagaagaaattgaaacaaaaagtacagaacaccagaacaacaagatcaaaacacccaatccactcagaacaaaaa

SEQ ID NO: 40048 - DNA, 80 bp, synthetic construct
  source 1..80: mol_type = other DNA
ccccagaggagaccggcaacacagcaaacaccgaacacaatgctagcttcaacattgtcaattgttgcaaccatgattgt

SEQ ID NO: 40049 - DNA, 80 bp, synthetic construct
  source 1..80: mol_type = other DNA
aaagatgtggacttatcaagacttatggttattaaagaccattcttatacaattgatatgaattattgggatgatactga

SEQ ID NO: 40050 - DNA, 80 bp, synthetic construct
  source 1..80: mol_type = other DNA
attccaaattctacctgtgctaaccaggttgactatcacttgagtaatagtgaatgcagcaggagatctcatgaacattt

SEQ ID NO: 40051 - DNA, 80 bp, synthetic construct
  source 1..80: mol_type = other DNA
gggatatatcttaatctttatccccaagcctaaggatagataaaaagtaagaaaaacatgtaatatatatattgtttggt

SEQ ID NO: 40052 - DNA, 80 bp, synthetic construct
  source 1..80: mol_type = other DNA
atcaagcgagacatcataaggagcgccatatgaattcacaaggactacctgactcacggggaaatccataaactgaaagc

SEQ ID NO: 40053 - DNA, 80 bp, synthetic construct
  source 1..80: mol_type = other DNA
cacaatgattctctgttaaataaaaaataagcacgaacaccggttcaatccaaccatagcagcaatggcaggatcacaga

SEQ ID NO: 40054 - DNA, 80 bp, synthetic construct
  source 1..80: mol_type = other DNA
agacaagcccaactcatccaacagccactcccagatcaactagtacaaaagaatcaacccgagcaaactctgaatccaag

SEQ ID NO: 40055 - DNA, 80 bp, synthetic construct
  source 1..80: mol_type = other DNA
gagatatatcttaacctttatccccaagcctaaggatagataaaaagtaagaaaaacatgtaatatatatataccaaaca

SEQ ID NO: 40056 - DNA, 80 bp, synthetic construct
  source 1..80: mol_type = other DNA
aagtcaaacagaagaaatcaaaacgaaaagcatagaacaccagaacaacaagatcaaaacatccaattcactcaaaacaa

SEQ ID NO: 40057 - DNA, 80 bp, synthetic construct
  source 1..80: mol_type = other DNA
aaactccaaaagagaccggcaacacaacaagcaccgaatacaatgccaatttcaatactgttaattattacaaccatgat

SEQ ID NO: 40058 - DNA, 80 bp, synthetic construct
  source 1..80: mol_type = other DNA
aactataaagagtgtatgcaaatgatgatgatattaatagcttaatcactgaatttttgactcttgatatactcgtattt

SEQ ID NO: 40059 - DNA, 80 bp, synthetic construct
  source 1..80: mol_type = other DNA
ctcaagacatttggtggattattagtaaatcaatttgcatacactctttatagtttaaaaatagaaggtagagacctcat

SEQ ID NO: 40060 - DNA, 80 bp, synthetic construct
  source 1..80: mol_type = other DNA
gacaaaaggggaatataaaaaacttaggagcaaagcgtgctcgaaacatggacactgaatctaacaatggcactgtgtcc

SEQ ID NO: 40061 - DNA, 80 bp, synthetic construct
  source 1..80: mol_type = other DNA
ggacaagtcacagacatttgatcttagttaaaacttttataatggctgggctactaagtacttttgacacattcagctct

SEQ ID NO: 40062 - DNA, 80 bp, synthetic construct
  source 1..80: mol_type = other DNA
aacttaggacaaaagaagtcaacaccaacaactattagcagtcatacgtgcaagaataagaaagaagagattcaagaagt

SEQ ID NO: 40063 - DNA, 80 bp, synthetic construct
  source 1..80: mol_type = other DNA
accaagcagaatgaaacaatagacatcaatcaatatacaaataagaaaaacttaggattaaagaataaattaatccttgt

SEQ ID NO: 40064 - DNA, 80 bp, synthetic construct
  source 1..80: mol_type = other DNA
agaaagaacccaacagacgaatccaaattcgaaatggaatactggaagcataccaatcacggaaagggtgctggtaatga

SEQ ID NO: 40065 - DNA, 80 bp, synthetic construct
  source 1..80: mol_type = other DNA
aaaattaacttaggattaaagacattgactagaaggtcaagaaaagggaactctacaatttcaaaaatgttgagcctatt

SEQ ID NO: 40066 - DNA, 80 bp, synthetic construct
  source 1..80: mol_type = other DNA
attccaaaaaagaccgacaacacaacaagcaccgaacacaatgctaatttcaatattattaattgttacaaccatgatca

SEQ ID NO: 40067 - DNA, 80 bp, synthetic construct
  source 1..80: mol_type = other DNA
aaaatataaatataatgaagatatatcctaacctttatctttaagcctaaggatagacaaaaagtaagaaaaacatgtaa

SEQ ID NO: 40068 - DNA, 80 bp, synthetic construct
  source 1..80: mol_type = other DNA
gcatcacacagtcaaatagacatcacaaaactacagcatgtaggtgtattggttaacagtcccaaagggatgaaaatatc

SEQ ID NO: 40069 - DNA, 80 bp, synthetic construct
  source 1..80: mol_type = other DNA
attacagaattcaaaagagaaatcgagtggatcaaaatgataagccatatgtattaacaaacaaatgacacatctgtaga

SEQ ID NO: 40070 - DNA, 80 bp, synthetic construct
  source 1..80: mol_type = other DNA
tctctatcgtccctaaatacagatgtatatcaactgtgttcaactccaaaagttgatgaaagatcagattatgcatcatc

SEQ ID NO: 40071 - DNA, 80 bp, synthetic construct
  source 1..80: mol_type = other DNA
aagacacaaatacaatagagatatatcctaacctttatccccaagcctaaagatagataaaaagtaagaaaaacatgtaa

SEQ ID NO: 40072 - DNA, 80 bp, synthetic construct
  source 1..80: mol_type = other DNA
gcagatgtcaagtagagttcaggattaaagacattgactagaaggtcaagaaaagggaactctacaatttcaaaaatgtt

SEQ ID NO: 40073 - DNA, 80 bp, synthetic construct
  source 1..80: mol_type = other DNA
acaacaccaacagagctgaacagacaaatacaactcctccaacagccactcccagatcaaccaatacaaaagaatcaatc

SEQ ID NO: 40074 - DNA, 80 bp, synthetic construct
  source 1..80: mol_type = other DNA
cgaacaagctctgaatccaagcccaagacacaaaagacaaatggaaaggaaaggaaggatacagaagagagcaatcgatt

SEQ ID NO: 40075 - DNA, 80 bp, synthetic construct
  source 1..80: mol_type = other DNA
tacaataaagatatatcctaacctttatccttaagcctaaagatagacaaaaagtaagaaaaacatgtaatatatatacc

SEQ ID NO: 40076 - DNA, 80 bp, synthetic construct
  source 1..80: mol_type = other DNA
gtttaacagaagaaacaaaaacagaaagcacagaacaccagaacaacaagatcaaaacacccaacccattcaaaacgaaa

SEQ ID NO: 40077 - DNA, 80 bp, synthetic construct
  source 1..80: mol_type = other DNA
atctcaaaagagattggcaacacaacaaacactgaacatcatgccaacctcaatactgctaattattacaaccatgatta

SEQ ID NO: 40078 - DNA, 80 bp, synthetic construct
  source 1..80: mol_type = other DNA
aaaatagaggaaattgaaacaaaaaatacagaacaccagaacaacaagatcaaaacatccattccactcaaaacagaaat

SEQ ID NO: 40079 - DNA, 80 bp, synthetic construct
  source 1..80: mol_type = other DNA
tttaaaagaaaccggcaacacaacaaacaccgaacacaatgctagcttcaacattgttaattattacaaccatgattatg

SEQ ID NO: 40080 - DNA, 80 bp, synthetic construct
  source 1..80: mol_type = other DNA
agtcttgtggaagccatggctactttcaaagatgcttgttattattataagagaattaacaaattgaatcatgcagtctt

SEQ ID NO: 40081 - DNA, 80 bp, synthetic construct
  source 1..80: mol_type = other DNA
gaagaaacttgtttggaaatataaatttaaattaaaattaacttaggattaaagacattgactagaaggtcaagaaaagg

SEQ ID NO: 40082 - DNA, 80 bp, synthetic construct
  source 1..80: mol_type = other DNA
gtaatttatctgctaatcagaaatcaaagaagtttgaattcaagtcaacagatatttacaatgatggatacgagactgtg

SEQ ID NO: 40083 - DNA, 80 bp, synthetic construct
  source 1..80: mol_type = other DNA
acaaatacaataaagatatatctgaacccttatcttcaagcctaaggatagacaaaaagtaagaaaaacatgtaatatat

SEQ ID NO: 40084 - DNA, 80 bp, synthetic construct
  source 1..80: mol_type = other DNA
tctgcttgcaactcagtcaatagagagttgatggaaagcgatgctaaaaactatcaaatcatggattcttgggaagagga

SEQ ID NO: 40085 - DNA, 80 bp, synthetic construct
  source 1..80: mol_type = other DNA
cacaaaatttcgaaacaagatacttaattttgagtctcataccaaaaatagaagattctaactcttgtggtgaccaacag

SEQ ID NO: 40086 - DNA, 80 bp, synthetic construct
  source 1..80: mol_type = other DNA
attatcaatagtcctcatcatagtgctaattaattccatcaaaagtcaaaaggcccacgaatcattgctacaaggcataa

SEQ ID NO: 40087 - DNA, 80 bp, synthetic construct
  source 1..80: mol_type = other DNA
tatgcttacacctcaaatctaattactcgaggttgccaggatataggaaaatcatatcaagtattacagatagggataat

SEQ ID NO: 40088 - DNA, 80 bp, synthetic construct
  source 1..80: mol_type = other DNA
ttgtgtcatctgtcatattagattcacaaaaatcgagagtcaacccagtcataacttactcaacagccaccgaaagggta

SEQ ID NO: 40089 - DNA, 80 bp, synthetic construct
  source 1..80: mol_type = other DNA
actctatcctgagtgtcaccttaattctcctatcgttaaaggtaaaatagcacaattacacacaattatgagcctacctc

SEQ ID NO: 40090 - DNA, 80 bp, synthetic construct
  source 1..80: mol_type = other DNA
attataacttgttggaagatcagaagaatttcctattgatacatccagaattggttttgatattagataaacaaaactat

SEQ ID NO: 40091 - DNA, 80 bp, synthetic construct
  source 1..80: mol_type = other DNA
tccccaagcctaaggatagataaaaagtaagaaaaacatgtaatatatatataccaaacaagagaagaactctgtttggt

SEQ ID NO: 40092 - DNA, 80 bp, synthetic construct
  source 1..80: mol_type = other DNA
aaaatcaaacaatggaattaacaattttcaccttggtctagatatacccactaagccagagcaaacaaaggataatcaaa

SEQ ID NO: 40093 - DNA, 80 bp, synthetic construct
  source 1..80: mol_type = other DNA
aacttaggacaaaagaagtcaacaccaacaactgtcagcagtcatacctgtcggaacaacaaagaaaagacaaaaaaagt

SEQ ID NO: 40094 - DNA, 80 bp, synthetic construct
  source 1..80: mol_type = other DNA
aaacaagcacaactcctccaacagccactctcagatcaaccagcacaaaagaatcaatccgaacaaactctgaatccaag

SEQ ID NO: 40095 - DNA, 80 bp, synthetic construct
  source 1..80: mol_type = other DNA
ctgctgatatcactaatatcgatacgtctgactccatacaatgatcttatattttctaaattctattatttaattagttt

SEQ ID NO: 40096 - DNA, 80 bp, synthetic construct
  source 1..80: mol_type = other DNA
taaggatagacaaaaagtaagaaaaacatgtaatatatatataccaaacaagagaagaactctgtttggtatatatatat

SEQ ID NO: 40097 - DNA, 80 bp, synthetic construct
  source 1..80: mol_type = other DNA
cactaacatcgatacacctgactctatacaatgatcttatatcttccaaattttattatttaattagtttaaagaaatga

SEQ ID NO: 40098 - DNA, 80 bp, synthetic construct
  source 1..80: mol_type = other DNA
tgaacccttatcttcaagcctaaggatagacaaaaagtaagaaaaacatgtaatatatatataccaaacaagagaagaac

SEQ ID NO: 40099 - DNA, 80 bp, synthetic construct
  source 1..80: mol_type = other DNA
ttatgtagaatctggggattggttagatgatccagaatttaatatttcttatagtctcaaagaaaaggagatcaaacaag

SEQ ID NO: 40100 - DNA, 80 bp, synthetic construct
  source 1..80: mol_type = other DNA
ggaggtatagaaggattttgtcaaaaattgtggacacttatatccataagtgcaatacatctagcagctgttaggatagg

SEQ ID NO: 40101 - DNA, 80 bp, synthetic construct
  source 1..80: mol_type = other DNA
gttgggggattcaactatatggccatgtcaagatgctttgtaaggaacattggtgatccatcagttgctgcattagctga

SEQ ID NO: 40102 - DNA, 80 bp, synthetic construct
  source 1..80: mol_type = other DNA
gcacaatatgaaacactaagtaggactttgagattaattgtaagcgataaaatcaggtatgaagatatgtgttcagtaga

SEQ ID NO: 40103 - DNA, 80 bp, synthetic construct
  source 1..80: mol_type = other DNA
tctggggtagtaataacaggatcagaacattgtaaaatatgttattcttcagatggtacaaacccatatacttggatgta

SEQ ID NO: 40104 - DNA, 80 bp, synthetic construct
  source 1..80: mol_type = other DNA
aatttctggggactagcacttaagaactatcaagtccttaaaatcagatctataacaagtgattctgataataatgatgg

SEQ ID NO: 40105 - DNA, 80 bp, synthetic construct
  source 1..80: mol_type = other DNA
gaatataacagatgtaattggtcaacgagaattgaaaatatttccttcagaggtatcattagtaggtaaaaaattaggaa

SEQ ID NO: 40106 - DNA, 80 bp, synthetic construct
  source 1..80: mol_type = other DNA
gttttatcaaaacttaaaagattgtcactcttggaagaaaataatctattaaaatggatcattttatcaaagaagaggaa

SEQ ID NO: 40107 - DNA, 80 bp, synthetic construct
  source 1..80: mol_type = other DNA
tataatatatttccactgaaaaataagggaaagttaagactgctatcgagaagactagtattaagttggatttcgttatc

SEQ ID NO: 40108 - DNA, 80 bp, synthetic construct
  source 1..80: mol_type = other DNA
tgaaattagaaagatggataaggactctattgaggggaaaatgcgacaatctgcagatgttccaagcgagatatcaggaa

SEQ ID NO: 40109 - DNA, 80 bp, synthetic construct
  source 1..80: mol_type = other DNA
gggggaaaagggaaagactggtttaagaaatcaaaagacattgacaaccagacatcaacatcagatcacagatctacatc

SEQ ID NO: 40110 - DNA, 80 bp, synthetic construct
  source 1..80: mol_type = other DNA
accgatacaaaggggcaaacagaaatacagacagaaccatcagaaacacaatctccattatggagtctcaccatcgacaa

SEQ ID NO: 40111 - DNA, 80 bp, synthetic construct
  source 1..80: mol_type = other DNA
gtcataggggtttcaatggacaacgacacaaaattgatacagatacaaaatgaaatgttaaatctcaaagcggatctaaa

SEQ ID NO: 40112 - DNA, 80 bp, synthetic construct
  source 1..80: mol_type = other DNA
catatataaacgaactcaaacattgcaagagtgatgaagaagtatctgaattaatggacatgttcaatgaggatgtcaat

SEQ ID NO: 40113 - DNA, 80 bp, synthetic construct
  source 1..80: mol_type = other DNA
aaacaggggttcagactgactccaaaggggtagttcagattctggatgagaaaggtgaaaaatcactgaatttcatggtc

SEQ ID NO: 40114 - DNA, 80 bp, synthetic construct
  source 1..80: mol_type = other DNA
tggaggggtaattggaactattgctctaggagtagcaacctcagcacaaatcacagcagcagttgctctggttgaagcca

SEQ ID NO: 40115 - DNA, 80 bp, synthetic construct
  source 1..80: mol_type = other DNA
ggtatatccctcttcccagccacatcatgacgaaaggagcatttctaggtggagcagatgtcaaagaatgcatagaagca

SEQ ID NO: 40116 - DNA, 80 bp, synthetic construct
  source 1..80: mol_type = other DNA
tccatggggacattcatgtccggatggatgtataacgggagtatataccgatgcatatccactcaatcccacaggaagca

SEQ ID NO: 40117 - DNA, 80 bp, synthetic construct
  source 1..80: mol_type = other DNA
caattaaaatttgacactattaataaatgtcatgctattttctgtacaataataattaatggatatagagagaggcatgg

SEQ ID NO: 40118 - DNA, 80 bp, synthetic construct
  source 1..80: mol_type = other DNA
gtcaaatagaagaaataaaaacaaaaagcatagaacaccagaacaacaagatcaaaacatcccacaaaacaaaaacaaaa

SEQ ID NO: 40119 - DNA, 80 bp, synthetic construct
  source 1..80: mol_type = other DNA
aacttaggacaaaagaggtcaatacaaacaaccattggcagtcatactcgtaagaataagaaaggagggattttaaaagt

SEQ ID NO: 40120 - DNA, 80 bp, synthetic construct
  source 1..80: mol_type = other DNA
taaacagaggaaattaaaacaaaaagtacagaacaccagaacaataagatcaaaacatctaactcactcaaaacaaaaat

SEQ ID NO: 40121 - DNA, 80 bp, synthetic construct
  source 1..80: mol_type = other DNA
cccaaaagagaccagtaatataacaagcactgggcataatgacaacctcaatactactaattattacaaccatgatcatg

SEQ ID NO: 40122 - DNA, 80 bp, synthetic construct
  source 1..80: mol_type = other DNA
gcatctttctgccaaatagatatcacaaaactacagaatgtaggtgtattggtcaacagtcccaaagggatgaagatatc

SEQ ID NO: 40123 - DNA, 80 bp, synthetic construct
  source 1..80: mol_type = other DNA
atcttctaaattttattatttaattaatttaaagagatgaattaataagataaaaaacccccttaaccgaatcataaaaa

SEQ ID NO: 40124 - DNA, 80 bp, synthetic construct
  source 1..80: mol_type = other DNA
cagaggagcttgcggccgaaggccattcgaaccggggtctccacttctgtctccgcctctcctctcccagtgcgggatga

SEQ ID NO: 40125 - DNA, 80 bp, synthetic construct
  source 1..80: mol_type = other DNA
tttgctagcgtcatgggggctcctctgtcttgctctcttcctctgttggcagcttggaggatccactcgaggcaattcgc

SEQ ID NO: 40126 - DNA, 80 bp, synthetic construct
  source 1..80: mol_type = other DNA
caattcgctctctttctgtctcccaactctcgggagttctctcccctctcttattcgggacccttcgccggaagcggccc

SEQ ID NO: 40127 - DNA, 80 bp, synthetic construct
  source 1..80: mol_type = other DNA
ctccccctgttcccattcctgggaggtggcccgggattccgatgctaaggagggaccggagcgttacccccgggataagc

SEQ ID NO: 40128 - DNA, 80 bp, synthetic construct
  source 1..80: mol_type = other DNA
gggtcagaaggaagattgattctactaggtaacaagatctacatatacacaagatctacaagttggcacagcaagttaca

SEQ ID NO: 40129 - DNA, 80 bp, synthetic construct
  source 1..80: mol_type = other DNA
aaatcaagcagaacgaaacaatagacatcaatcaatatacaaataagaaaaacttaggattaaagacattgactagaagg

SEQ ID NO: 40130 - DNA, 80 bp, synthetic construct
  source 1..80: mol_type = other DNA
tatttctagtctaaagttcaaaatgtcaagtgtcttaaagacatttgagaggtttactatacaacaagagcttcaggagc

SEQ ID NO: 40131 - DNA, 80 bp, synthetic construct
  source 1..80: mol_type = other DNA
catcacaggaaaaaatatatgaatatattgaagatattctgaacgtgtgtgatagtaaaaaatggaaaacgtcaataata

SEQ ID NO: 40132 - DNA, 80 bp, synthetic construct
  source 1..80: mol_type = other DNA
tattaatgtattggttcagaacattggtaaagtgccacacatattaactttgcaaaatgttattatagtcatacaatcta

SEQ ID NO: 40133 - DNA, 80 bp, synthetic construct
  source 1..80: mol_type = other DNA
accaaacaagagaagaaacttgtcaggaaatataaatttaacttaaaattaacttaggattaaagacattgactagaagg

SEQ ID NO: 40134 - DNA, 80 bp, synthetic construct
  source 1..80: mol_type = other DNA
ctgggaacatccacagccactcatggcagcaagctcaccaacaagataacatatatattatggacaataaccctggtgtt

SEQ ID NO: 40135 - DNA, 80 bp, synthetic construct
  source 1..80: mol_type = other DNA
atgtgccgtagacaattatagtagttttataggatttaaatttttaaaatttattgaacctcaattagatgaagatttga

SEQ ID NO: 40136 - DNA, 80 bp, synthetic construct
  source 1..80: mol_type = other DNA
accaaacaagtttcttctcttgtttggtaatataaatttaaattaaaattaacttaggattaaagacattgactagaagg

SEQ ID NO: 40137 - DNA, 80 bp, synthetic construct
  source 1..80: mol_type = other DNA
atatatcaaccttctttaattctcactcagtcctccccctccaccgtccatatcaaaaacaaatatggaaagccttaggt

SEQ ID NO: 40138 - DNA, 80 bp, synthetic construct
  source 1..80: mol_type = other DNA
tataatgatatatttaattttattagggctttagtgaaatcaaatctttatgtaggacactgttcttcagaagaaaagat

SEQ ID NO: 40139 - DNA, 80 bp, synthetic construct
  source 1..80: mol_type = other DNA
atatgaatctattaaggatattttaaatgtatgtaaagaaaatgaatggaacatgttggtaacggaaatattcaatcaat

SEQ ID NO: 40140 - DNA, 80 bp, synthetic construct
  source 1..80: mol_type = other DNA
aatagtatcggtaaagtaccaagaatattaactttgagtgacgttatttcgattttacgtataataatatatgattggtt

SEQ ID NO: 40141 - DNA, 80 bp, synthetic construct
  source 1..80: mol_type = other DNA
gatgtattactgctagatagcataaattttgacagaatggcatttttaccattaacattacagcaggagtatgcacttag

SEQ ID NO: 40142 - DNA, 80 bp, synthetic construct
  source 1..80: mol_type = other DNA
atatttttcaaaatcaagatttattactgaaagaaggaaatgtattgaactttcacatttttcagataatatattaattg

SEQ ID NO: 40143 - DNA, 80 bp, synthetic construct
  source 1..80: mol_type = other DNA
atttacataacccaaattttacattacaagtgattagaaattgcagtaatatgtcagttgaatggaataaagcatgtaat

SEQ ID NO: 40144 - DNA, 80 bp, synthetic construct
  source 1..80: mol_type = other DNA
cttattaggaatataagtaattatttcgatatattcaaatcgtcacatactgagtcttataatgtatctcctagatgtag

SEQ ID NO: 40145 - DNA, 80 bp, synthetic construct
  source 1..80: mol_type = other DNA
ctactgaagtacgcaattgcaaatggtgttcaattaataataattctattgtattgactgatttcagaattaaaaatgtt

SEQ ID NO: 40146 - DNA, 80 bp, synthetic construct
  source 1..80: mol_type = other DNA
aaaacctttataatggctggactactaagtacttttgatacattcagctccaggaggagtgagagcatcaataagtctgg

SEQ ID NO: 40147 - DNA, 80 bp, synthetic construct
  source 1..80: mol_type = other DNA
tcacagacatttgatcttagttaaaacctttataatggctggactactaagtacttttgatacattcagctccaggagga

SEQ ID NO: 40148 - DNA, 80 bp, synthetic construct
  source 1..80: mol_type = other DNA
agcatcaagcaacaaggcagagaatcatatttcatagctaagtgcatgagcatgcagctgcaggtgtccattgcagatct

SEQ ID NO: 40149 - DNA, 80 bp, synthetic construct
  source 1..80: mol_type = other DNA
ctgctcaatggagctgtgtcttggctggggatttgtgctgtggtcgtcttggaggtttgtttgtgcaggcgggtctatta

SEQ ID NO: 40150 - DNA, 80 bp, synthetic construct
  source 1..80: mol_type = other DNA
gacatttgatattagttaaaacctttataatggctgggctactaagtacttttgacacattcagctccaggaggagtgag

SEQ ID NO: 40151 - DNA, 80 bp, synthetic construct
  source 1..80: mol_type = other DNA
caagataaaaaatccccttaaccgaatcataaaaacatattaagaaaaaccaaaaaacgacaagagtattaataatatat

SEQ ID NO: 40152 - DNA, 80 bp, synthetic construct
  source 1..80: mol_type = other DNA
ttagaaaacttaattaatatgtatgaaacattatttcctataaatcaaaaaatagttaataaatttgtaaacacaatcaa

SEQ ID NO: 40153 - DNA, 80 bp, synthetic construct
  source 1..80: mol_type = other DNA
tttaattagtttaaagaaatgagttaacaagataaaaaatccctttaaccgaatcataaaaacatattaagaaaaaccaa

SEQ ID NO: 40154 - DNA, 80 bp, synthetic construct
  source 1..80: mol_type = other DNA
aaagctctatcacctaggaaagcagcatgggattcagtatatcctgatagtaatttatattacaaggtccctgaatcaga

SEQ ID NO: 40155 - DNA, 80 bp, synthetic construct
  source 1..80: mol_type = other DNA
tttattatttaattagtttaaagaaatgagttaacaagataaaaaatccccttaaccgaatcataaaaacatattaagaa

SEQ ID NO: 40156 - DNA, 80 bp, synthetic construct
  source 1..80: mol_type = other DNA
aaacaagaacaaaaagaggagcaaaaacaaaagtacacaccaaaaccaaaaaagggaaaaaaccagacacaaaaactgag

SEQ ID NO: 40157 - DNA, 80 bp, synthetic construct
  source 1..80: mol_type = other DNA
attggtattgatgtattgtgatgttgtcgaaggaagatggaatatgtcttcagctggacgactcgataagaggtcatcaa

SEQ ID NO: 40158 - DNA, 80 bp, synthetic construct
  source 1..80: mol_type = other DNA
aaatagtattttagggttaaagtaatactttaaagggacaagtcacagacatttgatcttagttaaaacctttataatgg

SEQ ID NO: 40159 - DNA, 80 bp, synthetic construct
  source 1..80: mol_type = other DNA
cctaacctttatccccaagcctaaagatagataaaaagtaagaaaaacatgtaatatatatataccaaacaagagaagaa

SEQ ID NO: 40160 - DNA, 80 bp, synthetic construct
  source 1..80: mol_type = other DNA
attatcaatagtcttcatcatagtgctttgtggtggcacttcttgattatcatttctaattgtaattccatcaaaaatga

SEQ ID NO: 40161 - DNA, 80 bp, synthetic construct
  source 1..80: mol_type = other DNA
aaaggcccgcgaattattgctacaagacataaataatgagtttatggaagttacagaaaagatccaagtagcatcggata

SEQ ID NO: 40162 - DNA, 80 bp, synthetic construct
  source 1..80: mol_type = other DNA
atatataatgatattaaatagtattttagggttaaagtaatacttttaaaggacaagtcacagacatttaatcttagtta

SEQ ID NO: 40163 - DNA, 80 bp, synthetic construct
  source 1..80: mol_type = other DNA
cttctaaattctattatttaattagtttaaagagatgagttaactagacaaaaaatagaatttagaagatataagattat

SEQ ID NO: 40164 - DNA, 80 bp, synthetic construct
  source 1..80: mol_type = other DNA
ctttaaagggacaagtcacagacatttgatcttagttaaaacttttataatggctgggctactaagtacttttgacacat

SEQ ID NO: 40165 - DNA, 80 bp, synthetic construct
  source 1..80: mol_type = other DNA
ggcatcacattgccaaatagacatcacaaaactacagcatgtaggtgtattggtcaacagtcctaagggtatgaagatat

SEQ ID NO: 40166 - DNA, 80 bp, synthetic construct
  source 1..80: mol_type = other DNA
tcattaactattaaaattataaaaaacttaggagtaaagttactcaactcaactccacttacataattgagagagaaccc

SEQ ID NO: 40167 - DNA, 80 bp, synthetic construct
  source 1..80: mol_type = other DNA
ttagtttaaagagatgaattaataagataaaaaatccccttaaccgaatcataaaaacatattaagaaaaaccaaaaaaa

SEQ ID NO: 40168 - DNA, 80 bp, synthetic construct
  source 1..80: mol_type = other DNA
cctgcctatttgtcaaatatggataaactggagtcaactcagaattcctcagacatcttatatccagaatgtcacttaaa

SEQ ID NO: 40169 - DNA, 80 bp, synthetic construct
  source 1..80: mol_type = other DNA
accaaggggaaaattaagaaggatgtctaacttacgaagtcataatagataaatcgagcccagaagtggcaaagatcgct

SEQ ID NO: 40170 - DNA, 80 bp, synthetic construct
  source 1..80: mol_type = other DNA
gcagatccaggtgatgatttgagtattttcatgaaagataaagcaattagtgctcccaaaaaagaatggatgagcgtgtt

SEQ ID NO: 40171 - DNA, 80 bp, synthetic construct
  source 1..80: mol_type = other DNA
taggaaagtcttcacaaaacaaatatgtgaaaaatgccatgaaccaatccccaatgcattcaataggcgtcttctgctta

SEQ ID NO: 40172 - DNA, 80 bp, synthetic construct
  source 1..80: mol_type = other DNA
agctcttgctgcattctcaggagaactccttaagcttaagtcattgatgcaactatacaggagcttaggagatagggctc

SEQ ID NO: 40173 - DNA, 80 bp, synthetic construct
  source 1..80: mol_type = other DNA
attttcttgcagacgaaacatttgaccccgcagtcgagctacagtatgtaaccactggtgcttaccttgatgatgaagaa

SEQ ID NO: 40174 - DNA, 80 bp, synthetic construct
  source 1..80: mol_type = other DNA
ttctgtgcctcatattcactcaaagagaaagaaataaaagaaactggaagaatctttgcaaaattaacaaagaagatgag

SEQ ID NO: 40175 - DNA, 80 bp, synthetic construct
  source 1..80: mol_type = other DNA
catgccaagttatagctgaatcactactagcatcacacgcagggaagtttttcaaagagaatggtgtcgtgttggatcag

SEQ ID NO: 40176 - DNA, 80 bp, synthetic construct
  source 1..80: mol_type = other DNA
atcagtataactaagacactgctgactatgtctcaaattggtttgatttcgaagaattctaggaggaatgtgagagacaa

SEQ ID NO: 40177 - DNA, 80 bp, synthetic construct
  source 1..80: mol_type = other DNA
tgtaaacattatgactccggccaattctaatactgaaactggctccacaagaacgagggacccgttccactccagagaga

SEQ ID NO: 40178 - DNA, 80 bp, synthetic construct
  source 1..80: mol_type = other DNA
agaaacctgatgagattactgagcttgctgcatgcttcctaaccaccgatctgagtaaatactgtctgaattggcgctat

SEQ ID NO: 40179 - DNA, 80 bp, synthetic construct
  source 1..80: mol_type = other DNA
caatccataattatgtttgctaccaaccttaataagctgtacggttacgatcacttatttgagtggattcatttaaggct

SEQ ID NO: 40180 - DNA, 80 bp, synthetic construct
  source 1..80: mol_type = other DNA
aatgagatctacattgtatgtaggcgatccattcaacccaccaaaaaacatcacaaccacggatctcgatgaaatggaaa

SEQ ID NO: 40181 - DNA, 80 bp, synthetic construct
  source 1..80: mol_type = other DNA
acggagacatctttattgtctcccctagaggagggattgaagggttatgccaaaaaatgtggacaatgatatctatagca

SEQ ID NO: 40182 - DNA, 80 bp, synthetic construct
  source 1..80: mol_type = other DNA
gtaatagttttatcagctacagaagccaagactagagttatgagcttagtgcaaggggacaatcaagcaatggcaatcac

SEQ ID NO: 40183 - DNA, 80 bp, synthetic construct
  source 1..80: mol_type = other DNA
gctatatggcccttctggaaatgtctgagatgatggagtttgcaccggctaactaccctctttgctacagttatgcaatg

SEQ ID NO: 40184 - DNA, 80 bp, synthetic construct
  source 1..80: mol_type = other DNA
cacattagttcctagatccctcccccatagcaccaaaaagaccattgcgtaccaaaatagtatggaatttgtgaatagac

SEQ ID NO: 40185 - DNA, 80 bp, synthetic construct
  source 1..80: mol_type = other DNA
tcagactcaacaattttggtatgggtcatcatttgaaagaacaggagactatcatcagttctgagtttattgtgtacagc

SEQ ID NO: 40186 - DNA, 80 bp, synthetic construct
  source 1..80: mol_type = other DNA
aaaaggatcatatataatggtagaatcctaaatcaagccctcaagaatgtgagcaaattgtgccttatagctgatgtgat

SEQ ID NO: 40187 - DNA, 80 bp, synthetic construct
  source 1..80: mol_type = other DNA
gggcgagagcactcaaacttcctgctcaaatctttccacaaccataatgagactaacagaaaatggtgtggaaaaggatg

SEQ ID NO: 40188 - DNA, 80 bp, synthetic construct
  source 1..80: mol_type = other DNA
tatgtttctttttaaatcagtatctaactgcaaaacagcttgtatatgatctcttgtttcccatgacaaaactatgtgaa

SEQ ID NO: 40189 - DNA, 80 bp, synthetic construct
  source 1..80: mol_type = other DNA
gatgaaactacagaatgctatctaaataatccaatacttatatcaaggatcattactatccctgctcaactaggtggcct

SEQ ID NO: 40190 - DNA, 80 bp, synthetic construct
  source 1..80: mol_type = other DNA
aaacttttatgcattaactagactctttaatcgaaacattggagatcctctcacatccgctattgcagatgttaaaagat

SEQ ID NO: 40191 - DNA, 80 bp, synthetic construct
  source 1..80: mol_type = other DNA
atgtacttgcaaagatgttgccaaaatgggtcttgaagaacctgctttctaggagccctggagatggtgattggaacact

SEQ ID NO: 40192 - DNA, 80 bp, synthetic construct
  source 1..80: mol_type = other DNA
cttgcttcagatccctatgctttaaacatcaattatctgtaccccccaacaaccttccttaagaagcacacacagagagt

SEQ ID NO: 40193 - DNA, 80 bp, synthetic construct
  source 1..80: mol_type = other DNA
cctcatggaagggagtgtaaatccaatgcttcgtggaatattcggagattcgaatctattagaggagaacaatctttcca

SEQ ID NO: 40194 - DNA, 80 bp, synthetic construct
  source 1..80: mol_type = other DNA
gggattgggagtgtccaagatccgatgatgaggaactatacatttgccagaccattcttgaaccctgcatatttccaact

SEQ ID NO: 40195 - DNA, 80 bp, synthetic construct
  source 1..80: mol_type = other DNA
gatttttgctggacagggaagttgtaatgccaagagttgcacacatcataatggagcagtctgtatgtgggaggaagaag

SEQ ID NO: 40196 - DNA, 80 bp, synthetic construct
  source 1..80: mol_type = other DNA
caaatacaagggtacctggataccacaagaactattattagatatgcactctctaaacaacctctcggcttccataagct

SEQ ID NO: 40197 - DNA, 80 bp, synthetic construct
  source 1..80: mol_type = other DNA
taataagatcctagattacaataccctatttctgtcttacaatcttgattcaatcttgaagcctgcagtgaacactcaga

SEQ ID NO: 40198 - DNA, 80 bp, synthetic construct
  source 1..80: mol_type = other DNA
tcaaattaacaacatctctacttatacaaacctgcagtatagatcttgcaaagatggtacgacggctatcatggtcatca

SEQ ID NO: 40199 - DNA, 80 bp, synthetic construct
  source 1..80: mol_type = other DNA
ttactgggaggacgacaactggatgggcttgaaacccccgacccaattgaacttttgtatggaagtatgataacatcagg

SEQ ID NO: 40200 - DNA, 80 bp, synthetic construct
  source 1..80: mol_type = other DNA
acagatttgtgatcactgtatggcaggtgataataagtatacctggctatttatacctgcagggattgatatagctgcag

SEQ ID NO: 40201 - DNA, 80 bp, synthetic construct
  source 1..80: mol_type = other DNA
atccggcagataatccaccaattagagttccttatatagggtccagaacagatgagagaagagtggcttctatgagttat

SEQ ID NO: 40202 - DNA, 80 bp, synthetic construct
  source 1..80: mol_type = other DNA
gtgaaaggatcttccaactcacttaaatctgctctacggctatgtggggtatatatttgggcttttggagacacagacca

SEQ ID NO: 40203 - DNA, 80 bp, synthetic construct
  source 1..80: mol_type = other DNA
aaactggcaggatgcagttgaattggcacaaactcgtacagagataactgaggatcagatgagagtactcacacctttgc

SEQ ID NO: 40204 - DNA, 80 bp, synthetic construct
  source 1..80: mol_type = other DNA
ctactacagcaaatttaacgcatcgtctagatgatggattaacacagcaaaaattcactccagcaagctcctatatgttt

SEQ ID NO: 40205 - DNA, 80 bp, synthetic construct
  source 1..80: mol_type = other DNA
tggagtggaaactgctaaccgccaacagggatcagtggacaaggcaatggcggcagagctaggcctcacagaagatgaga

SEQ ID NO: 40206 - DNA, 80 bp, synthetic construct
  source 1..80: mol_type = other DNA
tcctcattcgtgcatatatccaatgatagtcagaatctagaagtcatggacaaaacacttgactccaatctaatatacca

SEQ ID NO: 40207 - DNA, 80 bp, synthetic construct
  source 1..80: mol_type = other DNA
gcaaatcatgttactcggattgggaataattgaaacatggctccagctcccaaatgaacttaatagagaggacataacta

SEQ ID NO: 40208 - DNA, 80 bp, synthetic construct
  source 1..80: mol_type = other DNA
tacatctacacacagcttcctcatgttgcatcaagccggttgatccatgtataattaatgaggccttaatccctattccg

SEQ ID NO: 40209 - DNA, 80 bp, synthetic construct
  source 1..80: mol_type = other DNA
catttaagtgtcccaaaattcaacaaatttgtcttcgatgcggttcctttacaggacattgataagatcactattgagaa

SEQ ID NO: 40210 - DNA, 80 bp, synthetic construct
  source 1..80: mol_type = other DNA
cattcaatttgaagctgatatcagcgggattgatacgataccacaagcagataggctcaaggtattcagccatttggtag

SEQ ID NO: 40211 - DNA, 80 bp, synthetic construct
  source 1..80: mol_type = other DNA
gtattcagctaagcagaactcttactggattagatgaaattacatctcttgtcaatgatgctgtggtagaggcagattat

SEQ ID NO: 40212 - DNA, 80 bp, synthetic construct
  source 1..80: mol_type = other DNA
tcagcaaattggattagtgagtgtctaaatgctaggttagatgaggtctttatcttcgttgcatggaatttcctattaga

SEQ ID NO: 40213 - DNA, 80 bp, synthetic construct
  source 1..80: mol_type = other DNA
tctgtcttaccagttatactatttgaggatattagggtataattctatccttgactacctgtctgttacactcagtcgaa

SEQ ID NO: 40214 - DNA, 80 bp, synthetic construct
  source 1..80: mol_type = other DNA
ttcctggtttagcactgtcagggatttcgtcaactattagtcatcccaaaatattgaggcggatgataaacttagagata

SEQ ID NO: 40215 - DNA, 80 bp, synthetic construct
  source 1..80: mol_type = other DNA
atcaggccctacaattccccttacctagcaacattgaattatacaaggatgtcatgcgatgcaatattatggggtgccag

SEQ ID NO: 40216 - DNA, 80 bp, synthetic construct
  source 1..80: mol_type = other DNA
agcgggatatgtcagcagcagtcaccagactcacaacagggagaggaggcaatcaagcacaagagttgatcaatgtgatg

SEQ ID NO: 40217 - DNA, 80 bp, synthetic construct
  source 1..80: mol_type = other DNA
gcatgtcctcagcatgttgatgagtggtatagatatcgaaattatcatcccatctgagagctcagctgaaataggtgatc

SEQ ID NO: 40218 - DNA, 80 bp, synthetic construct
  source 1..80: mol_type = other DNA
ggattttaaatcttgttgcaagaaaattgtctttaattgcatgcctgtttgcgaaccaccatgacttgcccatagtgcgt

SEQ ID NO: 40219 - DNA, 80 bp, synthetic construct
  source 1..80: mol_type = other DNA
ggtatgacagctgaccaaaaatgcttggcactgactaactttttagtaacatatatacagacaagtgccggagaactaag

SEQ ID NO: 40220 - DNA, 80 bp, synthetic construct
  source 1..80: mol_type = other DNA
cggagagacaaacctcctcaaagcaatacatgaaccgaagctgactgctttcccctgcaatttgttttatctgtcgagaa

SEQ ID NO: 40221 - DNA, 80 bp, synthetic construct
  source 1..80: mol_type = other DNA
aattgctaaattatattagagatagtcaatgggtccaacaacagatactgaattattatgacagcaaaggattcgtggag

SEQ ID NO: 40222 - DNA, 80 bp, synthetic construct
  source 1..80: mol_type = other DNA
caccacgactctctcttaaacgtcaataatgaagtagacaacacagccaagattgcaactctaacggtattggattgggc

SEQ ID NO: 40223 - DNA, 80 bp, synthetic construct
  source 1..80: mol_type = other DNA
agttgaaatcttcaatctatcattccctcaaaagaagaatcacacacctttacttgaggaagaagggttccccagtctca

SEQ ID NO: 40224 - DNA, 80 bp, synthetic construct
  source 1..80: mol_type = other DNA
gagagagtgcagctccacccactcatcatatacttaggccagtaggtttatcatccacatcatggtacaaaggtctgagt

SEQ ID NO: 40225 - DNA, 80 bp, synthetic construct
  source 1..80: mol_type = other DNA
gttgtggcctttctaagaaaattaccaatacctgaaggtggacacctgtacttggcagagggtagtggatccatgatgac

SEQ ID NO: 40226 - DNA, 80 bp, synthetic construct
  source 1..80: mol_type = other DNA
agtcattgaatctcatttcccagctcaaagaatatattacaacagcctgttttctagtggccagaatccgccacagagaa

SEQ ID NO: 40227 - DNA, 80 bp, synthetic construct
  source 1..80: mol_type = other DNA
ggtgctcgacagggaagagaccagagaggaaggggaaatcgcgactatgttgtagtagaggaagatgaggaaactgagag

SEQ ID NO: 40228 - DNA, 80 bp, synthetic construct
  source 1..80: mol_type = other DNA
attttcaacctatgcccactcaattcgtagaaagtattgtgtaccaaaacattcaagattctgagtcagtgagtgatgat

SEQ ID NO: 40229 - DNA, 80 bp, synthetic construct
  source 1..80: mol_type = other DNA
caaatcttttatcctctatggagcggtgatggttgtcaaaccgatctcacaaagactgagtgtataaattttatcctatc

SEQ ID NO: 40230 - DNA, 80 bp, synthetic construct
  source 1..80: mol_type = other DNA
taaaatcatgtcatatagccttagcctgataaacatcgatttcgaggataccagatctctaatgtcttctgaagtccata

SEQ ID NO: 40231 - DNA, 80 bp, synthetic construct
  source 1..80: mol_type = other DNA
aggctcacataaatactctgatattggcaggtatgcttctcaaaccgaacgggatattgatagttaagacctacttaaca

SEQ ID NO: 40232 - DNA, 80 bp, synthetic construct
  source 1..80: mol_type = other DNA
ccattctgtaggttcaaccacttgattagaatgactcagcacatctttggattttgtcatgctcttagatcgtcttactc

SEQ ID NO: 40233 - DNA, 80 bp, synthetic construct
  source 1..80: mol_type = other DNA
tgatccaaattcggatgagatattcttgatactgaggagatctgataatatcttgtcacccctttcaagtgatgatttgg

SEQ ID NO: 40234 - DNA, 80 bp, synthetic construct
  source 1..80: mol_type = other DNA
cggcattttatgttaacaagacagagcaatctacaatcctgaccactgctatcatgacatacatcaatgagaacctgcaa

SEQ ID NO: 40235 - DNA, 80 bp, synthetic construct
  source 1..80: mol_type = other DNA
tcccaacaaaaaagagtctcgcaaatcatacatgatcaaattctttatggacgatgtgatatcaatgtagatgaccacat

SEQ ID NO: 40236 - DNA, 80 bp, synthetic construct
  source 1..80: mol_type = other DNA
aaatcttagtagattaggatctagatcacaaaccgccaagatacttgatatagaaaaatctgccaattataatatatttc

SEQ ID NO: 40237 - DNA, 80 bp, synthetic construct
  source 1..80: mol_type = other DNA
tagacagaatcacacagctgataaccactttcttcaaggagctgatatcattgtacgaagacactcaaacagatagacag

SEQ ID NO: 40238 - DNA, 80 bp, synthetic construct
  source 1..80: mol_type = other DNA
tgacagtgacaacgatgaagaccaggagatccaaaatcgtccgctacccccaattccgcagatgccgcagaacatagatt

SEQ ID NO: 40239 - DNA, 80 bp, synthetic construct
  source 1..80: mol_type = other DNA
agtataatttattcagcttataatgtcagcactcaagggaagatatcaactggtatagacgtgatgaccaaacagacact

SEQ ID NO: 40240 - DNA, 80 bp, synthetic construct
  source 1..80: mol_type = other DNA
ggatatctcaatcaggaactggtgtctcatgccaagaagctccataatccacttagtaaatgacttagaattggggatct

SEQ ID NO: 40241 - DNA, 80 bp, synthetic construct
  source 1..80: mol_type = other DNA
ataagatatcatctatactccccgtcaatttgttcatggataccacacctattaggaaacacttgattaagaaactaggg

SEQ ID NO: 40242 - DNA, 80 bp, synthetic construct
  source 1..80: mol_type = other DNA
tacagccatattcagcagatgtatgatactaattttatgatcttccttgatcgccccacacaaaagcgaatctggaagtc

SEQ ID NO: 40243 - DNA, 80 bp, synthetic construct
  source 1..80: mol_type = other DNA
agtgggctccgtgattttggagtacacccttaatgaagatacaccactcgatggtgacatactcttcccagatcaagatg

SEQ ID NO: 40244 - DNA, 80 bp, synthetic construct
  source 1..80: mol_type = other DNA
acattgaactcgatatcttcggcgatgaaatatgatcagaacaaattttaaaatgttttttaagaaaaacattaaaattt

SEQ ID NO: 40245 - DNA, 80 bp, synthetic construct
  source 1..80: mol_type = other DNA
ggcgatgaaatatgatcagaacaaattttaaaatgttttttaagaaaaacattaaaatttttgtttattttccccttggt

SEQ ID NO: 40246 - DNA, 80 bp, synthetic construct
  source 1..80: mol_type = other DNA
gggaagtgagactggcagagattgaaaggagaaaccagcagatagctgcccgagatcggcctcaggcagttgtaactgca

SEQ ID NO: 40247 - DNA, 80 bp, synthetic construct
  source 1..80: mol_type = other DNA
aggatgtcttccgtgttcagggcgtttgagctcttcaccttggagcaagagcagaatgagcatggaaatgacattgaatt

SEQ ID NO: 40248 - DNA, 80 bp, synthetic construct
  source 1..80: mol_type = other DNA
gatgtccaccaagaaccagcaggtgccagagtagacgagcaagacatgctactcgatcttgacatgtaacaagctggcaa

SEQ ID NO: 40249 - DNA, 80 bp, synthetic construct
  source 1..80: mol_type = other DNA
tctttcatctactgaataagctgttcccacttaatttaaccctatcaactccactaggagctttgcttgtagtttgctat

SEQ ID NO: 40250 - DNA, 80 bp, synthetic construct
  source 1..80: mol_type = other DNA
tagttgttaagaagtgttttaaagaaaacttaggaaaaggacaaatgagcccgaacagggtaaaagcgtgggcctttccc

SEQ ID NO: 40251 - DNA, 80 bp, synthetic construct
  source 1..80: mol_type = other DNA
tagttcgggtagtctagtgctctacaccagactataaaagttgtttctattgctcctgcatctgcacgtccatcttaaaa

SEQ ID NO: 40252 - DNA, 80 bp, synthetic construct
  source 1..80: mol_type = other DNA
ccttgaaagctatggataacccaccctctgacgctgaaatctctgcctggattgacaagggacttgatactgtagagcat

SEQ ID NO: 40253 - DNA, 80 bp, synthetic construct
  source 1..80: mol_type = other DNA
ttcttgagcgttgcaacagaccctgccaggagcctcgggaagtcaacaatcaagcccgggaagacccaagaattgatcag

SEQ ID NO: 40254 - DNA, 80 bp, synthetic construct
  source 1..80: mol_type = other DNA
atctgcagagaagcttgctggcgccgtggcacaaagtggagagaagggggacagagacaaagcaaagaaggaagtaacca

SEQ ID NO: 40255 - DNA, 80 bp, synthetic construct
  source 1..80: mol_type = other DNA
ccgcggcaccagagcctgcagtccgtgagaaagtccgtcccattgatgtggagccaagtgatgacatatacgaagaagta

SEQ ID NO: 40256 - DNA, 80 bp, synthetic construct
  source 1..80: mol_type = other DNA
attccttctgaaaattccaaattaatcccaccggtgactccaaagaagcctcctcgtcataaagacagaataatgtctat

SEQ ID NO: 40257 - DNA, 80 bp, synthetic construct
  source 1..80: mol_type = other DNA
gatgccgctccaatcagataagcaattgactgaaagtatggagagtcaagtatttaagagggggaaaggatttgagacat

SEQ ID NO: 40258 - DNA, 80 bp, synthetic construct
  source 1..80: mol_type = other DNA
acctcctgagaccttgaggactaatataaaggtatgcattctcaacaatcaggagcctcaagcacgtcatgatatgatgt

SEQ ID NO: 40259 - DNA, 80 bp, synthetic construct
  source 1..80: mol_type = other DNA
ggcccaagcgacatcggaccggaggccacaggagggaaatcgcaattgactggattggtgggaggccgagagtcacagag

SEQ ID NO: 40260 - DNA, 80 bp, synthetic construct
  source 1..80: mol_type = other DNA
tggtgcaacccaatatgtcacccaatctcccagtcaaccttccgaggtaactgccgatgtggaaattgccccgacatctg

SEQ ID NO: 40261 - DNA, 80 bp, synthetic construct
  source 1..80: mol_type = other DNA
ctccttatgtgaaagagattatacattacttacagactctggagactcggattaacaatcttgactggaaagtggataaa

SEQ ID NO: 40262 - DNA, 80 bp, synthetic construct
  source 1..80: mol_type = other DNA
attctctctcagcagtctgtcattactcaaatcaaacatgagcaacatgcaatcaaagcaggaatagccactttagaggg

SEQ ID NO: 40263 - DNA, 80 bp, synthetic construct
  source 1..80: mol_type = other DNA
tctcatcaccaccatcaagattatggaccctggagtaggtgatggcgccaccgcagccaaatcaaagaggttatttaaag

SEQ ID NO: 40264 - DNA, 80 bp, synthetic construct
  source 1..80: mol_type = other DNA
aagctcctgtagttgtgagtggaccggtcattggagagaaccccattgttgatgctgacaccattcaattggatgagctg

SEQ ID NO: 40265 - DNA, 80 bp, synthetic construct
  source 1..80: mol_type = other DNA
gcccgcccgtctcttcccaaaacaaaatctcagaagactggagcagcctcaccagcagccttatccggctataagatgac

SEQ ID NO: 40266 - DNA, 80 bp, synthetic construct
  source 1..80: mol_type = other DNA
attactggctcttatcaaggaatgcattcccaatcaggcacaacgccaaaagtttgaaatgcaagtcggaggaatacgaa

SEQ ID NO: 40267 - DNA, 80 bp, synthetic construct
  source 1..80: mol_type = other DNA
atgagcaagatttcaagaatctccgccgagagataatccgcagtgctgcccaataatcaccttatactatactgcatcct

SEQ ID NO: 40268 - DNA, 80 bp, synthetic construct
  source 1..80: mol_type = other DNA
gctaattcagcacagtttgatcaatcaccgcaattaattagcaactattaactgcttcttatgccaggctttgcttatct

SEQ ID NO: 40269 - DNA, 80 bp, synthetic construct
  source 1..80: mol_type = other DNA
gcttctgtttgcgcttaatcgctagtaattctgcccgtgctgcccataaaacgggggcaattcttactctattaagcttg

SEQ ID NO: 40270 - DNA, 80 bp, synthetic construct
  source 1..80: mol_type = other DNA
gcgactcttttttgagctttaagaaaaaataagtgagcccgaaccagttaagaagggctcactccgaccatggcgcttag

SEQ ID NO: 40271 - DNA, 80 bp, synthetic construct
  source 1..80: mol_type = other DNA
acaagcaaccatacctgttgatgtggacaaagacagtgaaaagaataatctcaacccattccctattattcctgttacca

SEQ ID NO: 40272 - DNA, 80 bp, synthetic construct
  source 1..80: mol_type = other DNA
gggatgacggatcctcaaccggtagattggtcaaacaactgagggtgaaaaatctcacaccaaaaggatccaccgagctt

SEQ ID NO: 40273 - DNA, 80 bp, synthetic construct
  source 1..80: mol_type = other DNA
ccgctttcctttgtgaacacttatggattcatcaagccgttgctcacatactcagagttttattctgaagtccaccacca

SEQ ID NO: 40274 - DNA, 80 bp, synthetic construct
  source 1..80: mol_type = other DNA
ggcatctactccctgcctcactgcatgcatgatcccgttcggtgcgggcccgtacatcgagaacccccacaggattctag

SEQ ID NO: 40275 - DNA, 80 bp, synthetic construct
  source 1..80: mol_type = other DNA
atgaatgtgacaaagtcaacatcatcgtgagaaagagtgcaagcttaaaggaagaaatagtctttgatgtcaggaggcta

SEQ ID NO: 40276 - DNA, 80 bp, synthetic construct
  source 1..80: mol_type = other DNA
ccccccatcttcaacaagcaccaaatatctgggaacagattgatctgtgttccctcagaaaagtatgtgaagtctccggg

SEQ ID NO: 40277 - DNA, 80 bp, synthetic construct
  source 1..80: mol_type = other DNA
gaaaatggttgctggaacagattacgcttaccaaattgcatttgtctcacttacattttgtccggaaagtcaaaagttca

SEQ ID NO: 40278 - DNA, 80 bp, synthetic construct
  source 1..80: mol_type = other DNA
gagttgcaaggcccttacagaccattcgatcaccaatcatgagaagtgtccaattggaagtgatgctgcgaattgactgt

SEQ ID NO: 40279 - DNA, 80 bp, synthetic construct
  source 1..80: mol_type = other DNA
gctgccaactcaccgctgaaaagattgctgattgtaaatcctggctctactgattactatgcctctgtatggtttcacat

SEQ ID NO: 40280 - DNA, 80 bp, synthetic construct
  source 1..80: mol_type = other DNA
cccactgcgatgatgcaaaatcaccttcggattgcagacaggtctccggatgcagacatagagaggctagagattgacgg

SEQ ID NO: 40281 - DNA, 80 bp, synthetic construct
  source 1..80: mol_type = other DNA
ttgcaacctttacaggggtaacaagccattcaaatcttatgatgatacctatttcagccaaaaatgcagagctatgcagc

SEQ ID NO: 40282 - DNA, 80 bp, synthetic construct
  source 1..80: mol_type = other DNA
ttgagtgcggaattgttgatatgtggggtcccacactggttgtgaaggcacatgggaaaatccctaagatggcaaagcct

SEQ ID NO: 40283 - DNA, 80 bp, synthetic construct
  source 1..80: mol_type = other DNA
ttcttcagtgcaaaagggtgggcttgccatgcgttttcagatgcagccccaacactggcaaaagctctgtggtcagtagg

SEQ ID NO: 40284 - DNA, 80 bp, synthetic construct
  source 1..80: mol_type = other DNA
agctaagatcacccaagtgaatgcaatcctgcaaccatccgagctgagccaaatggtccaagtaagtgatgtgatatggc

SEQ ID NO: 40285 - DNA, 80 bp, synthetic construct
  source 1..80: mol_type = other DNA
caaaggtcaaactggacaaccggattcaagactattctgctgcaaaatggaacccttttaagaagccttgactcagaatc

SEQ ID NO: 40286 - DNA, 80 bp, synthetic construct
  source 1..80: mol_type = other DNA
gtctgaatatctctattaccaacttataacccaataagtttactgtatgatcatcttgcaggacccacttgctattgcca

SEQ ID NO: 40287 - DNA, 80 bp, synthetic construct
  source 1..80: mol_type = other DNA
ccctacaattaaaagctaattcaacgaatgcattgctttaccgcacatcaactgacatggtatttcaaatttaaggactc

SEQ ID NO: 40288 - DNA, 80 bp, synthetic construct
  source 1..80: mol_type = other DNA
cgccacagcatatgacagcagctcaaaggcaactccctctacacaactcaccgcacaattcctcttccatcgcctaacct

SEQ ID NO: 40289 - DNA, 80 bp, synthetic construct
  source 1..80: mol_type = other DNA
tctgctagtttaataaaaaatttgagaagtgaaatgcacacacacaacaaccggaaaagagcacgaacaggtgcacccac

SEQ ID NO: 40290 - DNA, 80 bp, synthetic construct
  source 1..80: mol_type = other DNA
acatcaccccacagcaaccaacctgcctgtcatccaaagcatcatgataccccgtgttttagggataatcgtgctttatt

SEQ ID NO: 40291 - DNA, 80 bp, synthetic construct
  source 1..80: mol_type = other DNA
atttgagcctggtacgttccggctaagggcaaatgcaagaacccctatgacaaatggagaggtaacagcactcaacctta

SEQ ID NO: 40292 - DNA, 80 bp, synthetic construct
  source 1..80: mol_type = other DNA
taacccattctcagatactatgcattaacagaaatactctttaccagatcggcctaatacacaggtccgtcaaaaaggtc

SEQ ID NO: 40293 - DNA, 80 bp, synthetic construct
  source 1..80: mol_type = other DNA
aatttttacagccagggatccccttcttatatagttgttaaattggtgcccactcttgctgcaatcccgcctaactgcag

SEQ ID NO: 40294 - DNA, 80 bp, synthetic construct
  source 1..80: mol_type = other DNA
tatcaaaagcctgcaaagatataaagaaactgtaacttccttagttcagcctatctcggataacctaggatacttgcagg

SEQ ID NO: 40295 - DNA, 80 bp, synthetic construct
  source 1..80: mol_type = other DNA
ataagcttgttacaggccaatcaagaaggcgcagacgatttgcaggtgtggccatagggctagcagccctaggagtagct

SEQ ID NO: 40296 - DNA, 80 bp, synthetic construct
  source 1..80: mol_type = other DNA
gctgcagctcaagcaaccgctgccgttgcactggtggagactagagagaatgcaggtaagatccaggcattatcagaatc

SEQ ID NO: 40297 - DNA, 80 bp, synthetic construct
  source 1..80: mol_type = other DNA
catccagaatactaatcaagcagtacacagcctgaagacagcattaggcttctcggcaacagcaattcaagcaatccaaa

SEQ ID NO: 40298 - DNA, 80 bp, synthetic construct
  source 1..80: mol_type = other DNA
atcaagttaatgaggtcattaatccagcaattaacaagctgagttgtgaagtactggattctcagttagcttcaatgctt

SEQ ID NO: 40299 - DNA, 80 bp, synthetic construct
  source 1..80: mol_type = other DNA
aatttatatttgatccacttaactacggtcttccagacacagctgaccaatcctgctctcacaccactgagcatccaagc

SEQ ID NO: 40300 - DNA, 80 bp, synthetic construct
  source 1..80: mol_type = other DNA
actgacaagtgtgctccaagggacgtcaggggtattgatgaattcaaccaactccaccttaacccaaccaatggacttac

SEQ ID NO: 40301 - DNA, 80 bp, synthetic construct
  source 1..80: mol_type = other DNA
ttgccacagggttgattacggggcaaataattagcgttaatatgacaagtctacaattaatcattgctacattcatgcct

SEQ ID NO: 40302 - DNA, 80 bp, synthetic construct
  source 1..80: mol_type = other DNA
tggctcaggatctccctgacacttactctaatgataccccgttcctcaatccaaacaccgaaactgaacaatgtgatgag

SEQ ID NO: 40303 - DNA, 80 bp, synthetic construct
  source 1..80: mol_type = other DNA
tctattgcagagcttccgaatgcagtgctccattccttctttagaattaccacatcagtcaatttaactgaggtgatgat

SEQ ID NO: 40304 - DNA, 80 bp, synthetic construct
  source 1..80: mol_type = other DNA
ccaatcgccagaatttataatggagcaaaatggggtattctatgactttaatacagcccattgtcaattaggtgacaata

SEQ ID NO: 40305 - DNA, 80 bp, synthetic construct
  source 1..80: mol_type = other DNA
atgtttattgtccgtatattgatgcggctcgcttatcaagcacgatgacaaattgtattaacggcaagttaggtgattgc

SEQ ID NO: 40306 - DNA, 80 bp, synthetic construct
  source 1..80: mol_type = other DNA
gtattttctagggtaattggatctttcccatcgcggtttgtatctctcaatggagcaattttggcaaattgtaaattcat

SEQ ID NO: 40307 - DNA, 80 bp, synthetic construct
  source 1..80: mol_type = other DNA
gaggtgcaattgtcttgcaccggaaaaaattataacccccttggatggtgaaatgatctcgttgatagatttgagggtat

SEQ ID NO: 40308 - DNA, 80 bp, synthetic construct
  source 1..80: mol_type = other DNA
gccaaaaattaacattagggacaattacattcgagatatcccagcctgttaatgtgtcttttcaagggggctttgttgca

SEQ ID NO: 40309 - DNA, 80 bp, synthetic construct
  source 1..80: mol_type = other DNA
aatgcaggtcagataatagtgacgaacccttttgacatttcagctgagttggggcaaatcaataactccctcaatgatgc

SEQ ID NO: 40310 - DNA, 80 bp, synthetic construct
  source 1..80: mol_type = other DNA
acagggatttcttgaccaaagcaataactggctaaaagtcagtgggtggataagcaactcagggagcctatttatagccg

SEQ ID NO: 40311 - DNA, 80 bp, synthetic construct
  source 1..80: mol_type = other DNA
ggatagtagtcataggattgattgtgctttgtatagtaatcattatctatatcaatgttcaaattattcgagaagtaaat

SEQ ID NO: 40312 - DNA, 80 bp, synthetic construct
  source 1..80: mol_type = other DNA
cgcctaaggagctttatctatagggactatgtcctagatcatgataaagctccgtacagtcctgagctaagttcacctca

SEQ ID NO: 40313 - DNA, 80 bp, synthetic construct
  source 1..80: mol_type = other DNA
atggaacagttcctaaatgcaatatacagtgtactagttcaagtctgggtcacagtatgcaaatgcatgacagctcatga

SEQ ID NO: 40314 - DNA, 80 bp, synthetic construct
  source 1..80: mol_type = other DNA
taggaaatcattgaagactgtcagttaagctgactgagccatatcatccgatctccagagaatttaacataaaaagattt

SEQ ID NO: 40315 - DNA, 80 bp, synthetic construct
  source 1..80: mol_type = other DNA
tctaacgagattcaagaaaaaacgaatataagctagaaaactgtttaccataaagattaactccctacatactataactg

SEQ ID NO: 40316 - DNA, 80 bp, synthetic construct
  source 1..80: mol_type = other DNA
ccctcagacggatattagcagtgaagtgagcccgaacaaatatcacatcaggcaatcaaaggctacaggattgaacatgt

SEQ ID NO: 40317 - DNA, 80 bp, synthetic construct
  source 1..80: mol_type = other DNA
ggaatagtattcctcaacttgtctcagatcatgatggggcaaaaggcaagtttacggatatacccttacaggatgatact

SEQ ID NO: 40318 - DNA, 80 bp, synthetic construct
  source 1..80: mol_type = other DNA
gactctcaacagccaccaggctccaaaagcacatgcaggactttgttccggacagtattaataattttatccctcatcat

SEQ ID NO: 40319 - DNA, 80 bp, synthetic construct
  source 1..80: mol_type = other DNA
tcttgttcttggggttacaagtactatgttttctgcaaagtactcgggaagttgtgcaactaatagtcaactgctaggtg

SEQ ID NO: 40320 - DNA, 80 bp, synthetic construct
  source 1..80: mol_type = other DNA
taagtaatttgattaatcagatccaaaaatcaattgattctttaatctctgaagtgaatcaagtcagcattactactgct

SEQ ID NO: 40321 - DNA, 80 bp, synthetic construct
  source 1..80: mol_type = other DNA
gtaaccctacccgttaagattatggattttggtaagtcggtcactgatcaggtcactcaaatgattcgccaatgcaatac

SEQ ID NO: 40322 - DNA, 80 bp, synthetic construct
  source 1..80: mol_type = other DNA
agtctgcaagggtccggggcagaagccaggaagccagaatgtcagaataatgccatcaaataatctgtcgacatttcaga

SEQ ID NO: 40323 - DNA, 80 bp, synthetic construct
  source 1..80: mol_type = other DNA
atattaatatgagcgcaaggggaattgcttatcaagatgtccccctcacctttgtacggcctattaaaaacccaaagagc

SEQ ID NO: 40324 - DNA, 80 bp, synthetic construct
  source 1..80: mol_type = other DNA
tgctcccgatttcccagctatagtgtatcttttggtgttcattgctttgcaaatgctgtcactgatcagacttgtgaatt

SEQ ID NO: 40325 - DNA, 80 bp, synthetic construct
  source 1..80: mol_type = other DNA
gaaccagaatacgttttaccgggtggttttaagtgtgagtaaggggaatatatctgacccttcaagcctcgaaaccaaag

SEQ ID NO: 40326 - DNA, 80 bp, synthetic construct
  source 1..80: mol_type = other DNA
cagagactagaaccccaaaaggaactccagtaagaacctgctcaataatcagctcagtatatggatgttacttgctatgc

SEQ ID NO: 40327 - DNA, 80 bp, synthetic construct
  source 1..80: mol_type = other DNA
tccaaggctactatccccgaatcggaagagatgaaaacagtaggcttttctcaaatgtttatactctatctggcaatgga

SEQ ID NO: 40328 - DNA, 80 bp, synthetic construct
  source 1..80: mol_type = other DNA
ttcaaaacgcatactatatgacaacattgtctcatccaccagtgccatttggagtggactgtatccaggagagggtgcag

SEQ ID NO: 40329 - DNA, 80 bp, synthetic construct
  source 1..80: mol_type = other DNA
tccaccagtgccatttggagtggactgtatccaggagagggtgcaggaatttggcatatgggacaattgttctttccact

SEQ ID NO: 40330 - DNA, 80 bp, synthetic construct
  source 1..80: mol_type = other DNA
gaatttggcatatgggacaattgttctttccactttgggggggaatcccttttttaacccctctaggacaaaaaatacta

SEQ ID NO: 40331 - DNA, 80 bp, synthetic construct
  source 1..80: mol_type = other DNA
aattccacattggatatacctgaggtaggatccaaatgtaagagtgctcttaccaccagccctgctaagaccaaagatat

SEQ ID NO: 40332 - DNA, 80 bp, synthetic construct
  source 1..80: mol_type = other DNA
actggatcagagatatgcactgcaacctgaactgagaaggcagatacagacctgcattcggtcaagcctcacaataagac

SEQ ID NO: 40333 - DNA, 80 bp, synthetic construct
  source 1..80: mol_type = other DNA
gttattcagtccgtattatggggagaatgtaatggtgttcgggtttctaacatgttacctattatctaatgttccaacaa

SEQ ID NO: 40334 - DNA, 80 bp, synthetic construct
  source 1..80: mol_type = other DNA
actgccatgctgattatcttaattctactgtactcggattcggatcaaaggctcagttctatgattatagaggaatagta

SEQ ID NO: 40335 - DNA, 80 bp, synthetic construct
  source 1..80: mol_type = other DNA
tatatgtatatacagagtgctgggtggtatccctacactcaaatcttccgcattacattgcaactcaagcaaaatcgatt

SEQ ID NO: 40336 - DNA, 80 bp, synthetic construct
  source 1..80: mol_type = other DNA
gtcgaatacgatagtgagattccgcttctgggcacttgcacaggttgtctgtcctccctttcgcaatttcacactgtgca

SEQ ID NO: 40337 - DNA, 80 bp, synthetic construct
  source 1..80: mol_type = other DNA
gcaggccaaatcaatcaagcggatagaagtgacaagcactacaagaccaggaaacctcgaatgtagtgtgttgtggaact

SEQ ID NO: 40338 - DNA, 80 bp, synthetic construct
  source 1..80: mol_type = other DNA
gtccatacatttgtgccactggactctttcaggcaccatggattgtaaatagtgatgccatcacaccaaaagaagttgat

SEQ ID NO: 40339 - DNA, 80 bp, synthetic construct
  source 1..80: mol_type = other DNA
aacatggtgtttgtacaggcatggtcagctgatttcactgaattcaggaagggcatactttcgttatgcagtcaagtatc

SEQ ID NO: 40340 - DNA, 80 bp, synthetic construct
  source 1..80: mol_type = other DNA
ctgcccgattaatgacctgctaagcaaggataatagttatatgcgtgacactactacttactgttttccacagacagtgc

SEQ ID NO: 40341 - DNA, 80 bp, synthetic construct
  source 1..80: mol_type = other DNA
ccaacactcttccatgtacatcatttgtagaatggggtggggatagtggaaacccaataaatattttagaaatacattat

SEQ ID NO: 40342 - DNA, 80 bp, synthetic construct
  source 1..80: mol_type = other DNA
gaagttatttttgtggcatcataatattcctggcactctccgctagagcacatgttatattctttcttttaactgattca

SEQ ID NO: 40343 - DNA, 80 bp, synthetic construct
  source 1..80: mol_type = other DNA
ctggcacaaagactaatcatttaagaaaaaagaaaatcaagactgctagcacattataaatcaacagcagttatggacat

SEQ ID NO: 40344 - DNA, 80 bp, synthetic construct
  source 1..80: mol_type = other DNA
agttcctgacccatgagctgcagacagcacggaagcagggtgctataactggaaagtactacgccatggtcggagatatt

SEQ ID NO: 40345 - DNA, 80 bp, synthetic construct
  source 1..80: mol_type = other DNA
accatggggagaaaaggctgggccagaatggcgtgccccgagcagatcatcctccccgaggttcatctcgactcaccaat

SEQ ID NO: 40346 - DNA, 80 bp, synthetic construct
  source 1..80: mol_type = other DNA
tgtgaaaaataaactcctatattatatcaaagtcggcctgctgccaggctatcatgatacaatatggaactcagtcttcc

SEQ ID NO: 40347 - DNA, 80 bp, synthetic construct
  source 1..80: mol_type = other DNA
cagatacagattggaagcgggtcagggccgaggagtcgcgtttatgtgataggttaactcgtgttaagaaaatactgaca

SEQ ID NO: 40348 - DNA, 80 bp, synthetic construct
  source 1..80: mol_type = other DNA
aagagtactctatgtcatgcccacaggagtaatggcagcctgtcacaaatggtcctccgtgcagtagaatggcctgcaat

SEQ ID NO: 40349 - DNA, 80 bp, synthetic construct
  source 1..80: mol_type = other DNA
tataccagagcttaagtcatattgcatcccaaagtatctaaacagattctctgaagccaacagggttctaactgccgtgc

SEQ ID NO: 40350 - DNA, 80 bp, synthetic construct
  source 1..80: mol_type = other DNA
tatcgtcattagtatctggtacagaaactcttttacagaatgtcagcttaaaattgtgtggaagaccagatcttttaaac

SEQ ID NO: 40351 - DNA, 80 bp, synthetic construct
  source 1..80: mol_type = other DNA
cataatgaacaatattgtagaaaccatcatgctcatacacggccaaaatcagcccttgaacttagtcatctgtaccaatc

SEQ ID NO: 40352 - DNA, 80 bp, synthetic construct
  source 1..80: mol_type = other DNA
taaccaatataccactctgttcaatacttggttcattatacgacaccagatgaggtccctgattatgaaagtcaaaaaca

SEQ ID NO: 40353 - DNA, 80 bp, synthetic construct
  source 1..80: mol_type = other DNA
acatcacgactgatttattagtgcatattgatgaccgaaattacggttatatcataacacctgagatagttgttctctat

SEQ ID NO: 40354 - DNA, 80 bp, synthetic construct
  source 1..80: mol_type = other DNA
gatagagaaaatgggattgtgtcatattttacttttgaaatggttctaatggtgactgacatgctggagggtcgtatgaa

SEQ ID NO: 40355 - DNA, 80 bp, synthetic construct
  source 1..80: mol_type = other DNA
gggaggtacattgacaatgccggaatgagtgcatttttcatgacaatgagatttgcactcggaacaaagtggcccccatt

SEQ ID NO: 40356 - DNA, 80 bp, synthetic construct
  source 1..80: mol_type = other DNA
tatcctagtaattgctgactctagttgctacctccatcctcttgttccccgcctgagttacctctttgaactagtagaca

SEQ ID NO: 40357 - DNA, 80 bp, synthetic construct
  source 1..80: mol_type = other DNA
acctatgcccgattttgaagcagaacgtatattctcttatatcaaacctagagagcttgtcttatgccattctccagtta

SEQ ID NO: 40358 - DNA, 80 bp, synthetic construct
  source 1..80: mol_type = other DNA
tctgatcccgttcccgagttgagaggtgagtttctatcttttattaatggtgagatcatagcaatcctgttagcaagtga

SEQ ID NO: 40359 - DNA, 80 bp, synthetic construct
  source 1..80: mol_type = other DNA
ttcttttactctggaagagtgtgaagttgtcctaaaaaaaatcctggactgttataccgggctaaaacctgatctagttg

SEQ ID NO: 40360 - DNA, 80 bp, synthetic construct
  source 1..80: mol_type = other DNA
ctgaaatgctatgtgtaatgagactctggggacatccaatgttatcatcagcaaccgctgcacgaaaagtccgtgagtcc

SEQ ID NO: 40361 - DNA, 80 bp, synthetic construct
  source 1..80: mol_type = other DNA
atgtgtgctccaaaagtgattgacctaaccaccaatctcaagacattggcatttttcaatgggataattataaatggcta

SEQ ID NO: 40362 - DNA, 80 bp, synthetic construct
  source 1..80: mol_type = other DNA
tcggagaaaacacaatggaatgtggccaaattgcaaactcccgccgttctcatctgtgagtattcaggaattaaagcatg

SEQ ID NO: 40363 - DNA, 80 bp, synthetic construct
  source 1..80: mol_type = other DNA
acaacatggaattatcttaccaatatatactatcacactggaaagaagttgcaatgattgaatttgagaaaagcatcgac

SEQ ID NO: 40364 - DNA, 80 bp, synthetic construct
  source 1..80: mol_type = other DNA
agaaatgagttaacaagataaaaaatccccttaaccgaatcataaaaacatattaagaaaaaccaaaaccagacaagagt

SEQ ID NO: 40365 - DNA, 80 bp, synthetic construct
  source 1..80: mol_type = other DNA
agccatggctacttttaaagatgcatgctaccattacaagaagatgaataaattaaatggttgtatcttaaagttaggag

SEQ ID NO: 40366 - DNA, 80 bp, synthetic construct
  source 1..80: mol_type = other DNA
acaatgtgatggatttcgttagggcactagtcaaatcaaatgggacagttggacattgttcttcacaagaatcagtgtat

SEQ ID NO: 40367 - DNA, 80 bp, synthetic construct
  source 1..80: mol_type = other DNA
acggatataccaaagttattttcaatatatgatgaagaacggtggactgagtctgtaaacaagctttttagatatttgga

SEQ ID NO: 40368 - DNA, 80 bp, synthetic construct
  source 1..80: mol_type = other DNA
accagttgatataaatgaaacagaatacatattacttgatcatgagataaactgggaagttagaggtataataacgcaat

SEQ ID NO: 40369 - DNA, 80 bp, synthetic construct
  source 1..80: mol_type = other DNA
gcatgaatggcaatattccaagaattttaagtttaagtgatgttagactagtattgagctcattggtctatgattggttt

SEQ ID NO: 40370 - DNA, 80 bp, synthetic construct
  source 1..80: mol_type = other DNA
gatgtaagatatatgagagaaacaccaatgacaacatcaaccacaaacgaattacgcaaacttaatcaaaggaatgagtt

SEQ ID NO: 40371 - DNA, 80 bp, synthetic construct
  source 1..80: mol_type = other DNA
aatagatgaatatgacctagaactgtcagatatcgagtaaaaactaaatatggtcacaatttagccaacacaagaccgtc

SEQ ID NO: 40372 - DNA, 80 bp, synthetic construct
  source 1..80: mol_type = other DNA
cgagtaaaaactaaatatggtcacaatttagccaacacaagaccgtctgcactagagtagcgcctaggcagcataaaatg

SEQ ID NO: 40373 - DNA, 80 bp, synthetic construct
  source 1..80: mol_type = other DNA
tattgtagaggatgtgctctctaccatgtgtgtcaatggtgcagtcagtacaatagatgctttttagatgaggaaccaca

SEQ ID NO: 40374 - DNA, 80 bp, synthetic construct
  source 1..80: mol_type = other DNA
tctacttagaatgaggacgttcaaaaataacataactaaagaagacattgaaaatttgttaaatatgtataatactttgt

SEQ ID NO: 40375 - DNA, 80 bp, synthetic construct
  source 1..80: mol_type = other DNA
ttccaatacatgacaagatagtaaacaaattcattaataatactaaacaacgtaaatgtagaaatgaatacttattggaa

SEQ ID NO: 40376 - DNA, 80 bp, synthetic construct
  source 1..80: mol_type = other DNA
tggtataatcatttactgcttccattgactttgcaagcactaactattacattggagggaaatacgtattatatatttgg

SEQ ID NO: 40377 - DNA, 80 bp, synthetic construct
  source 1..80: mol_type = other DNA
atactatgattttatggagcaggaaaatcaaacaccttttcatttcgtcaatttaatagataaatatgataggttattat

SEQ ID NO: 40378 - DNA, 80 bp, synthetic construct
  source 1..80: mol_type = other DNA
tggatgatatgaactttaatagaatggcgtatttaccattgattctgcagcaggagtatgcactgagatacttttcgaaa

SEQ ID NO: 40379 - DNA, 80 bp, synthetic construct
  source 1..80: mol_type = other DNA
tcaagatttataaacaaaacaggaagggaattggtaagaaacgacttttcagataatctaatggaagatagacatagtcc

SEQ ID NO: 40380 - DNA, 80 bp, synthetic construct
  source 1..80: mol_type = other DNA
aacatcattaatgcaagtgactcgcaattgcatcataaagcatccagatgataatgaatggaataaggcctgcacgcaag

SEQ ID NO: 40381 - DNA, 80 bp, synthetic construct
  source 1..80: mol_type = other DNA
ctaacgatgaatggagaccagcaccaataacgaaattcaagggttggtgtttagattgctgccagtatacgagcctaaca

SEQ ID NO: 40382 - DNA, 80 bp, synthetic construct
  source 1..80: mol_type = other DNA
ttaaaaacgctaaagactatttagagctaacaaactcagcatatactgagcattacagtgtctctcagagatgtaggatt

SEQ ID NO: 40383 - DNA, 80 bp, synthetic construct
  source 1..80: mol_type = other DNA
tatactaaaagtaaacttgacacagtatcacgattaactaaaccaaattacacactatcaaatcatgaagtatgtgcatt

SEQ ID NO: 40384 - DNA, 80 bp, synthetic construct
  source 1..80: mol_type = other DNA
gaacgtccataattgcaaatggtgtcaggttactagctgttataagatatgggaagattttaggatcaagaagatataca

SEQ ID NO: 40385 - DNA, 80 bp, synthetic construct
  source 1..80: mol_type = other DNA
gtccggaaccactagattccggtgccggtaacgattccatttttatactatctgatcattctctatctctactaaggata

SEQ ID NO: 40386 - DNA, 80 bp, synthetic construct
  source 1..80: mol_type = other DNA
attaaagacattcagatagaagatattaatgattttgaggatatcgagaggggtatcgatggcgaagaattatgacaaca

SEQ ID NO: 40387 - DNA, 80 bp, synthetic construct
  source 1..80: mol_type = other DNA
gaaaaaacctaaaataagcacgaacccttaaggtgtcgtaacgtctcgtgacactgggttcagttcaaaaatcgacttct

SEQ ID NO: 40388 - DNA, 80 bp, synthetic construct
  source 1..80: mol_type = other DNA
ttatagcattctgccatgtttcccatatgaagcaaaccttcaacaccgacttaggttcaattttctcatcatttactgtt

SEQ ID NO: 40389 - DNA, 80 bp, synthetic construct
  source 1..80: mol_type = other DNA
agtttcttctcttgtttggaaatataaatttaaattaaaattaacttaggattaaagacattgactagaaggtcaagaaa

SEQ ID NO: 40390 - DNA, 80 bp, synthetic construct
  source 1..80: mol_type = other DNA
caagaagcggaagagtttccgcataacgctggagacatcctggaagaggaaagaggatggatggaaagagaagggggggg

SEQ ID NO: 40391 - DNA, 80 bp, synthetic construct
  source 1..80: mol_type = other DNA
gtcctctaacttctttcttgcactcacccactgctcgagggtctcttctctgcctccgcggcttttcttcgattcgggac

SEQ ID NO: 40392 - DNA, 80 bp, synthetic construct
  source 1..80: mol_type = other DNA
ccacacggagaaagcagacaaatcacctccggaagaccccttcagcgaacagagaactctgagccgcgaggagtaagaac

SEQ ID NO: 40393 - DNA, 80 bp, synthetic construct
  source 1..80: mol_type = other DNA
gccggctgggcaacattccgaggggaccgtccctcggtaatggcgaatgggaccagaactcttgattcccagagagaatc

SEQ ID NO: 40394 - DNA, 80 bp, synthetic construct
  source 1..80: mol_type = other DNA
gattacgtaggtccggaaccactagattccggtgccggtaacgatctcatttttatactatctgatcattctttatctct

SEQ ID NO: 40395 - DNA, 80 bp, synthetic construct
  source 1..80: mol_type = other DNA
acaagaacaaaaagaggagcaaaagcaaaagtacacaccaaaaccggaaaagggaaagaaacagacacgaaaactgaggc

SEQ ID NO: 40396 - DNA, 80 bp, synthetic construct
  source 1..80: mol_type = other DNA
aagaacaaaaatccaaacaaagacagaattcgaattcaaaacaaacaccaagatagagaccaaaatgcaaagctcagaga

SEQ ID NO: 40397 - DNA, 80 bp, synthetic construct
  source 1..80: mol_type = other DNA
tatacctctaattagagacattcagatagaagatattaatgattctgaagacatcgagaggggtatcgatggcgaagaat

SEQ ID NO: 40398 - DNA, 80 bp, synthetic construct
  source 1..80: mol_type = other DNA
atgtagaatcattttccgaactgccacaattcttggcatatgcacattaattgtgctatgttcaagtattcttcatgaga

SEQ ID NO: 40399 - DNA, 80 bp, synthetic construct
  source 1..80: mol_type = other DNA
aaaatacttgtttggaatatataataatattaaatagtattttagggttaaagtaatactttaaagggacaagtcacaga

SEQ ID NO: 40400 - DNA, 80 bp, synthetic construct
  source 1..80: mol_type = other DNA
gggctatgaaactttgagttgttttttaactactgatttgaaaaaatactgtcttaactggagatttgaaagtacagcat

SEQ ID NO: 40401 - DNA, 80 bp, synthetic construct
  source 1..80: mol_type = other DNA
ccaagaggaggaatagaaggttattgtcagaaattatggacactgatctctattagtgcaatccatcttgcagctgttaa

SEQ ID NO: 40402 - DNA, 80 bp, synthetic construct
  source 1..80: mol_type = other DNA
gatcatttattgaaggctcagaagtatgtaagttttgtagatcagagggaaataaccctatgtatacttggttctatctt

SEQ ID NO: 40403 - DNA, 80 bp, synthetic construct
  source 1..80: mol_type = other DNA
caggaggggatggtgcctaccacaaacccacaggtggtggagccatagaagtggcaattgatcatacagatataacattt

SEQ ID NO: 40404 - DNA, 80 bp, synthetic construct
  source 1..80: mol_type = other DNA
ctttcggaggtattctaatcaatcaatttgcatattcactttacgggctaaacatcagagggagggatgaaatatgggga

SEQ ID NO: 40405 - DNA, 80 bp, synthetic construct
  source 1..80: mol_type = other DNA
tatgtaatacgcataattaaagacacatcacatgcagtcttaaaagtattgtccaatgcattatcacatcctaaaatatt

SEQ ID NO: 40406 - DNA, 80 bp, synthetic construct
  source 1..80: mol_type = other DNA
cccttctgggggttaagggtatcaaaatcacaagttctacgacttagaggttatgaagagataaaaagagaagaaagagg

SEQ ID NO: 40407 - DNA, 80 bp, synthetic construct
  source 1..80: mol_type = other DNA
tatttatccttcagaagtggcactggtagggaagaaattgaataatgtcacgagtttatgtcaaagggtcaaggttttat

SEQ ID NO: 40408 - DNA, 80 bp, synthetic construct
  source 1..80: mol_type = other DNA
taccttgttggagataaggacgttatcctagtaagcaagattgcaccaagattaggtacagactggacaaaacaattaag

SEQ ID NO: 40409 - DNA, 80 bp, synthetic construct
  source 1..80: mol_type = other DNA
aatattgatgaaaattttaggagcagtcaaattatttggggcaagacagagtatgtctgctgatatcactaatatcgata

SEQ ID NO: 40410 - DNA, 80 bp, synthetic construct
  source 1..80: mol_type = other DNA
taaccgaatcataaaaacatattaagaaaaaccaaagaaagacaagagtttaagaaatatcgatatattattaatactct

SEQ ID NO: 40411 - DNA, 80 bp, synthetic construct
  source 1..80: mol_type = other DNA
caatctcgacgtcgacccaagatcatagatcaagtgaggagagtagagtctctgggagaacaggtgagtcaaaaacagag

SEQ ID NO: 40412 - DNA, 80 bp, synthetic construct
  source 1..80: mol_type = other DNA
aaatgtaggggttataatcaatgagggcaaattacttaaaatagcaggatcttatgaatctagatacatagtgttaagcc

SEQ ID NO: 40413 - DNA, 80 bp, synthetic construct
  source 1..80: mol_type = other DNA
actcggggatgtatcaaagtgccctgtgaccaaagtaataaacaatttggtaccaaagttcgcattcataaatggtggtg

SEQ ID NO: 40414 - DNA, 80 bp, synthetic construct
  source 1..80: mol_type = other DNA
aataaaaggggacgggatactacctgggggaatcaaatcatcaaagtgggtccagcggtctccattagacctgtagacat

SEQ ID NO: 40415 - DNA, 80 bp, synthetic construct
  source 1..80: mol_type = other DNA
aacaaggggttaccagttatgctccttgcccactgtgaatgagactacagattactcgagtgaaggtatagaagacttag

SEQ ID NO: 40416 - DNA, 80 bp, synthetic construct
  source 1..80: mol_type = other DNA
tgatatgagatggatgcaaaagaataaatcggggaaccatttagatgtctcaaattctcataattttcttgattgtaaat

SEQ ID NO: 40417 - DNA, 80 bp, synthetic construct
  source 1..80: mol_type = other DNA
aataacatataagggggaagaattgtgggaacttatcgactctttatttcccaatcttggtgaggatgtgtataatatta

SEQ ID NO: 40418 - DNA, 80 bp, synthetic construct
  source 1..80: mol_type = other DNA
acatagctaccatccacacactcacctagacaaatcaaactagatcataggcccggacgggttagagatccggtgctcgt

SEQ ID NO: 40419 - DNA, 80 bp, synthetic construct
  source 1..80: mol_type = other DNA
tggagcaaaagctatccctgatagggacaacaaaaattgggcaaatgatagcaacgaaagatggatgaatcactccacca

SEQ ID NO: 40420 - DNA, 80 bp, synthetic construct
  source 1..80: mol_type = other DNA
atcagagcaaaaagaggagcaaaaacaaaagtacacaccaaaacttttaaaggggaaaaaccagatataaaaactgaggc

SEQ ID NO: 40421 - DNA, 80 bp, synthetic construct
  source 1..80: mol_type = other DNA
ttcagatagaagatattaatgattttgaggatatcgagaggggtatcgatggcgaagaattatgacaacaatgattataa

SEQ ID NO: 40422 - DNA, 80 bp, synthetic construct
  source 1..80: mol_type = other DNA
ccaaacaagttttttctcttgtttggaatatataataatattaaatagtattttagggttaaagtaatactttaaaggga

SEQ ID NO: 40423 - DNA, 80 bp, synthetic construct
  source 1..80: mol_type = other DNA
aaaaacccctttaaccgaatcataaaaatatattaagaaaaaccaaaaaaagacaagagtttaagaaatatttatatatt

SEQ ID NO: 40424 - DNA, 80 bp, synthetic construct
  source 1..80: mol_type = other DNA
ccggcgatccaacccccattatacctcacattgctattgctaattcttctttatctgatcataactttgtatgtctggat

SEQ ID NO: 40425 - DNA, 80 bp, synthetic construct
  source 1..80: mol_type = other DNA
ggattatattaactgttacttataagactgcggtgcgacatgcagtactgtaccagagatccttctttcactggagtttc

SEQ ID NO: 40426 - DNA, 80 bp, synthetic construct
  source 1..80: mol_type = other DNA
ccggcaatccaacctcccttacacctaacatttctattgctaatccttctatatctgatcataactttttatgtctggat

SEQ ID NO: 40427 - DNA, 80 bp, synthetic construct
  source 1..80: mol_type = other DNA
ggattacatcaaccatcacttataaggctgcggtgcgacatgcaacactgtaccagagatccttctttcgctggagtttc

SEQ ID NO: 40428 - DNA, 80 bp, synthetic construct
  source 1..80: mol_type = other DNA
ccggtgatccgacctcccttatacctaacatctctattgctaattcttctttatctgatcataactttatatgtctggat

SEQ ID NO: 40429 - DNA, 80 bp, synthetic construct
  source 1..80: mol_type = other DNA
ggattatattaaccattacttataagactgcggtgcgacatgaagcattgtaccaaagatccttctctcgctggagtttc

SEQ ID NO: 40430 - DNA, 80 bp, synthetic construct
  source 1..80: mol_type = other DNA
accaaacaagaggaaaaacttgtttggaatatataataatattaaatagtattttagggttaaagtaatactttaaaagg

SEQ ID NO: 40431 - DNA, 80 bp, synthetic construct
  source 1..80: mol_type = other DNA
aagaaatcagatcaagtacattgtagcacacatacaacaatcaaatatatccacaacttctttaatcaaacgtatgataa

SEQ ID NO: 40432 - DNA, 80 bp, synthetic construct
  source 1..80: mol_type = other DNA
attaatgattttgaggatatcgagaggggtatcgatggcgaagaattatgacaacaatgattataagaactcatgatagt

SEQ ID NO: 40433 - DNA, 80 bp, synthetic construct
  source 1..80: mol_type = other DNA
tgaataataaagatgagatgaacaaatggtttgaagagttcaagaaaggaaatggacttgtggacactttcacaaactca

SEQ ID NO: 40434 - DNA, 80 bp, synthetic construct
  source 1..80: mol_type = other DNA
actgtaaccatcaatcatgtttattcaactgcttatataatcctgttttattaacattttcttatcttcttctgttttaa

SEQ ID NO: 40435 - DNA, 80 bp, synthetic construct
  source 1..80: mol_type = other DNA
ggcttatgctaatccagatctttctcaatcatgtatatgacatacttgacatctgcattacttccatttgttgtcaagta

SEQ ID NO: 40436 - DNA, 80 bp, synthetic construct
  source 1..80: mol_type = other DNA
agaagatattaatgattttgaagatatcgagaggggtatcgatggcgaagaattatgacaacagtgattataagaactca

SEQ ID NO: 40437 - DNA, 80 bp, synthetic construct
  source 1..80: mol_type = other DNA
ggttccaatactacactgaagatcaaggacaatttccgctacagcattctatccgttctgtgttttcttatcatttatta

SEQ ID NO: 40438 - DNA, 80 bp, synthetic construct
  source 1..80: mol_type = other DNA
tattgattctatggaaggtcttgagccccaagtcaaagaatttttagagttctttcctgatggccatcatggggaagtca

SEQ ID NO: 40439 - DNA, 80 bp, synthetic construct
  source 1..80: mol_type = other DNA
aaatatggacacagttgttcccagagcttgactgcttctttgagtttgcccatcattcagatgatgcacttttcatatat

SEQ ID NO: 40440 - DNA, 80 bp, synthetic construct
  source 1..80: mol_type = other DNA
gattcccttcattgataaaaaaattgtttgaaaggccttttaaaagtgcaatagaagtctttatttattataatataaaa

SEQ ID NO: 40441 - DNA, 80 bp, synthetic construct
  source 1..80: mol_type = other DNA
tatcctcttcagtaaccattatagaggctattagatacttgtcaaatgctagacataaccctagtgtgctacaactatat

SEQ ID NO: 40442 - DNA, 80 bp, synthetic construct
  source 1..80: mol_type = other DNA
cggaaatattcaatcaattagatccaataaagctaaatgaggatagttatgttttgttgaattatgaaataaattggaat

SEQ ID NO: 40443 - DNA, 80 bp, synthetic construct
  source 1..80: mol_type = other DNA
ctcttcagaagaaaagatatatgaatctattaaagatgttctaaacgtgtgtaaagaaaacgaatggaacatgttggtaa

SEQ ID NO: 40444 - DNA, 80 bp, synthetic construct
  source 1..80: mol_type = other DNA
tatgaaaaggatagaactgcagaacatgattcaggtatatccgatattgaatgattttaaagaaattctcgccaccatga

SEQ ID NO: 40445 - DNA, 80 bp, synthetic construct
  source 1..80: mol_type = other DNA
attgaatgattttaaagaaattctcgccaccatgagactctctgcactagagtagcgcctaggcagcataaaatgtgacc

SEQ ID NO: 40446 - DNA, 80 bp, synthetic construct
  source 1..80: mol_type = other DNA
acagcataaatgcagaaatgagtatttaacacaatggtataatcatttcttgatgcctattacattacagtctttatcaa

SEQ ID NO: 40447 - DNA, 80 bp, synthetic construct
  source 1..80: mol_type = other DNA
tagatggagatatatattatatatttggttattatgacgatatgcataaaattaatcagactcccttctcattcacgaat

SEQ ID NO: 40448 - DNA, 80 bp, synthetic construct
  source 1..80: mol_type = other DNA
ttaattagtaaatacgatatgttactacttgatagtataaattttgacagaatggcatttttaccattaacattacaaca

SEQ ID NO: 40449 - DNA, 80 bp, synthetic construct
  source 1..80: mol_type = other DNA
agagtatgcacttagatatttttcaaaatcaagatttattactgaaagaagaaaatgtattgaaattttacatttttcag

SEQ ID NO: 40450 - DNA, 80 bp, synthetic construct
  source 1..80: mol_type = other DNA
tggaataaggcgtgtaatattattagaaatataagtgattatttcgatatactaaaatcgtcacacactgagttctataa

SEQ ID NO: 40451 - DNA, 80 bp, synthetic construct
  source 1..80: mol_type = other DNA
cggaaatgttcaatcaattagaaccaataacactaaataaggataattacattttattaaatcatgaaataaattggaat

SEQ ID NO: 40452 - DNA, 80 bp, synthetic construct
  source 1..80: mol_type = other DNA
gttgtcaacacacggatttaacttactgccaaggatgtctaatatatcacgtttgcgaatggtgtagtcaatataacaga

SEQ ID NO: 40453 - DNA, 80 bp, synthetic construct
  source 1..80: mol_type = other DNA
tgttttcttgatgatgatcctcatttactaagaatgcgaacttttagaaatgaaatcacaaagagcgatttagaaaactt

SEQ ID NO: 40454 - DNA, 80 bp, synthetic construct
  source 1..80: mol_type = other DNA
aattaatatgtataatacattatttcctataaataacaaaatagttcataaatttgcaaacacaattaaacagtataaat

SEQ ID NO: 40455 - DNA, 80 bp, synthetic construct
  source 1..80: mol_type = other DNA
taatgtagttttaaagttaggagctaatgatgtttggagaccttctactctaacaaaacgtaaaggatggtgcttagagt

SEQ ID NO: 40456 - DNA, 80 bp, synthetic construct
  source 1..80: mol_type = other DNA
ggcgaagaattatgacaacagtgattataagaactcatgatagttttatttaagaaaaacatattgattttccccttggt

SEQ ID NO: 40457 - DNA, 80 bp, synthetic construct
  source 1..80: mol_type = other DNA
gatttcagaattaaaaatgtttatgatgatgtatttaattttattagggctttagtgaaatcaaatctttatgtaggaca

SEQ ID NO: 40458 - DNA, 80 bp, synthetic construct
  source 1..80: mol_type = other DNA
ttgttcttcagaagaaaagatatatgaacctattaaggatattttaaacgtatgtaaagaaaatgaatggaacacgttag

SEQ ID NO: 40459 - DNA, 80 bp, synthetic construct
  source 1..80: mol_type = other DNA
tataataatatatgattggtttgacataaggtttatgagaaatactccaatgactacgctcacagttaataaattgaaac

SEQ ID NO: 40460 - DNA, 80 bp, synthetic construct
  source 1..80: mol_type = other DNA
tgaataatttcagataaattatgttcgccaccatgagactctctgcactagagtagcgcctaggcagcataaaatgtgac

SEQ ID NO: 40461 - DNA, 80 bp, synthetic construct
  source 1..80: mol_type = other DNA
aatatagcagatgctttcttgataaagatccacatttactaagaatgcgaacttttagaaatgaaatcacaaagagtgac

SEQ ID NO: 40462 - DNA, 80 bp, synthetic construct
  source 1..80: mol_type = other DNA
ctagaaaatttaattaatatgtatgatgtattatttcctataaatcaaaaaatagttaataagtttgcaaacacaattaa

SEQ ID NO: 40463 - DNA, 80 bp, synthetic construct
  source 1..80: mol_type = other DNA
tttcagataatatattaactgatttacataacccgaattttacattacaagtgattagaaattgcagtaatatgtcagtt

SEQ ID NO: 40464 - DNA, 80 bp, synthetic construct
  source 1..80: mol_type = other DNA
gaatggaataaagcatgtaatcttattaggaatataagtaattatttcgatatattcaaatcatcacatacagagtctta

SEQ ID NO: 40465 - DNA, 80 bp, synthetic construct
  source 1..80: mol_type = other DNA
catcaaatcataattccttggctactgaagtacgcaattgcaaatggtgttcaattaataataattctattgtattgact

SEQ ID NO: 40466 - DNA, 80 bp, synthetic construct
  source 1..80: mol_type = other DNA
ggggaactccagaaattaaaggctctcatgctacattatcagagtctaggacccatggccaagtacatggctctattaga

SEQ ID NO: 40467 - DNA, 80 bp, synthetic construct
  source 1..80: mol_type = other DNA
actctaagaataagaggaaaagcaaaattgcatcatcatacctaacagatcctgatgatacatttgaacttagtgcatgt

SEQ ID NO: 40468 - DNA, 80 bp, synthetic construct
  source 1..80: mol_type = other DNA
actatcatgagattaacagaaaatggggttgagaaagatacatgttataagcttaatatttatcaatccattcgtcaact

SEQ ID NO: 40469 - DNA, 80 bp, synthetic construct
  source 1..80: mol_type = other DNA
acacattataatagatcaatccagcattggaagaaagaaacaaatacaaggattttttgataccacaaggaccataatga

SEQ ID NO: 40470 - DNA, 80 bp, synthetic construct
  source 1..80: mol_type = other DNA
ctatggggataattattgatggaaatcctgaaactaatccacccatcagagttccgtacattgggtctagaacagaggaa

SEQ ID NO: 40471 - DNA, 80 bp, synthetic construct
  source 1..80: mol_type = other DNA
gggtatacatttgggcatttggggatacagtagtgaactggaatgatgcacttgatatcgcaaatactagggttaagata

SEQ ID NO: 40472 - DNA, 80 bp, synthetic construct
  source 1..80: mol_type = other DNA
tgatgcaattcagtggggagttaaacaagttcttgctgatttatcaaatggaattgatcttgaaatcttgattctttcag

SEQ ID NO: 40473 - DNA, 80 bp, synthetic construct
  source 1..80: mol_type = other DNA
ctatctttatcccaattacctaggggtagacaaccaatatccgacccatttgctggagcaaatgacagagaaacaggagg

SEQ ID NO: 40474 - DNA, 80 bp, synthetic construct
  source 1..80: mol_type = other DNA
acttatcgacaaaggatgcagttgcattcataatacataaagtaggagcagaaaaagcatcccttgttcatatagatctc

SEQ ID NO: 40475 - DNA, 80 bp, synthetic construct
  source 1..80: mol_type = other DNA
gaggggtgggatattagtttacaaaacatcatggcttccgttttctaggtttagtcaactagcaagcctactttggtgct

SEQ ID NO: 40476 - DNA, 80 bp, synthetic construct
  source 1..80: mol_type = other DNA
gaggggtatcgatggcgaagaattatgacaacaatgattataagaactcataataattttatttaagaaaaacatattga

SEQ ID NO: 40477 - DNA, 80 bp, synthetic construct
  source 1..80: mol_type = other DNA
acatagccaccacctatacactcacccagacaaatcaaaccagactcaaatcattcagaaacaaatctcctaggatttaa

SEQ ID NO: 40478 - DNA, 80 bp, synthetic construct
  source 1..80: mol_type = other DNA
gaaaaaaacataggcccggacgggttagaaatccggtgctcatctgtggccagacaacctccacaccatagccacacaat

SEQ ID NO: 40479 - DNA, 80 bp, synthetic construct
  source 1..80: mol_type = other DNA
tggccgaggaaccaacatataccactgagcaagttgatgaattaatccatgctggactaggaacagtagatttcttccta

SEQ ID NO: 40480 - DNA, 80 bp, synthetic construct
  source 1..80: mol_type = other DNA
agagggggggagctaatagagaaagagcaagaggcaaccataggagagaatggagtattgcatgggtcggagatcaggtc

SEQ ID NO: 40481 - DNA, 80 bp, synthetic construct
  source 1..80: mol_type = other DNA
gcaagaggcaaccataggagagaatggagtattgcatgggtcggagatcaggtcaaagtcttcgagtggtgtaatcccag

SEQ ID NO: 40482 - DNA, 80 bp, synthetic construct
  source 1..80: mol_type = other DNA
aatcctataatgcagatcgaacaggtcgaggatgccttgcatcagtctggatccacgtatgtaacattctgaaaaacaaa

SEQ ID NO: 40483 - DNA, 80 bp, synthetic construct
  source 1..80: mol_type = other DNA
ttggggaccaactatcataatcaaatcattgggtcacatccccaagactgcacttccttttttcagcaaagacgggattg

SEQ ID NO: 40484 - DNA, 80 bp, synthetic construct
  source 1..80: mol_type = other DNA
tgccattgctggagatcaactcctcaatgtaggggtcattcaatcaaaggtaagatcactcatgtactacactgatggtg

SEQ ID NO: 40485 - DNA, 80 bp, synthetic construct
  source 1..80: mol_type = other DNA
tataatgttaccttatttaaattgctaacacccctgattgagaacctgagtaaaatttccgctgttacagacaccaaacc

SEQ ID NO: 40486 - DNA, 80 bp, synthetic construct
  source 1..80: mol_type = other DNA
cctgaatcacaatatcaatgtttaagggggaatcttaattcttgcacttttacccctattatcgggaactttcttaagcg

SEQ ID NO: 40487 - DNA, 80 bp, synthetic construct
  source 1..80: mol_type = other DNA
tacatgtccatgagtgacctctaagagtcaacctccaatgattatccgttaaactcagatacaacaattcaaaaattaat

SEQ ID NO: 40488 - DNA, 80 bp, synthetic construct
  source 1..80: mol_type = other DNA
attaagcctccagatatcaatgaatatgaatatatctcttagaaaacatgattattatgtgataacatagtacaatttaa

SEQ ID NO: 40489 - DNA, 80 bp, synthetic construct
  source 1..80: mol_type = other DNA
ggtgtacgcagatgtgtggccgcttaatgacccagaactcatgtcacgtaatgctctgaaccccaactatcgatttgctg

SEQ ID NO: 40490 - DNA, 80 bp, synthetic construct
  source 1..80: mol_type = other DNA
attgaaatgggctcatctcttttaggggagttccaaataataccatttttaagggaactaatactttaatcctattgagt

SEQ ID NO: 40491 - DNA, 80 bp, synthetic construct
  source 1..80: mol_type = other DNA
tggggtcatcccactcttactgctgcgcaagctgcaggtaaagtgagagaatctatgtgtgcaggtaagttacttgattt

SEQ ID NO: 40492 - DNA, 80 bp, synthetic construct
  source 1..80: mol_type = other DNA
gtggcaagctgatcttgctgatgatagtaacttaataaaagattttatcccattatggaatggaaacggagcagttacgg

SEQ ID NO: 40493 - DNA, 80 bp, synthetic construct
  source 1..80: mol_type = other DNA
ggcatgataacaacaattaaaatcatggatcccagtacaccaaccaatgtccctgtagaggagatcaggaagagtttaca

SEQ ID NO: 40494 - DNA, 80 bp, synthetic construct
  source 1..80: mol_type = other DNA
ccttctgcagctatgagtaatcacatcaaactagccatgcattcaccagaagccagcatagacagagtagagataacagg

SEQ ID NO: 40495 - DNA, 80 bp, synthetic construct
  source 1..80: mol_type = other DNA
acagagaaattcttggatgtttgctacagtgtacttatgcaggcatggatagtaacatgcaagtgcatgactgctcctga

SEQ ID NO: 40496 - DNA, 80 bp, synthetic construct
  source 1..80: mol_type = other DNA
taggccagaatggcggcctcttctgagatactccttcctgaagtccatttgaactcaccaatagtcaaacacaaactcat

SEQ ID NO: 40497 - DNA, 80 bp, synthetic construct
  source 1..80: mol_type = other DNA
ttggattgttgtcaacatgctgatttaacttattgcagcggttgtaccatgtatcatgtttgtcaatggtgcaatcaata

SEQ ID NO: 40498 - DNA, 80 bp, synthetic construct
  source 1..80: mol_type = other DNA
ttagtagatatatatgataagttattacttgatgatgtgaattttactagaatgtcattcttaccagcgtctttacagca

SEQ ID NO: 40499 - DNA, 80 bp, synthetic construct
  source 1..80: mol_type = other DNA
aattaaataatacagtcttaaaattaggagttaatgatacatggagaccgtcacctccaactagatgtaaaggatggtgt

SEQ ID NO: 40500 - DNA, 80 bp, synthetic construct
  source 1..80: mol_type = other DNA
tataagaactcatgatagttttatttaagaaaaacatattgattttccccttggtgtatggtgataagtgttactagagc

SEQ ID NO: 40501 - DNA, 80 bp, synthetic construct
  source 1..80: mol_type = other DNA
ctcgtacctataactagctttatcccctcagcaacatctccccatgggtgtactagaataccatcattttcactcatcaa

SEQ ID NO: 40502 - DNA, 80 bp, synthetic construct
  source 1..80: mol_type = other DNA
gacccattggtgttacactcacaatgtaatacttggagattgtcttgatttcacggcatctaaccagtatttatcaatgg

SEQ ID NO: 40503 - DNA, 80 bp, synthetic construct
  source 1..80: mol_type = other DNA
accaaggggagaatcagatggcatcgttatatgacgaattgcaaaaagattacgtaggtccggaaccactagattccggt

SEQ ID NO: 40504 - DNA, 80 bp, synthetic construct
  source 1..80: mol_type = other DNA
tatggacttggaacaagatggcatcgttatatgacgaattgcaaaaagattacgtaggtccggaaccactagattccggt

SEQ ID NO: 40505 - DNA, 80 bp, synthetic construct
  source 1..80: mol_type = other DNA
gctttaatctacgaatcattatgagtaacactgcaagagagggacatagagctggtgctctcctcagtcttttatcacta

SEQ ID NO: 40506 - DNA, 80 bp, synthetic construct
  source 1..80: mol_type = other DNA
ggctttttttatgaaaagtcttgtggaagccatggctacttttaaagacgcttgctatcaatataaaaagttaaacaaat

SEQ ID NO: 40507 - DNA, 80 bp, synthetic construct
  source 1..80: mol_type = other DNA
gattgttgtcaacatacggacttgacttactgccaaggatgcttaatatatcacgtttgtgaatggtgtagtcaatatag

SEQ ID NO: 40508 - DNA, 80 bp, synthetic construct
  source 1..80: mol_type = other DNA
cagatgctttcttgataatgatccacatttactaagaatgcgaacttttagaaatgaaatcacaaagagtgacttagaaa

SEQ ID NO: 40509 - DNA, 80 bp, synthetic construct
  source 1..80: mol_type = other DNA
acttaattaatatgtatgatacattatttcctataaatcaaaaaatagttactaagtttgcaaacacaattaaacaacat

SEQ ID NO: 40510 - DNA, 80 bp, synthetic construct
  source 1..80: mol_type = other DNA
aaatgtagaaatgagtatttgatacaatggtataatcattttttaatgccagttacactacagtctttatcaatagaatt

SEQ ID NO: 40511 - DNA, 80 bp, synthetic construct
  source 1..80: mol_type = other DNA
taattagtaaatatgatgtattactgctagatagtataaattttgacagaatggcattcttaccattaacattacagcaa

SEQ ID NO: 40512 - DNA, 80 bp, synthetic construct
  source 1..80: mol_type = other DNA
agacttagaaatatttgtgataatatattaaacttcattagagctttaatcaagtcaaatactggtattggacactgttc

SEQ ID NO: 40513 - DNA, 80 bp, synthetic construct
  source 1..80: mol_type = other DNA
atcgcaagaacggatacatgattacattagagacgtctttgacgtgtgtgatgaaagcaagtggagtgcatccgtagtag

SEQ ID NO: 40514 - DNA, 80 bp, synthetic construct
  source 1..80: mol_type = other DNA
gtatattcaattgcttagaaccagtggaattaggtaacgttaactatattttactcaatcatgaagtaaattgggatgtt

SEQ ID NO: 40515 - DNA, 80 bp, synthetic construct
  source 1..80: mol_type = other DNA
gctaatgtactcattcagaatactggaaaaattccacagatactgactttaagtgatgttataacagctttgcattctat

SEQ ID NO: 40516 - DNA, 80 bp, synthetic construct
  source 1..80: mol_type = other DNA
gatctatgattggttcgatattagatatatgagaaacacaccaacgactacatttacagttgataaattgagacaattat

SEQ ID NO: 40517 - DNA, 80 bp, synthetic construct
  source 1..80: mol_type = other DNA
gtgcaagacgaaagactgttgattatgactcaggtatatctgatgttgagtaattaaggagaggtcacattcgccaccac

SEQ ID NO: 40518 - DNA, 80 bp, synthetic construct
  source 1..80: mol_type = other DNA
ggattgctgtcaacatactgatttgacttactgtagaggctgttctatatatcatgtttgtcagtggtgcaatcaatacg

SEQ ID NO: 40519 - DNA, 80 bp, synthetic construct
  source 1..80: mol_type = other DNA
gtagatgttttcttgatgatgaaccgcacttgttgagaatgaggacttttaaaaacagtgtaacaaaggaagattttgca

SEQ ID NO: 40520 - DNA, 80 bp, synthetic construct
  source 1..80: mol_type = other DNA
aacttgattgatatgtataacgtgttatttcctgtgaatcagaagatagtaaataaatttattaataacacgaaacaaca

SEQ ID NO: 40521 - DNA, 80 bp, synthetic construct
  source 1..80: mol_type = other DNA
taagtgtagaaatgaatatgtgccacaatggtataatcacttattgatgccaataacgttacaatctttatcaatagaat

SEQ ID NO: 40522 - DNA, 80 bp, synthetic construct
  source 1..80: mol_type = other DNA
ttagcagatatgtatgataagttgttgcttgatgatgcgaattttaacagaatgtcatttttgccattaatgctacagca

SEQ ID NO: 40523 - DNA, 80 bp, synthetic construct
  source 1..80: mol_type = other DNA
agaatatgcacttcggtatttttcaaaatcaaggttcattagtgaaaagaagagacagattgatcactctcatttttctg

SEQ ID NO: 40524 - DNA, 80 bp, synthetic construct
  source 1..80: mol_type = other DNA
ctaatatactggagaatttacataatccaaattttaaaatacaaattacccgtaattgcagtgctatgtctgttagatgg

SEQ ID NO: 40525 - DNA, 80 bp, synthetic construct
  source 1..80: mol_type = other DNA
aatgaagcatgtaaacttgtcaaagatgtcggagtttacttcgatatactgagaacatcgcatgttgaattttatgatgt

SEQ ID NO: 40526 - DNA, 80 bp, synthetic construct
  source 1..80: mol_type = other DNA
ttcacccagatgcagaatgtttacacaacataaactgaaagcagtatcaaaagtggttaaaccgagttatgttacatcaa

SEQ ID NO: 40527 - DNA, 80 bp, synthetic construct
  source 1..80: mol_type = other DNA
ggctttttttatgaaaagtcttgtggaagccatggctactttcaaagatgcttgttattattataagagaattaacaagt

SEQ ID NO: 40528 - DNA, 80 bp, synthetic construct
  source 1..80: mol_type = other DNA
gagttaagaagatatatgataacattttcaattttctacgagctttagttaaatcaaattctaatattggacattgttcg

SEQ ID NO: 40529 - DNA, 80 bp, synthetic construct
  source 1..80: mol_type = other DNA
tcacaagaaaagatatatgaacatattaaagatgttctggatgtatgtgatgatgaaaaatggaaaatggcggtagcgga

SEQ ID NO: 40530 - DNA, 80 bp, synthetic construct
  source 1..80: mol_type = other DNA
aatatttaattgtttagaaccagtagaacttaatactgttgaatatgttttgtttaatcatgaggtgaattgggatgtca

SEQ ID NO: 40531 - DNA, 80 bp, synthetic construct
  source 1..80: mol_type = other DNA
ttaatttgttagttcagagcgttggtaaagtaccacaaatactgactttaaatgatattgtcataatcatgaaatctatc

SEQ ID NO: 40532 - DNA, 80 bp, synthetic construct
  source 1..80: mol_type = other DNA
atatatgagtggtttgatatcagatatatgaggaacacaccaatgactacatttacagttgataaattaagacagttatg

SEQ ID NO: 40533 - DNA, 80 bp, synthetic construct
  source 1..80: mol_type = other DNA
cacaggagtgaagactgttgattatgattccggtatatctgacgttgaataatgaaatagagatcacatttgccaccata

SEQ ID NO: 40534 - DNA, 80 bp, synthetic construct
  source 1..80: mol_type = other DNA
gaataatgaaatagagatcacatttgccaccataagactccctgcactagagtagcgcctaggcagcataaaatgtgacc

SEQ ID NO: 40535 - DNA, 80 bp, synthetic construct
  source 1..80: mol_type = other DNA
gactgttgtcaacacaccgacttaacttattgtcgaggttgtaccatgtatcatgtatgtcaatggtgtagtcaatatga

SEQ ID NO: 40536 - DNA, 80 bp, synthetic construct
  source 1..80: mol_type = other DNA
tagatgttttcttgatagtcaaccacatctattgagaatgagaactttcaagaatgaagtgacgaaaaatgatttaatga

SEQ ID NO: 40537 - DNA, 80 bp, synthetic construct
  source 1..80: mol_type = other DNA
atttaattgacatgtacaatatattatttcctataaatcaaagaatagtagatagattcattagtaacacaagacaacat

SEQ ID NO: 40538 - DNA, 80 bp, synthetic construct
  source 1..80: mol_type = other DNA
aaatgtagaaatgaatgtatgccacagtggtacaatcacctattgatgccaataacattacaatctctatcaattgaatt

SEQ ID NO: 40539 - DNA, 80 bp, synthetic construct
  source 1..80: mol_type = other DNA
agatggtgatgtttattatgtatttggatattatgatagtatgagtgacattaatcaaactccattctcatttgcaaatt

SEQ ID NO: 40540 - DNA, 80 bp, synthetic construct
  source 1..80: mol_type = other DNA
taatagatatgtatgataagttactacttgataatgtaaattttaatcgaatgtcattcttaccattagcattacaacaa

SEQ ID NO: 40541 - DNA, 80 bp, synthetic construct
  source 1..80: mol_type = other DNA
gaatatgcactcagatatttttcaaaatcaaggtttattagtgaaaagaggaaatgtatcagtgatgtacatttttccac

SEQ ID NO: 40542 - DNA, 80 bp, synthetic construct
  source 1..80: mol_type = other DNA
taatgtaatcgaaaatttacataatccaagttttaaaatacaaattacacgtaattgtagtgaattatcttctgattgga

SEQ ID NO: 40543 - DNA, 80 bp, synthetic construct
  source 1..80: mol_type = other DNA
tgaatcacgcagtcttgaagttaggagttaatgatacatggagaccatcacctccgaccaaatataaaggatggtgtctg

SEQ ID NO: 40544 - DNA, 80 bp, synthetic construct
  source 1..80: mol_type = other DNA
acggagcatgtaaacttgttaaagatatgaatacttattttgatattctaaaaacatcacatattgaattttatagtatt

SEQ ID NO: 40545 - DNA, 80 bp, synthetic construct
  source 1..80: mol_type = other DNA
tcaaccagatgtagaatgtttacacagcataaacttaaaatagcatctaaacatataaaaccaaattatgtaacatcaaa

SEQ ID NO: 40546 - DNA, 80 bp, synthetic construct
  source 1..80: mol_type = other DNA
tcatagaacatcagcaactgaggtgcataactgtaaatggtgctcaatcaataacggttatattgtatggaatgatttta

SEQ ID NO: 40547 - DNA, 80 bp, synthetic construct
  source 1..80: mol_type = other DNA
aatgttatgaatgtattaattaatagtatcggtaaagtaccaagaatattaactttaagtgacgttatttcgactttacg

SEQ ID NO: 40548 - DNA, 80 bp, synthetic construct
  source 1..80: mol_type = other DNA
aaatatttaatcaattagatccaataaagttaaatgagaatagctatgttttgttgaattataaaataaattggaatgtt

SEQ ID NO: 40549 - DNA, 80 bp, synthetic construct
  source 1..80: mol_type = other DNA
acaaatgtagaaatgaatgtatgacgcagtggtataatcacttactaatgccaataacgttacaatctctatcaattgaa

SEQ ID NO: 40550 - DNA, 80 bp, synthetic construct
  source 1..80: mol_type = other DNA
tggaatgaagcatgcaagctcgttaaaaatgtcagtgcttattttgatatgctgaaaacatcacgtgttgaattttatag

SEQ ID NO: 40551 - DNA, 80 bp, synthetic construct
  source 1..80: mol_type = other DNA
tgtttctactagatgtagaatattcacacaacataaactcaaaatggcatctaagctaatcaaaccaaattatataacct

SEQ ID NO: 40552 - DNA, 80 bp, synthetic construct
  source 1..80: mol_type = other DNA
gtgtttagattgttgtcaacatactgacttgacttactgccaaggatgcttaatatatcatgtgtgtgaatggtgtagtc

SEQ ID NO: 40553 - DNA, 80 bp, synthetic construct
  source 1..80: mol_type = other DNA
aataaagcatgtaatcttattagggatataagtaattttttcgatatattcaaatcatcacattcaaagtcttataatgt

SEQ ID NO: 40554 - DNA, 80 bp, synthetic construct
  source 1..80: mol_type = other DNA
taatgtatctcctagatgtagagtattcacacaatataaattagaaatagcatctaaattgattaaaccaaattatgtag

SEQ ID NO: 40555 - DNA, 80 bp, synthetic construct
  source 1..80: mol_type = other DNA
tttagaattaaaaatgtttataatgatatatttaattttattagagctttagtgaaatcaaatctttacgtgggacattg

SEQ ID NO: 40556 - DNA, 80 bp, synthetic construct
  source 1..80: mol_type = other DNA
ttcttcagaagaaaagatatatgaatctgttaaagatgttttgaatgtttgtaaagaaaatgaatggaatatattggtaa

SEQ ID NO: 40557 - DNA, 80 bp, synthetic construct
  source 1..80: mol_type = other DNA
cagaaatgttcaatcaattagaaccaataaagttaaatgataataattatattttattaaattatgaaataaattggaat

SEQ ID NO: 40558 - DNA, 80 bp, synthetic construct
  source 1..80: mol_type = other DNA
gttatgaatgtattaattaatagtatcggtaaagtaccaaaaatattaactttgagtgacgttattttaattttacgtat

SEQ ID NO: 40559 - DNA, 80 bp, synthetic construct
  source 1..80: mol_type = other DNA
aataatatatgattggtttggtataaggtttatgagaaacacgccaatgactacgttcacagttaacaaattgaaacaat

SEQ ID NO: 40560 - DNA, 80 bp, synthetic construct
  source 1..80: mol_type = other DNA
tatgaaaaggatagacctgcagaacatgattcaggtgtgtccgatgttgaataattttagagaaattatgttcgccacca

SEQ ID NO: 40561 - DNA, 80 bp, synthetic construct
  source 1..80: mol_type = other DNA
gtgcttagattgttgtcagtatacggatttgacttactgccaaggatgtctaatatatcacgtttgtgaatggtgtagtc

SEQ ID NO: 40562 - DNA, 80 bp, synthetic construct
  source 1..80: mol_type = other DNA
aatatagcagatgttttcttgatgataatcctcatttactaagaatgcggacttttagaaatgaaatcacaaaggatgac

SEQ ID NO: 40563 - DNA, 80 bp, synthetic construct
  source 1..80: mol_type = other DNA
ttagagaacttaattaatatgtataatacattatttcctataaatcaaaaaatagttcataagtttgcaaatataattaa

SEQ ID NO: 40564 - DNA, 80 bp, synthetic construct
  source 1..80: mol_type = other DNA
acaacataagtgtagaaatgagtatttgacgcaacggtataatcatttcttaatgccaattacattacagtctttatcaa

SEQ ID NO: 40565 - DNA, 80 bp, synthetic construct
  source 1..80: mol_type = other DNA
tagaattagatggagatatatactatatatttggttattatgacgatatgcacaaaattaatcagactcctttctcattc

SEQ ID NO: 40566 - DNA, 80 bp, synthetic construct
  source 1..80: mol_type = other DNA
actaatttaattagtaagtatgatatattactactcgatagtataaattttgacagaatggcatttttaccattaacatt

SEQ ID NO: 40567 - DNA, 80 bp, synthetic construct
  source 1..80: mol_type = other DNA
acaacaagagtatgcacttagatatttttcaaaatcaagatttattactgaaaaaagaaaatgtattaaaatttcacatt

SEQ ID NO: 40568 - DNA, 80 bp, synthetic construct
  source 1..80: mol_type = other DNA
cagataatatattagataatttacatgatccgaattttacattacaagtgattagaaattgcagtaatatgtcagttgaa

SEQ ID NO: 40569 - DNA, 80 bp, synthetic construct
  source 1..80: mol_type = other DNA
aacaaattaaataatgcagttttaaagttaggagctaatgatgtttggagaccttctactctaacaaaatgtaaaggatg

SEQ ID NO: 40570 - DNA, 80 bp, synthetic construct
  source 1..80: mol_type = other DNA
tggaatgaggcgtgcaatcttattagaaatataaatgattatttcgatatactaaaatcgtcacgcactgaattttatga

SEQ ID NO: 40571 - DNA, 80 bp, synthetic construct
  source 1..80: mol_type = other DNA
tatatctcctagatgtagaatgttcacacaatataaattaaaaatagcatctaaattaattaaaccaaattatgtagcat

SEQ ID NO: 40572 - DNA, 80 bp, synthetic construct
  source 1..80: mol_type = other DNA
caaatcataattccttggctactgaagtacataattgtaagtggtgttcaattaataataattctattgtatgggatgat

SEQ ID NO: 40573 - DNA, 80 bp, synthetic construct
  source 1..80: mol_type = other DNA
catcacaagaaaagatatatgaatatgttgaagatgttctgaatgtgtgcgatgacgaaagatggaaaacgtcaataatg

SEQ ID NO: 40574 - DNA, 80 bp, synthetic construct
  source 1..80: mol_type = other DNA
gaaatctttaattgtctagaaccagtagagcttgatgatgtcaagtatgttttacttaaccatgaaataaattgggatgt

SEQ ID NO: 40575 - DNA, 80 bp, synthetic construct
  source 1..80: mol_type = other DNA
gattaatgtattggttcatagtattggtaaagtaccacaaatattaactttggagaatgttattgcaatcatgcaatcta

SEQ ID NO: 40576 - DNA, 80 bp, synthetic construct
  source 1..80: mol_type = other DNA
aatattaaatagtattttagggttaaagtaatactttaaaaggacaagtcacagacatttgatcttagttaaaactttta

SEQ ID NO: 40577 - DNA, 80 bp, synthetic construct
  source 1..80: mol_type = other DNA
cccactcccgaagcccagtccacacaagtaccaggaacgtgaaagcagcaaaagggtttatcggattccctcatgtcatt

SEQ ID NO: 40578 - DNA, 80 bp, synthetic construct
  source 1..80: mol_type = other DNA
ttttccagtggctgcataagaggcttgaaacctcagtcctctatgtaagtgaccctcattgcccccctgaccttgacgcc

SEQ ID NO: 40579 - DNA, 80 bp, synthetic construct
  source 1..80: mol_type = other DNA
tgacgatatcaacagtttcataactgagtttctgcttatagagccaagattattcactatctacttgggccagtgtgcag

SEQ ID NO: 40580 - DNA, 80 bp, synthetic construct
  source 1..80: mol_type = other DNA
aaaactctcaatgttcctccgcccccgagccccggtagggccagcacttccgagacacccattaaaaagggcacagacgc

SEQ ID NO: 40581 - DNA, 80 bp, synthetic construct
  source 1..80: mol_type = other DNA
tgatgaagataataatgaagtagctacagctcaactcacctgccaacctcataccagttgacctaattaatacaacctaa

SEQ ID NO: 40582 - DNA, 80 bp, synthetic construct
  source 1..80: mol_type = other DNA
ctattcaaagtcctgtagaccgcagtgcccagcaatgcccaaagacgacccccctcataatgacagccagaaggcccgga

SEQ ID NO: 40583 - DNA, 80 bp, synthetic construct
  source 1..80: mol_type = other DNA
caaaaaagccccttataaaggactccacggaccaagcgagaggccagccagcagctaatggcaagcgtgaacaccaagcg

SEQ ID NO: 40584 - DNA, 80 bp, synthetic construct
  source 1..80: mol_type = other DNA
gcccaagcacagaacagccacgacacaaggccaccaccagccatcccaatccgcatccccctcgtgggacccctgggcac

SEQ ID NO: 40585 - DNA, 80 bp, synthetic construct
  source 1..80: mol_type = other DNA
caacccccaaggtcgcccctggccttgaccaccaactgtatccccacagcccccgggaaacaaacccccagcaactggaa

SEQ ID NO: 40586 - DNA, 80 bp, synthetic construct
  source 1..80: mol_type = other DNA
ggcccctccccccctccctcaacgcaggaactccacaaccgaaccgcacaagcgatcgaggtgacccaaccgcaggcatc

SEQ ID NO: 40587 - DNA, 80 bp, synthetic construct
  source 1..80: mol_type = other DNA
tcacccactagacagaccctctcctcccggcaaactaaacaaaacttagggccaaggaacatacacacccgacagaaccc

SEQ ID NO: 40588 - DNA, 80 bp, synthetic construct
  source 1..80: mol_type = other DNA
caaactaaacaaaacttagggccaaggaacatacacacccgacagaacccaaactccggcccacggcgccgcacccccgt

SEQ ID NO: 40589 - DNA, 80 bp, synthetic construct
  source 1..80: mol_type = other DNA
aaactccggcccacggcgccgcacccccgtcccccgacaacccgagggagcccccaaccaatcccgccggctccgccggt

SEQ ID NO: 40590 - DNA, 80 bp, synthetic construct
  source 1..80: mol_type = other DNA
aaaggggccccggtggccgacggccagcaccgcgagggcgcccacccaccccacactcgactacggcggccgaaccagta

SEQ ID NO: 40591 - DNA, 80 bp, synthetic construct
  source 1..80: mol_type = other DNA
cccacactcgactacggcggccgaaccagtatctagaccaccctgggccaccagctcccagactcggccatcatcccgca

SEQ ID NO: 40592 - DNA, 80 bp, synthetic construct
  source 1..80: mol_type = other DNA
tctagaccaccctgggccaccagctcccagactcggccatcatcccgcagaaagggaaggcaacaacccgcacaccccag

SEQ ID NO: 40593 - DNA, 80 bp, synthetic construct
  source 1..80: mol_type = other DNA
ccccgatccagtgggcagccacccaacccgaactagcacccaagagcgatccctgaaggacccccgaaccccaaaagaca

SEQ ID NO: 40594 - DNA, 80 bp, synthetic construct
  source 1..80: mol_type = other DNA
tcaacatcccacagcctctccacgtctcccggtctcctcctcttctcgaagggaccaaaagatcaatccaccacacccga

SEQ ID NO: 40595 - DNA, 80 bp, synthetic construct
  source 1..80: mol_type = other DNA
cgacactcaattccccaccccctaaggagacaccaggaatcccagaatcaagactcatccagtgtccatcatgggtccta

SEQ ID NO: 40596 - DNA, 80 bp, synthetic construct
  source 1..80: mol_type = other DNA
ctcctcctcgtcatcaagcaaccgtcgcatccagcatcaagcccacctgaaattgtttccggcttccctctggctgaaca

SEQ ID NO: 40597 - DNA, 80 bp, synthetic construct
  source 1..80: mol_type = other DNA
taaattggattatgatcaatactgtgcagatatggctgcagaaggactcatgaatgcattggtgaactcaactctactgg

SEQ ID NO: 40598 - DNA, 80 bp, synthetic construct
  source 1..80: mol_type = other DNA
gtcagtaatgctttcagcaactgcatggtggctttgggggagctcaaatttgctgccctttgtcacagggaagactctat

SEQ ID NO: 40599 - DNA, 80 bp, synthetic construct
  source 1..80: mol_type = other DNA
gggatggacctatataaatctaaccgcaacaatatgtattggctgactatcccgccaatgaagaacctagccttaggtgt

SEQ ID NO: 40600 - DNA, 80 bp, synthetic construct
  source 1..80: mol_type = other DNA
gtaggcatgggagtcagctgcacagtcactcgggaagacggaaccaaccgcagatagggctgccagtgaaccaatcacat

SEQ ID NO: 40601 - DNA, 80 bp, synthetic construct
  source 1..80: mol_type = other DNA
atggccacacttttaaggagcttagcattgttcaaaagaaacaaggacaaaccacccattacatcaggatccggtggagc

SEQ ID NO: 40602 - DNA, 80 bp, synthetic construct
  source 1..80: mol_type = other DNA
aactgagggatataacagtagaactcagaggtgctttccttaaccactgctttactgaaatacatgacgttcttgaccag

SEQ ID NO: 40603 - DNA, 80 bp, synthetic construct
  source 1..80: mol_type = other DNA
aacgggttttctgatgaaggtacttatcatgagttaattgaagctctagattacatcttcataactgatgacatacatct

SEQ ID NO: 40604 - DNA, 80 bp, synthetic construct
  source 1..80: mol_type = other DNA
gacaggggagattttctcattttttagaagtttcggccaccccagacttgaagcagtaacggctgctgaaaatgttagga

SEQ ID NO: 40605 - DNA, 80 bp, synthetic construct
  source 1..80: mol_type = other DNA
aatacatgaatcagcctaaagtcattgtgtatgagacactgatgaaaggtcatgccatattttgtggaatcataatcaac

SEQ ID NO: 40606 - DNA, 80 bp, synthetic construct
  source 1..80: mol_type = other DNA
ggctatcgtgacaggcacggaggcagttggccgccgctgaccctccccctacatgctgctgacacaatccgaaatgctca

SEQ ID NO: 40607 - DNA, 80 bp, synthetic construct
  source 1..80: mol_type = other DNA
gggaggtttgaacttcggccgatcttactttgatccggcatattttaggttagggcaagagatggtaaggaggtcagctg

SEQ ID NO: 40608 - DNA, 80 bp, synthetic construct
  source 1..80: mol_type = other DNA
agcttcaggtgaaggattaacacatgagcagtgcgttgataactggagatcctttgctggagtgaaatttggctgcttta

SEQ ID NO: 40609 - DNA, 80 bp, synthetic construct
  source 1..80: mol_type = other DNA
tgcctcttagcctggatagtgatctgacaatgtacctaaaggataaggcacttgctgctctccaaagggaatgggattca

SEQ ID NO: 40610 - DNA, 80 bp, synthetic construct
  source 1..80: mol_type = other DNA
gtttacccgaaagagttcctgcgttacgaccctcccaaaggaaccgggtcccggaggcttgtagatgttttccttaatga

SEQ ID NO: 40611 - DNA, 80 bp, synthetic construct
  source 1..80: mol_type = other DNA
ttcgagctttgacccatatgatatgataatgtatgttgtgagtggagcttacctccatgaccctgagttcaacttgtcct

SEQ ID NO: 40612 - DNA, 80 bp, synthetic construct
  source 1..80: mol_type = other DNA
atagtctgaaggagaaggagatcaaggaaacaggtagactttttgctaaaatgacttacaaaatgagagcatgccaagtg

SEQ ID NO: 40613 - DNA, 80 bp, synthetic construct
  source 1..80: mol_type = other DNA
attgctgaaaatctaatctcaaacgggattggcaaatattttaaggacaatgggatggccaaggatgaacatgatttgac

SEQ ID NO: 40614 - DNA, 80 bp, synthetic construct
  source 1..80: mol_type = other DNA
taaggcactccacactctagctgtctcaggaatccccaaagatctcaaagaaagtcacagaggggggccagtcttaaaaa

SEQ ID NO: 40615 - DNA, 80 bp, synthetic construct
  source 1..80: mol_type = other DNA
cctactcccgaaactcagttcacacaagtaccaaaaacgtgagagcagcgaaagggtttatagggttccctcaagtaatt

SEQ ID NO: 40616 - DNA, 80 bp, synthetic construct
  source 1..80: mol_type = other DNA
cagcagggccaagacactgatcatccggagaatgtggaagcctacgagacagtcagtgcatttatcacgactgatctcaa

SEQ ID NO: 40617 - DNA, 80 bp, synthetic construct
  source 1..80: mol_type = other DNA
gaagtactgccttaattggagatatgagaccatcagcctgtttgcacagaggctaaatgagatttacggattaccctcat

SEQ ID NO: 40618 - DNA, 80 bp, synthetic construct
  source 1..80: mol_type = other DNA
tttttcagtggctgcataaaaggcttgagacctctgttctgtatgtaagtgatcctcattgcccccctgatcttgacgcc

SEQ ID NO: 40619 - DNA, 80 bp, synthetic construct
  source 1..80: mol_type = other DNA
catatcccgttatgcaaagtccctaatgaccaaatcttcattaagtaccctatgggaggtatagaaggatattgtcagaa

SEQ ID NO: 40620 - DNA, 80 bp, synthetic construct
  source 1..80: mol_type = other DNA
gctgtggaccatcagcaccattccctatttatacctggctgcttatgagagcggagtaaggattgcttcgttagttcagg

SEQ ID NO: 40621 - DNA, 80 bp, synthetic construct
  source 1..80: mol_type = other DNA
gggacaatcagaccatagccgtaacaaaaagggtacccagcacatggccttacaacctcaagaaacgggaagctgctagg

SEQ ID NO: 40622 - DNA, 80 bp, synthetic construct
  source 1..80: mol_type = other DNA
gtaactagagactactttgtaattcttaggcaaaggctacatgacattggtcatcacctcaaggcaaatgagacaattgt

SEQ ID NO: 40623 - DNA, 80 bp, synthetic construct
  source 1..80: mol_type = other DNA
ttcatcacatttttttgtctattcaaaaggaatatattatgatgggctacttgtgtctcaatcactcaagagcatcgcaa

SEQ ID NO: 40624 - DNA, 80 bp, synthetic construct
  source 1..80: mol_type = other DNA
gatgtgtattctggtcagagactatagttgatgagacaagggcagcatgcagcaatattgccacaacgatggctaagagc

SEQ ID NO: 40625 - DNA, 80 bp, synthetic construct
  source 1..80: mol_type = other DNA
atcgagagaggttatgaccgttaccttgcatattccctgaatgtcctaaaagtgatacagcaaattctgatctcccttgg

SEQ ID NO: 40626 - DNA, 80 bp, synthetic construct
  source 1..80: mol_type = other DNA
cttcacaatcaattcaaccatgacccgggatgtagtcataccactcctcacaaacaacgacctcttaataaggatggcac

SEQ ID NO: 40627 - DNA, 80 bp, synthetic construct
  source 1..80: mol_type = other DNA
tattgcccgcccctattggggggatgaattatttgaatatgagcaggctgtttgtcagaaacatcggtgatccagtaaca

SEQ ID NO: 40628 - DNA, 80 bp, synthetic construct
  source 1..80: mol_type = other DNA
gagcaggctgtttgtcagaaacatcggtgatccagtaacatcatcaattgctgatctcaagagaatgattctcgcctcgc

SEQ ID NO: 40629 - DNA, 80 bp, synthetic construct
  source 1..80: mol_type = other DNA
tcatcaattgctgatctcaagagaatgattctcgcctcgctaatgcctgaagagaccctccatcaagtaatgacacaaca

SEQ ID NO: 40630 - DNA, 80 bp, synthetic construct
  source 1..80: mol_type = other DNA
accaggagactcttcattcctagactgggctagcgacccttactcagcgaatcttgtatgtgtccagagcatcaccagac

SEQ ID NO: 40631 - DNA, 80 bp, synthetic construct
  source 1..80: mol_type = other DNA
tccttaagaacataactgcaaggtttgtcctgatccatagtccaaacccaatgttaaaaggattattccatgatgacagt

SEQ ID NO: 40632 - DNA, 80 bp, synthetic construct
  source 1..80: mol_type = other DNA
aaagaagaggacgagggactggcggcattcctcatggacaggcatattatagtgcctagggcagctcatgaaatcttgga

SEQ ID NO: 40633 - DNA, 80 bp, synthetic construct
  source 1..80: mol_type = other DNA
tcatagtgtcacaggggcaagagagtctatcgcgggtatgctggacaccacaaagggcctgattcgagccagcatgagga

SEQ ID NO: 40634 - DNA, 80 bp, synthetic construct
  source 1..80: mol_type = other DNA
agggggggttaacctctcgagtgataactagattgtccaattatgactatgaacaattcagggcagggatggtgctattg

SEQ ID NO: 40635 - DNA, 80 bp, synthetic construct
  source 1..80: mol_type = other DNA
tgaacaattcagggcagggatggtgctattgacaggaagaaggagaaatgccctcattgacaaagagtcatgttcagtgc

SEQ ID NO: 40636 - DNA, 80 bp, synthetic construct
  source 1..80: mol_type = other DNA
acaggaagaaggagaaatgccctcattgacaaagagtcatgttcagtgcaattggcgagagctctaagaagccatatgtg

SEQ ID NO: 40637 - DNA, 80 bp, synthetic construct
  source 1..80: mol_type = other DNA
ggcgaggctagcccgaggacggcctatttacggccttgaggtccctgatgtactagaatctatgcgaggccacattattc

SEQ ID NO: 40638 - DNA, 80 bp, synthetic construct
  source 1..80: mol_type = other DNA
ggcgtcacgagacatgtgtcatatgcgaatgtggatcagtcaactacggatggttttttgtcccctcgggttgccaactg

SEQ ID NO: 40639 - DNA, 80 bp, synthetic construct
  source 1..80: mol_type = other DNA
gatgatattgacaaggaaacatcatccttgagagtcccctatattggttctaccactgatgagagaacagacatgaagct

SEQ ID NO: 40640 - DNA, 80 bp, synthetic construct
  source 1..80: mol_type = other DNA
tgagctgccgagattgggtggtaaggaggacaggagggtcaaacagaaccgaggagaagccggggagagccacagagaaa

SEQ ID NO: 40641 - DNA, 80 bp, synthetic construct
  source 1..80: mol_type = other DNA
tgcctttgtaagagccccaagtcgatccttgcgatctgctgttagaatagcaacagtgtactcatgggcttacggtgatg

SEQ ID NO: 40642 - DNA, 80 bp, synthetic construct
  source 1..80: mol_type = other DNA
atgatagctcctggaacgaagcttggttgttggcaaaacaaagggccaatgtgagcctggaggagctaagggtgatcact

SEQ ID NO: 40643 - DNA, 80 bp, synthetic construct
  source 1..80: mol_type = other DNA
cccatctcaacttcgactaatttggcacataggttgagggatcgtagtactcaagtaaaatactcaggtacatcccttgt

SEQ ID NO: 40644 - DNA, 80 bp, synthetic construct
  source 1..80: mol_type = other DNA
ccgagtggcgaggtataccacaatctccaacgacaatctctcatttgtcatatcagataagaaggttgatactaacttta

SEQ ID NO: 40645 - DNA, 80 bp, synthetic construct
  source 1..80: mol_type = other DNA
tataccaacaaggaatgcttctaggattgggtgttttagaaacattgttccgacttgagaaaaacaccggatcatccaac

SEQ ID NO: 40646 - DNA, 80 bp, synthetic construct
  source 1..80: mol_type = other DNA
tcaaacagaaccgaggagaagccggggagagccacagagaaaccgagcctagcagagcaagtgatgtgagagctgcccat

SEQ ID NO: 40647 - DNA, 80 bp, synthetic construct
  source 1..80: mol_type = other DNA
acagtactacatcttcacgtcgaaacagattgttgcgtgatccctatgatagatcatcccagaatacccagctcccgcaa

SEQ ID NO: 40648 - DNA, 80 bp, synthetic construct
  source 1..80: mol_type = other DNA
gctagagctgagagcagagctatgtaccaacccattgatatatgataatgctcctttaattgacagagatgcaacaaggc

SEQ ID NO: 40649 - DNA, 80 bp, synthetic construct
  source 1..80: mol_type = other DNA
tatacacccagagccataggaggcaccttgtggaatttgttacgtggtccacaccccaactatatcacattctagctaag

SEQ ID NO: 40650 - DNA, 80 bp, synthetic construct
  source 1..80: mol_type = other DNA
tccacagcactatctatgattgacctgataacaaaatttgaaaaggaccatatgaatgaaatttcagctctcatagggga

SEQ ID NO: 40651 - DNA, 80 bp, synthetic construct
  source 1..80: mol_type = other DNA
tgatgatattaatagtttcataactgaattcctgcttatagagccaagactgttcactatctacttaggccagtgtgcgg

SEQ ID NO: 40652 - DNA, 80 bp, synthetic construct
  source 1..80: mol_type = other DNA
ccgagcctagcagagcaagtgatgtgagagctgcccatcctccaaccggcacacccctagacattgacactgcatcggag

SEQ ID NO: 40653 - DNA, 80 bp, synthetic construct
  source 1..80: mol_type = other DNA
ccatcaattgggcatttgatgtgcattatcatagaccatcagggaaatatcagatgggtgagctgttgtcatcgttcctt

SEQ ID NO: 40654 - DNA, 80 bp, synthetic construct
  source 1..80: mol_type = other DNA
tctagaatgagcaaaggggtgtttaaggtgcttgtcaatgctctaagccacccaaagatctacaagaaattctggcattg

SEQ ID NO: 40655 - DNA, 80 bp, synthetic construct
  source 1..80: mol_type = other DNA
tggtattatagagcctatccatggtccgtcacttgatgctcaaaacttgcacacaactgtgtgcaacatgatttacacat

SEQ ID NO: 40656 - DNA, 80 bp, synthetic construct
  source 1..80: mol_type = other DNA
gctatatgacctacctagacctgctgttgaatgaagagttagacgagttcacatttcttttgtgtgaaagtgacgaggat

SEQ ID NO: 40657 - DNA, 80 bp, synthetic construct
  source 1..80: mol_type = other DNA
gtagtaccggacagatttgacaacatccaggcaaaacacttgtgtgttctagcagatttgtactgtcaaccagggacctg

SEQ ID NO: 40658 - DNA, 80 bp, synthetic construct
  source 1..80: mol_type = other DNA
cccaccaattcgaggtctaagaccggtggagaaatgtgcagttctaaccaaccatatcaaggcagaggctagattatctc

SEQ ID NO: 40659 - DNA, 80 bp, synthetic construct
  source 1..80: mol_type = other DNA
cagcaggatcttcgtggaatataaacccaattattgtagaccattactcatgctccctgacttatctccggcgagggtcg

SEQ ID NO: 40660 - DNA, 80 bp, synthetic construct
  source 1..80: mol_type = other DNA
atcaaacagataagattgagagttgatccaggattcatcttcgacgccctcgctgaggcaaatgtcagtcagccaaaaat

SEQ ID NO: 40661 - DNA, 80 bp, synthetic construct
  source 1..80: mol_type = other DNA
aggcagcaacaacagctcaaatatgaatatcaaggatttcagacccccacacgatgatgttgcaaaattgctcaaagata

SEQ ID NO: 40662 - DNA, 80 bp, synthetic construct
  source 1..80: mol_type = other DNA
tcaacacaagcaagcacaaccttcccatttcagggggcaatctcgtcaattatgaagtccatgctttccgcagaatcggg

SEQ ID NO: 40663 - DNA, 80 bp, synthetic construct
  source 1..80: mol_type = other DNA
ttgaactcatctgcttgctacaaagctgttgagatatcaacattaattaggagatgccttgagccaggggaagacggctt

SEQ ID NO: 40664 - DNA, 80 bp, synthetic construct
  source 1..80: mol_type = other DNA
gttcttgggtgagggatcgggttctatgttggtcacttataaggagatacttaaactaaacaagtgcttctataatagtg

SEQ ID NO: 40665 - DNA, 80 bp, synthetic construct
  source 1..80: mol_type = other DNA
gggtttccgccaattctagatctggtcaaagggaattagcaccctacccctccgaagtcggccttgtcgaacacagaatg

SEQ ID NO: 40666 - DNA, 80 bp, synthetic construct
  source 1..80: mol_type = other DNA
ggagtgggcaatattgtcaaggtgctctttaacgggaggcctgaagtcacgtgggtaggcagtgtagattgcttcaattt

SEQ ID NO: 40667 - DNA, 80 bp, synthetic construct
  source 1..80: mol_type = other DNA
catagttagtaatatccctacctctagtgtggggtttatccattcagatatagagaccttacctaacaaagatactatag

SEQ ID NO: 40668 - DNA, 80 bp, synthetic construct
  source 1..80: mol_type = other DNA
agaagctagaggaattggcagccatcttgtcgatggctctgctcctgggcaaaataggatcaatactggtgattaagctt

SEQ ID NO: 40669 - DNA, 80 bp, synthetic construct
  source 1..80: mol_type = other DNA
atgcctgtcagtggggattttgttcaaggatttataagttatgtagggtctcattatagggaagtgaaccttgtataccc

SEQ ID NO: 40670 - DNA, 80 bp, synthetic construct
  source 1..80: mol_type = other DNA
tagatacagcaacttcatatctactgaatcttatttggttatggcagatctcaaggctaaccggctaatgaatcctgaaa

SEQ ID NO: 40671 - DNA, 80 bp, synthetic construct
  source 1..80: mol_type = other DNA
agattaagcagcagataattgaatcatctgtgcggacttcacctggacttataggtcacatcctatccattaagcaacta

SEQ ID NO: 40672 - DNA, 80 bp, synthetic construct
  source 1..80: mol_type = other DNA
agctgcatacaagcaattgtgggaggcgcagttattagaggtgatatcaaccctactctgaaaaaacttacacctataga

SEQ ID NO: 40673 - DNA, 80 bp, synthetic construct
  source 1..80: mol_type = other DNA
gcaagactcagacacggacacccctagagtgtacaatgacagagaccttctagactaggtgcgaggggccgaagaccaga

SEQ ID NO: 40674 - DNA, 80 bp, synthetic construct
  source 1..80: mol_type = other DNA
gcaggtgctgatcaattgcgggttggcaattaacggacccaaactgtgcaaagaattgatccaccatgatgttgcctcag

SEQ ID NO: 40675 - DNA, 80 bp, synthetic construct
  source 1..80: mol_type = other DNA
ggcaagatggattgcttaattctatactcatcctctacagggagttggcaagattcaaggacaaccaaagaagtcaacag

SEQ ID NO: 40676 - DNA, 80 bp, synthetic construct
  source 1..80: mol_type = other DNA
gggatgttccacgcttaccccgtattggtaagtagcagacaacgggaacttatatctaggatcgcccgcaaattctgggg

SEQ ID NO: 40677 - DNA, 80 bp, synthetic construct
  source 1..80: mol_type = other DNA
gcacattcttctttactccgggaacagaaagttgataaataagtttatccagaatctcaagtccggttatctgatactag

SEQ ID NO: 40678 - DNA, 80 bp, synthetic construct
  source 1..80: mol_type = other DNA
acttacaccagaatatcttcgttaagaatctatccaagtcagagaaacagattatcctgtcggggggtctgaaacgtgag

SEQ ID NO: 40679 - DNA, 80 bp, synthetic construct
  source 1..80: mol_type = other DNA
agtgggtctttaaggtaacagtcaaggagaccaaagaatggtataagttactcggatatagtgctctgattaaggactag

SEQ ID NO: 40680 - DNA, 80 bp, synthetic construct
  source 1..80: mol_type = other DNA
ggttggtcagattaattggaaacccggatgtgagcgggcccaaactaacaggggcactaataggtatattatccttattt

SEQ ID NO: 40681 - DNA, 80 bp, synthetic construct
  source 1..80: mol_type = other DNA
acaacatctgcctaccctccatcattgttataaaaaacttaggaaccaggtccacacagccgccagcccatcaaccatcc

SEQ ID NO: 40682 - DNA, 80 bp, synthetic construct
  source 1..80: mol_type = other DNA
actcccacgatcggagccgatggcagaggagcaggcacgccatgtcaaaaacggactggaatgcatccgggctctcaaag

SEQ ID NO: 40683 - DNA, 80 bp, synthetic construct
  source 1..80: mol_type = other DNA
ccgagcccatcggcccactggccatcgaggaagccatggcagcatggtcagaaatatcagacaacccaggacaggagcga

SEQ ID NO: 40684 - DNA, 80 bp, synthetic construct
  source 1..80: mol_type = other DNA
gccacctgcaagaaagagaaggcaggcagttcgggtctcagcaaaccatgcctctcagcaattggatcaactgaaggcag

SEQ ID NO: 40685 - DNA, 80 bp, synthetic construct
  source 1..80: mol_type = other DNA
tgcacctcgcatccgcggtcagggatctggagagagcgatgacgacgctgaaactttgggagccccctcaggaaatctcc

SEQ ID NO: 40686 - DNA, 80 bp, synthetic construct
  source 1..80: mol_type = other DNA
aggcatcaagcgctgggttacagcgttattatgtttatgatcacagcggtgaagcgattaagggaatccaagatgctgac

SEQ ID NO: 40687 - DNA, 80 bp, synthetic construct
  source 1..80: mol_type = other DNA
tctatcatggttcaatcaggccttgaaggtgatagcaccctctcaggaggagacaatgaatctgaaaacagcgatgtgga

SEQ ID NO: 40688 - DNA, 80 bp, synthetic construct
  source 1..80: mol_type = other DNA
tattggcgaacctgataccgagggatatgctatcactgaccggggatctgctcccatctctatggggttcagagcttctg

SEQ ID NO: 40689 - DNA, 80 bp, synthetic construct
  source 1..80: mol_type = other DNA
atgttgaaactgcagaaggaggggagatccacgagctcctgagactccaatccagaggcaacaactttctgaagcctggg

SEQ ID NO: 40690 - DNA, 80 bp, synthetic construct
  source 1..80: mol_type = other DNA
aagactctcaatgtccccccgcccccggaccccggtagagccaacacttctgagacacccattaaaaagggcacagacgc

SEQ ID NO: 40691 - DNA, 80 bp, synthetic construct
  source 1..80: mol_type = other DNA
gtggagtccccaggtcaattgattcagaggatcactgatgaccctgacgttagcataaggctgttggaggttgtccagag

SEQ ID NO: 40692 - DNA, 80 bp, synthetic construct
  source 1..80: mol_type = other DNA
gagattagcctcatttggaacggagatcgcgtctttattgacaggtggtgcaacccaacgtgctcgaaagtcgccctcgg

SEQ ID NO: 40693 - DNA, 80 bp, synthetic construct
  source 1..80: mol_type = other DNA
aaccatcagggccaggtgcacctgtggggaatgtccccgagtgtgtgagcaatgccgcactgataccggagtggacaccc

SEQ ID NO: 40694 - DNA, 80 bp, synthetic construct
  source 1..80: mol_type = other DNA
gaatctggtaccacaatctccccgagatcccagaataatgaagaagggggagaatattatgatgatgagctgttctctga

SEQ ID NO: 40695 - DNA, 80 bp, synthetic construct
  source 1..80: mol_type = other DNA
tgtccaagatatcaaaacagccctggccaaaatacacgaggacaaccagaagataatctccaagctagaatcactgctgt

SEQ ID NO: 40696 - DNA, 80 bp, synthetic construct
  source 1..80: mol_type = other DNA
tattgaaaggagaagttgagtcaatcaagaagcagatcaacaagcaaaatatcagcatatccaccctggaaggacacctc

SEQ ID NO: 40697 - DNA, 80 bp, synthetic construct
  source 1..80: mol_type = other DNA
tcaagcatcatgatagccattcctggatttgggaaggatcccaacgaccctactgcagatgtcgaaatcaatcccgactt

SEQ ID NO: 40698 - DNA, 80 bp, synthetic construct
  source 1..80: mol_type = other DNA
gaaacccatcataagtagagattcaggccgagcactggccgaagttctcaagaaacccgttgccagccgacaactccaag

SEQ ID NO: 40699 - DNA, 80 bp, synthetic construct
  source 1..80: mol_type = other DNA
gaatgacaaatggacggaccagttccagaggacagctgcttaaggaatttcagctaaagccgatcgggaaaaagatgagc

SEQ ID NO: 40700 - DNA, 80 bp, synthetic construct
  source 1..80: mol_type = other DNA
tcagccgttgggtttgttcctgacaccggccctgcatcacgcagtgtaatccgctccattataaaatctagccggctaga

SEQ ID NO: 40701 - DNA, 80 bp, synthetic construct
  source 1..80: mol_type = other DNA
ggaggatcggaagcgttacctgatgactctccttgatgatatcaaaggagccaacgatcttgccaagttccaccagatgc

SEQ ID NO: 40702 - DNA, 80 bp, synthetic construct
  source 1..80: mol_type = other DNA
tgaccagtcacaatcaggccttaccttcgcatcgagaggtactaatatggaggatgaggcggaccagtacttttcacatg

SEQ ID NO: 40703 - DNA, 80 bp, synthetic construct
  source 1..80: mol_type = other DNA
tgatgaaaataataatgaagtagctacagctcaacttacctgccaaccccatgccagtcgacccaaccagcacaacctaa

SEQ ID NO: 40704 - DNA, 80 bp, synthetic construct
  source 1..80: mol_type = other DNA
gtccattataaaaaacttaggagcaaagtgattgcctcccaagctccacaatgacagagatctacgacttcgacaagtcg

SEQ ID NO: 40705 - DNA, 80 bp, synthetic construct
  source 1..80: mol_type = other DNA
gcatgggacatcaaagggtctatcgctccgattcaacccaccacctacagtgatgggaggctggtgccccaggtcagagt

SEQ ID NO: 40706 - DNA, 80 bp, synthetic construct
  source 1..80: mol_type = other DNA
catagaccctggtctaggcgacaggaaggatgaatgctttatgtacatgtttctgctgggggttgttgaggacagcgatc

SEQ ID NO: 40707 - DNA, 80 bp, synthetic construct
  source 1..80: mol_type = other DNA
ccttagggcccccaatcgggcgagcatttgggtccctgcccctaggtgttggcagatccacagcaaaacccgaagaactc

SEQ ID NO: 40708 - DNA, 80 bp, synthetic construct
  source 1..80: mol_type = other DNA
ctcaaggaggccactgagcttgacatagttgttagacgtacagcagggctcaatgaaaaactggtgttctacaacaacac

SEQ ID NO: 40709 - DNA, 80 bp, synthetic construct
  source 1..80: mol_type = other DNA
tccactaactctcctcacaccttggagaaaggtcctgacaacagggagtgtcttcaacgcaaatcaagtgtgcaatgcgg

SEQ ID NO: 40710 - DNA, 80 bp, synthetic construct
  source 1..80: mol_type = other DNA
ttaatctgataccgctggataccccgcagaggttccgtgttgtttatatgagcatcacccgtctttcagataacgggtat

SEQ ID NO: 40711 - DNA, 80 bp, synthetic construct
  source 1..80: mol_type = other DNA
tacactgttcctagaagaatgctggaattcagatcagtcaatgcagtggccttcaacctgctggtgacccttaggattga

SEQ ID NO: 40712 - DNA, 80 bp, synthetic construct
  source 1..80: mol_type = other DNA
caaggcaattggccctgggaggatcatcgacaatgcagagcaacttcctgaggcaacatttatggttcacatcgggaact

SEQ ID NO: 40713 - DNA, 80 bp, synthetic construct
  source 1..80: mol_type = other DNA
atgatccaagtagtagtgatcaatccaggttcgggtggtttgagaacaaggaaatctcagatattgaagtgcaagaccct

SEQ ID NO: 40714 - DNA, 80 bp, synthetic construct
  source 1..80: mol_type = other DNA
tcaggagaaagaagagtgaagtctactctgctgattattgcaaaatgaagatcgaaaagatgggtctagtttttgcactt

SEQ ID NO: 40715 - DNA, 80 bp, synthetic construct
  source 1..80: mol_type = other DNA
ggtgggatagggggcaccagtcttcacattagaagcacaggcaaaatgagcaagaccctccatgcacaactcgggttcaa

SEQ ID NO: 40716 - DNA, 80 bp, synthetic construct
  source 1..80: mol_type = other DNA
gaagaccttatgttacccactgatggatatcaatgaagaccttaatcgattactctggaggagcagatgcaagatagtaa

SEQ ID NO: 40717 - DNA, 80 bp, synthetic construct
  source 1..80: mol_type = other DNA
gaatccaggcagtcttgcagccatcagttcctcaagaattccgcatttacgatgacgtgatcataaatgatgaccaagga

SEQ ID NO: 40718 - DNA, 80 bp, synthetic construct
  source 1..80: mol_type = other DNA
ctcttcaaagttttgtagaccgtagtgctcagcagtgcccaaaaacaacccccctcacaatgacagccagaatgcccgga

SEQ ID NO: 40719 - DNA, 80 bp, synthetic construct
  source 1..80: mol_type = other DNA
caaaaaagccccctccgagagactccacagaccaagcgagaggccagctagcagccgacggcaagcgcgaacaccaggtg

SEQ ID NO: 40720 - DNA, 80 bp, synthetic construct
  source 1..80: mol_type = other DNA
gccccagcataggacagtcccgacccagggccaccaccagccatcccaatccgcatcatcctcgtgtgacccccgaggac

SEQ ID NO: 40721 - DNA, 80 bp, synthetic construct
  source 1..80: mol_type = other DNA
cagcctccaaggttgcccccgaccccaaccacccaccgcatccccaccacccctgggaaagaaacccccagcagctggaa

SEQ ID NO: 40722 - DNA, 80 bp, synthetic construct
  source 1..80: mol_type = other DNA
ggcccctctccccctcccccaacacaagaaccccacaaccgaaccgcacaagcgaccgaggtgactcaaccacaggcacc

SEQ ID NO: 40723 - DNA, 80 bp, synthetic construct
  source 1..80: mol_type = other DNA
cgattccccaggcagatcctctccccccggcaaactaaacaaaacttagggccaaggaacacacacgcccaacagaaccc

SEQ ID NO: 40724 - DNA, 80 bp, synthetic construct
  source 1..80: mol_type = other DNA
gagggcttcaacatgattctgggtaccatcctagctcaaatttgggtcttgctcgcaaaggcagttacggctccagacac

SEQ ID NO: 40725 - DNA, 80 bp, synthetic construct
  source 1..80: mol_type = other DNA
agacctcggcccacggcaccgcgcccccaacccccgacaaccagagggagtccccaaccaatccctccggcccgcctggt

SEQ ID NO: 40726 - DNA, 80 bp, synthetic construct
  source 1..80: mol_type = other DNA
atccctccggcccccctggtgcccacaggcaggcacaccaacccccaaacaggcccagcacccagccaccgacaatccaa

SEQ ID NO: 40727 - DNA, 80 bp, synthetic construct
  source 1..80: mol_type = other DNA
gcccacaggcaggcacaccaacccccaaacaggcccagcacccagccaccgacaatccaagacgtggaggcccccccaaa

SEQ ID NO: 40728 - DNA, 80 bp, synthetic construct
  source 1..80: mol_type = other DNA
aaagggcccccaggggccgacaaccaggacagcgaggaagcccacccgcaccacacaccaccacggcaaccagaccagaa

SEQ ID NO: 40729 - DNA, 80 bp, synthetic construct
  source 1..80: mol_type = other DNA
cccagaccaccctgggccaccaactcccagacccggcaaccgccccgcggaaagggacggccacaacccgcacaccccag

SEQ ID NO: 40730 - DNA, 80 bp, synthetic construct
  source 1..80: mol_type = other DNA
ccccgatcccgcgggcagccacccaacccgaaccagcacccaagagcgacccccgaaggacccccaaaccgcaaaggaca

SEQ ID NO: 40731 - DNA, 80 bp, synthetic construct
  source 1..80: mol_type = other DNA
tcagcatcccacagcctctccaagtctgccggtctcctccccttctcgaagggaccaaaagatcaacccactatatccga

SEQ ID NO: 40732 - DNA, 80 bp, synthetic construct
  source 1..80: mol_type = other DNA
cgtcactcaactccccacccctaaaggagacaccagggatcccagaatcaagactcatccaatatccatcatgggtctca

SEQ ID NO: 40733 - DNA, 80 bp, synthetic construct
  source 1..80: mol_type = other DNA
aggtgaacatctctgccgtattcatggcagtactgttaactctccaaacacccgccggtcaaattcattggggcaatctc

SEQ ID NO: 40734 - DNA, 80 bp, synthetic construct
  source 1..80: mol_type = other DNA
tctaagataggggtagtaggaataggaagtgcaagctacaaagttatgactcgttccagccatcaatcattagtcataaa

SEQ ID NO: 40735 - DNA, 80 bp, synthetic construct
  source 1..80: mol_type = other DNA
attaatgcccaatataactcttctcaataactgcacgagggtagagattgcagaatacaggagactactaagaacagttt

SEQ ID NO: 40736 - DNA, 80 bp, synthetic construct
  source 1..80: mol_type = other DNA
agcagctgattcagagctaagaaggtggatcaaatacacccaacaaagaagagtagttggtgaatttagattggagagaa

SEQ ID NO: 40737 - DNA, 80 bp, synthetic construct
  source 1..80: mol_type = other DNA
tggaaccaattaaagatgcacttaatgcaatgacccagaacataaggccggttcagagcgtagtttcaagtaggagacac

SEQ ID NO: 40738 - DNA, 80 bp, synthetic construct
  source 1..80: mol_type = other DNA
aagagatttgcgggagtagtcctggcaggtgcggccctaggtgttgccacagctgctcagataacagccggcgttgcact

SEQ ID NO: 40739 - DNA, 80 bp, synthetic construct
  source 1..80: mol_type = other DNA
tcaccggtccatgctgaactctcaggccatcgacaatctgagagcgagcctggaaactactaatcaggcaattgaggcaa

SEQ ID NO: 40740 - DNA, 80 bp, synthetic construct
  source 1..80: mol_type = other DNA
ttagacaagcagggcaggagatgatattggctgttcaaggtgtccaagactacatcaataatgagctgataccgtctatg

SEQ ID NO: 40741 - DNA, 80 bp, synthetic construct
  source 1..80: mol_type = other DNA
aaccagctatcttgtgatctgatcggtcagaagctcgggctcaaattgcttagatactatacagaaatcctgtcattatt

SEQ ID NO: 40742 - DNA, 80 bp, synthetic construct
  source 1..80: mol_type = other DNA
tggccccagcctacgggaccccatatctgcggaaatatctatccaggctttgagctatgcacttggaggagatatcaata

SEQ ID NO: 40743 - DNA, 80 bp, synthetic construct
  source 1..80: mol_type = other DNA
aggtgttagaaaagctcggatacagtggaggcgatttactaggcatcttagagagcagaggaataaaggctcggataact

SEQ ID NO: 40744 - DNA, 80 bp, synthetic construct
  source 1..80: mol_type = other DNA
cacgtcgacacagagtcctacttcatagtcctcagtatagcctatccgacgctgtccgagattaagggggtgattgtcca

SEQ ID NO: 40745 - DNA, 80 bp, synthetic construct
  source 1..80: mol_type = other DNA
ccggctagagggggtctcgtacaacataggctctcaagagtggtataccactgtgcctaagtatgttgcaacccaagggt

SEQ ID NO: 40746 - DNA, 80 bp, synthetic construct
  source 1..80: mol_type = other DNA
accttatctcgaattttgatgagtcatcatgtaccttcatgccagaggggactgtgtgcagccaaaatgccttgtacccg

SEQ ID NO: 40747 - DNA, 80 bp, synthetic construct
  source 1..80: mol_type = other DNA
aatggttggatgtggtgagaaacaggattgccgaggacctctccctacgccgattcatggtcgctctaatcctggatatc

SEQ ID NO: 40748 - DNA, 80 bp, synthetic construct
  source 1..80: mol_type = other DNA
atgagtcctctgctccaagagtgcctccgggggtccaccaagtcctgtgctcgtacactcgtatccgggtcttttgggaa

SEQ ID NO: 40749 - DNA, 80 bp, synthetic construct
  source 1..80: mol_type = other DNA
ccgattcattttatcacaagggaacctaatagccaattgtgcatcaattctttgtaagtgttacacaacaggtacgatta

SEQ ID NO: 40750 - DNA, 80 bp, synthetic construct
  source 1..80: mol_type = other DNA
ttaatcaagaccctgacaagatcctaacatacattgctgccgatcgctgcccggtagtcgaagtgaacggcgtgaccatc

SEQ ID NO: 40751 - DNA, 80 bp, synthetic construct
  source 1..80: mol_type = other DNA
caagtcgggagcaggaggtatccagacgctgtgtacttgcatagaattgacctcggtcctcccatatcattggagaggtt

SEQ ID NO: 40752 - DNA, 80 bp, synthetic construct
  source 1..80: mol_type = other DNA
ggacgtagggacaaatctggggaatgcaattgccaaattggaggatgccaaggaattgttggaatcatcggaccagatat

SEQ ID NO: 40753 - DNA, 80 bp, synthetic construct
  source 1..80: mol_type = other DNA
tgagaagtatgaaaggtttatcgagcactagcatagtctacatcctgattgcagtgtgtcttggagggttgatagggatc

SEQ ID NO: 40754 - DNA, 80 bp, synthetic construct
  source 1..80: mol_type = other DNA
cccactttaatatgttgctgcagggggcgttgtaacaaaaagggagaacaagttggtatatcacgaccaggcctaaagcc

SEQ ID NO: 40755 - DNA, 80 bp, synthetic construct
  source 1..80: mol_type = other DNA
tgaccttacaggaacatcaaaatcctatgtaagatcgctttgatcctctacaactcttgaaacacaagtgtcccagaatt

SEQ ID NO: 40756 - DNA, 80 bp, synthetic construct
  source 1..80: mol_type = other DNA
ctcctcttagtcatcaagcaaccaccgtgtccgacatcaagccaccctaaaattatctccggcttccctctagccaaaca

SEQ ID NO: 40757 - DNA, 80 bp, synthetic construct
  source 1..80: mol_type = other DNA
atatcgataattaattaaaacttagggtgcaagaccatccacaatgtcaccgcaacgagaccggataaatgccttctaca

SEQ ID NO: 40758 - DNA, 80 bp, synthetic construct
  source 1..80: mol_type = other DNA
aagaggacacccggaaacaaacccaggattgctgaaatgatatgtgacattgatacatatatcgtagaggcaggattagc

SEQ ID NO: 40759 - DNA, 80 bp, synthetic construct
  source 1..80: mol_type = other DNA
aagataacccttatcccaagggaagtaggatagttattaacagagaacatcttatgattgacagaccctatgttctgctg

SEQ ID NO: 40760 - DNA, 80 bp, synthetic construct
  source 1..80: mol_type = other DNA
gctgttctgttcgtcatgtttctgagcttgatcggattgctggcaattgcaggcattagacttcatcgggcagccatcta

SEQ ID NO: 40761 - DNA, 80 bp, synthetic construct
  source 1..80: mol_type = other DNA
caccgcggagatccataaaagcctcagtaccaatctagatgtgactaactcaatcgagcatcaggtcaaggacgtgctga

SEQ ID NO: 40762 - DNA, 80 bp, synthetic construct
  source 1..80: mol_type = other DNA
caccactctttaaaatcatcggggatgaagtgggcctgagaacacctcagagattcactgacctagtgaaattcatctcg

SEQ ID NO: 40763 - DNA, 80 bp, synthetic construct
  source 1..80: mol_type = other DNA
gacaagattaaattccttaatccggatagggagtacgacttcagagatctcacttggtgcatcaacccgccagagaggat

SEQ ID NO: 40764 - DNA, 80 bp, synthetic construct
  source 1..80: mol_type = other DNA
caaactagattatgatcaatactgtgcagatgtggctgctgaagagctcatgaatgcattggtgaactcaactctgctgg

SEQ ID NO: 40765 - DNA, 80 bp, synthetic construct
  source 1..80: mol_type = other DNA
agaccagaacaaccactcagttcctagctgtctcaaagggaaactgctcagggcccactacaatcagaggtcaattctca

SEQ ID NO: 40766 - DNA, 80 bp, synthetic construct
  source 1..80: mol_type = other DNA
aacatgtcgctgtccttgttggacttgtacttaggtcgaggttacaatgtgtcatctatagtcactatgacatcccaggg

SEQ ID NO: 40767 - DNA, 80 bp, synthetic construct
  source 1..80: mol_type = other DNA
aatgtatgggggaacctacctagttgaaaagcctaatctgaacagcaaagggtcagagttgtcacaactgagcatgtacc

SEQ ID NO: 40768 - DNA, 80 bp, synthetic construct
  source 1..80: mol_type = other DNA
gagtgtttgaagtaggtgtgatcagaaacccgggtttgggggctccggtgttccatatgacaaactattttgagcaacca

SEQ ID NO: 40769 - DNA, 80 bp, synthetic construct
  source 1..80: mol_type = other DNA
catcagaggcatcaaacacattattatagtaccaatccctggagattcctcaattaccactcgatccagactcctggacc

SEQ ID NO: 40770 - DNA, 80 bp, synthetic construct
  source 1..80: mol_type = other DNA
cagttttatcctgactattaagtttgggatagaaactatgtatcctgctcttggactgcatgaatttgctggtgaattat

SEQ ID NO: 40771 - DNA, 80 bp, synthetic construct
  source 1..80: mol_type = other DNA
gtcagtaatggtctcggcaactgtatggtggctttggtggagctcaaactcgcagccctttgtcacggggacgattctat

SEQ ID NO: 40772 - DNA, 80 bp, synthetic construct
  source 1..80: mol_type = other DNA
cataattccctatcagggatcagggaaaggtatcagcttccagctcgtcaagctgggtgtctggaaatccccaaccgaca

SEQ ID NO: 40773 - DNA, 80 bp, synthetic construct
  source 1..80: mol_type = other DNA
tgcaatcctgggtccccttatcaacggatgatccagtggtagacaggctttacctctcatctcacagaggtgtcatcgct

SEQ ID NO: 40774 - DNA, 80 bp, synthetic construct
  source 1..80: mol_type = other DNA
gacaatcaagcaaaatgggctgtcccgacaacacgaacagatgacaagttgcgaatggagacatgcttccagcatgcgtg

SEQ ID NO: 40775 - DNA, 80 bp, synthetic construct
  source 1..80: mol_type = other DNA
taaaggtaaaatccaagcactctgcgagaatcccgagtgggtaccattaaaggataacaggattccttcatacggggtcc

SEQ ID NO: 40776 - DNA, 80 bp, synthetic construct
  source 1..80: mol_type = other DNA
tgtctgttgatctgagtctgacagttgagcttaaaatcaaaattgcttcgggattcgggccattgatcacacacggctca

SEQ ID NO: 40777 - DNA, 80 bp, synthetic construct
  source 1..80: mol_type = other DNA
gggatggacctatacaaatccaaccgcaacaatgtgtattggctgactattccgccaatgagaaatctagccttaggcgt

SEQ ID NO: 40778 - DNA, 80 bp, synthetic construct
  source 1..80: mol_type = other DNA
aatcaacacattggagtggataccgagattcaaggttagtcccaacctcttcactgtcccaattaaggaagcaggcgaag

SEQ ID NO: 40779 - DNA, 80 bp, synthetic construct
  source 1..80: mol_type = other DNA
actgccatgccccaacatacctacctgcggaggtggacggtgatgttaaactcagttccaacctggtgattctacctggt

SEQ ID NO: 40780 - DNA, 80 bp, synthetic construct
  source 1..80: mol_type = other DNA
caagatctccaatatgttttggcaacctacgatacctccagggttgagcatgccgtggtttattacgtttacagcccaag

SEQ ID NO: 40781 - DNA, 80 bp, synthetic construct
  source 1..80: mol_type = other DNA
ccacacttgagtccttgatgaatctttaccagcaaatgggggagactgcaccctatatggtaatcctggagaactcaatt

SEQ ID NO: 40782 - DNA, 80 bp, synthetic construct
  source 1..80: mol_type = other DNA
ccgctcattctcttacttttatccttttaggttgcctataaagggggtcccaatcgaactacaagtggaatgcttcacat

SEQ ID NO: 40783 - DNA, 80 bp, synthetic construct
  source 1..80: mol_type = other DNA
gggaccaaaaactctggtgccgtcacttctgtgtgcttgcggactcagaatccggtggacatatcactcactctgggatg

SEQ ID NO: 40784 - DNA, 80 bp, synthetic construct
  source 1..80: mol_type = other DNA
gtgggcatgggagtcagctgcacagctacccgggaagatggaaccgatcgcagataaggctgttagtgaaccaatcacat

SEQ ID NO: 40785 - DNA, 80 bp, synthetic construct
  source 1..80: mol_type = other DNA
gatatcgcccagacatcaggcatacccactagtgtgaaatagacatcagaattaagaaaaacgtagggtccaagtggttc

SEQ ID NO: 40786 - DNA, 80 bp, synthetic construct
  source 1..80: mol_type = other DNA
cccattatggactcgctatctgtcaaccagatcttataccctgaagttcatctggatagtccgatagtcaccaataagat

SEQ ID NO: 40787 - DNA, 80 bp, synthetic construct
  source 1..80: mol_type = other DNA
agtagccatcctggagtatgctcgacttccccacgcttacagcttggaggaccctacattgtgtcagaacatcaagcacc

SEQ ID NO: 40788 - DNA, 80 bp, synthetic construct
  source 1..80: mol_type = other DNA
gcctaaaaaacggattttccaaccaaatgattataaacaatgtggaagttgggaatgtcatcaagtccaagcttaagagt

SEQ ID NO: 40789 - DNA, 80 bp, synthetic construct
  source 1..80: mol_type = other DNA
tatccgacccactcccatattccatatccaaattgtaatcaggatttatttaacataggagacaaagagtcaacgaggaa

SEQ ID NO: 40790 - DNA, 80 bp, synthetic construct
  source 1..80: mol_type = other DNA
gatccgtgaacttctcaaaaaggggaattcgctgtactccaaagtcagtgataaggttttccaatgcttgagggacatca

SEQ ID NO: 40791 - DNA, 80 bp, synthetic construct
  source 1..80: mol_type = other DNA
actcacggcttggcctaggctccgaattgagggaggacatcaaggagaaagttactaacttaggggtttacatgcacagc

SEQ ID NO: 40792 - DNA, 80 bp, synthetic construct
  source 1..80: mol_type = other DNA
cagaacaagtttagtgcaggatcataccctctgctttggagttatgccatgggagtaggagtggaacttgaaaactccat

SEQ ID NO: 40793 - DNA, 80 bp, synthetic construct
  source 1..80: mol_type = other DNA
tcccaatggtttgagccctttctgttttggtttacagtcaagaccgagatgaggtcagtgattaaatcacaaacccatac

SEQ ID NO: 40794 - DNA, 80 bp, synthetic construct
  source 1..80: mol_type = other DNA
ttgccataggaggagacacacacctgtattcttcactggtagttcagttgagttgctaatctctcgtgaccttgttgcta

SEQ ID NO: 40795 - DNA, 80 bp, synthetic construct
  source 1..80: mol_type = other DNA
taataagtagagagtctcaacatgtatattacctgacatttgagctggttttgatgtattgtgatgtcatagaggggagg

SEQ ID NO: 40796 - DNA, 80 bp, synthetic construct
  source 1..80: mol_type = other DNA
ttaatgacagagaccgctatgaccattgatgctaggtatactgagcttctaggaagagtcagatacatgtggaaactgat

SEQ ID NO: 40797 - DNA, 80 bp, synthetic construct
  source 1..80: mol_type = other DNA
agatggtttcttccctgcactcgggaatccgacttatcaaattgtagccatgctggagccactttcacttgcttacctgc

SEQ ID NO: 40798 - DNA, 80 bp, synthetic construct
  source 1..80: mol_type = other DNA
tctcttgagtgttggcaaaatggagaataaaatcgaggtgactagcaaggatgagatgaacaggtggtttgaagagttca

SEQ ID NO: 40799 - DNA, 80 bp, synthetic construct
  source 1..80: mol_type = other DNA
ctacatgcaccctgctgtgttgacagctggcagaatcagtgaaatgggtgtctgctttggaaccatccctgtggctaacc

SEQ ID NO: 40800 - DNA, 80 bp, synthetic construct
  source 1..80: mol_type = other DNA
atttgtatcattctgcacttgaattcttttcttattcgcttttatctataactgcaatcagtaatcttgttcatgtcaat

SEQ ID NO: 40801 - DNA, 80 bp, synthetic construct
  source 1..80: mol_type = other DNA
gaattcttttcttattcgcttttatctataactgcaatcagtaatcttgttcatgtcaatcagttatacaatccagtttt

SEQ ID NO: 40802 - DNA, 80 bp, synthetic construct
  source 1..80: mol_type = other DNA
atgaaaagtcttgtgtgagccatggcgacttttaaagacgcttgttatcattataaaaagttgaataagttaaatagttt

SEQ ID NO: 40803 - DNA, 80 bp, synthetic construct
  source 1..80: mol_type = other DNA
acttaggaaaatatataataatgtaatggattttatcagggcacttgtgaaatcgaatggaaatgttggacattgttcat

SEQ ID NO: 40804 - DNA, 80 bp, synthetic construct
  source 1..80: mol_type = other DNA
cccaggaatcagtgtataagtatataccagatttatttttaatttgtaaaacggaaaaatggaacgaagctgtcgaaatg

SEQ ID NO: 40805 - DNA, 80 bp, synthetic construct
  source 1..80: mol_type = other DNA
ttatttaattatctagaaccagtggacataaatggaacggagtatgtattattagactatgaagtgaactgggaagtgag

SEQ ID NO: 40806 - DNA, 80 bp, synthetic construct
  source 1..80: mol_type = other DNA
gggactagtcatgcaaaacatggatgggaaagtaccaagaattttgaatatgaatgatacaaagaagatactgagtgcga

SEQ ID NO: 40807 - DNA, 80 bp, synthetic construct
  source 1..80: mol_type = other DNA
tgatatttgactggtttgatacaagatatatgagagaaacaccaatgacgacgtcaacaacaaaccaacttcgaacactg

SEQ ID NO: 40808 - DNA, 80 bp, synthetic construct
  source 1..80: mol_type = other DNA
aacaaaaggaatgaactcatagatgagtacgacttagaactttcagatgttgagtaaatatggtcacaactacgccagca

SEQ ID NO: 40809 - DNA, 80 bp, synthetic construct
  source 1..80: mol_type = other DNA
aatatacaaatttgacatattgcagagggtgcgctctataccatgtatgtcagtggtgcagtcagtataacaggtgtttc

SEQ ID NO: 40810 - DNA, 80 bp, synthetic construct
  source 1..80: mol_type = other DNA
ttagatgaagaaccccatttgctgagaatgcgaacatttaaagatgtagtaacaaaggaagatatagaagggctgctaac

SEQ ID NO: 40811 - DNA, 80 bp, synthetic construct
  source 1..80: mol_type = other DNA
catgtatgaaacgttgtttccaataaatgaaaagttggtgaataaattcataaactctgtgaaacagcgtaagtgtagga

SEQ ID NO: 40812 - DNA, 80 bp, synthetic construct
  source 1..80: mol_type = other DNA
atgaatatttgttagaatggtataatcacttactaatgccaataacattacaagcattgactataaatcttgaggataat

SEQ ID NO: 40813 - DNA, 80 bp, synthetic construct
  source 1..80: mol_type = other DNA
gtatattatatatttggatactatgattgcatggagcatgaaaaccaaacaccattccaatttattaatctactagaaaa

SEQ ID NO: 40814 - DNA, 80 bp, synthetic construct
  source 1..80: mol_type = other DNA
atatgataaattgctactagatgatagaaatttccatagaatgtcacacttaccagtaatattgcaacaagagtatgctt

SEQ ID NO: 40815 - DNA, 80 bp, synthetic construct
  source 1..80: mol_type = other DNA
tgagatatttttcaaaatcaagatttttaagtaaagggaagaagagattgagcaggagtgatttctcagatagtcttatg

SEQ ID NO: 40816 - DNA, 80 bp, synthetic construct
  source 1..80: mol_type = other DNA
gaagatagacatagtccaacatcattaatgcaagtggtacgtaactgcatcagtatacacataaatgattgtgaatggaa

SEQ ID NO: 40817 - DNA, 80 bp, synthetic construct
  source 1..80: mol_type = other DNA
agtgctcaaactaggagcaaatgatgaatggaggccagcaccagtgacaaaatataaaggatggtgtttagattgttgtc

SEQ ID NO: 40818 - DNA, 80 bp, synthetic construct
  source 1..80: mol_type = other DNA
taaagcgtgtacgcttatagttgatgctagaaattatattagtattatgaactcatcgtatactgagcattatagtgtgt

SEQ ID NO: 40819 - DNA, 80 bp, synthetic construct
  source 1..80: mol_type = other DNA
cacaaagatgtaagttgtttactaagtataaatttgggatcgtatcaagattggtgaaaccgaattacattttttccagc

SEQ ID NO: 40820 - DNA, 80 bp, synthetic construct
  source 1..80: mol_type = other DNA
catgaatcatgcgcattaaacgtacataactgtaaatggtgtcagatcaacaaccattacaaagtgtgggaagattttag

SEQ ID NO: 40821 - DNA, 80 bp, synthetic construct
  source 1..80: mol_type = other DNA
taattcgtagattaaagaataaaagtctagaccaaggggagaattagatggcatcgttatatgacgaattgcaaaaagat

SEQ ID NO: 40822 - DNA, 80 bp, synthetic construct
  source 1..80: mol_type = other DNA
tcagaatcaagaaagtttatgataatattttcagttttgtaagagctctcgtcaaatcaaacgttaatattggacattgc

SEQ ID NO: 40823 - DNA, 80 bp, synthetic construct
  source 1..80: mol_type = other DNA
tcatcacaagagaaaatatatgaacatattaaagatattctagatgtatgtgatgatgataagtggaattcatcagtgac

SEQ ID NO: 40824 - DNA, 80 bp, synthetic construct
  source 1..80: mol_type = other DNA
agaggtatttaattgtctggaaccagtggagctaaacgctattaaatatgttcttcttaatcatgaagtgagttgggatg

SEQ ID NO: 40825 - DNA, 80 bp, synthetic construct
  source 1..80: mol_type = other DNA
taattaacgcattagttcagaatattggtaaagttccacaaatattaactttgaatgatattgtcattgttttacaatcc

SEQ ID NO: 40826 - DNA, 80 bp, synthetic construct
  source 1..80: mol_type = other DNA
attatatatgattggtttgacattagatacatgaggcacacaccgatgactacgtttacggttgataaattaaggcgatt

SEQ ID NO: 40827 - DNA, 80 bp, synthetic construct
  source 1..80: mol_type = other DNA
gtgtagaaaaaaagactgttgagtatgattcaggtatatctgatgttgaataatgagataaaggtcacatttgccaccac

SEQ ID NO: 40828 - DNA, 80 bp, synthetic construct
  source 1..80: mol_type = other DNA
aacttaattgatatgtataatatcctatttcctatgaatcagaaaatagtgaataaattcatcaacagcacaagacaaca

SEQ ID NO: 40829 - DNA, 80 bp, synthetic construct
  source 1..80: mol_type = other DNA
taagtgtagaaatgaatacgcaacccaatggtataatcatttattaatgccaataacattacaatcattgtcagtggaat

SEQ ID NO: 40830 - DNA, 80 bp, synthetic construct
  source 1..80: mol_type = other DNA
agaatatgcacttagatatttttctaagtcaagatttattactgaaggaaggaaatgtgttaatgattcccatttctctg

SEQ ID NO: 40831 - DNA, 80 bp, synthetic construct
  source 1..80: mol_type = other DNA
ttaatatattagagaatttaaacaatccaaactttaaaatacaaattacacgtaattgcagtgaagtatcctcaaaatgg

SEQ ID NO: 40832 - DNA, 80 bp, synthetic construct
  source 1..80: mol_type = other DNA
aatgaaatgtgcaagcttgttaaaaatgtgaatacttattttgatgttttgaaaacatcgcatattgaattttacagtat

SEQ ID NO: 40833 - DNA, 80 bp, synthetic construct
  source 1..80: mol_type = other DNA
tcccactagatgcagattattcacacaacgtaaattgaaaatggtgtctaaattaatcagaccaaattatgtgacgtcaa

SEQ ID NO: 40834 - DNA, 80 bp, synthetic construct
  source 1..80: mol_type = other DNA
atcatagagctacagctactgaggtgcataattataaatggtgctcaattaataacagttatactgtgtggaatgacttc

SEQ ID NO: 40835 - DNA, 80 bp, synthetic construct
  source 1..80: mol_type = other DNA
atggagaataaaatcgaagtgactagcaaggatgaaatgaacaggtggtttgaggagttcaagaagagtaatggacttgt

SEQ ID NO: 40836 - DNA, 80 bp, synthetic construct
  source 1..80: mol_type = other DNA
ttcaatcaatcgcattttttatccagctttgctcactttgcttttctttctttaattttaaacacttaaagggctgtgcg

SEQ ID NO: 40837 - DNA, 80 bp, synthetic construct
  source 1..80: mol_type = other DNA
ctgctgtctatgattgtaaccatcaaccatgtttattttaactgcttatataatcctgttttattaacttcttctcattt

SEQ ID NO: 40838 - DNA, 80 bp, synthetic construct
  source 1..80: mol_type = other DNA
ggcttttttttgaaaagtcttgtgtagccatggcgactttcaaagacgcatgtttccattaccaaaagataaacaaatta

SEQ ID NO: 40839 - DNA, 80 bp, synthetic construct
  source 1..80: mol_type = other DNA
gatgactttagaataaaagaggtgtacgatttagtgattgaattcttgcgtgcacttgtcaaatcaaaccttaatgtggg

SEQ ID NO: 40840 - DNA, 80 bp, synthetic construct
  source 1..80: mol_type = other DNA
acattgctcatcaatagaatctatatattcagacattccaactctttttaatccctgtagaaaggagaaattcaataaag

SEQ ID NO: 40841 - DNA, 80 bp, synthetic construct
  source 1..80: mol_type = other DNA
ctatatctaacttatttacatatctagagccagttgatataaaaggtgttaaatatgtattactaaattacccaataagc

SEQ ID NO: 40842 - DNA, 80 bp, synthetic construct
  source 1..80: mol_type = other DNA
attcagttgcatgacatactaagagtatatggatcaaatagagtggcaacagtcatgtcagaacatactattaattgtat

SEQ ID NO: 40843 - DNA, 80 bp, synthetic construct
  source 1..80: mol_type = other DNA
gattaaacaaattattgcaaaatggttcgatgttgacaatgtcagagtacaacctctaactttaactcaaactaattcac

SEQ ID NO: 40844 - DNA, 80 bp, synthetic construct
  source 1..80: mol_type = other DNA
tttatgcactgaatacatttgataagctcattgacgagtatgcactgttgatttcagatgatgagtcttgaaatgcgcta

SEQ ID NO: 40845 - DNA, 80 bp, synthetic construct
  source 1..80: mol_type = other DNA
atgatgagtcttgaaatgcgctaacacagggctcccggtactagagtagcgcctaggcagcataaaatgtgaccaagggc

SEQ ID NO: 40846 - DNA, 80 bp, synthetic construct
  source 1..80: mol_type = other DNA
ctgttgccaatatacaaatttgacttattgtaaaggatgtgcattatatcatgtatgtcagtggtgcgttcaatataata

SEQ ID NO: 40847 - DNA, 80 bp, synthetic construct
  source 1..80: mol_type = other DNA
gatgttttctagatgatcaaccacatttactaaggatgagaactttaatggatcctattaataaatctgatcttgataac

SEQ ID NO: 40848 - DNA, 80 bp, synthetic construct
  source 1..80: mol_type = other DNA
atattaataatgtacaataaattgtttccaattaataggaggctaattgaaagatttatgtcaaatattaagcaaaataa

SEQ ID NO: 40849 - DNA, 80 bp, synthetic construct
  source 1..80: mol_type = other DNA
atgccgaagcgagtatgaggtgcagtggtataatcatttattgatgccaattacacttcaagctttaacgataaatattg

SEQ ID NO: 40850 - DNA, 80 bp, synthetic construct
  source 1..80: mol_type = other DNA
agggtacaacttatcatatatttggatattatgataacatgtcagaagtgaatcaaactccgttttcatttacaaatttc

SEQ ID NO: 40851 - DNA, 80 bp, synthetic construct
  source 1..80: mol_type = other DNA
tgtgataaatatgataaattaattttggactcatataattttgaccgtatggaatatcttccagtagttttacagcaaga

SEQ ID NO: 40852 - DNA, 80 bp, synthetic construct
  source 1..80: mol_type = other DNA
atatgctgtcagatattttaataaaactaggttcataactaatccaatgagaaaaatttgtaaaagtaattttacagatg

SEQ ID NO: 40853 - DNA, 80 bp, synthetic construct
  source 1..80: mol_type = other DNA
aattatttgaaaatagagatgtacccacttcaccaattaatataactcgtaactgtgttaagggacattcaaagtggaac

SEQ ID NO: 40854 - DNA, 80 bp, synthetic construct
  source 1..80: mol_type = other DNA
aatagtatagtgcttaaactaggagcaaattcagtatggcgaccagcgccatttactaaatataagggttggtgtttgga

SEQ ID NO: 40855 - DNA, 80 bp, synthetic construct
  source 1..80: mol_type = other DNA
atttcagactggaataagcaatgtatgaaagtatgggatacaggtatgtatattaaggaaatagagacagcttatactga

SEQ ID NO: 40856 - DNA, 80 bp, synthetic construct
  source 1..80: mol_type = other DNA
acactactctgtatcacaaagatgtttgatatttattgattatagactgcaaaatttaacaactaaggttagaccaaact

SEQ ID NO: 40857 - DNA, 80 bp, synthetic construct
  source 1..80: mol_type = other DNA
atatttgttcaaatcaccatgaacgtgcatcgagagttagaagatgtcgttggtgcactttacaacaaagcacaatttgg

SEQ ID NO: 40858 - DNA, 80 bp, synthetic construct
  source 1..80: mol_type = other DNA
ttttagactcaagaaaatatataataacatgatggactttattagagcacttgtgaaatcaaacggaaatgttggacatt

SEQ ID NO: 40859 - DNA, 80 bp, synthetic construct
  source 1..80: mol_type = other DNA
gctcgtcacaagaatcggtatacaaatgtatcccggacatatttctgatttgtgagatggaaaaatggaatggagctgtt

SEQ ID NO: 40860 - DNA, 80 bp, synthetic construct
  source 1..80: mol_type = other DNA
agagtgttgtttagatatctagaaccagtggatatgaacggagaggaatatgtactattggactatgaagtgaattggga

SEQ ID NO: 40861 - DNA, 80 bp, synthetic construct
  source 1..80: mol_type = other DNA
agtgaggggactaattatgcagaatatggatggaagagtgccaaggattttgaatatagatgatgtaaagaaaatattaa

SEQ ID NO: 40862 - DNA, 80 bp, synthetic construct
  source 1..80: mol_type = other DNA
gcgcaataatatttgattggtttgacgtgagatatatgagagaaacaccgttgacaacgttaacaacaaatcaactccga

SEQ ID NO: 40863 - DNA, 80 bp, synthetic construct
  source 1..80: mol_type = other DNA
gcactgaataggaggaatgagctcatagatgagtacgacttagaactttcagatgtcgagtaaatgtagtcataattatg

SEQ ID NO: 40864 - DNA, 80 bp, synthetic construct
  source 1..80: mol_type = other DNA
gtcgagtaaatgtagtcataattatgccaacacaagactctctgcactagagtagcgcctaggcagcataaaatgtgacc

SEQ ID NO: 40865 - DNA, 80 bp, synthetic construct
  source 1..80: mol_type = other DNA
gctgtcaacacacgaatttgacatattgcagaggctgtgctctatatcacgtatgtcagtggtgtagtcagtataatagg

SEQ ID NO: 40866 - DNA, 80 bp, synthetic construct
  source 1..80: mol_type = other DNA
tgtttcttagatgaagaacctcactttttgagaatgcgaacatttaaaaatgtaatgacaaaagaagacatagagggatt

SEQ ID NO: 40867 - DNA, 80 bp, synthetic construct
  source 1..80: mol_type = other DNA
gctgacaatgtatgaaacgctgtttccaataaacggaaaattagtgaacaaattcacggactttgtgaaacaacgtaaat

SEQ ID NO: 40868 - DNA, 80 bp, synthetic construct
  source 1..80: mol_type = other DNA
gtagaaatgagtatttgctagaatggtacaaccatttactaatgccagtgacgttacaagcattaactataaaatttgag

SEQ ID NO: 40869 - DNA, 80 bp, synthetic construct
  source 1..80: mol_type = other DNA
aatgacgtatattatatatttggatattatgattgtatggaacatgagaaccaaacaccattccagtttattaatctggt

SEQ ID NO: 40870 - DNA, 80 bp, synthetic construct
  source 1..80: mol_type = other DNA
agagaagtatgataaattgttgctggatgacagaaattttaatagaatgtcatacctaccaacaatactacaacaggaat

SEQ ID NO: 40871 - DNA, 80 bp, synthetic construct
  source 1..80: mol_type = other DNA
atgcattgagatatttttcaaaatcaaggtttttaagcaaagagaagaaaaaattgattaggagcgatttttcagacaat

SEQ ID NO: 40872 - DNA, 80 bp, synthetic construct
  source 1..80: mol_type = other DNA
cttatggaagacaggcattgtccaatgtcactaatacaagtgacacgcaactgcatcagtacacacatgaatgatagtga

SEQ ID NO: 40873 - DNA, 80 bp, synthetic construct
  source 1..80: mol_type = other DNA
atggaataaagcgtgcacgcttataattgatcctaaaaactacattaacatcatgaactcatcatacactgaacattaca

SEQ ID NO: 40874 - DNA, 80 bp, synthetic construct
  source 1..80: mol_type = other DNA
taatttagtgctcaaactaggagcaaacgatgaatggagaccagcgccagtgacaaaatacaagggatggtgtctagatt

SEQ ID NO: 40875 - DNA, 80 bp, synthetic construct
  source 1..80: mol_type = other DNA
gcgtttcacaaagatgcaaattgttcactaaatataaatttgggatcgtatcaaaactggtaagaccaaattacattttc

SEQ ID NO: 40876 - DNA, 80 bp, synthetic construct
  source 1..80: mol_type = other DNA
tctaatcacgcatcgtgcgcattaaatgtacacaattgtaaatggtgccagacaaacaaccattataaagtgtgggacga

SEQ ID NO: 40877 - DNA, 80 bp, synthetic construct
  source 1..80: mol_type = other DNA
gaagactttagacttaggaaaatatataataatgtaatggattttatcagggcacttatgaaatcgaatggaaatgttgg

SEQ ID NO: 40878 - DNA, 80 bp, synthetic construct
  source 1..80: mol_type = other DNA
acattgttcatcacaggaatcagtgtataagtatataccagatttatttttaatttgtaaaacggaaaaatggaacgaag

SEQ ID NO: 40879 - DNA, 80 bp, synthetic construct
  source 1..80: mol_type = other DNA
ctgtcgaaatgttatttaattatctagaaccagtggacataaatggaacggagtatgtattattagactatgaagtgaac

SEQ ID NO: 40880 - DNA, 80 bp, synthetic construct
  source 1..80: mol_type = other DNA
tgggaagtgaggggactagtcatgcaaaacatggatgggaaagtaccaagaattttgaatatgaatgatacaaagaagat

SEQ ID NO: 40881 - DNA, 80 bp, synthetic construct
  source 1..80: mol_type = other DNA
actgagtgcaatgatatttgactggtttgacacaagatatatgagagaaacaccaatgacgacgtcaacaacaaaccaac

SEQ ID NO: 40882 - DNA, 80 bp, synthetic construct
  source 1..80: mol_type = other DNA
ttcgaacactgaacaaaaggaatgagctcatagatgagtacgatttagaactttcagatgttgagtaaatatggtcacaa

SEQ ID NO: 40883 - DNA, 80 bp, synthetic construct
  source 1..80: mol_type = other DNA
taagtgtaggaatgaatatttgttagaatggtataaccacttactaatgccaataacattgcaagcattgactataaatc

SEQ ID NO: 40884 - DNA, 80 bp, synthetic construct
  source 1..80: mol_type = other DNA
ttgaggataatgtatattatatatttggatactatgattgcatggagcatgaaaaccaaacaccattccaatttattaat

SEQ ID NO: 40885 - DNA, 80 bp, synthetic construct
  source 1..80: mol_type = other DNA
ctactagaaaaatatgataaattgctactagatgatagaaatttccatagaatgtcacacttaccagtaatattgcaaca

SEQ ID NO: 40886 - DNA, 80 bp, synthetic construct
  source 1..80: mol_type = other DNA
agagtatgcgttgagatatttttcaaaatcaagatttttaagtaaagggaagaaaagattgagcaggagtgatttctcag

SEQ ID NO: 40887 - DNA, 80 bp, synthetic construct
  source 1..80: mol_type = other DNA
ataatcttatggaagatagacatagtccaacatcattaatgcaagtggtacgtaactgcatcagtatacacataaatgat

SEQ ID NO: 40888 - DNA, 80 bp, synthetic construct
  source 1..80: mol_type = other DNA
tgtgaatggaataaagcgtgtacgcttatagttgatgctagaaattatattagtattatgaactcatcgtatactgagca

SEQ ID NO: 40889 - DNA, 80 bp, synthetic construct
  source 1..80: mol_type = other DNA
ttacagtgtgtcacaaagatgtaaattgtttactaagtataaatttgggattgtatcaagattggtgaaaccgaattaca

SEQ ID NO: 40890 - DNA, 80 bp, synthetic construct
  source 1..80: mol_type = other DNA
ttttttctagccatgaatcatgcgcattaaacgtacataattgtaaatggtgtcagatcaacaaccattacaaagtgtgg

SEQ ID NO: 40891 - DNA, 80 bp, synthetic construct
  source 1..80: mol_type = other DNA
gatcctattatcagggacaggagcaggattagagatatccgagatggccacacttttaaggagcttagcattgttcaaaa

SEQ ID NO: 40892 - DNA, 80 bp, synthetic construct
  source 1..80: mol_type = other DNA
tcacagtgttctcttgagttttggcaaaatggagaataaaatcgaagtgactagcaaggatgaaatgaacaggtggtttg

SEQ ID NO: 40893 - DNA, 80 bp, synthetic construct
  source 1..80: mol_type = other DNA
aatttgcgtcactctgcactcagattttttcctctaattgcttcaatcaatcgctttttttatccagctttgcttacttt

SEQ ID NO: 40894 - DNA, 80 bp, synthetic construct
  source 1..80: mol_type = other DNA
ttttttcctctaattgcttcaatcaatcgctttttttatccagctttgcttactttgcttttctttcttaattaaacact

SEQ ID NO: 40895 - DNA, 80 bp, synthetic construct
  source 1..80: mol_type = other DNA
aactggagccatataatcataagtacatatcatctgtagcattaagtacaaggaaatactaatgacagtaatgaatgtat

SEQ ID NO: 40896 - DNA, 80 bp, synthetic construct
  source 1..80: mol_type = other DNA
aactccggaaccctaaccctgctctaggtagttaggcattatttgcaatatattaaagaaaactttgaaaatacgaagtt

SEQ ID NO: 40897 - DNA, 80 bp, synthetic construct
  source 1..80: mol_type = other DNA
gggaggattttagaattaaaaagatatataataatgtgctagatttcattagagcattgtctaaatcaaatgggatggca

SEQ ID NO: 40898 - DNA, 80 bp, synthetic construct
  source 1..80: mol_type = other DNA
ggacattgttcttcacagcaaaagatttataaatatgtatctaaattgcttttaatatatgatgaagagcaatggactgg

SEQ ID NO: 40899 - DNA, 80 bp, synthetic construct
  source 1..80: mol_type = other DNA
atccatagataaattatttaaatgtttagaacctgttgacataaatgaagtagaatatgtgctgtttgatcatgaaatta

SEQ ID NO: 40900 - DNA, 80 bp, synthetic construct
  source 1..80: mol_type = other DNA
attgggaagttagagccttaatttcgaagtgtatgaatggaaatattccgaggatattaaatttagatgatattcgattg

SEQ ID NO: 40901 - DNA, 80 bp, synthetic construct
  source 1..80: mol_type = other DNA
atattgagctcgttaatatatgactggtttgatatgagatacatgagagagacgccaatgataacgtcaaccacgaatga

SEQ ID NO: 40902 - DNA, 80 bp, synthetic construct
  source 1..80: mol_type = other DNA
attacgtaaattaaacagaaagaatgaattgattgatgagtatgatctggaactatcagacgttgaataagcagttatac

SEQ ID NO: 40903 - DNA, 80 bp, synthetic construct
  source 1..80: mol_type = other DNA
agcagttatacatggtcacaatttagccaacacaagaccgtctgcactagagtagcgcctaggcagcataaaatgtgacc

SEQ ID NO: 40904 - DNA, 80 bp, synthetic construct
  source 1..80: mol_type = other DNA
ctagattgttgccaatatacaaatctaacatactgtaggggatgtgctctatatcatgtatgtcaatggtgtagtcaata

SEQ ID NO: 40905 - DNA, 80 bp, synthetic construct
  source 1..80: mol_type = other DNA
caatcgatgttttttagatgaagaaccacacttactgaggatgaggacatttaagaacgatatgaataaagaagatattg

SEQ ID NO: 40906 - DNA, 80 bp, synthetic construct
  source 1..80: mol_type = other DNA
aaaatttgcttaatatgtatgacactctattcccaatacatgaaaaaatagtgaataagtttattaataatgttaagcaa

SEQ ID NO: 40907 - DNA, 80 bp, synthetic construct
  source 1..80: mol_type = other DNA
cgtaagtgcaggaatgagtatttattggaatggtacaatcatctattatttccacttactttgcaagcactggccataga

SEQ ID NO: 40908 - DNA, 80 bp, synthetic construct
  source 1..80: mol_type = other DNA
actagaaaacagcacatattatatattcggatactatgactgcatggagcaagaaaatcaaacaccatttcattttgtaa

SEQ ID NO: 40909 - DNA, 80 bp, synthetic construct
  source 1..80: mol_type = other DNA
atctgatagataattatgataggttgttattggatgatagaaactttaatagcatggcacatttaccaccaatattacaa

SEQ ID NO: 40910 - DNA, 80 bp, synthetic construct
  source 1..80: mol_type = other DNA
caagaatatgcattgagatatttttcaaaatcaaggtttatagataaaccgcaaagagcgctgcaaagaaatgattttgc

SEQ ID NO: 40911 - DNA, 80 bp, synthetic construct
  source 1..80: mol_type = other DNA
agacaatttaatggaagatagacatagtccaacttcattaatgcaagtaactcgtaactgtgtcgctgagcatttggatg

SEQ ID NO: 40912 - DNA, 80 bp, synthetic construct
  source 1..80: mol_type = other DNA
aattgaatggttccattttaaaattaggagctaatgatgaatggagaccagcaccaataacaaaattcaaaggttggtgt

SEQ ID NO: 40913 - DNA, 80 bp, synthetic construct
  source 1..80: mol_type = other DNA
atgataaatggaataaagcttgcacacatgttataaacgctaagagttacatggaggtaataaattctgcatatactgaa

SEQ ID NO: 40914 - DNA, 80 bp, synthetic construct
  source 1..80: mol_type = other DNA
cattatggcgtatcacaaagatgtaagctttatactaggaataagcttaatactttagctcgactaactaaaccaaacta

SEQ ID NO: 40915 - DNA, 80 bp, synthetic construct
  source 1..80: mol_type = other DNA
cattctttcaaatcatgagacatgtgcactgaatgttcataattgtaaatggtgtcagattaatagctgctataaaatat

SEQ ID NO: 40916 - DNA, 80 bp, synthetic construct
  source 1..80: mol_type = other DNA
agcaaaaacaagcagattgtccaaagatgaatgcccttctagtcatactggtagcgattgccgcaaaatcagcagaccaa

SEQ ID NO: 40917 - DNA, 80 bp, synthetic construct
  source 1..80: mol_type = other DNA
aagatggtctccagcttggctaagatcgatgatagattgattggagcactgctggagaaacctatggcaagtaaattcat

SEQ ID NO: 40918 - DNA, 80 bp, synthetic construct
  source 1..80: mol_type = other DNA
ctctcctaccaaattcatggtgtcgccctgtgtcgctgtgttagaagaagaatcgaattgccataaggacagcatatata

SEQ ID NO: 40919 - DNA, 80 bp, synthetic construct
  source 1..80: mol_type = other DNA
gagacggccggtgggtgtacaataacgacccaacaaaatgcttcatcctcaactcgtcccaaactattgatttgtttaac

SEQ ID NO: 40920 - DNA, 80 bp, synthetic construct
  source 1..80: mol_type = other DNA
tttaaaactctgtggttgccccagttagtggctgcaaaggtcgagggagtggtttccgacgaggatggttggacatttgt

SEQ ID NO: 40921 - DNA, 80 bp, synthetic construct
  source 1..80: mol_type = other DNA
agcaaacagcaaacaggcattgcttgacaccatgacatacaccaagaatggaggcagagggactagcatggaggatgttt

SEQ ID NO: 40922 - DNA, 80 bp, synthetic construct
  source 1..80: mol_type = other DNA
tgaactaccccagcggatggctgtctggcaagttaaacggcttgctgctcaatggagctgtgtcttggctggggatttgt

SEQ ID NO: 40923 - DNA, 80 bp, synthetic construct
  source 1..80: mol_type = other DNA
ctggggatttgtgctgtggtcgtcttgggggtttgtttgtgcaggcgggtctattaagaaaaaactgctttgatttctct

SEQ ID NO: 40924 - DNA, 80 bp, synthetic construct
  source 1..80: mol_type = other DNA
actgcaaatcaaagtcaccaaaacaacagtccaagacagaggaaagaattttatcattggctatcgcgcatactggagga

SEQ ID NO: 40925 - DNA, 80 bp, synthetic construct
  source 1..80: mol_type = other DNA
gctactgctacaacggcggatcactggacggtaacactggatgctacaactctctcaatccaaagccgcctacaaaagac

SEQ ID NO: 40926 - DNA, 80 bp, synthetic construct
  source 1..80: mol_type = other DNA
gagttgaaaacatggggacaagaagaagtgtgctacaccggaccagaagtgcaagatgcttggtctggggactctagcat

SEQ ID NO: 40927 - DNA, 80 bp, synthetic construct
  source 1..80: mol_type = other DNA
atgctttgtggattggaagatggacaacaaacacagagccaaagagttggagaagcggagcaacaacaaccattttgcgc

SEQ ID NO: 40928 - DNA, 80 bp, synthetic construct
  source 1..80: mol_type = other DNA
accacacatgcaatctctcctggaggtgtggggtaacaaacacccatttagaagtgagactggttgcatccggcactcaa

SEQ ID NO: 40929 - DNA, 80 bp, synthetic construct
  source 1..80: mol_type = other DNA
ccccaagcagtaatagtgatgcccaacgggactacgagagctgtgtctatggtggcagaaacgttctggactgacggaga

SEQ ID NO: 40930 - DNA, 80 bp, synthetic construct
  source 1..80: mol_type = other DNA
attttcctacctttacagccctaaggtctttggaacaagagcagagaccaaattcatcccatgctttaaagaacatgtga

SEQ ID NO: 40931 - DNA, 80 bp, synthetic construct
  source 1..80: mol_type = other DNA
agacccgtcttgaccaaggagggagtgactacctaatccacgaccttaccacagagaagtttcattgcaaagatggagac

SEQ ID NO: 40932 - DNA, 80 bp, synthetic construct
  source 1..80: mol_type = other DNA
gctgaactgtgcaataagcagcaacagcaaggcccgttcacgttcgcaaattaccaagagtcaccattaaacgtgtccag

SEQ ID NO: 40933 - DNA, 80 bp, synthetic construct
  source 1..80: mol_type = other DNA
aacttcttcgaatttccctcatcagggttcatctgcttaccagatgcttgctacaaaaatgaaaagcagaaaaacaatct

SEQ ID NO: 40934 - DNA, 80 bp, synthetic construct
  source 1..80: mol_type = other DNA
attgcaccccggaatgtggaatatttctgagaaactacatgcagcaagtgtctatgatgtaaacaatgtaatacattctt

SEQ ID NO: 40935 - DNA, 80 bp, synthetic construct
  source 1..80: mol_type = other DNA
tagtgtatgaaactgaaagcctacggctctcactagcccaattagaccatagattttctgtgctaaccaaactcatgaat

SEQ ID NO: 40936 - DNA, 80 bp, synthetic construct
  source 1..80: mol_type = other DNA
ttgggtaaggatagatcaatcaatgatcatattctagtacacttaggattcaagatcctattatcagggacaagagcagg

SEQ ID NO: 40937 - DNA, 80 bp, synthetic construct
  source 1..80: mol_type = other DNA
acatgtggaaactgatagatggtttcttccctgcactcgggaatccaacttatcaaattgtagccatgctggagccactt

SEQ ID NO: 40938 - DNA, 80 bp, synthetic construct
  source 1..80: mol_type = other DNA
tcacttgcttacctgcaactgagggatataacagtagaactcagaggtgctttccttaaccactgctttactgaaataca

SEQ ID NO: 40939 - DNA, 80 bp, synthetic construct
  source 1..80: mol_type = other DNA
tgatgttcttgaccaaaacgggttttctgatgaaggtacttatcatgagttaattgaagccctagattacattttcataa

SEQ ID NO: 40940 - DNA, 80 bp, synthetic construct
  source 1..80: mol_type = other DNA
ctgatgacatacatctgacaggggagattttttcatttttcagaagtttcggccaccccagacttgaagcagtaacggct

SEQ ID NO: 40941 - DNA, 80 bp, synthetic construct
  source 1..80: mol_type = other DNA
gctgaaaatgttaggaaatacatgaatcagcctaaagtcattgtgtatgagactctgatgaaaggtcatgccatattttg

SEQ ID NO: 40942 - DNA, 80 bp, synthetic construct
  source 1..80: mol_type = other DNA
cctagagaactcacttcagaacaagttcagtgcaggatcataccctctgctctggagctatgccatgggagtaggggtgg

SEQ ID NO: 40943 - DNA, 80 bp, synthetic construct
  source 1..80: mol_type = other DNA
tggaatcataatcaacggctatcgtgacaggcacggaggcagttggccacccctaaccctccccctgcatgctgccgaca

SEQ ID NO: 40944 - DNA, 80 bp, synthetic construct
  source 1..80: mol_type = other DNA
caatccggaatgctcaagcttcaggtgaagggttaacacatgagcagtgcgttgataactggaaatcatttgctggagtg

SEQ ID NO: 40945 - DNA, 80 bp, synthetic construct
  source 1..80: mol_type = other DNA
agatttggctgttttatgcctcttagcctggacagtgatctgacaatgtatctaaaggacaaggcgcttgctgctctcca

SEQ ID NO: 40946 - DNA, 80 bp, synthetic construct
  source 1..80: mol_type = other DNA
aagggaatgggattcagtttacccgaaagagttcctgcgttacgatccccccaagggaaccgggtcacggaggcttgtag

SEQ ID NO: 40947 - DNA, 80 bp, synthetic construct
  source 1..80: mol_type = other DNA
atgttttccttaatgattcaagttttgacccatatgatatgataatgtatgtcgtgagtggagcttacctccatgaccct

SEQ ID NO: 40948 - DNA, 80 bp, synthetic construct
  source 1..80: mol_type = other DNA
gagttcaacctgtcttacagcctgaaagaaaaggagatcaaggaaacaggtagactttttgctaaaatgacttacaaaat

SEQ ID NO: 40949 - DNA, 80 bp, synthetic construct
  source 1..80: mol_type = other DNA
gagggcatgccaagtgattgctgaaaatctaatctcaaacggaattggtaaatattttaaggacaatggaatggccaagg

SEQ ID NO: 40950 - DNA, 80 bp, synthetic construct
  source 1..80: mol_type = other DNA
atgagcacgatttgactaaggcactccacaccctagctgtctcaggagtccccaaagatctcaaagaaagtcacagggtg

SEQ ID NO: 40951 - DNA, 80 bp, synthetic construct
  source 1..80: mol_type = other DNA
gggccagtcttaaaaacctactcccgaagcccagtccacacaagtgccaggaacgttaaagcagaaaaagggtttgtagg

SEQ ID NO: 40952 - DNA, 80 bp, synthetic construct
  source 1..80: mol_type = other DNA
attccctcatgtaattcggcaggatcaagacactgatcatccggagaatatagaaacctacgagacagtcagcgcattta

SEQ ID NO: 40953 - DNA, 80 bp, synthetic construct
  source 1..80: mol_type = other DNA
tcacgactgatctcaagaagtactgccttaattggagatatgagactatcagcttatttgcacagaggctaaatgagatt

SEQ ID NO: 40954 - DNA, 80 bp, synthetic construct
  source 1..80: mol_type = other DNA
tacggattaccctcattttttcagtggctgcataagaggcttgaaacctctgtcctctatgtgagtgaccctcattgccc

SEQ ID NO: 40955 - DNA, 80 bp, synthetic construct
  source 1..80: mol_type = other DNA
ccccgaccttgacgcccatgtcccgttatgcaaagttcccaatgaccaaatcttcatcaagtaccctatgggaggtatag

SEQ ID NO: 40956 - DNA, 80 bp, synthetic construct
  source 1..80: mol_type = other DNA
aagggtattgtcagaagctgtggaccatcagcaccatcccctacttatacctggctgcttatgagagcggagtaaggatt

SEQ ID NO: 40957 - DNA, 80 bp, synthetic construct
  source 1..80: mol_type = other DNA
gcttcgttagtgcaaggggacaatcagaccatagccgtaacaaaaagggtgcccagcacatggccttacaaccttaagaa

SEQ ID NO: 40958 - DNA, 80 bp, synthetic construct
  source 1..80: mol_type = other DNA
acaggaagctgctagagtaactagagattactttgtaattcttaggcaaaggctacatgacattggccatcacctcaagg

SEQ ID NO: 40959 - DNA, 80 bp, synthetic construct
  source 1..80: mol_type = other DNA
caaatgagacaattgtgtcatcacatttttttgtctattcaaaaggaatatattatgatgggctacttgtgtcccaatca

SEQ ID NO: 40960 - DNA, 80 bp, synthetic construct
  source 1..80: mol_type = other DNA
ctcaagagcatcgcaagatgtgtattctggtcagagactatagttgatgaaacaagggcagcatgcagtaatattgccac

SEQ ID NO: 40961 - DNA, 80 bp, synthetic construct
  source 1..80: mol_type = other DNA
aacaatggctaaaagcatcgagaaaggttatgaccgttatcttgcatattccctgaacgtcctaaaagtgatacagcaaa

SEQ ID NO: 40962 - DNA, 80 bp, synthetic construct
  source 1..80: mol_type = other DNA
ttttgatctctcttgacttcacaatcaattcaaccatgacccgggatgtagtcatacccctcctctcaaacaatgatctc

SEQ ID NO: 40963 - DNA, 80 bp, synthetic construct
  source 1..80: mol_type = other DNA
ttaataaggatggcactgttgcccgctcctattggtgggatgaattatctgaatatgagcaggctgtttgtcagaaacat

SEQ ID NO: 40964 - DNA, 80 bp, synthetic construct
  source 1..80: mol_type = other DNA
cggtgatccagtaacatcatcaattgctgatctcaagagaatgattctcgcatcactaatgcctgaagagaccctccatc

SEQ ID NO: 40965 - DNA, 80 bp, synthetic construct
  source 1..80: mol_type = other DNA
aagtaatgacacaacagccgggggactcttcattcctagactgggctagcgacccttactcagcaaatcttgtatgtgtc

SEQ ID NO: 40966 - DNA, 80 bp, synthetic construct
  source 1..80: mol_type = other DNA
cagagcatcactagactcctcaagaacataactgcaaggtttgtcctgatccatagtccaaacccaatgttaaaagggtt

SEQ ID NO: 40967 - DNA, 80 bp, synthetic construct
  source 1..80: mol_type = other DNA
attccatgatgacagtaaagaagaggacgagagactggcggcattccttatggacaggcatattatagtacctagggcag

SEQ ID NO: 40968 - DNA, 80 bp, synthetic construct
  source 1..80: mol_type = other DNA
ctcatgaaatcctggaccatagtgtcacaggggcacgagaatccattgcaggcatgctagataccacaaaaggcctgatt

SEQ ID NO: 40969 - DNA, 80 bp, synthetic construct
  source 1..80: mol_type = other DNA
cgagccagcatgaggaagggggggtcaacctctcgagtgataaccagattgtccaattatgactatgaacaatttagagc

SEQ ID NO: 40970 - DNA, 80 bp, synthetic construct
  source 1..80: mol_type = other DNA
agggatggtgctattgacaggaagaaagaggaatgtcctcattgacaaagagtcatgttcagtacagctggctagagccc

SEQ ID NO: 40971 - DNA, 80 bp, synthetic construct
  source 1..80: mol_type = other DNA
tcagaagccacatgtgggcaagactagctcgaggacggcctatttacggccttgaggtccctgatgtactagaatctatg

SEQ ID NO: 40972 - DNA, 80 bp, synthetic construct
  source 1..80: mol_type = other DNA
cgaggccaccttattcggcgtcatgagacatgtgtcatctgcgagtgtggatcagtcaattacggatggttttttgtccc

SEQ ID NO: 40973 - DNA, 80 bp, synthetic construct
  source 1..80: mol_type = other DNA
ctcgggttgccaactggatgatattgacaaggaaacatcatccttaagggtcccatatatcggttctaccaccgatgaga

SEQ ID NO: 40974 - DNA, 80 bp, synthetic construct
  source 1..80: mol_type = other DNA
gaacagatatgaagctcgccttcgttagagccccaagtcgatccttgcgatctgctgttagaatagcaacagtgtactca

SEQ ID NO: 40975 - DNA, 80 bp, synthetic construct
  source 1..80: mol_type = other DNA
tgggcctacggtgatgatgatagctcttggaacgaggcatggttgttggcgaggcaaagggccaatgtgaccctggagga

SEQ ID NO: 40976 - DNA, 80 bp, synthetic construct
  source 1..80: mol_type = other DNA
gctaagggtgatcactcccatctcaacttcgactaatttagcacataggttgagggatcgtagcactcaagtgaaatact

SEQ ID NO: 40977 - DNA, 80 bp, synthetic construct
  source 1..80: mol_type = other DNA
caggtacatctcttgtccgagtggcaaggtataccacaatctccaacgacaatctctcatttgtcatatcagataagaag

SEQ ID NO: 40978 - DNA, 80 bp, synthetic construct
  source 1..80: mol_type = other DNA
tcagtagagcagtcggacccagacaagcccaagtgtcatttctacacggtgatcaaagtgagaatgagctaccaggactg

SEQ ID NO: 40979 - DNA, 80 bp, synthetic construct
  source 1..80: mol_type = other DNA
gttgatactaactttatataccaacaaggaatgcttctagggttgggtgttttagaaacattgtttcgactcaagaaaga

SEQ ID NO: 40980 - DNA, 80 bp, synthetic construct
  source 1..80: mol_type = other DNA
tactggatcatctaacacggtattacatcttcacgtcgaaacagattgttgcgtgatcccgatgatagatcatcccagga

SEQ ID NO: 40981 - DNA, 80 bp, synthetic construct
  source 1..80: mol_type = other DNA
tacccagctcccgcaagctagagctgagggcagagctatgtaccaacccattgatatatgataatgcacctctaattgac

SEQ ID NO: 40982 - DNA, 80 bp, synthetic construct
  source 1..80: mol_type = other DNA
agagatgcaacaaggctatacacccagagccataggaggcaccttgtggaatttgttacatggtccacaccccaactata

SEQ ID NO: 40983 - DNA, 80 bp, synthetic construct
  source 1..80: mol_type = other DNA
tcacattctagctaagtccacagcactatctatgattgacctagtaacaaaatttgagaaggaccatatgaatgaaattt

SEQ ID NO: 40984 - DNA, 80 bp, synthetic construct
  source 1..80: mol_type = other DNA
gtgatcaaagtgagaatgagctaccaggactggggtggaaggaggacaggagggtcaaacagagtagaggagaagcaagg

SEQ ID NO: 40985 - DNA, 80 bp, synthetic construct
  source 1..80: mol_type = other DNA
cagctctcataggggatgacgatatcaatagtttcataactgagtttctgcttatagagccaagattattcaccatttac

SEQ ID NO: 40986 - DNA, 80 bp, synthetic construct
  source 1..80: mol_type = other DNA
ttgggccagtgtgcagccatcaattgggcatttgatgtacattatcatagaccatcagggaaatatcagatgggtgagct

SEQ ID NO: 40987 - DNA, 80 bp, synthetic construct
  source 1..80: mol_type = other DNA
gttgtcttcattcctttctagaatgagcaaaggagtatttaaggtgcttgtcaatgctctaagccacccaaagatttaca

SEQ ID NO: 40988 - DNA, 80 bp, synthetic construct
  source 1..80: mol_type = other DNA
agaaattctggcattgtggtattatagagcctatccatggtccttcacttgatgctcaaaacttgcacacaactgtgtgc

SEQ ID NO: 40989 - DNA, 80 bp, synthetic construct
  source 1..80: mol_type = other DNA
aatatggtttacacatgctatatgacctaccttgacctgttgttgaatgaagaattagaagagttcacatttcttttgtg

SEQ ID NO: 40990 - DNA, 80 bp, synthetic construct
  source 1..80: mol_type = other DNA
tgaaagcgacgaggatgtagtaccggatagattcgacaacatccaggcaaaacacttgtgtgttctagcagatttgtact

SEQ ID NO: 40991 - DNA, 80 bp, synthetic construct
  source 1..80: mol_type = other DNA
gtcaaccagggacctgcccaccgattcgaggtctaagaccggtagagaaatgtgcggttctaaccgatcatatcaaggca

SEQ ID NO: 40992 - DNA, 80 bp, synthetic construct
  source 1..80: mol_type = other DNA
gaggctaggttatctccagcaggatcttcgtggaacataaatccaattattgtagaccattactcatgctctctgactta

SEQ ID NO: 40993 - DNA, 80 bp, synthetic construct
  source 1..80: mol_type = other DNA
tctccggcgaggatctatcaaacagataagattgagagttgatccaggattcatttttgacgccctcgctgaggtaaatg

SEQ ID NO: 40994 - DNA, 80 bp, synthetic construct
  source 1..80: mol_type = other DNA
tcagtcagccaaagatcggcagcaacaacatctcaaatatgagcatcaaggatttcagacctccatacgatgatgttgca

SEQ ID NO: 40995 - DNA, 80 bp, synthetic construct
  source 1..80: mol_type = other DNA
aaattgctcaaagatgtcaacacaagcaagcacaatcttcccatttcaggggttggtctcgccaattatgaaatccatgt

SEQ ID NO: 40996 - DNA, 80 bp, synthetic construct
  source 1..80: mol_type = other DNA
tttccgcagaatcgggttaaactcatccgcttgctacaaagctgttgagatatcaacattaattaggagatgccttgagc

SEQ ID NO: 40997 - DNA, 80 bp, synthetic construct
  source 1..80: mol_type = other DNA
caggggaagatggcttgttcttgggtgaggggtcgggttctatgttgatcacttataaggagatactaaaactaaacaag

SEQ ID NO: 40998 - DNA, 80 bp, synthetic construct
  source 1..80: mol_type = other DNA
tgcttctataatagtggggtttccgccaattctagatctggtcaaagggaattagcaccctatccctccgaagttggcct

SEQ ID NO: 40999 - DNA, 80 bp, synthetic construct
  source 1..80: mol_type = other DNA
tgtcgaacacagaatgggagtaggtaatattgtcaaggtgctctttaacgggaggcccgaagtcacatgggtaggcagta

SEQ ID NO: 41000 - DNA, 80 bp, synthetic construct
  source 1..80: mol_type = other DNA
tagattgcttcaatttcatagtcagtaatatccctacctctagtgtggggtttatccattcagatatagagaccttacct

SEQ ID NO: 41001 - DNA, 80 bp, synthetic construct
  source 1..80: mol_type = other DNA
aacaaagatactatagagaagctagaggaattggcagccatcttatcgatggctctgctccttggtaaaataggatcaat

SEQ ID NO: 41002 - DNA, 80 bp, synthetic construct
  source 1..80: mol_type = other DNA
actggtgattaagcttatgcctttcagcggggattttgttcagggatttataagctatgtagggtcttattatagagagg

SEQ ID NO: 41003 - DNA, 80 bp, synthetic construct
  source 1..80: mol_type = other DNA
tgaaccttgtctaccctaggtacagcaacttcatatctactgaatcttacttagttatgacagatcttaaagctaaccgg

SEQ ID NO: 41004 - DNA, 80 bp, synthetic construct
  source 1..80: mol_type = other DNA
ctaatgaatcctgaaaagattaagcagcagataattgaatcatctgtgcggacctcacccggacttataggtcacatcct

SEQ ID NO: 41005 - DNA, 80 bp, synthetic construct
  source 1..80: mol_type = other DNA
tgacactgcatcagagtcaggccaagatccgcaggacagtcgaaggtcagctgacgccctgctcagactgcaagccatgg

SEQ ID NO: 41006 - DNA, 80 bp, synthetic construct
  source 1..80: mol_type = other DNA
atccatcaaacaaacaagctgcatacaagcaattgtgggaggcgcagttaggagaggtgatatcaaccctactctgaaaa

SEQ ID NO: 41007 - DNA, 80 bp, synthetic construct
  source 1..80: mol_type = other DNA
aacttacacctatagagcaggtgctgatcagttgcgggttggcaattaacggacctaaactgtgcaaagaattaatccac

SEQ ID NO: 41008 - DNA, 80 bp, synthetic construct
  source 1..80: mol_type = other DNA
catgatgttgcctcagggcaagatggattgctcaactctatactcatcctctacagggagttggcaagattcaaggacaa

SEQ ID NO: 41009 - DNA, 80 bp, synthetic construct
  source 1..80: mol_type = other DNA
ccaaagaagtcaacaagggatgttccacgcttaccccgtattggtaagtagtaggcaacgagaacttgtatctaggatca

SEQ ID NO: 41010 - DNA, 80 bp, synthetic construct
  source 1..80: mol_type = other DNA
ctcgcaaattttgggggcatattcttctttactccgggaacagaaagttgataaatcggtttatccagaatctcaagtcc

SEQ ID NO: 41011 - DNA, 80 bp, synthetic construct
  source 1..80: mol_type = other DNA
ggttacctaatactagacttacaccggaatatcttcgtcaagaatctatctaagtcagagaaacagattattatgacggg

SEQ ID NO: 41012 - DNA, 80 bp, synthetic construct
  source 1..80: mol_type = other DNA
gggtttaaaacgtgagtgggtttttaaggtgacagtcaaggagaccaaagaatggtataagttagtcggatacagtgctc

SEQ ID NO: 41013 - DNA, 80 bp, synthetic construct
  source 1..80: mol_type = other DNA
tgattaaggattaattggttgaactccggaaccctaatcctaccctgggtggctaggcattatttgcagtatattaaaga

SEQ ID NO: 41014 - DNA, 80 bp, synthetic construct
  source 1..80: mol_type = other DNA
cgggatccggtggagccatcagaggaatcaaacacattattatagtaccaatacctggagattcctcaattaccactcga

SEQ ID NO: 41015 - DNA, 80 bp, synthetic construct
  source 1..80: mol_type = other DNA
cagggatcttggaagaacaaggctcagacacggacactcccaaggtgtacaatgacagagatcttctagactaggtgcga

SEQ ID NO: 41016 - DNA, 80 bp, synthetic construct
  source 1..80: mol_type = other DNA
gatgccgaggaccagaacaacatctgcctaccctccatcattgttataaaaaacttaggaaccaggtccacacagccgcc

SEQ ID NO: 41017 - DNA, 80 bp, synthetic construct
  source 1..80: mol_type = other DNA
agccaaccaaccatccactcccacgactggagccgatggcagaagagcaggcacgccatgtcaaaaacggactggaatgc

SEQ ID NO: 41018 - DNA, 80 bp, synthetic construct
  source 1..80: mol_type = other DNA
atccgggctctcaaggtcgagcccatcggctcactggccgtcgaggaagccatggcagcatggtcagaaatatcagacaa

SEQ ID NO: 41019 - DNA, 80 bp, synthetic construct
  source 1..80: mol_type = other DNA
cccagggcaggaccgagccacctgcaaggaagagaaggcaggcagttcgggtctcagcaaaccatgcctctcagcaattg

SEQ ID NO: 41020 - DNA, 80 bp, synthetic construct
  source 1..80: mol_type = other DNA
gatcaactgaaggcggtgcacctcgcatccgcggtcagggatctggagaaagcgatgacgacgctgaaactttgggaatc

SEQ ID NO: 41021 - DNA, 80 bp, synthetic construct
  source 1..80: mol_type = other DNA
ccctcaaaaaatctccaggcatcaagcactgggttacagtgttatcatgtttatgatcacagcggtgaagcggttaaggg

SEQ ID NO: 41022 - DNA, 80 bp, synthetic construct
  source 1..80: mol_type = other DNA
aatccaagatgctgactctatcatggttcaatcaggccctgatggttatagcaccctctcaggaggagacgatgaatctg

SEQ ID NO: 41023 - DNA, 80 bp, synthetic construct
  source 1..80: mol_type = other DNA
aaaacagcgatgtggatattggcgaacctgataccgagggatatgctatcactgaccggggatctgctcccatctctatg

SEQ ID NO: 41024 - DNA, 80 bp, synthetic construct
  source 1..80: mol_type = other DNA
ggattcagggcttctgatgttgaaactgcagaaggaggggagatccacgagctcctgaaactccaatccagaggcaacag

SEQ ID NO: 41025 - DNA, 80 bp, synthetic construct
  source 1..80: mol_type = other DNA
tctagactactggaccgattggtcaggttaattggaaacccggatgtgagcgggcccaaactaacaggggcgctaatagg

SEQ ID NO: 41026 - DNA, 80 bp, synthetic construct
  source 1..80: mol_type = other DNA
ctttccgaagcttgggaaaaccctcaatgttcctccgcccccgaaccccattagggccagcacttccgagacacccatta

SEQ ID NO: 41027 - DNA, 80 bp, synthetic construct
  source 1..80: mol_type = other DNA
aaaagggcacagacgcgagattagcctcatttggaacggagatcgcgtctttattgacaggtggtgcaacccactatgct

SEQ ID NO: 41028 - DNA, 80 bp, synthetic construct
  source 1..80: mol_type = other DNA
ctaaagtcactctcggaaccatcagggctaggtgcacctgcggagagtgtccccgagtgtgtgaacaatgccgcactgat

SEQ ID NO: 41029 - DNA, 80 bp, synthetic construct
  source 1..80: mol_type = other DNA
acaggagtggacacccgaatctggtaccacaatctccccgagatcccagaataatgaagaaggtggagactattatgatg

SEQ ID NO: 41030 - DNA, 80 bp, synthetic construct
  source 1..80: mol_type = other DNA
atgagctgttctccgatgtccaagacatcaaaacagccttggccaaaatacacgaggataatcagaagataatctccaag

SEQ ID NO: 41031 - DNA, 80 bp, synthetic construct
  source 1..80: mol_type = other DNA
ctagaatcactgctgttattgaagggagaagttgagtcaattaagaagcagatcaacaggcaaaatatcagcatatccac

SEQ ID NO: 41032 - DNA, 80 bp, synthetic construct
  source 1..80: mol_type = other DNA
cctggaaggacacctctcaagcatcatgatcgccattcctggacttgggaaggatcccaacgaccccactgcagatgtcg

SEQ ID NO: 41033 - DNA, 80 bp, synthetic construct
  source 1..80: mol_type = other DNA
aactcaatcccgacctgaaacccatcattggcagagattcaggccgagcacttgccgaagttctcaagaagcccgttgcc

SEQ ID NO: 41034 - DNA, 80 bp, synthetic construct
  source 1..80: mol_type = other DNA
agccgacaactccagggaatgacaaatggacggaccagttccagaggacagctgctgaaggaatttcaactaaagccgat

SEQ ID NO: 41035 - DNA, 80 bp, synthetic construct
  source 1..80: mol_type = other DNA
cgggaaaaaggtgagctcagccgtcgggtttgttcctgacaccggccctgcatcacgcagtgtaatccgctccattataa

SEQ ID NO: 41036 - DNA, 80 bp, synthetic construct
  source 1..80: mol_type = other DNA
tatactatccttatttgtggaatctccaggtcaattgattcagaggatcaccgatgatcctgacgttagcatcaggctgt

SEQ ID NO: 41037 - DNA, 80 bp, synthetic construct
  source 1..80: mol_type = other DNA
aatccagccggctagaggaggatcggaagcgttacctgatgactctccttgatgatgtcaaaggagccaacgatcttgcc

SEQ ID NO: 41038 - DNA, 80 bp, synthetic construct
  source 1..80: mol_type = other DNA
aagttccaccagatgctgatgaagataataatgaagtagctacagctcaacttacctgccaaccccatgccagccgacct

SEQ ID NO: 41039 - DNA, 80 bp, synthetic construct
  source 1..80: mol_type = other DNA
aattagtacaacataaatccattataaaaaacttaggagcaaagtgattgcctcccaagttccacaatgacagagatcta

SEQ ID NO: 41040 - DNA, 80 bp, synthetic construct
  source 1..80: mol_type = other DNA
cgacttcgacaagtcggcatgggacatcaaagggtcgatcgctccgatacaacctaccacctacagtgatggcaggctgg

SEQ ID NO: 41041 - DNA, 80 bp, synthetic construct
  source 1..80: mol_type = other DNA
tgccccaggtcagagtcatagatcctggtctaggtgataggaaggatgaatgctttatgtacatgtttctgctgggggtt

SEQ ID NO: 41042 - DNA, 80 bp, synthetic construct
  source 1..80: mol_type = other DNA
gttgaggacagcgatcccctagggcctccaatcgggcgagcatttgggtccctgcccttaggtgttggtagatccacagc

SEQ ID NO: 41043 - DNA, 80 bp, synthetic construct
  source 1..80: mol_type = other DNA
aaaacccgaggaactcctcaaagaggccactgagcttgacatagttgttagacgtacagcagggctcaatgaaaaactgg

SEQ ID NO: 41044 - DNA, 80 bp, synthetic construct
  source 1..80: mol_type = other DNA
tgttctacaacaacaccccactaactctcctcacaccttggagaaaggtcctaacaacagggagtgtcttcaatgcaaac

SEQ ID NO: 41045 - DNA, 80 bp, synthetic construct
  source 1..80: mol_type = other DNA
caagtgtgcaatgcggttaatctaataccgctggacaccccgcagaggttccgtgttgtttatatgagcatcacccgtct

SEQ ID NO: 41046 - DNA, 80 bp, synthetic construct
  source 1..80: mol_type = other DNA
ctcggataacgggtattacaccgttcccagaagaatgctggaattcagatcggttaatgcagtggccttcaacctgctag

SEQ ID NO: 41047 - DNA, 80 bp, synthetic construct
  source 1..80: mol_type = other DNA
tagaggttgtccagagtgaccagtcacaatctggccttaccttcgcatcaagaggtaccaacatggaggatgaggcggac

SEQ ID NO: 41048 - DNA, 80 bp, synthetic construct
  source 1..80: mol_type = other DNA
tgacccttaggattgacaaggcgattggccctgggaagatcatcgacaatgcagagcaacttcctgaggcaacatttatg

SEQ ID NO: 41049 - DNA, 80 bp, synthetic construct
  source 1..80: mol_type = other DNA
gtccacatcgggaacttcaggagaaagaagagtgaagtctactctgccgattattgcaaaatgaaaattgaaaagatggg

SEQ ID NO: 41050 - DNA, 80 bp, synthetic construct
  source 1..80: mol_type = other DNA
cctggtttttgcacttggagggatagggggcaccagtcttcacattagaagtaccggcaaaatgagcaagactctccatg

SEQ ID NO: 41051 - DNA, 80 bp, synthetic construct
  source 1..80: mol_type = other DNA
cacaactcgggttcaagaagaccttatgttacccactgatggatatcaatgaagaccttaatcggttactctggaggagc

SEQ ID NO: 41052 - DNA, 80 bp, synthetic construct
  source 1..80: mol_type = other DNA
aggtgcaagatagtaagaatccaggcagttttgcagccatcagttcctcaagaattccgcatttacgacgacgtgatcat

SEQ ID NO: 41053 - DNA, 80 bp, synthetic construct
  source 1..80: mol_type = other DNA
aaatgatgaccaaggactattcaaagttctgtagaccgcaatgcccagcaatacccgaaaacgacccccctcataatgac

SEQ ID NO: 41054 - DNA, 80 bp, synthetic construct
  source 1..80: mol_type = other DNA
agccagaaggcccggacaaaaaagccccctccaaaagactccacggaccaagcgagaggccagccggcagccgacggcaa

SEQ ID NO: 41055 - DNA, 80 bp, synthetic construct
  source 1..80: mol_type = other DNA
gtgtggacaccaggcggcccaagcacagaatagccccgacacaaggccaccaccagccatcccaatctgcgtcctcctcg

SEQ ID NO: 41056 - DNA, 80 bp, synthetic construct
  source 1..80: mol_type = other DNA
tgggacccccgaggatcaacccccaaggccaccccggacacagaccaccaaccgcatccccacagcccccgggaaaggaa

SEQ ID NO: 41057 - DNA, 80 bp, synthetic construct
  source 1..80: mol_type = other DNA
cccccagcaactggaaggcccctccctccttcccccaacgcaagaactccacaaccgaaccacacaggcgaccaaggtga

SEQ ID NO: 41058 - DNA, 80 bp, synthetic construct
  source 1..80: mol_type = other DNA
caatacttttcacatgatggcccaagcagtagtgatcaatccgggtccggatggttcgagaacaaggaaatctcagatat

SEQ ID NO: 41059 - DNA, 80 bp, synthetic construct
  source 1..80: mol_type = other DNA
cccaaccgcatgcatccgactccccagacagatcccctctccccggcaaactaaacaaaacttagggccaaggaacatac

SEQ ID NO: 41060 - DNA, 80 bp, synthetic construct
  source 1..80: mol_type = other DNA
acactcgacagaacccagaccccggcccacggcaccgcgcccccaccccccgaaaaccagagggagcccccaaccaatcc

SEQ ID NO: 41061 - DNA, 80 bp, synthetic construct
  source 1..80: mol_type = other DNA
tgccggcccccccggtgcccacgggcaggcacaccaacccccgaccagacccagcacccagccaccgacaatccaagacg

SEQ ID NO: 41062 - DNA, 80 bp, synthetic construct
  source 1..80: mol_type = other DNA
ggaggccccccccaagaagaggcccccaggggccgacagccagcaccaagaggaagtccacccaccccacacacgaccac

SEQ ID NO: 41063 - DNA, 80 bp, synthetic construct
  source 1..80: mol_type = other DNA
ggcaaccgaaccagagtccagacccccctgggccaccaactcccagactcagccatcgccccgcaaaaagggaaggccac

SEQ ID NO: 41064 - DNA, 80 bp, synthetic construct
  source 1..80: mol_type = other DNA
caaaccgcaaaagacatcagtatccctcagcctctccaagtctcctgatctcctcctcttctcgaaggggccaaaagacc

SEQ ID NO: 41065 - DNA, 80 bp, synthetic construct
  source 1..80: mol_type = other DNA
aatccaccacatccgacgacactcaattcctcacccctcaagtagacaccgggaatcccagtatcaagactcatccagtg

SEQ ID NO: 41066 - DNA, 80 bp, synthetic construct
  source 1..80: mol_type = other DNA
tccatcatgggtttcaaggtgaatgtctctgccatattcatggcaatgctgttaactctccaaacacccaccggtcaaat

SEQ ID NO: 41067 - DNA, 80 bp, synthetic construct
  source 1..80: mol_type = other DNA
ccactggggcaatctctccaagataggggtggtagggataggtagtgcaagctacaaagttatgactcgttccagccatc

SEQ ID NO: 41068 - DNA, 80 bp, synthetic construct
  source 1..80: mol_type = other DNA
tgaagtgcaagaccctgaaggattcaacatgattctgggtaccattctcgcccaaatctgggtcctgctcgcaaaggcgg

SEQ ID NO: 41069 - DNA, 80 bp, synthetic construct
  source 1..80: mol_type = other DNA
aatcattggtcataaaattaatgcccaatataactctcctcaacaactgcacgagggtagagattgcagaatacaggaga

SEQ ID NO: 41070 - DNA, 80 bp, synthetic construct
  source 1..80: mol_type = other DNA
ctactgagaacagttctggaaccaattagagatgcacttactgcaatgacccagaatataagaccggtccagagtgtaac

SEQ ID NO: 41071 - DNA, 80 bp, synthetic construct
  source 1..80: mol_type = other DNA
ttcaagtaggagacacaagagatttgcgggagttgtcctggcaggtgcggctctaggcgttgccacagctgctcagataa

SEQ ID NO: 41072 - DNA, 80 bp, synthetic construct
  source 1..80: mol_type = other DNA
cagccggcattgcacttcaccagtccatgctgaattctcaagccatcgacaatctgagagcaagcctggaaactactaat

SEQ ID NO: 41073 - DNA, 80 bp, synthetic construct
  source 1..80: mol_type = other DNA
caggcaattgaggcaatcagacaagcagggcaggagatgatattggctgttcagggtgtccaagactacatcaacaatga

SEQ ID NO: 41074 - DNA, 80 bp, synthetic construct
  source 1..80: mol_type = other DNA
gctgataccgtctatgaaccaattatcttgtgatttaatcggccagaagctagggctcaaattgctcagatactatacag

SEQ ID NO: 41075 - DNA, 80 bp, synthetic construct
  source 1..80: mol_type = other DNA
aaatcctatcattatttggccccagcttacgggaccccatatctgcggagatatccattcaggctttgagctatgcgctt

SEQ ID NO: 41076 - DNA, 80 bp, synthetic construct
  source 1..80: mol_type = other DNA
ggaggagatatcaataaggtgttagaaaagctcggatacagtggaggtgatttattgggcatcttagagagcagaggaat

SEQ ID NO: 41077 - DNA, 80 bp, synthetic construct
  source 1..80: mol_type = other DNA
aaaggcccggataacgcacgtcgacacagagtcctacttcattgtactcagtatagcctatccgacgctgtccgagatta

SEQ ID NO: 41078 - DNA, 80 bp, synthetic construct
  source 1..80: mol_type = other DNA
agggggtgattgtccatcggttagagggggtctcgtacaatataggctctcaagagtggtataccactgtgcccaagtat

SEQ ID NO: 41079 - DNA, 80 bp, synthetic construct
  source 1..80: mol_type = other DNA
ttacggccccagacacggcagctgattcagagctaagaaggtggataaagtacacccaacaaagaagggtagttggtgaa

SEQ ID NO: 41080 - DNA, 80 bp, synthetic construct
  source 1..80: mol_type = other DNA
gttgcaacccaagggtaccttatctcgaattttgatgagtcatcgtgtaccttcatgccggaggggactgtgtgcagcca

SEQ ID NO: 41081 - DNA, 80 bp, synthetic construct
  source 1..80: mol_type = other DNA
aaatgctttgtacccgatgagtcctctgctccaagaatgcctccgggggtccaccaagtcctgtgctcgtacactcgtat

SEQ ID NO: 41082 - DNA, 80 bp, synthetic construct
  source 1..80: mol_type = other DNA
ccggatcttttgggaaccggttcattttatcacaagggaacctaatagccaattgtgcatcaatcctctgcaagtgttac

SEQ ID NO: 41083 - DNA, 80 bp, synthetic construct
  source 1..80: mol_type = other DNA
acaacaggaacgatcattaatcaagaccctgacaagatcctaacatacattgctgccgaccactgcccggtggtcgaggt

SEQ ID NO: 41084 - DNA, 80 bp, synthetic construct
  source 1..80: mol_type = other DNA
gaacggtgtgaccatccaagtcgggagcaggaggtatccggacgcggtgtacttgcacagaattgacctcggtcctccta

SEQ ID NO: 41085 - DNA, 80 bp, synthetic construct
  source 1..80: mol_type = other DNA
tatcattggagaggttggacgtagggacaaatctggggaatgcaattgctaaattggaggatgccaaggaattgttggag

SEQ ID NO: 41086 - DNA, 80 bp, synthetic construct
  source 1..80: mol_type = other DNA
tcatcggaccagatattgaggagtatgaaaggtttatcgagtactagcatagtttacatcctgattgcagtgtgtcttgg

SEQ ID NO: 41087 - DNA, 80 bp, synthetic construct
  source 1..80: mol_type = other DNA
agggttgatagggatccccgctttaatatgttgctgcagggggcgttgtaacaaaaagggagaacaagttggtatgtcaa

SEQ ID NO: 41088 - DNA, 80 bp, synthetic construct
  source 1..80: mol_type = other DNA
gaccaggcctaaagcctgatcttacagggacatcaaaatcctatgtaaggtcgctctgatcctctacaactcttgaaaca

SEQ ID NO: 41089 - DNA, 80 bp, synthetic construct
  source 1..80: mol_type = other DNA
tagatgtcccacaagtcccctcttcttcttcaagcaaccaccgcatccagcatcaagcccacctgaaattgtctccggct

SEQ ID NO: 41090 - DNA, 80 bp, synthetic construct
  source 1..80: mol_type = other DNA
tttagattggagcggaaatggttggatgtggtgaggaacaggattgccgaggatctctctttacgccgatttatggtggc

SEQ ID NO: 41091 - DNA, 80 bp, synthetic construct
  source 1..80: mol_type = other DNA
tccctctggccgaacaatatcggtagttaattaaaacttagggtgcaagatcatccacaatgtcaccacaacgagaccga

SEQ ID NO: 41092 - DNA, 80 bp, synthetic construct
  source 1..80: mol_type = other DNA
ataaatgccttctacaaagacaacccccatcctaagggaagtaggatagttattaacagagaacatcttatgattgatag

SEQ ID NO: 41093 - DNA, 80 bp, synthetic construct
  source 1..80: mol_type = other DNA
accttatgttttgctggctgttctattcgtcatgtttctgagcttgatcgggttgctagccattgcaggcattagacttc

SEQ ID NO: 41094 - DNA, 80 bp, synthetic construct
  source 1..80: mol_type = other DNA
atcgggcagccgtctacaccgcagagatccataaaagcctcagcaccaatctagatgtaactaactcaatcgagcatcag

SEQ ID NO: 41095 - DNA, 80 bp, synthetic construct
  source 1..80: mol_type = other DNA
gtcaaggacgtgctgacaccactcttcaagatcatcggtgatgaagtgggcctgaggacacctcagagattcactgacct

SEQ ID NO: 41096 - DNA, 80 bp, synthetic construct
  source 1..80: mol_type = other DNA
agttaaattcatctctgacaagattaaattccttaatccggatagggagtacgacttcagggacctcacttggtgtatca

SEQ ID NO: 41097 - DNA, 80 bp, synthetic construct
  source 1..80: mol_type = other DNA
acccgccagagagaatcaaattggattatgatcgatactgtgcagatgtggctgctgaagaactcatgaatgcattggtg

SEQ ID NO: 41098 - DNA, 80 bp, synthetic construct
  source 1..80: mol_type = other DNA
aactcaactctactggaggccagtgcaaccaatcagttcctagctgtctcaaaggggaactgctccgggcccactacaat

SEQ ID NO: 41099 - DNA, 80 bp, synthetic construct
  source 1..80: mol_type = other DNA
cagaggtcaattctcaaacatgtcgctgtccctgttggacttgtatttaagtcgaggttacaatgtgtcatctataacca

SEQ ID NO: 41100 - DNA, 80 bp, synthetic construct
  source 1..80: mol_type = other DNA
ctatgacatcccagggaatgtacgggggaacttacctagttgaaaaacctaatctgagcagtaaagggtcagagttgtca

SEQ ID NO: 41101 - DNA, 80 bp, synthetic construct
  source 1..80: mol_type = other DNA
attagggatatccgagatggccacacttttaaggagcttagcattgttcaaaagaaacaaggacaaaccacccattacat

SEQ ID NO: 41102 - DNA, 80 bp, synthetic construct
  source 1..80: mol_type = other DNA
tctaatcctggatatcaagaggacacccgggaacaaacccaggattgctgaaatgatatgtgatattgacacatatatcg

SEQ ID NO: 41103 - DNA, 80 bp, synthetic construct
  source 1..80: mol_type = other DNA
caactgagcatgcaccgagtgtttgaagtaggtgttatcagaaatccgggtttgggggctccggtgttccatatgacaaa

SEQ ID NO: 41104 - DNA, 80 bp, synthetic construct
  source 1..80: mol_type = other DNA
ctattttgagcaaccagtcagtcatgatttcagcaactgcatggtggctttgggggagctcaaattcgcagccctctgtc

SEQ ID NO: 41105 - DNA, 80 bp, synthetic construct
  source 1..80: mol_type = other DNA
acagggaagattccatcacaatcccctatcaggggtcagggaaaggtgtcagcttccagctcgtcaagctaggtgtctgg

SEQ ID NO: 41106 - DNA, 80 bp, synthetic construct
  source 1..80: mol_type = other DNA
aaatccccaaccgacatgcaatcctgggtccccctatcaacggatgatccagttatagataggctttacctctcatccca

SEQ ID NO: 41107 - DNA, 80 bp, synthetic construct
  source 1..80: mol_type = other DNA
caggggtgttatcgctgacaatcaagcaaaatgggctgtcccgacaacacggacagatgacaagttgcgaatggagacat

SEQ ID NO: 41108 - DNA, 80 bp, synthetic construct
  source 1..80: mol_type = other DNA
gcttccagcaggcgtgtaagggtaagatccaagcactctgcgagaatcccgagtgggaaccattgaaggataacaggatt

SEQ ID NO: 41109 - DNA, 80 bp, synthetic construct
  source 1..80: mol_type = other DNA
ccttcatacggggtcttgtctgttaatctgagtctgacagttgagcttacaatcaagattgcttcaggattcgggccatt

SEQ ID NO: 41110 - DNA, 80 bp, synthetic construct
  source 1..80: mol_type = other DNA
gatcacacacggttcagggatggacctatacaaatccaaccacaacaatatgtattggctgactatcccgccaatgaaga

SEQ ID NO: 41111 - DNA, 80 bp, synthetic construct
  source 1..80: mol_type = other DNA
acctagccttaggtgtaatcaacacattggagtggataccgagattcaaggttagtcccaacctcttcactgttccaatc

SEQ ID NO: 41112 - DNA, 80 bp, synthetic construct
  source 1..80: mol_type = other DNA
aaggaagcaggcgaggactgccatgccccaacatacctacctgcgggagtggatggtgatgtcaaactcagttctaatct

SEQ ID NO: 41113 - DNA, 80 bp, synthetic construct
  source 1..80: mol_type = other DNA
tagaggcaggattagccagttttatcctgactattaagtttggaatagaaaccatgtatcctgctcttggactgcatgaa

SEQ ID NO: 41114 - DNA, 80 bp, synthetic construct
  source 1..80: mol_type = other DNA
ggtaattctacctggccaagatctccaatatgttttggcaacctacgatacttccagggttgaacatgctgtggtttatt

SEQ ID NO: 41115 - DNA, 80 bp, synthetic construct
  source 1..80: mol_type = other DNA
atgtttacagcccaagccgctcattttcttacttttacccttttaggttgcctataaagggggtccccatcgaattacaa

SEQ ID NO: 41116 - DNA, 80 bp, synthetic construct
  source 1..80: mol_type = other DNA
gtggaatgcttcacatgggacaaaaaactttggtgccgtcacttctgtgtgcttgcggactcagaatctggtggacatat

SEQ ID NO: 41117 - DNA, 80 bp, synthetic construct
  source 1..80: mol_type = other DNA
cactcactctgggatggtgggcatgggagtcagctgcacagccactcgggaagatggaaccaatcgcagatagggctgcc

SEQ ID NO: 41118 - DNA, 80 bp, synthetic construct
  source 1..80: mol_type = other DNA
agtgaaccgatcacatgatgtcacccagacatcaggcatacccactagtgtgaaatagacatcaggattaagaaaaacgt

SEQ ID NO: 41119 - DNA, 80 bp, synthetic construct
  source 1..80: mol_type = other DNA
agggtccaagtggttccccattatggactcgctatctgtcaaccagatcctataccctgaagttcacctagacagcccga

SEQ ID NO: 41120 - DNA, 80 bp, synthetic construct
  source 1..80: mol_type = other DNA
ttgttaccaataagatagtagctatcctggagtatgctcgagtccctcacgcttacaacctggaggaccctacactatgt

SEQ ID NO: 41121 - DNA, 80 bp, synthetic construct
  source 1..80: mol_type = other DNA
cagaacatcaagcatcgcctaaaaaccggattctccaaccaaatgattataaataatgtggaagttgggaatgtcatcaa

SEQ ID NO: 41122 - DNA, 80 bp, synthetic construct
  source 1..80: mol_type = other DNA
gtctaagcttaggagttatccggcccactctcatattccatatccaaattgtaatcaggatttatttaacatagaagaca

SEQ ID NO: 41123 - DNA, 80 bp, synthetic construct
  source 1..80: mol_type = other DNA
aagaggcaacaaggaagatccgtgagctcctaaaaaagggaaattcgatgtactccaaaatcagtgataaagttctccaa

SEQ ID NO: 41124 - DNA, 80 bp, synthetic construct
  source 1..80: mol_type = other DNA
tgtactccaaaatcagtgataaagttctccaatgcctgagggacactaactcacggcttggcctaggctccgagttgagg

SEQ ID NO: 41125 - DNA, 80 bp, synthetic construct
  source 1..80: mol_type = other DNA
tttgctggtgagctatccacacttgagtccttgatgaatctttaccagcaaatgggagaaactgcaccctacatggtaat

SEQ ID NO: 41126 - DNA, 80 bp, synthetic construct
  source 1..80: mol_type = other DNA
tgcctgagggacactaactcacggcttggcctaggctccgagttgaggtgggacatcaaggagaaaattattaacttggg

SEQ ID NO: 41127 - DNA, 80 bp, synthetic construct
  source 1..80: mol_type = other DNA
agtttacatgcacagctcccaatggtttgagccctttctattttggtttacagtcaagactgagatgaggtcagtgatta

SEQ ID NO: 41128 - DNA, 80 bp, synthetic construct
  source 1..80: mol_type = other DNA
aatcacaaacccatacttgccataggaggagacacacacctgtattcttcactggtagttcagttgagctgttaatctct

SEQ ID NO: 41129 - DNA, 80 bp, synthetic construct
  source 1..80: mol_type = other DNA
cgtgaccttgttgctatgatcagtaaagagtctcaacatgtatattacctgacgtttgaactggttttgatgtattgtga

SEQ ID NO: 41130 - DNA, 80 bp, synthetic construct
  source 1..80: mol_type = other DNA
tgtcatagaggggaggttaatgacagagaccgctatgaccattgatgctaggtatgcagaacttctaggaagagtcagat

SEQ ID NO: 41131 - DNA, 80 bp, synthetic construct
  source 1..80: mol_type = other DNA
gggttccctcaagtaattcggcaggaccaagacactgatcatccggagaatatggaagcttacgagacagtcagtgcatt

SEQ ID NO: 41132 - DNA, 80 bp, synthetic construct
  source 1..80: mol_type = other DNA
ccccccgaccttgacgcccatatcccgttatataaagtccccaatgatcaaatcttcattaagtaccctatgggaggtat

SEQ ID NO: 41133 - DNA, 80 bp, synthetic construct
  source 1..80: mol_type = other DNA
agctcatgaaatcctggatcatagtgtcacaggggcaagagagtctattgcaggcatgctggataccacaaaaggcttga

SEQ ID NO: 41134 - DNA, 80 bp, synthetic construct
  source 1..80: mol_type = other DNA
gggagagctacagagaaaccgggcccagcagagcaagtgatgcgagagctgcccatcttccaaccggcacacccctagac

SEQ ID NO: 41135 - DNA, 80 bp, synthetic construct
  source 1..80: mol_type = other DNA
agtgaaccttgtataccctagatacagcaacttcatctctactgaatcttatttggttatgacagatctcaaggctaacc

SEQ ID NO: 41136 - DNA, 80 bp, synthetic construct
  source 1..80: mol_type = other DNA
attgacactgcaacggagtccagccaagatccgcaggacagtcgaaggtcagctgacgccctgcttaggctgcaagccat

SEQ ID NO: 41137 - DNA, 80 bp, synthetic construct
  source 1..80: mol_type = other DNA
ctatccattaagcaactaagctgcatacaagcaattgtgggagacgcagttagtagaggtgatatcaatcctactctgaa

SEQ ID NO: 41138 - DNA, 80 bp, synthetic construct
  source 1..80: mol_type = other DNA
cacccgcaaattctgggggcacattcttctttactccgggaacaaaaagttgataaataagtttatccagaatctcaagt

SEQ ID NO: 41139 - DNA, 80 bp, synthetic construct
  source 1..80: mol_type = other DNA
ccggctatctgatactagacttacaccagaatatcttcgttaagaatctatccaagtcagagaaacagattattatgacg

SEQ ID NO: 41140 - DNA, 80 bp, synthetic construct
  source 1..80: mol_type = other DNA
ctcgaaagtcaccctcggaaccatcagggccaggtgcacctgcggggaatgtccccgagtgtgtgagcaatgccgcactg

SEQ ID NO: 41141 - DNA, 80 bp, synthetic construct
  source 1..80: mol_type = other DNA
aagcgcgaacaccaggcggccccagcacagaacagccctgacacaaggccaccaccagccaccccaatctgcatcctcct

SEQ ID NO: 41142 - DNA, 80 bp, synthetic construct
  source 1..80: mol_type = other DNA
cgtgggacccccgaggaccaacccccaaggctgcccccgatccaaaccaccaaccgcatccgcaccacccccgggaaaga

SEQ ID NO: 41143 - DNA, 80 bp, synthetic construct
  source 1..80: mol_type = other DNA
aacccccagcaattggaaggcccctccccctcttcctcaacacaagaactccacaaccgaaccgcacaagcgaccgaggt

SEQ ID NO: 41144 - DNA, 80 bp, synthetic construct
  source 1..80: mol_type = other DNA
accaatacttttcacatgatgatccaattagtagtgatcaatccaggttcggatggttcgggaacaaggaaatctcagat

SEQ ID NO: 41145 - DNA, 80 bp, synthetic construct
  source 1..80: mol_type = other DNA
cccgccggctcccccggtgcccacaggcagggacaccaacccccgaacagacccagcacccaaccatcgacaatccaaga

SEQ ID NO: 41146 - DNA, 80 bp, synthetic construct
  source 1..80: mol_type = other DNA
cgtggtggcccccccaaaaaaaggcccccaggggccgacagccagcaccgcgaggaagcccacccaccccacacacgacc

SEQ ID NO: 41147 - DNA, 80 bp, synthetic construct
  source 1..80: mol_type = other DNA
gcgaggaagcccacccaccccacacacgaccacggcaaccaaaccagaacccagaccaccctgggccaccagctcccaga

SEQ ID NO: 41148 - DNA, 80 bp, synthetic construct
  source 1..80: mol_type = other DNA
acggcaaccaaaccagaacccagaccaccctgggccaccagctcccagactcggccatcaccccgcagaaaggaaaggcc

SEQ ID NO: 41149 - DNA, 80 bp, synthetic construct
  source 1..80: mol_type = other DNA
acaacccgcgcaccccagccccgatccggcggggagccacccaacccgaaccagcacccaagagcgatccccgaaggacc

SEQ ID NO: 41150 - DNA, 80 bp, synthetic construct
  source 1..80: mol_type = other DNA
cccgaaccgcaaaggacatcagtatcccacagcctctccaagtcccccggtctcctcctcttctcgaagggaccaaaaga

SEQ ID NO: 41151 - DNA, 80 bp, synthetic construct
  source 1..80: mol_type = other DNA
tcaatccaccacacccgacgacactcaactccccacccctaaaggagacaccgggaatcccagaatcaagactcatccaa

SEQ ID NO: 41152 - DNA, 80 bp, synthetic construct
  source 1..80: mol_type = other DNA
cacaaatgtcccacaagtctcctcttcgtcatcaagcaaccaccgcacccagcatcaagcccacctgaaattatctccgg

SEQ ID NO: 41153 - DNA, 80 bp, synthetic construct
  source 1..80: mol_type = other DNA
aatttagattggagagaaaatggttggatgtggtgaggaacaggattgccgaggacctctccttacgccgattcatggtc

SEQ ID NO: 41154 - DNA, 80 bp, synthetic construct
  source 1..80: mol_type = other DNA
aactatcttgagcaaccagtcagtaatgatctcagcaactgtatggtggctttgggggagctcaaactcgcagccctttg

SEQ ID NO: 41155 - DNA, 80 bp, synthetic construct
  source 1..80: mol_type = other DNA
caaagagtcaacgaggaagatccgtgaactcctcaaaaaggggaattcgctgtactccaaagtcagtgataaggttttcc

SEQ ID NO: 41156 - DNA, 80 bp, synthetic construct
  source 1..80: mol_type = other DNA
gcagtaatcaacttatattcagggcactaatcagggtttattgcactagggtgggttcgagggccaattatattacagtg

SEQ ID NO: 41157 - DNA, 80 bp, synthetic construct
  source 1..80: mol_type = other DNA
tattaagtttcggtaagtctgttaagtatagttattcttggtagtgttaagtcatatgtatgggggttgtttagtgttaa

SEQ ID NO: 41158 - DNA, 80 bp, synthetic construct
  source 1..80: mol_type = other DNA
accaaacaaagttgggtaaggatagatcaatcaatgatcatattctagtacacttaggattcaagatcctattatcaggg

SEQ ID NO: 41159 - DNA, 80 bp, synthetic construct
  source 1..80: mol_type = other DNA
gagagtcagatacatgtggaaactgatagatggtttcttccctgcactcgggaatccaacttatcaaattgtagctatgc

SEQ ID NO: 41160 - DNA, 80 bp, synthetic construct
  source 1..80: mol_type = other DNA
tggagccactttcacttgcttacctgcaactgagggatataacagtagaactcagaggtgctttccttaaccactgcttt

SEQ ID NO: 41161 - DNA, 80 bp, synthetic construct
  source 1..80: mol_type = other DNA
actgaaatatatgatgttcttgaccaaaacgggttttctgatgaaggtacttatcacgagttaattgaagccttagatta

SEQ ID NO: 41162 - DNA, 80 bp, synthetic construct
  source 1..80: mol_type = other DNA
cattttcataactgatgacatacatctgacaggggagattttctcatttttcagaagtttcggccaccccagacttgaag

SEQ ID NO: 41163 - DNA, 80 bp, synthetic construct
  source 1..80: mol_type = other DNA
cagtaacggctgctgcaaatgtcaggaaatacatgaatcagcctaaagtcattgtgtatgagactctgatgaaaggtcat

SEQ ID NO: 41164 - DNA, 80 bp, synthetic construct
  source 1..80: mol_type = other DNA
tacatggtaatcctagagaactcaattcagaacaagttcagtgcaggatcataccctctgctctggagctatgccatggg

SEQ ID NO: 41165 - DNA, 80 bp, synthetic construct
  source 1..80: mol_type = other DNA
gccatattttgtggaatcataatcaacggctatcgtgacaggcacggaggcagttggccacccctgaccctccccctgca

SEQ ID NO: 41166 - DNA, 80 bp, synthetic construct
  source 1..80: mol_type = other DNA
tgctgcagacacaatccggaatgctcaagcttcaggtgaagggttaacacatgagcagtgcgttgataactggagatcat

SEQ ID NO: 41167 - DNA, 80 bp, synthetic construct
  source 1..80: mol_type = other DNA
ttgctggagtgagatttggctgttttatgcctcttagcctggacagtgatctgacaatgtacctaaaggacaaggcactt

SEQ ID NO: 41168 - DNA, 80 bp, synthetic construct
  source 1..80: mol_type = other DNA
gctgctctccaaagggaatgggattcagtttacccgaaagagttcctgcgttacgatcctcccaagggaaccgggtcacg

SEQ ID NO: 41169 - DNA, 80 bp, synthetic construct
  source 1..80: mol_type = other DNA
gaggcttgtagatgttttccttagtgattcgagctttgacccatatgatatgataatgtatgtcgtaaatggatcctacc

SEQ ID NO: 41170 - DNA, 80 bp, synthetic construct
  source 1..80: mol_type = other DNA
tccatgaccctgagttcaacctgtcttacagcctgaaagaaaaggagatcaaggaaacaggtagacttttcgctaaaatg

SEQ ID NO: 41171 - DNA, 80 bp, synthetic construct
  source 1..80: mol_type = other DNA
acttacaaaatgagggcatgccaagtgatcgctgaaaatctaatctcaaacgggattggcaagtattttaaggacaatgg

SEQ ID NO: 41172 - DNA, 80 bp, synthetic construct
  source 1..80: mol_type = other DNA
gatggccaaggatgagcacgatttgactaaggcactccacactctggctgtctcaggagtccccaaagatctcaaagaaa

SEQ ID NO: 41173 - DNA, 80 bp, synthetic construct
  source 1..80: mol_type = other DNA
gtcacaggggggggccagtcttaaaaacctactcccgaagcccagtccacacaattaccaagaacgttaaagcagaaaaa

SEQ ID NO: 41174 - DNA, 80 bp, synthetic construct
  source 1..80: mol_type = other DNA
ctcccgaagcccagtccacacaattaccaagaacgttaaagcagaaaaagggtttgtaggattccctcatgtaattcggc

SEQ ID NO: 41175 - DNA, 80 bp, synthetic construct
  source 1..80: mol_type = other DNA
gggtttgtaggattccctcatgtaattcggcagaatcaagacactgatcatccggagaatatagaaacctacgagacagt

SEQ ID NO: 41176 - DNA, 80 bp, synthetic construct
  source 1..80: mol_type = other DNA
agtaggagtggaacttgaaaactccatgggaggtttgaactttggtcgatcttactttgatccagcatattttagattag

SEQ ID NO: 41177 - DNA, 80 bp, synthetic construct
  source 1..80: mol_type = other DNA
cagcgcatttatcacgactgatctcaagaagtactgccttaattggagatatgagaccatcagcttatttgcacagaggc

SEQ ID NO: 41178 - DNA, 80 bp, synthetic construct
  source 1..80: mol_type = other DNA
taaatgagatttacggattaccctcatttttccagtggctgcataagaggcttgaaacctctgtcctctatgtaagtgat

SEQ ID NO: 41179 - DNA, 80 bp, synthetic construct
  source 1..80: mol_type = other DNA
cctcattgcccccccgaccttgacgcccatatcccgttatgcaaagtccccaatgaccaaatcttcatcaagtaccctat

SEQ ID NO: 41180 - DNA, 80 bp, synthetic construct
  source 1..80: mol_type = other DNA
gggaggtatagaagggtattgtcagaagctgtggaccatcagcaccattccctacttatacctggctgcttatgagagcg

SEQ ID NO: 41181 - DNA, 80 bp, synthetic construct
  source 1..80: mol_type = other DNA
gagtaaggattgcttcgttagtgcaaggggacaatcagaccatagccgtaacaaaaagggtacccagcacatggccttac

SEQ ID NO: 41182 - DNA, 80 bp, synthetic construct
  source 1..80: mol_type = other DNA
aaccttaagaaacgggaagctgctagagtaactagagattactttgtaattcttaggcaaaggctacatgacattggcca

SEQ ID NO: 41183 - DNA, 80 bp, synthetic construct
  source 1..80: mol_type = other DNA
tcacctcaaggcaaatgagacaattgtttcatcacatttttttgtctattcaaaaggaatatattatgatgggctacttg

SEQ ID NO: 41184 - DNA, 80 bp, synthetic construct
  source 1..80: mol_type = other DNA
tgtcccaatcactcaagagcattgcaagatgtgtattctggtcagagactatagttgatgaaacaagggcagcatgcagt

SEQ ID NO: 41185 - DNA, 80 bp, synthetic construct
  source 1..80: mol_type = other DNA
aatatcgctacaacaatggctaaaagtatcgagagaggttatgaccgttatcttgcatattccctgaacgtcctaaaagt

SEQ ID NO: 41186 - DNA, 80 bp, synthetic construct
  source 1..80: mol_type = other DNA
gatacagcaaattttgatctctcttggcttcacaatcaattcaaccatgacccgagatgtagtcatacccctcctcacaa

SEQ ID NO: 41187 - DNA, 80 bp, synthetic construct
  source 1..80: mol_type = other DNA
tgacccgagatgtagtcatacccctcctcacaaacaacgatctcttaataaggatggcactgttgcccgctcctattggg

SEQ ID NO: 41188 - DNA, 80 bp, synthetic construct
  source 1..80: mol_type = other DNA
ggcaagagatggtgaggaggtcagctggaaaggtcagttccacattggcatccgaactcggtatcactgccgaggatgca

SEQ ID NO: 41189 - DNA, 80 bp, synthetic construct
  source 1..80: mol_type = other DNA
acaacgatctcttaataaggatggcactgttgcccgctcctattggggggatgaattatctgaatatgagcaggttgttt

SEQ ID NO: 41190 - DNA, 80 bp, synthetic construct
  source 1..80: mol_type = other DNA
gtcagaaacatcggtgatccagtaacatcatcaattgctgatctcaagagaatgattctcgcatcactaatgcctgaaga

SEQ ID NO: 41191 - DNA, 80 bp, synthetic construct
  source 1..80: mol_type = other DNA
gaccctccatcaagtaatgacacaacaaccgggggactcttcattcctggactgggctagcgacccttactcagcaaatc

SEQ ID NO: 41192 - DNA, 80 bp, synthetic construct
  source 1..80: mol_type = other DNA
ttgtatgcgtccagagcatcactagactcctcaagaacataactgcaaggtttgtcctaatccatagtccaaacccaatg

SEQ ID NO: 41193 - DNA, 80 bp, synthetic construct
  source 1..80: mol_type = other DNA
ttaaaagggttattccatgatgacagtaaagaagaggacgagagactggcggcattcctcatggacaggcatattatagt

SEQ ID NO: 41194 - DNA, 80 bp, synthetic construct
  source 1..80: mol_type = other DNA
acctagggcagctcatgaaatcctggaccatagtgtcacaggggcaagagagtctattgcaggcatgctagataccacaa

SEQ ID NO: 41195 - DNA, 80 bp, synthetic construct
  source 1..80: mol_type = other DNA
aaggcctgattcgagccagcatgaggaaaggggggttaacctctcgagtgataaccagattgtccaattatgactatgaa

SEQ ID NO: 41196 - DNA, 80 bp, synthetic construct
  source 1..80: mol_type = other DNA
caatttagagcagggatggtgctattgacaggaagaaagagaaatgtcctcattgacaaagagtcatgttcagtgcagct

SEQ ID NO: 41197 - DNA, 80 bp, synthetic construct
  source 1..80: mol_type = other DNA
ggctagagccctaagaagccatatgtgggcaagactagctcgaggacggcctatttacggccttgaggtccctgatgtac

SEQ ID NO: 41198 - DNA, 80 bp, synthetic construct
  source 1..80: mol_type = other DNA
tagaatctatgcgaggccaccttattcggcgtcatgagacatgtgtcatctgcgagtgtggatcagtcaactacggatgg

SEQ ID NO: 41199 - DNA, 80 bp, synthetic construct
  source 1..80: mol_type = other DNA
aggcttgtttcagagattgcaatgcatactactgaggacaggatcagtagagcggtcggacccagacaagcccaagtgtc

SEQ ID NO: 41200 - DNA, 80 bp, synthetic construct
  source 1..80: mol_type = other DNA
ttttttgtcccctcgggttgccaactggatgatattgacaaggaaacatcatccttgagagtcccatatattggttctac

SEQ ID NO: 41201 - DNA, 80 bp, synthetic construct
  source 1..80: mol_type = other DNA
cactgatgagagaacagacatgaagctcgccttcgtaagagccccaagtagatccttgcgatctgccgttagaatagcaa

SEQ ID NO: 41202 - DNA, 80 bp, synthetic construct
  source 1..80: mol_type = other DNA
cagtgtactcatgggcttacggtgatgatgatagctcttggaacgaagcctggttgttggcaaggcaaagggccaatgtg

SEQ ID NO: 41203 - DNA, 80 bp, synthetic construct
  source 1..80: mol_type = other DNA
agcctggaggagctaagggtgatcactcccatctcgacttcgactaatttagcgcataggttgagggatcgtagcactca

SEQ ID NO: 41204 - DNA, 80 bp, synthetic construct
  source 1..80: mol_type = other DNA
agtgaaatactcaggtacatcccttgtcagagtggcaaggtataccacaatctccaacgacaatctctcatttgtcatat

SEQ ID NO: 41205 - DNA, 80 bp, synthetic construct
  source 1..80: mol_type = other DNA
cagataagaaagttgatactaactttatataccaacaaggaatgcttctagggttgggtgttttagaaacactgtttcga

SEQ ID NO: 41206 - DNA, 80 bp, synthetic construct
  source 1..80: mol_type = other DNA
ctcgagaaagatactggatcatctaacacggtattacatcttcacgtcgaaacagattgttgcgtgatcccgatgataga

SEQ ID NO: 41207 - DNA, 80 bp, synthetic construct
  source 1..80: mol_type = other DNA
tcatcccaggatacccagctcccgcaagctagagctgagggcagagctatgcaccaacccattgatatatgataatgcac

SEQ ID NO: 41208 - DNA, 80 bp, synthetic construct
  source 1..80: mol_type = other DNA
ctttaattgacagagatgcaacaaggctatacacccagagccataggaggcaccttgtggaatttgttacatggtccaca

SEQ ID NO: 41209 - DNA, 80 bp, synthetic construct
  source 1..80: mol_type = other DNA
ccccaactatatcacattctagctaagtccacagcactatctatgattgacctggtaacaaaatttgagaaagaccatat

SEQ ID NO: 41210 - DNA, 80 bp, synthetic construct
  source 1..80: mol_type = other DNA
atttctacacggtgatcaaagtgagaatgagctaccaggattggggggcaaggaagacaggagggtcaaacagagtcgtg

SEQ ID NO: 41211 - DNA, 80 bp, synthetic construct
  source 1..80: mol_type = other DNA
gaatgaaatttcagctctcataggggatgacgatatcaatagtttcataactgagtttctgcttatagagccaagattat

SEQ ID NO: 41212 - DNA, 80 bp, synthetic construct
  source 1..80: mol_type = other DNA
tcaccatctacttgggccagtgtgcagccatcaattgggcatttgatgtacattatcatagaccatcagggaaatatcag

SEQ ID NO: 41213 - DNA, 80 bp, synthetic construct
  source 1..80: mol_type = other DNA
atgggtgagctgttgtcttcgttcctctctagaatgagcaaaggagtgtttaaggtgcttgtcaatgctctaagtcaccc

SEQ ID NO: 41214 - DNA, 80 bp, synthetic construct
  source 1..80: mol_type = other DNA
aaagatctacaagaaattctggcattgtggtattatagagcctatccatggtccttcacttgacgctcaaaacttgcata

SEQ ID NO: 41215 - DNA, 80 bp, synthetic construct
  source 1..80: mol_type = other DNA
caactgtgtgcaacatggtttacacatgctatatgacctaccttgacctgttgttgaatgaagagttagaagagttcaca

SEQ ID NO: 41216 - DNA, 80 bp, synthetic construct
  source 1..80: mol_type = other DNA
tttcttttgtgcgaaagcgatgaggatgtagtaccggacagattcgacaacatccaggcaaaacacttgtgtgttctggc

SEQ ID NO: 41217 - DNA, 80 bp, synthetic construct
  source 1..80: mol_type = other DNA
agatttgtactgtcaaccagggacctgcccaccgattcgaggtctaaggccggtagagaaatgtgcagttctaaccgatc

SEQ ID NO: 41218 - DNA, 80 bp, synthetic construct
  source 1..80: mol_type = other DNA
atatcaaggcagaggctaggttatctccagcaggatcttcgtggaacataaatccaattattgtagaccattactcatgc

SEQ ID NO: 41219 - DNA, 80 bp, synthetic construct
  source 1..80: mol_type = other DNA
tctctgacttatctccgtcgaggatctatcaaacagataagattgagagttgatccaggattcatttttgacgccctcgc

SEQ ID NO: 41220 - DNA, 80 bp, synthetic construct
  source 1..80: mol_type = other DNA
tgaggtaaatgtcagtcagccaaaggtcggcagtaacaacatctcaaatatgagcatcaaggatttcagacctccacacg

SEQ ID NO: 41221 - DNA, 80 bp, synthetic construct
  source 1..80: mol_type = other DNA
gagaagccagggagagctatagagaaaccgagtccagcagagcaagtgatgcgagagctgcccatcctccaaccagtatg

SEQ ID NO: 41222 - DNA, 80 bp, synthetic construct
  source 1..80: mol_type = other DNA
atgatgttgcaaaattgctcaaagatatcaacacaagcaagcacaatcttcccatttcagggggtagtctcgccaattat

SEQ ID NO: 41223 - DNA, 80 bp, synthetic construct
  source 1..80: mol_type = other DNA
gaaatccatgctttccgcagaatcggattaaactcatctgcttgctacaaagctgttgagatatcaacattaattaggag

SEQ ID NO: 41224 - DNA, 80 bp, synthetic construct
  source 1..80: mol_type = other DNA
atgccttgagccaggggaagacggcttgttcttgggtgaggggtcgggttctatgttgatcacttataaggagatactaa

SEQ ID NO: 41225 - DNA, 80 bp, synthetic construct
  source 1..80: mol_type = other DNA
aactaaacaagtgcttctataatagtggggtttccgccaattctagatctggtcaaagggaattagcaccctatccctcc

SEQ ID NO: 41226 - DNA, 80 bp, synthetic construct
  source 1..80: mol_type = other DNA
gaagttggccttgtcgaacacagaatgggagtaggtaatattgtcaaggtgctctttaacgggaggcccgaagtcacgtg

SEQ ID NO: 41227 - DNA, 80 bp, synthetic construct
  source 1..80: mol_type = other DNA
ggtaggcagtatagattgcttcaatttcatagtcagtaatatccctacctctagtgtgggatttatccattcagatatag

SEQ ID NO: 41228 - DNA, 80 bp, synthetic construct
  source 1..80: mol_type = other DNA
agaccttacctaacaaagatactgtagagaagctagaggaattggcagccatcttatcaatggctctactccttggcaaa

SEQ ID NO: 41229 - DNA, 80 bp, synthetic construct
  source 1..80: mol_type = other DNA
ataggatcaatactagtgattaagcttatgcctttcagcggggattttgttcagggatttataagctatgtagggtctca

SEQ ID NO: 41230 - DNA, 80 bp, synthetic construct
  source 1..80: mol_type = other DNA
ttatagagaagtgaaccttgtctaccctaggtacagcaacttcatatctactgaatcttatttagttatgacagatctca

SEQ ID NO: 41231 - DNA, 80 bp, synthetic construct
  source 1..80: mol_type = other DNA
aagctaaccggctaatgaatcctgaaaagattaagcagcagataattgaatcatctgtgcggacttcacctggacttata

SEQ ID NO: 41232 - DNA, 80 bp, synthetic construct
  source 1..80: mol_type = other DNA
cccctagacattgacactgcatcggagtcaggccaagatctgcaggacagtcgaaggtcagctgacgctctgctcaggct

SEQ ID NO: 41233 - DNA, 80 bp, synthetic construct
  source 1..80: mol_type = other DNA
ggtcacatcctatccgtcaagcaactaagctgcatacaagcaattgtgggaggcgcagttagtagaggtgatatcaaccc

SEQ ID NO: 41234 - DNA, 80 bp, synthetic construct
  source 1..80: mol_type = other DNA
tattctgaaaaaacttacacctatagagcaggtgctgatcagttgcgggttggcaattaacggacctaaactgtgcaaag

SEQ ID NO: 41235 - DNA, 80 bp, synthetic construct
  source 1..80: mol_type = other DNA
aattaatccaccatgatgttgcctcagggcaagatggattgcttaactctatactcatcctctacagggagttggcaaga

SEQ ID NO: 41236 - DNA, 80 bp, synthetic construct
  source 1..80: mol_type = other DNA
ttcaaagacaaccaaagaagtcaacaagggatgttccacgcttaccccgtattggtaagtagtaggcaacgagaacttgt

SEQ ID NO: 41237 - DNA, 80 bp, synthetic construct
  source 1..80: mol_type = other DNA
atctaggatcactcgcaaattttgggggcatattcttctttactccgggaacagaaagttgataaatcggtttatccaga

SEQ ID NO: 41238 - DNA, 80 bp, synthetic construct
  source 1..80: mol_type = other DNA
atctcaagtccggttatctaatactagacttacaccagaatatcttcgttaagaatctatccaagtcagagaaacagatt

SEQ ID NO: 41239 - DNA, 80 bp, synthetic construct
  source 1..80: mol_type = other DNA
attatgacggggggtttaaaacgtgagtgggtttttaaggtaacagtcaaggagaccaaagaatggtataagttagtcgg

SEQ ID NO: 41240 - DNA, 80 bp, synthetic construct
  source 1..80: mol_type = other DNA
gtcaaggagaccaaagaatggtataagttagtcggatacagcgctctgattaaggattaattggttgaactccggaaccc

SEQ ID NO: 41241 - DNA, 80 bp, synthetic construct
  source 1..80: mol_type = other DNA
atacagcgctctgattaaggattaattggttgaactccggaaccctaatcctgccctaggtagttaggcattatttgcaa

SEQ ID NO: 41242 - DNA, 80 bp, synthetic construct
  source 1..80: mol_type = other DNA
cctaggtagttaggcattatttgcaatatattaaagaaaactttgaaaatacgaagtttctattcccagctttgtctggt

SEQ ID NO: 41243 - DNA, 80 bp, synthetic construct
  source 1..80: mol_type = other DNA
acccattacatcaggatccggtggagccatcagaggaatcaaacacattatcatagtaccaattcctggagattcctcaa

SEQ ID NO: 41244 - DNA, 80 bp, synthetic construct
  source 1..80: mol_type = other DNA
gcaagccatggcaggaatcctggaagaacaaggctcagacacggacacccctagggtatacaatgacagagatcttctag

SEQ ID NO: 41245 - DNA, 80 bp, synthetic construct
  source 1..80: mol_type = other DNA
attaggtgcgagaggccgaagaccagaacaacatccgcctaccctccatcattgttataaaaaacttaggaaccaggtcc

SEQ ID NO: 41246 - DNA, 80 bp, synthetic construct
  source 1..80: mol_type = other DNA
acacagccgccagccaaccaaccatccactcccacgactggagccgatggcagaagagcaggcacgccatgtcaaaaacg

SEQ ID NO: 41247 - DNA, 80 bp, synthetic construct
  source 1..80: mol_type = other DNA
gactggaatgcatccgggctctcaaggccgagcccatcggctcactggccgtcgaggaagccatggcagcatggtcagaa

SEQ ID NO: 41248 - DNA, 80 bp, synthetic construct
  source 1..80: mol_type = other DNA
atatcagacaatccaggacaggaccgagccacctgcaaggaagaggaggcaggcagttcgggtctcagcaaatcatgctt

SEQ ID NO: 41249 - DNA, 80 bp, synthetic construct
  source 1..80: mol_type = other DNA
ctcagcaattggatcaactgaaggcggtgcacctcgcatctgcggtcagggatctggagaaagcgatgacgacgctgaaa

SEQ ID NO: 41250 - DNA, 80 bp, synthetic construct
  source 1..80: mol_type = other DNA
ctttgggaatcccctcaagaaatctccaggcatcaagcactgggttacagtgttatcatgtttatgatcacagcggtgaa

SEQ ID NO: 41251 - DNA, 80 bp, synthetic construct
  source 1..80: mol_type = other DNA
gcggttaagggaatccaagatgctgactctatcatggttcaatcaggccttgatggtgatagcaccctctcaggaggaga

SEQ ID NO: 41252 - DNA, 80 bp, synthetic construct
  source 1..80: mol_type = other DNA
cgatgaatctgaaaacagcgatgtggatattggcgaacctgataccgagggatatgctatcattgaccggggatctgctc

SEQ ID NO: 41253 - DNA, 80 bp, synthetic construct
  source 1..80: mol_type = other DNA
ccatctctatggggttcagggcttctgatgttgaaactgcagaaggaggggagatccacgagctcctgaaactccaatcc

SEQ ID NO: 41254 - DNA, 80 bp, synthetic construct
  source 1..80: mol_type = other DNA
ttaccactcgatccagactactggaccggttggtcaggttaattggaaacccggatgtgagcgggcccaaactaacaggg

SEQ ID NO: 41255 - DNA, 80 bp, synthetic construct
  source 1..80: mol_type = other DNA
agaggcaacaactttccgaagcttgggaaaactctcaatgttcctccgcccccgaaccctagtagggccagcacttccga

SEQ ID NO: 41256 - DNA, 80 bp, synthetic construct
  source 1..80: mol_type = other DNA
gacacccattaaaaggggcacagacgcgagattggcctcatttggaacggagatcgcgtctttattgacaggtggtgcaa

SEQ ID NO: 41257 - DNA, 80 bp, synthetic construct
  source 1..80: mol_type = other DNA
cccaatgtgctcgaaagtcaccctcggaaccatcagggccagatgcacctgcggggaatgtccccgagtgtgtgagcaat

SEQ ID NO: 41258 - DNA, 80 bp, synthetic construct
  source 1..80: mol_type = other DNA
gccgcactgatacaggagtggacacccgaatctggtaccacaatctccccgagatcccagaataatgaagaaggtggaga

SEQ ID NO: 41259 - DNA, 80 bp, synthetic construct
  source 1..80: mol_type = other DNA
ctattatgatgatgagctgttctccgatgtccaagacatcaaaacagccttggccaaaatacacgaggataatcagaaga

SEQ ID NO: 41260 - DNA, 80 bp, synthetic construct
  source 1..80: mol_type = other DNA
taatctccaagctagaatcattgctgttattgaagggagaagttgagtcaattaagaagcagatcaacaggcaaaatatc

SEQ ID NO: 41261 - DNA, 80 bp, synthetic construct
  source 1..80: mol_type = other DNA
agcatatccaccctggaaggacacctctcaagcatcatgattgccattcctggacttgggaaggatcccaacgaccccac

SEQ ID NO: 41262 - DNA, 80 bp, synthetic construct
  source 1..80: mol_type = other DNA
tgcagatgtcgaactcaatcccgacctgaaacccatcataggcagagactcaggccgagcactggccgaagttctcaaga

SEQ ID NO: 41263 - DNA, 80 bp, synthetic construct
  source 1..80: mol_type = other DNA
agcccgttgccagccgacaactccagggaatgactaatggacggaccagttccagaggacagctgctgaaggaatttcaa

SEQ ID NO: 41264 - DNA, 80 bp, synthetic construct
  source 1..80: mol_type = other DNA
ctaaagccgatcgggaaaaaggtgagctcagccgtcgggtttgttcctgacaccggccctgcatcacgcagtgtaatccg

SEQ ID NO: 41265 - DNA, 80 bp, synthetic construct
  source 1..80: mol_type = other DNA
gccctaataggtatattatccttatttgtggagtctccaggtcaattgattcagaggatcaccgatgaccctgacgttag

SEQ ID NO: 41266 - DNA, 80 bp, synthetic construct
  source 1..80: mol_type = other DNA
ctccattataaaatccagccggctagaggaggatcgaaagcgttacctgttgactctccttgatgatatcaaaggagcca

SEQ ID NO: 41267 - DNA, 80 bp, synthetic construct
  source 1..80: mol_type = other DNA
acgatcttgccaagttccaccagatgctgatgaagataataatgaagtagctacagctcaacttacctgccaaccccatg

SEQ ID NO: 41268 - DNA, 80 bp, synthetic construct
  source 1..80: mol_type = other DNA
ccagtcgacctaattagtacaacctaaatccattataaaaaacttaggagcaaagtgattgcctcccaagctccacaatg

SEQ ID NO: 41269 - DNA, 80 bp, synthetic construct
  source 1..80: mol_type = other DNA
acagagatctacgacttcgacaagtcggcatgggacatcaaagggtcgatcgctccgatacaacctaccacctacagtga

SEQ ID NO: 41270 - DNA, 80 bp, synthetic construct
  source 1..80: mol_type = other DNA
tggcaggctggtgccccaggtcagagtcatagatcctggtctaggtgataggaaggatgaatgctttatgtacatgtttc

SEQ ID NO: 41271 - DNA, 80 bp, synthetic construct
  source 1..80: mol_type = other DNA
tgctgggggttgttgaggacagcgatcccctagggcctccaatcgggcgagcattcgggtccctgcccttaggtgttggt

SEQ ID NO: 41272 - DNA, 80 bp, synthetic construct
  source 1..80: mol_type = other DNA
agatctacagcaaaacccgaggaactcctcaaagaggccactgagcttgacatagttgttagacgtacagcagggctcaa

SEQ ID NO: 41273 - DNA, 80 bp, synthetic construct
  source 1..80: mol_type = other DNA
tgaaaaattggtgttctacaacaacaccccactaaccctcctcacaccttggagaaaggtcctaacaacagggagtgtct

SEQ ID NO: 41274 - DNA, 80 bp, synthetic construct
  source 1..80: mol_type = other DNA
tcaatgcaaaccaagtgtgcaatgcggttaatctaataccgctggacaccccgcagaggttccgtgttgtttatatgagc

SEQ ID NO: 41275 - DNA, 80 bp, synthetic construct
  source 1..80: mol_type = other DNA
atcacccgtctttcggataacgggtattacaccgttcccagaagaatgctggaattcagatcggtcaatgcagtggcctt

SEQ ID NO: 41276 - DNA, 80 bp, synthetic construct
  source 1..80: mol_type = other DNA
catcaggctgttagaggttgttcagagtgaccagtcacaatctgggcttaccttcgcatcaagaggtaccaacatggagg

SEQ ID NO: 41277 - DNA, 80 bp, synthetic construct
  source 1..80: mol_type = other DNA
caacctgctagtgaccctcaggattgacaaggcgattggccccgggaagattatcgacaatgcagagcaacttcctgagg

SEQ ID NO: 41278 - DNA, 80 bp, synthetic construct
  source 1..80: mol_type = other DNA
caacatttatggtccacatcgggaacttcaggagaaagaagagtgaagtctactctgccgattattgcaaaatgaaaatc

SEQ ID NO: 41279 - DNA, 80 bp, synthetic construct
  source 1..80: mol_type = other DNA
gaaaagatgggcctggtttttgcacttggtgggatagggggcaccagtcttcacattagaagcacaggcaaaatgagcaa

SEQ ID NO: 41280 - DNA, 80 bp, synthetic construct
  source 1..80: mol_type = other DNA
gactctccatgcacaactcgggttcaagaagaccttatgttacccactaatggatatcaatgaagaccttaatcggttac

SEQ ID NO: 41281 - DNA, 80 bp, synthetic construct
  source 1..80: mol_type = other DNA
tctggaggagcagatgcaagatagtaagaatccaggcagttttgcagccatcagttccccaagaattccgcatttacgac

SEQ ID NO: 41282 - DNA, 80 bp, synthetic construct
  source 1..80: mol_type = other DNA
gacgtgatcataaatgatgaccaaggactattcaaagttctgtagaccgcagtgcccagcaatacccgaaaacgaccccc

SEQ ID NO: 41283 - DNA, 80 bp, synthetic construct
  source 1..80: mol_type = other DNA
ctcacaatgacagccagaaggcccggacaaaaaagccccctccaaaagactccacggaccaagtgagaggccagccagca

SEQ ID NO: 41284 - DNA, 80 bp, synthetic construct
  source 1..80: mol_type = other DNA
gccgacagcaagcgtggacaccaggcggcccaagcacggaacagccccgacacaaggccactaccagccatcccaatctg

SEQ ID NO: 41285 - DNA, 80 bp, synthetic construct
  source 1..80: mol_type = other DNA
cgtcctcctcgtaggacccctgaggaccaacccccaaggtcgctccggacacagaccaccagccgcatccccacagctcc

SEQ ID NO: 41286 - DNA, 80 bp, synthetic construct
  source 1..80: mol_type = other DNA
cgggaaaggaacccccagcaactggaaggccccttcccccctcccccaacgcaagaaccccgcaaccgaaccgcacaagc

SEQ ID NO: 41287 - DNA, 80 bp, synthetic construct
  source 1..80: mol_type = other DNA
atgaggcggaccaatacttttcacatgatgatccaagcagtagtgatcaatccaggtccggatggttcgagaacaaggaa

SEQ ID NO: 41288 - DNA, 80 bp, synthetic construct
  source 1..80: mol_type = other DNA
gaccgaggtgacccaaccgcaggcatccgactccccagacagatcctccccccccggcatactaaacaaaacttagggcc

SEQ ID NO: 41289 - DNA, 80 bp, synthetic construct
  source 1..80: mol_type = other DNA
aaggaacacacacacttgacagaacccagaccccggcccgcggcaccgcgcccccaccccccgaaaaccagggagagccc

SEQ ID NO: 41290 - DNA, 80 bp, synthetic construct
  source 1..80: mol_type = other DNA
ccaaccaaacccgccggcccccccggtgcccacaggcaggcacaccaacccccgaccagacccagcacccagccaccgac

SEQ ID NO: 41291 - DNA, 80 bp, synthetic construct
  source 1..80: mol_type = other DNA
aatccaagacggagtggccccccccaaaaaaggccccccaggggccgacagccagcatcgcggggaagcacacccaccac

SEQ ID NO: 41292 - DNA, 80 bp, synthetic construct
  source 1..80: mol_type = other DNA
acagccagcatcgcggggaagcacacccaccccacacacgaccacggcaaccgaaccagagtccagaccaccctgggcca

SEQ ID NO: 41293 - DNA, 80 bp, synthetic construct
  source 1..80: mol_type = other DNA
acacacgaccacggcaaccgaaccagagtccagaccaccctgggccaccagctcccaaactcggccaccaccccgcaaaa

SEQ ID NO: 41294 - DNA, 80 bp, synthetic construct
  source 1..80: mol_type = other DNA
aggaaaggccacaacccgcgcaccccagccccgatccggcgggcagccatccaacctgaaccagcacccaagagcgatcc

SEQ ID NO: 41295 - DNA, 80 bp, synthetic construct
  source 1..80: mol_type = other DNA
ctgggggacccccaaaccgcaaaagacatcagtatcccacagcctccccaagtcccccggtctcctcttcgtctcgaagg

SEQ ID NO: 41296 - DNA, 80 bp, synthetic construct
  source 1..80: mol_type = other DNA
gaccaaaagatcaatccaccacatccgacgatactcaattccccacccccaaaggagacaccgggaatcccagaatcaag

SEQ ID NO: 41297 - DNA, 80 bp, synthetic construct
  source 1..80: mol_type = other DNA
actcatccagtgtccatcatggatctcaaggtgaacgtctttgccacattcatggcagtactgttaactctccaaacacc

SEQ ID NO: 41298 - DNA, 80 bp, synthetic construct
  source 1..80: mol_type = other DNA
caccggtcaaatccattggggcaatctctctaagataggggtggtagggataggaagtgcaagctacaaagttatgactc

SEQ ID NO: 41299 - DNA, 80 bp, synthetic construct
  source 1..80: mol_type = other DNA
atctcagatattgaagtgcaagaccctgagggattcaacatgattctgggtaccattctagcccagatctgggtcttgct

SEQ ID NO: 41300 - DNA, 80 bp, synthetic construct
  source 1..80: mol_type = other DNA
gttccagccatcaatcattggtcataaaattaatgcccaatataactctcctcaataactgcacgagggtagagatcgca

SEQ ID NO: 41301 - DNA, 80 bp, synthetic construct
  source 1..80: mol_type = other DNA
gaatacaggagactactgagaacagttttggaaccaattagagatgcacttaatgcaatgacccagaatataagaccggt

SEQ ID NO: 41302 - DNA, 80 bp, synthetic construct
  source 1..80: mol_type = other DNA
tcagagtgtagcttcaagtaggagacacaagagatttgcgggagttgtcctggcaggtgcagccctaggcgttgccacag

SEQ ID NO: 41303 - DNA, 80 bp, synthetic construct
  source 1..80: mol_type = other DNA
ctgctcagataacagccggcattgcacttcaccagtccatgctgaactctcaagccatcgacaatctgagagcaagcctg

SEQ ID NO: 41304 - DNA, 80 bp, synthetic construct
  source 1..80: mol_type = other DNA
gaaactactaatcaggcaattgaggcaatcagacaagcagggcaggaaatgatattggctgttcagggtgtccaagacta

SEQ ID NO: 41305 - DNA, 80 bp, synthetic construct
  source 1..80: mol_type = other DNA
catcaataatgagctgataccgtctatgaaccaactatcttgtgatttaatcggccagaagctagggctcaaattgctca

SEQ ID NO: 41306 - DNA, 80 bp, synthetic construct
  source 1..80: mol_type = other DNA
gatactatacagaaatcctgtcattatttggccccagcttacgggaccccatatctgcggagatatccatccaggctttg

SEQ ID NO: 41307 - DNA, 80 bp, synthetic construct
  source 1..80: mol_type = other DNA
agctatgcgcttgggggagacatcaataaggtattagaaaagctcggatacagtggaggtgatttactgggcatcttaga

SEQ ID NO: 41308 - DNA, 80 bp, synthetic construct
  source 1..80: mol_type = other DNA
gagcagaggaataaaggcccggataactcacgtcgacacagagtcctacttcattgtactcagtatagcctatccgacgc

SEQ ID NO: 41309 - DNA, 80 bp, synthetic construct
  source 1..80: mol_type = other DNA
tgtccgagattaagggggtgattgtccaccggcttgaggtggtctcgtacaatataggctctcaagagtggtataccact

SEQ ID NO: 41310 - DNA, 80 bp, synthetic construct
  source 1..80: mol_type = other DNA
cgcaaaggcggttacggccccagacactgcagctgattcggagctgagaaggtggataaagtacacccaacaaagaaggg

SEQ ID NO: 41311 - DNA, 80 bp, synthetic construct
  source 1..80: mol_type = other DNA
gtgcccaaatatgttgcaacccaagggtaccttatctcgaattttgatgagtcatcgtgtactttcatgccagaggggac

SEQ ID NO: 41312 - DNA, 80 bp, synthetic construct
  source 1..80: mol_type = other DNA
tgtgtgcagccaaaatgccctgtacccgatgagtcctctgctccaagaatgcctccgggggtccaccaagtcctgtgctc

SEQ ID NO: 41313 - DNA, 80 bp, synthetic construct
  source 1..80: mol_type = other DNA
gtacactcgtatccgggtcttttgggaaccggttcattttatcacaagggaacctaatagccaattgtgcatcaatcctc

SEQ ID NO: 41314 - DNA, 80 bp, synthetic construct
  source 1..80: mol_type = other DNA
tgcaagtgttacacaacaggaacgatcattaatcaagaccctgacaagatcctaacatacattgctgccgatcactgccc

SEQ ID NO: 41315 - DNA, 80 bp, synthetic construct
  source 1..80: mol_type = other DNA
ggtggtcgaggtgaacggtgtgactatccaagtcgggagcaggaggtatccggacgcggtgtacctgcacagaattgatc

SEQ ID NO: 41316 - DNA, 80 bp, synthetic construct
  source 1..80: mol_type = other DNA
tcggccctcccatatcattggagaagttggacgtagggacaaatctggggaatgcaattgctaagttggaggatgccaag

SEQ ID NO: 41317 - DNA, 80 bp, synthetic construct
  source 1..80: mol_type = other DNA
gaattgttggagtcatcggaccagatattgaggagtatgaaaggtttatcgagcactagcatagtttacatcctgattgc

SEQ ID NO: 41318 - DNA, 80 bp, synthetic construct
  source 1..80: mol_type = other DNA
agtgtgtcttggagggttgatagggatccccgctttaatatgttgctgcaggtggcgctgtaacaaaagggagaacaagt

SEQ ID NO: 41319 - DNA, 80 bp, synthetic construct
  source 1..80: mol_type = other DNA
tggtatgtcaagaccaggcctaaagcctgatcttacagggacatcaaaatcctatgtaaggtcgctctgatcccctacaa

SEQ ID NO: 41320 - DNA, 80 bp, synthetic construct
  source 1..80: mol_type = other DNA
ctcttgaaacacagatttcccacaagtctcctctccgtcatcaagcaaccaccgcatccagcatcaagcccacctgaaat

SEQ ID NO: 41321 - DNA, 80 bp, synthetic construct
  source 1..80: mol_type = other DNA
tagttggtgaatttagattggagagaaaatggttggatgtggtgaggaacagaattgccgaggacctctctttacgccga

SEQ ID NO: 41322 - DNA, 80 bp, synthetic construct
  source 1..80: mol_type = other DNA
tgtctccggcttccctctggccgaacgagatcggtagttaattaaaacttagggtgcaagatcatccacaatgtcaccac

SEQ ID NO: 41323 - DNA, 80 bp, synthetic construct
  source 1..80: mol_type = other DNA
accgagaccgaataaatgccttctacaaagacaacccccatcctaagggaagtaggatagttattaacagagaacatctt

SEQ ID NO: 41324 - DNA, 80 bp, synthetic construct
  source 1..80: mol_type = other DNA
atgattgatagaccttatgttttgctggctgttctattcgtcatgtttctgagcttgatcgggttgctagccattgcagg

SEQ ID NO: 41325 - DNA, 80 bp, synthetic construct
  source 1..80: mol_type = other DNA
cattagactccatcgggcagccatctacaccgcagagatccataagagcctcagcaccaatctggatgtaactaactcaa

SEQ ID NO: 41326 - DNA, 80 bp, synthetic construct
  source 1..80: mol_type = other DNA
tcgagcatcaggtcaaggacgtgctgacgccactcttcaagatcattggtgatgaagtgggcctgaggacacctcagaga

SEQ ID NO: 41327 - DNA, 80 bp, synthetic construct
  source 1..80: mol_type = other DNA
ttcactgacctagtgaaattcatctctgacaaaattaaattccttaatccggatagggagtacgacttcagagatctcac

SEQ ID NO: 41328 - DNA, 80 bp, synthetic construct
  source 1..80: mol_type = other DNA
ttggtgtatcaacccgccagagagaatcaaattggattatgatcaatactgtgcagatgtggctgctgaagaactcatga

SEQ ID NO: 41329 - DNA, 80 bp, synthetic construct
  source 1..80: mol_type = other DNA
atgcattggtgaactcaactctactggaggccagggcaaccaatcagttcctagctgtctcaaagggaaactgctcaggg

SEQ ID NO: 41330 - DNA, 80 bp, synthetic construct
  source 1..80: mol_type = other DNA
cccactacaatcagaggtcaattctcaaacatgtcgctgtctctgttggacttgtatttaagtcgaggttacaatgtgtc

SEQ ID NO: 41331 - DNA, 80 bp, synthetic construct
  source 1..80: mol_type = other DNA
atctatagtcaccatgacatcccagggaatgtacgggggaacttacctagtgggaaagcctaatctgagcagtaaagggt

SEQ ID NO: 41332 - DNA, 80 bp, synthetic construct
  source 1..80: mol_type = other DNA
acaagagcaggattagagatatccgagatggccacacttttgaggagcttagcattgttcaaaagaaacaaggacaaacc

SEQ ID NO: 41333 - DNA, 80 bp, synthetic construct
  source 1..80: mol_type = other DNA
ttcatggtggctctaatcctggatatcaagaggacacccgggaacaaacctaggattgctgaaatgatatgtgacattga

SEQ ID NO: 41334 - DNA, 80 bp, synthetic construct
  source 1..80: mol_type = other DNA
cagagttgtcacaactgagcatgcaccgagtgtttgaagtaggggttatcagaaatccgggtttgggggctccggtgttc

SEQ ID NO: 41335 - DNA, 80 bp, synthetic construct
  source 1..80: mol_type = other DNA
catatgacgaactattttgagcaaccagttagtaatgatttcagcaactgcatggttgctttgggggagctcaggttcgc

SEQ ID NO: 41336 - DNA, 80 bp, synthetic construct
  source 1..80: mol_type = other DNA
agccctctgtcacagggaagattctgtcacggttccctatcaggggtcagggaaaggtgtcagcttccagctcgtcaagc

SEQ ID NO: 41337 - DNA, 80 bp, synthetic construct
  source 1..80: mol_type = other DNA
taggtgtctggaaatccccaaccgacatgcaatcctgggtccccctatcaacggatgatccagtgatagataggctttac

SEQ ID NO: 41338 - DNA, 80 bp, synthetic construct
  source 1..80: mol_type = other DNA
ctctcatctcacagaggtgttatcgctgacaatcaagcaaaatgggctgtcccgacgacacggacagatgacaagttgcg

SEQ ID NO: 41339 - DNA, 80 bp, synthetic construct
  source 1..80: mol_type = other DNA
aatggagacatgcttccagcaggcgtgtaagggtaaaaaccaagcactctgcgagaatcccgagtgggcaccattgaagg

SEQ ID NO: 41340 - DNA, 80 bp, synthetic construct
  source 1..80: mol_type = other DNA
ataacaggattccttcatacggggtcttgtctgttaatctgagtctgacagttgagcttaaaatcaaaattgcttcagga

SEQ ID NO: 41341 - DNA, 80 bp, synthetic construct
  source 1..80: mol_type = other DNA
ttcgggccattgatcacacacggttcagggatggacctatacaaaaccaaccacgacaatgtgtattggctgactatccc

SEQ ID NO: 41342 - DNA, 80 bp, synthetic construct
  source 1..80: mol_type = other DNA
gccaatgaaaaacctagccttaggtgtaatcaacacattggagtggataccgagattcaaggttagtcccaacctcttca

SEQ ID NO: 41343 - DNA, 80 bp, synthetic construct
  source 1..80: mol_type = other DNA
ctgttccaatcaaggaagcaggcgaggactgccatgccccaacatacctacctgcggaggtggatggtgatgtcaaactc

SEQ ID NO: 41344 - DNA, 80 bp, synthetic construct
  source 1..80: mol_type = other DNA
tacatatatcgtagaagcaggattagccagttttatcctgactattaagtttgggatagaaactatgtatcctgctcttg

SEQ ID NO: 41345 - DNA, 80 bp, synthetic construct
  source 1..80: mol_type = other DNA
agttccaatctggtaattctacctggtcaggatctccaatatgttttggcaacctacgatacttccagggttgaacatgc

SEQ ID NO: 41346 - DNA, 80 bp, synthetic construct
  source 1..80: mol_type = other DNA
tgtggtttattatgtttacagcccaagccgctcattttcttacttttatccttttaggttgcctataaagggggtcccaa

SEQ ID NO: 41347 - DNA, 80 bp, synthetic construct
  source 1..80: mol_type = other DNA
tcgagttacaagtggaatgcttcacatgggatcaaaaactctggtgccgtcacttctgtgtgcttgcggattcagaatct

SEQ ID NO: 41348 - DNA, 80 bp, synthetic construct
  source 1..80: mol_type = other DNA
ggtggacatatcactcactctgggatggtgggcatgggagtcagctgcacagtcactcgggaagatggaactaaccgcag

SEQ ID NO: 41349 - DNA, 80 bp, synthetic construct
  source 1..80: mol_type = other DNA
atagggctgccagtgaatcgatcacatgatgtcacccagacatcaggcatacccactagtgtgaaatagacatcagaatt

SEQ ID NO: 41350 - DNA, 80 bp, synthetic construct
  source 1..80: mol_type = other DNA
aagaaaaacgtagggtccaagtggtttcccgttatggactcgctatctgtcaaccagatcttgtaccctgaagttcacct

SEQ ID NO: 41351 - DNA, 80 bp, synthetic construct
  source 1..80: mol_type = other DNA
agatagcccgatagttaccaataagatagtagctatcctggagtatgctcgggtccctcacgcttacagcctggaggacc

SEQ ID NO: 41352 - DNA, 80 bp, synthetic construct
  source 1..80: mol_type = other DNA
ctacactgtgtcagaacatcaagcaccgcctaaaaaacggattctccaaccaaatgattataaacaatgtggaagttggg

SEQ ID NO: 41353 - DNA, 80 bp, synthetic construct
  source 1..80: mol_type = other DNA
aatgtcatcaagtccaagcttaggagttacccggcccactctcatattccatatccaaattgtaatcaggatttatttaa

SEQ ID NO: 41354 - DNA, 80 bp, synthetic construct
  source 1..80: mol_type = other DNA
catagaagacaaagagtcaacaaggaagatccgtgagctcctaaaaaagggaaattcgctgtactccaaagtcagtgata

SEQ ID NO: 41355 - DNA, 80 bp, synthetic construct
  source 1..80: mol_type = other DNA
gactgcatgaatttgctggtgagttatccacacttgagtccttgatgaatctttaccagcaaatgggagaaactgcaccc

SEQ ID NO: 41356 - DNA, 80 bp, synthetic construct
  source 1..80: mol_type = other DNA
aggttttccaatgcctgagggacactaactcacggcttggcctaggctccgaattgagggaggacatcaaggagaaaatt

SEQ ID NO: 41357 - DNA, 80 bp, synthetic construct
  source 1..80: mol_type = other DNA
attaacttgggagtttacatgcacagctcccaatggtttgagccctttctgttttggtttacagtcaagactgagatgag

SEQ ID NO: 41358 - DNA, 80 bp, synthetic construct
  source 1..80: mol_type = other DNA
gtcagtgattaaatcacaaacccatacttgccataggaggagacacacacctgtattcttcactggtagttcagttgagc

SEQ ID NO: 41359 - DNA, 80 bp, synthetic construct
  source 1..80: mol_type = other DNA
tgttaatctctcgtgaccttgttgccataatcagtaaggagtctcaacatgtatattacctaacgtttgaactggtcttg

SEQ ID NO: 41360 - DNA, 80 bp, synthetic construct
  source 1..80: mol_type = other DNA
atgtattgtgatgtcatagaggggaggttaatgacagagaccgctatgaccattgatgctaggtatgcagaacttctagg

SEQ ID NO: 41361 - DNA, 80 bp, synthetic construct
  source 1..80: mol_type = other DNA
cgggaaagaaacccccagcaactggaaggtccctccccctttctctcaacgcaaaagccccgcaaccgaatcgcacaagc

SEQ ID NO: 41362 - DNA, 80 bp, synthetic construct
  source 1..80: mol_type = other DNA
aaggaacatacacacccgacagaacccagaccccggcccacgacgccgcgcccccatcccccgacaaccagagggagccc

SEQ ID NO: 41363 - DNA, 80 bp, synthetic construct
  source 1..80: mol_type = other DNA
tgaaggacccccgaaccgcaaacgacatcagcatcccacagcctccccaagtccctcgatctcctcctcttcttgaaggg

SEQ ID NO: 41364 - DNA, 80 bp, synthetic construct
  source 1..80: mol_type = other DNA
gtggttgaagtgaatggtgtgaccatccaagtcgggagcaggaggtatccagacgctgtgtacttgcacaggattgacct

SEQ ID NO: 41365 - DNA, 80 bp, synthetic construct
  source 1..80: mol_type = other DNA
tctaggaagagtcagatacatgtggaaactgatagatggtttcttccctgcactcgggaatccaacttatcagattgtag

SEQ ID NO: 41366 - DNA, 80 bp, synthetic construct
  source 1..80: mol_type = other DNA
ccatgctggagccactttcacttgcttacctgcagctgagggatataacaatagaacttagaggtgctttccttaaccac

SEQ ID NO: 41367 - DNA, 80 bp, synthetic construct
  source 1..80: mol_type = other DNA
tgctttactgagatccatgatgttcttgaccaaaacgggttttctgatgaaggtacttatcatgagttaattgaagccct

SEQ ID NO: 41368 - DNA, 80 bp, synthetic construct
  source 1..80: mol_type = other DNA
agattacattttcataaccgatgacatacatctgacaggggagattttctcatttttcagaagtttcggccatcccagac

SEQ ID NO: 41369 - DNA, 80 bp, synthetic construct
  source 1..80: mol_type = other DNA
ttgaagcagtaacggctgctgaaaatgttaggaaatacatgaatcagcctaaagtcattatgtatgagactctgatgaaa

SEQ ID NO: 41370 - DNA, 80 bp, synthetic construct
  source 1..80: mol_type = other DNA
agtcttttgctggagtgagatttggctgctttatgcctcttagcctggacagtgacctgacaatgtacctaaaagacaag

SEQ ID NO: 41371 - DNA, 80 bp, synthetic construct
  source 1..80: mol_type = other DNA
gcacttgctgctctccaaagggagtgggattcagtttacccgaaagagttcctgcgttacgaccctcccaagggaaccgg

SEQ ID NO: 41372 - DNA, 80 bp, synthetic construct
  source 1..80: mol_type = other DNA
gtcacggaggcttgtagatgttttccttaatgattcgagctttgacccatatgatatgataatgtatgttgtaagtggag

SEQ ID NO: 41373 - DNA, 80 bp, synthetic construct
  source 1..80: mol_type = other DNA
attacctccgtgacccagagttcaacctgtcttacagcctgaaagaaaaggagatcaaggaaacaggtagactttttgct

SEQ ID NO: 41374 - DNA, 80 bp, synthetic construct
  source 1..80: mol_type = other DNA
aaaatgacttacaaaatgagggcatgccaagtgattgctgaaaatctaatctcaaacgggattggcaaatatttcaaaga

SEQ ID NO: 41375 - DNA, 80 bp, synthetic construct
  source 1..80: mol_type = other DNA
caatgggatggccaaggacgagcacgatttgactaaggcactccacactctagctgtctcaggagtccccaaagatctca

SEQ ID NO: 41376 - DNA, 80 bp, synthetic construct
  source 1..80: mol_type = other DNA
aagaaagtcacaggggggggccagtcctaaaaacctactcccgaagcccagtccacacaagtaccaggaacgtgaaagca

SEQ ID NO: 41377 - DNA, 80 bp, synthetic construct
  source 1..80: mol_type = other DNA
gcaagagggtttataggattccctcatgtaattcggcaggaccaagacactgatcatccggagaatatggaagcttacga

SEQ ID NO: 41378 - DNA, 80 bp, synthetic construct
  source 1..80: mol_type = other DNA
gacagttagtgcatttatcacgactgatctcaaaaagtactgccttaattggagatatgagaccatcagcttatttgcac

SEQ ID NO: 41379 - DNA, 80 bp, synthetic construct
  source 1..80: mol_type = other DNA
agtgaccctcattgcccccctgaccttgacgcccatgtcccgttatgcaaagtccctaatgaccaaatcttcattaagta

SEQ ID NO: 41380 - DNA, 80 bp, synthetic construct
  source 1..80: mol_type = other DNA
ccctatgggagggatagaagggtattgtcagaagctgtggaccatcagcaccattccttatttatacctggctgcgtatg

SEQ ID NO: 41381 - DNA, 80 bp, synthetic construct
  source 1..80: mol_type = other DNA
agagcggagtaaggattgcttcactagtgcaaggggacaatcagactatagccgtaacaaaaagagtacccagcacatgg

SEQ ID NO: 41382 - DNA, 80 bp, synthetic construct
  source 1..80: mol_type = other DNA
tactcgtgtcccaatcactcaagagcatcgcaagatgtgtattctggtcagagactatagttgatgagacaagggcagca

SEQ ID NO: 41383 - DNA, 80 bp, synthetic construct
  source 1..80: mol_type = other DNA
tgcagtaatattgccacaacaatggctaaaagcatcgagagaggttatgaccgttaccttgcatattccctgaacgtcct

SEQ ID NO: 41384 - DNA, 80 bp, synthetic construct
  source 1..80: mol_type = other DNA
aaaagtaatacagcagattctgatctctcttggcttcacaatcaattcaaccatgacccgagatgtagtcatacccctcc

SEQ ID NO: 41385 - DNA, 80 bp, synthetic construct
  source 1..80: mol_type = other DNA
tgaagagaccctccatcaagtaatgacacaacaaccgggggactcttcattcctagactgggcaagcgacccttactcag

SEQ ID NO: 41386 - DNA, 80 bp, synthetic construct
  source 1..80: mol_type = other DNA
ccaatgttaaaagggttattccatgatgacagtaaagaagaggacgagggactggcagcattcctcatggacaggcatat

SEQ ID NO: 41387 - DNA, 80 bp, synthetic construct
  source 1..80: mol_type = other DNA
tatagtacctagggcagctcatgaaatcctggatcatagtgtcacaggggcacgagagtctattgcaggcatgctagata

SEQ ID NO: 41388 - DNA, 80 bp, synthetic construct
  source 1..80: mol_type = other DNA
ccacaaaaggccttattcgagccagcatgaggaaggggggattaacctctcgagtgataaccagattgtccaattatgac

SEQ ID NO: 41389 - DNA, 80 bp, synthetic construct
  source 1..80: mol_type = other DNA
gggattaacctctcgagtgataaccagattgtccaattatgactatgaacaatttagagcagggatggtgctcttgacag

SEQ ID NO: 41390 - DNA, 80 bp, synthetic construct
  source 1..80: mol_type = other DNA
gcagctggccagagctctaagaagccatatgtgggcaaggctagctcgaggacggcctatttacggccttgaggtccctg

SEQ ID NO: 41391 - DNA, 80 bp, synthetic construct
  source 1..80: mol_type = other DNA
ggatggttttttgtcccctcaggttgccaactagatgatattgacaaggaaacatcatccttgagagtcccatatattgg

SEQ ID NO: 41392 - DNA, 80 bp, synthetic construct
  source 1..80: mol_type = other DNA
ttctaccactgatgagagaacagacatgaagcttgccttcgtaagagccccaagtcgatccttgagatctgctgttagaa

SEQ ID NO: 41393 - DNA, 80 bp, synthetic construct
  source 1..80: mol_type = other DNA
tagcaacagtgtactcatgggcttatggtgatgatgatagctcttggaatgaagcctggttgttggcaaggcaaagggcc

SEQ ID NO: 41394 - DNA, 80 bp, synthetic construct
  source 1..80: mol_type = other DNA
aatgtgagcttggaagagctaagggtgatcactcccatctcaacttcgactaatttagcgcataggttgagggatcgtag

SEQ ID NO: 41395 - DNA, 80 bp, synthetic construct
  source 1..80: mol_type = other DNA
cactcaagtgaaatactcaggcacatcacttgtccgagtggcaaggtataccacaatctccaacgacaatctctcatttg

SEQ ID NO: 41396 - DNA, 80 bp, synthetic construct
  source 1..80: mol_type = other DNA
tcatatcagataagaaggttgatactaactttatataccaacaaggaatgcttctagggttgggtgttttagaaacattg

SEQ ID NO: 41397 - DNA, 80 bp, synthetic construct
  source 1..80: mol_type = other DNA
tttcgacttgagaaagataccggatcatctaacacggtattacatcttcacgtcgaaacagattgttgcgtgatcccgat

SEQ ID NO: 41398 - DNA, 80 bp, synthetic construct
  source 1..80: mol_type = other DNA
gatagatcatcctaggatacccagctcccgtaagctagagctgagggcagagctatgtaccaacccattgatatatgata

SEQ ID NO: 41399 - DNA, 80 bp, synthetic construct
  source 1..80: mol_type = other DNA
gattattcactatctacttgggccaatgtgcagccatcaattgggcatttgatatacattatcataggccatcggggaaa

SEQ ID NO: 41400 - DNA, 80 bp, synthetic construct
  source 1..80: mol_type = other DNA
tatcagatgggtgagctgctgtcttcattcctttctaggatgagcaaaggagtgtttaaggtgcttgtcaatgctctaag

SEQ ID NO: 41401 - DNA, 80 bp, synthetic construct
  source 1..80: mol_type = other DNA
ccacccaaaaatctacaagaaattctggcattgtggtattatagagcctatccatggtccttcacttgatgctcaaaact

SEQ ID NO: 41402 - DNA, 80 bp, synthetic construct
  source 1..80: mol_type = other DNA
ttcacatttcttttgtgcgaaagtgacgaggatgtagtaccggacagattcgacaatatccaggcaaaacacctgtgtgt

SEQ ID NO: 41403 - DNA, 80 bp, synthetic construct
  source 1..80: mol_type = other DNA
tctagcagatttgtactgtcaaccagggacctgcccaccaattcgaggtctgagaccggtagagaaatgtgcagtcctaa

SEQ ID NO: 41404 - DNA, 80 bp, synthetic construct
  source 1..80: mol_type = other DNA
tcatgttccctgacttatctccggcgaggatcgatcaaacagataagattgagagttgatccaggattcatttttgacgc

SEQ ID NO: 41405 - DNA, 80 bp, synthetic construct
  source 1..80: mol_type = other DNA
cctcgctgatgtcaatgtcagtcagccaaagatcggcagcaacaacatcccaaatatgagcatcaaggatttcagacccc

SEQ ID NO: 41406 - DNA, 80 bp, synthetic construct
  source 1..80: mol_type = other DNA
gagaagccagggagagctacagagaaaccggatccaatagagcaagtgatgcgagagctgcccatcttccaatcagcaca

SEQ ID NO: 41407 - DNA, 80 bp, synthetic construct
  source 1..80: mol_type = other DNA
tactaaaactaaacaagtgcttctataatagtggagtttccgccaattctagatctggccaaagggaattagcaccctac

SEQ ID NO: 41408 - DNA, 80 bp, synthetic construct
  source 1..80: mol_type = other DNA
ccctccgaagttggccttgtcgaacacaaaatgggagtaggtaacattgtcaaggtgctctttaacgggaggcccgaagt

SEQ ID NO: 41409 - DNA, 80 bp, synthetic construct
  source 1..80: mol_type = other DNA
atatagagaccttacctaataaagatactatagagaagctagaggaattggcagccatcttatcgatggctctgctcctt

SEQ ID NO: 41410 - DNA, 80 bp, synthetic construct
  source 1..80: mol_type = other DNA
ggcaaaataggatcaatactggtgattaagcttatgcctttcagcggggattttgttcagggatttataaattatgtagg

SEQ ID NO: 41411 - DNA, 80 bp, synthetic construct
  source 1..80: mol_type = other DNA
gtctcattatagagaagtgaaccttgtctaccctagatacagcaacttcatatctactgaatcttatttaattatgacag

SEQ ID NO: 41412 - DNA, 80 bp, synthetic construct
  source 1..80: mol_type = other DNA
atctcaaagctaaccggttaatgaatcctgaaaagattaagcagcagataattgaatcatccgtgcggacttcacctgga

SEQ ID NO: 41413 - DNA, 80 bp, synthetic construct
  source 1..80: mol_type = other DNA
cttataggtcacatcctatccattaagcaactaagctgcatacaagcaattgtgggagacgcagttagcagaggtgatct

SEQ ID NO: 41414 - DNA, 80 bp, synthetic construct
  source 1..80: mol_type = other DNA
caaccctactctgaaaaaactcacacctatagagcaggtgctgatcaattgcgggttggcaattaacgggcctaaactgt

SEQ ID NO: 41415 - DNA, 80 bp, synthetic construct
  source 1..80: mol_type = other DNA
gcaagattcaaagagaaccaaagaagtcaacaagggatgttccacgcttaccccgtattggtaagtagcagacaacgaga

SEQ ID NO: 41416 - DNA, 80 bp, synthetic construct
  source 1..80: mol_type = other DNA
actcatatctaggatcacccgcaaattttgggggcatattcttctttactccgggaacagaaaattgataaatcggttta

SEQ ID NO: 41417 - DNA, 80 bp, synthetic construct
  source 1..80: mol_type = other DNA
tccagaatctcaagtccggttacctgatactagatttacaccagaatatcttcgttaagaatctatctaagtcagagaaa

SEQ ID NO: 41418 - DNA, 80 bp, synthetic construct
  source 1..80: mol_type = other DNA
agtcggatacagtgccctgattaaggattaattggttgaactccggaaccctaatcctgccctaggtagttaggcattat

SEQ ID NO: 41419 - DNA, 80 bp, synthetic construct
  source 1..80: mol_type = other DNA
gcaggccatggcaggaatcttggaagaacaaggctcagatacggacatctctagggtgtataatgacaaagatcttctag

SEQ ID NO: 41420 - DNA, 80 bp, synthetic construct
  source 1..80: mol_type = other DNA
gccgatggaaagcgcgagcaccaggcggcccaagcacagaacagccccgacacaaggccaccaccagccatcccaatctg

SEQ ID NO: 41421 - DNA, 80 bp, synthetic construct
  source 1..80: mol_type = other DNA
agtcctcctcgtgggacccccgaggaccaacccccaaggtcgcccccgacccagaccaccaaccgcatccccatagccgc

SEQ ID NO: 41422 - DNA, 80 bp, synthetic construct
  source 1..80: mol_type = other DNA
cacaagcgaccgaggtgacccaaccgcaggcatccgactccccagacagatcctctccccccggcaaactaaacaaaact

SEQ ID NO: 41423 - DNA, 80 bp, synthetic construct
  source 1..80: mol_type = other DNA
tagggccaaggaaaatacacacccgacagaacccagaccccggcccacgacgccgcgcctccatcccccgacaaccagag

SEQ ID NO: 41424 - DNA, 80 bp, synthetic construct
  source 1..80: mol_type = other DNA
agagcccccaaccaatcccgccggctcccccggcgcccacaggcaggcacaccaacccccgaacagacccggcacccagc

SEQ ID NO: 41425 - DNA, 80 bp, synthetic construct
  source 1..80: mol_type = other DNA
caccgacagtccaagacgggaggcccccccaaaaaagggcccccaggggccgacagccagcaccgcaaggaagcccaccc

SEQ ID NO: 41426 - DNA, 80 bp, synthetic construct
  source 1..80: mol_type = other DNA
gggccgacagccagcaccgcaaggaagcccacccaccccacacacgaccacggcaaccgaaccagaatccagaccaccct

SEQ ID NO: 41427 - DNA, 80 bp, synthetic construct
  source 1..80: mol_type = other DNA
accccacacacgaccacggcaaccgaaccagaatccagaccaccctgggccaccagctcccagactcggccactaccccg

SEQ ID NO: 41428 - DNA, 80 bp, synthetic construct
  source 1..80: mol_type = other DNA
cagaaaggaaaggccacaatccgcgcaccccagccccgatccggcggacagccacccaacccgagccagcacccaagagc

SEQ ID NO: 41429 - DNA, 80 bp, synthetic construct
  source 1..80: mol_type = other DNA
gatccctgaaggacccccgaaccgcaaacgacatcagtatcccatagcctctccaagtccctcgatctcctcctcttctt

SEQ ID NO: 41430 - DNA, 80 bp, synthetic construct
  source 1..80: mol_type = other DNA
tcaagactcatccagtgtccatcatgggtctcaaggtgaacgtctctgccatattcatggcagtactgttaactctccaa

SEQ ID NO: 41431 - DNA, 80 bp, synthetic construct
  source 1..80: mol_type = other DNA
ttgcagaatacaggagactactgaggacagttctggaaccaatcagagatgcacttaatgcaatgacccagaatataaga

SEQ ID NO: 41432 - DNA, 80 bp, synthetic construct
  source 1..80: mol_type = other DNA
ctttgagctacgcgcttggaggagatatcaataaggtgttagaaaagctcgggtacagtggaggtgatttactgggcatc

SEQ ID NO: 41433 - DNA, 80 bp, synthetic construct
  source 1..80: mol_type = other DNA
gacactgtccgagattaagggggtgatcgtccaccggctagaggtggtctcgtacaacataggatctcaagaatggtata

SEQ ID NO: 41434 - DNA, 80 bp, synthetic construct
  source 1..80: mol_type = other DNA
ccactgtgcccaagtatgttgcaacccaaggataccttatttcgaattttgatgagtcatcgtgtactttcatgccagag

SEQ ID NO: 41435 - DNA, 80 bp, synthetic construct
  source 1..80: mol_type = other DNA
gggactgtgtgcagccaaaatgccttgtacccgatgagtcccctgctccaagaatgcctccgggggtccaccaagtcttg

SEQ ID NO: 41436 - DNA, 80 bp, synthetic construct
  source 1..80: mol_type = other DNA
tgcccggtggtcgaggtgaacggagtgaccatccaagtcgggagcaggaggtatccggacgctgtgtacttgcacagaat

SEQ ID NO: 41437 - DNA, 80 bp, synthetic construct
  source 1..80: mol_type = other DNA
tgacctcggtcctcccatatcgttggagaggttggacgtgggaacaaatctggggaatgcaattgctaagttggaggatg

SEQ ID NO: 41438 - DNA, 80 bp, synthetic construct
  source 1..80: mol_type = other DNA
attgcagtgtgtcttggagggttgatagggatccccgttttaatatgttgctgcagggtgcggtgtaacagaaagggaga

SEQ ID NO: 41439 - DNA, 80 bp, synthetic construct
  source 1..80: mol_type = other DNA
acaagttggtatgtcaagaccaggcctaaagcctgatcttacaggaacgtcaaaatcctatgtgaggtcgctttgatcct

SEQ ID NO: 41440 - DNA, 80 bp, synthetic construct
  source 1..80: mol_type = other DNA
ctacaactcttgaaacacaaatgtcccacaagtctcctctccgtaatcaagcaactaccgcatccggcatcaagcccacc

SEQ ID NO: 41441 - DNA, 80 bp, synthetic construct
  source 1..80: mol_type = other DNA
tgaaattgtctcctgcttccctctgatcgagcaatatcggtagttaattaaaacttagggtgcaagatcatccacaatgt

SEQ ID NO: 41442 - DNA, 80 bp, synthetic construct
  source 1..80: mol_type = other DNA
caccgcaacgagaccggataaatgccttctacaaggacaacccccatcctaaaggaagtaggatagttattaacagagaa

SEQ ID NO: 41443 - DNA, 80 bp, synthetic construct
  source 1..80: mol_type = other DNA
tgcaggcattagattgcatcgggcagccatctacaccgcagagatccataagagcctcagcaccaatctagatgtaacta

SEQ ID NO: 41444 - DNA, 80 bp, synthetic construct
  source 1..80: mol_type = other DNA
tcagggcccactacaatcagaggtcaattctcaaacatgtcgctgtccctgttggacttgtatttaggtcaaggttacaa

SEQ ID NO: 41445 - DNA, 80 bp, synthetic construct
  source 1..80: mol_type = other DNA
aggggtcagagttgtcacaactgagcatgcaccgagtgtttgaagtaggtgttatcagaaatccgggtttggtggctcca

SEQ ID NO: 41446 - DNA, 80 bp, synthetic construct
  source 1..80: mol_type = other DNA
gtgttccatatgacaaactattttgagcaaccagtcaataatgatttcagcaactgcatggtggctttaggggagctcaa

SEQ ID NO: 41447 - DNA, 80 bp, synthetic construct
  source 1..80: mol_type = other DNA
attcgcagccctttgtcatagggaggattctatcataattccctatcaaggatcagggaaaggtgtcagcttccagctcg

SEQ ID NO: 41448 - DNA, 80 bp, synthetic construct
  source 1..80: mol_type = other DNA
tgaaggacaacaggatcccttcatacggggtcttgtctgtcaatctgagtctgacagttgagcttaaaatcaaaattgct

SEQ ID NO: 41449 - DNA, 80 bp, synthetic construct
  source 1..80: mol_type = other DNA
tcaggattcgggccattgatcacacacggctcagggatggacctgtacaagtccaaccacaacaatgtgtattggctgac

SEQ ID NO: 41450 - DNA, 80 bp, synthetic construct
  source 1..80: mol_type = other DNA
tatcccgccaatgaggaacctagccttaggtgtaatcaacacattggagtgggtaccgagattcaaggttagtcccaacc

SEQ ID NO: 41451 - DNA, 80 bp, synthetic construct
  source 1..80: mol_type = other DNA
tcttcactgttccaatcaaggaggcaggcgaggactgccatgccccaacatacctacctgcggaggtggacggtgatgtc

SEQ ID NO: 41452 - DNA, 80 bp, synthetic construct
  source 1..80: mol_type = other DNA
ccgcagatagggctgccgatgaaccgatcacatgatgtcacccagacatcaggcatacccactagtgtgaaatagacatc

SEQ ID NO: 41453 - DNA, 80 bp, synthetic construct
  source 1..80: mol_type = other DNA
agaattaagaaaaacatagggtccaagtggttccccgttatggactcgctatctgtcaaccagatcttataccctgaagt

SEQ ID NO: 41454 - DNA, 80 bp, synthetic construct
  source 1..80: mol_type = other DNA
aggactctacactgtgtcagaacatcaagcaccgcctaaaaaacggattttccaatcaaatgattataaacaatgtggaa

SEQ ID NO: 41455 - DNA, 80 bp, synthetic construct
  source 1..80: mol_type = other DNA
gttgggaatgtcatcaagtccaagcttaggagctatcccgcccacactcatattccatatccaaattgtaatcaggattt

SEQ ID NO: 41456 - DNA, 80 bp, synthetic construct
  source 1..80: mol_type = other DNA
atttaacatagaagacaaagagtcaacaaggaagatccgtgagctcctcaaaaagggaaatttgctgtactccaaagtca

SEQ ID NO: 41457 - DNA, 80 bp, synthetic construct
  source 1..80: mol_type = other DNA
aaaattattaacttgggggtttacatgcatagctcccaatggtttgagccctttctgttttggtttacagtcaagactga

SEQ ID NO: 41458 - DNA, 80 bp, synthetic construct
  source 1..80: mol_type = other DNA
gatgaggtcagtgattaaatcacaaacccatacttgccataggaggagacacacacctacattcttcactggtagttcag

SEQ ID NO: 41459 - DNA, 80 bp, synthetic construct
  source 1..80: mol_type = other DNA
ttgagttactaatctctcgtgaccttgttgccataatcagtaaagagtctcaacatgtatattacctgacgtttgaactg

SEQ ID NO: 41460 - DNA, 80 bp, synthetic construct
  source 1..80: mol_type = other DNA
gttttgatgtattgtgatgtcatagaagggaggttaatgacagagaccgccatgaccattgatgccaggtatacagagct

SEQ ID NO: 41461 - DNA, 80 bp, synthetic construct
  source 1..80: mol_type = other DNA
tgtaaaacgacggccagttggatgaaaagtcttgtggaagccatggctacttttaaagacgcttgttatcaatataaaaa

SEQ ID NO: 41462 - DNA, 80 bp, synthetic construct
  source 1..80: mol_type = other DNA
aaattatttttgccaccatgagactctctgcactagagtagcgcctaggcagcataaaatgggtcatagctggtttcctg

SEQ ID NO: 41463 - DNA, 80 bp, synthetic construct
  source 1..80: mol_type = other DNA
gatggtgcttagattgttgtcaacatacggacttgacctactgccaaggatgtttaatatatcatgtgtgtgaatggtgt

SEQ ID NO: 41464 - DNA, 80 bp, synthetic construct
  source 1..80: mol_type = other DNA
tgacttagaaaatttgattaatatgtatgatgcattatttcctataaatcaaaaaataattaataagtttgcaaacacaa

SEQ ID NO: 41465 - DNA, 80 bp, synthetic construct
  source 1..80: mol_type = other DNA
ttaaacaacataaatgtagaaatgagtatttgatacaatggtataatcattttttaatgccaattacactacagtcttta

SEQ ID NO: 41466 - DNA, 80 bp, synthetic construct
  source 1..80: mol_type = other DNA
ttgatgtgaactccatcgatattgatgagccaagtggccaaacagcagattggttacaaatcggcagctacattataagc

SEQ ID NO: 41467 - DNA, 80 bp, synthetic construct
  source 1..80: mol_type = other DNA
ggctttttttttgaaaagtcttgtgttagccatggcaacctttaaggatgcttgctttcattatagaagggttacaaaac

SEQ ID NO: 41468 - DNA, 80 bp, synthetic construct
  source 1..80: mol_type = other DNA
attggaagatggaatcaatgtacaatgaacttttaagctttatccaatcttgctataaaagtaatgttaatgtaggacat

SEQ ID NO: 41469 - DNA, 80 bp, synthetic construct
  source 1..80: mol_type = other DNA
tgtagttcaattgaaaaagcttatccattagttaaagatatactttggcattcaattactgaatatattgatcaaactgt

SEQ ID NO: 41470 - DNA, 80 bp, synthetic construct
  source 1..80: mol_type = other DNA
tgagaaattgtttaatacaatgaatccagtgcaagtaaatgaacagcaggtaataaagttctgttggcaaatagatatcg

SEQ ID NO: 41471 - DNA, 80 bp, synthetic construct
  source 1..80: mol_type = other DNA
cattatatatgcacattaaaatgatactggaaaccgaggctcttccatttactttcacattgaatcagttcaattctata

SEQ ID NO: 41472 - DNA, 80 bp, synthetic construct
  source 1..80: mol_type = other DNA
attaaagggattgtgaaccaatggtgtgatgttgctgaattagatcacttgccgttatgcactgaacagactgatgcatt

SEQ ID NO: 41473 - DNA, 80 bp, synthetic construct
  source 1..80: mol_type = other DNA
ggttaaattggaagaagaaggaaaactatctgaagaatatgagcttctgatctcggactctgaagatgacgactaatgat

SEQ ID NO: 41474 - DNA, 80 bp, synthetic construct
  source 1..80: mol_type = other DNA
tgaattaactatcaccacagtttttgccatcacaagaccttctggactagagtagcgcctagccagcaaaaactgtgacc

SEQ ID NO: 41475 - DNA, 80 bp, synthetic construct
  source 1..80: mol_type = other DNA
tgcattgagtgttgtcaattaactggattgactttttgtcacggatgttcgctagctcatgtttgtcagtggtgcatcca

SEQ ID NO: 41476 - DNA, 80 bp, synthetic construct
  source 1..80: mol_type = other DNA
aaacaaacgttgcttcttggacaatgaaccacatcttttaaaattaagaacttttgaatctccaataacgaaggaaaaat

SEQ ID NO: 41477 - DNA, 80 bp, synthetic construct
  source 1..80: mol_type = other DNA
tacaatgcattattaatttatatgaattactatttccaattaatcatggggttatcaataaatttaaaaaaacaataaaa

SEQ ID NO: 41478 - DNA, 80 bp, synthetic construct
  source 1..80: mol_type = other DNA
cagaggaaatgtagaaatgagtttgacaaatcatggtataatcagctactgcttccaattactttaaatgctgcagtttt

SEQ ID NO: 41479 - DNA, 80 bp, synthetic construct
  source 1..80: mol_type = other DNA
caagtttcactcaagggatgtttatgtttttggattttatgaaggatcatcaccatgcatagatttgccatatagacttg

SEQ ID NO: 41480 - DNA, 80 bp, synthetic construct
  source 1..80: mol_type = other DNA
taaattgcattgatttatatgataaactattgttagatcaagtaaactttgaaaggatgagttctcttccagataattta

SEQ ID NO: 41481 - DNA, 80 bp, synthetic construct
  source 1..80: mol_type = other DNA
caatccatctatgcaaacaaatacttcaaattaagtagacttccttcaatgaagctaaaacgaatctattactcagattt

SEQ ID NO: 41482 - DNA, 80 bp, synthetic construct
  source 1..80: mol_type = other DNA
ctccaaacagaatttgattaataagtacaagactaaaagtcgcatagttcttaggaatcttactgaattcacctgggatt

SEQ ID NO: 41483 - DNA, 80 bp, synthetic construct
  source 1..80: mol_type = other DNA
taaacagagaattgctgagaattggagcaaattcagtatggactccagtctcttcgaataaaattaaaattaaagggtgg

SEQ ID NO: 41484 - DNA, 80 bp, synthetic construct
  source 1..80: mol_type = other DNA
ctcaaactgatttacatcatgatctgattaatgataaagataaaatacttgccgcattatcaacatcatcattaaaacaa

SEQ ID NO: 41485 - DNA, 80 bp, synthetic construct
  source 1..80: mol_type = other DNA
tttgaaacacatgatttaaatttggggagaataaaagctgacatttttgaacttggacatcactgcaaaccaaattacat

SEQ ID NO: 41486 - DNA, 80 bp, synthetic construct
  source 1..80: mol_type = other DNA
ctcatcaaatcattggcaaccagcatcaaaaatttctaaatgtaaatggtgtaatgtaaaatatgcattcagagacatgg

SEQ ID NO: 41487 - DNA, 80 bp, synthetic construct
  source 1..80: mol_type = other DNA
gtaaagagcattggaacgtcggaggaagtcccccaagaagccaaagagaaaccaagaatcggaagctttccccataacgc

SEQ ID NO: 41488 - DNA, 80 bp, synthetic construct
  source 1..80: mol_type = other DNA
tttggagagcattccgggccgaagggtcgaggtacccagaaggaggaatcctcacggagaaaagcagacaaatcacctcc

SEQ ID NO: 41489 - DNA, 80 bp, synthetic construct
  source 1..80: mol_type = other DNA
ggaagaccccttcagcgaacagaaaactctgacgcgcgaggagtaagaccatagcgatagggcgagatgctaggagttag

SEQ ID NO: 41490 - DNA, 80 bp, synthetic construct
  source 1..80: mol_type = other DNA
gccggctgggcaacattccgaggggaccgtccctcggtaatggcgaatgggaccagaattcctttctcattaggaaagga

SEQ ID NO: 41491 - DNA, 80 bp, synthetic construct
  source 1..80: mol_type = other DNA
gctctgctgagcaccccaatgaaatgggggaagaaactttatgaactctttgccgacgatactttccagcagaacaggat

SEQ ID NO: 41492 - DNA, 80 bp, synthetic construct
  source 1..80: mol_type = other DNA
cataactacaatgctcaatcatgcttagtttacttgcttatataatcttattttattaacctttctctattttctcttgt

SEQ ID NO: 41493 - DNA, 80 bp, synthetic construct
  source 1..80: mol_type = other DNA
cctaaaatgttctgcaatcagcattccctacaaccgcaaccatcaactatgtttatttaaactgcttatgtaatcctgct

SEQ ID NO: 41494 - DNA, 80 bp, synthetic construct
  source 1..80: mol_type = other DNA
ggccttgaccctgctttgatcatcaagaagctgaaggagacaggtggagatgattgggtgaaggatacaaagttcatcat

SEQ ID NO: 41495 - DNA, 80 bp, synthetic construct
  source 1..80: mol_type = other DNA
atgtacatctgcggagattctactgaatgtgctaatttgcttctccaatatggtagcttttgcacacaactaaatcgtgc

SEQ ID NO: 41496 - DNA, 80 bp, synthetic construct
  source 1..80: mol_type = other DNA
gctcttgtggttcttgctgcaagtttgatgaggatgactctgagccagttctcaagggtgtcaaattacattacacataa

SEQ ID NO: 41497 - DNA, 80 bp, synthetic construct
  source 1..80: mol_type = other DNA
gagctggcctatgaaggccttgaccctgctttgatcatcaagaagctgaaggagacaggtggagatgattgggtgaagga

SEQ ID NO: 41498 - DNA, 80 bp, synthetic construct
  source 1..80: mol_type = other DNA
aatttgtatcattctgcactcgaattctttctctgctcgcctttatcttcagctgcagtcaataatcttgttcatgtcaa

SEQ ID NO: 41499 - DNA, 80 bp, synthetic construct
  source 1..80: mol_type = other DNA
ctttctctgctcgcctttatcttcagctgcagtcaataatcttgttcatgtcaatcagttatgcaatctagtttaactaa

SEQ ID NO: 41500 - DNA, 80 bp, synthetic construct
  source 1..80: mol_type = other DNA
tccctaaccttgataggtttgtattccagatggctggcgcaaccgatgatgcacaaaaggactccatctatgcatctgct

SEQ ID NO: 41501 - DNA, 80 bp, synthetic construct
  source 1..80: mol_type = other DNA
cggtaaagagcattggaacatcgggagattcactcccaagaaggacaaagagaattcaagaatcggaagctttcccctat

SEQ ID NO: 41502 - DNA, 80 bp, synthetic construct
  source 1..80: mol_type = other DNA
acctccagaggaccccttcagcgaacagagagctctgacgcgcgaggagttagagcatagctgggcggagatgctaggag

SEQ ID NO: 41503 - DNA, 80 bp, synthetic construct
  source 1..80: mol_type = other DNA
gacgctggagacatcctggaaggggaaagaggacggagggaacaaaaggtgcgggcctcccgatccgagtggcccaacca

SEQ ID NO: 41504 - DNA, 80 bp, synthetic construct
  source 1..80: mol_type = other DNA
tcaacggtcaaccttccgagttcctcttcttcctccctgctgaggctctttcctcccgaggagagcctcctccttcggag

SEQ ID NO: 41505 - DNA, 80 bp, synthetic construct
  source 1..80: mol_type = other DNA
agaaaggcctcttcccagtcccggagtcgacctccatccgatccgtccgggatctcttcgccggaggagccccctccccg

SEQ ID NO: 41506 - DNA, 80 bp, synthetic construct
  source 1..80: mol_type = other DNA
ggctcatccccaggtcgaggcgagggtcctcagttctttcctctgtaaagaggagactgctgggccaaacgcccgagccg

SEQ ID NO: 41507 - DNA, 80 bp, synthetic construct
  source 1..80: mol_type = other DNA
aaagccacaatgattctctgttaaataaaaaataagcacgaacacaagtccaatatggtgagcaagggcgccgagctgtt

SEQ ID NO: 41508 - DNA, 80 bp, synthetic construct
  source 1..80: mol_type = other DNA
tcacatgatctacttcggcttcgtgaccgccgccgccatcacccacggcatggatgagctgtacaagtgaattctctgtt

SEQ ID NO: 41509 - DNA, 80 bp, synthetic construct
  source 1..80: mol_type = other DNA
atcatggattactttcctgtgatatctgttgatttgcagagtggtcgtcgtgttgtgtcagtggagtacattaaaggtga

SEQ ID NO: 41510 - DNA, 80 bp, synthetic construct
  source 1..80: mol_type = other DNA
agcaaactctcggacccactgttcaatctcattgcggtccactgcttgagcagcaaactggatcgcaagctcttgatagt

SEQ ID NO: 41511 - DNA, 80 bp, synthetic construct
  source 1..80: mol_type = other DNA
ctcttgagtgctaacaaaatggagaataaaatcgaggtgaacaacaaagatgagatgaacaagtggtttgaagagttcaa

SEQ ID NO: 41512 - DNA, 80 bp, synthetic construct
  source 1..80: mol_type = other DNA
atgaaggctttttcagtcacttgcttgggctttgcagtcttttcgtcttctatatgtgtgaatatcaacatcttgcagca

SEQ ID NO: 41513 - DNA, 80 bp, synthetic construct
  source 1..80: mol_type = other DNA
cttttctggggaggcacttgatgtcagaacagtgattagatcttatagagcaagtgacccttctgctaccccaccccaga

SEQ ID NO: 41514 - DNA, 80 bp, synthetic construct
  source 1..80: mol_type = other DNA
tccaatcccagacccaacccacccttgctaccctccccacccagctaccccccaccccagaaccctctacctagaacacc

SEQ ID NO: 41515 - DNA, 80 bp, synthetic construct
  source 1..80: mol_type = other DNA
ctcttgagtgtctgcaaaatggaaaacaagatcgaggtgaacagcaaagatgagatgaacaaatggtttgaggagtttaa

SEQ ID NO: 41516 - DNA, 80 bp, synthetic construct
  source 1..80: mol_type = other DNA
cctctttttcttgctttctctgcttactaacaacaacactctacctcaacacaactacctcatttgcttgctccttgatt

SEQ ID NO: 41517 - DNA, 80 bp, synthetic construct
  source 1..80: mol_type = other DNA
tctttctctggctttttttgcttactaacaacaacactctacctcaacacaaaactaccccaacctaactacctcatttg

SEQ ID NO: 41518 - DNA, 80 bp, synthetic construct
  source 1..80: mol_type = other DNA
ccaatccagcatgaaggcagaagaaataacacctggtaggtatagaacagcaatttgtggactctaccctgcacagatca

SEQ ID NO: 41519 - DNA, 80 bp, synthetic construct
  source 1..80: mol_type = other DNA
ttaatcacgtttattttaattgcttatgtaatgctgttttgctaattttatcttgctatctttcatttcaaatacttaaa

SEQ ID NO: 41520 - DNA, 80 bp, synthetic construct
  source 1..80: mol_type = other DNA
actgcacctacagtcataaccacagtaactaaccatgcctgattctagttgctaaaactgactggtcttttaaccaattt

SEQ ID NO: 41521 - DNA, 80 bp, synthetic construct
  source 1..80: mol_type = other DNA
catcatggccttcaaccctccctggggtgacatcaacaaatcaggccgctcggggattgcacttgtcgccacaggccttg

SEQ ID NO: 41522 - DNA, 80 bp, synthetic construct
  source 1..80: mol_type = other DNA
gctgacaatatggtcacaaacctctttaagcacattgccaaggctcaggaactctacaagaactcatctgcactacgtgc

SEQ ID NO: 41523 - DNA, 80 bp, synthetic construct
  source 1..80: mol_type = other DNA
tttcagaatataaagtccctggtgaaattgtaatgtctgttaaagaaatgttgtcagatatgattagaaggaggaactta

SEQ ID NO: 41524 - DNA, 80 bp, synthetic construct
  source 1..80: mol_type = other DNA
atgccctgcaatcagctctcccatttttgctgtgccatacataactgcaaccatcaactatgtttaccccaaccacccat

SEQ ID NO: 41525 - DNA, 80 bp, synthetic construct
  source 1..80: mol_type = other DNA
tatgtttaccccaaccacccatgtaatcctgttttactaacattttattattctcttctgttttaaacacttaatgggct

SEQ ID NO: 41526 - DNA, 80 bp, synthetic construct
  source 1..80: mol_type = other DNA
tttccaactatcagcaagccgctctcaagtggagaaaagacataggcttccgtgtcaatgcaaacacggcagctttgagt

SEQ ID NO: 41527 - DNA, 80 bp, synthetic construct
  source 1..80: mol_type = other DNA
ccttgtcggtgaaatctcccctgtgaggcctcttcctaggtccggagtctacctccatctcgtccgttcgggccctcttc

SEQ ID NO: 41528 - DNA, 80 bp, synthetic construct
  source 1..80: mol_type = other DNA
ccttttctcgtcttcctcggtcaacctcttaagttcctcttcctcctccctgctgaggctcttccctcccccggagagct

SEQ ID NO: 41529 - DNA, 80 bp, synthetic construct
  source 1..80: mol_type = other DNA
ggaaagtcgagggaaactgtcccaagaagttccaagagaaaattcaggaaggaggatctttgcccataacgctgcggaga

SEQ ID NO: 41530 - DNA, 80 bp, synthetic construct
  source 1..80: mol_type = other DNA
gccgggggagcccccccttcgtacctttccttctttccgattattcctttgatgtttcccagccaggcattgtcatcctc

SEQ ID NO: 41531 - DNA, 80 bp, synthetic construct
  source 1..80: mol_type = other DNA
cagttatgactattaaccacatttatcttaattgcttatgtaatgttgttttgctaattttatcttgctatctttcattt

SEQ ID NO: 41532 - DNA, 80 bp, synthetic construct
  source 1..80: mol_type = other DNA
aatccagagagaaatcagtgctcatgaggggcagcttgtgataccacgccagaaggtcaaggatgcagaaaagcagtatg

SEQ ID NO: 41533 - DNA, 80 bp, synthetic construct
  source 1..80: mol_type = other DNA
atgtagatttcaattgatcgagtactaatcctcctgttctcttttcttttcctttctccttctttactaacaacaaaaaa

SEQ ID NO: 41534 - DNA, 80 bp, synthetic construct
  source 1..80: mol_type = other DNA
ttgcagaatataaggtccctggcgaaattgtgatgtctgttaaagaaatgctgtcggacatgattagaaggaggaatcta

SEQ ID NO: 41535 - DNA, 80 bp, synthetic construct
  source 1..80: mol_type = other DNA
agaggaccgtggaggctctcaatgggtacttggacaagcacagggacgaagttgacaaagcaagtgctgacagcatgata

SEQ ID NO: 41536 - DNA, 80 bp, synthetic construct
  source 1..80: mol_type = other DNA
ttacgcccacagtgttcccttgagtgctagcagaatggagaataaaatcgaggtgaataacaaagatgaaatgaacaagt

SEQ ID NO: 41537 - DNA, 80 bp, synthetic construct
  source 1..80: mol_type = other DNA
gcactcttaagcaccccaatgaagtgggggaagaagctttatgagctttttgctgatgactctttccagcaaaacaggat

SEQ ID NO: 41538 - DNA, 80 bp, synthetic construct
  source 1..80: mol_type = other DNA
tctggacacaccaagtccattcttaacctacggacaaacaccgagaccaacaatccgtgtgccaagacaattgtcaagtt

SEQ ID NO: 41539 - DNA, 80 bp, synthetic construct
  source 1..80: mol_type = other DNA
ttggcaagcagtctccattccaaaatgcctacaatgtcaagggcaatgccaccagtgccaacatcatctgaagctcagaa

SEQ ID NO: 41540 - DNA, 80 bp, synthetic construct
  source 1..80: mol_type = other DNA
tgctctgcacccagctcttccccttttgcactgctgtctatgattgtaaccatcaaccatgtttattttaactgcttata

SEQ ID NO: 41541 - DNA, 80 bp, synthetic construct
  source 1..80: mol_type = other DNA
ttattttaactgcttatataatcctgttttattaacttcttcttattttctttcgttttaaacattcaaagggctgtgcg

SEQ ID NO: 41542 - DNA, 80 bp, synthetic construct
  source 1..80: mol_type = other DNA
ctggtggaagcaaccaaattttgtgcacccatatacgagtgtgcctgggttagctccactggcattgtgaagaaaggact

SEQ ID NO: 41543 - DNA, 80 bp, synthetic construct
  source 1..80: mol_type = other DNA
ttgagaagaacgcaggaaccattaaatcttgggatgaaagctatactgagctgaaagttgaagtccccaaaatagaacag

SEQ ID NO: 41544 - DNA, 80 bp, synthetic construct
  source 1..80: mol_type = other DNA
caacaggctgctctcaagtggaggaaggacataggttttcgtgtcaatgcaaatacggcagccttaagccacaaagtcct

SEQ ID NO: 41545 - DNA, 80 bp, synthetic construct
  source 1..80: mol_type = other DNA
gaggtggtgatgaaaacccacgaggcccagtgagccgtgaacatgtggagtggtgcagggaatttgtcaaaggcaagtac

SEQ ID NO: 41546 - DNA, 80 bp, synthetic construct
  source 1..80: mol_type = other DNA
cctggggggacatcaacaagtcaggccggtcaggaatagcacttgttgcaacaggccttgccaagctcgcagagactgag

SEQ ID NO: 41547 - DNA, 80 bp, synthetic construct
  source 1..80: mol_type = other DNA
cggtcaggaatagcacttgttgcaacaggccttgccaagctcgcagagactgaggggaaaggagtgtttgatgaagcaaa

SEQ ID NO: 41548 - DNA, 80 bp, synthetic construct
  source 1..80: mol_type = other DNA
acaaagcaagtgccgacaacatgataacaaaccttctcaaacacattgctaaggcacaggagctttacaaaaactcgtct

SEQ ID NO: 41549 - DNA, 80 bp, synthetic construct
  source 1..80: mol_type = other DNA
gctggcgtgactccagaaaccttcccaactgtctcacagttccttttcgaactggggaaacaaccaaggggtaccaagaa

SEQ ID NO: 41550 - DNA, 80 bp, synthetic construct
  source 1..80: mol_type = other DNA
acccaaggtgtttcacattcagcttttctcctcctgcattgctacttacagttatgactatcaatcatgtttattttaat

SEQ ID NO: 41551 - DNA, 80 bp, synthetic construct
  source 1..80: mol_type = other DNA
ttattttaattgcttatgtaacgctgttttgctaattttatcttgctatctttcatttcaaatacttaaagggctgtgcg

SEQ ID NO: 41552 - DNA, 80 bp, synthetic construct
  source 1..80: mol_type = other DNA
tggggtaaagaggctgtggataacttccagccaggggacgatatggaccctgaattaaggacactagcacaaagcctgat

SEQ ID NO: 41553 - DNA, 80 bp, synthetic construct
  source 1..80: mol_type = other DNA
gctgtttgaaatccagaaagcaggattcaacatacaggaaatggacattgtggcttcagaacatctgctgcatcagtcac

SEQ ID NO: 41554 - DNA, 80 bp, synthetic construct
  source 1..80: mol_type = other DNA
ttgtgggaaagcagtccccgttccagaatgcctacaatgtcaaggggaatgccaccagcgccaacatcatctaaacctca

SEQ ID NO: 41555 - DNA, 80 bp, synthetic construct
  source 1..80: mol_type = other DNA
gcttgttctacatccaactgcacctgcaatcataaccacaataactaaccatgcctgattccagatgctgaaactaacca

SEQ ID NO: 41556 - DNA, 80 bp, synthetic construct
  source 1..80: mol_type = other DNA
tgccaaatctagacaaatttgtcttccaaatggcaagtgcaactgatgatgcacagaaggattccatctatgcatcggca

SEQ ID NO: 41557 - DNA, 80 bp, synthetic construct
  source 1..80: mol_type = other DNA
aaactaaccaatcttttaaccaattttctctttgcttgttgctttgttttgttttaccatttaaacatttaaagggctgt

SEQ ID NO: 41558 - DNA, 80 bp, synthetic construct
  source 1..80: mol_type = other DNA
ttgccagctaccaacaggctgccctcaagtggagaaaggacataggcttccgtgtcaatgcaaacacagcagccctgagt

SEQ ID NO: 41559 - DNA, 80 bp, synthetic construct
  source 1..80: mol_type = other DNA
tcttcgaagaggccaggaaaaccgtcgatgccctcaaggattaccttgacagacataaggaagaggttgacaagacaaat

SEQ ID NO: 41560 - DNA, 80 bp, synthetic construct
  source 1..80: mol_type = other DNA
aaatgaaaaaagcactcctgagcactccaatgaagtgggggaagaaactttatgagctctttgctgatgactctttccag

SEQ ID NO: 41561 - DNA, 80 bp, synthetic construct
  source 1..80: mol_type = other DNA
ttgtgtcattctgcactcagattctttcctctaattgcttttatcaatcgtttatttaatccagcttcactaactttgct

SEQ ID NO: 41562 - DNA, 80 bp, synthetic construct
  source 1..80: mol_type = other DNA
atttaatccagcttcactaactttgcttttttctttaatttaaacacttaaagggctgtgcggcaacgatatctttgaga

SEQ ID NO: 41563 - DNA, 80 bp, synthetic construct
  source 1..80: mol_type = other DNA
tccctaaccttgacaggtttgtgtttcagatggccagtgccacagacgatgcacaaaaggactccatctatgcatctgct

SEQ ID NO: 41564 - DNA, 80 bp, synthetic construct
  source 1..80: mol_type = other DNA
ctgatcctgagaggggatgagacggtaaagagcattggaacgtcggagagatcactcccaagaaggagaagagaactcaa

SEQ ID NO: 41565 - DNA, 80 bp, synthetic construct
  source 1..80: mol_type = other DNA
cccgatccgaggggcccaacctccagattctggagagaattcccggccgaagggtcgagtgctactcgagggagagcatc

SEQ ID NO: 41566 - DNA, 80 bp, synthetic construct
  source 1..80: mol_type = other DNA
gggtgttccaccccccgagaggggacgagtgaggcttatcccggggaactcgacttatcgtccccacatagcagagccac

SEQ ID NO: 41567 - DNA, 80 bp, synthetic construct
  source 1..80: mol_type = other DNA
ggacccccttccgaagtgaccgaggggggtggcttggaacctggaggaccagtggagccatgggatgctcttcccgattc

SEQ ID NO: 41568 - DNA, 80 bp, synthetic construct
  source 1..80: mol_type = other DNA
ttccgaagtgaccgaggggggtggcttggaacctggaggaccagtggagccatgggatgctcttcccgattctgacctaa

SEQ ID NO: 41569 - DNA, 80 bp, synthetic construct
  source 1..80: mol_type = other DNA
tgacctaactccttccccccaagggtcgcccaggaatggcgggaccccactctgcagggtccgcgttccatcctttctta

SEQ ID NO: 41570 - DNA, 80 bp, synthetic construct
  source 1..80: mol_type = other DNA
gaaacggaaggttttccccaaaacgctagtgaaactctaggaaggggaaagaaggaaggtggaaaagaaggtgcgggcct

SEQ ID NO: 41571 - DNA, 80 bp, synthetic construct
  source 1..80: mol_type = other DNA
gatcagcgcccgagaggggttgaaaggtaaagagcattggaacgccgtcagaaacactcccaagaaggaaaaaagagaaa

SEQ ID NO: 41572 - DNA, 80 bp, synthetic construct
  source 1..80: mol_type = other DNA
tcggcaagagggcggcagtcctggaactcttactcttttctgtaaagaggagtccgtggactcgtcgccccaagcccgag

SEQ ID NO: 41573 - DNA, 80 bp, synthetic construct
  source 1..80: mol_type = other DNA
ctcccgatccgaggggcccaactaccaagtttggagagcactccgggccgaagggtcgaggtacccggagagaggaatcc

SEQ ID NO: 41574 - DNA, 80 bp, synthetic construct
  source 1..80: mol_type = other DNA
tcgcggagataagcggaaaaatcacctccggaggaccccttcagcgaacagaaggcactgaagcgcgaagagtgagacca

SEQ ID NO: 41575 - DNA, 80 bp, synthetic construct
  source 1..80: mol_type = other DNA
tagcgataggagtggatgctaggagttagaggagacccgagcgaggaggaaagcaaagaaagcaacggggctagccggtg

SEQ ID NO: 41576 - DNA, 80 bp, synthetic construct
  source 1..80: mol_type = other DNA
gcaagaatcggaagaaacccccataacgctggagacatcctggaaggggaaagaggataggtggaaaagaaggagcgggc

SEQ ID NO: 41577 - DNA, 80 bp, synthetic construct
  source 1..80: mol_type = other DNA
ggatgctcttcccgattccgtccaccctttcctcccaagggtcgcccaggaatggcgggaccccactcaacggggtccgc

SEQ ID NO: 41578 - DNA, 80 bp, synthetic construct
  source 1..80: mol_type = other DNA
ctgccaatcacccatccccaccatcaccaagcccaccccaatgtggcagctgctcactccagcttcctgtacacttctgc

SEQ ID NO: 41579 - DNA, 80 bp, synthetic construct
  source 1..80: mol_type = other DNA
aatcttcttgaccactgcagtggcccttgctccagaagtaattaccccaaacttggtcaggaaagccctcctctgtgtgt

SEQ ID NO: 41580 - DNA, 80 bp, synthetic construct
  source 1..80: mol_type = other DNA
acagtgttctcttgagtcttggcaaaatggaaaacaaaatcgaggtgaataacaaagatgagatgaacaaatggtttgaa

SEQ ID NO: 41581 - DNA, 80 bp, synthetic construct
  source 1..80: mol_type = other DNA
gtcggtgagcctcccctgttactccttttccctggtccggagtcgacctccatccgatctgttcggggtttcttcgccgg

SEQ ID NO: 41582 - DNA, 80 bp, synthetic construct
  source 1..80: mol_type = other DNA
ctccgcttcatctcttgctttgacccacttcgagagggtctcctcccttcccctccggggtctcttcgagtcggcaaggc

SEQ ID NO: 41583 - DNA, 80 bp, synthetic construct
  source 1..80: mol_type = other DNA
cgagcatgggcccagtccggcgaagagtccggagatgggagaggagcgagacccccgaggtggcaaagtcgagagagcgg

SEQ ID NO: 41584 - DNA, 80 bp, synthetic construct
  source 1..80: mol_type = other DNA
gaacactctgaggagaggactcccaagaagccaagaagcagctcaagatccgggaacgaatccccaaaacgctggtgaag

SEQ ID NO: 41585 - DNA, 80 bp, synthetic construct
  source 1..80: mol_type = other DNA
ctctcggaatgaggaaaacggatgggatggtagaaaagagcgagcctcccgatccgggattcccctgaacctattggatc

SEQ ID NO: 41586 - DNA, 80 bp, synthetic construct
  source 1..80: mol_type = other DNA
tggagactccgaccttaaggggtcaagggtaggacagggaggcaatccaccaggagatctcggagaaaccacctccagag

SEQ ID NO: 41587 - DNA, 80 bp, synthetic construct
  source 1..80: mol_type = other DNA
gggagctccctccccactcctctcctttccaattattcctttgatgtttcccagccagggattttcgtcctctagtttct

SEQ ID NO: 41588 - DNA, 80 bp, synthetic construct
  source 1..80: mol_type = other DNA
gttacctttagatatgttttctatgttttcggggataaaaagtactattgatctgaccaagtcaatggcaactagcgtaa

SEQ ID NO: 41589 - DNA, 80 bp, synthetic construct
  source 1..80: mol_type = other DNA
cagggtccgctatcctacccttttcttacctttggccggcatggtcccagcctcctcgctggcgccggctgggcaacatt

SEQ ID NO: 41590 - DNA, 80 bp, synthetic construct
  source 1..80: mol_type = other DNA
ccgaggggaccgtccctcggtaatggcgaatgggacccaagacctccaagattcccagagagaatcgggaggtgactgtg

SEQ ID NO: 41591 - DNA, 80 bp, synthetic construct
  source 1..80: mol_type = other DNA
ccagggatgttcctcctcaagtttcttgatagtcttctttgtcttccggagcctcctctcgaggtcatccgcgtcatccc

SEQ ID NO: 41592 - DNA, 80 bp, synthetic construct
  source 1..80: mol_type = other DNA
agggcggagacgctctgaggagaggactcccaagaggacagagagaactcaagattcgggtaggagtccccaagacgctg

SEQ ID NO: 41593 - DNA, 80 bp, synthetic construct
  source 1..80: mol_type = other DNA
gtgaagctctaggaatgggggaaaatggcggaatggtagaaaagagcgagcctcccgatccgaatactcctgaacctatt

SEQ ID NO: 41594 - DNA, 80 bp, synthetic construct
  source 1..80: mol_type = other DNA
ggatctggagactccgaccttaaggggttaggagaaggccagaagggcaatccaccaggagattttcggaaaacccacct

SEQ ID NO: 41595 - DNA, 80 bp, synthetic construct
  source 1..80: mol_type = other DNA
ggcggcgtggagccggcagccccactccacactccttcccccccgcggggccccccatctaaggatgaaactccaccctc

SEQ ID NO: 41596 - DNA, 80 bp, synthetic construct
  source 1..80: mol_type = other DNA
gccccccatctaaggatgaaactccaccctccagggtccgctatcctacccttttcttacctttggccggcatggtccca

SEQ ID NO: 41597 - DNA, 80 bp, synthetic construct
  source 1..80: mol_type = other DNA
cttgtacccctgctttatgtaatcccacatatgctgcattaattgcttgaactggaattattatcactaggggatgggtt

SEQ ID NO: 41598 - DNA, 80 bp, synthetic construct
  source 1..80: mol_type = other DNA
tactagaataacgatggcaactatggaggaattgcagagggaaatcaatgcccacgagggtcaactggtgatagccaggc

SEQ ID NO: 41599 - DNA, 80 bp, synthetic construct
  source 1..80: mol_type = other DNA
tttctctgcttactaacaacaacattctacctcaacacaaaactacctcaactaaactacctcattaaattgctccttga

SEQ ID NO: 41600 - DNA, 80 bp, synthetic construct
  source 1..80: mol_type = other DNA
gaccggagcgaggagaaaagtaaagaaagcaacggggctagccggtgggtgttccgccccccgagaggcacgagtgaggc

SEQ ID NO: 41601 - DNA, 80 bp, synthetic construct
  source 1..80: mol_type = other DNA
agggtgcacagattgataccgtctttagctcgtactactggctctacaaggccggcgtgactccagatactttcccgact

SEQ ID NO: 41602 - DNA, 80 bp, synthetic construct
  source 1..80: mol_type = other DNA
aggaggtggatctcccgaggtgggtatcccactaaagagagggagatacttcgagggagatcactcccaagaggttctaa

SEQ ID NO: 41603 - DNA, 80 bp, synthetic construct
  source 1..80: mol_type = other DNA
cccactaaagagagggagatacttcgagggagatcactcccaagaggttctaagagaacttcaagaatgaggagagtccc

SEQ ID NO: 41604 - DNA, 80 bp, synthetic construct
  source 1..80: mol_type = other DNA
aagaccatagcacaggggaagatgctaggagttgggggaggccgaagcgaggagaaaagcaaagagagcaacggagctag

SEQ ID NO: 41605 - DNA, 80 bp, synthetic construct
  source 1..80: mol_type = other DNA
tcacttttgttggtcttttcccttttacttcccctctcaatgggcctcatgggactgggcgaggcagaagtgtttaccaa

SEQ ID NO: 41606 - DNA, 80 bp, synthetic construct
  source 1..80: mol_type = other DNA
tcccctgagaggtccctttccgggtccggagtctacctccatccggtccgttcgggccctcttcgccggagtggcccctt

SEQ ID NO: 41607 - DNA, 80 bp, synthetic construct
  source 1..80: mol_type = other DNA
ggtctccccttatgtccagtccctccccggtccgaacgaaggtggactccgggacaccctgcatgctggggacgaagccg

SEQ ID NO: 41608 - DNA, 80 bp, synthetic construct
  source 1..80: mol_type = other DNA
tcttccttgctgaggctcttccctcccctggagagctgcttcctcttgttctcgagggccttccttcttcggtgatcctg

SEQ ID NO: 41609 - DNA, 80 bp, synthetic construct
  source 1..80: mol_type = other DNA
ctcctatctttcctcttgtgatcacccactgctcgaggatgtcctcccgtcctcctcgcttctccttcttgtcggaccgg

SEQ ID NO: 41610 - DNA, 80 bp, synthetic construct
  source 1..80: mol_type = other DNA
gtccgaggtgagccttgtgccgaccgaagggtgcgatgggggagggggatcttccgagagaggttgctcactaaagagag

SEQ ID NO: 41611 - DNA, 80 bp, synthetic construct
  source 1..80: mol_type = other DNA
ggagattctctgaggaagatttctcccaagaagttccaagagaatctcaagaacgaggagagtccccaagacgctgagga

SEQ ID NO: 41612 - DNA, 80 bp, synthetic construct
  source 1..80: mol_type = other DNA
ggtctaggaatgggaaagaggaaggcggaaaaagtggagcggcctcccgatccgaatggcccgactgccgaatttggaga

SEQ ID NO: 41613 - DNA, 80 bp, synthetic construct
  source 1..80: mol_type = other DNA
gcactccgggccgtacggtcgggaaccctccagagggaagaagccactcggagtagaacagagaaatcacctccagagga

SEQ ID NO: 41614 - DNA, 80 bp, synthetic construct
  source 1..80: mol_type = other DNA
ccccttcagcgaacggagggctctctcacacggcaggagtaagaccatagcgtaggaagagatgctaggagttaggggag

SEQ ID NO: 41615 - DNA, 80 bp, synthetic construct
  source 1..80: mol_type = other DNA
ctccgtccttatccttctttccgattattcctttgacatttcccagccagggattgtcttcctcgagcttcttgaccttc

SEQ ID NO: 41616 - DNA, 80 bp, synthetic construct
  source 1..80: mol_type = other DNA
gagcatggaggaaccgtcgggtccgtgggatgctcctcccgattccgtccatccccccccccgagaggtcccccaggaat

SEQ ID NO: 41617 - DNA, 80 bp, synthetic construct
  source 1..80: mol_type = other DNA
atgcttcgcatccagattccctcctcttgcactgctacatacaattgcaaccatcaatcatgtccataccaaccgcctgt

SEQ ID NO: 41618 - DNA, 80 bp, synthetic construct
  source 1..80: mol_type = other DNA
gcctgtataatcttgttttattaaccttctcctattttctttcgttttaaacacttaaagggctgtgcggcaacgatatc

SEQ ID NO: 41619 - DNA, 80 bp, synthetic construct
  source 1..80: mol_type = other DNA
gtcggtgatcctcccacgcggctctccttcctaggcccggagtctacctccatactgtccgtgcgggccctcttcgccgg

SEQ ID NO: 41620 - DNA, 80 bp, synthetic construct
  source 1..80: mol_type = other DNA
tcttgattttcttcctgatcttccggaggtctttctccagctcctctgccctttttcttccagagacccactgctcgagg

SEQ ID NO: 41621 - DNA, 80 bp, synthetic construct
  source 1..80: mol_type = other DNA
atgtcttcccttccccctcggttcttcttcgattcgggccggctcatcttggcagagggcggcggtcctcagcgctctta

SEQ ID NO: 41622 - DNA, 80 bp, synthetic construct
  source 1..80: mol_type = other DNA
ctctttcctataaagaggaggctgctggactcgtcgccccagcccgagatgggccacagctccgaacgaagggtccgacg

SEQ ID NO: 41623 - DNA, 80 bp, synthetic construct
  source 1..80: mol_type = other DNA
ggggatggagacctcccgaggtgggttgcctggtaaagaggcgaggaaatctgggaaaaattctcctaagaagaattagg

SEQ ID NO: 41624 - DNA, 80 bp, synthetic construct
  source 1..80: mol_type = other DNA
gggttgcctggtaaagaggcgaggaaatctgggaaaaattctcctaagaagaattaggagagatttcaagattgaggaac

SEQ ID NO: 41625 - DNA, 80 bp, synthetic construct
  source 1..80: mol_type = other DNA
agagatttcaagattgaggaactttccccataacgctgtggagactcttggaaggggaaagaggaggacgagaaaaaaga

SEQ ID NO: 41626 - DNA, 80 bp, synthetic construct
  source 1..80: mol_type = other DNA
gtgcgggtttcccgatccgaggggcccggcgccagaaattggggaatgctccgggccgaatggttggacagcgcgcggtg

SEQ ID NO: 41627 - DNA, 80 bp, synthetic construct
  source 1..80: mol_type = other DNA
aaggaaatccactcggagatgagcggagaaaccacctccagaggaccccttcagcgaacagaaggcgctctcgggcggta

SEQ ID NO: 41628 - DNA, 80 bp, synthetic construct
  source 1..80: mol_type = other DNA
gggagccccctcctcgttcctatccttctttccgattattcctttgatgtttcccagccagggattggcttcctcgagct

SEQ ID NO: 41629 - DNA, 80 bp, synthetic construct
  source 1..80: mol_type = other DNA
ccgaggggaccgtcccctcggtaatggcgaatgggacccagaactctctctgattccgatagagaatcgagagaaaactg

SEQ ID NO: 41630 - DNA, 80 bp, synthetic construct
  source 1..80: mol_type = other DNA
gctcttggaagaggaaaaaggaggtcgaagagaaaggtgcggggcccccgatccgaggggtccggcgccgagttttggag

SEQ ID NO: 41631 - DNA, 80 bp, synthetic construct
  source 1..80: mol_type = other DNA
agtctacttccatctcgtccgtccgggccctcttcgccgggggagcccccccttcgactttttccttttttccgattatt

SEQ ID NO: 41632 - DNA, 80 bp, synthetic construct
  source 1..80: mol_type = other DNA
catgagccacgttccgaacgaagggtccgcgggggagagtcgacagcccgagagggagtggatggcaaagatgcgaggaa

SEQ ID NO: 41633 - DNA, 80 bp, synthetic construct
  source 1..80: mol_type = other DNA
cctgccgccccgtcacgtccagcccctccccgtgtctggtgaaggtggactccgggattccttgcatgctggggacgaag

SEQ ID NO: 41634 - DNA, 80 bp, synthetic construct
  source 1..80: mol_type = other DNA
ccgcccccgggcgctcccctccgttcgccttcaggtgggttcacacctccaggcggcgggccggctactcttcttttcct

SEQ ID NO: 41635 - DNA, 80 bp, synthetic construct
  source 1..80: mol_type = other DNA
acctccaggcggcgggccggctactcttcttttccttttctcgtcttcctcggtcaacctcccgagttcctcttcttctt

SEQ ID NO: 41636 - DNA, 80 bp, synthetic construct
  source 1..80: mol_type = other DNA
ctcgagggccttccttcgtcggtgatcctgcctctccttgtcggtgaatcttcccctgagaggccccttcccaggcccgg

SEQ ID NO: 41637 - DNA, 80 bp, synthetic construct
  source 1..80: mol_type = other DNA
agtctatctccatctggtccgttcgggccctcttcgccgggggagccccctctccatccttatccttctttccaagaatt

SEQ ID NO: 41638 - DNA, 80 bp, synthetic construct
  source 1..80: mol_type = other DNA
cctttgatgtttcccagccagggattttcttcctcaagcctcttgatctttttcttcgtcttccggaggtctctctcgag

SEQ ID NO: 41639 - DNA, 80 bp, synthetic construct
  source 1..80: mol_type = other DNA
ctcctcggctttctttcttccattcacccactgctcgaggatgtcttcccttcccccgcgattcttcttcgattcggacc

SEQ ID NO: 41640 - DNA, 80 bp, synthetic construct
  source 1..80: mol_type = other DNA
ggctcatctcgacaaagggtcgacagtcctcagtgctcttatctttctctgataaagaggagactgctggacctgcgccc

SEQ ID NO: 41641 - DNA, 80 bp, synthetic construct
  source 1..80: mol_type = other DNA
cgacaaagggtcgacagtcctcagtgctcttatctttctctgataaagaggagactgctggacctgcgcccaagttcgag

SEQ ID NO: 41642 - DNA, 80 bp, synthetic construct
  source 1..80: mol_type = other DNA
ggggaaagaggataggtggaatagaaggtgcgggccccccgatccgaggggcccaactgccaagtttggaggcacttccg

SEQ ID NO: 41643 - DNA, 80 bp, synthetic construct
  source 1..80: mol_type = other DNA
gccgaaaggttgggaagcacccagagggaagaatccactcggagatagcagacaaatcacctccagaggaccccttcagc

SEQ ID NO: 41644 - DNA, 80 bp, synthetic construct
  source 1..80: mol_type = other DNA
gaacagaagggtccccgcacgggataggagtaagaccatagcgatggaaagagatgctaggagttagaggagaccgaagc

SEQ ID NO: 41645 - DNA, 80 bp, synthetic construct
  source 1..80: mol_type = other DNA
ttatcccggggaactcggcaatcgtccccgcactgcagaccccggagccccttccaaaggaccggaggtggagctaggag

SEQ ID NO: 41646 - DNA, 80 bp, synthetic construct
  source 1..80: mol_type = other DNA
cgtggtgggagcagtggagccatgggatgctcttcccgattccgtccatcccttccccccgagggtcgcccaggaatggc

SEQ ID NO: 41647 - DNA, 80 bp, synthetic construct
  source 1..80: mol_type = other DNA
ggaaccccactcagctggggtccacgttccattctttcttacctgtggccggcatggtcccagcctcctcgctggcgccg

SEQ ID NO: 41648 - DNA, 80 bp, synthetic construct
  source 1..80: mol_type = other DNA
gccggctgggcaacattccgaggggaccgtcccctcggtaatggcgaatgggacccagtcgattcctattgagaatcgaa

SEQ ID NO: 41649 - DNA, 80 bp, synthetic construct
  source 1..80: mol_type = other DNA
tctggctctcccttagccatccgagtggacgtgcgtcctccttcggatgcccaggtcggaccgcgaggaggtggagatgc

SEQ ID NO: 41650 - DNA, 80 bp, synthetic construct
  source 1..80: mol_type = other DNA
cctcggagaagttccccccaagaagcgaagaaggatcggaggtggaaagatttcccaaagacgctggaggcatctcggaa

SEQ ID NO: 41651 - DNA, 80 bp, synthetic construct
  source 1..80: mol_type = other DNA
cccccgggcgctcccctcgatccactcccggaggggttcacacctccagtcggcgggccggctgctcttctttcccttct

SEQ ID NO: 41652 - DNA, 80 bp, synthetic construct
  source 1..80: mol_type = other DNA
ctcgtcttcctcggtcaacttcctgagttcctcttcctcgtccctgctgaggctcttccctcccgcttgaagttgcttct

SEQ ID NO: 41653 - DNA, 80 bp, synthetic construct
  source 1..80: mol_type = other DNA
ttcctctaacttctttcttccattgacccactgctcgaggacgtcttcccttcctccgcggttcttccttccttcggacc

SEQ ID NO: 41654 - DNA, 80 bp, synthetic construct
  source 1..80: mol_type = other DNA
ttgagagtatcccagagggaggaagccacacagagtagaacagagaaatcacctccagaggaccccttcagcgaacagag

SEQ ID NO: 41655 - DNA, 80 bp, synthetic construct
  source 1..80: mol_type = other DNA
agcacctcgcgaggagtagaccgtagcgatggggcgggatgctaggagtagggagagaccgaagcgaggaggaaagtaaa

SEQ ID NO: 41656 - DNA, 80 bp, synthetic construct
  source 1..80: mol_type = other DNA
ggagcgtggtggaccatcgggtccgtgggatgctcctcccgattccgtccaccccttccccccacgggtcgcccaggaat

SEQ ID NO: 41657 - DNA, 80 bp, synthetic construct
  source 1..80: mol_type = other DNA
aagaacccccaagaaggaaaaaagagaaagcaagaatcggatgttccccatgacgctggagacagggaaggggaaagagg

SEQ ID NO: 41658 - DNA, 80 bp, synthetic construct
  source 1..80: mol_type = other DNA
aatttgtatcaatctgcacttgaattcttttcctattcgcttttgtcttcagctgcaatcaacaatcttgttcacgtcaa

SEQ ID NO: 41659 - DNA, 80 bp, synthetic construct
  source 1..80: mol_type = other DNA
tcagttatacaatccagttttactaactttactttactttctttgattttaaacacttaaagggctgtgcggcaacgata

SEQ ID NO: 41660 - DNA, 80 bp, synthetic construct
  source 1..80: mol_type = other DNA
ttgctaattaccaacaggctgccttgaaatggaggaaagacataggtttccgtgtcaatgcaaacacagcggctctgagc

SEQ ID NO: 41661 - DNA, 80 bp, synthetic construct
  source 1..80: mol_type = other DNA
acagaaagctcaacgcgcggagtagatcgtagcgatggggcgagatgctaggagttagaggagaccaaagcgaggagaaa

SEQ ID NO: 41662 - DNA, 80 bp, synthetic construct
  source 1..80: mol_type = other DNA
agtaaagaaagcaacggggctagtcggtgggtgttccgcctcccgagaggggacgagtgaggcttatcccggtgaactcg

SEQ ID NO: 41663 - DNA, 80 bp, synthetic construct
  source 1..80: mol_type = other DNA
gcgaatcgtccccacatagcagattcccggagccccttccaaaatgaccgagggtggtgactaggaacaccggggaccgg

SEQ ID NO: 41664 - DNA, 80 bp, synthetic construct
  source 1..80: mol_type = other DNA
tggagccatgggatgcccttcccgattccgtccactcctcccccccgagggtcgcccaggaatggcgggaccccactctg

SEQ ID NO: 41665 - DNA, 80 bp, synthetic construct
  source 1..80: mol_type = other DNA
gccggctgggcaacattccgaggggaccgtccctcggtaatggcgaatgggaccacagagactttcttgcttcgcagaaa

SEQ ID NO: 41666 - DNA, 80 bp, synthetic construct
  source 1..80: mol_type = other DNA
ctcccctgctctctttcttccattgacccactgctcgagaacctcttctctttccccgcgactctttttttcttcggacc

SEQ ID NO: 41667 - DNA, 80 bp, synthetic construct
  source 1..80: mol_type = other DNA
aagaggtaaggtggaagagaagtagggtggcctcccgatccgaggggcccaaccaccaagtttggagagcactccgggcc

SEQ ID NO: 41668 - DNA, 80 bp, synthetic construct
  source 1..80: mol_type = other DNA
ccaaccaccaagtttggagagcactccgggccgaatggtcgagagcatctcagagggaggaagccacacggagtagaaca

SEQ ID NO: 41669 - DNA, 80 bp, synthetic construct
  source 1..80: mol_type = other DNA
ggagtagaacagagaaatcacctccagaggaccccttcagcgaacagatagggcctcactaggagtagaccatagcgatg

SEQ ID NO: 41670 - DNA, 80 bp, synthetic construct
  source 1..80: mol_type = other DNA
acagatagggcctcactaggagtagaccatagcgatggggggagatgctaggagttagaggagaccgaagcgaggaggaa

SEQ ID NO: 41671 - DNA, 80 bp, synthetic construct
  source 1..80: mol_type = other DNA
ttatcccggggaactcggcgaatcgtccccacatagcagatgcccggacccccttccaaaatgaccgagggaggcgtctt

SEQ ID NO: 41672 - DNA, 80 bp, synthetic construct
  source 1..80: mol_type = other DNA
ttccaaaatgaccgagggaggcgtcttggagcgcgggtggccggtggagccgtgggatgctcctcccgattccgtccacc

SEQ ID NO: 41673 - DNA, 80 bp, synthetic construct
  source 1..80: mol_type = other DNA
ggagcgcgggaggccggtggagccgtgggatgctcctcccgattccgtccaccccttccccctgcgggtcgcccaggaat

SEQ ID NO: 41674 - DNA, 80 bp, synthetic construct
  source 1..80: mol_type = other DNA
agatactactcccaagaaggtaaagagaggattcaagaagcggaagttccccacaacgctggtttaatcttggaagggga

SEQ ID NO: 41675 - DNA, 80 bp, synthetic construct
  source 1..80: mol_type = other DNA
gaagggttgagagtatcccagagggtggaatccacacagagtagtgcagacaaatcacctccagaggaccccttcagcga

SEQ ID NO: 41676 - DNA, 80 bp, synthetic construct
  source 1..80: mol_type = other DNA
cccccctgttactctttttccccagtccggagtcgacctccatccgatctgttcgggatctcttcgccgggtgagctccc

SEQ ID NO: 41677 - DNA, 80 bp, synthetic construct
  source 1..80: mol_type = other DNA
ctttgccttccggagcttcctctcgaggtcgtccgcatcctctcttgccttgacccacttcgagaggatttcctccctag

SEQ ID NO: 41678 - DNA, 80 bp, synthetic construct
  source 1..80: mol_type = other DNA
aggatccccgagggggcaaggacaggaaagcggagacactctgaggaaaaactcccaagaggacaagaagtgactcaaga

SEQ ID NO: 41679 - DNA, 80 bp, synthetic construct
  source 1..80: mol_type = other DNA
tccgggaacgaatccccaagacgccggtagcgcctcggaatgagggaaaatggccaagatggtagaaaagagcgagcctc

SEQ ID NO: 41680 - DNA, 80 bp, synthetic construct
  source 1..80: mol_type = other DNA
ccgatacgggatttccctgaacttattggatctggagactccggtcctaagggtcaaaggaaaggcagggggaggcaatc

SEQ ID NO: 41681 - DNA, 80 bp, synthetic construct
  source 1..80: mol_type = other DNA
caccaggagatctcggaaaaaccacctccagaggaccccttcagcgaacagaagagcctgacccggtcgaattgtcccgt

SEQ ID NO: 41682 - DNA, 80 bp, synthetic construct
  source 1..80: mol_type = other DNA
agcgataggtggagatgctgggagtgaggggagaccggagcgaggggagcaagacaagagagcaacggagctagcgagtg

SEQ ID NO: 41683 - DNA, 80 bp, synthetic construct
  source 1..80: mol_type = other DNA
ttatcccggggaactcggccactcccccaactagccggtcctgggtccccattccaaaggaaggagtggactggcaactc

SEQ ID NO: 41684 - DNA, 80 bp, synthetic construct
  source 1..80: mol_type = other DNA
ggtggtcccgcagcaccatggtgaacccccgtagccacccactccacactccttcccccccgcggggcctcccatccaaa

SEQ ID NO: 41685 - DNA, 80 bp, synthetic construct
  source 1..80: mol_type = other DNA
atgggccaaattccgaacgaagggacgcggcgggatcagcgcccgagaggggtgaattggtaaagagcattggaacgtcg

SEQ ID NO: 41686 - DNA, 80 bp, synthetic construct
  source 1..80: mol_type = other DNA
ggcttccccttatgtccagcccctccccggtcctggtgaaggtggactccgggacaccttgcaagttggggacaaagccg

SEQ ID NO: 41687 - DNA, 80 bp, synthetic construct
  source 1..80: mol_type = other DNA
cctccgggcgctcccctcgatccaccttcgagggggttcacacctccaggcggcgtgccggctgttcttctttcccttct

SEQ ID NO: 41688 - DNA, 80 bp, synthetic construct
  source 1..80: mol_type = other DNA
cctttgatgtttcccagccagggattgtcatcctctagtttcttgattttcttcttaaccttccggagatctttctcgag

SEQ ID NO: 41689 - DNA, 80 bp, synthetic construct
  source 1..80: mol_type = other DNA
ttcctctaacttctttcttccgttcacccactgctcgagaacctcttctcttcccccgcgattcttcttcgattcggtcc

SEQ ID NO: 41690 - DNA, 80 bp, synthetic construct
  source 1..80: mol_type = other DNA
aaagatggaaggtggaaaagaaggtggcgggcctcccgatccgaggggcccaactaccaagtttggagagcactccgggc

SEQ ID NO: 41691 - DNA, 80 bp, synthetic construct
  source 1..80: mol_type = other DNA
cgtatggtcgagagcatctcagagggaggaagccacacagagtagaacagggaaatcacctccagaggaccccttcagcg

SEQ ID NO: 41692 - DNA, 80 bp, synthetic construct
  source 1..80: mol_type = other DNA
aacagagagcgcaatgcgaggagtagaccatagcgatagggggagatgctaggagttagaggaaaccgaagcgaggagga

SEQ ID NO: 41693 - DNA, 80 bp, synthetic construct
  source 1..80: mol_type = other DNA
aagcaaagaaagcaacggggctagccgtcaggtgttccacctcccgagaggggacgagtgaggcttatcccggagaattc

SEQ ID NO: 41694 - DNA, 80 bp, synthetic construct
  source 1..80: mol_type = other DNA
tgttccacctcccgagaggggacgagtgaggcttatcccggagaattcgtgtaattgtccccacttagcagtctcccgga

SEQ ID NO: 41695 - DNA, 80 bp, synthetic construct
  source 1..80: mol_type = other DNA
gtgtaattgtccccacttagcagtctcccggacccccttccaaaatgaccgaggggggtggctaggagcatagaggacca

SEQ ID NO: 41696 - DNA, 80 bp, synthetic construct
  source 1..80: mol_type = other DNA
gtggatccgtgagatgctcttcccgattccgtccaacccctccccccaagggtcgcccaggaatggcgggaccccactcg

SEQ ID NO: 41697 - DNA, 80 bp, synthetic construct
  source 1..80: mol_type = other DNA
gaagcgagagaaaagtggctctcccttagccatccgagtggacgtctgtcctccttcggatgcccaggtcggaccgcgag

SEQ ID NO: 41698 - DNA, 80 bp, synthetic construct
  source 1..80: mol_type = other DNA
gagtaagaacccccaagaaggaaaaaagagaaagcaagaatcggatgctccctatgacgctggagacatcttggaagggg

SEQ ID NO: 41699 - DNA, 80 bp, synthetic construct
  source 1..80: mol_type = other DNA
cgaagggttgagagtatcccagagggtggaatccacacggaggtaagcagataaaacacctccagaggaccccttcagcg

SEQ ID NO: 41700 - DNA, 80 bp, synthetic construct
  source 1..80: mol_type = other DNA
aaagaaggcaggaggaaaagaaggtggcgggcctcccgatccgaggggtccgtccgccaaacttgaaggtcactccgggc

SEQ ID NO: 41701 - DNA, 80 bp, synthetic construct
  source 1..80: mol_type = other DNA
aaagagggagtgaggaagaaaaggtggcgtgcctcccgatccgaggggtccgtccgccagaattggaaggcactccgggc

SEQ ID NO: 41702 - DNA, 80 bp, synthetic construct
  source 1..80: mol_type = other DNA
cctttgacgtttcccagccaggcgttctcttcctcaagtttcttgattttcttcttgatcttccgggcctccctttcgag

SEQ ID NO: 41703 - DNA, 80 bp, synthetic construct
  source 1..80: mol_type = other DNA
gaagggttgagtgtatcccggagagaggaatccacacggagaaagacagacaaatcacctccagaggaccccttcagcga

SEQ ID NO: 41704 - DNA, 80 bp, synthetic construct
  source 1..80: mol_type = other DNA
acaaagagctcttcgcgaggtataagaccatagcgataggtggagatgctaggagtcggaggagaccgaagcgaggagga

SEQ ID NO: 41705 - DNA, 80 bp, synthetic construct
  source 1..80: mol_type = other DNA
cctaaaatgttctgcaatcagctttcccattcctactctgccatttacaactgcaaccatcaactatgtttatttaaacc

SEQ ID NO: 41706 - DNA, 80 bp, synthetic construct
  source 1..80: mol_type = other DNA
ctcgagggccttccttcgtcggtgagaccgtctctcctcgtcggtgaagcctcccttgttactctttttccctgttccga

SEQ ID NO: 41707 - DNA, 80 bp, synthetic construct
  source 1..80: mol_type = other DNA
actccggacttaggggtcaaaggaaggacagggaggcaatccaccaggagatctcggagaactcacctccagaggacccc

SEQ ID NO: 41708 - DNA, 80 bp, synthetic construct
  source 1..80: mol_type = other DNA
cggggaactcggctatcttccccaactagccgggcccggatccccttccaacgaacggaggagactctggcggcgtggga

SEQ ID NO: 41709 - DNA, 80 bp, synthetic construct
  source 1..80: mol_type = other DNA
cggtgaatctcccctgcggggcaccctcctaggcccggagtctacttccatctgatctgttcggggcttcttcgccggtg

SEQ ID NO: 41710 - DNA, 80 bp, synthetic construct
  source 1..80: mol_type = other DNA
gaacagaaagcgctccgcgaggagtagatcatagcgatgggaggagatgctaggagttagaggagaccgaagcgaggagg

SEQ ID NO: 41711 - DNA, 80 bp, synthetic construct
  source 1..80: mol_type = other DNA
gagatgctaggagttagaggagaccgaagcgaggaggaaagcaaagaaagcaacggggctagtcggtgggtgttccgcct

SEQ ID NO: 41712 - DNA, 80 bp, synthetic construct
  source 1..80: mol_type = other DNA
ggaaagaggcgtgaggaaaagaaggagcgggcctcccgatccgagtggcccgacctccagatctggagggcactccgggc

SEQ ID NO: 41713 - DNA, 80 bp, synthetic construct
  source 1..80: mol_type = other DNA
agagggagtaaatggtaaagagcattggatcgtcggggggagtccccggaagggccaggagaactcaagattcggaaggt

SEQ ID NO: 41714 - DNA, 80 bp, synthetic construct
  source 1..80: mol_type = other DNA
gtcgggtggagtccccggaagggccaggagaactcaagattcggaaggtccccccaagacgctggagacatcctggaagg

SEQ ID NO: 41715 - DNA, 80 bp, synthetic construct
  source 1..80: mol_type = other DNA
ggtgaaagaggtcggatggaagagaggaggcgggctctccgattcgaggggcccggcgcccaggtttggagagcactccg

SEQ ID NO: 41716 - DNA, 80 bp, synthetic construct
  source 1..80: mol_type = other DNA
cgaacagaagggcgctagatgcgataggagtaagaccatagcgatggggagagatgctaggagttagaggagaccgaagc

SEQ ID NO: 41717 - DNA, 80 bp, synthetic construct
  source 1..80: mol_type = other DNA
gagcgcagggagaggcggtggagccatgggatgcccttcccgattccgtccatcccttcccccagggagtcgcccaggaa

SEQ ID NO: 41718 - DNA, 80 bp, synthetic construct
  source 1..80: mol_type = other DNA
gccggctgggcaacattccgaggggaccgtcccctcggtaatggcgaatgggaccccagatttccttccgattgcgaagg

SEQ ID NO: 41719 - DNA, 80 bp, synthetic construct
  source 1..80: mol_type = other DNA
aaattactggcactcccttagccatccgggtggacgtctgtcctccttcggatgcccaggtcggaccgcgaggaggtgga

SEQ ID NO: 41720 - DNA, 80 bp, synthetic construct
  source 1..80: mol_type = other DNA
gtcgaggagatgtctcccaagaaggaaaagagaattcaagattcggaggaattccccataacgctggagacatctcggaa

SEQ ID NO: 41721 - DNA, 80 bp, synthetic construct
  source 1..80: mol_type = other DNA
gcgaggagaaagcaaagaaagcagcgggctagtcagtgggtgttccgccccccgagaggggacgagtgaggcttatcccg

SEQ ID NO: 41722 - DNA, 80 bp, synthetic construct
  source 1..80: mol_type = other DNA
gggaatctctggagccatgggatgcccttcccgattccgtccatcccttcccccaaggggtcgcccaggaatggcaggac

SEQ ID NO: 41723 - DNA, 80 bp, synthetic construct
  source 1..80: mol_type = other DNA
atgagccaagtccgacgaagagtccggaaatgggagaggtggagaatcccccgagtgggcaaagacgagagggcggagac

SEQ ID NO: 41724 - DNA, 80 bp, synthetic construct
  source 1..80: mol_type = other DNA
gcccccgggcgctcccctcggttgtccctcgagggggttcacatccccaacccgcgggccggctactcttcttgcccttt

SEQ ID NO: 41725 - DNA, 80 bp, synthetic construct
  source 1..80: mol_type = other DNA
ttatcccggggaactcggctatcttccccaactagccggccccggatccccttccagacgaacgggaggacctcgcaatt

SEQ ID NO: 41726 - DNA, 80 bp, synthetic construct
  source 1..80: mol_type = other DNA
cggaggccagcagtaccatggtggaaccccgagtcccccactccacactccttccccccgcggggcctcccacctaaaga

SEQ ID NO: 41727 - DNA, 80 bp, synthetic construct
  source 1..80: mol_type = other DNA
actctgaggagaagacccccaagaggacaggaggttactcaagattcgggaacgaatcccccaaggccggtgaagctctc

SEQ ID NO: 41728 - DNA, 80 bp, synthetic construct
  source 1..80: mol_type = other DNA
ccgagcccgagcatgagccaagtccgacgaagggcccagagatgggaaagaggtggaacccccgaggtggcaaagtcgag

SEQ ID NO: 41729 - DNA, 80 bp, synthetic construct
  source 1..80: mol_type = other DNA
agagcggagacactctgaggagaagactcccaagaggacaagaagtgctcaagattcgggaacgaatccctaagacgccg

SEQ ID NO: 41730 - DNA, 80 bp, synthetic construct
  source 1..80: mol_type = other DNA
ccagaggaccccttcagcgaacagaagagcctgtcccagtcgaatagctccgtagcgatagggggagatgctaggagtga

SEQ ID NO: 41731 - DNA, 80 bp, synthetic construct
  source 1..80: mol_type = other DNA
tgaggcttatcccggagaactcggctatcttccccaactagccggccccggatccccttccaaatgatcgggaggtggcc

SEQ ID NO: 41732 - DNA, 80 bp, synthetic construct
  source 1..80: mol_type = other DNA
acggcagcgggagacccgcggtcccatggtgaacgcccgtgtcccccactccacactccttccccccgcggggcccgccg

SEQ ID NO: 41733 - DNA, 80 bp, synthetic construct
  source 1..80: mol_type = other DNA
tccacactccttccccccgcggggccccccgcttaaagatggaactccaccctccagggttcgctatccacccctttctt

SEQ ID NO: 41734 - DNA, 80 bp, synthetic construct
  source 1..80: mol_type = other DNA
cgagcatgagccgtgtccgacgaagagtccggagatgggagaggagggagatctccgaggaggcaaagacgagagtgcgg

SEQ ID NO: 41735 - DNA, 80 bp, synthetic construct
  source 1..80: mol_type = other DNA
agacactctgaggagaggactcccaagagggcaaagagagctcaagatccgggaacgaatccccaagacgccggtgaagc

SEQ ID NO: 41736 - DNA, 80 bp, synthetic construct
  source 1..80: mol_type = other DNA
tcttggaatggggaaaactggcgggatggtagagaagagcgagcctcccgatccgaagttcccctgaacttattggatct

SEQ ID NO: 41737 - DNA, 80 bp, synthetic construct
  source 1..80: mol_type = other DNA
atgagccaattccgaacgaagggaacgcggggacaggatcggaatccgagaggggatgagtggtaaagagcattggaacg

SEQ ID NO: 41738 - DNA, 80 bp, synthetic construct
  source 1..80: mol_type = other DNA
ctggttccctctcacgtccagcccatccccggtccgagcgaaggtggactccgggatgccttgcatgctggggacgaagc

SEQ ID NO: 41739 - DNA, 80 bp, synthetic construct
  source 1..80: mol_type = other DNA
gccggatggtcgagtagcatccagagggaggaagccacacggagttgggtagagaaatcacctccagaggaccccttcag

SEQ ID NO: 41740 - DNA, 80 bp, synthetic construct
  source 1..80: mol_type = other DNA
ttgggtagagaaatcacctccagaggaccccttcagcgaacagagaggtcagatgcgataggagtaagaccatagcgatg

SEQ ID NO: 41741 - DNA, 80 bp, synthetic construct
  source 1..80: mol_type = other DNA
cgaacagagaggtcagatgcgataggagtaagaccatagcgatggggggaaatgctaggagtaggaggagaccaaagcga

SEQ ID NO: 41742 - DNA, 80 bp, synthetic construct
  source 1..80: mol_type = other DNA
gaactcgacttatcgtccccacatagcagctcccggacccccttccaaagcgacctgggaggcgcttggagcgcggtgga

SEQ ID NO: 41743 - DNA, 80 bp, synthetic construct
  source 1..80: mol_type = other DNA
ccagtggagccatgggatgctcctcccgattccgtccatcccctcccccaaagggtcgcccaggaatggcaggaccccac

SEQ ID NO: 41744 - DNA, 80 bp, synthetic construct
  source 1..80: mol_type = other DNA
tcggagaaaaactcccaagaaggaaaaaagagaagacaagaaacggacgttttccccacgacgctggagacatcctggaa

SEQ ID NO: 41745 - DNA, 80 bp, synthetic construct
  source 1..80: mol_type = other DNA
ttatcccgtggaactcggcaaatcgtccccacatagcagtgcccggggccccttcaaaagggaccgagggtgtggctagg

SEQ ID NO: 41746 - DNA, 80 bp, synthetic construct
  source 1..80: mol_type = other DNA
ctctaacttctttcttgtattcacccattgctcgagggtctcttccctgcctccgcgattcttcttcgattccgcgcggc

SEQ ID NO: 41747 - DNA, 80 bp, synthetic construct
  source 1..80: mol_type = other DNA
acagagagctctaccccgcgaggagtaagaccatagcgataggagtggatgctaggagttaggggagaccgaagcgagga

SEQ ID NO: 41748 - DNA, 80 bp, synthetic construct
  source 1..80: mol_type = other DNA
cggaggtgatctacccaagaagaggaaagagaaagcaagagacggagactctccccacgacgctggagacatcctggaag

SEQ ID NO: 41749 - DNA, 80 bp, synthetic construct
  source 1..80: mol_type = other DNA
gtgagccaacttccgaacgaagatcccgcggaggcgagtcagcgcccgagagggagtggatggcaaagagcattggaaca

SEQ ID NO: 41750 - DNA, 80 bp, synthetic construct
  source 1..80: mol_type = other DNA
ggttgcccctcacgtccagcccctccccggtcctggtgaaggtggactccgggactccctgcatgctggggacgaagccg

SEQ ID NO: 41751 - DNA, 80 bp, synthetic construct
  source 1..80: mol_type = other DNA
cccccgggtgctcccctcggtccaccttcgagggggttcacacccccaaccgacgggccggctactcttctttctctttc

SEQ ID NO: 41752 - DNA, 80 bp, synthetic construct
  source 1..80: mol_type = other DNA
ctcgagggccttctttcgtcggtgatcctgcctctccttgtcggtgaacccccttccgagaggtctcttcctaggcccgg

SEQ ID NO: 41753 - DNA, 80 bp, synthetic construct
  source 1..80: mol_type = other DNA
agtctacctccatctggtccgttcgggcccttttcgctgggggagcccctcctccatccctgtccttctttccgagaatt

SEQ ID NO: 41754 - DNA, 80 bp, synthetic construct
  source 1..80: mol_type = other DNA
cctttgatgtttcccagccaggggttctcctcctcaagttttctgattttcttcttggtcttccgggtctccctctcgag

SEQ ID NO: 41755 - DNA, 80 bp, synthetic construct
  source 1..80: mol_type = other DNA
ttcctctaacttctttcttccattcacccactgctcgaggacgttctctctgtctccgcggtctttcttcgattcggagc

SEQ ID NO: 41756 - DNA, 80 bp, synthetic construct
  source 1..80: mol_type = other DNA
ctggcgaagggcggcagtcctcagtactcttactcttttctgtaaagaggagactgctggacgctccgcccaagtccagg

SEQ ID NO: 41757 - DNA, 80 bp, synthetic construct
  source 1..80: mol_type = other DNA
cgaagggttgaggtacccggagagggggatccacacggagataagcagagaaatcacctccggaagaccccttcagcgaa

SEQ ID NO: 41758 - DNA, 80 bp, synthetic construct
  source 1..80: mol_type = other DNA
gataagcagagaaatcacctccggaagaccccttcagcgaacagaaggctctgacacgtgaggagtaagagcgtagcgat

SEQ ID NO: 41759 - DNA, 80 bp, synthetic construct
  source 1..80: mol_type = other DNA
cagaaggctctgacacgtgaggagtaagagcgtagcgatggggggagatgctaggagttagaggagaccggagcgaggag

SEQ ID NO: 41760 - DNA, 80 bp, synthetic construct
  source 1..80: mol_type = other DNA
agcatgggaggccagtggagccatgggatgcccttcccaacgctcgtccatcaccttcccccgagggtcgcccaggaatg

SEQ ID NO: 41761 - DNA, 80 bp, synthetic construct
  source 1..80: mol_type = other DNA
tcgtccatcaccttcccccgagggtcgcccaggaatggcgggaccccactctgacagggtccgcgttccatcctttctta

SEQ ID NO: 41762 - DNA, 80 bp, synthetic construct
  source 1..80: mol_type = other DNA
tcggaggaaattccccaagaggatcaagagaactcagaattcggagggttcccccacgacgctggagacatcctggaagg

SEQ ID NO: 41763 - DNA, 80 bp, synthetic construct
  source 1..80: mol_type = other DNA
ataaccaagttccgagcgaggagaccgcggggacaggatcagtgcccgagaggggatgaatggtaaagagcattggaacg

SEQ ID NO: 41764 - DNA, 80 bp, synthetic construct
  source 1..80: mol_type = other DNA
ccctggcctcccctcacatccagcccctccccggtcctggagaaggtggactccggaactccttgcatgctcgggacgaa

SEQ ID NO: 41765 - DNA, 80 bp, synthetic construct
  source 1..80: mol_type = other DNA
ttcctctaacttctttcttccattcacccactgctcgagaagctcttctctgtccgcgcgtttctttctcgactcggacc

SEQ ID NO: 41766 - DNA, 80 bp, synthetic construct
  source 1..80: mol_type = other DNA
agtatgggaggccggtggagccatgggtgatccttccacgtctcgtccaaccccttcccccgagggtcgcccagtgatgg

SEQ ID NO: 41767 - DNA, 80 bp, synthetic construct
  source 1..80: mol_type = other DNA
aaccccttcccccgagggtcgcccagtgatggcggaaccccactcaactggggtccgcgttccatcctttcttacctgat

SEQ ID NO: 41768 - DNA, 80 bp, synthetic construct
  source 1..80: mol_type = other DNA
tcggaggaagccccccaagaggaaaaagagaaagcaagaatcggacgcattccccaagacgctggagacatcctggaagg

SEQ ID NO: 41769 - DNA, 80 bp, synthetic construct
  source 1..80: mol_type = other DNA
ctcctctaaccttttccttccactcacccactgctcgagaacctcttctcttcccctgcggctcttcttcgattcggaac

SEQ ID NO: 41770 - DNA, 80 bp, synthetic construct
  source 1..80: mol_type = other DNA
tcgacttatcgtccccacatagcagtttccaggacccccttccaaaaagactgaggggggtggctaggaacaaggtggac

SEQ ID NO: 41771 - DNA, 80 bp, synthetic construct
  source 1..80: mol_type = other DNA
atgggccacagttccgaccgaagagtccgacgggtgaggaggccgacccgagaggggtctcctgttaagaggcgaggaaa

SEQ ID NO: 41772 - DNA, 80 bp, synthetic construct
  source 1..80: mol_type = other DNA
ctcgtcatctctggtcaacctcctgagttcctcttcttcctccttgctgaggctcttccctcctccggagagctgtttct

SEQ ID NO: 41773 - DNA, 80 bp, synthetic construct
  source 1..80: mol_type = other DNA
aatgggaaggaggaaggtgcaaaagaaggagcgggcctcccgatccgagggccccaacgacagtttgggaggcactccgg

SEQ ID NO: 41774 - DNA, 80 bp, synthetic construct
  source 1..80: mol_type = other DNA
tcgcagaaacctctcccaagaaggtccaagagagctctcaagaagaggaagtttccccaagacgctgaggagactcttgg

SEQ ID NO: 41775 - DNA, 80 bp, synthetic construct
  source 1..80: mol_type = other DNA
catccgcttcgtctcttgctttgacccacttcgagaggatttcctcccttcccttccgggttctcttcgcatcggcgtgg

SEQ ID NO: 41776 - DNA, 80 bp, synthetic construct
  source 1..80: mol_type = other DNA
atgggccaggtccgacgaagagtccggagatgggagaggagtggaatccccgaggtggcgaagtcgagagagcggagaca

SEQ ID NO: 41777 - DNA, 80 bp, synthetic construct
  source 1..80: mol_type = other DNA
cgtggaactcggctatcttccccaactagccggccccggatccccttccaaacgatcgggggtggtcccggcagcgtgtg

SEQ ID NO: 41778 - DNA, 80 bp, synthetic construct
  source 1..80: mol_type = other DNA
ctctgaggagaggactcccaagaggacaaggagcgcccaagatccgggaacgaatccctagaacgccggtgaagctctcg

SEQ ID NO: 41779 - DNA, 80 bp, synthetic construct
  source 1..80: mol_type = other DNA
gtcggaggaaaccccccaagaaggaaaaaagagaaagcaagagacggacgatacccccaagacgctggagacatcctgga

SEQ ID NO: 41780 - DNA, 80 bp, synthetic construct
  source 1..80: mol_type = other DNA
atgggccaagtccgacgaagagtccggagatgggagaggaggagaatccccgaaggaggcaaagacgagatggcgaagac

SEQ ID NO: 41781 - DNA, 80 bp, synthetic construct
  source 1..80: mol_type = other DNA
cttctgcctcttctctcgctttgacccacttcgagaggatgtcctcccttcccttccgggatctcttcggatcggcgagg

SEQ ID NO: 41782 - DNA, 80 bp, synthetic construct
  source 1..80: mol_type = other DNA
gaatggggaaaacaggcgggatggtagaaaggagcgagcctcccgatccgagttcccctgaacctattggatctggagac

SEQ ID NO: 41783 - DNA, 80 bp, synthetic construct
  source 1..80: mol_type = other DNA
ggggaactcggctatcttccccgactagccggcccggatccccttccagacgaacgggtggacctcgacagatcgtggtg

SEQ ID NO: 41784 - DNA, 80 bp, synthetic construct
  source 1..80: mol_type = other DNA
ccggcggaaccatggtggacccccgtagccccccactccacactccttccccccgcggggcccgccatccaaagaagaaa

SEQ ID NO: 41785 - DNA, 80 bp, synthetic construct
  source 1..80: mol_type = other DNA
acctcggggagaactcccaagaagacaaggagcgactcaagatccgggaacgaatccccaagacgccggtgaaactcctg

SEQ ID NO: 41786 - DNA, 80 bp, synthetic construct
  source 1..80: mol_type = other DNA
tttcttgaaagaggagactgctggacgctccgcccgagtccgagcatgggccgagtccgacgaagagtccggagatggga

SEQ ID NO: 41787 - DNA, 80 bp, synthetic construct
  source 1..80: mol_type = other DNA
cgagtccgagcatgggccgagtccgacgaagagtccggagatgggagaggtggaggatcccccggaggggcaaggacgag

SEQ ID NO: 41788 - DNA, 80 bp, synthetic construct
  source 1..80: mol_type = other DNA
gtgaagctctcggaatgaggaaaaacaggcaggatggaagaaaggagcgagcctcccgatccgaggaccccttgaaccta

SEQ ID NO: 41789 - DNA, 80 bp, synthetic construct
  source 1..80: mol_type = other DNA
ctcctgtcctttccaattattcctttgatgtttcccagccagggattttcgtcctctagtttcttgacggtcttccttgc

SEQ ID NO: 41790 - DNA, 80 bp, synthetic construct
  source 1..80: mol_type = other DNA
tcggcggcgtgggaccagcggtaccatggtgaacccccgtagccccctactccacactccttccgcccgcgaggcccgcc

SEQ ID NO: 41791 - DNA, 80 bp, synthetic construct
  source 1..80: mol_type = other DNA
gatcgtcatcgatggtcagcctctcgagttcctcttcttcctccctgctgagggtctttcctcccgcggacagctgcttc

SEQ ID NO: 41792 - DNA, 80 bp, synthetic construct
  source 1..80: mol_type = other DNA
gatgaaactccaccctccagggtccgccatcctacccttttcttacctttggccggcatggtcccagcctccccgctggc

SEQ ID NO: 41793 - DNA, 80 bp, synthetic construct
  source 1..80: mol_type = other DNA
atgggccacagttccgaccgaagggtccgacgggagaggaggtcagcccgagagggtgtcgactggtaagaggcgaggaa

SEQ ID NO: 41794 - DNA, 80 bp, synthetic construct
  source 1..80: mol_type = other DNA
ctctatcctttttcttccagcgacccactgctcgaggatgtcctcccttccccctcggttcttcttctggtcggaccggc

SEQ ID NO: 41795 - DNA, 80 bp, synthetic construct
  source 1..80: mol_type = other DNA
aatgggaaaggggaaggtggaaaagaaggtgcgggcctcccgatccgagggtcccggcgacagattgggaaacactccgg

SEQ ID NO: 41796 - DNA, 80 bp, synthetic construct
  source 1..80: mol_type = other DNA
gccgaatggatgagattcctccagagggagaagccacacggagataaacagagaaatcacctccagaggaccccttcagc

SEQ ID NO: 41797 - DNA, 80 bp, synthetic construct
  source 1..80: mol_type = other DNA
agggtgtcgactggtaagaggcgaggaaatcggggggactctcccaagaaggtccaagagaaacctcaagaagaggattt

SEQ ID NO: 41798 - DNA, 80 bp, synthetic construct
  source 1..80: mol_type = other DNA
atcggggggactctcccaagaaggtccaagagaaacctcaagaagaggatttttccccaagacgctgaggaagctctcgg

SEQ ID NO: 41799 - DNA, 80 bp, synthetic construct
  source 1..80: mol_type = other DNA
tcccctgcggggcaccttcctagatccggagtctatttccatctgttccattcggggcctcttcgccggtggagccccct

SEQ ID NO: 41800 - DNA, 80 bp, synthetic construct
  source 1..80: mol_type = other DNA
ctcgtcctccttggccaacctcccgagttcctcttcttcctccttgctgaggctcttccctcctccggcgagctgcctct

SEQ ID NO: 41801 - DNA, 80 bp, synthetic construct
  source 1..80: mol_type = other DNA
ggaaatcgaggggaactctcccaagaaggttcaagagaaaatccaagaagaggaatcttccccaagacgctgaggaaact

SEQ ID NO: 41802 - DNA, 80 bp, synthetic construct
  source 1..80: mol_type = other DNA
cctggaatgggaaaggtgaaggtggaaaagaaggggtgggcccccgatccgagggtcccgacaacagactgggaaacact

SEQ ID NO: 41803 - DNA, 80 bp, synthetic construct
  source 1..80: mol_type = other DNA
tccgagggtcccgacaacagactgggaaacactctcgggtcgaatggacgggactcccccagagggagaagccacacgga

SEQ ID NO: 41804 - DNA, 80 bp, synthetic construct
  source 1..80: mol_type = other DNA
ctcgggtcgaatggacgggactcccccagagggagaagccacacggagatgagcagagaaatcacctccagaggacccct

SEQ ID NO: 41805 - DNA, 80 bp, synthetic construct
  source 1..80: mol_type = other DNA
cttccttgccttccggagcctcctctcgaggtcttccgcttcttctcttgttttgacccacttcgagagggtctcctccc

SEQ ID NO: 41806 - DNA, 80 bp, synthetic construct
  source 1..80: mol_type = other DNA
gtgaagctcctggaatgaggaaaatgggtgggatggtagaaaagagcgagcctcccgatccgaggttcccctgaacttat

SEQ ID NO: 41807 - DNA, 80 bp, synthetic construct
  source 1..80: mol_type = other DNA
ttggctccgagtgaggcttatcccggggaactcggctatcttccccaactagccggtcccggatcctcttccaaacgaac

SEQ ID NO: 41808 - DNA, 80 bp, synthetic construct
  source 1..80: mol_type = other DNA
cccaactagccggtcccggatcctcttccaaacgaacgggaggacctcggcggttcgggagccggcggctccatggtgaa

SEQ ID NO: 41809 - DNA, 80 bp, synthetic construct
  source 1..80: mol_type = other DNA
ggcggttcgggagccggcggctccatggtgaacccccgcagtcccccactccacactccttccccccgcgaggcccacca

SEQ ID NO: 41810 - DNA, 80 bp, synthetic construct
  source 1..80: mol_type = other DNA
tccaaagaagaaactccaccctccagggtccgccatcctacccttttcttacctttggccggcatggtcccagcctcctc

SEQ ID NO: 41811 - DNA, 80 bp, synthetic construct
  source 1..80: mol_type = other DNA
ctccctcccctttcccgtcctttcctagtattcctttgatgtttcccagccagggattttcgtcctcaagtttcttgaca

SEQ ID NO: 41812 - DNA, 80 bp, synthetic construct
  source 1..80: mol_type = other DNA
agttaccctttattggaggttacactcgaggagtggaaggcgaggagggggggtcggactagttccccatggaaactgcc

SEQ ID NO: 41813 - DNA, 80 bp, synthetic construct
  source 1..80: mol_type = other DNA
ggtctcctcggacgtcgagcccgtctcccgttctggagaagggggactccgggacccctagcagttgaggaacgaagccg

SEQ ID NO: 41814 - DNA, 80 bp, synthetic construct
  source 1..80: mol_type = other DNA
cccccgggcgctcccctcggtggtccttcgggagggttcacatccccaactcgcgggccggctattcttcttgctctttg

SEQ ID NO: 41815 - DNA, 80 bp, synthetic construct
  source 1..80: mol_type = other DNA
ccttcccttccgggatctcttcgaatcggcgaggctcatctcggcagaggcggcgatcctcagtactcttactcttttct

SEQ ID NO: 41816 - DNA, 80 bp, synthetic construct
  source 1..80: mol_type = other DNA
tgaaagaggagactgctggacgccccgcccgagcccgagcatgggccaagtccggcgaagagtccggagatgggagagga

SEQ ID NO: 41817 - DNA, 80 bp, synthetic construct
  source 1..80: mol_type = other DNA
gagaatccccgagggaggcaaagatgagggagcggagacactccggggagaactcccaagaagacaaggagcgaatcaag

SEQ ID NO: 41818 - DNA, 80 bp, synthetic construct
  source 1..80: mol_type = other DNA
attcgggaacggatccccgagacgccggtgaagctctcggaatggggaaaacagtcgggaaggtagaacggagcgagcct

SEQ ID NO: 41819 - DNA, 80 bp, synthetic construct
  source 1..80: mol_type = other DNA
cccgatccgaggatccctgaacctatcggatctggagactccgacccaaaggggtcaaaggtaggacagggaggcaatcc

SEQ ID NO: 41820 - DNA, 80 bp, synthetic construct
  source 1..80: mol_type = other DNA
accaggagttctcggaaaacccacctccagaggaccccttcagcgaacggaggagcctgccccggtcgaacagtcccgta

SEQ ID NO: 41821 - DNA, 80 bp, synthetic construct
  source 1..80: mol_type = other DNA
gcgatgggaggagatgctaggagtagggagagaccggtgcgagagaggcaagacaagagagcagcggggctagcgagtgg

SEQ ID NO: 41822 - DNA, 80 bp, synthetic construct
  source 1..80: mol_type = other DNA
ttatcccggggaactcggctatcttccccaactagccgggcccggatccccttccaaacgatcgggtggactccggcggc

SEQ ID NO: 41823 - DNA, 80 bp, synthetic construct
  source 1..80: mol_type = other DNA
ccggaggacccgcagccccatggtggaaccccgtagtcccccactccacactccttcccgccgcggggcccccctgtcta

SEQ ID NO: 41824 - DNA, 80 bp, synthetic construct
  source 1..80: mol_type = other DNA
aagaaggaactccaccccccagggttcgctatcctacccttttcttacctttggccggcatggtcccagcctcctcgctg

SEQ ID NO: 41825 - DNA, 80 bp, synthetic construct
  source 1..80: mol_type = other DNA
cgtccgcatcttctcttgccttgatccaccttgagaggatctcctcccttcccttccggggtctcttcggatcggcgtgg

SEQ ID NO: 41826 - DNA, 80 bp, synthetic construct
  source 1..80: mol_type = other DNA
ccgagcatgagccaagtccgacgaagagtccggagatgggagaggaggggacctccgagggaaccaaggacgaaggtgcg

SEQ ID NO: 41827 - DNA, 80 bp, synthetic construct
  source 1..80: mol_type = other DNA
gagacactctgaggagaggtctcccaagaggacaagaaggactcaagattcgggaacgaatccccaagacgccggtgaag

SEQ ID NO: 41828 - DNA, 80 bp, synthetic construct
  source 1..80: mol_type = other DNA
ctctcggaatgaggaaaacaggcgggatggaagaaaggagcgagcctcccgatccgaggatcccttgaacctattggatc

SEQ ID NO: 41829 - DNA, 80 bp, synthetic construct
  source 1..80: mol_type = other DNA
atgggccatctccgagcgaagattccgcgggtgcgggatcagctcccgagaggggaagaatggcaaagagcattggaacg

SEQ ID NO: 41830 - DNA, 80 bp, synthetic construct
  source 1..80: mol_type = other DNA
tcggaggaagtctcccaagaagaaaaaaagagaaaccaagaatcggacgctttccccacgacgctggagacatcttggaa

SEQ ID NO: 41831 - DNA, 80 bp, synthetic construct
  source 1..80: mol_type = other DNA
gacgagtgaggcttatcccggggaattcgacttatcgtccccacatagcagatgcccggacccccttccaaaatgaccga

SEQ ID NO: 41832 - DNA, 80 bp, synthetic construct
  source 1..80: mol_type = other DNA
ttcgacttatcgtccccacatagcagatgcccggacccccttccaaaatgaccgagggaggttactaggagcatggggtg

SEQ ID NO: 41833 - DNA, 80 bp, synthetic construct
  source 1..80: mol_type = other DNA
tcggaggtaattacccaagaaggaaaaaagagaaagcaagagacggaggatctccccataacgctggagacatcctggaa

SEQ ID NO: 41834 - DNA, 80 bp, synthetic construct
  source 1..80: mol_type = other DNA
atgagccaagttccgggcgaggagtcgcgaggggcaggatcagctcccgagaggggttaccaggtaaagagcattggaac

SEQ ID NO: 41835 - DNA, 80 bp, synthetic construct
  source 1..80: mol_type = other DNA
ggctcatctcggcaagaggcggcagtcccaaaatctcttactctttcctataaagaggagattgctggactcgccgccca

SEQ ID NO: 41836 - DNA, 80 bp, synthetic construct
  source 1..80: mol_type = other DNA
tcggcaagaggcggcagtcccaaaatctcttactctttcctataaagaggagattgctggactcgccgcccaagcctgag

SEQ ID NO: 41837 - DNA, 80 bp, synthetic construct
  source 1..80: mol_type = other DNA
aggggaaggaagggcggatggaagaaaagggagggacccccgatccgagaggcccaaccaccaagtttggagagcacttc

SEQ ID NO: 41838 - DNA, 80 bp, synthetic construct
  source 1..80: mol_type = other DNA
gggcccaaccaccaagtttggagagcacttccggccgaagggttgagtgcacccagagggaggaatccacacggagaaag

SEQ ID NO: 41839 - DNA, 80 bp, synthetic construct
  source 1..80: mol_type = other DNA
ggacgagtgaggcttatcccggggaactcggcgaattgtcccgacatagcagagcccgggctcccttccaaaaagaccga

SEQ ID NO: 41840 - DNA, 80 bp, synthetic construct
  source 1..80: mol_type = other DNA
ttatcccggggaactcggcgaattgtcccgacatagcagagcccgggctcccttccaaaaagaccgagggtggagcttgg

SEQ ID NO: 41841 - DNA, 80 bp, synthetic construct
  source 1..80: mol_type = other DNA
gacagggggagccagtggagccatgggatgctcttcccgattccgtccaaccccttccccaagcgtcgcccaggaatggc

SEQ ID NO: 41842 - DNA, 80 bp, synthetic construct
  source 1..80: mol_type = other DNA
gtcggaggaactctcccaagaaggaagaagaagaattcaagaatcggacgctttccccataacgctggagacatcttgga

SEQ ID NO: 41843 - DNA, 80 bp, synthetic construct
  source 1..80: mol_type = other DNA
agtctacttccatccggtccgtccgggccctcttcgccgggggagccccctctccatccttgtctttcttcccgagaatt

SEQ ID NO: 41844 - DNA, 80 bp, synthetic construct
  source 1..80: mol_type = other DNA
atcctctaacttctttcttgcatctacccactgctcgagagtctcttccctgcctccgcggttcttcttcgattccgagc

SEQ ID NO: 41845 - DNA, 80 bp, synthetic construct
  source 1..80: mol_type = other DNA
gccgaagggtagaaagtacccagagcgaggaatccactcggagaaaagcagacaaatcacctccagaggaccccttcagc

SEQ ID NO: 41846 - DNA, 80 bp, synthetic construct
  source 1..80: mol_type = other DNA
aacaaaggggaccagtggagccatgggatgcccttcccgattccgtccatccctcccccccaagggtcgcccaggaatgg

SEQ ID NO: 41847 - DNA, 80 bp, synthetic construct
  source 1..80: mol_type = other DNA
ccttctctcgtcatcctcggtcaacctcttaagttcctcttcttcctccctgctgaggttcttccctccggcgcttagct

SEQ ID NO: 41848 - DNA, 80 bp, synthetic construct
  source 1..80: mol_type = other DNA
gaggtactcctcccaagaatgaaacaagagaaggcaagaatcggatgctccccatgacgctggagacaccttggaagggg

SEQ ID NO: 41849 - DNA, 80 bp, synthetic construct
  source 1..80: mol_type = other DNA
ctgagccatctccgaacgaagatcccgccaggacaggatcggatcccgagagggagtggctggcaaagagcattggaacg

SEQ ID NO: 41850 - DNA, 80 bp, synthetic construct
  source 1..80: mol_type = other DNA
tcctcggtcaacctcttaagttccccttcttcctcctcgctgagctccttccctcccgccctcagctgcttctgcttgtt

SEQ ID NO: 41851 - DNA, 80 bp, synthetic construct
  source 1..80: mol_type = other DNA
ttcctctaacttctttcttccagctatccactgctcgagggtcccctctctgtccgggcggcttttcttcgattcggaac

SEQ ID NO: 41852 - DNA, 80 bp, synthetic construct
  source 1..80: mol_type = other DNA
gggcccagccaccaagtttggagagcactccggcccgaagggttgagagtacccagaaggaggagtccacacggagaaaa

SEQ ID NO: 41853 - DNA, 80 bp, synthetic construct
  source 1..80: mol_type = other DNA
tcggaaggtgccccccaagaagcaaggagaacttcaggaatcggacgggtttccccacaacgctgggaacagcttggaag

SEQ ID NO: 41854 - DNA, 80 bp, synthetic construct
  source 1..80: mol_type = other DNA
gtgagcctcattccgaccgaagggtgcgatgggggagggggatcttccgagagtggtcatccactaaagagaaggagaaa

SEQ ID NO: 41855 - DNA, 80 bp, synthetic construct
  source 1..80: mol_type = other DNA
tctcctatctttcctcctgtggccacccactgctcgagaattcctcccgtcctctcgctctccttcttgtcggtacggct

SEQ ID NO: 41856 - DNA, 80 bp, synthetic construct
  source 1..80: mol_type = other DNA
cgcggtggagccatggggtccgtgggatgctcttcccgattccgtccaacccccccccgagaggtccccccaggaatggc

SEQ ID NO: 41857 - DNA, 80 bp, synthetic construct
  source 1..80: mol_type = other DNA
acccaagttgtttcatattcagcttttcccctcctgcatcactacccacagtcatgactattaaccatgttcattttaat

SEQ ID NO: 41858 - DNA, 80 bp, synthetic construct
  source 1..80: mol_type = other DNA
tgctcatgtaatgctgttttgctaattttgtcttgctatctttcatttcaaatacttaaagggctgtgcggcaacgatat

SEQ ID NO: 41859 - DNA, 80 bp, synthetic construct
  source 1..80: mol_type = other DNA
cccctcctcttatgtccagtccttccccggttcgggaaaaggtggactccgggactccttgcaggttggggacgaagccg

SEQ ID NO: 41860 - DNA, 80 bp, synthetic construct
  source 1..80: mol_type = other DNA
tgtccctcttgtcggaccggctcatctcggcaagaggcaggcggtcctcagtgctcttactcttttctgtaaagaggaga

SEQ ID NO: 41861 - DNA, 80 bp, synthetic construct
  source 1..80: mol_type = other DNA
ctgctggactcgctgccccagtccgaggtgagcctcagtaccgaccgaggggagcgatgggagaggagtgcttcccgagg

SEQ ID NO: 41862 - DNA, 80 bp, synthetic construct
  source 1..80: mol_type = other DNA
ggggtacccactaaaggaaagaggggacacttcgaggaggatcactcccaagaagttccaagagaatctcaagaatgagg

SEQ ID NO: 41863 - DNA, 80 bp, synthetic construct
  source 1..80: mol_type = other DNA
agggtccccatgacgctggagaaatctaggaatgggaaagaggaaggcggaagagtggagcggcctcccgatccgaatgg

SEQ ID NO: 41864 - DNA, 80 bp, synthetic construct
  source 1..80: mol_type = other DNA
cccgactgccgaatttggagagcactccgggccgtacggtcgggaaccctccagaggaaagaagccacacggagtagaac

SEQ ID NO: 41865 - DNA, 80 bp, synthetic construct
  source 1..80: mol_type = other DNA
ccggaggtctctctcgagttctcctattcttccccttgtggtcacccattgctcgaggatgtcctcccgtcctcctcgct

SEQ ID NO: 41866 - DNA, 80 bp, synthetic construct
  source 1..80: mol_type = other DNA
catgagccaagtccgacgaagagtccggagatgggagagaggagggatccccggggtggcaagaacgagagagcggagag

SEQ ID NO: 41867 - DNA, 80 bp, synthetic construct
  source 1..80: mol_type = other DNA
agtcgacctccatccgatccgttcgggcccttttcgccgggggagctccctccccagttccgacctttccaattattcct

SEQ ID NO: 41868 - DNA, 80 bp, synthetic construct
  source 1..80: mol_type = other DNA
ttgatgtttcccagccagggattgtcgtcctctagcttcttgatagttcttcttgccttccggagcttcctctcgagctc

SEQ ID NO: 41869 - DNA, 80 bp, synthetic construct
  source 1..80: mol_type = other DNA
cgtccgcttcatctcttgtcttgacccacttcgagaggatttcctccctgcccttccgggatctcttcggatcggcgagg

SEQ ID NO: 41870 - DNA, 80 bp, synthetic construct
  source 1..80: mol_type = other DNA
tcggaatgaggaaaacggtcgggatggtagaagagagcgagcctcccgctccgagaggtccactgaacctatcggatctg

SEQ ID NO: 41871 - DNA, 80 bp, synthetic construct
  source 1..80: mol_type = other DNA
gagactccgacctcaaggggtcaaaggtagaacagggaggcaatccaccaggagttttcggaaaacccacctccggagga

SEQ ID NO: 41872 - DNA, 80 bp, synthetic construct
  source 1..80: mol_type = other DNA
cgagcgagaggagcaagacaagagagcagcggggctagcgagtggatgttccgccccccgtgggctccgagtgaggctta

SEQ ID NO: 41873 - DNA, 80 bp, synthetic construct
  source 1..80: mol_type = other DNA
tcccggggaactcggccaacttccccaactagccggtcccgggtccccttccaaacgagcgggtggaccttgcgccccgg

SEQ ID NO: 41874 - DNA, 80 bp, synthetic construct
  source 1..80: mol_type = other DNA
ggggcccgcagctccatggtggactcccgagcccgccactccacactccttccccccgcggggccccccattcaaggaaa

SEQ ID NO: 41875 - DNA, 80 bp, synthetic construct
  source 1..80: mol_type = other DNA
aaactccaccctccagggttcgctattctaccctttcttacctttggccggcatggtcccagcctccccgctggcgccgg

SEQ ID NO: 41876 - DNA, 80 bp, synthetic construct
  source 1..80: mol_type = other DNA
ctgggcaacattccgaggggaccgtccctcggcaatggcgaatgggacccaagacctccatgattcccagagagaatcgg

SEQ ID NO: 41877 - DNA, 80 bp, synthetic construct
  source 1..80: mol_type = other DNA
gctccgaaggaaagacccccaagaaggacaagagatgaaccaagattcgagaacgaatccccaaaacgccggtgggcatc

SEQ ID NO: 41878 - DNA, 80 bp, synthetic construct
  source 1..80: mol_type = other DNA
gaggtgactgggcattccctttgccatccgagtggacgctcgtcctccttcggatgcccaggtcggaccgcgaggaggtg

SEQ ID NO: 41879 - DNA, 80 bp, synthetic construct
  source 1..80: mol_type = other DNA
ttcggtgatccttcctctccttgtcggtgaaatctcccctgcggggcaccttcctaggcccggagtctacttccatctga

SEQ ID NO: 41880 - DNA, 80 bp, synthetic construct
  source 1..80: mol_type = other DNA
ggtctcccctcacgtccagcccgtccccggttcgtgcgaaggtggactccgggattccttgcatgctggggacgaagccg

SEQ ID NO: 41881 - DNA, 80 bp, synthetic construct
  source 1..80: mol_type = other DNA
gagttcctcttcttcctccttgctgaggctcttccctcctccggcgagctgtttcttcttgttctcgagggacttccttc

SEQ ID NO: 41882 - DNA, 80 bp, synthetic construct
  source 1..80: mol_type = other DNA
gaggaaatcggagggaattctcccaagaaggtccaggagaaattccaagaagaggatttttccccaagacgctgaggaaa

SEQ ID NO: 41883 - DNA, 80 bp, synthetic construct
  source 1..80: mol_type = other DNA
tctgttcggggcttcttcgccgggggagccccctctccatccttatccttctttccgattattcctttgatgtttcccag

SEQ ID NO: 41884 - DNA, 80 bp, synthetic construct
  source 1..80: mol_type = other DNA
ctctccgcgtcggtgaagcctcccttgctactctttttccctggtccggagtcgacctccatccgatctgttcgggatct

SEQ ID NO: 41885 - DNA, 80 bp, synthetic construct
  source 1..80: mol_type = other DNA
cctccttgctgagggactttcctcctgcggatagctgcttcttcttgttctcgagggccttccttcgtcggtggtcccgt

SEQ ID NO: 41886 - DNA, 80 bp, synthetic construct
  source 1..80: mol_type = other DNA
ccgagcatgggccaagtccgacgaagagtccggagatgggagtggagtgaaaaccccgaggaggcaaagtcgagagagcg

SEQ ID NO: 41887 - DNA, 80 bp, synthetic construct
  source 1..80: mol_type = other DNA
gagacactctgaggagaagacccccaagaagacaagaagtgactcaagatccgggaacggttccccaaaacgccggtgaa

SEQ ID NO: 41888 - DNA, 80 bp, synthetic construct
  source 1..80: mol_type = other DNA
gaccccttcagcgaacagaagagcctatcccggtcgaacagtcccgtagcgataggtggagatgctaggagtagggagag

SEQ ID NO: 41889 - DNA, 80 bp, synthetic construct
  source 1..80: mol_type = other DNA
cttcgccgggggagctccctccccattcttgtcctttccaattattcctttgatgtttcccagccagggattctcgtcct

SEQ ID NO: 41890 - DNA, 80 bp, synthetic construct
  source 1..80: mol_type = other DNA
ccgagcatgggcaaagtccgaagaagagcccggagatgggacagggggaggatccccgaggaggcaaagacgagagagcg

SEQ ID NO: 41891 - DNA, 80 bp, synthetic construct
  source 1..80: mol_type = other DNA
gggtttctctgaggagaggactcccaagaaggcaaagagagattcaagatccgggaacgaatccccaggacgccggtgaa

SEQ ID NO: 41892 - DNA, 80 bp, synthetic construct
  source 1..80: mol_type = other DNA
gctctcggaatgaggaaaattggcgggatggtagagaagagcgagcctcccgatccgaggtttccctgaacctattggat

SEQ ID NO: 41893 - DNA, 80 bp, synthetic construct
  source 1..80: mol_type = other DNA
cgatctgttcgggatctcttcgccgggggagctccctccccaatcccgctctttcctattattcctttgatgtttcccag

SEQ ID NO: 41894 - DNA, 80 bp, synthetic construct
  source 1..80: mol_type = other DNA
actctttttccctggtccggagtcgacctccatccgatctgttcgggctcttttcgccgggggagctccctcccctttcc

SEQ ID NO: 41895 - DNA, 80 bp, synthetic construct
  source 1..80: mol_type = other DNA
cgtccgcgtcttcccttgctttgacccacttcgtgaggatttcctcccttcccttccgggatctcttctgttcggcaagg

SEQ ID NO: 41896 - DNA, 80 bp, synthetic construct
  source 1..80: mol_type = other DNA
agctctcggaatgaggaaaatgggcgggaaggtagaaaggagcgagcctcccgatccgaggagccctgaacttattggat

SEQ ID NO: 41897 - DNA, 80 bp, synthetic construct
  source 1..80: mol_type = other DNA
cgtcctttccaattattcctttgatgtttcccagccagggattttcgtcctcaagtttcttgatagtcttctttgtcttc

SEQ ID NO: 41898 - DNA, 80 bp, synthetic construct
  source 1..80: mol_type = other DNA
cagaggccccgcagctccatggtgaacgcccgtagccccctgctccacactccttcccccccgcggggccccccgtctaa

SEQ ID NO: 41899 - DNA, 80 bp, synthetic construct
  source 1..80: mol_type = other DNA
ggcactccctttgccatccgagtggacgtctgtcctccttcggatgcccaggtcggaccgcggggaggtggagatgccat

SEQ ID NO: 41900 - DNA, 80 bp, synthetic construct
  source 1..80: mol_type = other DNA
gcggcgatcctcagtactcttactcttttcttgaaagaggagactgctggacgccccgcccgagcccgagcatgagccaa

SEQ ID NO: 41901 - DNA, 80 bp, synthetic construct
  source 1..80: mol_type = other DNA
gtccgacgaagaggccggagataggaaaggagtggaatccccgaaggaggcaaagtcgagagggcggaaacactctgagg

SEQ ID NO: 41902 - DNA, 80 bp, synthetic construct
  source 1..80: mol_type = other DNA
aacagaagagcctgtcccggtcgaattgtcccgtagcgatgagaggagatgctaggagtagggagagaccaaagcgagag

SEQ ID NO: 41903 - DNA, 80 bp, synthetic construct
  source 1..80: mol_type = other DNA
ctcggctatcttccccaactagccggcccggatcccttccaaacgagtggtgggacctcggcggttcggaggacccgcgg

SEQ ID NO: 41904 - DNA, 80 bp, synthetic construct
  source 1..80: mol_type = other DNA
tcccatggtgaactccgtagccccccactccacactccttccccccgcggggccccccatccaaagatggaactccactc

SEQ ID NO: 41905 - DNA, 80 bp, synthetic construct
  source 1..80: mol_type = other DNA
gccggcatggtcccagcctcctcgctggcgccggctggccaacattccgaggtggaccgtccctcggtaatggcgaatgg

SEQ ID NO: 41906 - DNA, 80 bp, synthetic construct
  source 1..80: mol_type = other DNA
gacccaagacctccaagattcccaaagagaatcgggaggtgactgggcattccctttgccatccgagtggacgtttgtcc

SEQ ID NO: 41907 - DNA, 80 bp, synthetic construct
  source 1..80: mol_type = other DNA
tctttgccttccggagctttctctcgaggtcgtccgcctcttctcttgtcttaatccacctcgagaggatctcctccctt

SEQ ID NO: 41908 - DNA, 80 bp, synthetic construct
  source 1..80: mol_type = other DNA
atccccagagggggcaaggacgagagggcggagacactcggaggaaaggactcccaagaggacaaagagcgactcaagat

SEQ ID NO: 41909 - DNA, 80 bp, synthetic construct
  source 1..80: mol_type = other DNA
tcgagaacgattccccaagacgccggtgaagctctcggaatgaggaaaataggcaagatggtagagaagagcgagcctcc

SEQ ID NO: 41910 - DNA, 80 bp, synthetic construct
  source 1..80: mol_type = other DNA
ttcagcgaacagaagagcctgtcccggtcgaacagtcccgtagcgatgggaggagatgctaggagtgggtggagaccggt

SEQ ID NO: 41911 - DNA, 80 bp, synthetic construct
  source 1..80: mol_type = other DNA
gatgggaggagatgctaggagtggtgggagaccggtgcgagaaaagcaagacaagaaagcaacggggctagcgagtggat

SEQ ID NO: 41912 - DNA, 80 bp, synthetic construct
  source 1..80: mol_type = other DNA
gttccgccccccgttggctccgagtgaggcttatcccggggaactcggctatcttccccaactagccggcccggatcacc

SEQ ID NO: 41913 - DNA, 80 bp, synthetic construct
  source 1..80: mol_type = other DNA
ttccaaacgaacgggtggacctcggcggcgtggggcccgcggctccatggtgaacccccgcagcccgccactccacactc

SEQ ID NO: 41914 - DNA, 80 bp, synthetic construct
  source 1..80: mol_type = other DNA
cttccccccgcggggccccccatccaaaagatgaaactccacccctcagggttcgctatcctacccttttcttacctttg

SEQ ID NO: 41915 - DNA, 80 bp, synthetic construct
  source 1..80: mol_type = other DNA
ctgagccatctccgagcgaagatcccgcggaggcaggatcagcgcccgagaggggataaatggtaaagagcattggaacg

SEQ ID NO: 41916 - DNA, 80 bp, synthetic construct
  source 1..80: mol_type = other DNA
ggtgaaagaggacggatggaagagaaggtggggctccccgatccgaggggtccggcgtccagattttggaggcactccgg

SEQ ID NO: 41917 - DNA, 80 bp, synthetic construct
  source 1..80: mol_type = other DNA
gtccggcgtccagattttggaggcactccggaccgaagggttgaggtacccagaaggaggaatccactcggagagcggga

SEQ ID NO: 41918 - DNA, 80 bp, synthetic construct
  source 1..80: mol_type = other DNA
agcaccggggacccatggtgccatgggatgcccttcccgatgtccgtcctccccctccccccgagggtcgcccaggaatg

SEQ ID NO: 41919 - DNA, 80 bp, synthetic construct
  source 1..80: mol_type = other DNA
tcggagagattctcccaagaaggaaaaaagagaaagcaagaatcggacgagttccccacaacgctgggaacaccttggaa

SEQ ID NO: 41920 - DNA, 80 bp, synthetic construct
  source 1..80: mol_type = other DNA
ctcgtcttcctcggtcaacctcttgagttcctcttcttcgtccttgctgagcgtcttccctccggcgttcagttgcttct

SEQ ID NO: 41921 - DNA, 80 bp, synthetic construct
  source 1..80: mol_type = other DNA
gaacaaagagctctgacacgcgaggagtaagagcgtagcgatagggcgagatgctaggagtacggggagaccgaagcgag

SEQ ID NO: 41922 - DNA, 80 bp, synthetic construct
  source 1..80: mol_type = other DNA
aatccctggcttcccctcacgtccagtccctccccggtcctggagaaggtggactccgggactccttgcatgctggggac

SEQ ID NO: 41923 - DNA, 80 bp, synthetic construct
  source 1..80: mol_type = other DNA
gaagccgcccccgggcgctcccctcgatccaccttcgaggaggttcacacccccaaccgacgggccggctgttcttcttt

SEQ ID NO: 41924 - DNA, 80 bp, synthetic construct
  source 1..80: mol_type = other DNA
tcaatggtcaacctcttaagttcctcttcttcctccttgctgagattcttccctcctgcgctcagctgctttctcttgtt

SEQ ID NO: 41925 - DNA, 80 bp, synthetic construct
  source 1..80: mol_type = other DNA
ctcgagggccttccttcgtcggtgatcctccctctccttgtcggtgaagccaaccctgagagtcctcttcctaggtccgg

SEQ ID NO: 41926 - DNA, 80 bp, synthetic construct
  source 1..80: mol_type = other DNA
aggggaaagaggcaggaggaaaagaaggtgcgggcctcccgatccgaggggtccgtccgccagattgagaaagcactccg

SEQ ID NO: 41927 - DNA, 80 bp, synthetic construct
  source 1..80: mol_type = other DNA
ggaactcggcgaatcgtccccacatagcagagcccggagccccttccaaaatgaccgagggggtcacttggagcgcggtg

SEQ ID NO: 41928 - DNA, 80 bp, synthetic construct
  source 1..80: mol_type = other DNA
gaccagtggagccatgggatgctcctcccgatgtccgtccatccctcccccccgagggtcgcccaggaatggcgggacca

SEQ ID NO: 41929 - DNA, 80 bp, synthetic construct
  source 1..80: mol_type = other DNA
ctgagccatctccgagcgaggatcccgcggtggcaggatcagttcccgagaggggatggatgccaaagagcattggaacg

SEQ ID NO: 41930 - DNA, 80 bp, synthetic construct
  source 1..80: mol_type = other DNA
agacagcaagaacggaagagatccccataacgctgggaacagctcggaaggggaaagaggacggatggaagagaaggtgg

SEQ ID NO: 41931 - DNA, 80 bp, synthetic construct
  source 1..80: mol_type = other DNA
tcgtcttcctcggtcaacctcttaagttcctcttcttcctccctgcttagattcttccctcccgcgctcagttgtttctt

SEQ ID NO: 41932 - DNA, 80 bp, synthetic construct
  source 1..80: mol_type = other DNA
gggaaagaggacggatggaagagaaggggagggacccgcattccaaggggcccgagcccggatcctgaggcgaattcccg

SEQ ID NO: 41933 - DNA, 80 bp, synthetic construct
  source 1..80: mol_type = other DNA
ccgaaagggttgaaggaccccggaaggagggatcaccacggaagaaccagcagaatccacctccggagaaccccttcagc

SEQ ID NO: 41934 - DNA, 80 bp, synthetic construct
  source 1..80: mol_type = other DNA
actcggcgaatcgtccccacatagcagagcccaggacccccttccaaaataaccgagggaggatcttggagcaccgggga

SEQ ID NO: 41935 - DNA, 80 bp, synthetic construct
  source 1..80: mol_type = other DNA
aggggaaagaggtcaggtggaaaagaaggcgtgggctccccgatccgagtggcccaacctcagtttgggaggcactccgg

SEQ ID NO: 41936 - DNA, 80 bp, synthetic construct
  source 1..80: mol_type = other DNA
gtcggaggaagtcccccaagaagaacgaaagagaaatcaagaatgaggacctttccctacgacgctggagacatcctggg

SEQ ID NO: 41937 - DNA, 80 bp, synthetic construct
  source 1..80: mol_type = other DNA
atgggccaactccgagcgaagggagcgcgaggggaaggatcagctcccgagaggggatagatggtaaagagcattggatc

SEQ ID NO: 41938 - DNA, 80 bp, synthetic construct
  source 1..80: mol_type = other DNA
ttatcccggggaactcggcaattgtccccacatagcaggtcccaggaccccttccaaaatgactgagggtggtgcttgga

SEQ ID NO: 41939 - DNA, 80 bp, synthetic construct
  source 1..80: mol_type = other DNA
aacaaagagcgcagcgcacgtgggagtagaccatagcgatggggggagatgctaggagttagaggagaccgaagcgagga

SEQ ID NO: 41940 - DNA, 80 bp, synthetic construct
  source 1..80: mol_type = other DNA
aacatagaggtcgcgcgggaccatgggatgctcttcccgatttccgtttccaaccccttcccccgagggtcgcccaggaa

SEQ ID NO: 41941 - DNA, 80 bp, synthetic construct
  source 1..80: mol_type = other DNA
ccgaagggttgagagtacccagagaggggaatccacacagagaaaagcagaaaaatcacctccagaggaccccttcagcg

SEQ ID NO: 41942 - DNA, 80 bp, synthetic construct
  source 1..80: mol_type = other DNA
ggcggaggaagttccccaagagggccaagagaactcaagattcggaagaaacccctatgacgctggagacatcttggaag

SEQ ID NO: 41943 - DNA, 80 bp, synthetic construct
  source 1..80: mol_type = other DNA
ctctagcttctttcttgtgttcacccactgctcgagagtctcttccctgctcgggcggtccttcttcgattcggagcgga

SEQ ID NO: 41944 - DNA, 80 bp, synthetic construct
  source 1..80: mol_type = other DNA
tcggctagaggcggcagtcctcagtactcttactcttttctgtaaagaggagactgctggactctccgcccgagtgtccg

SEQ ID NO: 41945 - DNA, 80 bp, synthetic construct
  source 1..80: mol_type = other DNA
ggtgaagaggaaggtggaaaagaaggagcgggcctcccgatccgaggggcccgacgcccggatctggagggcactccgtg

SEQ ID NO: 41946 - DNA, 80 bp, synthetic construct
  source 1..80: mol_type = other DNA
gtcggaagtagtctcccaagaggagaaagagaaggcaagagacgaaggctttccccatgacgctggagacatcctggaag

SEQ ID NO: 41947 - DNA, 80 bp, synthetic construct
  source 1..80: mol_type = other DNA
atccgctctattcactggggtcgacaactctggggatagaagggaggatcggctgggaagagtatatcccatggtgatcc

SEQ ID NO: 41948 - DNA, 80 bp, synthetic construct
  source 1..80: mol_type = other DNA
cccctcacgtccaggccctccccggtcctggtgaaggtggactccgggactccttgcatgttggggacgaagccgccccc

SEQ ID NO: 41949 - DNA, 80 bp, synthetic construct
  source 1..80: mol_type = other DNA
aatctacctccatctggtctgctcgggccctcttcgccgggggaggcccctctccatccttgtctttctttccgagaatt

SEQ ID NO: 41950 - DNA, 80 bp, synthetic construct
  source 1..80: mol_type = other DNA
ctctaacttctttcttccagatacccactgctcgaggatctcttctctgttcgggcggtctttcctcgattcggaacggc

SEQ ID NO: 41951 - DNA, 80 bp, synthetic construct
  source 1..80: mol_type = other DNA
ccatctcggctagaggcggcagtcctcagtactcttactcttttatgtaaagaggagactgctggactcgccgcccgagc

SEQ ID NO: 41952 - DNA, 80 bp, synthetic construct
  source 1..80: mol_type = other DNA
gaacagagagccctgagccgccaggagtaagagcgtagcgttagggggagatgctgggagatagaggagaccgaagcgag

SEQ ID NO: 41953 - DNA, 80 bp, synthetic construct
  source 1..80: mol_type = other DNA
ccgcgaggaggtgaaaatgccttgccaacccaaaaagaaaagaaggacgcgagacacaaacccgtgagtgaaaacccgct

SEQ ID NO: 41954 - DNA, 80 bp, synthetic construct
  source 1..80: mol_type = other DNA
ttattcactggggtcgacacttctggggagaaaaggaaggatcggatgggaaaagtatatcctatggaaatccctggttt

SEQ ID NO: 41955 - DNA, 80 bp, synthetic construct
  source 1..80: mol_type = other DNA
atgaaccaacagggcaaactgctgactggctaagcattgtgatctatctgacatctttcgtagtcccaatactcctgaag

SEQ ID NO: 41956 - DNA, 80 bp, synthetic construct
  source 1..80: mol_type = other DNA
atctccccctgttcctattcctgggaggtggcccgggagctcgatgctaagggaggaccggagcgtcacccccgggataa

SEQ ID NO: 41957 - DNA, 80 bp, synthetic construct
  source 1..80: mol_type = other DNA
ttgccagcgtcatgggggctcctctctcttgttttcttcctctgttggcagcttgggcgatccagtcgaggacattcgct

SEQ ID NO: 41958 - DNA, 80 bp, synthetic construct
  source 1..80: mol_type = other DNA
cattcgctctctttctgtctcccaactctcggtggttctccgctctggctcttcgggtcccttcgccggtaagcggccca

SEQ ID NO: 41959 - DNA, 80 bp, synthetic construct
  source 1..80: mol_type = other DNA
gatgagccaacccgtgtcgaaggagtcctcgaaggacagaggggagaccctcgagcagtgggtagaagaaaggaagaaaa

SEQ ID NO: 41960 - DNA, 80 bp, synthetic construct
  source 1..80: mol_type = other DNA
ggagcttgcagccgacgggcattcggatcggggtctccgctgctatccccgccactcctctcccagtgcgagacgatttg

SEQ ID NO: 41961 - DNA, 80 bp, synthetic construct
  source 1..80: mol_type = other DNA
ttcgccctctttctgtcccccaactctcgggtgttctcctcccctctctagattcggccctcctcgccggaagcggccca

SEQ ID NO: 41962 - DNA, 80 bp, synthetic construct
  source 1..80: mol_type = other DNA
atccgagggaacgggagagcgctcgagagctccttcctcctataggagattagagagatcgtcgaggctccccggtctca

SEQ ID NO: 41963 - DNA, 80 bp, synthetic construct
  source 1..80: mol_type = other DNA
cagaggttcttgccgccgatggacattcaaccggggtctccgccgatttcttcgccactcctctcccagcttgcgatggt

SEQ ID NO: 41964 - DNA, 80 bp, synthetic construct
  source 1..80: mol_type = other DNA
tcgccagcgtcacgggggctcctctgtcttgtttcttcctctgttggcagcttggaggatccatccgagaccattcgccc

SEQ ID NO: 41965 - DNA, 80 bp, synthetic construct
  source 1..80: mol_type = other DNA
cattcgccctctttctgtctcccaactctcgggagttctcccccgatcccacttcgggaccgttcgccggaagcggccca

SEQ ID NO: 41966 - DNA, 80 bp, synthetic construct
  source 1..80: mol_type = other DNA
aaggtgtttcatattcagcttttcttctcctgcatcactacttacagttatgactattaaccacatttatcttaattgct

SEQ ID NO: 41967 - DNA, 80 bp, synthetic construct
  source 1..80: mol_type = other DNA
atgagccaacttccgaacgaagatacgcgggaggcaggatcagcgcccgagaggggataaatggcaaagagcggaggaac

SEQ ID NO: 41968 - DNA, 80 bp, synthetic construct
  source 1..80: mol_type = other DNA
gatttcctcttatgtctatcccctccccggtcctagagaagggggactccggaactccttgcatgctggggacgaagccg

SEQ ID NO: 41969 - DNA, 80 bp, synthetic construct
  source 1..80: mol_type = other DNA
aagatgagatgaataaatggtttgaggagtttaaaaaggaaaatggacttatggacactttcacaaactcctactccttt

SEQ ID NO: 41970 - DNA, 80 bp, synthetic construct
  source 1..80: mol_type = other DNA
ttgatgtttcccagccagggattgtcttcctcaagtttcctgatggtcttctttgtcttccggagcctcctctcgaggtc

SEQ ID NO: 41971 - DNA, 80 bp, synthetic construct
  source 1..80: mol_type = other DNA
cgtccgcctcatctcttgctttgacccacttcgagaggatgtcctcccttcccttccgttgtctcttctgatcggcgtgg

SEQ ID NO: 41972 - DNA, 80 bp, synthetic construct
  source 1..80: mol_type = other DNA
ccggggaactcggccttcttccccaactagccggccccggaccccctaccaaacgaacgggaggaccccggcagttcgag

SEQ ID NO: 41973 - DNA, 80 bp, synthetic construct
  source 1..80: mol_type = other DNA
ctctgaggagaggactcccaagaggacaaagagagactcaggatccgggaacgcatccccataacgccggtgaagctctc

SEQ ID NO: 41974 - DNA, 80 bp, synthetic construct
  source 1..80: mol_type = other DNA
agcgaacagaagagcgctcgggtggtaggagaaagaccatagcgaaggaggggatgctaggagtagggagagaccgaagc

SEQ ID NO: 41975 - DNA, 80 bp, synthetic construct
  source 1..80: mol_type = other DNA
gaggaggaaagcaaagaaagcaacggggctagtcggtgggtgttccgccccccgagaggccgatgaggttatccgggaac

SEQ ID NO: 41976 - DNA, 80 bp, synthetic construct
  source 1..80: mol_type = other DNA
tcgatatgtccccacatagcagagccccggacccccttccaaagtgaccggaggggtcgcttggaacgtcgagggagccg

SEQ ID NO: 41977 - DNA, 80 bp, synthetic construct
  source 1..80: mol_type = other DNA
gtggagccatgggatgttcctcccgatgctcggatccccttccttccccccaagcgtcgcccaggaatggcgggacccca

SEQ ID NO: 41978 - DNA, 80 bp, synthetic construct
  source 1..80: mol_type = other DNA
gtcggaggaaatcttcccaagaagagagaagaggagtcaagaggtggacgaaatccccgagacgctggagacacccttgg

SEQ ID NO: 41979 - DNA, 80 bp, synthetic construct
  source 1..80: mol_type = other DNA
atgggccaagtccgaggaagagcccggagatgggagaggagtggatccccgaaggagtcaaagtcgagagggcggagtca

SEQ ID NO: 41980 - DNA, 80 bp, synthetic construct
  source 1..80: mol_type = other DNA
gatcgtcatcgacggtcaacctcctgagttcctcttcttcctccttgctgagggactttcctcctgaggacagctgcttc

SEQ ID NO: 41981 - DNA, 80 bp, synthetic construct
  source 1..80: mol_type = other DNA
ttgatgtttcccagccagggattttcgtcctctagtttcttgatggtcttctttgccttcttgagcctcttctcgaggtc

SEQ ID NO: 41982 - DNA, 80 bp, synthetic construct
  source 1..80: mol_type = other DNA
ttccgcatcttcccttgttttgatccacttcgagaggatctcctcccttcccttccgttgtctcttctgatcggcgaggc

SEQ ID NO: 41983 - DNA, 80 bp, synthetic construct
  source 1..80: mol_type = other DNA
ggaatgaggaaaatgggcgggatggtagagaaaggagagcctcccgatccgaggttgccctgaacttattggatctggag

SEQ ID NO: 41984 - DNA, 80 bp, synthetic construct
  source 1..80: mol_type = other DNA
actccgaccttaaggggtcaagggtagaacagggaggcaatccaccaggagatctcggacaacccacctccagaggaccc

SEQ ID NO: 41985 - DNA, 80 bp, synthetic construct
  source 1..80: mol_type = other DNA
gcgataggaacaagacaagaaagcaacggggctagcgagtggatgttccgccccccgttggctccgagtgaggcttatcc

SEQ ID NO: 41986 - DNA, 80 bp, synthetic construct
  source 1..80: mol_type = other DNA
cggggaactcggctctcttccccaactagccgggcccggaccctcttccaaacgatcggagtggcttcggcgacccgagg

SEQ ID NO: 41987 - DNA, 80 bp, synthetic construct
  source 1..80: mol_type = other DNA
gacccgcggtcccatggtgaacccccgtagccacccactccacactccttccccccgcggggccccccgctcaaagatga

SEQ ID NO: 41988 - DNA, 80 bp, synthetic construct
  source 1..80: mol_type = other DNA
ctctgaggagagaactctaagaaggacaagaagtgtctcaagatccggggacgaatccccaagacgccggtgaagctctt

SEQ ID NO: 41989 - DNA, 80 bp, synthetic construct
  source 1..80: mol_type = other DNA
ccagggattttcttcctctagtttcttgatggtcttccttgccttccggagcctcctctcgaggtcatccgcttcttccc

SEQ ID NO: 41990 - DNA, 80 bp, synthetic construct
  source 1..80: mol_type = other DNA
ccgtgcccgagcatgggccaagtccgacgaagagtccggaaatgggagaggtggaagatcccccgagggggcaaagttga

SEQ ID NO: 41991 - DNA, 80 bp, synthetic construct
  source 1..80: mol_type = other DNA
actagccggccccggatccccttccaaacgaacgggaggacctcaacagttcggaggacccgcggctccatggtgaaccc

SEQ ID NO: 41992 - DNA, 80 bp, synthetic construct
  source 1..80: mol_type = other DNA
tcgggagacccgcggctccatggtgaacgcccgcagtcccccactccacactccttccccccgcggggccccccgctcaa

SEQ ID NO: 41993 - DNA, 80 bp, synthetic construct
  source 1..80: mol_type = other DNA
agtttttcctttattgggtggtacactcgaggagtggaaggcggggaggggggaccggactaggtccctacggaaactgc

SEQ ID NO: 41994 - DNA, 80 bp, synthetic construct
  source 1..80: mol_type = other DNA
ctccgcttcttctcttgtcttgacccatttcgagaggatctcctccctgcccccccgggatttcttcggatcggcgcggc

SEQ ID NO: 41995 - DNA, 80 bp, synthetic construct
  source 1..80: mol_type = other DNA
tcatctcggcagaggcggcgatcctcagtgctcttactcttttcttgaaagaggagactgctggacgccccgcccgagcc

SEQ ID NO: 41996 - DNA, 80 bp, synthetic construct
  source 1..80: mol_type = other DNA
cgagcatgggccaggtccgacgaagagtccgggcgcgggagagagagagaacctccgaagggagcaaggacgagagagcg

SEQ ID NO: 41997 - DNA, 80 bp, synthetic construct
  source 1..80: mol_type = other DNA
gaaacactctgaggagaggacccccaagaaggcaagagatgagtcaagattcgggaacggatccccaaaacgccggtagg

SEQ ID NO: 41998 - DNA, 80 bp, synthetic construct
  source 1..80: mol_type = other DNA
catctcggaataaggaaaaatggccaggatggtagaaaagagcgagcctcccgatccgagggggccctgaacttattgga

SEQ ID NO: 41999 - DNA, 80 bp, synthetic construct
  source 1..80: mol_type = other DNA
tctggagactccgaccctaaggggtctaagaaagaacagggaggcaatccaccaggagttctcggacaacccacctccag

SEQ ID NO: 42000 - DNA, 80 bp, synthetic construct
  source 1..80: mol_type = other DNA
aggaccccttcagcgaacagaagggcctgtcccggtcgaattgtcccgtagcgataggaggagatgctaggagtagggtg

SEQ ID NO: 42001 - DNA, 80 bp, synthetic construct
  source 1..80: mol_type = other DNA
agaccgatgcgaggacagcaagacaagagagcagcggggctagcgagtggatgttccgccccccgtgggtcccgagtgag

SEQ ID NO: 42002 - DNA, 80 bp, synthetic construct
  source 1..80: mol_type = other DNA
cccggagagccagcagccccgtggtggacccccgagtcccccactccacactccttcccgccgcggggcctcccatccaa

SEQ ID NO: 42003 - DNA, 80 bp, synthetic construct
  source 1..80: mol_type = other DNA
ttctccggtgatcctgtctctccttgtcggtgaagactcccctggagactgctttcctaggcccggagtctacttccatc

SEQ ID NO: 42004 - DNA, 80 bp, synthetic construct
  source 1..80: mol_type = other DNA
ccggcatgggccacagttccgaccgaagagtccgacgggggaggaaggccagcccgagagggcgtctcctggtaagagac

SEQ ID NO: 42005 - DNA, 80 bp, synthetic construct
  source 1..80: mol_type = other DNA
atgaacagaaaaatcacctccagaggaccccttcagcgaacagaagacgctcacggcagtaggagtaagaccgtagcgat

SEQ ID NO: 42006 - DNA, 80 bp, synthetic construct
  source 1..80: mol_type = other DNA
cttcagcgaacagaagacgctcacggcagtaggagtaagaccgtagcgatggggggagatgctaggagtaggtggagacc

SEQ ID NO: 42007 - DNA, 80 bp, synthetic construct
  source 1..80: mol_type = other DNA
ccagggatagtcgtcctctagtttcttgatagtcttccttgccttccggagcttcctctcgaggtcgtccgcctcttctc

SEQ ID NO: 42008 - DNA, 80 bp, synthetic construct
  source 1..80: mol_type = other DNA
tctggaggtgactgggcattccctttgccatccgagtggacgtctgtcctccttcggatgcccaggtcggaccgcgggga

SEQ ID NO: 42009 - DNA, 80 bp, synthetic construct
  source 1..80: mol_type = other DNA
agggcggagacactctgaggagaggactcccaagaggacaagaagtgactcaagatccgagaagaaatccccaagacgcc

SEQ ID NO: 42010 - DNA, 80 bp, synthetic construct
  source 1..80: mol_type = other DNA
ttgctttgacccacttcgcgaggatctcctccctgactcccttccgggatctcttcggatcggcgaggctcatctcggca

SEQ ID NO: 42011 - DNA, 80 bp, synthetic construct
  source 1..80: mol_type = other DNA
caagtccgacgaagagtccggagatgggagaggtggggatccccgggagggcaagcgcaagaaggcggagacactccgag

SEQ ID NO: 42012 - DNA, 80 bp, synthetic construct
  source 1..80: mol_type = other DNA
gggcaagcgcaagaaggcggagacactccgaggagatgactcccaagaaggcaagagtgaatcaagattcggggacgaat

SEQ ID NO: 42013 - DNA, 80 bp, synthetic construct
  source 1..80: mol_type = other DNA
gagatgactcccaagaaggcaagagtgaatcaagattcggggacgaatcccaacgacgccggtgagcatctcggaatgag

SEQ ID NO: 42014 - DNA, 80 bp, synthetic construct
  source 1..80: mol_type = other DNA
gaaaatgggcaggatggtagaaaggagcgagcctcccgatccgaggtttccctgaacctatcggatctggagactccgac

SEQ ID NO: 42015 - DNA, 80 bp, synthetic construct
  source 1..80: mol_type = other DNA
ctcaaggggtcaaaggtaggacagggaggcaatccaccaggagttctcggaaaacccacctccagaggaccccttcagcg

SEQ ID NO: 42016 - DNA, 80 bp, synthetic construct
  source 1..80: mol_type = other DNA
cgatccgttcgggatctcttcgccgggggagctcctcccccatctttgtcctttccaattattcctttgatgtttcccag

SEQ ID NO: 42017 - DNA, 80 bp, synthetic construct
  source 1..80: mol_type = other DNA
ggagcaagacaagaaagcaacggggctagcgagtggatgttccgccccccgctggctccgagtgaggcttatcccgtgga

SEQ ID NO: 42018 - DNA, 80 bp, synthetic construct
  source 1..80: mol_type = other DNA
actcgactatcttccccaactagccggtcccgggtccccttccaaatgatcggtggggacctggcggcccgggagcccgc

SEQ ID NO: 42019 - DNA, 80 bp, synthetic construct
  source 1..80: mol_type = other DNA
agtaccatggtgaacccccgagtccgccactccacactccttccccccgcggggccccccatctaagagagagactccac

SEQ ID NO: 42020 - DNA, 80 bp, synthetic construct
  source 1..80: mol_type = other DNA
cgtccgcatcatcccttgctttgacccacttcgagaggatctcctcccttcccttccgggttctcttcagatcggcgcgg

SEQ ID NO: 42021 - DNA, 80 bp, synthetic construct
  source 1..80: mol_type = other DNA
ccgagcatgagccaagtccgacgaagagtccggagatgggagaggagggagaaccccgaagagaggcaaagacgagaggg

SEQ ID NO: 42022 - DNA, 80 bp, synthetic construct
  source 1..80: mol_type = other DNA
cggagacactccgaggagaggactcccaagaggacaagaggtgctcaagatccgggaacggatccccacgacgccggtga

SEQ ID NO: 42023 - DNA, 80 bp, synthetic construct
  source 1..80: mol_type = other DNA
agctcttggaatgggggaaataggcggaatggtagaaaagagcgagcctcccgatccgagatttccctaaacttattgga

SEQ ID NO: 42024 - DNA, 80 bp, synthetic construct
  source 1..80: mol_type = other DNA
agacccgtgcgatggagacaagataagaaagcaacggggctagcgagtggatgttccgccccccgttggctccgagtgag

SEQ ID NO: 42025 - DNA, 80 bp, synthetic construct
  source 1..80: mol_type = other DNA
tagcgagtggatgttccgccccccgttggctccgagtgaggcttatcccggggaactcgactatcttccccaactagccg

SEQ ID NO: 42026 - DNA, 80 bp, synthetic construct
  source 1..80: mol_type = other DNA
gcttatcccggggaactcgactatcttccccaactagccggccccggacccccttccaaacgaacgggtggcatccggca

SEQ ID NO: 42027 - DNA, 80 bp, synthetic construct
  source 1..80: mol_type = other DNA
gcggagaaccggcggctccatggtgaacccccgtagccccccactccacactccttcccgccgcggggcctcccatccaa

SEQ ID NO: 42028 - DNA, 80 bp, synthetic construct
  source 1..80: mol_type = other DNA
cgggtccgagcatgggccaggtccgacgaagagtccggaggtgaggaaggtggaggccccccgaagaggccaaagacgag

SEQ ID NO: 42029 - DNA, 80 bp, synthetic construct
  source 1..80: mol_type = other DNA
gaagaaaggagcgagcctcccgattcgaggatccctgaacctatcggatctggagactccgacctcaaggggtctaagat

SEQ ID NO: 42030 - DNA, 80 bp, synthetic construct
  source 1..80: mol_type = other DNA
ggatctggagactccgacctcaaggggtctaagatggaacggggaggcaatccaccgggagatctcggaaaacccacctc

SEQ ID NO: 42031 - DNA, 80 bp, synthetic construct
  source 1..80: mol_type = other DNA
aggcttatcccggggaactcggctgtcttccccaactagccggtctcggacccccttccaaacgaacggaggtgcttcgg

SEQ ID NO: 42032 - DNA, 80 bp, synthetic construct
  source 1..80: mol_type = other DNA
cggcccgggagacccgcagccccgtggagaacccccgtagtcccccactccacactccttccccccgcgaggcccaccat

SEQ ID NO: 42033 - DNA, 80 bp, synthetic construct
  source 1..80: mol_type = other DNA
cactccacactccttccccccgcggggccccccatccaaagaagaaactccaccctccagggttcgctatcctacccttt

SEQ ID NO: 42034 - DNA, 80 bp, synthetic construct
  source 1..80: mol_type = other DNA
acaaagagccctgacgcgcgaggagtaagcccatagcgatggggagagatgctaggagttagaggaggccgaagcgagga

SEQ ID NO: 42035 - DNA, 80 bp, synthetic construct
  source 1..80: mol_type = other DNA
cctttgatgtttcccagccagggattatcgtcctctaacctcttgactttcttcttcgccttccggaggtccttctcgag

SEQ ID NO: 42036 - DNA, 80 bp, synthetic construct
  source 1..80: mol_type = other DNA
ccgaagggtcgaggcacccagaggggggagtccactcggagtagaacagacaaatcacctccagaggaccccttcagcga

SEQ ID NO: 42037 - DNA, 80 bp, synthetic construct
  source 1..80: mol_type = other DNA
tcggagtagaacagacaaatcacctccagaggaccccttcagcgaacaaagagccctgacgtggtaggagaaagaccata

SEQ ID NO: 42038 - DNA, 80 bp, synthetic construct
  source 1..80: mol_type = other DNA
acaaagagccctgacgtggtaggagaaagaccatagcgatgggtagagatgctaggagtagggagagaccgaagcgagga

SEQ ID NO: 42039 - DNA, 80 bp, synthetic construct
  source 1..80: mol_type = other DNA
ccgagagtgattctcccaagaagagaaagaggcggcaagaggtggacgacttccccaagacgctggagacatcctggaag

SEQ ID NO: 42040 - DNA, 80 bp, synthetic construct
  source 1..80: mol_type = other DNA
catgagccatctccgagcgaagggaacgcgctggaaggatcagcgcccgagagggagaaacggtaaagagcattggaacg

SEQ ID NO: 42041 - DNA, 80 bp, synthetic construct
  source 1..80: mol_type = other DNA
gggaaagaggatgggtggaaaagaaggtgtgggcctcccgatccgaggggcccaaccaccaagtttggagagcactccgg

SEQ ID NO: 42042 - DNA, 80 bp, synthetic construct
  source 1..80: mol_type = other DNA
acaaagagcgcttagccgtcaggagtaagaccatagcgatgggtagagatgctaggagttagaggagaccgaagcgagga

SEQ ID NO: 42043 - DNA, 80 bp, synthetic construct
  source 1..80: mol_type = other DNA
ttatcccggggaattcgacttatcgtccccacatagcagaccccggagccccttccaaaatgaccgagggtggtggctag

SEQ ID NO: 42044 - DNA, 80 bp, synthetic construct
  source 1..80: mol_type = other DNA
cccttccaaaatgaccgagggaggtggctaggaacgcggggaaccggtggagccatgggatgctcctcccgattccgaat

SEQ ID NO: 42045 - DNA, 80 bp, synthetic construct
  source 1..80: mol_type = other DNA
ccgagagtgattctcccaagaagagaaagagaaggcaagagacgggcgaaatccccgtgacgctagagacatcctggaag

SEQ ID NO: 42046 - DNA, 80 bp, synthetic construct
  source 1..80: mol_type = other DNA
ttgagccatctccgaacgaagatcccgccgggacaggatcagctcccgagaggggatggaaggtaaagagcattggaacg

SEQ ID NO: 42047 - DNA, 80 bp, synthetic construct
  source 1..80: mol_type = other DNA
ctcgtcttcctcggtcaacctcttaagttcctcttcctcttccctgctgaggctcttccctcccgcctggagctgtttct

SEQ ID NO: 42048 - DNA, 80 bp, synthetic construct
  source 1..80: mol_type = other DNA
cctttgatgttccccagccaggggtggtcttcctcaagtttcttgatcttcttcttgaccttccggaggtctctctcgag

SEQ ID NO: 42049 - DNA, 80 bp, synthetic construct
  source 1..80: mol_type = other DNA
ttcctctaacttctttcttccttctacccactgctcgaggacctcttccctccctccgcggttcttcttcgattcggacc

SEQ ID NO: 42050 - DNA, 80 bp, synthetic construct
  source 1..80: mol_type = other DNA
ccgaatggtcgagtagcacccagagggaggaagccacacagagaaaagaagacaaatcacctccagaggaccccttcagc

SEQ ID NO: 42051 - DNA, 80 bp, synthetic construct
  source 1..80: mol_type = other DNA
gaacagaggaccccatggcggtaggagtaagaccatagcgatggggagggatgctaggagttagaggagaccgaagcgag

SEQ ID NO: 42052 - DNA, 80 bp, synthetic construct
  source 1..80: mol_type = other DNA
gagcatagaggaccagtggagccgtgggatgcccttcccaagtccgtccactccctcccccagggggtcgcccaggaatg

SEQ ID NO: 42053 - DNA, 80 bp, synthetic construct
  source 1..80: mol_type = other DNA
tcggagaaatactcctaagaaggaacaagggaacacaagaagcggaagaaacccccatgacgccggagacatcctggaag

SEQ ID NO: 42054 - DNA, 80 bp, synthetic construct
  source 1..80: mol_type = other DNA
atgggccaattccgaacgaagggaacgcggtgggcgagatcagcggacgagagggaataaatggtaaagagtaggagaac

SEQ ID NO: 42055 - DNA, 80 bp, synthetic construct
  source 1..80: mol_type = other DNA
ctcctctgccttctttcttccatttacccactgctcgagaacctcttctctgcctccgcgactcttcttcgattcggacc

SEQ ID NO: 42056 - DNA, 80 bp, synthetic construct
  source 1..80: mol_type = other DNA
gcgaacagagagcaccgagccgcgaggagtaagatcatagcgataggaggagatgctaggagtaagaggagaccgaggcg

SEQ ID NO: 42057 - DNA, 80 bp, synthetic construct
  source 1..80: mol_type = other DNA
gtcggaggaagccccctaggaaggaaaaagagaaagcaagaatcggatggatttccccataacgctggagacgtcttgga

SEQ ID NO: 42058 - DNA, 80 bp, synthetic construct
  source 1..80: mol_type = other DNA
atgagccactgccggacaaggagtacgcggggacaggatcagctcccgagaggggatgatggtaaaagaatggaggaacg

SEQ ID NO: 42059 - DNA, 80 bp, synthetic construct
  source 1..80: mol_type = other DNA
ctcgagggccttccttcgtcggtggtcctgcctctccttgtcggtgaatccatctctgagaggcctcttcctaggcgcgg

SEQ ID NO: 42060 - DNA, 80 bp, synthetic construct
  source 1..80: mol_type = other DNA
ggggaaagagggaaggtggaaaagaaggtgcgggcctcccgatccgaggggcccggcgcccaggattggacagcactctc

SEQ ID NO: 42061 - DNA, 80 bp, synthetic construct
  source 1..80: mol_type = other DNA
tcggaggaggccccccaagaagaaaaaaagagaaaacaaaaatcggacgctccccctaagacgctggagacatcctggaa

SEQ ID NO: 42062 - DNA, 80 bp, synthetic construct
  source 1..80: mol_type = other DNA
atgggccacttccggacgaagggaacgcgtggtgaaggatcagcgcccgagaggggaaaaagggaaaaaggattgggatc

SEQ ID NO: 42063 - DNA, 80 bp, synthetic construct
  source 1..80: mol_type = other DNA
agtctacttccatctgatctgttcgggccttcttcgccgggggtgccccctctccatccttgtccttctttccgagaatc

SEQ ID NO: 42064 - DNA, 80 bp, synthetic construct
  source 1..80: mol_type = other DNA
tcatctcgacgagggcgaccagtcctcagtactcttactctttcctataaagaggagactgctggactcggtgcccgggt

SEQ ID NO: 42065 - DNA, 80 bp, synthetic construct
  source 1..80: mol_type = other DNA
gccggaggaaatcccccagaagaaccaaagggaaaaccagaatgggggccctttccctccacccttgggaacttctggtg

SEQ ID NO: 42066 - DNA, 80 bp, synthetic construct
  source 1..80: mol_type = other DNA
ttgagccaattccgaacgaagaggcgcgggcgggagggatcagcgaccgagaggggataaatggcaaagagcattggaac

SEQ ID NO: 42067 - DNA, 80 bp, synthetic construct
  source 1..80: mol_type = other DNA
aggtgaaagaggatggagggaacaaaaggtgcgggcctcccgatccgaggggcccgaccaccaggattggaggacgactc

SEQ ID NO: 42068 - DNA, 80 bp, synthetic construct
  source 1..80: mol_type = other DNA
gggccgtatggttgagtagcattcagagggaggaagcccacacggagttggtggaaagccacctccggaggaccccttca

SEQ ID NO: 42069 - DNA, 80 bp, synthetic construct
  source 1..80: mol_type = other DNA
ttcctctaactttcttcttccattcacccactgctcgaggatgtcttctctgcctccgcgatttttcttcggctcggaac

SEQ ID NO: 42070 - DNA, 80 bp, synthetic construct
  source 1..80: mol_type = other DNA
tcgacgagaggcggggctcctcagtactcttactcttttctgtaaagaggagactgctggagtccccgcccaagttcgag

SEQ ID NO: 42071 - DNA, 80 bp, synthetic construct
  source 1..80: mol_type = other DNA
ggaaagaaggtgggaggaagaaaaggtgcgggcctcccgatccgaggggcccggctgccagaatttggaggcacctcgtg

SEQ ID NO: 42072 - DNA, 80 bp, synthetic construct
  source 1..80: mol_type = other DNA
tcggagataagcagacaaatcacctccagaggaccccttcagcgaacaaaggactctgacgcgcgaggagtaagagcgta

SEQ ID NO: 42073 - DNA, 80 bp, synthetic construct
  source 1..80: mol_type = other DNA
acaaaggactctgacgcgcgaggagtaagagcgtagcgatggggggagatgctaggagaaggtggagaccgaagcgagga

SEQ ID NO: 42074 - DNA, 80 bp, synthetic construct
  source 1..80: mol_type = other DNA
tcgaaggaacttcccaagaaaaaaaaagagaaggcaagaatcggacgatttccccataacgctggagacatcctggaagg

SEQ ID NO: 42075 - DNA, 80 bp, synthetic construct
  source 1..80: mol_type = other DNA
aaagcaagaagcggagactctccctatgacgctggagacatcttggaaggggaaagaggataggaggaagagaaagggtg

SEQ ID NO: 42076 - DNA, 80 bp, synthetic construct
  source 1..80: mol_type = other DNA
tcctttgatgtttcccagccagggattctcgtcctcaagtttcttgattttcctcttggtcttccggaggtccctctcga

SEQ ID NO: 42077 - DNA, 80 bp, synthetic construct
  source 1..80: mol_type = other DNA
ctctaacttctttcttgcactcacccactgctcgaggagctcctccctgcctccgcgatttttcttcgattcgggacggc

SEQ ID NO: 42078 - DNA, 80 bp, synthetic construct
  source 1..80: mol_type = other DNA
ggaaagaggataggaggaagagaaaggtggggtcccccgatccgaggggtccgtcgcccggaatggagaggcactccggc

SEQ ID NO: 42079 - DNA, 80 bp, synthetic construct
  source 1..80: mol_type = other DNA
ccaaagggttgaagtacccagaaggaggaatccacacggagaaaaggagacaaatcacctccagaggaccccttcagcga

SEQ ID NO: 42080 - DNA, 80 bp, synthetic construct
  source 1..80: mol_type = other DNA
acagagagctctgagccgcgaggagtaagatcgtagcgataggaagagatgctaggagttagaggagaccgaagcgagga

SEQ ID NO: 42081 - DNA, 80 bp, synthetic construct
  source 1..80: mol_type = other DNA
gtagtgagattccccaagaagaaaaaagagaaagcaagaagcggagactctccctatgacgctggagacatcttggaagg

SEQ ID NO: 42082 - DNA, 80 bp, synthetic construct
  source 1..80: mol_type = other DNA
ttcctctaacttctttcttccagacacccactgctcgagaacctcttctcttcccgagcggttcttcctcgactcggacc

SEQ ID NO: 42083 - DNA, 80 bp, synthetic construct
  source 1..80: mol_type = other DNA
aagaggataggtggaaaagaaggtgcgggcctcccgatccgaggggcccaaccaccaagtttggagagatctccgggccg

SEQ ID NO: 42084 - DNA, 80 bp, synthetic construct
  source 1..80: mol_type = other DNA
aagggttgagtagcacccagagggaggaatccacacggagttggacagagaaatcacctccagaggaccccttcagcgaa

SEQ ID NO: 42085 - DNA, 80 bp, synthetic construct
  source 1..80: mol_type = other DNA
cagagcgctcgtgacgcgcgaggagttagagcatagcgataggaggggatgctaggagtaggaggcgaccgaagcgagga

SEQ ID NO: 42086 - DNA, 80 bp, synthetic construct
  source 1..80: mol_type = other DNA
ctcgacttatcgtccccacatagcagagcccggacccccttccaaaagtgaccggaggtggagctaggagcgcggtggag

SEQ ID NO: 42087 - DNA, 80 bp, synthetic construct
  source 1..80: mol_type = other DNA
ccgtggggccatgggatgctcttcccgatgtccgcgtccaaaccccctcccagagggtcgcccaggaatggcaggacccc

SEQ ID NO: 42088 - DNA, 80 bp, synthetic construct
  source 1..80: mol_type = other DNA
gagtaagcccccaagaaggaaaaaagagaaagcaagaatcggaactttccccatgacgctggagacgtcctggaagggga

SEQ ID NO: 42089 - DNA, 80 bp, synthetic construct
  source 1..80: mol_type = other DNA
ctctaacttctttcttgcattcacccactgctcgaggacctcttccctgcccccgcggtgtttcttcgactcggaacggc

SEQ ID NO: 42090 - DNA, 80 bp, synthetic construct
  source 1..80: mol_type = other DNA
ggggaaaggggacggatggaagagaaaggggggggccgccgatccgaggagcccggcccccagaactagagggcactccc

SEQ ID NO: 42091 - DNA, 80 bp, synthetic construct
  source 1..80: mol_type = other DNA
gggcccggcgcccagaactggagggcactccggcccgaagggttgaggtacccagaaggaggtatccacacggagaacag

SEQ ID NO: 42092 - DNA, 80 bp, synthetic construct
  source 1..80: mol_type = other DNA
gcccgaagggttgaggtacccagaaggaggtatccacacggagaacagcagagaaatcacctccggaggaccccttcagc

SEQ ID NO: 42093 - DNA, 80 bp, synthetic construct
  source 1..80: mol_type = other DNA
cctatcccggggaactcggcgaatcgtccccacatagcagagcccaggaccccttccaaaatgaccgagggtggatcttg

SEQ ID NO: 42094 - DNA, 80 bp, synthetic construct
  source 1..80: mol_type = other DNA
tcggaggacgccccccaagaaggaaaaaagagaaagcaagaaacggaggagatccccataacgctggaaacaacttggaa

SEQ ID NO: 42095 - DNA, 80 bp, synthetic construct
  source 1..80: mol_type = other DNA
atggcccaattccggaggaagggagcaagggtggagggatcatcccccgggagaggatcaatggcgaggagcggagatct

SEQ ID NO: 42096 - DNA, 80 bp, synthetic construct
  source 1..80: mol_type = other DNA
agtctatctccatctggtctgttcgggccctcttcgccgggggagccccctctccgtccttgcctttttttccgataatt

SEQ ID NO: 42097 - DNA, 80 bp, synthetic construct
  source 1..80: mol_type = other DNA
cctttgatgcttcccaggggggtattgtcctcctcaagtttgatgattttcttctttaccttccggaggtccctctcgag

SEQ ID NO: 42098 - DNA, 80 bp, synthetic construct
  source 1..80: mol_type = other DNA
tcttctttaccttccggaggtccctctcgagttcctctaacttctttcttccatttacccactgctcgaggacctcttcc

SEQ ID NO: 42099 - DNA, 80 bp, synthetic construct
  source 1..80: mol_type = other DNA
ttcctctaacttctttcttccatttacccactgctcgaggacctcttccctgcccctccggttcttcttcgattcggatt

SEQ ID NO: 42100 - DNA, 80 bp, synthetic construct
  source 1..80: mol_type = other DNA
gaggtcaaggagcaggaggaagtaaaggtgcggagtcccgatccgaggggtccgtccgccggatctggagggcactccgg

SEQ ID NO: 42101 - DNA, 80 bp, synthetic construct
  source 1..80: mol_type = other DNA
gccgaagggttgagagcacccagagggtggacatccacccggaggtaagcagacaatccacctccagaggaccccttcag

SEQ ID NO: 42102 - DNA, 80 bp, synthetic construct
  source 1..80: mol_type = other DNA
cgaacagagagctttgagccgcgaggagtaagaacataacgataggaggagatgctaggagttagaggagaccgaagcga

SEQ ID NO: 42103 - DNA, 80 bp, synthetic construct
  source 1..80: mol_type = other DNA
gggggaggaggccccccaaagagccagaaagcgtcaacaaggatgggattctccacccatgtggaagaaaccccctggaa

SEQ ID NO: 42104 - DNA, 80 bp, synthetic construct
  source 1..80: mol_type = other DNA
gagatcccatgccgacccgaagaggaaaggaggacacggacgacaaaccgtaagttctactgccctttattgttgggtgc

SEQ ID NO: 42105 - DNA, 80 bp, synthetic construct
  source 1..80: mol_type = other DNA
cactccggcccgaagggttgagagtaccccagaggaggaagccacacggagtagaacagaaaaatcacctccagaggacc

SEQ ID NO: 42106 - DNA, 80 bp, synthetic construct
  source 1..80: mol_type = other DNA
gcgaggagaaagtaaagaagcaacggggctagcaggtgggtgttccgcctcccgagagacgagtgaggcttatcccggtg

SEQ ID NO: 42107 - DNA, 80 bp, synthetic construct
  source 1..80: mol_type = other DNA
gcaggtgggtgttccgcctcccgagagacgagtgaggcttatcccggggaactcgacttatcgtccccacatagcaggga

SEQ ID NO: 42108 - DNA, 80 bp, synthetic construct
  source 1..80: mol_type = other DNA
aactcgacttatcgtccccacatagcagggaccccggacccccttcgaaaggtaccggagggtggtgactcgaacaccgg

SEQ ID NO: 42109 - DNA, 80 bp, synthetic construct
  source 1..80: mol_type = other DNA
ggaccagtggagccatgggatgctcttcccgatgctcgattccgactcccccccaagggtcgcccaggaatggcgggacc

SEQ ID NO: 42110 - DNA, 80 bp, synthetic construct
  source 1..80: mol_type = other DNA
gggagccccatcgggaccagttttctccggaaagggatggcgtggagactccatcgggttctgcgggacccggtcgatct

SEQ ID NO: 42111 - DNA, 80 bp, synthetic construct
  source 1..80: mol_type = other DNA
ccccctgttcccattcctgggaggtggcccggaactccgatgctaagggaggaccgaggcgtcacccccgggataagcct

SEQ ID NO: 42112 - DNA, 80 bp, synthetic construct
  source 1..80: mol_type = other DNA
ggatgtgggttgtccgttcaactccgggtggatcaccctccgctggtagtttattcctttgggtccggaggactccagag

SEQ ID NO: 42113 - DNA, 80 bp, synthetic construct
  source 1..80: mol_type = other DNA
gagcttgccgccgatggacattcgaaccggggtctccactgctatcttcgccactcctctcccagtgcgcgacggtttgc

SEQ ID NO: 42114 - DNA, 80 bp, synthetic construct
  source 1..80: mol_type = other DNA
tagcgtcatgggggctcctctgtcttgttttcttcctctgttggcagcttggaggatccagtcgagggttttcgccctct

SEQ ID NO: 42115 - DNA, 80 bp, synthetic construct
  source 1..80: mol_type = other DNA
ttttcgccctctttctgtctcccaactctcgggagttctccactcctgccacttcgggcctcttcgccggaggcggccca

SEQ ID NO: 42116 - DNA, 80 bp, synthetic construct
  source 1..80: mol_type = other DNA
gaggaacccggcagttcccatagtatgggtttaccccgcctccccccgggtattactgggtcccagggtgctcccaacaa

SEQ ID NO: 42117 - DNA, 80 bp, synthetic construct
  source 1..80: mol_type = other DNA
tgggcctcagttccgagcgaagagccgaaccgggaagaggaagcgcccgagagggagccaatgccaaagaggtggtgatc

SEQ ID NO: 42118 - DNA, 80 bp, synthetic construct
  source 1..80: mol_type = other DNA
ctcgtcatcctgggtcaacctcttaagttcctcttcctcctccttgctgaggttcttccctcccgcgctgagttgattct

SEQ ID NO: 42119 - DNA, 80 bp, synthetic construct
  source 1..80: mol_type = other DNA
catccactaactttcttgcattgacccactgctcgaggactccttctcttcccgctcgggatttcttcgtctcggaccgg

SEQ ID NO: 42120 - DNA, 80 bp, synthetic construct
  source 1..80: mol_type = other DNA
aggaagaaggaaggtggaaagaaaggagggaccctcccgatccgaggggcccaaccaccaagtttggagagcactccggg

SEQ ID NO: 42121 - DNA, 80 bp, synthetic construct
  source 1..80: mol_type = other DNA
gaacagagagcgctgcgagcgaggagtaagaccatagcgatggaaagagatgctaggagtagggagagaccgaagcgagg

SEQ ID NO: 42122 - DNA, 80 bp, synthetic construct
  source 1..80: mol_type = other DNA
ggacgcaggggaccagtggagccgtgggatgctcttcccaatctgacctgacccctcccccagcgggtcgcccaggaatg

SEQ ID NO: 42123 - DNA, 80 bp, synthetic construct
  source 1..80: mol_type = other DNA
gtcggaaggtatcgtcccaatgaccaagagaagggaagaaacggaagcctttccccttgacgccggtgaaactctggaat

SEQ ID NO: 42124 - DNA, 80 bp, synthetic construct
  source 1..80: mol_type = other DNA
cgtccgcattatccctttctttgacccacttcgagaggatttcctcccttcccttccgggatctcttcgcatcggacagg

SEQ ID NO: 42125 - DNA, 80 bp, synthetic construct
  source 1..80: mol_type = other DNA
ccttcagcgaacagaagagcctgacccggtcgaatagtcccgtagcgatagaaggagatgctaggagtgggaggaggccg

SEQ ID NO: 42126 - DNA, 80 bp, synthetic construct
  source 1..80: mol_type = other DNA
cccggggaactcggctatcttccccaactagccggccccggatccccttccaaacgaacggaggagaccccggcgactcg

SEQ ID NO: 42127 - DNA, 80 bp, synthetic construct
  source 1..80: mol_type = other DNA
ggtgccagcagccccatggagaacccccgtgccccccactccacactccttccccccgcggggcccgccgtctaaggatg

SEQ ID NO: 42128 - DNA, 80 bp, synthetic construct
  source 1..80: mol_type = other DNA
actccgaggagatgacccccaagaggacaaggagcgctcaagattcgaggacgaatccccaagacgccggtgaagctcct

SEQ ID NO: 42129 - DNA, 80 bp, synthetic construct
  source 1..80: mol_type = other DNA
cttccggagatctctctcgagttctcctatccttcctcttgtggtcacccactgctcgagaatgtcctcccgtccccctc

SEQ ID NO: 42130 - DNA, 80 bp, synthetic construct
  source 1..80: mol_type = other DNA
gaggggtcatccactaaagagagggagattctctgaggaagatttctcccaagaagttccaagagaatctcaagaatgag

SEQ ID NO: 42131 - DNA, 80 bp, synthetic construct
  source 1..80: mol_type = other DNA
gagagtccccaggacgctgaggaaatctaggaatgggaaagaggagggcggaaaaaacggagcggccccccgattcgaat

SEQ ID NO: 42132 - DNA, 80 bp, synthetic construct
  source 1..80: mol_type = other DNA
atgagccaagtccgaggaagagcccggagatgggagaggagtggaacccccgaagaggcaaggacgagagggcgtggata

SEQ ID NO: 42133 - DNA, 80 bp, synthetic construct
  source 1..80: mol_type = other DNA
ctccgcgtcttccctcgccttgacccacttcgagagggtttcctcccttcccttccgacctctcttctgatcggcgaggc

SEQ ID NO: 42134 - DNA, 80 bp, synthetic construct
  source 1..80: mol_type = other DNA
ggggaactcggctatcttccccaactagccggccccggacccccttccaaacgaatgggaggactctggcggttcgggag

SEQ ID NO: 42135 - DNA, 80 bp, synthetic construct
  source 1..80: mol_type = other DNA
cttcgagtagaagacccccaagaggacaaagagagctcaagattcgggaacgattccccaagacgccggtgaagctctcg

SEQ ID NO: 42136 - DNA, 80 bp, synthetic construct
  source 1..80: mol_type = other DNA
atgggccaagtccgacgaagggtccggagagaggagaggtggagaatcctccgaagggacaaggacgagagagcggagac

SEQ ID NO: 42137 - DNA, 80 bp, synthetic construct
  source 1..80: mol_type = other DNA
ccagggattgtcgtcctcaagtttcttgagagtcttttttgccttccggagcctcttctcgaggtcatccgcatcttctc

SEQ ID NO: 42138 - DNA, 80 bp, synthetic construct
  source 1..80: mol_type = other DNA
ttgttttgacccacttcaagaggatctcctcccttcccttccgggctctcttcggatcggcaaggctcatctcggcagag

SEQ ID NO: 42139 - DNA, 80 bp, synthetic construct
  source 1..80: mol_type = other DNA
ccgagcccgagtatgggccaagtccgacgaagagaccggagatgggagaggagggagatctccgaaggaggcaaagacga

SEQ ID NO: 42140 - DNA, 80 bp, synthetic construct
  source 1..80: mol_type = other DNA
cggtgaagctcttggaatgaggaaagcaggcgggatggtagaaaagagcgagcctcccgatccgaggtttccctgaactt

SEQ ID NO: 42141 - DNA, 80 bp, synthetic construct
  source 1..80: mol_type = other DNA
gactagccggtcccggatccccttccaaatgaacggggggaccccggcgattcgggagtgcggcagccccatggtgaatc

SEQ ID NO: 42142 - DNA, 80 bp, synthetic construct
  source 1..80: mol_type = other DNA
ccggcgattcgggagtgcggcagccccatggtgaatccccgcagtcccccactccacactccttccccccgcgtggcctc

SEQ ID NO: 42143 - DNA, 80 bp, synthetic construct
  source 1..80: mol_type = other DNA
catctctttattgggtggtacactcgaggagtggaaggcggtgaggaggtggcggactagatccctatgggaactgctgg

SEQ ID NO: 42144 - DNA, 80 bp, synthetic construct
  source 1..80: mol_type = other DNA
tttcctcggacgtcgagtccatctcccgatctggagaatggggactccgggactcctagcagttgaggaacgaagccgcc

SEQ ID NO: 42145 - DNA, 80 bp, synthetic construct
  source 1..80: mol_type = other DNA
ccgcgcccgagcatgagccaagtccgacgaagagtccggagatgggagaggagagagatccccgagggggcaaaattcga

SEQ ID NO: 42146 - DNA, 80 bp, synthetic construct
  source 1..80: mol_type = other DNA
gagagcgggaacactctgaggagaggactcccaagaaggtcaagaagaggctcaagatccgagaacgaatccccaaaacg

SEQ ID NO: 42147 - DNA, 80 bp, synthetic construct
  source 1..80: mol_type = other DNA
ctggtgaagctcctggaatgaggaaaactggcgggatggtagagaagagcgagcctcccgatccgagattcccctgaacc

SEQ ID NO: 42148 - DNA, 80 bp, synthetic construct
  source 1..80: mol_type = other DNA
gagtgaggcttatcccggggaactcggctatcttccccaactagccggtcccggacccctttccaaacgatcggagggac

SEQ ID NO: 42149 - DNA, 80 bp, synthetic construct
  source 1..80: mol_type = other DNA
ccaactagccggtcccggacccctttccaaacgatcggagggacctcggcggctcgggggccggcagtcccatggtgaat

SEQ ID NO: 42150 - DNA, 80 bp, synthetic construct
  source 1..80: mol_type = other DNA
ctcggcggctcggtggccggcagtcccatggtgaatctccgatcgccctactccacactccttccccccgcggggccccc

SEQ ID NO: 42151 - DNA, 80 bp, synthetic construct
  source 1..80: mol_type = other DNA
tggtccggagtcgacctccatccgatccgttcgggatcttttcgccgggggagctccctccccactcctgtcctttccaa

SEQ ID NO: 42152 - DNA, 80 bp, synthetic construct
  source 1..80: mol_type = other DNA
tcgaggtcttccgcttcatctcttgttttgacccactttgagaggacttcctcccttcccttccgggatctcttcgaatc

SEQ ID NO: 42153 - DNA, 80 bp, synthetic construct
  source 1..80: mol_type = other DNA
ggcgaggctcatctcggcaggggcggcgatcctcagtgctcttactcttttcttgaaagaggagactgctggacgccccg

SEQ ID NO: 42154 - DNA, 80 bp, synthetic construct
  source 1..80: mol_type = other DNA
cgagcccgagcatgagccaagtccgacgaagagtccggagatgggagaggagtagaacctccaaaggagccaaaaacgag

SEQ ID NO: 42155 - DNA, 80 bp, synthetic construct
  source 1..80: mol_type = other DNA
agggcggagacacctgaggggaaaaactcccaagaggacaaggagtgactcaagatccgggaacgaatccccaaaacgcc

SEQ ID NO: 42156 - DNA, 80 bp, synthetic construct
  source 1..80: mol_type = other DNA
ttattcctttgatgtttcccagccagggattttcgtcctcaagtttcttgatagtcttccttgccttccggagcttcctc

SEQ ID NO: 42157 - DNA, 80 bp, synthetic construct
  source 1..80: mol_type = other DNA
actagccggtcccggatccccttccaaacgaacgaggggaccggacggcccgggaagcccgcggttccgtggtggaaccc

SEQ ID NO: 42158 - DNA, 80 bp, synthetic construct
  source 1..80: mol_type = other DNA
cgggaagcccgcggttccgtggtggaaccccgcagtccaccactccacactccttccccccgcggggccccccgtccaaa

SEQ ID NO: 42159 - DNA, 80 bp, synthetic construct
  source 1..80: mol_type = other DNA
ttcttcggtgatcctgtctctccttgtcggtgaaatctcccctgcggggccccttcctaggtccggagtctatttccatc

SEQ ID NO: 42160 - DNA, 80 bp, synthetic construct
  source 1..80: mol_type = other DNA
ccgctttattcactggggacgacaactctggggagagaaggcagggtcggatggaaagagtatatcctacgggaaccctc

SEQ ID NO: 42161 - DNA, 80 bp, synthetic construct
  source 1..80: mol_type = other DNA
ccggcatgggccacagctccgaccgaagggtccgatgggagaggaggcagacccgagagggcgtctcctggtaagaggcg

SEQ ID NO: 42162 - DNA, 80 bp, synthetic construct
  source 1..80: mol_type = other DNA
aggaaaccgggagggattctcccaagaaggcccaagagaaaacccaagaagaggatttttccccaagacgctgaggagac

SEQ ID NO: 42163 - DNA, 80 bp, synthetic construct
  source 1..80: mol_type = other DNA
tcttggaatgggaaagaggaaggtggaaaagaaggagcgggcctcccgatccgagggccccggcgacagattgggaaaca

SEQ ID NO: 42164 - DNA, 80 bp, synthetic construct
  source 1..80: mol_type = other DNA
ctccgggccgaatgggaggagctcccccagagggagaagccacacggagatgaacagacaaatcacctccagaggacccc

SEQ ID NO: 42165 - DNA, 80 bp, synthetic construct
  source 1..80: mol_type = other DNA
gaccaagcgagagggagagtgaagaaagcaacggggctagccggtgggtgttccgccccccgagaggagacgagtgaggc

SEQ ID NO: 42166 - DNA, 80 bp, synthetic construct
  source 1..80: mol_type = other DNA
ttatcccggggaactcggcgaatcgtccccacatagcagatcccggacccccttccaaagcgaccgggaggcgcttggag

SEQ ID NO: 42167 - DNA, 80 bp, synthetic construct
  source 1..80: mol_type = other DNA
cgtggaggaaccggaggaccgtgggatgctccttccgattccgcccgaacccccgcccccgagaggtccccccaggaatg

SEQ ID NO: 42168 - DNA, 80 bp, synthetic construct
  source 1..80: mol_type = other DNA
tctttggtttatcaatatcgctagcttcaaaaccaactggtaataatcatttgttcattttaagtggaacagacaagtat

SEQ ID NO: 42169 - DNA, 80 bp, synthetic construct
  source 1..80: mol_type = other DNA
atactttgcattcagtttcccccttttgcactgctatctaagaccgcaactatcaaccatgtttattttaattgcttaca

SEQ ID NO: 42170 - DNA, 80 bp, synthetic construct
  source 1..80: mol_type = other DNA
aggagaaggggcaggaggaaaagaaggagcgggcctcccgatccgaggggtccgtccgccaggtttggatggcactccgg

SEQ ID NO: 42171 - DNA, 80 bp, synthetic construct
  source 1..80: mol_type = other DNA
cgaacagagagctctgagccgcgaggagagggttcatagcgatggggggagatgctaggagttagaggagaccgaagcga

SEQ ID NO: 42172 - DNA, 80 bp, synthetic construct
  source 1..80: mol_type = other DNA
tcctcggtcaacttcttgagttcctcttcttcttccctgctgaggtgcttccctcccgctgccagttgcttcctcttgtt

SEQ ID NO: 42173 - DNA, 80 bp, synthetic construct
  source 1..80: mol_type = other DNA
agtggaaaggagcaggaggaaaagaaggtgtgggcctcccgatccgaggggtcccttcgcccgatttggagggcactccg

SEQ ID NO: 42174 - DNA, 80 bp, synthetic construct
  source 1..80: mol_type = other DNA
gcgaacagagagctctgacccgcgaggagtaagaccatagcgatagggggagatgctaggagtaggaagagaccgaagcg

SEQ ID NO: 42175 - DNA, 80 bp, synthetic construct
  source 1..80: mol_type = other DNA
ttatcccggggaactcggcgaatcgtccccacatagcagttcccaggtccccttccaaagtggccggaggtggagctagg

SEQ ID NO: 42176 - DNA, 80 bp, synthetic construct
  source 1..80: mol_type = other DNA
agcgcggggtgccagaggagccatgggatgcccttcccgatgtccgctcatccttccccccgagggtcgcccaggaatgg

SEQ ID NO: 42177 - DNA, 80 bp, synthetic construct
  source 1..80: mol_type = other DNA
gtcggaggaagcctcccaagaaggaaaaaagagaaagcaagaatcggaagttttccccatgacgttggagacatcttgga

SEQ ID NO: 42178 - DNA, 80 bp, synthetic construct
  source 1..80: mol_type = other DNA
aggggaaggagagcgggaggaaaggaggcgccggcccccccgttccgagaggcccttcccccagttcggaaggccattcc

SEQ ID NO: 42179 - DNA, 80 bp, synthetic construct
  source 1..80: mol_type = other DNA
ggccggaagggtgaagagcccccagaggtggacatccactcggaggtaagcagacaaatcacctccagaggaccccttca

SEQ ID NO: 42180 - DNA, 80 bp, synthetic construct
  source 1..80: mol_type = other DNA
agcatgggtggccggtggagccatgggacgcccttcccgatgtccgtccatccctccccgccgagggtcgcccaggaatg

SEQ ID NO: 42181 - DNA, 80 bp, synthetic construct
  source 1..80: mol_type = other DNA
atccctcccccccgagggtcgcccaggaatggcgggaccccccttcagcagggtccgcgttccatcctttcttacctgat

SEQ ID NO: 42182 - DNA, 80 bp, synthetic construct
  source 1..80: mol_type = other DNA
gtcggaggaagccccccaagaaggaaaaaggggaaaccaggattgaaggaatttccccatgccccgggagactcctggaa

SEQ ID NO: 42183 - DNA, 80 bp, synthetic construct
  source 1..80: mol_type = other DNA
ttatcccggggaactcggcgaatcgtccccacatagcagaccccggagccccttccaaattgaccgaaggtggtactagg

SEQ ID NO: 42184 - DNA, 80 bp, synthetic construct
  source 1..80: mol_type = other DNA
cttcctcggtcaacctcttaagttcctcttcttcctccctgctgagcctcttccctcctgcgctcagctgcttcctcttg

SEQ ID NO: 42185 - DNA, 80 bp, synthetic construct
  source 1..80: mol_type = other DNA
ccgcgagtaggtggagatgccatgccgacccgaagaggaaagaaggacgcgagacgcgaactcgtgagtaaagtcccgct

SEQ ID NO: 42186 - DNA, 80 bp, synthetic construct
  source 1..80: mol_type = other DNA
tgggccaattccgaacgaaggtacgcggtggcaggatcagcgcccgagaggggatgagtgggtaaagagcattggaactt

SEQ ID NO: 42187 - DNA, 80 bp, synthetic construct
  source 1..80: mol_type = other DNA
ccctggcctcccctcgtgtccagcccctccccagtcctggcgaaggtggactccgggattccctgcatgctggggacgaa

SEQ ID NO: 42188 - DNA, 80 bp, synthetic construct
  source 1..80: mol_type = other DNA
atcctctaatctttttcttccattcacccactgctcgaggacatcttctctgtccccgcggtttttcttcgattcggagc

SEQ ID NO: 42189 - DNA, 80 bp, synthetic construct
  source 1..80: mol_type = other DNA
gggaaagaaggcaggtggaaaaaaaggagcgggccccccgatccgaggggcccaaccaccaaagtttggaggcactccgg

SEQ ID NO: 42190 - DNA, 80 bp, synthetic construct
  source 1..80: mol_type = other DNA
cggaggaataactcccaagaagaaaaaagagaaagcaagaatcggacgctccccccaagacgctggagacatcttggaag

SEQ ID NO: 42191 - DNA, 80 bp, synthetic construct
  source 1..80: mol_type = other DNA
ttcctctaacttctttcttccactcacccactgctcgagaacctcttctctgcctccgcggccttccttctcttcggatc

SEQ ID NO: 42192 - DNA, 80 bp, synthetic construct
  source 1..80: mol_type = other DNA
aacagaagactctgacacacgaggagtaagaccatagcgatggggagagatgctaggagttaggggagaccgaagcgagg

SEQ ID NO: 42193 - DNA, 80 bp, synthetic construct
  source 1..80: mol_type = other DNA
aacaagagactctaacgcgctaggagtaagaccatagcgatgggggggaatgctaggagttagaggagaccgaagcgagg

SEQ ID NO: 42194 - DNA, 80 bp, synthetic construct
  source 1..80: mol_type = other DNA
atcctctaacttctttcttccatttatccactgctcgagaacctcttctctgcccccgcggtctttcttcgattcggagc

SEQ ID NO: 42195 - DNA, 80 bp, synthetic construct
  source 1..80: mol_type = other DNA
gggaaaggaggcgggaggaaaagaaggtgcgggcctcccgatccgagaggtccgactgccaaagtttggaggcactccgg

SEQ ID NO: 42196 - DNA, 80 bp, synthetic construct
  source 1..80: mol_type = other DNA
ggaacatagaggaccactggagccatgggatgcccttcccgattccgtccacccctttcccccgagggtcgcccaggaat

SEQ ID NO: 42197 - DNA, 80 bp, synthetic construct
  source 1..80: mol_type = other DNA
tcggaggtactcctcccaagaaggtaacaagagaaagcaagaatcggatgctccccatgacgctggagacatctcggaag

SEQ ID NO: 42198 - DNA, 80 bp, synthetic construct
  source 1..80: mol_type = other DNA
cctttgatgtttcccagccagggattttcttcctctagtttcttgatcttcttcttgatcttccgggtgtccttctcgag

SEQ ID NO: 42199 - DNA, 80 bp, synthetic construct
  source 1..80: mol_type = other DNA
gcgaacagagagcgcttagcacgtgggagtagaccatagcgatagggggagatgctaggagtaggtggagaccgaagcga

SEQ ID NO: 42200 - DNA, 80 bp, synthetic construct
  source 1..80: mol_type = other DNA
tcggagtttgaacccccaagaaggaaaaaagagaaagcaagaactggatgctccccatgacgctggagacatcttggaag

SEQ ID NO: 42201 - DNA, 80 bp, synthetic construct
  source 1..80: mol_type = other DNA
ggccgaagggttgagagtaccccagagggtggaatccacacagagatcagcagacaaatcacctccagaggaccccttca

SEQ ID NO: 42202 - DNA, 80 bp, synthetic construct
  source 1..80: mol_type = other DNA
gcgaacagagagctctgagcaacggggagtagatcatagcgataggtggagatgctaggagttagaggagaccgaagcga

SEQ ID NO: 42203 - DNA, 80 bp, synthetic construct
  source 1..80: mol_type = other DNA
ctctaacttctttcttccactcacccactgctcgagaacctcttctcttcccccgcgactcttcttcgattcaggacggc

SEQ ID NO: 42204 - DNA, 80 bp, synthetic construct
  source 1..80: mol_type = other DNA
ggacgcgtggagccatgggatgctcctcccgattccgtcctcccctttcccccgagggtcgcccaggaatggcgggatcc

SEQ ID NO: 42205 - DNA, 80 bp, synthetic construct
  source 1..80: mol_type = other DNA
atgggccaagtccgaggaagagcccggagatgggacaggtggaggatccccgaggaggcaataacgagagagcggagaca

SEQ ID NO: 42206 - DNA, 80 bp, synthetic construct
  source 1..80: mol_type = other DNA
ggaatggggaaaattggcgggatggtagagaagagcgagcctcccgatccgaggtttccctgaacttatcagatctggag

SEQ ID NO: 42207 - DNA, 80 bp, synthetic construct
  source 1..80: mol_type = other DNA
ccggggaactcggccttcttccccaactagccggtctcggaccctcttccaaacgaacggagggactctggcgactcggg

SEQ ID NO: 42208 - DNA, 80 bp, synthetic construct
  source 1..80: mol_type = other DNA
catcatgtcttcagtcttagctgcttacgaacagtttcttcaaacaactgaagatcggagttttggtgatcaacaatttg

SEQ ID NO: 42209 - DNA, 80 bp, synthetic construct
  source 1..80: mol_type = other DNA
aaatagatagtaatttagataagtatattcaattcaatgatgctaacgatgaaagagatgttttcggtgatatattataa

SEQ ID NO: 42210 - DNA, 80 bp, synthetic construct
  source 1..80: mol_type = other DNA
ttgcagagtacaaagtccctggcgaaattgtaatgtccgtcaaagaaatgttgtcagatatgattaggagaaggaacttg

SEQ ID NO: 42211 - DNA, 80 bp, synthetic construct
  source 1..80: mol_type = other DNA
ggatgctctgcaatcagctttcccattcctgctccgccatttacgatttcaatcatcaactatgcttcttttaactgttt

SEQ ID NO: 42212 - DNA, 80 bp, synthetic construct
  source 1..80: mol_type = other DNA
tgctctaaatccaacatccttccctctgaactgccaaccacaactgcaatgctcagtcatgcttattttacttgcttata

SEQ ID NO: 42213 - DNA, 80 bp, synthetic construct
  source 1..80: mol_type = other DNA
taattctgtcttgtctactcttctttatcttcttttgttttaaacacttaaagggctgtgcggcaacgatatctttgaga

SEQ ID NO: 42214 - DNA, 80 bp, synthetic construct
  source 1..80: mol_type = other DNA
ttgcagagtataaagtacctggtgagattgtgatgtctgtcaaagaaatgttatcagacatgatcagaaggagaaatctg

SEQ ID NO: 42215 - DNA, 80 bp, synthetic construct
  source 1..80: mol_type = other DNA
aaggtgtttcatattcagcttttctcctcctgcatcactacttacagttataactatcaatcacgttcattccaactgcc

SEQ ID NO: 42216 - DNA, 80 bp, synthetic construct
  source 1..80: mol_type = other DNA
acgatgtttcccagccaggggttttcatcctcaagtttcttgatcttcttgttggttcgccggagatccttctcgagtat

SEQ ID NO: 42217 - DNA, 80 bp, synthetic construct
  source 1..80: mol_type = other DNA
tttggaaagcactccgggccgaagggttgagagcaccccagtgggggaagccactcggagttcagcagaaaaaacacctc

SEQ ID NO: 42218 - DNA, 80 bp, synthetic construct
  source 1..80: mol_type = other DNA
ccaagttcgagatgggccatagttccgaacgaggattccgcgagtggaaggatcagcgcccgagagggagtgacggcaaa

SEQ ID NO: 42219 - DNA, 80 bp, synthetic construct
  source 1..80: mol_type = other DNA
gagcattggaacgccgaagggatgactcccaagaaggaaaaagagaattcaagagacgggcgactctccccataacgctg

SEQ ID NO: 42220 - DNA, 80 bp, synthetic construct
  source 1..80: mol_type = other DNA
ggagacatcctggaagaggaaagaggatgggtggaagagaaggaggcgggccccccgatccgaggtgcccggcggccaag

SEQ ID NO: 42221 - DNA, 80 bp, synthetic construct
  source 1..80: mol_type = other DNA
cagaggaccccttcagcgaacagaagagtctactcggatcaggagtaagaccatagcgataggaagagatgctaggagtt

SEQ ID NO: 42222 - DNA, 80 bp, synthetic construct
  source 1..80: mol_type = other DNA
ctcgtcttcctcggtcaacctcttgagttcctcttcttcttccttgctcaggctcttccctcctccagatagttgcttct

SEQ ID NO: 42223 - DNA, 80 bp, synthetic construct
  source 1..80: mol_type = other DNA
gcctctggagttcctcttcttcctcttggctgaggcgctttcctcctccggccagctgcttcttcttgttctccagggcc

SEQ ID NO: 42224 - DNA, 80 bp, synthetic construct
  source 1..80: mol_type = other DNA
ccagccaggggttttcatcctcaagtttcttgatcttcttgttggatcgccggagatccttctcgagcagtcgccttttc

SEQ ID NO: 42225 - DNA, 80 bp, synthetic construct
  source 1..80: mol_type = other DNA
ggtctcccctcaggtccagcccccccccggtcctggtgaaggtggactccgggatgccttgcatgttggggacgaagccg

SEQ ID NO: 42226 - DNA, 80 bp, synthetic construct
  source 1..80: mol_type = other DNA
ccagaggagtttgctgccgacgggcattcgaaccggggactccgctgctgtcttcgcctttcctctcccagcctacgacg

SEQ ID NO: 42227 - DNA, 80 bp, synthetic construct
  source 1..80: mol_type = other DNA
gtttgccggcgtcacgggggctcctccctcctgctgtcttcctctgttggaagcttggtggttccagccgaggattttcg

SEQ ID NO: 42228 - DNA, 80 bp, synthetic construct
  source 1..80: mol_type = other DNA
gtcgttggactgttgagaaggaaaaagaacgaagagggagcgcccccggcgaagaggcccaggcaggaaaccatggaggt

SEQ ID NO: 42229 - DNA, 80 bp, synthetic construct
  source 1..80: mol_type = other DNA
tccgagggaacgggagagcgttcgagaactccttcctctttcaagagaatagagagatcgtcgaagctccccggtctcag

SEQ ID NO: 42230 - DNA, 80 bp, synthetic construct
  source 1..80: mol_type = other DNA
gtcatcggactgttgagaaggaagaaggacgaagacggaggacccccggcgaagaggtgcgagaggaccatggagattga

SEQ ID NO: 42231 - DNA, 80 bp, synthetic construct
  source 1..80: mol_type = other DNA
atccgaggagtcgggggggcgctcgagagctccttcctcctctaggagatcaaagagatcgtcgaggctccccggtctca

SEQ ID NO: 42232 - DNA, 80 bp, synthetic construct
  source 1..80: mol_type = other DNA
tctggatgtggcttgtccgttcagctccgggtggatcaccctccgctggtagttttctcccttaagtccggaggactcca

SEQ ID NO: 42233 - DNA, 80 bp, synthetic construct
  source 1..80: mol_type = other DNA
gaggtgtttgctgccgatgggcattcggatcggggtctccgccactgtcttcgctcctcctctcccagtccgcgacgttg

SEQ ID NO: 42234 - DNA, 80 bp, synthetic construct
  source 1..80: mol_type = other DNA
cgtcatcggactgatgagaaagaagggaggcgaagacgggagcgccccgacgaagaggcccaggctggaaaccatggagg

SEQ ID NO: 42235 - DNA, 80 bp, synthetic construct
  source 1..80: mol_type = other DNA
aagatgttctgcaatcagctttcccattcctactctgccatccactactgcaaccatcaactatgtttatttaaactgct

SEQ ID NO: 42236 - DNA, 80 bp, synthetic construct
  source 1..80: mol_type = other DNA
atgctctgtatccaacctctctccttccgaaccaccacccataattgcaaggttcaattacacttattttatccgcttat

SEQ ID NO: 42237 - DNA, 80 bp, synthetic construct
  source 1..80: mol_type = other DNA
tatgtaatgttgttttgctaactttatcttgctatcttttatttcagatacttaaagggctgtgcggcaacgatatcttt

SEQ ID NO: 42238 - DNA, 80 bp, synthetic construct
  source 1..80: mol_type = other DNA
agcatgagggaggcggtggagccatgggatgcccttcccgattccgtccatcccttccccctagtgtcgcccaggaatgg

SEQ ID NO: 42239 - DNA, 80 bp, synthetic construct
  source 1..80: mol_type = other DNA
cttgggaccccactctctgcggggtccgcgttccatcctttcttacctgatggccggcatggtcccagcctcctcgctgg

SEQ ID NO: 42240 - DNA, 80 bp, synthetic construct
  source 1..80: mol_type = other DNA
atgggccaagtccgacgaagagctcgaggacttggggagaggacagatcccgaggtgggccccaacttaagaaggtagga

SEQ ID NO: 42241 - DNA, 80 bp, synthetic construct
  source 1..80: mol_type = other DNA
ttatcccgggggtacggccgaatccctccatgccagttccacggctcccttccgaaggtcgtggaggactggagcgtagg

SEQ ID NO: 42242 - DNA, 80 bp, synthetic construct
  source 1..80: mol_type = other DNA
atcgtcgaggaaattctcccaagagtcccgggagtgacaagaaacggaagactttcccccattggcccggacgggtcccg

SEQ ID NO: 42243 - DNA, 80 bp, synthetic construct
  source 1..80: mol_type = other DNA
cggtctcctcggatgtcgattccctctcctgttctggagaagggagactccgggacacctagcagttggggaacgaagcc

SEQ ID NO: 42244 - DNA, 80 bp, synthetic construct
  source 1..80: mol_type = other DNA
cccggggaactcggctatcttccccaactagccggtcccggatccccttccaaacgaaaggtgggacttcggcagttcgg

SEQ ID NO: 42245 - DNA, 80 bp, synthetic construct
  source 1..80: mol_type = other DNA
gggacccgcagtcccatggtgggaacccgtagtccaccactccacactccttccccccgcggggccccccatccaaagag

SEQ ID NO: 42246 - DNA, 80 bp, synthetic construct
  source 1..80: mol_type = other DNA
gaagaggaaagaaggattcggacgcaaacctgtgagtggaagttccacctttattggggggtacactcgaggagtggaag

SEQ ID NO: 42247 - DNA, 80 bp, synthetic construct
  source 1..80: mol_type = other DNA
agttccacctttattggtgggtacactcgaggagtggaaggcggtgagaggggaccggattattcccccatggaaactgc

SEQ ID NO: 42248 - DNA, 80 bp, synthetic construct
  source 1..80: mol_type = other DNA
ccgagcatgggccaagtccgaggaagagcccggatatgggtgaggtggaggacccccgaaggaggcaaagtcgagagagc

SEQ ID NO: 42249 - DNA, 80 bp, synthetic construct
  source 1..80: mol_type = other DNA
atctggagactccgacccaaaggggtcaaaggtaggacagggaggcaatccaccaggagaattcggacaacccacctcca

SEQ ID NO: 42250 - DNA, 80 bp, synthetic construct
  source 1..80: mol_type = other DNA
ggcttatcccggggaactcggccttcttccccaactagccggccccggacccccttccaaacgaacgggaggacctcggc

SEQ ID NO: 42251 - DNA, 80 bp, synthetic construct
  source 1..80: mol_type = other DNA
ggctcgtgggacccgcggttccatggtagactcccgagccccccactccacactccttccccccgcggggcccgccatcc

SEQ ID NO: 42252 - DNA, 80 bp, synthetic construct
  source 1..80: mol_type = other DNA
gtgagcctcagtaccgaccgaagggagcgatgggagaggagggtctcccgaggtgggtttcccactaaagagagggagac

SEQ ID NO: 42253 - DNA, 80 bp, synthetic construct
  source 1..80: mol_type = other DNA
gatctcccctcacgtccaacccctccccggtccggtggtaggtggactccgggactccttgcaggttggggacgaagccg

SEQ ID NO: 42254 - DNA, 80 bp, synthetic construct
  source 1..80: mol_type = other DNA
gaatgggaaagaggaaggcggaatagtggagcggccccccgatccgaatggcccgactgccaagtttggaaagcactccg

SEQ ID NO: 42255 - DNA, 80 bp, synthetic construct
  source 1..80: mol_type = other DNA
ggccgtacggttgggaaccctccagagggaagaagccacacggagtagaacagacaaatcacctccagaggaccccttca

SEQ ID NO: 42256 - DNA, 80 bp, synthetic construct
  source 1..80: mol_type = other DNA
ttatcccggggaactcggcgaatcgtccccacctagcagagcccggaccctctacaaaaaggaccaagggaggtggttag

SEQ ID NO: 42257 - DNA, 80 bp, synthetic construct
  source 1..80: mol_type = other DNA
acttcggggggattactcccaagaagttccaagagaacttcaagaatgaggagagtccccaagacgctggagaaatctag

SEQ ID NO: 42258 - DNA, 80 bp, synthetic construct
  source 1..80: mol_type = other DNA
cttgctactctttttccctggtccggagtcgacctccatccgatctgttcggggtctcttcgccgggagagctccctccc

SEQ ID NO: 42259 - DNA, 80 bp, synthetic construct
  source 1..80: mol_type = other DNA
cgcccccgggcgctcccctcggaggtcccacgggagggttcacatccccaacccgcgggccggctactcttcttgatctc

SEQ ID NO: 42260 - DNA, 80 bp, synthetic construct
  source 1..80: mol_type = other DNA
catctgcttcctctctcgccttgacccacttggttaggatctcctccctagctcccctccgggatttcttcggatcggga

SEQ ID NO: 42261 - DNA, 80 bp, synthetic construct
  source 1..80: mol_type = other DNA
agtccgagcatgggccgaagccgacgaagagtccggaggtggagaggagaggatcccccgagggagttcaaggacgagga

SEQ ID NO: 42262 - DNA, 80 bp, synthetic construct
  source 1..80: mol_type = other DNA
gcggagatgctcccgaggaatctactcccaagagggcaagggaagactcaagatcccggaacgtttccccgttacgccgg

SEQ ID NO: 42263 - DNA, 80 bp, synthetic construct
  source 1..80: mol_type = other DNA
gatgacatctcggaatgaggaaagaggtcagagatggtagaaaagagcgagcctcccgatacgagtttcccctgaaccta

SEQ ID NO: 42264 - DNA, 80 bp, synthetic construct
  source 1..80: mol_type = other DNA
ttggatctggagactccgaccctaaggggtcaaaggaagggcagggaggctatcctcctggagatctcggaaaacccacc

SEQ ID NO: 42265 - DNA, 80 bp, synthetic construct
  source 1..80: mol_type = other DNA
tccagaggaccccttcagcgaacagaagagcatgagcccgtcgaattgtcccgtagcgataggaggagatgctaggagtg

SEQ ID NO: 42266 - DNA, 80 bp, synthetic construct
  source 1..80: mol_type = other DNA
ggtggagacccgggagagcgatcaaagataagaaagcaacggggctagcgagtggatgttccgcccctcgtgggtcccga

SEQ ID NO: 42267 - DNA, 80 bp, synthetic construct
  source 1..80: mol_type = other DNA
cactcttgtcctttccaattattcctttgatgtttcccagccagggattctcgtcctcaagtttcttgatagttctcctt

SEQ ID NO: 42268 - DNA, 80 bp, synthetic construct
  source 1..80: mol_type = other DNA
gtgaggcttatcccggggaactcggcgtttcttccccaactagccgggcccgggtcccctaccaaatgaacggtgagggc

SEQ ID NO: 42269 - DNA, 80 bp, synthetic construct
  source 1..80: mol_type = other DNA
tggtactccgggttcccgcggttccatggtgatccccccggaccccccactccacactccttcccgcccgcgtggcctcc

SEQ ID NO: 42270 - DNA, 80 bp, synthetic construct
  source 1..80: mol_type = other DNA
cacgaaagaaagaaacctcactctacagggtccgctatcctatcctttcttacctgtggccggcatggtcccagcctcct

SEQ ID NO: 42271 - DNA, 80 bp, synthetic construct
  source 1..80: mol_type = other DNA
ccccttcagcgaacagaaggctctctcacgcgtcaggagtaagaccatagcacaggggaagatgctaggaggtagtggag

SEQ ID NO: 42272 - DNA, 80 bp, synthetic construct
  source 1..80: mol_type = other DNA
agccccccttgttactctttttccccgaactggagtcgatctccatccgatctgttcggggtctcttcgccggtggagct

SEQ ID NO: 42273 - DNA, 80 bp, synthetic construct
  source 1..80: mol_type = other DNA
ccgcggggaggtggagatgccatgccgacccgaagaggaaagaaggattcggacgcaaacctgtgagtggaagttcactc

SEQ ID NO: 42274 - DNA, 80 bp, synthetic construct
  source 1..80: mol_type = other DNA
ccttccccactcccgctctttccaattattcctttgatgtttcccagccagggattatcgtcctctagtttcttgatggt

SEQ ID NO: 42275 - DNA, 80 bp, synthetic construct
  source 1..80: mol_type = other DNA
ttcgtcggtggtcccgtctctcctcgtcggtgaagccccccttgttactctttttccctggtccggagtcgacctccatc

SEQ ID NO: 42276 - DNA, 80 bp, synthetic construct
  source 1..80: mol_type = other DNA
cgcctaaagatggaactccaccctccagggttcgctatcctacccttttcttacctttggccggcatggtcccagcctcc

SEQ ID NO: 42277 - DNA, 80 bp, synthetic construct
  source 1..80: mol_type = other DNA
tcgctggcgccggctgggcaacattccgaggggaccgttcctcggtaatggcgaatgggacccaagacctccatgattcc

SEQ ID NO: 42278 - DNA, 80 bp, synthetic construct
  source 1..80: mol_type = other DNA
caaagagaatcgggaggtgactgggcattccctttgccatccgagtggacgtctgtcctccttcggatgcccaggtcgga

SEQ ID NO: 42279 - DNA, 80 bp, synthetic construct
  source 1..80: mol_type = other DNA
cgtccgcgtcgtcccttgccttgacccacttcgagaggatttcctcccttcccttccgagttctcttcgaatcggctagg

SEQ ID NO: 42280 - DNA, 80 bp, synthetic construct
  source 1..80: mol_type = other DNA
cgagcccgagcatgggccaggtccgacgaagagtccggaaataggagagaggaaagatcccccgagggggcaaggacaag

SEQ ID NO: 42281 - DNA, 80 bp, synthetic construct
  source 1..80: mol_type = other DNA
agggcggagacgctccgaggaaggactcccaagaaggacaaggagaaactcaagatccgggaacgaatccccaagacgcc

SEQ ID NO: 42282 - DNA, 80 bp, synthetic construct
  source 1..80: mol_type = other DNA
ggtgaagctctcggaatgaggaaaataggcgggatggtagaaaagaacgagcctcccgatacgagtttcccctgaaccta

SEQ ID NO: 42283 - DNA, 80 bp, synthetic construct
  source 1..80: mol_type = other DNA
ttggatctggagactccgacctcaaggggtcaaaggtaggacaggggggcaatccaccaggagttctcggacaacccacc

SEQ ID NO: 42284 - DNA, 80 bp, synthetic construct
  source 1..80: mol_type = other DNA
caatccaccaggagttctcggacaacccacctccagaggaccccttcagcgaacagaagagcctgtcccggtcgaacagt

SEQ ID NO: 42285 - DNA, 80 bp, synthetic construct
  source 1..80: mol_type = other DNA
tccagaggaccccttcagcgaacagaagagcctgtcccggtcgaacagtcccgtagcgatgggaggagatgctaggagta

SEQ ID NO: 42286 - DNA, 80 bp, synthetic construct
  source 1..80: mol_type = other DNA
gggagagaccggtgcgagaggagcaagacaagaaagcaacggggctagcgagtggatgttccgccccccgttggctccga

SEQ ID NO: 42287 - DNA, 80 bp, synthetic construct
  source 1..80: mol_type = other DNA
aaagcaacggggctagcgagtggatgttccgccccccgttggctccgagtgaggcttatcccggggaactcggctatctt

SEQ ID NO: 42288 - DNA, 80 bp, synthetic construct
  source 1..80: mol_type = other DNA
gtgaggcttatcccggggaactcggctatcttccccaactagccggccccgggccccctcccaacgaacgggaggatctc

SEQ ID NO: 42289 - DNA, 80 bp, synthetic construct
  source 1..80: mol_type = other DNA
gacagatcgggagacccgcagctccatggtgtaaccgccgtagcccccaactccacactccttccccccgcggggccccc

SEQ ID NO: 42290 - DNA, 80 bp, synthetic construct
  source 1..80: mol_type = other DNA
gtgaggtccctttccgggtccggagtctacctccatccggtccgttcgggccctcttcgccggaggagcccctcctccgt

SEQ ID NO: 42291 - DNA, 80 bp, synthetic construct
  source 1..80: mol_type = other DNA
gccttccggaggtccctctcgaggtcttccacatgctttcttgtggacacccactgctcgagaatgtcctcccgtcctcc

SEQ ID NO: 42292 - DNA, 80 bp, synthetic construct
  source 1..80: mol_type = other DNA
tcgcttctccttcttgtcggaccggctcatctcggcgagaggcgaacggtcctcagtgctcttactcttttctgtaaaga

SEQ ID NO: 42293 - DNA, 80 bp, synthetic construct
  source 1..80: mol_type = other DNA
ggagactgctggactcgtcgccccagtccgaggtgagcctcagttccgaccgaagggtgcgatgggagaggtggatcttc

SEQ ID NO: 42294 - DNA, 80 bp, synthetic construct
  source 1..80: mol_type = other DNA
cgagggaggtaccactaaagaaagggaaaacactccgaggggatcactcccaagaagttccaagagaatctcaagaatga

SEQ ID NO: 42295 - DNA, 80 bp, synthetic construct
  source 1..80: mol_type = other DNA
gggatcactcccaagaagttccaagagaatctcaagaatgaggaggatccccacgacgctggagaaatctaggaatggga

SEQ ID NO: 42296 - DNA, 80 bp, synthetic construct
  source 1..80: mol_type = other DNA
ggaggatccccacgacgctggagaaatctaggaatgggaaaggggaaggcggaaagaatggagcggccccccgatccgaa

SEQ ID NO: 42297 - DNA, 80 bp, synthetic construct
  source 1..80: mol_type = other DNA
tggcccaactgccgagtttggagagcactccgggccgtacggtcgggaaccctccagagggaagaagccacccggagttg

SEQ ID NO: 42298 - DNA, 80 bp, synthetic construct
  source 1..80: mol_type = other DNA
gacggagaaatcacctccagaggaccccttcagcgaacagaaggctctctcacgcggtagagtaagaccatagcgtagga

SEQ ID NO: 42299 - DNA, 80 bp, synthetic construct
  source 1..80: mol_type = other DNA
gaagatgctaggagtggtggcgaccagaacgagaagaaaagcaaagaaagcaacggggctagccagtgggtgttccgccc

SEQ ID NO: 42300 - DNA, 80 bp, synthetic construct
  source 1..80: mol_type = other DNA
ccttatccttctttccgattattcctttgatgtttcccagccagggattttcgtcctcgagtttcttgatcttcctcttg

SEQ ID NO: 42301 - DNA, 80 bp, synthetic construct
  source 1..80: mol_type = other DNA
atgggccaagttccgacgaagagtccggagatgggagaggtggaagacctccgaagaggcaaagacgagggtgcggagac

SEQ ID NO: 42302 - DNA, 80 bp, synthetic construct
  source 1..80: mol_type = other DNA
cgtccgcctcttcccttgctttaacccacttcaggaggatctcctcccttcccttccgggatctcttcgaatcggcgtgg

SEQ ID NO: 42303 - DNA, 80 bp, synthetic construct
  source 1..80: mol_type = other DNA
tggaatgaggaaaataggcgggatggtagaaaagagcgagcctcccgatccgagagacccctgaacctattggatctgga

SEQ ID NO: 42304 - DNA, 80 bp, synthetic construct
  source 1..80: mol_type = other DNA
gactccgaccctaaggggtttaagatagaacaggggaggcaatccaccaggagttttcggacaacccacctccagaggac

SEQ ID NO: 42305 - DNA, 80 bp, synthetic construct
  source 1..80: mol_type = other DNA
ggagccagcggctccatggtgaacgcccgtgtcccccactccacactccttccccccgcggggccccccatccaaagaag

SEQ ID NO: 42306 - DNA, 80 bp, synthetic construct
  source 1..80: mol_type = other DNA
actctgaggagaagactcccaagaggacaagaagtgactcaagatccgggaacgaatccccaagacgccggtgaagctct

SEQ ID NO: 42307 - DNA, 80 bp, synthetic construct
  source 1..80: mol_type = other DNA
aaggcgtttcacattcagcttttctccgcccgcatcactacttacagttatgactattaatcacgtttattttaattgct

SEQ ID NO: 42308 - DNA, 80 bp, synthetic construct
  source 1..80: mol_type = other DNA
taatgctgttttgctaattttatcttgctatctttcatttcaaatacttaaagggctgtgcggcaacgatatctttgaga

SEQ ID NO: 42309 - DNA, 80 bp, synthetic construct
  source 1..80: mol_type = other DNA
ctctaacttctttcttccactgacccactgctcgaggatctcctctctgtctccgcggtttttcttcttctcggaacggc

SEQ ID NO: 42310 - DNA, 80 bp, synthetic construct
  source 1..80: mol_type = other DNA
cgtcggaggaggccccccaagaagttaaagagaaaacaagaatcggaagttttccccataacgctgaagacatctcggaa

SEQ ID NO: 42311 - DNA, 80 bp, synthetic construct
  source 1..80: mol_type = other DNA
cttgagccaattccgggcgaagggagcgcggaggaaggatcggcgctcgagaggggctgaatggcaaagagtattggaat

SEQ ID NO: 42312 - DNA, 80 bp, synthetic construct
  source 1..80: mol_type = other DNA
gtgtctatctccattcggtccgttcgggccttcgccggaggtgccccctctccgtccttgtccttctttccgagaattcc

SEQ ID NO: 42313 - DNA, 80 bp, synthetic construct
  source 1..80: mol_type = other DNA
tttgatgtttcccagccaggggttatcgtcctcaagtttcttgattttcttcttaaccttccggaggtccctctcgagtt

SEQ ID NO: 42314 - DNA, 80 bp, synthetic construct
  source 1..80: mol_type = other DNA
cctctaacttctttcttccattcacccactgctcgagaacctcttccctgcctccgcgacttttcttcgattcggagcgg

SEQ ID NO: 42315 - DNA, 80 bp, synthetic construct
  source 1..80: mol_type = other DNA
ctcatcccagcaaagggcgggggtcctcagtgctcttactcttttctgtaaagaggagactcgtggacgctccgcccagg

SEQ ID NO: 42316 - DNA, 80 bp, synthetic construct
  source 1..80: mol_type = other DNA
gaaggggaaaggggatgggaggaaaagaaggtgcgggcctcccgatccgaggcgcccaaccaccgagattagagcactcc

SEQ ID NO: 42317 - DNA, 80 bp, synthetic construct
  source 1..80: mol_type = other DNA
agcatgagggaggcggtggagccatgccatgggatgcccttcccgattccgtccatacccgctcccagagggtcgcccag

SEQ ID NO: 42318 - DNA, 80 bp, synthetic construct
  source 1..80: mol_type = other DNA
ttcggagaaactactcccaagaaggaaaaaagagcaaacaagaagcggacgactctccccatgacgctggagacaccttg

SEQ ID NO: 42319 - DNA, 80 bp, synthetic construct
  source 1..80: mol_type = other DNA
ctgggccaagtccgagcgaagggacgcggtgggaggaacagctcccgagaggcgatgaatgggtaaagagcattggaaca

SEQ ID NO: 42320 - DNA, 80 bp, synthetic construct
  source 1..80: mol_type = other DNA
actgagccatctccgaacgaagagaacgcaggggacgggatcagctcccgagaggggatcagtggtaaagagcattggaa

SEQ ID NO: 42321 - DNA, 80 bp, synthetic construct
  source 1..80: mol_type = other DNA
ctcgactttttttcttccactcacccactgctcgaggatctcctctctgtctccgcgcctcttcttcgattcggaacggc

SEQ ID NO: 42322 - DNA, 80 bp, synthetic construct
  source 1..80: mol_type = other DNA
ggtgaaagagggaaggtggaaaagaaggagcgggcctcccgatccaaggggcccgacggccaagtttgggaggcattccg

SEQ ID NO: 42323 - DNA, 80 bp, synthetic construct
  source 1..80: mol_type = other DNA
ggagagggcacgagtgaggctcttcgccgggtgagctccctcacgtccccacatagcaggacccaggacccccttccaaa

SEQ ID NO: 42324 - DNA, 80 bp, synthetic construct
  source 1..80: mol_type = other DNA
tcttcgccgggtgagctccctcacgtccccacatagcaggacccaggacccccttccaaaatgaccgagggaggtggcta

SEQ ID NO: 42325 - DNA, 80 bp, synthetic construct
  source 1..80: mol_type = other DNA
cgtcggaggacacctcccaagaaggcaaagagaaaacaagaatcggaagttctccctatgacgctggagacatcctggaa

SEQ ID NO: 42326 - DNA, 80 bp, synthetic construct
  source 1..80: mol_type = other DNA
catgggccatctccgagcgaagggaacgcgctggagagatcatctcccgagaggggatgaacggtaaagagcattggaac

SEQ ID NO: 42327 - DNA, 80 bp, synthetic construct
  source 1..80: mol_type = other DNA
cctttgatgtttcctagccagggattttcttcctcgagtttcttgatcttcttcttaaccttccgggcctccctttcgag

SEQ ID NO: 42328 - DNA, 80 bp, synthetic construct
  source 1..80: mol_type = other DNA
atcctctaacttctttcttccgttcacccactgctcgaggatatcttctcttcccccgcggttcttcttcgactcggaac

SEQ ID NO: 42329 - DNA, 80 bp, synthetic construct
  source 1..80: mol_type = other DNA
ccgaagggtcgaggtaccccagagggaggaatccactcggagatgagcagagaaatcacctccagaggaccccttcagcg

SEQ ID NO: 42330 - DNA, 80 bp, synthetic construct
  source 1..80: mol_type = other DNA
aacagagaactctgacgcgcgaggagtaagcccatagcgatagggggagatgctaggagttagaggagatcgaagcgagg

SEQ ID NO: 42331 - DNA, 80 bp, synthetic construct
  source 1..80: mol_type = other DNA
actcggcgaatcgtccccacatagcaggaccccggaccccttcaaaaatgaccgaggagggtagcttggaacatggagga

SEQ ID NO: 42332 - DNA, 80 bp, synthetic construct
  source 1..80: mol_type = other DNA
aaatgaccgaggggggtagcttggaacatggaggaccggtggagccatgggatgcccttcccgatgtccgtccaatccct

SEQ ID NO: 42333 - DNA, 80 bp, synthetic construct
  source 1..80: mol_type = other DNA
ccggtggagccatgggatgcccttcccgatgtccgtccaatccctcccccccaggggtcgcccaggaatggcaggacccc

SEQ ID NO: 42334 - DNA, 80 bp, synthetic construct
  source 1..80: mol_type = other DNA
atcggaggaatacccaagaaggaaaaaagagaaagcaagagacggacgacctccccaagacgctgggggaacctaggaag

SEQ ID NO: 42335 - DNA, 80 bp, synthetic construct
  source 1..80: mol_type = other DNA
ctctaacttctttcttccgtttacccactgctcgaggatcccctctcttccatcgcgcttcttcttcgactcggaacggc

SEQ ID NO: 42336 - DNA, 80 bp, synthetic construct
  source 1..80: mol_type = other DNA
gaacgcggggaaccagtggagccatgggatgccccttccaagttcgaatcatctccctccccccgagtgtcgcccaggaa

SEQ ID NO: 42337 - DNA, 80 bp, synthetic construct
  source 1..80: mol_type = other DNA
tcctgagctccggggcctggcacaggcattaattgatcaaaaagtgaaggaaatatctaatcaggaaccgcttaagcttt

SEQ ID NO: 42338 - DNA, 80 bp, synthetic construct
  source 1..80: mol_type = other DNA
tgcactaggggttgggttgggtgggccatttatccgttatgtaatctcagggtggtttaggacgtcaccttaagtgactt

SEQ ID NO: 42339 - DNA, 80 bp, synthetic construct
  source 1..80: mol_type = other DNA
ttgcacaatcaattcagggaaaaatagatgaattaaggagacagctggctgatcgtgtggcagcagggaaaaacattggc

SEQ ID NO: 42340 - DNA, 80 bp, synthetic construct
  source 1..80: mol_type = other DNA
acccaactggactagaccctggagatcacctcaaagagaagtcaatgctcagttatggaaatgtcattgacctcaaccat

SEQ ID NO: 42341 - DNA, 80 bp, synthetic construct
  source 1..80: mol_type = other DNA
gaccacgggaggccagtggagccatgggatgctcttcccgatgctcgactcctacccttccccctgagggtcgcccagga

SEQ ID NO: 42342 - DNA, 80 bp, synthetic construct
  source 1..80: mol_type = other DNA
gggccagtggagccatgggatgctcttcccgatgctcgactcctacccttccccctgagggtcgcccaggaatggcggga

SEQ ID NO: 42343 - DNA, 80 bp, synthetic construct
  source 1..80: mol_type = other DNA
tcggaggaagcaaccccaagaagaaacaagggaactcaagaatcggagacttcccccatgacgctggagacatcctggaa

SEQ ID NO: 42344 - DNA, 80 bp, synthetic construct
  source 1..80: mol_type = other DNA
cggctcatcccggcaaagggcggcggtcctcagttctcttactcttttctgtaaagaggagactgctggacgctccgccc

SEQ ID NO: 42345 - DNA, 80 bp, synthetic construct
  source 1..80: mol_type = other DNA
ttcggaggaggcccccccaagaaaaaaaagagaaagcaagagacggagaccctccccataacgctggagacatcctggaa

SEQ ID NO: 42346 - DNA, 80 bp, synthetic construct
  source 1..80: mol_type = other DNA
gagcgcgggaggccagtggagccatgggatgcccttcccgatgtccgagtccatcccttccccccgagggtcgcccagga

SEQ ID NO: 42347 - DNA, 80 bp, synthetic construct
  source 1..80: mol_type = other DNA
tccatcccttccccccgagggtcgcccaggaatggcaggaccccactcgacaagggtccgcgttccatcctttcttacct

SEQ ID NO: 42348 - DNA, 80 bp, synthetic construct
  source 1..80: mol_type = other DNA
aacagaagactcgtgagtggctaggagtaagaccatagcgatggggggagatgctaggagttagaggagaccgaagcgag

SEQ ID NO: 42349 - DNA, 80 bp, synthetic construct
  source 1..80: mol_type = other DNA
aactcggcgaatcgtccccacatagcagagcccggacccccttccaaaaatgaccgggagaggcgcttggagcgcgggtg

SEQ ID NO: 42350 - DNA, 80 bp, synthetic construct
  source 1..80: mol_type = other DNA
gccggtggagccgtgggatgctcctcccgatttccgattccatcccctcccccagcgggtcgcccaggaatggcgggacc

SEQ ID NO: 42351 - DNA, 80 bp, synthetic construct
  source 1..80: mol_type = other DNA
gaagaactactcccaagaagaaacaagagaaagcaagaagcggagaatttccccataacgctggcgacatcttggaaggg

SEQ ID NO: 42352 - DNA, 80 bp, synthetic construct
  source 1..80: mol_type = other DNA
aggggaaagagggcgggaggaaaaaaaggtgcgggcctcccgatccgagaggtccgtccgccagaactggatggcactcc

SEQ ID NO: 42353 - DNA, 80 bp, synthetic construct
  source 1..80: mol_type = other DNA
gtcggaggaggccccccaagaagaaaaaaagagaaagcaagaataggagactttccccaggacgcgggagacatctggaa

SEQ ID NO: 42354 - DNA, 80 bp, synthetic construct
  source 1..80: mol_type = other DNA
aacaagcatctttgaaagtagccatggctttttttatgaaaagtcttgtggaagccatggctactttcaaagatgcttgt

SEQ ID NO: 42355 - DNA, 80 bp, synthetic construct
  source 1..80: mol_type = other DNA
aaggtgtttcacattcagcccctctcctcctgcatcactacctacagttatgactatcagtcacgtttattttaattgcg

SEQ ID NO: 42356 - DNA, 80 bp, synthetic construct
  source 1..80: mol_type = other DNA
tcgctttttcttcctttcctctacccactgctcgagggcctcctccctctccttcgagccgggtcttgcaccgggttggc

SEQ ID NO: 42357 - DNA, 80 bp, synthetic construct
  source 1..80: mol_type = other DNA
agatgctaggagtcggtggaagccagaacgactgggaaaggaaagaaagcaacggggctagctgccgggtgttccatcca

SEQ ID NO: 42358 - DNA, 80 bp, synthetic construct
  source 1..80: mol_type = other DNA
tgttccatccatgggatcggtgccgagtgaggcttatcccggtgggattgcctcggccccctccctaacacgggagtacc

SEQ ID NO: 42359 - DNA, 80 bp, synthetic construct
  source 1..80: mol_type = other DNA
ggggattgcctcggccccctccctaacacgggagtacccgggccccctcccaggaaaggagacggagggaaatcgaccgg

SEQ ID NO: 42360 - DNA, 80 bp, synthetic construct
  source 1..80: mol_type = other DNA
gaacgcgggggaccagtggagccatgggatgcccttcccgatgtccgatcatctcccttcccccgagtgtcgcccaggaa

SEQ ID NO: 42361 - DNA, 80 bp, synthetic construct
  source 1..80: mol_type = other DNA
tctgagggcagaaccccaagaagaaaaaaggagaaagcaagagacggacgatttccccatgacgctggagacatcctgga

SEQ ID NO: 42362 - DNA, 80 bp, synthetic construct
  source 1..80: mol_type = other DNA
gtgagcctcgtgccgaccgaagggcgcgatgggggagggggatcctccgagaggagatacccactaaagagaaggagata

SEQ ID NO: 42363 - DNA, 80 bp, synthetic construct
  source 1..80: mol_type = other DNA
ctcgagggccttccttcttcggtgatcccgcctctcctgttcggtgaatcttcccctgagaggtccctttccgggtccgg

SEQ ID NO: 42364 - DNA, 80 bp, synthetic construct
  source 1..80: mol_type = other DNA
agtctacctccatcctgtccgtccgggccctcttcgccgggggagccccttctccgtccctatccttctttccaattatt

SEQ ID NO: 42365 - DNA, 80 bp, synthetic construct
  source 1..80: mol_type = other DNA
ttctcctattcttcctcttgtggatacccactgctcgagaatgtcctcccgtcctcctcgcttctccttcttgtcggacc

SEQ ID NO: 42366 - DNA, 80 bp, synthetic construct
  source 1..80: mol_type = other DNA
gaatgggaaagaggagggcggaaaaaatggagcggcctcccgattcgaacggcccgacgccagaactggagagcactccg

SEQ ID NO: 42367 - DNA, 80 bp, synthetic construct
  source 1..80: mol_type = other DNA
ccctgagggagactgctcccaagaagttccaagagaatctcaagaatgaggaggatccccaggacgctggagaaatctag

SEQ ID NO: 42368 - DNA, 80 bp, synthetic construct
  source 1..80: mol_type = other DNA
attgtgggtgcccctatcgggaccggttctatccgacaggggatggtgaggaactccatcgggttctgcgggacccggtc

SEQ ID NO: 42369 - DNA, 80 bp, synthetic construct
  source 1..80: mol_type = other DNA
tcgccctctttctgtctcccaactctcgggagttctcccccgctccctacctcgggctaacctgccggaagcggcccaat

SEQ ID NO: 42370 - DNA, 80 bp, synthetic construct
  source 1..80: mol_type = other DNA
gatgagccaacccgtcgcaggtttgacctcgaaggggaaggaggagatcctcgaacagtgggtagaagaaaggaagaaaa

SEQ ID NO: 42371 - DNA, 80 bp, synthetic construct
  source 1..80: mol_type = other DNA
tccgaggagtcggggggcgttcgagagcttccttcctcctttctgagagataaagagatcgtcgaagctccccgatctca

SEQ ID NO: 42372 - DNA, 80 bp, synthetic construct
  source 1..80: mol_type = other DNA
ttgtgggtgccccattgggaccagttttctccggaagggacggtggtggaactccatcgggttctgcgggacccggtcga

SEQ ID NO: 42373 - DNA, 80 bp, synthetic construct
  source 1..80: mol_type = other DNA
tctcccccgttcccattcctgggaggtggcccgggaatccgatgctaggagagggacccgaaggcatcacccccgggata

SEQ ID NO: 42374 - DNA, 80 bp, synthetic construct
  source 1..80: mol_type = other DNA
tcctctagatgtggcttgtccgttcaactccgggtggatcaccctccgctggtagttttctcctttggctccgagagact

SEQ ID NO: 42375 - DNA, 80 bp, synthetic construct
  source 1..80: mol_type = other DNA
ccagaggagtttgctgccgacggacattcgaaccggggtctccactgctgtcttcgccactcctctcccatgtcgcgacg

SEQ ID NO: 42376 - DNA, 80 bp, synthetic construct
  source 1..80: mol_type = other DNA
ggtctccactgctgtcttcgccactcctctcccatgtcgcgacggtttgctagcgtcacgggggctcctctctcttgttt

SEQ ID NO: 42377 - DNA, 80 bp, synthetic construct
  source 1..80: mol_type = other DNA
gtttgctagcgtcacggaggctcctctctcttgttttcttcctctgttggtggggttgggggtcccttccgaggatgttc

SEQ ID NO: 42378 - DNA, 80 bp, synthetic construct
  source 1..80: mol_type = other DNA
tgttccccctctttctgtctcccaactctcgggagttctccactcctctctcttcgggccccttcgccggaagggcccca

SEQ ID NO: 42379 - DNA, 80 bp, synthetic construct
  source 1..80: mol_type = other DNA
gtcgtcggtatattgagaaagaagaaggacgaagaaggagggcccccggcgaagaggtccaggcaggaaaccatggaggt

SEQ ID NO: 42380 - DNA, 80 bp, synthetic construct
  source 1..80: mol_type = other DNA
atccgaggatcccagcagttcccatggtatgggtttaccccgcctccccccgggtattactgggacccagggtgcaccca

SEQ ID NO: 42381 - DNA, 80 bp, synthetic construct
  source 1..80: mol_type = other DNA
ggatgagcctatgcgcgggaagtcgtcctcgaaggacagggaggagatcctcgaacagtgggtagaagaaaggaagaaaa

SEQ ID NO: 42382 - DNA, 80 bp, synthetic construct
  source 1..80: mol_type = other DNA
gaggttcttgccgccgaccggcattcggaccggggtctccgctactgttttcgtcactcctctcccagctcgcgacggtt

SEQ ID NO: 42383 - DNA, 80 bp, synthetic construct
  source 1..80: mol_type = other DNA
cgtcgtcggactgttgagaaggaagaaagacgaagacggagcgcccccggcgaagaggcccaggcgggaagacatggagg

SEQ ID NO: 42384 - DNA, 80 bp, synthetic construct
  source 1..80: mol_type = other DNA
ctccagaggagtttgctgccgatgggcattcgaaccggggtctccgccgatggcttcgcctctcctctcccagtccgcga

SEQ ID NO: 42385 - DNA, 80 bp, synthetic construct
  source 1..80: mol_type = other DNA
atgggccacgttccgaacgaagggagcgcggtggaaggatcagcgcccgagaggggtcaatggcaaagagcattggaacg

SEQ ID NO: 42386 - DNA, 80 bp, synthetic construct
  source 1..80: mol_type = other DNA
aatccacacggagaaagcagacaaatcacctccagaggaccccttcagcgaacagagagcactgcgcgcgaggagtaaga

SEQ ID NO: 42387 - DNA, 80 bp, synthetic construct
  source 1..80: mol_type = other DNA
gaacagagagcactgcgcgcgaggagtaagagcgtagcgatggggggagatgctaggagttagaggagaccgaagcgagg

SEQ ID NO: 42388 - DNA, 80 bp, synthetic construct
  source 1..80: mol_type = other DNA
ttatcccggggaactcgacttatcgtccccacatagcagctcccggacccccttcgaaagtgactgggtgtggagcttgg

SEQ ID NO: 42389 - DNA, 80 bp, synthetic construct
  source 1..80: mol_type = other DNA
aacgcgggggttccagtggagccatgggatgcccttcccgattccgtccaaaccccctcccagggagtcgcccagcgaat

SEQ ID NO: 42390 - DNA, 80 bp, synthetic construct
  source 1..80: mol_type = other DNA
gcgaggagatatctcccaagaaggagaagaggcgatcgagagttggacgatctccctataacgctggagacactctggaa

SEQ ID NO: 42391 - DNA, 80 bp, synthetic construct
  source 1..80: mol_type = other DNA
ggacgagtgaggcttatcccggggaactcggcgaatcgtccccacatagcagtgcccgaagccccttccaaaataaccga

SEQ ID NO: 42392 - DNA, 80 bp, synthetic construct
  source 1..80: mol_type = other DNA
ttatcccggggaactcggcgaatcgtccccacatagcagtgcccgaagccccttccaaaataaccgagggtggtggctag

SEQ ID NO: 42393 - DNA, 80 bp, synthetic construct
  source 1..80: mol_type = other DNA
atgggccaagtccgacgaagaggccggagagggagaggagaaggaacccccgaatggacaaagacaggagagcggagaca

SEQ ID NO: 42394 - DNA, 80 bp, synthetic construct
  source 1..80: mol_type = other DNA
agtcgacctccatccgatctgttcgggatctcttcgccgggggagctccctccccattcttgtcctttccaattattcct

SEQ ID NO: 42395 - DNA, 80 bp, synthetic construct
  source 1..80: mol_type = other DNA
ttccgcttcttctcttgatttgacccatttcgtgaggatctcctccctacctcccttccgggatctcttcgaatcggcgt

SEQ ID NO: 42396 - DNA, 80 bp, synthetic construct
  source 1..80: mol_type = other DNA
cggaatagggaaaacggccaagatggtagaaaagagcgagcctcccgatccgaggtttccctgaacctattggatctgga

SEQ ID NO: 42397 - DNA, 80 bp, synthetic construct
  source 1..80: mol_type = other DNA
gactccggccctaaggggtcaaaggaagggcagggaggcaatccaccaggagttttcggaaaaaccacctccagaggacc

SEQ ID NO: 42398 - DNA, 80 bp, synthetic construct
  source 1..80: mol_type = other DNA
aggcaatccaccaggagttttcggaaaaaccacctccagaggacccctcagcgaacagaagagcctgtcccggtcgaatt

SEQ ID NO: 42399 - DNA, 80 bp, synthetic construct
  source 1..80: mol_type = other DNA
cctcagcgaacagaagagcctgtcccggtcgaattggcccgtagcgatgggaggagatgctaggagtggggtgaggccgg

SEQ ID NO: 42400 - DNA, 80 bp, synthetic construct
  source 1..80: mol_type = other DNA
cccgctggctccgagtgaggcttatcccggggaactcggctctctcccccaactagccggtcccgggtccccattccaaa

SEQ ID NO: 42401 - DNA, 80 bp, synthetic construct
  source 1..80: mol_type = other DNA
cggggaactcggctctctcccccaactagccggtcccgggtccccattccaaaagaaggggtggactggcaactcgtgga

SEQ ID NO: 42402 - DNA, 80 bp, synthetic construct
  source 1..80: mol_type = other DNA
gccagcagcgccatggtgatccgccgtagcccccctgtccacactccttcccccccgcggggccccccgtccaaagagaa

SEQ ID NO: 42403 - DNA, 80 bp, synthetic construct
  source 1..80: mol_type = other DNA
ctctgaggaaagcactcccaagaggacaagaaacgactcaagattcgagaacggatccccatgacgctggaagggcgcct

SEQ ID NO: 42404 - DNA, 80 bp, synthetic construct
  source 1..80: mol_type = other DNA
atgctctgcagtcagctttcccattcctgctctgccattcacaactgcaaccatcaactatgtttatttcaactgcttat

SEQ ID NO: 42405 - DNA, 80 bp, synthetic construct
  source 1..80: mol_type = other DNA
agggtgcacagattgataccgtcttcagctcatattactggctccacaaggccggtgtgtctccagacaccttcccaact

SEQ ID NO: 42406 - DNA, 80 bp, synthetic construct
  source 1..80: mol_type = other DNA
agtggcgagcggtcctcagtactcttactcttttctgtaaagaggagactgctggactcgtcgccccagcccgaggtgag

SEQ ID NO: 42407 - DNA, 80 bp, synthetic construct
  source 1..80: mol_type = other DNA
cctcgcaccgaccgaagggtgcgatgggggagggggatctcccgagagaggttacccgctaaagagaaggagattctctg

SEQ ID NO: 42408 - DNA, 80 bp, synthetic construct
  source 1..80: mol_type = other DNA
agggagatagctcccaagaagttccaagagaatctcaagaatgaggagagtccccatgacgctgaggaaatctaggaaga

SEQ ID NO: 42409 - DNA, 80 bp, synthetic construct
  source 1..80: mol_type = other DNA
ggaaggaggagtgcggaaaaaatggagcggccccccgattcgaatggcccgactgccgagtttggagagcactccgggcc

SEQ ID NO: 42410 - DNA, 80 bp, synthetic construct
  source 1..80: mol_type = other DNA
atctcccctgtgaggcctcttcctaggtccggagtctacctccatctcgtccgtccggggcctcttcgtcggtggagccc

SEQ ID NO: 42411 - DNA, 80 bp, synthetic construct
  source 1..80: mol_type = other DNA
ctctcggaatgggaaagaggagggcgaggaaaaagggagcgggacccccgatccgagggccccggcgtcgaagtttggag

SEQ ID NO: 42412 - DNA, 80 bp, synthetic construct
  source 1..80: mol_type = other DNA
ctccctcgctcctatccttctttccgattattcccttgatgtttcccagccagggattgtcgtcctcgagtttcttgatt

SEQ ID NO: 42413 - DNA, 80 bp, synthetic construct
  source 1..80: mol_type = other DNA
atgtcgctgagcaaatgctccaacgttgacctcaaatctgtagcaatgaatgccaacactgttaggcttgaaccatctct

SEQ ID NO: 42414 - DNA, 80 bp, synthetic construct
  source 1..80: mol_type = other DNA
ttcctccttctttcttccaccgacccaccgctcgaaaacctcttctcttcccccgcggttcttcttcgattcggaccggc

SEQ ID NO: 42415 - DNA, 80 bp, synthetic construct
  source 1..80: mol_type = other DNA
ctcgacaagggcggcggtcctaaaaactcttactcttttctgtaaagaggagtcttctggactcgccgcccgggttcgag

SEQ ID NO: 42416 - DNA, 80 bp, synthetic construct
  source 1..80: mol_type = other DNA
gaatggaaagaggagggatggaaagaaaggagcgagccctccgatccgaggggcccaacggccgaccttggagagcactc

SEQ ID NO: 42417 - DNA, 80 bp, synthetic construct
  source 1..80: mol_type = other DNA
agcgaacagaggagctttcagcgcggtaggagtaagaccatagcgatggggggagatgctaggagtaggaggagaccgaa

SEQ ID NO: 42418 - DNA, 80 bp, synthetic construct
  source 1..80: mol_type = other DNA
cggggaactcggcgaatcgtccccatctagcagcttccggacccccttccaaaataaccgagaggtggtgctaggagcgt

SEQ ID NO: 42419 - DNA, 80 bp, synthetic construct
  source 1..80: mol_type = other DNA
gttcggaggggttctcccaagaagggccaggagaaggcaagaatcggaagcatttctccataacgctggggaacttcctg

SEQ ID NO: 42420 - DNA, 80 bp, synthetic construct
  source 1..80: mol_type = other DNA
ggttcggagggctctcccaagagggccaagagaaggcaagaaacggaagcttctccccatgacgctgggaaacctcttgg

SEQ ID NO: 42421 - DNA, 80 bp, synthetic construct
  source 1..80: mol_type = other DNA
atgggagaagagaggatgaaaagaaaggagcgacctccccgatccgaggggcccaactgccgaggttggagagcactccc

SEQ ID NO: 42422 - DNA, 80 bp, synthetic construct
  source 1..80: mol_type = other DNA
gttcggaggggccccccaagaagaaccaggagaaggcaagagacggaagttttccccatgacgctggaaaacctcttgga

SEQ ID NO: 42423 - DNA, 80 bp, synthetic construct
  source 1..80: mol_type = other DNA
tccttgtcggtgaatcctcccctgagaggcctcttcctaggcccggagtctatctccattcggtctgttcgggccctctt

SEQ ID NO: 42424 - DNA, 80 bp, synthetic construct
  source 1..80: mol_type = other DNA
agtctatctccattcggtctgttcgggccctcttcgccggggggactccctcctcatccttgcttttctttcccaaaatt

SEQ ID NO: 42425 - DNA, 80 bp, synthetic construct
  source 1..80: mol_type = other DNA
tgggagaaaaggggatgaagaaaaaggagtgagctctccgatccgaggggcccaactaccgagtttggagagcactctcg

SEQ ID NO: 42426 - DNA, 80 bp, synthetic construct
  source 1..80: mol_type = other DNA
gccggctgggcaacattccgaggggaccgtccctcggtaatggcgaatgggacccagatctctttctagattccgataga

SEQ ID NO: 42427 - DNA, 80 bp, synthetic construct
  source 1..80: mol_type = other DNA
ttcggagggctctcccaagaattccaagagaaagcaaaaaacggaagcatttccccataacgctggaaaacctcttggaa

SEQ ID NO: 42428 - DNA, 80 bp, synthetic construct
  source 1..80: mol_type = other DNA
gggaacccggcgaatcgtccccatctagcagcctccggacccccttccaaaatgaccggaaaagggtggctaggagcgcg

SEQ ID NO: 42429 - DNA, 80 bp, synthetic construct
  source 1..80: mol_type = other DNA
atgggagaagaggggatggaaagaaaggagcggccctccgatccgaggggcccaactgccaagactggagagcactctcg

SEQ ID NO: 42430 - DNA, 80 bp, synthetic construct
  source 1..80: mol_type = other DNA
ggcgggaccccacttcagcagggtccgcgttccatcctttcttaccttgtggccggcatggtcccagcctcctccctggc

SEQ ID NO: 42431 - DNA, 80 bp, synthetic construct
  source 1..80: mol_type = other DNA
atgggccatctccgaacgaagggatcgcgggaggcaggatcagcgcccgagagggagtgaatggtaaagaatattggatc

SEQ ID NO: 42432 - DNA, 80 bp, synthetic construct
  source 1..80: mol_type = other DNA
cctttgatgtttcccagccaggggtgatcctcctcaagtttcttgagtttcttcctaatcttccggagtttcctctcgag

SEQ ID NO: 42433 - DNA, 80 bp, synthetic construct
  source 1..80: mol_type = other DNA
atcctctaactcttttcttccattcacccactgctcgagaacctcttctctgcctccgcggttcttcttcgattcggaac

SEQ ID NO: 42434 - DNA, 80 bp, synthetic construct
  source 1..80: mol_type = other DNA
aggggaaagaggacggagggaacaaaaggtgcgggcctcccgatccgagtggcccaaccacccgatctggagagcactcc

SEQ ID NO: 42435 - DNA, 80 bp, synthetic construct
  source 1..80: mol_type = other DNA
aaaggagacaaatcacctccagaggaccccttcagcgaacagagaactctgagccgcgaggagttagagcgtagcgatgg

SEQ ID NO: 42436 - DNA, 80 bp, synthetic construct
  source 1..80: mol_type = other DNA
gcgaacagagaactctgagccgcgaggagttagagcgtagcgatggggggagatgctaggagtgcgaggagaccgaagcg

SEQ ID NO: 42437 - DNA, 80 bp, synthetic construct
  source 1..80: mol_type = other DNA
ttatcccggggaactcgacttatcgtcccgacatagcagttcccggagcccccttccaaaataaccggaagaggcgcttg

SEQ ID NO: 42438 - DNA, 80 bp, synthetic construct
  source 1..80: mol_type = other DNA
ttccaaaataaccggaagaggcgcttggagcccggggggccagtggagccatgggatgctccttccgatgtcggtccatc

SEQ ID NO: 42439 - DNA, 80 bp, synthetic construct
  source 1..80: mol_type = other DNA
gagcccgggaggccagtggagccatgggatgctccttccgatgtcggtccatcccctccccccgagggtcgcccaggaat

SEQ ID NO: 42440 - DNA, 80 bp, synthetic construct
  source 1..80: mol_type = other DNA
gtcggaggaaatctcccaagaagaaaaaaggagaaggcaagagacggaggtttcccctatgacgctggagacatcctgga

SEQ ID NO: 42441 - DNA, 80 bp, synthetic construct
  source 1..80: mol_type = other DNA
attcgctttattcactggggtcgacaactctggggagaaaagggaggatcagccgggaagagtatatcctatgggaatcc

SEQ ID NO: 42442 - DNA, 80 bp, synthetic construct
  source 1..80: mol_type = other DNA
gtccacctctcaggtccagcccctccccggtcctggagaaggtggactccgggactccttgcatgttggggacgaagccg

SEQ ID NO: 42443 - DNA, 80 bp, synthetic construct
  source 1..80: mol_type = other DNA
ttcctctaacttctttcttccattcacccactgctcgagaacctcttccctgctctcgcgggatttcttcgattcggacc

SEQ ID NO: 42444 - DNA, 80 bp, synthetic construct
  source 1..80: mol_type = other DNA
aggggaaagaaggcgggaggaagaaaaggtgcgggcctcccgatccgagaggcccgtcgtccagactttggaggcactcc

SEQ ID NO: 42445 - DNA, 80 bp, synthetic construct
  source 1..80: mol_type = other DNA
gggccaaagggttgaggtacccagagcgaggaatccactcggagaaagcgagacaaatcacctccagaggaccccttcag

SEQ ID NO: 42446 - DNA, 80 bp, synthetic construct
  source 1..80: mol_type = other DNA
aatccactcggagaaagcgagacaaatcacctccagaggaccccttcagcgaacagaagacactaacacgcgaggagaaa

SEQ ID NO: 42447 - DNA, 80 bp, synthetic construct
  source 1..80: mol_type = other DNA
cgaacagaagacactaacacgcgaggagaaagcccatagcgacaggtgggaatgctaggagtcaggggagaccaaagcga

SEQ ID NO: 42448 - DNA, 80 bp, synthetic construct
  source 1..80: mol_type = other DNA
ttatcccggagaattcggttaatcgcccccacatagcagagcccaggacccccttccaaaatggccgagggaggcgctag

SEQ ID NO: 42449 - DNA, 80 bp, synthetic construct
  source 1..80: mol_type = other DNA
atggcgggacctcactcgactggggtccgcgttccatcctttcttacctgatggccggcatggtcccagcctcctcgctg

SEQ ID NO: 42450 - DNA, 80 bp, synthetic construct
  source 1..80: mol_type = other DNA
gtcggaggaagccaccccaagaagaaaaaagaaaaggcaagaaacggacgatctcccgaagacgctggagacatcttgga

SEQ ID NO: 42451 - DNA, 80 bp, synthetic construct
  source 1..80: mol_type = other DNA
aggtggaagaaggaaggtggaaaagaaggtgcgggcctcccgatccgaggggtccgacgtccagacttcggaggcactcc

SEQ ID NO: 42452 - DNA, 80 bp, synthetic construct
  source 1..80: mol_type = other DNA
agtttcccctcaggtccagcccctccccggttctggcgaaggtggactccggaacaccttgcatgctggggacgaagccg

SEQ ID NO: 42453 - DNA, 80 bp, synthetic construct
  source 1..80: mol_type = other DNA
aggggaaagaggatgagcggaacagaaggtgcgggcctcccgatccgaggggcccagccaccagagtttggaggcactcc

SEQ ID NO: 42454 - DNA, 80 bp, synthetic construct
  source 1..80: mol_type = other DNA
gggccgaagggttgaggcccccagagggaggaatccacacggagaaaagcagacaaatcacctccagaggaccccttcag

SEQ ID NO: 42455 - DNA, 80 bp, synthetic construct
  source 1..80: mol_type = other DNA
gagaccaaagcgaggagaaaagcaaagaaagcaacggggctagtcggtgggtgttccgccccccgagaggagacgagtga

SEQ ID NO: 42456 - DNA, 80 bp, synthetic construct
  source 1..80: mol_type = other DNA
aggagacgagtgaggcttatcccggggaactcggcgaatcgtccccacatagcagggccaggacccccttcctcaaatga

SEQ ID NO: 42457 - DNA, 80 bp, synthetic construct
  source 1..80: mol_type = other DNA
ggcttatcccggggaactcggcgaatcgtccccacatagcagggccaggacccccttcctcaaatgaccgagggtggtgc

SEQ ID NO: 42458 - DNA, 80 bp, synthetic construct
  source 1..80: mol_type = other DNA
ttcctcaaatgaccgagggaggtgctaggaacgtgggtggcccgcggagccgtgggatgctcctcccgatttccgagtcc

SEQ ID NO: 42459 - DNA, 80 bp, synthetic construct
  source 1..80: mol_type = other DNA
taggaacgtgggtggcccgcggagccgtgggatgctcctcccgatttccgagtccatcccccccccccgagggtcgccca

SEQ ID NO: 42460 - DNA, 80 bp, synthetic construct
  source 1..80: mol_type = other DNA
ggaatggcgggaccccacttcagcggggtccgcgttccatcctttcttacctgatggccggcatggtcccagcctcctcg

SEQ ID NO: 42461 - DNA, 80 bp, synthetic construct
  source 1..80: mol_type = other DNA
gtcggagtgagattccccaagaagaaaaaagagaaagcaagaatcggagaatttccccaaaacgctggagacatcttgga

SEQ ID NO: 42462 - DNA, 80 bp, synthetic construct
  source 1..80: mol_type = other DNA
gtcggaggaatcctacccaagaagaaaaaagagaaagcaagaaacggagaatttccccatgacgctggagacatcctgga

SEQ ID NO: 42463 - DNA, 80 bp, synthetic construct
  source 1..80: mol_type = other DNA
atgggccaaattccgaacgaagggacgcggcgggaggatcagcgcccgagaggggatgattggctaaagagcattggatc

SEQ ID NO: 42464 - DNA, 80 bp, synthetic construct
  source 1..80: mol_type = other DNA
tcctcggtcaacctcttaagttcctcttcctcctccttgctcaggctcttccctcccgaggtcagctgctttcttttgtt

SEQ ID NO: 42465 - DNA, 80 bp, synthetic construct
  source 1..80: mol_type = other DNA
ctctaacttctttcttgcaatcacccactgctcgagaagctcttctctgcctccgcggttcttcttcgtctccgagcggc

SEQ ID NO: 42466 - DNA, 80 bp, synthetic construct
  source 1..80: mol_type = other DNA
atcggaggtagtccccccaagaagaaaaaagagaaagcaagagacggagactttccccatgacgctggagacatcttgga

SEQ ID NO: 42467 - DNA, 80 bp, synthetic construct
  source 1..80: mol_type = other DNA
gggaaagagggaaggtggaaaagaaggtgcgggcctcccgatccgagggtcccaactgccaagtttggaaagcaccccgg

SEQ ID NO: 42468 - DNA, 80 bp, synthetic construct
  source 1..80: mol_type = other DNA
gcgaacagaggactcctgagtcgcgaggagtaagaccgtagcgataggacgagatgctaggagtagggagagaccgaagc

SEQ ID NO: 42469 - DNA, 80 bp, synthetic construct
  source 1..80: mol_type = other DNA
tccctgcttgccccttatgtccagcccctccccagttctggcgaaggcggactccggaacaccttgcatgctggggacga

SEQ ID NO: 42470 - DNA, 80 bp, synthetic construct
  source 1..80: mol_type = other DNA
taggaacatgacgggccgtggagccatgggatgcccttcccgatgtccgcttccatccctttcccccgagggtcgcccag

SEQ ID NO: 42471 - DNA, 80 bp, synthetic construct
  source 1..80: mol_type = other DNA
tcggaagtacctccccaagaagaaacaagggaaggcaagaatcggaagctttccccagggcgccggagacatcctggaag

SEQ ID NO: 42472 - DNA, 80 bp, synthetic construct
  source 1..80: mol_type = other DNA
ggtttccccctatgtctagcccccccccggtcctgacgaaggtggactccgggatgccttgcatgctggggacgaagccg

SEQ ID NO: 42473 - DNA, 80 bp, synthetic construct
  source 1..80: mol_type = other DNA
gaacctctaacttctttcttgcactcgcctgctgctcgagaggctcttctccgcctccgcggttcttccttcgatccgaa

SEQ ID NO: 42474 - DNA, 80 bp, synthetic construct
  source 1..80: mol_type = other DNA
cggcccatcttcggcaagaggcggcgatcctcagtgctcttactcttttcttttgaaagaggagactgctggatccgccg

SEQ ID NO: 42475 - DNA, 80 bp, synthetic construct
  source 1..80: mol_type = other DNA
atgagccacgttccgagcgaagggaacgacggggagggggacagacccgaaagggactgaacgataaagatgagaggaac

SEQ ID NO: 42476 - DNA, 80 bp, synthetic construct
  source 1..80: mol_type = other DNA
ctccggttcccgtcacgtctagcccctccccgcgtctgtggaaggtggactccgggatcccttgcatgctggggacgaag

SEQ ID NO: 42477 - DNA, 80 bp, synthetic construct
  source 1..80: mol_type = other DNA
ccgcccccgggcgctcccctcgatccaccttcgagggggttcacacccccagccgacgggccggctattcttcttgatct

SEQ ID NO: 42478 - DNA, 80 bp, synthetic construct
  source 1..80: mol_type = other DNA
ttcctcgtcctccctggccaacctcctgagttcctcttcctcctccttgctgaggttcttgcctcctgcggagagctgct

SEQ ID NO: 42479 - DNA, 80 bp, synthetic construct
  source 1..80: mol_type = other DNA
cctttgatgtttcccagccagggattttcctcctcaagtttcttgatcttcttctttgccttccggagttccttctcgag

SEQ ID NO: 42480 - DNA, 80 bp, synthetic construct
  source 1..80: mol_type = other DNA
ctctgctttctttctttcgttcacccacttctcgagggtgtcctctcttccccctcgattcttcttctgctcggaccggc

SEQ ID NO: 42481 - DNA, 80 bp, synthetic construct
  source 1..80: mol_type = other DNA
tcgacaaggggcggcagtcctcagtgctcttactcttttctgtaaagaggagactgctggactcgccgcccaagtcgagc

SEQ ID NO: 42482 - DNA, 80 bp, synthetic construct
  source 1..80: mol_type = other DNA
agcggaagaaggaaggtggaagaaaaggagtgagcctcccgaaccgaacgccccgacgcccaagtttggaaagcactccg

SEQ ID NO: 42483 - DNA, 80 bp, synthetic construct
  source 1..80: mol_type = other DNA
acgcccaagtttggaaagcactccggcccaaagggttgaattccacccagaggggggaagccacacggagaaaggagaaa

SEQ ID NO: 42484 - DNA, 80 bp, synthetic construct
  source 1..80: mol_type = other DNA
gcccaaagggttgaattccacccagaggggggaagccacacggagaaaggagaaaaatcacctccagaggaccccttcag

SEQ ID NO: 42485 - DNA, 80 bp, synthetic construct
  source 1..80: mol_type = other DNA
cgaacagaaggctctctcacgcggtaggagaaagaccatagcgataggaggggatgctaggagtaggtggaggccaaggc

SEQ ID NO: 42486 - DNA, 80 bp, synthetic construct
  source 1..80: mol_type = other DNA
gaggaagaaagtaagagagcagcggggctagtcgacgggtgttccacctcccgagaggggacgagtgaggcttatcccgg

SEQ ID NO: 42487 - DNA, 80 bp, synthetic construct
  source 1..80: mol_type = other DNA
ggaactcggcaaatcgctcccacatagcaggccccgggccccctccaaaaatgaccggagagggcgcttagaacgcggtg

SEQ ID NO: 42488 - DNA, 80 bp, synthetic construct
  source 1..80: mol_type = other DNA
gagcagtagggtccgtgggatgctcctcccgattccgtccatcccctcccccagaaggtccccccaggaatggcggaacc

SEQ ID NO: 42489 - DNA, 80 bp, synthetic construct
  source 1..80: mol_type = other DNA
gccggctgggcaacattccgaggggaccgccccctcggtaatggcgaatgggacccagagttctctctagtttccaacag

SEQ ID NO: 42490 - DNA, 80 bp, synthetic construct
  source 1..80: mol_type = other DNA
agaaacgagagaaaaactggcaactcccttagccatccgaggggacgtcagtcctccttcggatgcccaggtcggaccgc

SEQ ID NO: 42491 - DNA, 80 bp, synthetic construct
  source 1..80: mol_type = other DNA
ctcgggaggaatcctcccaagaagccaaagagaactcaagaaagaggagatctccccacgacgctggtgaagctctagga

SEQ ID NO: 42492 - DNA, 80 bp, synthetic construct
  source 1..80: mol_type = other DNA
tcggagggaaatcccaagagggtcactcgagattcaagaggtgaggagggatccccgagacgctgaggaagttccgggaa

SEQ ID NO: 42493 - DNA, 80 bp, synthetic construct
  source 1..80: mol_type = other DNA
agtctacctccatctggtctgttcgggtcctgttcgccgggggagccggctctccatccttatgattctttccaaaaatt

SEQ ID NO: 42494 - DNA, 80 bp, synthetic construct
  source 1..80: mol_type = other DNA
atgagccaatgctgatcgaagatcccgcgaggggaagggtcagcgctcgagaggggatagaaggtaaagagcattggaac

SEQ ID NO: 42495 - DNA, 80 bp, synthetic construct
  source 1..80: mol_type = other DNA
cctttgatgttccccagccagggattttcgtcctctaacttcttgatcttcttcttggtcttccggaggtccctctcgag

SEQ ID NO: 42496 - DNA, 80 bp, synthetic construct
  source 1..80: mol_type = other DNA
ctctaacttctttcttccttccacccactgctcgagaacgttctctcttcccccgcggcttttcttcgaatcagctcggc

SEQ ID NO: 42497 - DNA, 80 bp, synthetic construct
  source 1..80: mol_type = other DNA
cgacaagaggcggcggtcctcagtgctcttactctttcttgataagaggagactgctggacccgccgcccaagttcgagc

SEQ ID NO: 42498 - DNA, 80 bp, synthetic construct
  source 1..80: mol_type = other DNA
gggaaacagggaagcttgaagagaagggggtggcccccgatccgagggtcccggctaccgagtttggagagcactccgtg

SEQ ID NO: 42499 - DNA, 80 bp, synthetic construct
  source 1..80: mol_type = other DNA
tcccggctaccgagtttggagagcactccgggccgaagggttgagtagcacacggagggagacatccactcggagaaagc

SEQ ID NO: 42500 - DNA, 80 bp, synthetic construct
  source 1..80: mol_type = other DNA
ccgaagggttgagtagcacacggagggagacatccactcggagaaagcagaaaaaccacctccagaggacccattcagcg

SEQ ID NO: 42501 - DNA, 80 bp, synthetic construct
  source 1..80: mol_type = other DNA
aacagagagcccccgcacgggataggagtaagaccatagcgataggtggagatgctgggagtgcggggagaccagagcga

SEQ ID NO: 42502 - DNA, 80 bp, synthetic construct
  source 1..80: mol_type = other DNA
ttatcccggggaacccggcgaatcgtccccacatagcgagttcccggacccccttccaaagtgaccgagggaggagctag

SEQ ID NO: 42503 - DNA, 80 bp, synthetic construct
  source 1..80: mol_type = other DNA
gaactcggaggaccagtggatcctacatgggatgctcttcccgattccgtccaaacccccacccccgagggtcgcccagg

SEQ ID NO: 42504 - DNA, 80 bp, synthetic construct
  source 1..80: mol_type = other DNA
gccgggaggaattctcccaagaagccaagagagtatcgggaaggaggactatccccaggacgctggagtcatctcggaat

SEQ ID NO: 42505 - DNA, 80 bp, synthetic construct
  source 1..80: mol_type = other DNA
atgagccaagctccgagcgaagggaccgcggaggagagaataacaccggagagggagtgaacaacaaggggcgaggaacc

SEQ ID NO: 42506 - DNA, 80 bp, synthetic construct
  source 1..80: mol_type = other DNA
gtccacccgtcacgtccagcccctccccgtgtctagcgaacggggactcgggaactccttgcatgctggggacgaagccg

SEQ ID NO: 42507 - DNA, 80 bp, synthetic construct
  source 1..80: mol_type = other DNA
ctccgctttcttccttgcgctcacccactgctcaaggatgttttcccttcccccgcgactcttcttcgactcggaccggc

SEQ ID NO: 42508 - DNA, 80 bp, synthetic construct
  source 1..80: mol_type = other DNA
ccaaatggttgagtagcattcagagggaggagtccacacggagttgggcagagaaatcacctccggaggaccccttcaac

SEQ ID NO: 42509 - DNA, 80 bp, synthetic construct
  source 1..80: mol_type = other DNA
ttgggcagagaaatcacctccggaggaccccttcaacgaacagaagagctctgctcggaataggagtagacacagcgatg

SEQ ID NO: 42510 - DNA, 80 bp, synthetic construct
  source 1..80: mol_type = other DNA
gaacagaagagctctgctcggaataggagtagacacagcgatggggggagatgctaggagttagaggagaccgaagcgag

SEQ ID NO: 42511 - DNA, 80 bp, synthetic construct
  source 1..80: mol_type = other DNA
ttatcccggggaactcggcaatcgtccccgcatggcagagaccgagtcccccttcaaaaaggaccggaggagggagctag

SEQ ID NO: 42512 - DNA, 80 bp, synthetic construct
  source 1..80: mol_type = other DNA
gagcgtgggtggtgcggtggagccatgggatgctcctcccgattccgcccatccccacccccaagagggtcgcccaggaa

SEQ ID NO: 42513 - DNA, 80 bp, synthetic construct
  source 1..80: mol_type = other DNA
catccccacccccaagagggtcgcccaggaatggcgggaccccactcggcagggtccgcgttccattctttcttacctga

SEQ ID NO: 42514 - DNA, 80 bp, synthetic construct
  source 1..80: mol_type = other DNA
tcgaagggaactctcccaagaagcaaagagaatccaagaatcggaagctttccccatgacgccggagacatctcggaagg

SEQ ID NO: 42515 - DNA, 80 bp, synthetic construct
  source 1..80: mol_type = other DNA
tctgaaggtaattcccccaagaagaaaaaaagagaaaacaagagacggacgatctccctgtgacgctggagacatcctgg

SEQ ID NO: 42516 - DNA, 80 bp, synthetic construct
  source 1..80: mol_type = other DNA
ctgggccatctccgagcgaagggagcgcgctggaaggatcagctcccgagaggggaaaacggtaaagagcattggatcgt

SEQ ID NO: 42517 - DNA, 80 bp, synthetic construct
  source 1..80: mol_type = other DNA
cctgatgtccagtccctcccccgtccgagcgaagggggactccggaacatcttccattcgagggacgaagccgccaccgg

SEQ ID NO: 42518 - DNA, 80 bp, synthetic construct
  source 1..80: mol_type = other DNA
ctcgagggccttccttctgcggtgatcctccctctccttgtcggtgaacccgctcttgtgaggcctcttcccagtcccgg

SEQ ID NO: 42519 - DNA, 80 bp, synthetic construct
  source 1..80: mol_type = other DNA
aggatgttccccagccagggattttcatcctcgagtctcttgatggtcttcctggccttccggaggtctttctcgagctc

SEQ ID NO: 42520 - DNA, 80 bp, synthetic construct
  source 1..80: mol_type = other DNA
ctccgccttttttcttgttgtgatccatttctcgaggatgtcctccctttgtccccttcggctcctcttcgactcggatt

SEQ ID NO: 42521 - DNA, 80 bp, synthetic construct
  source 1..80: mol_type = other DNA
ccgaagggtcgaggtacccagaatgaggaatcctcacggagaaaagcagagaaaccacctccagaggaccccttcagcga

SEQ ID NO: 42522 - DNA, 80 bp, synthetic construct
  source 1..80: mol_type = other DNA
tagccgacggatgttccgcctcccgagaggggacgagtgaggcttatcccggggaactcggcagatcgcccccacatagc

SEQ ID NO: 42523 - DNA, 80 bp, synthetic construct
  source 1..80: mol_type = other DNA
ttatcccggggaactcggcagatcgcccccacatagcagctcccgtggccccttccaaaatgaccgagggtggtggctag

SEQ ID NO: 42524 - DNA, 80 bp, synthetic construct
  source 1..80: mol_type = other DNA
gaacccggtggaccggtggagccatgggatgctcctcccgatgtccgtccaaccccctccccccgagtgtcgcccaggaa

SEQ ID NO: 42525 - DNA, 80 bp, synthetic construct
  source 1..80: mol_type = other DNA
cgaaggtgaggaccccaagaaggaaaaaagagaaagcaagagacggacgatttccccacaacgctggagacatcctggaa

SEQ ID NO: 42526 - DNA, 80 bp, synthetic construct
  source 1..80: mol_type = other DNA
aaagaagaactcggacgcgaaccgtgagtggaaccctgttctttattggggggtacactcgaggagtggaaggcgttgtt

SEQ ID NO: 42527 - DNA, 80 bp, synthetic construct
  source 1..80: mol_type = other DNA
ctttattggtgggtacactcgaggagtggaaggcgttgttggggtggagatgggtgtacctacgggaatccctggtttcc

SEQ ID NO: 42528 - DNA, 80 bp, synthetic construct
  source 1..80: mol_type = other DNA
tcgatttccccctgttcctattcctgggaggtggcccgggaatccgatgctaagggaggaccgaagcaccacccctcgtg

SEQ ID NO: 42529 - DNA, 80 bp, synthetic construct
  source 1..80: mol_type = other DNA
tccagaggagcttgccgccgaccggcattcggaccggggtctcctctgcctttcttcgcctctcctctcccagtgcgcga

SEQ ID NO: 42530 - DNA, 80 bp, synthetic construct
  source 1..80: mol_type = other DNA
cggtgccggcgtcatgggggcccctcgttcttgctttcttcctctgttggcagcttggtggatgccttccgaggccattc

SEQ ID NO: 42531 - DNA, 80 bp, synthetic construct
  source 1..80: mol_type = other DNA
gtcgtcggactgttgagaaggaaggggatcgaagagggagaacccccggcgaagaggcccaggcgggaagccatggagat

SEQ ID NO: 42532 - DNA, 80 bp, synthetic construct
  source 1..80: mol_type = other DNA
atccgaggagccgggggggcgttcgagagctccttcctccttcaggagaatgaagagatcatcgaagctccccggtctca

SEQ ID NO: 42533 - DNA, 80 bp, synthetic construct
  source 1..80: mol_type = other DNA
actccatcgggttctgcgggaacccggtcgaactccccccgtttccattcctgggaggtggcccgggagtccgatgctaa

SEQ ID NO: 42534 - DNA, 80 bp, synthetic construct
  source 1..80: mol_type = other DNA
gtcctctggatgtggcttgtccgtccagctccgggtggatcaccctccgctggtagttttctcctttagctccggaggat

SEQ ID NO: 42535 - DNA, 80 bp, synthetic construct
  source 1..80: mol_type = other DNA
gggccgccagcgtcgcgggggctcctccgtcttgttttcttcctctgttggcagcttggaggatccagccgaagtcgttc

SEQ ID NO: 42536 - DNA, 80 bp, synthetic construct
  source 1..80: mol_type = other DNA
cgtcgtcggactgttgagaaagaagaaggacgaagagggagggcccccggcgaagaggcccaggcaggaagccatggaaa

SEQ ID NO: 42537 - DNA, 80 bp, synthetic construct
  source 1..80: mol_type = other DNA
atccgaggaacccggcagtacccatagtatgggtttacctcgcctccccccgggtactacacggtcccagggtgctccca

SEQ ID NO: 42538 - DNA, 80 bp, synthetic construct
  source 1..80: mol_type = other DNA
tccgaggaagcgggagagcgctcgagagctccatcctcctttaggagaaaaaaagagatcgtcgaggctccccggtctca

SEQ ID NO: 42539 - DNA, 80 bp, synthetic construct
  source 1..80: mol_type = other DNA
gttcgccagcgtcatgggggctcctctatcttgatcgcttcctctgttggcagcttggtggatcctcccgagactcctcg

SEQ ID NO: 42540 - DNA, 80 bp, synthetic construct
  source 1..80: mol_type = other DNA
cctcgccctctttctgtctcccaactctcgggaactctccgcctctcccgatttcgggcttgctccgcggaagcggccca

SEQ ID NO: 42541 - DNA, 80 bp, synthetic construct
  source 1..80: mol_type = other DNA
ccagaggagcttgcagccgacgggcattcggatcggggtctccgctactttccccgccactcctctcccagtgtgggacg

SEQ ID NO: 42542 - DNA, 80 bp, synthetic construct
  source 1..80: mol_type = other DNA
atttgctagcgtcatgggggctcctccatcttgctgtcttcctctgttggaagcttggaggatccatccgaggctatccg

SEQ ID NO: 42543 - DNA, 80 bp, synthetic construct
  source 1..80: mol_type = other DNA
acgtcctcggactgttgagaaggaagaaagacggggagggagcgcccccgacgaagaggcccaggctggaagccatggag

SEQ ID NO: 42544 - DNA, 80 bp, synthetic construct
  source 1..80: mol_type = other DNA
gaggagtttgctgccgaaggacattcggatcggggtctccgctgcgatcttcgcctctcctctcccagctcgggatggtt

SEQ ID NO: 42545 - DNA, 80 bp, synthetic construct
  source 1..80: mol_type = other DNA
gggaaagcgcctcagccaagaggaagaaggggaacttcagaggctggccaaggatgacgacgaaagagaaagaagaacag

SEQ ID NO: 42546 - DNA, 80 bp, synthetic construct
  source 1..80: mol_type = other DNA
tccagaggagcttgctgccgatcggcattcgaaccggggactccgccgttgttttcgccactcctctcccagctcgcgat

SEQ ID NO: 42547 - DNA, 80 bp, synthetic construct
  source 1..80: mol_type = other DNA
attcgccctctttctgtctcccaactctcgggagttctccccccactcccacatcgggccttcttgccggctgcggccca

SEQ ID NO: 42548 - DNA, 80 bp, synthetic construct
  source 1..80: mol_type = other DNA
ggtcctctggatgtgggttttctgctcatctccgggtggatcaccctccgctggtagttttctccttttggatccgaggg

SEQ ID NO: 42549 - DNA, 80 bp, synthetic construct
  source 1..80: mol_type = other DNA
attccagaggagcttgccgcccggacattcggaccggggtctccacttctatcttcgccactcctctcccagtgcgcggt

SEQ ID NO: 42550 - DNA, 80 bp, synthetic construct
  source 1..80: mol_type = other DNA
ggtccgccaacgtcatgggggctcctctctcttgctttcttcctctgttggcagcttggaggatccagtcgaagacattc

SEQ ID NO: 42551 - DNA, 80 bp, synthetic construct
  source 1..80: mol_type = other DNA
agaggagtttgcagccgacgggcattcggatcggggtctccgctgttttcttcaccactcctctcccagtgcgcgatggt

SEQ ID NO: 42552 - DNA, 80 bp, synthetic construct
  source 1..80: mol_type = other DNA
tgccagcgtcatgggggctcctccctcttgtttcttcctctgttggcagcttggaggatccgtccgaggctactcgccct

SEQ ID NO: 42553 - DNA, 80 bp, synthetic construct
  source 1..80: mol_type = other DNA
actcgccctctttctgtctcccagctctcgggagttctccactcctgtcatcttcggacttcctcgccggaggcggccca

SEQ ID NO: 42554 - DNA, 80 bp, synthetic construct
  source 1..80: mol_type = other DNA
catcgtcggactattgagaaggaagaaggatgaagagggagcgcccccgacgaagaggcccaggcgagaaaccatggagg

SEQ ID NO: 42555 - DNA, 80 bp, synthetic construct
  source 1..80: mol_type = other DNA
tttgccagcgtcatgggggctcctctctcttgttgtcttcctctgttggaagcttggaggttccactcgggaacattcgc

SEQ ID NO: 42556 - DNA, 80 bp, synthetic construct
  source 1..80: mol_type = other DNA
atgagcctaaccgtcgcgaagccgagcttgaaggatagggaggagatcctcgaacagtgggtagaagaaaggaagaaaag

SEQ ID NO: 42557 - DNA, 80 bp, synthetic construct
  source 1..80: mol_type = other DNA
tattcgctctctttctgtctcccaactctcggaggttctccgttcctctctcttcgggcctcttcgccggaagcggccca

SEQ ID NO: 42558 - DNA, 80 bp, synthetic construct
  source 1..80: mol_type = other DNA
tccgagggatcggtggggcattcgagagcctcttcctcctttctggagtacaagggatcgtcgaagctccccggtctcag

SEQ ID NO: 42559 - DNA, 80 bp, synthetic construct
  source 1..80: mol_type = other DNA
attgtgggtgcccctatcgggaccagtgttttccggaagggatggtgtggagagctccatcgggctctgtgggacccggt

SEQ ID NO: 42560 - DNA, 80 bp, synthetic construct
  source 1..80: mol_type = other DNA
cgagctccccctgttcccattcttgggaggtggcccgggagtccgatgctaagggaggaccgaggcgttacccccgggat

SEQ ID NO: 42561 - DNA, 80 bp, synthetic construct
  source 1..80: mol_type = other DNA
tccagaggagtttgctgccgacgggcattcggatcggggtctccgcttactgtcttcgcctctcctctctcagtgcgcga

SEQ ID NO: 42562 - DNA, 80 bp, synthetic construct
  source 1..80: mol_type = other DNA
tggtttgccggcgtcacgggggcccctcgttcttgctttcttcctctgttggcagcttggaggatccatccgaggatatt

SEQ ID NO: 42563 - DNA, 80 bp, synthetic construct
  source 1..80: mol_type = other DNA
tattcgccctctttctgtctcccaactctcgggagttctcacctctggctacctcggaccccttcgccggaagcggccca

SEQ ID NO: 42564 - DNA, 80 bp, synthetic construct
  source 1..80: mol_type = other DNA
atcgtcggactgataagaaggaagaaggacgaagagggagcgcccccgacgaagaggcccgggctggaaaccatggaggt

SEQ ID NO: 42565 - DNA, 80 bp, synthetic construct
  source 1..80: mol_type = other DNA
gatgagccaaaccgtcgcgaagcagacctcgagggacagagaggagatcctcgagcagtgggtagaagaaaggaagaaaa

SEQ ID NO: 42566 - DNA, 80 bp, synthetic construct
  source 1..80: mol_type = other DNA
tcctcggtcaacctcttgagttcctcttcctcctccttgctcaggcgcttccctccactgctcagctgcttcctcttgtt

SEQ ID NO: 42567 - DNA, 80 bp, synthetic construct
  source 1..80: mol_type = other DNA
ctcaatcctttttcttccattcacccactgctcgagagtctcttccctcccctggcgtcttttcctcgattcggcccggc

SEQ ID NO: 42568 - DNA, 80 bp, synthetic construct
  source 1..80: mol_type = other DNA
gaaggggaaagaggacagatggaagaaaaaggtgcgggcccccccgatccgaggggcccgactgccagatttggagagca

SEQ ID NO: 42569 - DNA, 80 bp, synthetic construct
  source 1..80: mol_type = other DNA
cttcagcgaacaaagagcgccctggggaggaataagaccatagcgataggagtggatgctaggagtaagaggagaccgaa

SEQ ID NO: 42570 - DNA, 80 bp, synthetic construct
  source 1..80: mol_type = other DNA
gtcgggagaaactgtcctaagaaggtccaagagaaaactgagagggaggacttttccccataacgctgtggaaactctcg

SEQ ID NO: 42571 - DNA, 80 bp, synthetic construct
  source 1..80: mol_type = other DNA
gtcgaaggtaagtccccaagaaggaaaaaagagaaagcaagagacggacgacctccccatgacgctagagtcatcctgga

SEQ ID NO: 42572 - DNA, 80 bp, synthetic construct
  source 1..80: mol_type = other DNA
gaacgcgggggaccggtggaaccatgagatgcccttcccgatgtccgtccaatcccttccccccgagcgtcgcccaggaa

SEQ ID NO: 42573 - DNA, 80 bp, synthetic construct
  source 1..80: mol_type = other DNA
cttgagcccagttccggccgaagagtccgccgggtgcgagagatgacccgacggggaatcaatggtaaaggatggaggaa

SEQ ID NO: 42574 - DNA, 80 bp, synthetic construct
  source 1..80: mol_type = other DNA
ggtctcctctcgtgtccagtccttccccgagtcggtggaaggtggactccgggactccttgcatgttggggacgaagccg

SEQ ID NO: 42575 - DNA, 80 bp, synthetic construct
  source 1..80: mol_type = other DNA
ctcgtcttcctcggtcaacctcttgagttcctcttcttcctccctgctgaggttcttccctcctgcggagagctgtctct

SEQ ID NO: 42576 - DNA, 80 bp, synthetic construct
  source 1..80: mol_type = other DNA
cctttgatgtttcccagccaggggttttcatcctcgagtttcttgagtttctttctgcacttccggaggtctctctcgag

SEQ ID NO: 42577 - DNA, 80 bp, synthetic construct
  source 1..80: mol_type = other DNA
ctcctcctgtctctttcttccattgacccactgttcgaggacatcttccctgccccctcggttcttcttcgagtcggacc

SEQ ID NO: 42578 - DNA, 80 bp, synthetic construct
  source 1..80: mol_type = other DNA
ggctcatctcggctagaggcgagcagtcctcagtactcttactctttcctataaagaggagactgctggactcgctgccc

SEQ ID NO: 42579 - DNA, 80 bp, synthetic construct
  source 1..80: mol_type = other DNA
cggctagaggcgagcagtcctcagtactcttactctttcctataaagaggagactgctggactcgctgcccaagcccgag

SEQ ID NO: 42580 - DNA, 80 bp, synthetic construct
  source 1..80: mol_type = other DNA
aagaggaagaaggaaggtggaagaaaagggtgcgggcctcaccgatccgaggggcccgtcgccccgactggagagcactc

SEQ ID NO: 42581 - DNA, 80 bp, synthetic construct
  source 1..80: mol_type = other DNA
agcgaacagaaggatctctcgggtaggagtaagaccatagcgatgggtggagatgctaggagttagaggagaccgaagcg

SEQ ID NO: 42582 - DNA, 80 bp, synthetic construct
  source 1..80: mol_type = other DNA
aggaggaaagcaaagaaagcaacggggctagtcggcaggtgttccgccccccgagaggggaagagtgaggcttatcccgg

SEQ ID NO: 42583 - DNA, 80 bp, synthetic construct
  source 1..80: mol_type = other DNA
agaattcggtaatcgcccccacatagcagagccccgggccccctcctaaaagaccgaggggaggtccttggaacgcggag

SEQ ID NO: 42584 - DNA, 80 bp, synthetic construct
  source 1..80: mol_type = other DNA
ggccggtggtgccgtgggatgctcctcccgattccgccaacccttcccccccgagaagtcccccaggaatggcgggaccc

SEQ ID NO: 42585 - DNA, 80 bp, synthetic construct
  source 1..80: mol_type = other DNA
attcgatagaaactctcccaagaagtagtagaagaaatttcaagaagaggaggatccctatgacgctggaaaactcttgg

SEQ ID NO: 42586 - DNA, 80 bp, synthetic construct
  source 1..80: mol_type = other DNA
cggcgggccgtccattgggttcacacccccaggtcgcgggccggctattcttctttctctttcgtcgtcatccttgatca

SEQ ID NO: 42587 - DNA, 80 bp, synthetic construct
  source 1..80: mol_type = other DNA
gtcgccaaagagccgacgaagaggccggaggtaggagaaggagggaccccgggaagggattcgaagccaaagagtggagg

SEQ ID NO: 42588 - DNA, 80 bp, synthetic construct
  source 1..80: mol_type = other DNA
ctggtttcctctgatgtccagtccgtccccggttctggtgaatggggactccgggacccctagcatcctagggacgaagc

SEQ ID NO: 42589 - DNA, 80 bp, synthetic construct
  source 1..80: mol_type = other DNA
agtcaacctccatccgatccgttcgggctctcttcgccgggggagctctctccccgtctcccccttttctgattattccg

SEQ ID NO: 42590 - DNA, 80 bp, synthetic construct
  source 1..80: mol_type = other DNA
aggatgttccccagccagggattatcgtcctccaatttcttgattgtcctcctcgccttccggagcctcctctcgaggtc

SEQ ID NO: 42591 - DNA, 80 bp, synthetic construct
  source 1..80: mol_type = other DNA
gacgagggcggcggtcctcagtgctcttactctttgcgatataagaggagactgctggacgctccgcccgggtctgggat

SEQ ID NO: 42592 - DNA, 80 bp, synthetic construct
  source 1..80: mol_type = other DNA
gaagaaagaaataggaggtgaaacggtagaaaagagcgagcctcccgatccgagtttgccttgaacttatcgagtttgga

SEQ ID NO: 42593 - DNA, 80 bp, synthetic construct
  source 1..80: mol_type = other DNA
gtcctccgagcttagggatgagaaaagcggagagggggcagccaccaggagccggagacaagacacctccagaggacccc

SEQ ID NO: 42594 - DNA, 80 bp, synthetic construct
  source 1..80: mol_type = other DNA
ttcagcgaacagaagagctcgtatcctgaggagtggtccgtagcgataggaagagatgctaggagtaggtagagaccgaa

SEQ ID NO: 42595 - DNA, 80 bp, synthetic construct
  source 1..80: mol_type = other DNA
ttatcccggggaacccggcctagtcccggattaccgggcccgggacccactccgaaagaccgaggctgggacttggagca

SEQ ID NO: 42596 - DNA, 80 bp, synthetic construct
  source 1..80: mol_type = other DNA
caggggaccaagcagtccatggaagacggtcgtcccccttctccacactccttccccccgcgggcccccccgtaaaggaa

SEQ ID NO: 42597 - DNA, 80 bp, synthetic construct
  source 1..80: mol_type = other DNA
gaaacccactcagcagggtccgcgctccaccccctttcttacctgtggccggcatggtcccagcctcctcgctggcgccg

SEQ ID NO: 42598 - DNA, 80 bp, synthetic construct
  source 1..80: mol_type = other DNA
gccggctgggcaacattccgaggggaccgtcccctcggtaatggcgaatgggacccagtcttctccttagactcccgaaa

SEQ ID NO: 42599 - DNA, 80 bp, synthetic construct
  source 1..80: mol_type = other DNA
cacacgagggtgaggtgccccaagagggcgaggggtgcctcaaggaagaggacgaatccccgagacgctggaaactcccg

SEQ ID NO: 42600 - DNA, 80 bp, synthetic construct
  source 1..80: mol_type = other DNA
actctttctctttattgggtggtacactcgaggagtggaaggcggggagggtgggacggctgctgtccccatggatactg

SEQ ID NO: 42601 - DNA, 80 bp, synthetic construct
  source 1..80: mol_type = other DNA
ttcttcggtgatcctccctctccttgtcggtgaatcttcccctgagaggtccctttccgggtccgtagtctacctccatc

SEQ ID NO: 42602 - DNA, 80 bp, synthetic construct
  source 1..80: mol_type = other DNA
cagccaggggttttcatcctcgagtttcttgagcttcttcttggccttccggaggcccttctcgagttcttccacatttt

SEQ ID NO: 42603 - DNA, 80 bp, synthetic construct
  source 1..80: mol_type = other DNA
ttcttgtggttacccactgctcgagaatgtcctcccgtcctcctcgcttctccttcttgtcggaccggctcatctcggcg

SEQ ID NO: 42604 - DNA, 80 bp, synthetic construct
  source 1..80: mol_type = other DNA
cctcagttccgaccgaagggagcgatgggggagggggaccttccgagagaggttacccactaaagaaagggaagacactt

SEQ ID NO: 42605 - DNA, 80 bp, synthetic construct
  source 1..80: mol_type = other DNA
gggttacccactaaagaaagggaagacacttcgaggggggtcactcccaagaagttccaagagaatcccaggaacgagga

SEQ ID NO: 42606 - DNA, 80 bp, synthetic construct
  source 1..80: mol_type = other DNA
cgaggggggtcactcccaagaagttccaagagaatcccaggaacgaggaggatccctatgacgctggagaaatctaggaa

SEQ ID NO: 42607 - DNA, 80 bp, synthetic construct
  source 1..80: mol_type = other DNA
ttccaagagaatcccaggaacgaggaggatccctatgacgctggagaaatctaggaatgggaaagaggaaggcggaaaga

SEQ ID NO: 42608 - DNA, 80 bp, synthetic construct
  source 1..80: mol_type = other DNA
tgggaaagaggaaggcggaaagaaggagcggccccccgatccgaatggcccaactgccgagtttggagagcactccggac

SEQ ID NO: 42609 - DNA, 80 bp, synthetic construct
  source 1..80: mol_type = other DNA
cgtacggtcggggagccctccagagggaagaggccacacggagaagggtagagaaatcacctccagaggaccccttcagc

SEQ ID NO: 42610 - DNA, 80 bp, synthetic construct
  source 1..80: mol_type = other DNA
gaacagaaggctctctcacgcggtaggagtaagaccatagcacaggagaagatgctaggagttgggggagaccgaagcga

SEQ ID NO: 42611 - DNA, 80 bp, synthetic construct
  source 1..80: mol_type = other DNA
tagccagtgggtgttccgcctcccgagaggcacgagtgaggcttatcccggggaacccggcgaatcgtccccacctagca

SEQ ID NO: 42612 - DNA, 80 bp, synthetic construct
  source 1..80: mol_type = other DNA
ttatcccggggaacccggcgaatcgtccccacctagcagagcccggacccctctccaaaagaccgagggtggtgactagg

SEQ ID NO: 42613 - DNA, 80 bp, synthetic construct
  source 1..80: mol_type = other DNA
tgtcggtgatcttcccctgagaggtccctttccgggtccggagtctatctccatttggtcggtccgggccctcttcgccg

SEQ ID NO: 42614 - DNA, 80 bp, synthetic construct
  source 1..80: mol_type = other DNA
cccctcacgtccagtccttctccggtccgggcaaaggtggactccgggactccttgcaggctggggacgaagccgccccc

SEQ ID NO: 42615 - DNA, 80 bp, synthetic construct
  source 1..80: mol_type = other DNA
gggcgctcccctcgatgctccctcgagggggttcacacccccagccggcgggccggctactcttcttttcctttcctcgt

SEQ ID NO: 42616 - DNA, 80 bp, synthetic construct
  source 1..80: mol_type = other DNA
ttcttgatcttcttcttggccttccggaggtctttctcgagttctcctatttttgctcttgtggtcacccattgctcgag

SEQ ID NO: 42617 - DNA, 80 bp, synthetic construct
  source 1..80: mol_type = other DNA
gatgtcctcccgtcctcctcgcttgtccctcttgtcggaccggctcatctcggcaagaggcaggcggtcctcagtgctct

SEQ ID NO: 42618 - DNA, 80 bp, synthetic construct
  source 1..80: mol_type = other DNA
tactcttttctgtaaagaggagactgctggactcgctgccccagtccgaggtgagcctcagtaccgaccgaggggagcga

SEQ ID NO: 42619 - DNA, 80 bp, synthetic construct
  source 1..80: mol_type = other DNA
tgggagaggagggtctcccgaggagggttacccactaaagagagggagacacttcgaggaggatcactcccaagaagttc

SEQ ID NO: 42620 - DNA, 80 bp, synthetic construct
  source 1..80: mol_type = other DNA
caagagaacctcaagaatgaggagagtccccatgacgctggagaaatctaggaatgggaaagaggagggcggaagagtgg

SEQ ID NO: 42621 - DNA, 80 bp, synthetic construct
  source 1..80: mol_type = other DNA
agcggcctcccgatccgaacggcccgaccgccgaatttggagagcactccgggccgtacggtcgggaaccctccagaggg

SEQ ID NO: 42622 - DNA, 80 bp, synthetic construct
  source 1..80: mol_type = other DNA
aagaagccacacggagtagaacagacaaatcacctccagaggaccccttcagcgaacagaaggctctcgcgcgcgtcagg

SEQ ID NO: 42623 - DNA, 80 bp, synthetic construct
  source 1..80: mol_type = other DNA
agtaagaccatagcgtaggaagagatgctaggagttggtggagaccgaagcgaggagaaaagtaaagaaagcaacggggc

SEQ ID NO: 42624 - DNA, 80 bp, synthetic construct
  source 1..80: mol_type = other DNA
ggggagccccttccccgtccctatccttctttccaattattcctttgatgtttcccagccagggatgttcgtcctcgagt

SEQ ID NO: 42625 - DNA, 80 bp, synthetic construct
  source 1..80: mol_type = other DNA
cggttcccctcacgtccagcccttccccggtccgagaaaagggagactccgggactccttgcagactggggacgaagccg

SEQ ID NO: 42626 - DNA, 80 bp, synthetic construct
  source 1..80: mol_type = other DNA
cagccagggattttcgtcctcgagtctcttgagcttcttcttggccttccggaggtctctctcgagttctcctactttcc

SEQ ID NO: 42627 - DNA, 80 bp, synthetic construct
  source 1..80: mol_type = other DNA
ctcttgtggtcacccattgctcgaggattccctcccgttctcctcgcttgtccctcttgtcggaccggctcatctcggca

SEQ ID NO: 42628 - DNA, 80 bp, synthetic construct
  source 1..80: mol_type = other DNA
agaggcaggcgatcctcagtactcttactcttttctgtaaagaggagactgctggattcgctgccccagtccgaggtgag

SEQ ID NO: 42629 - DNA, 80 bp, synthetic construct
  source 1..80: mol_type = other DNA
cctcagtgccgaccgaggggagcgatggagaaggagggtctcccgaggagggtttcccactaaagagagggagatacttc

SEQ ID NO: 42630 - DNA, 80 bp, synthetic construct
  source 1..80: mol_type = other DNA
gggtttcccactaaagagagggagatacttcgagggggattactcccaagaagttccaagagaactccaggaatgaggag

SEQ ID NO: 42631 - DNA, 80 bp, synthetic construct
  source 1..80: mol_type = other DNA
gagggggattactcccaagaagttccaagagaactccaggaatgaggaggatccccataacgctggagaaatctgggaat

SEQ ID NO: 42632 - DNA, 80 bp, synthetic construct
  source 1..80: mol_type = other DNA
acagaagaccctctcacgcgataggagtaagaccatagcgtaggaagagatgctaggagttaggggagaccggagcgagg

SEQ ID NO: 42633 - DNA, 80 bp, synthetic construct
  source 1..80: mol_type = other DNA
gagcatgagggagcggttgggtccgtgggatgctcttcccgattccgtccaacccaccccccgagaggtccccccaggaa

SEQ ID NO: 42634 - DNA, 80 bp, synthetic construct
  source 1..80: mol_type = other DNA
cggtgaatctcccctgtgaggcctcttcctaggtccggcgtctacctccatctcgtccgtccgggccctcttcgccggtg

SEQ ID NO: 42635 - DNA, 80 bp, synthetic construct
  source 1..80: mol_type = other DNA
ctgattttcttcttggtcttccggacttttctctcaagctcctctagctcttttcttccagagacccactgctcgaggat

SEQ ID NO: 42636 - DNA, 80 bp, synthetic construct
  source 1..80: mol_type = other DNA
ggatgaagccttcccgagaggggttagctggtaaagaggcgaggaaagttgagaaaaattgtcccaagaaggtccaagag

SEQ ID NO: 42637 - DNA, 80 bp, synthetic construct
  source 1..80: mol_type = other DNA
aaaactcgggaaggaggacttttccccataacgctgcggagactctcggaatgggaaagaggaaggcgaagaaagaggtg

SEQ ID NO: 42638 - DNA, 80 bp, synthetic construct
  source 1..80: mol_type = other DNA
cgggcctcccgatccgaggggtccggcgccgagtttttggagagaactccgggccgaatggtcgagtagcacacagagtg

SEQ ID NO: 42639 - DNA, 80 bp, synthetic construct
  source 1..80: mol_type = other DNA
agaatgccacacggagacaagcagaaaaaccacctccagaggaccccttcagcgaacagaagacgctctcggcggaggag

SEQ ID NO: 42640 - DNA, 80 bp, synthetic construct
  source 1..80: mol_type = other DNA
taagcccgtagcgataggagaggatgctaggaggtaggggcgaccaaagcgaggagaaaagcaaagagagcaacggggct

SEQ ID NO: 42641 - DNA, 80 bp, synthetic construct
  source 1..80: mol_type = other DNA
gagcccccccttcgctcttttccttctttccgattattcctttgatgtttcccagccagggattatcgtcctcgagtttc

SEQ ID NO: 42642 - DNA, 80 bp, synthetic construct
  source 1..80: mol_type = other DNA
gttccacggacccccttccaaaggaccgagggggggactaggagcgcggtgtggaccgctggagccgtgggatgctcttc

SEQ ID NO: 42643 - DNA, 80 bp, synthetic construct
  source 1..80: mol_type = other DNA
ccgattccgtccgaccccacccccgagaggtccccccaggaatggcgggaccccactctgcagggtccgcgtaccatcct

SEQ ID NO: 42644 - DNA, 80 bp, synthetic construct
  source 1..80: mol_type = other DNA
cctgagttcctcttcttcctccttgctgaggctcttccctcccgcggagagctgattcttcttgttcttgagggccatcc

SEQ ID NO: 42645 - DNA, 80 bp, synthetic construct
  source 1..80: mol_type = other DNA
ggagatacttcgagggggattgctcccaagaagttccaagagaatctcaagaaagaggagagtccccatgacgctggaga

SEQ ID NO: 42646 - DNA, 80 bp, synthetic construct
  source 1..80: mol_type = other DNA
cccttcagcgaacagaagactctctcacgcgataggagtaagaccatagcgtgggaggagatgctaggagtagggagaga

SEQ ID NO: 42647 - DNA, 80 bp, synthetic construct
  source 1..80: mol_type = other DNA
ctgtccgtccgggccttcttcgccgggggagccccttccccgtccctatccttctttccgattattcctttgatgtttcc

SEQ ID NO: 42648 - DNA, 80 bp, synthetic construct
  source 1..80: mol_type = other DNA
tctgtaaagaggagactgctggactcgctgccccagtccgaggtgagcccagtgccgaccgaagggagcgatgggagagg

SEQ ID NO: 42649 - DNA, 80 bp, synthetic construct
  source 1..80: mol_type = other DNA
tggacctcccgaggggggtttcccactaaagagagggagacacttcgaggtggatcactcccaagaagttccaagagaac

SEQ ID NO: 42650 - DNA, 80 bp, synthetic construct
  source 1..80: mol_type = other DNA
ttcaagagtgaggagagtccccaagacgctggagaaatcttggaatgggaaagaggagggcggaagagtggagcggcccc

SEQ ID NO: 42651 - DNA, 80 bp, synthetic construct
  source 1..80: mol_type = other DNA
ccgatccgaacggcccgactgcagagtttggagagcactccggaccgtacggttgggaaccctccagagggaagaagcca

SEQ ID NO: 42652 - DNA, 80 bp, synthetic construct
  source 1..80: mol_type = other DNA
cacggagtagaacagagaaatcacctccagaggaccccttcagcgaacagaaggctctcgcacgcgataggagtaagacc

SEQ ID NO: 42653 - DNA, 80 bp, synthetic construct
  source 1..80: mol_type = other DNA
atagcgtagaaagagatgctgggagttgggtgaggccgaagcgaggagaaaagcaaagaaagcaacggggctagccagtg

SEQ ID NO: 42654 - DNA, 80 bp, synthetic construct
  source 1..80: mol_type = other DNA
ccttcagcgaacagaaggctctctcgcgcgataggagtaagcccatagcataggaagagatgctaggagttgggggagac

SEQ ID NO: 42655 - DNA, 80 bp, synthetic construct
  source 1..80: mol_type = other DNA
ttcgtcggtggtcccgtctctcctcgtcggtgaagcctcccgatcctccctttcttcctggaccggagtcgacctccatc

SEQ ID NO: 42656 - DNA, 80 bp, synthetic construct
  source 1..80: mol_type = other DNA
agagaaaccccacccctcagggtccgctatcctaccctttcttacctgtggccggcatggtcccagcctcctcgctggcg

SEQ ID NO: 42657 - DNA, 80 bp, synthetic construct
  source 1..80: mol_type = other DNA
gccggctgggcaacattccgaggggaccgtccctcggtaatggcgaatgggacccaagacctccgaaggttcccagagag

SEQ ID NO: 42658 - DNA, 80 bp, synthetic construct
  source 1..80: mol_type = other DNA
aaccaggaggtgactgggcactccctttgccatccgagtggacgttcgtcctccttcggatgcccaggtcggaccgcgag

SEQ ID NO: 42659 - DNA, 80 bp, synthetic construct
  source 1..80: mol_type = other DNA
tgccgacccgaagaggaaagaaggattcggacgcaaacctgtgagtggaaattctcttctttattggggggtacactcga

SEQ ID NO: 42660 - DNA, 80 bp, synthetic construct
  source 1..80: mol_type = other DNA
attctcttctttattgtgtggtacactcgaggagtggaaggcggggagggggggtcggactaggaacctatgggaactgc

SEQ ID NO: 42661 - DNA, 80 bp, synthetic construct
  source 1..80: mol_type = other DNA
tggtttcctcggatgtccagtccatcccccgttctggagaatggcgactccgggactcctagcagttgaggaacgaagcc

SEQ ID NO: 42662 - DNA, 80 bp, synthetic construct
  source 1..80: mol_type = other DNA
gcccccgggcgctcccctcggaggtccggaaggggggttcacatccccaactcgcgggccggctgttcttcttgctcttt

SEQ ID NO: 42663 - DNA, 80 bp, synthetic construct
  source 1..80: mol_type = other DNA
ccaactcgcgggccggctgttcttcttgctcttttctcgtcttcgacggtcaacttcccgagttcctcttcttcctcctt

SEQ ID NO: 42664 - DNA, 80 bp, synthetic construct
  source 1..80: mol_type = other DNA
cccgagttcctcttcttcctccttgctgagggactttcctcccgcggacagctgcttcttcttgttctcgagggccttcc

SEQ ID NO: 42665 - DNA, 80 bp, synthetic construct
  source 1..80: mol_type = other DNA
ccagggattttcgtcctcaagcctcctgatcgttttcctcgccttccggatcttcctctcgaggtcctccgcttcttctc

SEQ ID NO: 42666 - DNA, 80 bp, synthetic construct
  source 1..80: mol_type = other DNA
ttgccttgacccacttcgaaaggatctcctcccttcccttccggcttcccctcggatcggcacggctcatctcggcgagg

SEQ ID NO: 42667 - DNA, 80 bp, synthetic construct
  source 1..80: mol_type = other DNA
gcggcgatcctcagttctcttactcttttctgacaaagaggagactgctggatgccccgcccgggtccgaggatgggcca

SEQ ID NO: 42668 - DNA, 80 bp, synthetic construct
  source 1..80: mol_type = other DNA
agtccgacgaggggatcgcaagaggaagaggagagagagcctcgaagaggagcaaggacaggagagcgggaacactctga

SEQ ID NO: 42669 - DNA, 80 bp, synthetic construct
  source 1..80: mol_type = other DNA
ggagagaactcccaagagggcgaggaatgatcagaggtcggggacggatccccgagacgctggtaggcatctcggaatga

SEQ ID NO: 42670 - DNA, 80 bp, synthetic construct
  source 1..80: mol_type = other DNA
ggaaaaatggtcagagatggagaaaaagagcgagcctcccgatacgggattcccctgaacctattggatctggagactct

SEQ ID NO: 42671 - DNA, 80 bp, synthetic construct
  source 1..80: mol_type = other DNA
cgtcccataggagtggtgggggatcgaggcggcaatccaccaggagatctcggagaacccacctccagaggaccccttca

SEQ ID NO: 42672 - DNA, 80 bp, synthetic construct
  source 1..80: mol_type = other DNA
gggatcgaggcggcaatccaccaggagatctcggagaacccacctccagaggaccccttcagcgaacagaagagcctgcc

SEQ ID NO: 42673 - DNA, 80 bp, synthetic construct
  source 1..80: mol_type = other DNA
gcgaacagaagagcctgccccggtcgaattgtcccgtagcgataggaggagatgctaggagtggggagagaccgagcgag

SEQ ID NO: 42674 - DNA, 80 bp, synthetic construct
  source 1..80: mol_type = other DNA
cgatctgttcggggtttcttcgccgggggagctccctccccactcttgtcctttccgattattcctttgatgtttcccag

SEQ ID NO: 42675 - DNA, 80 bp, synthetic construct
  source 1..80: mol_type = other DNA
ttatcccggggaactcggctctcttccccaactagccggccccgggcgcctttccaaatgagcgtggaggactggcaacc

SEQ ID NO: 42676 - DNA, 80 bp, synthetic construct
  source 1..80: mol_type = other DNA
ggaggccccgcggtcccatggcattccaccgttgcccgccactccacactccttcccccctgcggggccccccataacag

SEQ ID NO: 42677 - DNA, 80 bp, synthetic construct
  source 1..80: mol_type = other DNA
ttcctctaacttctttcttccatttatccactgctcgagagtctcttctcttcccccgcggttcctcctcgattcggacc

SEQ ID NO: 42678 - DNA, 80 bp, synthetic construct
  source 1..80: mol_type = other DNA
ggaactcggcgaatcgtccccacatagcagctcccaggacccccttccaaaatgaccgagggtggagcttggatcgtggg

SEQ ID NO: 42679 - DNA, 80 bp, synthetic construct
  source 1..80: mol_type = other DNA
aaatgaccgagggaggagcttggatcgtgggggaccagtggagccatgggatgctcctcccgattccgtccatccctacc

SEQ ID NO: 42680 - DNA, 80 bp, synthetic construct
  source 1..80: mol_type = other DNA
acgccgaggggatatctcccaagaaggaaaaaaggaaaaagagtcggaagctttccccataacgctggagacatctcgga

SEQ ID NO: 42681 - DNA, 80 bp, synthetic construct
  source 1..80: mol_type = other DNA
aggggaaagaggcgggagggaaaagaaggagcgggctccccgatccgagaggcccaactgccaagtttggagagcactcc

SEQ ID NO: 42682 - DNA, 80 bp, synthetic construct
  source 1..80: mol_type = other DNA
gtcggaggaggccccccaagaaggaaaaaagagaaagcaagagacggacgtttcccctatgacgctggagacatctcgga

SEQ ID NO: 42683 - DNA, 80 bp, synthetic construct
  source 1..80: mol_type = other DNA
cttgagccaattccgaacgaagagagcgcgaggggaggatcagcgcccgagagggagtcgatggtgaagaatggaggaaa

SEQ ID NO: 42684 - DNA, 80 bp, synthetic construct
  source 1..80: mol_type = other DNA
ctcgtcttcctcggtcaacctcctgagttcctcttcttcctccttgctgagtttcttccctccggcgtcgagctgcttcc

SEQ ID NO: 42685 - DNA, 80 bp, synthetic construct
  source 1..80: mol_type = other DNA
agtctatctccatccggtccgttcgggccctcttcgccggaggggccccctccccatccttgctcttctttcccaagatt

SEQ ID NO: 42686 - DNA, 80 bp, synthetic construct
  source 1..80: mol_type = other DNA
ttcctcctgtttctttcttccatcgacccactgctcgagaacctcttctctccctccgcggttcttcttcgattcggacc

SEQ ID NO: 42687 - DNA, 80 bp, synthetic construct
  source 1..80: mol_type = other DNA
tcgacgagggcgagcggtcctcagagctcttactcttttctgtaaagaggagactgctggactcgccgcacaggttcgag

SEQ ID NO: 42688 - DNA, 80 bp, synthetic construct
  source 1..80: mol_type = other DNA
atgggggaagaggggatggaagaaaggagcgagcctcccgatccgagtggcccaactaccgtggttggaggacacttccg

SEQ ID NO: 42689 - DNA, 80 bp, synthetic construct
  source 1..80: mol_type = other DNA
gaacagaggagctctcggcgcggcaggagtaagactgtagcgataggaggagatgctaggagtaggcggagaccgaggcg

SEQ ID NO: 42690 - DNA, 80 bp, synthetic construct
  source 1..80: mol_type = other DNA
ggaactcggcgaatcgtccccatctagcagttcccggacccccttccaaaatgaccgagagagggtggctaggagcgcgg

SEQ ID NO: 42691 - DNA, 80 bp, synthetic construct
  source 1..80: mol_type = other DNA
agggccccggggtccgtgggatgctcttcccgattccgtccaaccccctcccagcgcgtccccccaggaatggcaggacc

SEQ ID NO: 42692 - DNA, 80 bp, synthetic construct
  source 1..80: mol_type = other DNA
aatggaggaagaggggatggaagaaaggagcgagccctccgatccgaggggcccaactgccagatttggagagcacttcc

SEQ ID NO: 42693 - DNA, 80 bp, synthetic construct
  source 1..80: mol_type = other DNA
ggctcatctcgacgagggcggcggtcctaaaaactcttactcttttctgtaaagaggagtcttctggactcgccgcccgg

SEQ ID NO: 42694 - DNA, 80 bp, synthetic construct
  source 1..80: mol_type = other DNA
gggaactcggcgaatcgtccccatctagcagcttccgggcccccttccaaaatgaccaagaaagggtggcttggagtgcg

SEQ ID NO: 42695 - DNA, 80 bp, synthetic construct
  source 1..80: mol_type = other DNA
ggtctcctctcacgtccagcccctccccggtcctggcgaaggtggactccggaacgccttgcagattggggacgaagccg

SEQ ID NO: 42696 - DNA, 80 bp, synthetic construct
  source 1..80: mol_type = other DNA
ttatcccggggaactcggcgaatcgtccccatctagcagctcccggacccccttccaaaatgaccgagagagggtggcta

SEQ ID NO: 42697 - DNA, 80 bp, synthetic construct
  source 1..80: mol_type = other DNA
gttcggagggctctcccaagaggcccaaaggaaggcaagaatgggaagcatttccctatgacgctggaaaacttcctgga

SEQ ID NO: 42698 - DNA, 80 bp, synthetic construct
  source 1..80: mol_type = other DNA
aatgggagaagaagggatggaaagaaaggagtgacctccccgatccgaggggcccaactaccaggtttggagagcactcc

SEQ ID NO: 42699 - DNA, 80 bp, synthetic construct
  source 1..80: mol_type = other DNA
gcgaacggaagagctctcagcgcggtaggagtaagactgtagcgataggtggagacgctaggagtaggcggagaccgagg

SEQ ID NO: 42700 - DNA, 80 bp, synthetic construct
  source 1..80: mol_type = other DNA
ggccgaaggatcgaggtatcccagaaggaggaatcctctcggagaaaaggagacaaatcacctccagaggaccccttcag

SEQ ID NO: 42701 - DNA, 80 bp, synthetic construct
  source 1..80: mol_type = other DNA
cgaacagagaactctgacgcgcgaggagcaagcccatagcgatggaaagagatgctaggagttagaggagactgaagcga

SEQ ID NO: 42702 - DNA, 80 bp, synthetic construct
  source 1..80: mol_type = other DNA
gaactcggcgaatcgtccccacatagcagctcccggagccccttccaaagcgaccgagggaggtggcttggaacacaggg

SEQ ID NO: 42703 - DNA, 80 bp, synthetic construct
  source 1..80: mol_type = other DNA
ttccaaagcgaccgagggaggtggcttggaacacaggggaccagtggagccatgggatgcccttcccgatgtccgtccaa

SEQ ID NO: 42704 - DNA, 80 bp, synthetic construct
  source 1..80: mol_type = other DNA
catgggccatctccgagcgaagggaacgcgctggaaagatcatctcccgagaggggatggacggtaaagaaacggagatc

SEQ ID NO: 42705 - DNA, 80 bp, synthetic construct
  source 1..80: mol_type = other DNA
atcctcggctctctttcttccgttcacccactgctcgaggatatcttctcttccatcgcgcctcttcttcgactcggaac

SEQ ID NO: 42706 - DNA, 80 bp, synthetic construct
  source 1..80: mol_type = other DNA
aggggaaagagggaaggtggaaaagaaggcgcgggcctcccgatccgaaaggcccgacgcccaagtttggagagcacccc

SEQ ID NO: 42707 - DNA, 80 bp, synthetic construct
  source 1..80: mol_type = other DNA
cgaacagagaactcgcacgggataggagtaagcccatagcgatggaaagagatgctaggagttagaggagaccagaacga

SEQ ID NO: 42708 - DNA, 80 bp, synthetic construct
  source 1..80: mol_type = other DNA
tcaggtgttccacctcccgagaggggacgagtgagtcttatcccggggaactcggcgaatcgtccccacataacagctcc

SEQ ID NO: 42709 - DNA, 80 bp, synthetic construct
  source 1..80: mol_type = other DNA
ttatcccggggaactcggcgaatcgtccccacataacagctcccggacccccttcaaaaatggccgagggtggtggctag

SEQ ID NO: 42710 - DNA, 80 bp, synthetic construct
  source 1..80: mol_type = other DNA
gccgaggagatgtccccaagaaggaaaaaagagaaagcaagagtcggaagctttccccataacgctagagacatcctgga

SEQ ID NO: 42711 - DNA, 80 bp, synthetic construct
  source 1..80: mol_type = other DNA
atcctctaacttctttcttccgttcacccactgctcgagaacctcttctctgccatcgcggcctttcttcgactcggaac

SEQ ID NO: 42712 - DNA, 80 bp, synthetic construct
  source 1..80: mol_type = other DNA
cgaacagaagactctgagccgcgaggagtaagagcatagcgatggaaagagatgctaggagttagaggagaccagaacga

SEQ ID NO: 42713 - DNA, 80 bp, synthetic construct
  source 1..80: mol_type = other DNA
atcgaaggtaagtccccaagaaggaaaaaagagaaagcaagaatcggacgagttccccacaacgctgggaacaccttgga

SEQ ID NO: 42714 - DNA, 80 bp, synthetic construct
  source 1..80: mol_type = other DNA
catgggccatctccatgcgaaaatggcgcgctggaaggatcagctcccgagaggggtaaaccggtaaagagcattggaac

SEQ ID NO: 42715 - DNA, 80 bp, synthetic construct
  source 1..80: mol_type = other DNA
cctttgatgtttcccaaccagggatattcgtcctcaagtatcttgatattcttcttaatcttccggaggtccctctcgag

SEQ ID NO: 42716 - DNA, 80 bp, synthetic construct
  source 1..80: mol_type = other DNA
cggaggaagccccccaagaaggaaaaaagagaaagcaagaatcggagactttccccacgacgctggtaacgtcttggaag

SEQ ID NO: 42717 - DNA, 80 bp, synthetic construct
  source 1..80: mol_type = other DNA
ctcgagggccatccttcgtcggtgatcccgcctctcactgtcggagaaccctcccctgagaggcctcttcctaggcccgg

SEQ ID NO: 42718 - DNA, 80 bp, synthetic construct
  source 1..80: mol_type = other DNA
cctttgatgtttcctagccagagattttcttcctcaagtttcttgattttcttcttgaccttccggaggtccctctcgag

SEQ ID NO: 42719 - DNA, 80 bp, synthetic construct
  source 1..80: mol_type = other DNA
tcggaggtaccctcccaagaaggaacaaagagaaggcaagagacggagcatttccctagggcactggagacatcctggaa

SEQ ID NO: 42720 - DNA, 80 bp, synthetic construct
  source 1..80: mol_type = other DNA
atgggccaagtccgacaaagagtccggaggaggaagggtgagagagatcccgaagggaggcaaggacaggagagcgggag

SEQ ID NO: 42721 - DNA, 80 bp, synthetic construct
  source 1..80: mol_type = other DNA
tgtcgtcctcgtcggccaacctcctgagttcctcttcttcctccttgctgagggactttcctcccgcggacagctgcttt

SEQ ID NO: 42722 - DNA, 80 bp, synthetic construct
  source 1..80: mol_type = other DNA
ctcgagggccttccttcgtcggtggtcccgtctctcctcgtcggtgtagcctcccggtcccttccttcctcctggaccgg

SEQ ID NO: 42723 - DNA, 80 bp, synthetic construct
  source 1..80: mol_type = other DNA
cctccgcttcttctcttgccttgacccacttcgaaaggatctcctcccttcccttccgacttctctttggatcggcgagg

SEQ ID NO: 42724 - DNA, 80 bp, synthetic construct
  source 1..80: mol_type = other DNA
ctcatctcggcgagggcggcgatcctcagtactcttactcttttctgtaaagaggagactgctggataccccgcccgagc

SEQ ID NO: 42725 - DNA, 80 bp, synthetic construct
  source 1..80: mol_type = other DNA
ggaatgaggaagatggtcagagatggtagaaaagagcgagccctccgatccgatggggccctggacccctcagctctgga

SEQ ID NO: 42726 - DNA, 80 bp, synthetic construct
  source 1..80: mol_type = other DNA
gaccgaagcgaggaggaaagtaaagaaagcaacggggctagcgagtggatgttccgcccccgccggcccgagtgaaggct

SEQ ID NO: 42727 - DNA, 80 bp, synthetic construct
  source 1..80: mol_type = other DNA
ccctctgaggagaagacccccaagagggcaagggatgaaccaagattcgggaacggatcccctacgctggtgagcatctc

SEQ ID NO: 42728 - DNA, 80 bp, synthetic construct
  source 1..80: mol_type = other DNA
tggctcatctcgacgagggcggcagtcctcagtgctcttactctttgtgaataaaaaggagactgctggacgccccgccc

SEQ ID NO: 42729 - DNA, 80 bp, synthetic construct
  source 1..80: mol_type = other DNA
cgacgagggcggcagtcctcagtgctcttactctttgtgaataaaaaggagactgctggacgccccgcccgggttcgagc

SEQ ID NO: 42730 - DNA, 80 bp, synthetic construct
  source 1..80: mol_type = other DNA
atgaggaaagtggggatgggaaggtagaaaagagcgagcctcccgatccgagtttgccctgaacctatcgagtttggagt

SEQ ID NO: 42731 - DNA, 80 bp, synthetic construct
  source 1..80: mol_type = other DNA
cctccgagcttagggttgaatagagcgcagtgggaggaagccaccaggagccggagacaagacacctccagaggacccct

SEQ ID NO: 42732 - DNA, 80 bp, synthetic construct
  source 1..80: mol_type = other DNA
tcagcgaacagaagagtctatcccgggggaggagaacatagcgataggaggagatgctaggagtagggagagaccgaagc

SEQ ID NO: 42733 - DNA, 80 bp, synthetic construct
  source 1..80: mol_type = other DNA
ttatcccggggaactcggccagtcccggatcaccggctccaggactccatctcaaaggaccgagggtagggcttagaaca

SEQ ID NO: 42734 - DNA, 80 bp, synthetic construct
  source 1..80: mol_type = other DNA
ccggggttcccggcttcccatggaggaccccgtcgcccttctccacactccttccccgccgcgggccccccccataaaga

SEQ ID NO: 42735 - DNA, 80 bp, synthetic construct
  source 1..80: mol_type = other DNA
gccggctgggcaacattccgaggggaccgtcccccggtaatggcagatgggacccaggctctccccggattctctttcga

SEQ ID NO: 42736 - DNA, 80 bp, synthetic construct
  source 1..80: mol_type = other DNA
tcgagaaggagtggttcccaagagggcgaggggacttcaagagatgaggatgaatccccgagacgctggagactcccgga

SEQ ID NO: 42737 - DNA, 80 bp, synthetic construct
  source 1..80: mol_type = other DNA
actctcatcctttattgggtggtacactcgaggagtggaaggcggtgagggtgggacggaccaggtccccatggaaattg

SEQ ID NO: 42738 - DNA, 80 bp, synthetic construct
  source 1..80: mol_type = other DNA
atgcattgcactcagcttccctcctcctgcactgctatccacaattgtaactgttaaccatgtttattttaactgctcat

SEQ ID NO: 42739 - DNA, 80 bp, synthetic construct
  source 1..80: mol_type = other DNA
ttctttcgatttaaacacttaaaggtcttgcttcaactcctgttcatcctgttgttcgttgaggagaagtttcttcagct

SEQ ID NO: 42740 - DNA, 80 bp, synthetic construct
  source 1..80: mol_type = other DNA
gattagggatatccgagggcgcgccatggtgagcaagggcgaggagctgttcaccgtggtggtgcccatcctggtcgagc

SEQ ID NO: 42741 - DNA, 80 bp, synthetic construct
  source 1..80: mol_type = other DNA
cactcccacgactggagttcgaacgagatggccacacttttgaggagcttagcattgttcaaaagaaacaaggacaaacc

SEQ ID NO: 42742 - DNA, 80 bp, synthetic construct
  source 1..80: mol_type = other DNA
tgaaactgtcaatttagaaccaggttggacagatactgcgcatggttctggaatcatcccacttaaaactgacttggaat

SEQ ID NO: 42743 - DNA, 80 bp, synthetic construct
  source 1..80: mol_type = other DNA
catgtgactctgcaatgtgttatggatcaagtacagcaaacttagtacgaggacaaaatactgtacatgttgtgggcaaa

SEQ ID NO: 42744 - DNA, 80 bp, synthetic construct
  source 1..80: mol_type = other DNA
gccgccagaactataagaaaaacaagtagtgatcacatgctctgctttataatagtatcaattaactttctatatattta

SEQ ID NO: 42745 - DNA, 80 bp, synthetic construct
  source 1..80: mol_type = other DNA
gtataactgtattaatcactatcatttattttatacaactatattatattaatacctataaaaagttactatagttccca

SEQ ID NO: 42746 - DNA, 80 bp, synthetic construct
  source 1..80: mol_type = other DNA
tcttcggttaacttccgaagttcctcttcctcctccctgctgaggacctttcccccggaggaaagctgctttttcttgtt

SEQ ID NO: 42747 - DNA, 80 bp, synthetic construct
  source 1..80: mol_type = other DNA
tcatcttcgaagagggcggacggtcccgagaacttctatcttcctgcttagaagaggagtctctgggacgcctccgccca

SEQ ID NO: 42748 - DNA, 80 bp, synthetic construct
  source 1..80: mol_type = other DNA
ccccttctgcgaacagaaaagctcttccccctcgggagtagggccgtagcgatgggagtggatgctaggagttgggagaa

SEQ ID NO: 42749 - DNA, 80 bp, synthetic construct
  source 1..80: mol_type = other DNA
agttcggaaggggatcccaagaggatcactcgagattcaagaggtgaggagggatccccgagacgctggaggaacgccgg

SEQ ID NO: 42750 - DNA, 80 bp, synthetic construct
  source 1..80: mol_type = other DNA
cgcggtcccccctcgtgtctagcccatccccgtgtctagagaagggggattccggaactccttgcatgttggagacgaag

SEQ ID NO: 42751 - DNA, 80 bp, synthetic construct
  source 1..80: mol_type = other DNA
ttcctctgttctcttccttgcgttcacccacttctcgaggagctcttccctccctccgcgttctttcttcgattcggacc

SEQ ID NO: 42752 - DNA, 80 bp, synthetic construct
  source 1..80: mol_type = other DNA
tggaaagaaggaaggttgaaaaaaagggggcggccttcccattccaagggccccaagcgacaacttttgaaggcaattcc

SEQ ID NO: 42753 - DNA, 80 bp, synthetic construct
  source 1..80: mol_type = other DNA
ggccggaagggtgaaacctccgccagagggaggaagccacacggagtagaacagagaaatcacctccagaggaccccttc

SEQ ID NO: 42754 - DNA, 80 bp, synthetic construct
  source 1..80: mol_type = other DNA
agtgaacagaagagccttgctcgggataggagtaagcccatacgcgatggggggagatgctaggagaacgggctagccgt

SEQ ID NO: 42755 - DNA, 80 bp, synthetic construct
  source 1..80: mol_type = other DNA
cagtgaggaggaaagcaacggggctagccgtcaggtgttcctccccccgagaggggaagagtgaggcttatcccgtggaa

SEQ ID NO: 42756 - DNA, 80 bp, synthetic construct
  source 1..80: mol_type = other DNA
ctcggcgaatcgtctccacatagcagagcccggacccccttccaaaaggaccgggtgtggagcttagagcgcgtggtgga

SEQ ID NO: 42757 - DNA, 80 bp, synthetic construct
  source 1..80: mol_type = other DNA
cccgctggagccatgggatgcttctcccgattccgtccatccctcccccagggggtcgcccaggaatggcggaaactgca

SEQ ID NO: 42758 - DNA, 80 bp, synthetic construct
  source 1..80: mol_type = other DNA
ctcttcggagtccgcgttccattccttcttacctgtggccggcatggtcccagcctcctcgctggcgccggctgggcaac

SEQ ID NO: 42759 - DNA, 80 bp, synthetic construct
  source 1..80: mol_type = other DNA
attccgaggggaccgtcccctcggtaatggcgaatgggacccagaatccctcctctgattccgatagagaatcaagaggg

SEQ ID NO: 42760 - DNA, 80 bp, synthetic construct
  source 1..80: mol_type = other DNA
tccagaaaagctattcccagaaggtaagaaaggaccaagagtcggaagttttcccgagaacgctggaagcactcttgaaa

SEQ ID NO: 42761 - DNA, 80 bp, synthetic construct
  source 1..80: mol_type = other DNA
ttgagccccatccgggcgaagagtccgacggggaagaggaacaacccgagaggggacccagcgataaagatgcgaggaac

SEQ ID NO: 42762 - DNA, 80 bp, synthetic construct
  source 1..80: mol_type = other DNA
ggtcacctctgatgtctaggccctctacctgtcgagtgaaggtggactccgggactccttgcatgctggggacgaagccg

SEQ ID NO: 42763 - DNA, 80 bp, synthetic construct
  source 1..80: mol_type = other DNA
tccttggtcaacctcttaagttcctcttcttcctccctgctgaggttctttcctcctgaggagagctgtctcttcttgtt

SEQ ID NO: 42764 - DNA, 80 bp, synthetic construct
  source 1..80: mol_type = other DNA
agtctacctccatctggtccgtcctggccctcttcgccggaggtgctccttctccatccttatccttctttccgattatt

SEQ ID NO: 42765 - DNA, 80 bp, synthetic construct
  source 1..80: mol_type = other DNA
cctttgatgttccccagccagggattttcttcctcgagtttcttgaccttcttcttgctcttccggaggttccgctcgag

SEQ ID NO: 42766 - DNA, 80 bp, synthetic construct
  source 1..80: mol_type = other DNA
ctcgacttttcttctttcgctgacccactgctcgaggatgttctccctgtcccctcggttcttcttcgactcggaacggc

SEQ ID NO: 42767 - DNA, 80 bp, synthetic construct
  source 1..80: mol_type = other DNA
tcatctcggcaagaggcggcgatccctaggttctcttactcttttctgtaaagaggagaccgctgggtccgccgccccag

SEQ ID NO: 42768 - DNA, 80 bp, synthetic construct
  source 1..80: mol_type = other DNA
aaggggaaagaggaaggtggaagagaggagggagccttccgattcgaatggccagactgccaagtttggagatcttcggc

SEQ ID NO: 42769 - DNA, 80 bp, synthetic construct
  source 1..80: mol_type = other DNA
ccgaaaggttgagtagcccccagagggagaaaaccacaccgagagtgtcagagaaatcacctccagaggaccccttcagc

SEQ ID NO: 42770 - DNA, 80 bp, synthetic construct
  source 1..80: mol_type = other DNA
agtgtcagagaaatcacctccagaggaccccttcagcgaacagaagacctctcactcggtgggagtaagaccatagcgat

SEQ ID NO: 42771 - DNA, 80 bp, synthetic construct
  source 1..80: mol_type = other DNA
gaacagaagacctctcactcggtgggagtaagaccatagcgatgggaggagatgctaggagttagaggggaccaaagcga

SEQ ID NO: 42772 - DNA, 80 bp, synthetic construct
  source 1..80: mol_type = other DNA
ggaggaaagtaaaaagagcagcggggctagccggtgggtgttccgcctcccgaggtggacgagtgaggcttatcccggtg

SEQ ID NO: 42773 - DNA, 80 bp, synthetic construct
  source 1..80: mol_type = other DNA
aactcggcgaatcgtccccacatagcagatccacggacccccttccaaaagactggagggaggatccttagagcaccggg

SEQ ID NO: 42774 - DNA, 80 bp, synthetic construct
  source 1..80: mol_type = other DNA
aaagactggggtgaggatccttagagcaccgggagacgcgcgggtccgtgggatgctcctcccgattccgcccatcccac

SEQ ID NO: 42775 - DNA, 80 bp, synthetic construct
  source 1..80: mol_type = other DNA
agacgcgcgggtccgtgggatgctcctcccgattccgcccatcccacccccccgggaggtccccccaggaatggcaggac

SEQ ID NO: 42776 - DNA, 80 bp, synthetic construct
  source 1..80: mol_type = other DNA
gccgacggatgtcctcccaagaagacccaagagaagacgcaagaagaggaattttccctaggacgctggtggactcttgg

SEQ ID NO: 42777 - DNA, 80 bp, synthetic construct
  source 1..80: mol_type = other DNA
atgggcctcgttccgggcgaagggagcgcgggtgaggaggaaacacccgaggtggagtgagttggtaaagagcaggtgaa

SEQ ID NO: 42778 - DNA, 80 bp, synthetic construct
  source 1..80: mol_type = other DNA
cagcgaacagaagagcgtcggacgcgtcaggagcaagaccatagcgatggggagagatgctaggagttagaggagaccga

SEQ ID NO: 42779 - DNA, 80 bp, synthetic construct
  source 1..80: mol_type = other DNA
cctgggaggtcccagtggagccatgggatgcccttcccgattctgacctaccccctcccagtagggtcgcccaggaatgg

SEQ ID NO: 42780 - DNA, 80 bp, synthetic construct
  source 1..80: mol_type = other DNA
ttctgacctaccccctcccagtagggtcgcccaggaatggcgggaccccactcaacagggtccgcgtaccatcctttctt

SEQ ID NO: 42781 - DNA, 80 bp, synthetic construct
  source 1..80: mol_type = other DNA
cctcggagaaactactcccaagaaggaaaaaagagaactcaagaggcgggagacctccccacgacgctgcagacatcctg

SEQ ID NO: 42782 - DNA, 80 bp, synthetic construct
  source 1..80: mol_type = other DNA
catgggccaattccgagcgaagagtccgcggtggaaggatcagtgcccgagaggggtaaagtggtaaagagtattggaac

SEQ ID NO: 42783 - DNA, 80 bp, synthetic construct
  source 1..80: mol_type = other DNA
ttcctccgctttctttcttccactcacccacttctcgagaatatcttctcttccatcgcgcttcttcttcaactcggacc

SEQ ID NO: 42784 - DNA, 80 bp, synthetic construct
  source 1..80: mol_type = other DNA
aaggtgaaagaggacagatggaagagaagggggggcccccccgatccgaaaggcccgacgcccaagtttggagagcactc

SEQ ID NO: 42785 - DNA, 80 bp, synthetic construct
  source 1..80: mol_type = other DNA
aaaggcccgacgcccaagtttggagagcactccggccgaagggttgagaacaccagagggaggaacacactcggagatga

SEQ ID NO: 42786 - DNA, 80 bp, synthetic construct
  source 1..80: mol_type = other DNA
cggccgaagggttgagaacaccagagggaggaacacactcggagatgagcagagaaatcacctccagaggaccccttcag

SEQ ID NO: 42787 - DNA, 80 bp, synthetic construct
  source 1..80: mol_type = other DNA
gccgaggagatgtctcccaagaaggccaaaagagaatacaagagtcggaagctttccccataacgctggagacatctcgg

SEQ ID NO: 42788 - DNA, 80 bp, synthetic construct
  source 1..80: mol_type = other DNA
ggaacactccggcccaaaggccttgagtacccagagggaggagatccactcttagaaagccctggagagggaggaccccc

SEQ ID NO: 42789 - DNA, 80 bp, synthetic construct
  source 1..80: mol_type = other DNA
ggaaaggggaaagtggataggaggaaaaaaaaggagcggctccccgatccgaaagtcccgatcccgatttccaaagtttg

SEQ ID NO: 42790 - DNA, 80 bp, synthetic construct
  source 1..80: mol_type = other DNA
ttatcccgaggaactcggctaatcgtccttacatagcagctccaggacccccttccaaaaagactgagggaggagcttgg

SEQ ID NO: 42791 - DNA, 80 bp, synthetic construct
  source 1..80: mol_type = other DNA
ccgccttattcactagggacgacaattctggggagaggagggtggatcagatgggaagagtatatcctatggaaattccc

SEQ ID NO: 42792 - DNA, 80 bp, synthetic construct
  source 1..80: mol_type = other DNA
catgagccatctccgaacgaaggatcgcgccgggggcgagtcaggacaccgagagggatcaataccaagagcggtggatc

SEQ ID NO: 42793 - DNA, 80 bp, synthetic construct
  source 1..80: mol_type = other DNA
gggatcccctcacgtccagcccctcggcagttctggtgaaggtggactccgggatgccttgcatgctggggacgaagccg

SEQ ID NO: 42794 - DNA, 80 bp, synthetic construct
  source 1..80: mol_type = other DNA
cccccgggcgctcccctcggtccaccttcggaggggttcacccccaaccgcgacgggccgtgctcttcttttttcttttc

SEQ ID NO: 42795 - DNA, 80 bp, synthetic construct
  source 1..80: mol_type = other DNA
ggagaggggaaagtggataggaggaaaagaaaggagcggcccgccgatccgagagtaccgctccagatttccaaagtatg

SEQ ID NO: 42796 - DNA, 80 bp, synthetic construct
  source 1..80: mol_type = other DNA
cgagcactccggtccaaaggttgagagtacgcagagggaggagatccactcggagaaagccctccagaggacgcaccccc

SEQ ID NO: 42797 - DNA, 80 bp, synthetic construct
  source 1..80: mol_type = other DNA
ttcagcgaacagaagagcgtcagacgcgtcaggagtaagagatagggggagatgcttggagttagaggagaccgaagcga

SEQ ID NO: 42798 - DNA, 80 bp, synthetic construct
  source 1..80: mol_type = other DNA
ttattccggggaactcggcttatcgtccccacatagcagctccaggacccccttccgaaaagactgaggtgggatcttgg

SEQ ID NO: 42799 - DNA, 80 bp, synthetic construct
  source 1..80: mol_type = other DNA
cccttccgaaaagactgaggggggatcttggagcgtggaggacccagtggaaccttgggatgcccttcccgattccgaac

SEQ ID NO: 42800 - DNA, 80 bp, synthetic construct
  source 1..80: mol_type = other DNA
agcgtggaggacccagtggaaccttgggatgcccttcccgattccgaacccatcccttccccccagggtccggccaggaa

SEQ ID NO: 42801 - DNA, 80 bp, synthetic construct
  source 1..80: mol_type = other DNA
tggaacccactcagttggggtccgcgttccttccttccttacctgtggccggcatggtccagcctactcgctggcgcggg

SEQ ID NO: 42802 - DNA, 80 bp, synthetic construct
  source 1..80: mol_type = other DNA
gtcggaggaaagttccccaagaaggccaaaagagcaaagaagagacggaagattaccccttaagacgctggagacatcct

SEQ ID NO: 42803 - DNA, 80 bp, synthetic construct
  source 1..80: mol_type = other DNA
cctttgacgtttcccagccagggattgtcgtgctcgagtttcttgatcttcttcctagccctccggagttccctctcgag

SEQ ID NO: 42804 - DNA, 80 bp, synthetic construct
  source 1..80: mol_type = other DNA
cgccggccgggcaacgatccgagggaactattcctctcgagaatcggcaaatggggccccccgctcgtatctccaagagg

SEQ ID NO: 42805 - DNA, 80 bp, synthetic construct
  source 1..80: mol_type = other DNA
aaaggaggacacggacgacaaaccgtgagatctactgccctttattgttgggtgcaccctgggacccagtaatacccggg

SEQ ID NO: 42806 - DNA, 80 bp, synthetic construct
  source 1..80: mol_type = other DNA
cattgtggaggcccctatcgggaccagtttcgtccggaagggatggtgcgggaactccatcgggttctgacaggacccgg

SEQ ID NO: 42807 - DNA, 80 bp, synthetic construct
  source 1..80: mol_type = other DNA
ttcgccctctttctgtctcccaactctcgggagttctctcacccttctctcttcggtctccttcgccggaagcggcccat

SEQ ID NO: 42808 - DNA, 80 bp, synthetic construct
  source 1..80: mol_type = other DNA
ccagaggagcttgctgccgatggacattcggaccggggtctcctctgctatcttcgccactcctctcccagtgcgcgacg

SEQ ID NO: 42809 - DNA, 80 bp, synthetic construct
  source 1..80: mol_type = other DNA
tcgccctctttctgtctcccaactctcgggagctctccactcctgtcacttcgggccccctcgccggaagcggcccatcc

SEQ ID NO: 42810 - DNA, 80 bp, synthetic construct
  source 1..80: mol_type = other DNA
agaggagtttgctgccgacggacattcggaccggggactccgcttctgtcatcgccactcctctcccagctcgggatggt

SEQ ID NO: 42811 - DNA, 80 bp, synthetic construct
  source 1..80: mol_type = other DNA
cctccagcgtcatggaggctcctctctcttgctgtcttcctctgttggaagcttgggggatcctcccgagacaattcgcc

SEQ ID NO: 42812 - DNA, 80 bp, synthetic construct
  source 1..80: mol_type = other DNA
gggtgcccctatcgggaccagtgtttgtccgaaaggggatggtgaggaactccatcgggatctgtgggacccggtcgatc

SEQ ID NO: 42813 - DNA, 80 bp, synthetic construct
  source 1..80: mol_type = other DNA
ctggatgtggtttgtccgttcagctccaggtggatcaccctccgttggtagttttctcctttggctccgaaggactccag

SEQ ID NO: 42814 - DNA, 80 bp, synthetic construct
  source 1..80: mol_type = other DNA
aggagtttgctgccgacggacattcggaccggggtctccactgctatcctcgccactcctctcccagtgcgggacggttt

SEQ ID NO: 42815 - DNA, 80 bp, synthetic construct
  source 1..80: mol_type = other DNA
gctagcgtcatgggggctcctctatcttgttctcttcctctgttggaagcttggaggatccagtcgaggacattcgccct

SEQ ID NO: 42816 - DNA, 80 bp, synthetic construct
  source 1..80: mol_type = other DNA
aggagggagggcccccggcgaagaggcccaggcaggaaaccatggagattgatttcggagctgggagaaacccaaaccca

SEQ ID NO: 42817 - DNA, 80 bp, synthetic construct
  source 1..80: mol_type = other DNA
gaggctggggccatgccggccacaaggtaagaaaaggatggaacgacggacccggtggtccccctttgccatcctattgt

SEQ ID NO: 42818 - DNA, 80 bp, synthetic construct
  source 1..80: mol_type = other DNA
gatctcccccagttcctattcctgagaggtggcccgggtctccgatgctaagggaggaccgaggcgtcacccccgggata

SEQ ID NO: 42819 - DNA, 80 bp, synthetic construct
  source 1..80: mol_type = other DNA
tcccaaagagtttgctgccgacgggcattcggacccggggtctccgttcctattttcgccactcctctcccagctcgcga

SEQ ID NO: 42820 - DNA, 80 bp, synthetic construct
  source 1..80: mol_type = other DNA
tggttctccggcgtcatgggggctcctctgtcttgtttcttcctctgttggaagcttggtggatccttccgaggctattc

SEQ ID NO: 42821 - DNA, 80 bp, synthetic construct
  source 1..80: mol_type = other DNA
gatgagccaaaccgtcgcgaatccgtcttcgaaggggagggaggagatcctcgaacagtgggtagaagaaaggaagaaaa

SEQ ID NO: 42822 - DNA, 80 bp, synthetic construct
  source 1..80: mol_type = other DNA
tgggtgcccctatcgggaccggctttcctcggaggggacggtggtggaactccatcgggttctgtggttcccggtcgatc

SEQ ID NO: 42823 - DNA, 80 bp, synthetic construct
  source 1..80: mol_type = other DNA
gaggagtttgctgccgacgggcattcggtccggggtctccgctaactatcttcgtccctcctctcccagtgcgcgatggt

SEQ ID NO: 42824 - DNA, 80 bp, synthetic construct
  source 1..80: mol_type = other DNA
ggaggctggggccatgccggccacaaggtaagagagggatggaacgacggacctgagagtccccccttgccatctcattg

SEQ ID NO: 42825 - DNA, 80 bp, synthetic construct
  source 1..80: mol_type = other DNA
ctccttggggagtggaggcggttcaagagtcccttcccccttctggagattagagagatcgtcgaagctccccggtctca

SEQ ID NO: 42826 - DNA, 80 bp, synthetic construct
  source 1..80: mol_type = other DNA
actccagaggagcttgctgccgaccggcattcggatcggggtctccgccactgttttcgtcactcctctcccagctcgcg

SEQ ID NO: 42827 - DNA, 80 bp, synthetic construct
  source 1..80: mol_type = other DNA
atggttctccagcgtcatgggggctcctctatcttgtttcttcctctgttggtagcttggaggatccattcgagaccatt

SEQ ID NO: 42828 - DNA, 80 bp, synthetic construct
  source 1..80: mol_type = other DNA
catgagccaagtccgagcgaagagaacgcgttgggaaagatcagtgaccgagaggggtcaatggtaaagaggcgaagtat

SEQ ID NO: 42829 - DNA, 80 bp, synthetic construct
  source 1..80: mol_type = other DNA
cctttgatgtttcccagccaggggtgatcgtcctcgagtttcttgattttcttcttctccttccggaggtctctttcgag

SEQ ID NO: 42830 - DNA, 80 bp, synthetic construct
  source 1..80: mol_type = other DNA
atcttctaacctttttcttccattcacccacttctcgaggacctcttctcttccctcgcgcttcttcttctgctcggcgc

SEQ ID NO: 42831 - DNA, 80 bp, synthetic construct
  source 1..80: mol_type = other DNA
cccggagagatactctcctaagagggggaagagaatccaagagacggacgagctcccctacgacgctggaacatccctgg

SEQ ID NO: 42832 - DNA, 80 bp, synthetic construct
  source 1..80: mol_type = other DNA
agtggaaagggacaggcggaagaaaaaggagcgggccccccgatccgaggggcccggccaccagggtttggagagcactc

SEQ ID NO: 42833 - DNA, 80 bp, synthetic construct
  source 1..80: mol_type = other DNA
ttccacgtcttttcttgcctcgacccatttcgtgagggtctcctcccggcctccccttcgggttctcttcgcatcggact

SEQ ID NO: 42834 - DNA, 80 bp, synthetic construct
  source 1..80: mol_type = other DNA
gaggatcaggagaagtactggctctcccttagccatccgagtggacgttcgtcctccttcggatgcccaggtcggaccgc

SEQ ID NO: 42835 - DNA, 80 bp, synthetic construct
  source 1..80: mol_type = other DNA
ctcgtcatcctcggtcaacttccgaagttcctcttcctcttccctgctcaggttcttccctcccgcggacagctgctttc

SEQ ID NO: 42836 - DNA, 80 bp, synthetic construct
  source 1..80: mol_type = other DNA
tcatctcggcaagaggcggcaatcctcagtactcttactcttttcttttgaaagaggagactgctggatccgccgcccaa

SEQ ID NO: 42837 - DNA, 80 bp, synthetic construct
  source 1..80: mol_type = other DNA
gcaagaggcggcaatcctcagtactcttactcttttcttttgaaagaggagactgctggatccgccgcccaagcccgagc

SEQ ID NO: 42838 - DNA, 80 bp, synthetic construct
  source 1..80: mol_type = other DNA
tcggaggtggtcctcccaagaaggaaaaaagagaaaacaagagacggaagctttccccacgacgctggagacatcctgga

SEQ ID NO: 42839 - DNA, 80 bp, synthetic construct
  source 1..80: mol_type = other DNA
tcccctctcccgttcgggaaaaggtggactccgggactccctgcaggctgggcacgaagcccccaccgggcgctcccctc

SEQ ID NO: 42840 - DNA, 80 bp, synthetic construct
  source 1..80: mol_type = other DNA
ggcgggccgtccgttgggttcacacccccaggccgcgggccggctgctcttctttctctttcgtcgtcatccttggctaa

SEQ ID NO: 42841 - DNA, 80 bp, synthetic construct
  source 1..80: mol_type = other DNA
ccgctcaagttcctcctcttcctctcggctgaggtgcttccctcccgcggccagctgcttcttcttgttctccagggcct

SEQ ID NO: 42842 - DNA, 80 bp, synthetic construct
  source 1..80: mol_type = other DNA
tgccgggtgttccacctacgggaacggtgccgagtgaggcttatcccggagggtagcgctccgtgcccttccatagcact

SEQ ID NO: 42843 - DNA, 80 bp, synthetic construct
  source 1..80: mol_type = other DNA
ccggctgggcaacgatccgaggggactatccctctcgagaatcggcaaatgggcccctcgctcgtatctccgagaggaga

SEQ ID NO: 42844 - DNA, 80 bp, synthetic construct
  source 1..80: mol_type = other DNA
gaggacacggacgacaaaccgtgagttctattgccctttattgttgggtgcaccctgggacccagtaatgcccggtggga

SEQ ID NO: 42845 - DNA, 80 bp, synthetic construct
  source 1..80: mol_type = other DNA
cggcgagaggcgagcggtcctcagtgctcttactcttttctgtaaagaggagactgctggactcgtcgccccagtccggg

SEQ ID NO: 42846 - DNA, 80 bp, synthetic construct
  source 1..80: mol_type = other DNA
ctctgagggagattgctcccaagaagttccaggagaatctcaagaatgaggagagtccccaagacgctggagaaacccag

SEQ ID NO: 42847 - DNA, 80 bp, synthetic construct
  source 1..80: mol_type = other DNA
gatcccccctcacgtccagtccttccccggtccgggtaaaggaggattccgggactccttgcaggctggggacgaagccg

SEQ ID NO: 42848 - DNA, 80 bp, synthetic construct
  source 1..80: mol_type = other DNA
cttccactcttccccttgtggtcacccactgctcgaggatgttctcccgtcctcctcgcttgtccttcttgtcggaccgg

SEQ ID NO: 42849 - DNA, 80 bp, synthetic construct
  source 1..80: mol_type = other DNA
ctctccttgtcggtgaatcttcccctgagaggtccctttccgggtccgaagtctacctccattctgtccgttcgggccct

SEQ ID NO: 42850 - DNA, 80 bp, synthetic construct
  source 1..80: mol_type = other DNA
gttctccccttatgtccagcccctccccggtccgggtaaaggtggactccgggactccttgcaggttggggacgaagccg

SEQ ID NO: 42851 - DNA, 80 bp, synthetic construct
  source 1..80: mol_type = other DNA
gggagacacttcgaggaggattactcccaagaagttccaagagaatttccaagaatgaggagagtccccatgacgccggg

SEQ ID NO: 42852 - DNA, 80 bp, synthetic construct
  source 1..80: mol_type = other DNA
cttcgccgggggagccccttccccgtccctatccttctttccgagaattcctttgatgttccctagccagggattttcat

SEQ ID NO: 42853 - DNA, 80 bp, synthetic construct
  source 1..80: mol_type = other DNA
catgggccaccttccggacgaagagatcgcggtggcaggatcagctcccgagaggggatggatggcaaagagcattggaa

SEQ ID NO: 42854 - DNA, 80 bp, synthetic construct
  source 1..80: mol_type = other DNA
ctgggttcccctcgcgtccagcccctccccagtcctggcgaaggtggactccggaacaccttgcatgctcgggacgaagc

SEQ ID NO: 42855 - DNA, 80 bp, synthetic construct
  source 1..80: mol_type = other DNA
ttggcaagaggcggcagtcctcagtactcttactcttttctgtaaagaggagactgctggactcgccgcccgagcccaag

SEQ ID NO: 42856 - DNA, 80 bp, synthetic construct
  source 1..80: mol_type = other DNA
cgtcggaggaattctcccaagaaggaaaaaagggtaaacaagaaacggacgtttcccctatgacgctggagacatcctgg

SEQ ID NO: 42857 - DNA, 80 bp, synthetic construct
  source 1..80: mol_type = other DNA
atgagccaaatcggaacgaagagatcgcggagacaggatcagacgacgagaggggatggatgccaaagagcattggatcg

SEQ ID NO: 42858 - DNA, 80 bp, synthetic construct
  source 1..80: mol_type = other DNA
atcctctaacttctttcttgcattcacccactgctcgagaatctcttctctgttcccgcggctcttcttcgattccgagc

SEQ ID NO: 42859 - DNA, 80 bp, synthetic construct
  source 1..80: mol_type = other DNA
ggtggaagaggcaggaggaaaagaaggagcgggccccccgatccgaggggcccgacgtccagctcttggaaggcaccccg

SEQ ID NO: 42860 - DNA, 80 bp, synthetic construct
  source 1..80: mol_type = other DNA
cgaacagagagcactgacgcgcgaggagtaagcccatagcgataggaggggatgctaggagttggaggagaccgaagcga

SEQ ID NO: 42861 - DNA, 80 bp, synthetic construct
  source 1..80: mol_type = other DNA
ggagcatggaggaccagtggagccatgggatgctcctcccgatgtccgtccatccctcccccccgagggtcgcccaggaa

SEQ ID NO: 42862 - DNA, 80 bp, synthetic construct
  source 1..80: mol_type = other DNA
tcgaaggaagtctcccaagaaggaaaaaagagaaagcaagaaacggatgctctccccatgacgctggagacgtcctggaa

SEQ ID NO: 42863 - DNA, 80 bp, synthetic construct
  source 1..80: mol_type = other DNA
atgggccacgttccgaacgaagagatgcgggaagaagggatcagcatccgagagggagaggacggtaaagagcattggaa

SEQ ID NO: 42864 - DNA, 80 bp, synthetic construct
  source 1..80: mol_type = other DNA
ggttgcccctcgtgtccagcccctccccgcgtcggtggaaggtggactccgggatcccttgcatgctggggacgaagccg

SEQ ID NO: 42865 - DNA, 80 bp, synthetic construct
  source 1..80: mol_type = other DNA
ctcgtcttcctcggtcaacctcttaagttcctcttcttcctccttgctgaggtgctttcctcccgcgctcagctgcttct

SEQ ID NO: 42866 - DNA, 80 bp, synthetic construct
  source 1..80: mol_type = other DNA
cgccgaggggacacctcccaagaaggaaaaaagagaattcaagagacggacgatttccccataacgctagagacatcctg

SEQ ID NO: 42867 - DNA, 80 bp, synthetic construct
  source 1..80: mol_type = other DNA
ttcctcctgttttcttcttccagtgatccactgctcgagaacctcttctcttcccccgcggcccttcttcgattcggacc

SEQ ID NO: 42868 - DNA, 80 bp, synthetic construct
  source 1..80: mol_type = other DNA
aatggaagaaaaagggatgaaagaaaaggagcggtcctccgatccgaggggcccaactgccaggtttggagagcactctc

SEQ ID NO: 42869 - DNA, 80 bp, synthetic construct
  source 1..80: mol_type = other DNA
agcgcggtggatcgcggggtccgtgggatgctcttcccgattccgtccaacccctcccccagtgcgtccccccaggaatg

SEQ ID NO: 42870 - DNA, 80 bp, synthetic construct
  source 1..80: mol_type = other DNA
actgagccaattccgagcgaagagagcgcagggggaaggatcagcgcccgagcgggagtcatggtaaagaatggtggaaa

SEQ ID NO: 42871 - DNA, 80 bp, synthetic construct
  source 1..80: mol_type = other DNA
atgggaggagaagggatggaaagaaaggagcgagcctcccgatccgaggggcccaactgccaagtttggaggacactctc

SEQ ID NO: 42872 - DNA, 80 bp, synthetic construct
  source 1..80: mol_type = other DNA
cgaacaaaggagctcccagtgcggtaggagtgagaccatagcgataggaggagatgctaggagtagggggagaccgaagc

SEQ ID NO: 42873 - DNA, 80 bp, synthetic construct
  source 1..80: mol_type = other DNA
cctttgatgtttcccagccagggattttcttcctctagtttcctgattttcttcctggtcttccggagttccctctcgag

SEQ ID NO: 42874 - DNA, 80 bp, synthetic construct
  source 1..80: mol_type = other DNA
ggaactcggcaaatcgcccccatctagcagttcccgggcccccttccaaaggaccggaagagggtggctaggaacgcagg

SEQ ID NO: 42875 - DNA, 80 bp, synthetic construct
  source 1..80: mol_type = other DNA
gttcggagggttctcccaagagggccaagagaaagcaggaaacggaagcatttccccacgacgctgggaagcctcttgga

SEQ ID NO: 42876 - DNA, 80 bp, synthetic construct
  source 1..80: mol_type = other DNA
agcgaacaggaggcactgacgcgcgaggagttagaccatagcgataggagggaatgctgggagttaggggagaccgaagc

SEQ ID NO: 42877 - DNA, 80 bp, synthetic construct
  source 1..80: mol_type = other DNA
catgggccatctccgagcgaagaggacgcgccggaaggatcagctcccgagaggggtaagacggtaaagagcattggaac

SEQ ID NO: 42878 - DNA, 80 bp, synthetic construct
  source 1..80: mol_type = other DNA
ttcctctaactttcttcttccgttcacccactgctcgaggacctcttctcttccatcgcgcttcttcttcgactcggaac

SEQ ID NO: 42879 - DNA, 80 bp, synthetic construct
  source 1..80: mol_type = other DNA
ggggaaagaaggtaggtggaaaggaaggtgcgggcctcccgatccgaggggcccaacatccgagtttggagagcactccg

SEQ ID NO: 42880 - DNA, 80 bp, synthetic construct
  source 1..80: mol_type = other DNA
aggaacgcaggggaccagtggagccatgggatgccctttcccatgttcgaatccatcccttccccccgagtgtcgcccag

SEQ ID NO: 42881 - DNA, 80 bp, synthetic construct
  source 1..80: mol_type = other DNA
ctcgagggccttccttcgtcggtggtcctgcctctccttgtcggagaacccttccctgagaatcttcttcctaggcccgg

SEQ ID NO: 42882 - DNA, 80 bp, synthetic construct
  source 1..80: mol_type = other DNA
aggggaaagaggaaggtaggaaaagaaggcgtgggccccccgatccgagggtcccaactgccaggattggatggcactcc

SEQ ID NO: 42883 - DNA, 80 bp, synthetic construct
  source 1..80: mol_type = other DNA
gtcggaggtagctctcctaagaagaaacaagagaaagcaagaatcggatgttttccccagggcactggagacaccctgga

SEQ ID NO: 42884 - DNA, 80 bp, synthetic construct
  source 1..80: mol_type = other DNA
atgagccaagttccgggcgaaggggcgcgggggaaggatcagcgcccgagagtggatcagatggtaaaggagtgaggaac

SEQ ID NO: 42885 - DNA, 80 bp, synthetic construct
  source 1..80: mol_type = other DNA
gagcgcggagaggcaggggagccggtggatgctcttcccgatgtccgtccatcccctcccccagcgggtcgcccaggaat

SEQ ID NO: 42886 - DNA, 80 bp, synthetic construct
  source 1..80: mol_type = other DNA
gacggagaaactactcccaagaaggaaagagaggattcaagaggcggaagactttcccacaacgctggtaacgtcttgga

SEQ ID NO: 42887 - DNA, 80 bp, synthetic construct
  source 1..80: mol_type = other DNA
gcgaacagagcgctcgtgcggcgcgaggagttagagcatagcgataggaggggatgctaggagtaggtggcgaccgaagc

SEQ ID NO: 42888 - DNA, 80 bp, synthetic construct
  source 1..80: mol_type = other DNA
gggaaccgtggggccatgggatgcccttcccgatgtccgattccaaaccccctcccaggtggtcgcccaggaatggcgtg

SEQ ID NO: 42889 - DNA, 80 bp, synthetic construct
  source 1..80: mol_type = other DNA
ctcctctatcttctttcttccattgacccactgctcgagaacctcttccctacttccgcgattcttcttcgactcggacc

SEQ ID NO: 42890 - DNA, 80 bp, synthetic construct
  source 1..80: mol_type = other DNA
tagaacagagaaaacacctccagaggaccccttcagcgaacagaggcctcgtgagtcgcgaggagtaagaccatagcgat

SEQ ID NO: 42891 - DNA, 80 bp, synthetic construct
  source 1..80: mol_type = other DNA
agcgaacagaggcctcgtgagtcgcgaggagtaagaccatagcgatgggaggagatgctaggagttaggggagaccgaag

SEQ ID NO: 42892 - DNA, 80 bp, synthetic construct
  source 1..80: mol_type = other DNA
ggaggccaatgggtccgtgggatgctcttcccgatgtccggtccatcccctcccccagtgggtcgcccaggaatggcgtg

SEQ ID NO: 42893 - DNA, 80 bp, synthetic construct
  source 1..80: mol_type = other DNA
gtcggaagaagccccccaagaaggaaaaaagagaaagcaagaatcggagactctccctatgacgctggagacatcttgga

SEQ ID NO: 42894 - DNA, 80 bp, synthetic construct
  source 1..80: mol_type = other DNA
cgcttcctcttatgtccagcccctccccagttctggagaaggtggactccggaataccctgcatgctggggacgaagccg

SEQ ID NO: 42895 - DNA, 80 bp, synthetic construct
  source 1..80: mol_type = other DNA
gcgaacagagcgctagagaggcacgaggagtaagaccatagcgatagggggagatgctaggagttagaggagaccgaagc

SEQ ID NO: 42896 - DNA, 80 bp, synthetic construct
  source 1..80: mol_type = other DNA
tcggaggtaccctcccaagaaagaaacaagagaaggcaagaatcggatgctctccccagggcactggagacatcctggaa

SEQ ID NO: 42897 - DNA, 80 bp, synthetic construct
  source 1..80: mol_type = other DNA
ataagcagacaaaccacctccagaggaccccttcagcgaacaaagagcacgtgagacgctaggagtaagaccatagcgat

SEQ ID NO: 42898 - DNA, 80 bp, synthetic construct
  source 1..80: mol_type = other DNA
agcgaacaaagagcacgtgagacgctaggagtaagaccatagcgatggggggagatgctaggagttagaggagaccaaag

SEQ ID NO: 42899 - DNA, 80 bp, synthetic construct
  source 1..80: mol_type = other DNA
cgaggagaaaagcaaagaaagcaacggggctagccgacgggtgttccgcctcccgagaggggacgagtgaggcttatccc

SEQ ID NO: 42900 - DNA, 80 bp, synthetic construct
  source 1..80: mol_type = other DNA
ggggaactcggcgaatcgtccccacatagcagttccaggaccccccttccaaaaagactgagggtggtgctaggaacata

SEQ ID NO: 42901 - DNA, 80 bp, synthetic construct
  source 1..80: mol_type = other DNA
gaggtcgcgcggggccatgggatgcccttcccgatgtccgttccaaccccttcccccgagggtcgcccaggaatggcgtg

SEQ ID NO: 42902 - DNA, 80 bp, synthetic construct
  source 1..80: mol_type = other DNA
gtcggaagaaccctcccaagaaggaacaaggagaaggcaagaatcggacgctctccccagggcgctggagacatcctgga

SEQ ID NO: 42903 - DNA, 80 bp, synthetic construct
  source 1..80: mol_type = other DNA
gatcccgggggaccagtggagccatgggatgctcatcccgatgtccgaatccatccctcccccagcagggtcgcccagga

SEQ ID NO: 42904 - DNA, 80 bp, synthetic construct
  source 1..80: mol_type = other DNA
gtgagccttgtgccgagcgaagggcgcgatggagaggggggacattccgacggaggtgctctgccaaagagttggagatt

SEQ ID NO: 42905 - DNA, 80 bp, synthetic construct
  source 1..80: mol_type = other DNA
ggtcacctctcacgtccagcccctccccgctccgactgaaggtggactccgggacaccctgcaggttggggacgaagccg

SEQ ID NO: 42906 - DNA, 80 bp, synthetic construct
  source 1..80: mol_type = other DNA
agtctatctccatccggtcggtccgggccttcttcgccgggggagccccctccccgtccttatccttctttccgattatt

SEQ ID NO: 42907 - DNA, 80 bp, synthetic construct
  source 1..80: mol_type = other DNA
ctcctgctttagctcttgcagtcacccactgctcgagaattccctccctttctcctcgcttctccttcttctcggaccgg

SEQ ID NO: 42908 - DNA, 80 bp, synthetic construct
  source 1..80: mol_type = other DNA
ctcatctcggcaagaggcaggcggtcctcagaactcttactcttttctgtaaagaggaagtctgctggtctcgctgcccc

SEQ ID NO: 42909 - DNA, 80 bp, synthetic construct
  source 1..80: mol_type = other DNA
ggcaagaggcaggcggtcctcagaactcttactcttttctgtaaagaggaagtctgctggtctcgctgccccagtccgag

SEQ ID NO: 42910 - DNA, 80 bp, synthetic construct
  source 1..80: mol_type = other DNA
gaatgggaaagaggaaggcggagaacaggagcgggcctcccgatccgagcggcccgacctccaggtttggaaagcactcc

SEQ ID NO: 42911 - DNA, 80 bp, synthetic construct
  source 1..80: mol_type = other DNA
gggccgaacggtcgggagtcctccagaggcaagaagccacgcggagaaaagcagaaaaagcgcctccagaggaccccttc

SEQ ID NO: 42912 - DNA, 80 bp, synthetic construct
  source 1..80: mol_type = other DNA
aaagcagaaaaagcgcctccagaggaccccttcagcgaacagaaggctctctcacgcgataggagtaagacctagcgttg

SEQ ID NO: 42913 - DNA, 80 bp, synthetic construct
  source 1..80: mol_type = other DNA
agcgaacagaaggctctctcacgcgataggagtaagacctagcgttggggggagatgctaggagtgggaggagaccgaag

SEQ ID NO: 42914 - DNA, 80 bp, synthetic construct
  source 1..80: mol_type = other DNA
cccgagaggcacgagtgaggcttatcccggggaactcggcatcttcccaccttagcagagtccccgagccctcttccaaa

SEQ ID NO: 42915 - DNA, 80 bp, synthetic construct
  source 1..80: mol_type = other DNA
ttatcccggggaactcggcatcttcccaccttagcagagtccccgagccctcttccaaaaaggagcgagggtggtggctt

SEQ ID NO: 42916 - DNA, 80 bp, synthetic construct
  source 1..80: mol_type = other DNA
ggaacgcggaggaccgctgggtccgtgggatgctcttcccgattccgtccatccccccccccgagaggtccccccaggaa

SEQ ID NO: 42917 - DNA, 80 bp, synthetic construct
  source 1..80: mol_type = other DNA
ttcgaggagaattctcccaagaagattcaggagaaaactcaagattgagagaggatccccaagacgctggagaaatcttg

SEQ ID NO: 42918 - DNA, 80 bp, synthetic construct
  source 1..80: mol_type = other DNA
ctcgagggccttccttcgtcggtggtcccgtctctcctcgtcggtgaagcctcccttgctactctttttccctggcccag

SEQ ID NO: 42919 - DNA, 80 bp, synthetic construct
  source 1..80: mol_type = other DNA
ctccgcttcctctctcgtcttgacccatttcgagaggatctcctccctacctcccctccgggatctcttcgaatcggcaa

SEQ ID NO: 42920 - DNA, 80 bp, synthetic construct
  source 1..80: mol_type = other DNA
tcggcagaggcggctatcctcagtactcttactcttttcttgaaagaggagactgctggacgccccgcccgagtccgagc

SEQ ID NO: 42921 - DNA, 80 bp, synthetic construct
  source 1..80: mol_type = other DNA
gactccggttcccgaggggtcagaaggaagggcagggaggcaatccaccaggagatctcggagaaaccacctccagagga

SEQ ID NO: 42922 - DNA, 80 bp, synthetic construct
  source 1..80: mol_type = other DNA
ccccttcagcgaacagaagagcctgccccggtcgaattgtcccgtagcgatgggaggagatgctaggagtagggagagac

SEQ ID NO: 42923 - DNA, 80 bp, synthetic construct
  source 1..80: mol_type = other DNA
tcccggtgaactcggccctcttccccaactagccggtcctgggtccccgttccaaaagaaggtggggcctggcaactcgg

SEQ ID NO: 42924 - DNA, 80 bp, synthetic construct
  source 1..80: mol_type = other DNA
ggagccagcagcgccatggtggacccccgcagcccgcctgtccacactccttcccccccgcggggccccccatctaaagg

SEQ ID NO: 42925 - DNA, 80 bp, synthetic construct
  source 1..80: mol_type = other DNA
acactccttcccccccgcggggccccccatctaaaggaaaagactccaccctccagggttcgctatcctaccctttctta

SEQ ID NO: 42926 - DNA, 80 bp, synthetic construct
  source 1..80: mol_type = other DNA
ggaatgggaaagaggagggcggaaagagtggagcggcctcccgatccgaacggcccgactgcagaattggagagcacttc

SEQ ID NO: 42927 - DNA, 80 bp, synthetic construct
  source 1..80: mol_type = other DNA
ggctcatccccaggtcgaggcgaaggtcctcagttctctctattctttcctttcgaaagaggagactgctggcccaaacg

SEQ ID NO: 42928 - DNA, 80 bp, synthetic construct
  source 1..80: mol_type = other DNA
gatgggcctcagtgccgacgaggagtccgcaggtgggaggatcagccaccggagagggacgcgatggtaagagtggagga

SEQ ID NO: 42929 - DNA, 80 bp, synthetic construct
  source 1..80: mol_type = other DNA
ctcctttcttcttcttccatcgatccactttccgagtgcctcttctctccccctccgggttctcctcgcatcggactggc

SEQ ID NO: 42930 - DNA, 80 bp, synthetic construct
  source 1..80: mol_type = other DNA
tcattctcggagagggcggacggtcctgagaactcttatcttcctgcttagaagaggagtctcctggacgcttccgcccg

SEQ ID NO: 42931 - DNA, 80 bp, synthetic construct
  source 1..80: mol_type = other DNA
accccttcagcgaacagaagggctcctcctcctcgggagtaggcccgtagcgatggtgagggatgctaggagttggtgga

SEQ ID NO: 42932 - DNA, 80 bp, synthetic construct
  source 1..80: mol_type = other DNA
gatgggccgcagttcccgacgaggagcccgcaagtgggaggatcagccaccggagaggacgcgatgccaaagagtggtgg

SEQ ID NO: 42933 - DNA, 80 bp, synthetic construct
  source 1..80: mol_type = other DNA
ctcggatgtttcccagccagggattgtcctcctcaagtctcttgagagtctttgtgaccttccggagatccctctcgagc

SEQ ID NO: 42934 - DNA, 80 bp, synthetic construct
  source 1..80: mol_type = other DNA
tcctcctttcttcttcttgcatcgatccactttccgagtgtctcttctctccccttccggggtctcctcgtatcgggctg

SEQ ID NO: 42935 - DNA, 80 bp, synthetic construct
  source 1..80: mol_type = other DNA
cctcgattgcgggcggcggtcctgagaactcttatcttcctgcttagaagaggagtctcctggacgccccgcccggtcgg

SEQ ID NO: 42936 - DNA, 80 bp, synthetic construct
  source 1..80: mol_type = other DNA
cctggtgtccaggccgtcccctctccgagtgaagggagactccgggattccttgcatgcttgggacgaacccgccaccgg

SEQ ID NO: 42937 - DNA, 80 bp, synthetic construct
  source 1..80: mol_type = other DNA
ctcgaatgttccccagccagggattgtcctcctctagcctcttgagattcttgttgaccttccggagctccttctcgagt

SEQ ID NO: 42938 - DNA, 80 bp, synthetic construct
  source 1..80: mol_type = other DNA
aacaaggaaacagaacaaggaacggtagaaaagagcgagcctcccgatacgagtttgccaggacctatcaagtttggagt

SEQ ID NO: 42939 - DNA, 80 bp, synthetic construct
  source 1..80: mol_type = other DNA
catccgggccctaaggtagaatagaacaccggggggtgatccaccaggagatgaacggagaaatcacctccagaggaccc

SEQ ID NO: 42940 - DNA, 80 bp, synthetic construct
  source 1..80: mol_type = other DNA
cttcagcgaacagaaaagccccttctcggcgggagcaagaccatagcgatggggggagatgctaggagtcggaggagacc

SEQ ID NO: 42941 - DNA, 80 bp, synthetic construct
  source 1..80: mol_type = other DNA
tcagctaccggagagggacgcgatggcaagagtgggggaaatctcggagggtgatcccaagaaggccaaagaagattcaa

SEQ ID NO: 42942 - DNA, 80 bp, synthetic construct
  source 1..80: mol_type = other DNA
ttatcccggggatcgggcgttgccccaacatagcagaccccaggaccccttccgaacgaggtggacggtccttgaactcc

SEQ ID NO: 42943 - DNA, 80 bp, synthetic construct
  source 1..80: mol_type = other DNA
caggaggtcccatggagccgtgggaatccccagcactcccttctccacactccttcccccctgtggggcccgcccataag

SEQ ID NO: 42944 - DNA, 80 bp, synthetic construct
  source 1..80: mol_type = other DNA
atggcgagatctccactcattgggtccttcgtccatctccttttcttacctttggccggcatggtcccagcctcctcgtc

SEQ ID NO: 42945 - DNA, 80 bp, synthetic construct
  source 1..80: mol_type = other DNA
atctcggagggtgatcccaagaaggccaaagaagattcaagcgacgagggtggatccccgagacgctggagacgcccggg

SEQ ID NO: 42946 - DNA, 80 bp, synthetic construct
  source 1..80: mol_type = other DNA
atgtgccaagtccgacgaagggatcgaggacttggggagtggaggggcccgaagcgcgggaacgagactgggaagagaga

SEQ ID NO: 42947 - DNA, 80 bp, synthetic construct
  source 1..80: mol_type = other DNA
ccttacgtccagaccatcccccgaccgggtgaatggagattcgggaacgtgtagcatggttgggacgaagccccctccgg

SEQ ID NO: 42948 - DNA, 80 bp, synthetic construct
  source 1..80: mol_type = other DNA
accgaaccaggaaatgggaaagagatggtagaaaagagcgagcctcccgaacatcgaggagtcccgagcgcctctaaatt

SEQ ID NO: 42949 - DNA, 80 bp, synthetic construct
  source 1..80: mol_type = other DNA
accgacgaggaaattctcccaagaggtcccgggggcatgccaagaaacggaagagtttccccctttggactgggagactc

SEQ ID NO: 42950 - DNA, 80 bp, synthetic construct
  source 1..80: mol_type = other DNA
gaagaggaaagaaggactcggacgcgactcgtgagtggacacctcgttctttattggggggtgcactctaggagtggaag

SEQ ID NO: 42951 - DNA, 80 bp, synthetic construct
  source 1..80: mol_type = other DNA
ctttattggtgggtgcactctaggagtggaaggcgtggagagcggggaggaccgttaccccatggaaactgccggtctcc

SEQ ID NO: 42952 - DNA, 80 bp, synthetic construct
  source 1..80: mol_type = other DNA
atgggcccacttccgaacgaagattgcgcgaggagcaggatcagcgaccgagaggggtaggtggtaaagagcattggaac

SEQ ID NO: 42953 - DNA, 80 bp, synthetic construct
  source 1..80: mol_type = other DNA
ctcgtcttcctcggccaaccccttaagttcctcttcttcctccctgctgagcttcttccctccggctgccagttgcttcc

SEQ ID NO: 42954 - DNA, 80 bp, synthetic construct
  source 1..80: mol_type = other DNA
ttttgttctcgagggccttccttcgtcggtgatcctgcctctccttgtcggtgaatcctcctctgagaggcctcttccta

SEQ ID NO: 42955 - DNA, 80 bp, synthetic construct
  source 1..80: mol_type = other DNA
ggctcatctcgacaagaggcggggctccctagttctcttactcttttctgtaaagaggagatgtgggagtccccgcccaa

SEQ ID NO: 42956 - DNA, 80 bp, synthetic construct
  source 1..80: mol_type = other DNA
aaagccgacaaatcacctccagaggacccgttcagcgaacaaaggagccctgagtcgcgaggagtaagagcatagcgatg

SEQ ID NO: 42957 - DNA, 80 bp, synthetic construct
  source 1..80: mol_type = other DNA
gaacaaaggagccctgagtcgcgaggagtaagagcatagcgatggggggagatgctaggagttaggagaggccgaagcga

SEQ ID NO: 42958 - DNA, 80 bp, synthetic construct
  source 1..80: mol_type = other DNA
ttccgcctcccgagaggggacgagtgaggcttatcccggggaactcggcaaatcgctcccacatagcagtttccaggatc

SEQ ID NO: 42959 - DNA, 80 bp, synthetic construct
  source 1..80: mol_type = other DNA
ttatcccggggaactcggcaaatcgctcccacatagcagtttccaggatccccttccaaaatggtccgagggaggtggct

SEQ ID NO: 42960 - DNA, 80 bp, synthetic construct
  source 1..80: mol_type = other DNA
gtcgggggaacactcccaagaaggaaaagagaaagcaagaatcggaagagttccccaagacgctgggaacgtcttggaag

SEQ ID NO: 42961 - DNA, 80 bp, synthetic construct
  source 1..80: mol_type = other DNA
atgggccaagttccgaacgaagagtccgcggcggaggaacggcgacccgagaggggatcagtggtaaagatgcgtggaac

SEQ ID NO: 42962 - DNA, 80 bp, synthetic construct
  source 1..80: mol_type = other DNA
ctcgtcttccccggtcaaccttctgagttcctcttcctcctccttgctgaggctcttccctcctccggccagctgcttct

SEQ ID NO: 42963 - DNA, 80 bp, synthetic construct
  source 1..80: mol_type = other DNA
atgggaaggaagaaaggtggaaaagaaggaaaggaccttccgatccgaggggccggacttccgagtcttggagagcactc

SEQ ID NO: 42964 - DNA, 80 bp, synthetic construct
  source 1..80: mol_type = other DNA
agcgaacagaagagccttgcacgggaaggagtaagaccatagcgataggaggggatgctaggagtaggaggagaccgaag

SEQ ID NO: 42965 - DNA, 80 bp, synthetic construct
  source 1..80: mol_type = other DNA
gggagccgtggggccatgggatgctccttccgattccgtccatccccctccccccgagggtcgcccaggaatggcgtgac

SEQ ID NO: 42966 - DNA, 80 bp, synthetic construct
  source 1..80: mol_type = other DNA
ctcggagaaaattctcccaagaagggaagaggggatcgggaagaggaaggtctctacaagacgctggagtccttcctgga

SEQ ID NO: 42967 - DNA, 80 bp, synthetic construct
  source 1..80: mol_type = other DNA
gtgggccacagttctggacgaagagccgcacggtgagggttcagcgcccgagaggggatggatcgcaaaggtgcgtggaa

SEQ ID NO: 42968 - DNA, 80 bp, synthetic construct
  source 1..80: mol_type = other DNA
gcgatcgcccctcacgtccagcccctccccgtgtctaacgaaggtggactccgggatgccttgcatgctagggacgaagc

SEQ ID NO: 42969 - DNA, 80 bp, synthetic construct
  source 1..80: mol_type = other DNA
cgcccccggctgcgcccctctgtccaccttcgagggggttcacacctccagtcggcgggccggctactcttctttccctt

SEQ ID NO: 42970 - DNA, 80 bp, synthetic construct
  source 1..80: mol_type = other DNA
ctcgagggccttccttcatcggtgatcctgcctctccttgtcggtgaaccctcccctgtgaggcctcttcctgggcgcgg

SEQ ID NO: 42971 - DNA, 80 bp, synthetic construct
  source 1..80: mol_type = other DNA
cctttgatgtttcccagccagggattttcttcctcgagcttcttgattttcttcttttccttccggaggcttttctcgag

SEQ ID NO: 42972 - DNA, 80 bp, synthetic construct
  source 1..80: mol_type = other DNA
ttcctcagctttcttccttgcgtctacccacttctcgaggatctcttccctctccgggcgagtcttcttcgatccagacc

SEQ ID NO: 42973 - DNA, 80 bp, synthetic construct
  source 1..80: mol_type = other DNA
ggctcatcctggcgagggcggcagtcctcagtgctcttactcttttctgtaaagaggagactgctggactcgccgcccgg

SEQ ID NO: 42974 - DNA, 80 bp, synthetic construct
  source 1..80: mol_type = other DNA
ctggcgagggcggcagtcctcagtgctcttactcttttctgtaaagaggagactgctggactcgccgcccgggcctggga

SEQ ID NO: 42975 - DNA, 80 bp, synthetic construct
  source 1..80: mol_type = other DNA
gaataggaaggagggaaggtggaaaagaaggggcgggccttccaatccgaatggtcccgactgccaagtttggatagcac

SEQ ID NO: 42976 - DNA, 80 bp, synthetic construct
  source 1..80: mol_type = other DNA
accggggaactcggcgaatcgtccccacatagcagctcccggacccccttccaaaggaccggaggtggagctaggagcgc

SEQ ID NO: 42977 - DNA, 80 bp, synthetic construct
  source 1..80: mol_type = other DNA
gggagggagcgctggagccatgggatgctcctcccgattccgtccatccctcccccaggagggtcgcccaggaatggcag

SEQ ID NO: 42978 - DNA, 80 bp, synthetic construct
  source 1..80: mol_type = other DNA
atccctcccccaggagggtcgcccaggaatggcaggaactccactctgcggagtccgcgttccatcctttcttacctgat

SEQ ID NO: 42979 - DNA, 80 bp, synthetic construct
  source 1..80: mol_type = other DNA
ttcggataagttatctcctaagaaggtaagagagaagtacaagagctggaagttttcccgaagacgctggagacatctcg

SEQ ID NO: 42980 - DNA, 80 bp, synthetic construct
  source 1..80: mol_type = other DNA
tgggtgcccctatcggagccagttttatccggaaggggacggtgaggaactccatcgggttctgcgggacccggtcgatc

SEQ ID NO: 42981 - DNA, 80 bp, synthetic construct
  source 1..80: mol_type = other DNA
tcgccagcgtcatggggactcctctatcttgatcgcttcctctgttggtagcttgggggatccacccgagaccattcgcc

SEQ ID NO: 42982 - DNA, 80 bp, synthetic construct
  source 1..80: mol_type = other DNA
cctattgtgggtgcccctatcgggaccagttttctccggaagggatggtggagggactccatcgggttctgcgggccccg

SEQ ID NO: 42983 - DNA, 80 bp, synthetic construct
  source 1..80: mol_type = other DNA
cggtttgctagcgtcacgggggctcctctatcttgctttcctcctttgttgaaagcttggaggatccagccgaggtcaat

SEQ ID NO: 42984 - DNA, 80 bp, synthetic construct
  source 1..80: mol_type = other DNA
attgccctctttctgtctcccaactctcgggatgctctcccatccttccttcttcggccctcttcgccggaagcggccca

SEQ ID NO: 42985 - DNA, 80 bp, synthetic construct
  source 1..80: mol_type = other DNA
tggcggtccggcctgggcatccgtaagggggacttctgttcgctcgaatggccctgggagatccacctccttctcgtctc

SEQ ID NO: 42986 - DNA, 80 bp, synthetic construct
  source 1..80: mol_type = other DNA
aggtaagaaaaggatggaacgacggacccgggagtcccctcttgccatcctattgtgggtgcccctatcgggaccagttt

SEQ ID NO: 42987 - DNA, 80 bp, synthetic construct
  source 1..80: mol_type = other DNA
atccgaggaaccgggggagcgttcgagaactccttcctcgttaggagaaaaaaagagatcttcgaagctccccggtctca

SEQ ID NO: 42988 - DNA, 80 bp, synthetic construct
  source 1..80: mol_type = other DNA
gagctccccctgttccctttcctgggaggtggcccgggattccgatgctaaggagaggaacggagcgtttccccccggga

SEQ ID NO: 42989 - DNA, 80 bp, synthetic construct
  source 1..80: mol_type = other DNA
gggtcctctggatgtgatttgtcttctgaactccaggtggatcaccctccggtggtaattttctcctttggatccgaggg

SEQ ID NO: 42990 - DNA, 80 bp, synthetic construct
  source 1..80: mol_type = other DNA
atggtttgctagcgtcttgggggctcctctgtcttgttttcttcctctgctggcagcttggaggatccagccgaggaatt

SEQ ID NO: 42991 - DNA, 80 bp, synthetic construct
  source 1..80: mol_type = other DNA
attcgctctctttctgtctcccaactctcgggagttctcctgccctctcatcttcggacttcttcgccggaagcggccca

SEQ ID NO: 42992 - DNA, 80 bp, synthetic construct
  source 1..80: mol_type = other DNA
ctcctccggactgttgagaaggaagaaggacgaagagggagggcccccggccaagagggccaggccggaaaccatggagg

SEQ ID NO: 42993 - DNA, 80 bp, synthetic construct
  source 1..80: mol_type = other DNA
cagaggagcttgacgccgatgggcattcggaccggggtctccgccgctttcttcgccactcctctcccagctcgcgatgg

SEQ ID NO: 42994 - DNA, 80 bp, synthetic construct
  source 1..80: mol_type = other DNA
tccagaggagtttgccgccgacgggcattcgcatcggggtctccgttccctctcttcgccactcctctcccagttcccga

SEQ ID NO: 42995 - DNA, 80 bp, synthetic construct
  source 1..80: mol_type = other DNA
attcgctctctttctgtctcccaactctcgggttttctccacctctccctacttcggacgccttcgccggaagcggccca

SEQ ID NO: 42996 - DNA, 80 bp, synthetic construct
  source 1..80: mol_type = other DNA
attgtgggtgcccctatcggagccagtttcatccggaaggggatggcgtggaactccatcgagttctgcgggacccggtc

SEQ ID NO: 42997 - DNA, 80 bp, synthetic construct
  source 1..80: mol_type = other DNA
tccagaggagtttgctgccgatggacattcggaccggggtctccgctactgtcttcgccgctcctctcccagctcgtgac

SEQ ID NO: 42998 - DNA, 80 bp, synthetic construct
  source 1..80: mol_type = other DNA
ggatgagccaacccgtcgcgaagctgaccacgaaggacagggaggagatcctcgaacagtgggtagaagaaaggaggaag

SEQ ID NO: 42999 - DNA, 80 bp, synthetic construct
  source 1..80: mol_type = other DNA
tccgaggagacgggggcgcgctcgagagctccttcctccttcaggagagtagagagatcgtcgaggctccccgctctcag

SEQ ID NO: 43000 - DNA, 80 bp, synthetic construct
  source 1..80: mol_type = other DNA
gactccagaggagtttgctgccgatggacattcggaccggggactccgccgttgttctcgtcactcctctcccagctcgc

SEQ ID NO: 43001 - DNA, 80 bp, synthetic construct
  source 1..80: mol_type = other DNA
gatggttcgctagcgtcatgggggctcctctatcttgctctcttcctctgttggcagcttggaggatccatccgaggcca

SEQ ID NO: 43002 - DNA, 80 bp, synthetic construct
  source 1..80: mol_type = other DNA
cattcgccctctttctgtctcccaactctcgggagttctcctctctcctcacttcgggctccttcgccggacgtggccca

SEQ ID NO: 43003 - DNA, 80 bp, synthetic construct
  source 1..80: mol_type = other DNA
atcgtcggactgttgagaaggaagaaagacgaggacggaggacccccggcgaagaggcccaggcaggaaaccatggagat

SEQ ID NO: 43004 - DNA, 80 bp, synthetic construct
  source 1..80: mol_type = other DNA
catgggccacagttccgagcgaggagacgcgggtggaagggatggtgcccgaaaggggacaaacggtaaagagcattgga

SEQ ID NO: 43005 - DNA, 80 bp, synthetic construct
  source 1..80: mol_type = other DNA
ctcgactttttttcttccactcacccactgctcgagaatctcttcccttccctcgcgcctcttcttcgattcggatcggc

SEQ ID NO: 43006 - DNA, 80 bp, synthetic construct
  source 1..80: mol_type = other DNA
aaggggaaagagggaaggtggaaaagaaggcgcgggcctcccgatccgaggggcccaacgccagatctaggcgacatgcc

SEQ ID NO: 43007 - DNA, 80 bp, synthetic construct
  source 1..80: mol_type = other DNA
cttgagccaattccgaacgaagagggcgcagagggaaggatcagacgacgagaggggatgaactggtaaagaggcgagga

SEQ ID NO: 43008 - DNA, 80 bp, synthetic construct
  source 1..80: mol_type = other DNA
ctcgtcttcctcggtcaaccttctgagttcctcttcctcctccttgctcaggttcttccctccgccgctcagttgctttc

SEQ ID NO: 43009 - DNA, 80 bp, synthetic construct
  source 1..80: mol_type = other DNA
cttgagggccttccttcgtcggtgatcctgcctctccctgtcggttgatcctcccctgagaggcctcttcctacggccgg

SEQ ID NO: 43010 - DNA, 80 bp, synthetic construct
  source 1..80: mol_type = other DNA
tcagcgaacagagagcaccgagcgagaggagtaagaccatagcgataggaggggatgctaggagtaggaggagaccgaag

SEQ ID NO: 43011 - DNA, 80 bp, synthetic construct
  source 1..80: mol_type = other DNA
gaacgcgggagaccggtggatccatgggatgcttttcccgattccgtcctatccccaccccccagggtcgcccaggaatg

SEQ ID NO: 43012 - DNA, 80 bp, synthetic construct
  source 1..80: mol_type = other DNA
acgcgaggggatatctcccaagatggcaaggagaaggcaagagtcggatgactttccccataacgctggagacatcctgg

SEQ ID NO: 43013 - DNA, 80 bp, synthetic construct
  source 1..80: mol_type = other DNA
catgagccaagagccgggcgaggagaacgcggaggaaggatcggcgaccgagaggggatgaactggtaagaggcgtggaa

SEQ ID NO: 43014 - DNA, 80 bp, synthetic construct
  source 1..80: mol_type = other DNA
aaggggaaagaggagggtggaaaagaaaggtgcgggcctcccgctccgagaggcccggcggccaacctggaaagcactcc

SEQ ID NO: 43015 - DNA, 80 bp, synthetic construct
  source 1..80: mol_type = other DNA
gaagagtgaggcatatcccggggaactcgacttagcgtccacatctagcagttcccggggcccctctcgaaagggatcga

SEQ ID NO: 43016 - DNA, 80 bp, synthetic construct
  source 1..80: mol_type = other DNA
gggaactcgacttagcgtccacatctagcagttcccggggcccctctcgaaagggatcgagggtggagctaggaacgcgg

SEQ ID NO: 43017 - DNA, 80 bp, synthetic construct
  source 1..80: mol_type = other DNA
ggtgggccgcgaggccatgggatgctcctcccgattccgtccaacccccaccccaaaagggtcgcccaggaatggcgtga

SEQ ID NO: 43018 - DNA, 80 bp, synthetic construct
  source 1..80: mol_type = other DNA
gccggctgggcaacattccaaggggacagtccctcggcaatggcaaagggaacccaaaaatctctctaaattccaataaa

SEQ ID NO: 43019 - DNA, 80 bp, synthetic construct
  source 1..80: mol_type = other DNA
aaatcaaaagaaaacgggttctcccttacccatccaagtgaacctccgtcctccttcgaatgcccaggtcggaccgcgag

SEQ ID NO: 43020 - DNA, 80 bp, synthetic construct
  source 1..80: mol_type = other DNA
cgccgaggggatatctcccaagagggcaaggagaagacaagaatcggacgactccccctatgacgctaaagacatcctgg

SEQ ID NO: 43021 - DNA, 80 bp, synthetic construct
  source 1..80: mol_type = other DNA
catgagccaaatgccgaacgaagagaacgcgagtggaggatcagaggacgagaggggatgagatggtaaagaagagagga

SEQ ID NO: 43022 - DNA, 80 bp, synthetic construct
  source 1..80: mol_type = other DNA
ggttacccctcgtgtccagcccgtccccggtccggctgaaggtggactccgggaccccttgcatgttggggacgaagccg

SEQ ID NO: 43023 - DNA, 80 bp, synthetic construct
  source 1..80: mol_type = other DNA
aaggtgaaagaggaaggtggaagaaaaaggcgcgggccccccgatccgaggggtccgacggccaagtttgggaggcactc

SEQ ID NO: 43024 - DNA, 80 bp, synthetic construct
  source 1..80: mol_type = other DNA
cgggccgcagggttgagaagtcccagagggaggaatccacgcggagataagcggagaaaccacctccagaggaacccttc

SEQ ID NO: 43025 - DNA, 80 bp, synthetic construct
  source 1..80: mol_type = other DNA
ttatcccggagcattcgacttatcgtccccacatagcagagccccggaccccctcagaaagtgaccgagggaggcgctag

SEQ ID NO: 43026 - DNA, 80 bp, synthetic construct
  source 1..80: mol_type = other DNA
gatcgcgggggcaccggtggagccatgggatgctccttccgattccgtccatccctcctcccagagggtcgcccaggaat

SEQ ID NO: 43027 - DNA, 80 bp, synthetic construct
  source 1..80: mol_type = other DNA
tcgccgaggggacacctcccaagagggcaaagagaaggcaagaatcggaggctctccctatgacgctggagacatcctgg

SEQ ID NO: 43028 - DNA, 80 bp, synthetic construct
  source 1..80: mol_type = other DNA
catgggccacagttccgagcgaagatcccgcggagggaggattggcatccgagaggtgatgaatggcaaagagtggagga

SEQ ID NO: 43029 - DNA, 80 bp, synthetic construct
  source 1..80: mol_type = other DNA
aatctatctccatctggtctgcgcggggcctcttcgccggggagggcccttctccatccttctccttctttccgagaatt

SEQ ID NO: 43030 - DNA, 80 bp, synthetic construct
  source 1..80: mol_type = other DNA
ctcatccatctttcttcttccattcacccactgctcgagaatgtcttctctccccccgcggcttttcttcgactcggacc

SEQ ID NO: 43031 - DNA, 80 bp, synthetic construct
  source 1..80: mol_type = other DNA
ggaaggggaaagaggagggatggaagagaagaagcggactccccgatccgagggtcccggccaccaagtttggaaagcac

SEQ ID NO: 43032 - DNA, 80 bp, synthetic construct
  source 1..80: mol_type = other DNA
acgtcgaggagaaccctcccaagaaggacaagagagattcgggaagcggacgactttccccaaaacgctggagacatctt

SEQ ID NO: 43033 - DNA, 80 bp, synthetic construct
  source 1..80: mol_type = other DNA
atgggcctcagttccgagcgaagagacgagacggtgagggatcagcgcccgagagggagtcaatggtaaagagtgggaga

SEQ ID NO: 43034 - DNA, 80 bp, synthetic construct
  source 1..80: mol_type = other DNA
agtctacttccatccggtccgctcgggccttcttcgccgggggggctccttccccatccttatccttctttccaagtatt

SEQ ID NO: 43035 - DNA, 80 bp, synthetic construct
  source 1..80: mol_type = other DNA
gggctccttccccatccttatccttctttccaagtattcctttgatatttcccagccagggattatcttcctctagtttc

SEQ ID NO: 43036 - DNA, 80 bp, synthetic construct
  source 1..80: mol_type = other DNA
cctttgatatttcccagccagggattatcttcctctagtttcttgatcttcttcttgaccttttggagttccctttcgag

SEQ ID NO: 43037 - DNA, 80 bp, synthetic construct
  source 1..80: mol_type = other DNA
atcttcctgttttcttcttccattgacccactgctcgagaacctcttctctcccccctcgcttcttcttcgactcggacc

SEQ ID NO: 43038 - DNA, 80 bp, synthetic construct
  source 1..80: mol_type = other DNA
aagaggaagaaggaaggtggaaagaaaggagggaccctcccgatccgagtggcccggccaccgagtttggagggcactcc

SEQ ID NO: 43039 - DNA, 80 bp, synthetic construct
  source 1..80: mol_type = other DNA
gggctcaacggttgagtagcactcggagggaggaaccacacggagtagaacagagaaatcacctccagaggaccccttca

SEQ ID NO: 43040 - DNA, 80 bp, synthetic construct
  source 1..80: mol_type = other DNA
gcgaacaaaggaccatcagagcggcaggagtgagaccatagcgataggaggggatgctaggagttaggggagacccgagc

SEQ ID NO: 43041 - DNA, 80 bp, synthetic construct
  source 1..80: mol_type = other DNA
ggaacaaagggaccgggtggtccgtgggatgcttttcccgattccgcccaaccaaccccccaagaggtcccccaggaatg

SEQ ID NO: 43042 - DNA, 80 bp, synthetic construct
  source 1..80: mol_type = other DNA
aaccaaccccccaagaggtcccccaggaatggcgggaccccacctcagcggagtccgcgttccatcctttcttacctgat

SEQ ID NO: 43043 - DNA, 80 bp, synthetic construct
  source 1..80: mol_type = other DNA
tcgtcggagggaatcatccttccgggccaagagaagggaaaaaacggaagcttttccccataacgctggtaaaatcttgg

SEQ ID NO: 43044 - DNA, 80 bp, synthetic construct
  source 1..80: mol_type = other DNA
catgagccaattccgaacgggagggtcgcggcgggaaggatcagcttccgagaggggatgaatggcaaagagtattggaa

SEQ ID NO: 43045 - DNA, 80 bp, synthetic construct
  source 1..80: mol_type = other DNA
gaaggggaaaggtggaaggtggaaaagaaggtgtgggcctcccgatccgaggcgcccagcgcccaggtttggaggcactc

SEQ ID NO: 43046 - DNA, 80 bp, synthetic construct
  source 1..80: mol_type = other DNA
cgggccgaagggttgagaatccccagagggaggaagccacacggagttcagcagagaaatcacctccagaggaccccttc

SEQ ID NO: 43047 - DNA, 80 bp, synthetic construct
  source 1..80: mol_type = other DNA
agcgaacagaagagcactgcacgggttaggagttagaccgtagcgataggaggagatgctaggagtaggaggagaccgag

SEQ ID NO: 43048 - DNA, 80 bp, synthetic construct
  source 1..80: mol_type = other DNA
cgccgaggggatgtctcccaagaaggaaaaaggagaagacaagaatcggaagctttccccataacgctggtaacgtcttg

SEQ ID NO: 43049 - DNA, 80 bp, synthetic construct
  source 1..80: mol_type = other DNA
atgggccatagttccgaacgaggggaccgcggaggaaggatcagcgcccgagaggggataaatggtaaagagtattggaa

SEQ ID NO: 43050 - DNA, 80 bp, synthetic construct
  source 1..80: mol_type = other DNA
tcctggccgattatggtcgggtagcctccagagggacaaatccacacggagaaagcagacaaatcacctccagaggaccc

SEQ ID NO: 43051 - DNA, 80 bp, synthetic construct
  source 1..80: mol_type = other DNA
ttatcccggggaactcggcgaatcgtccccacatagcagagcccaggaccccttccaaaatgttccggagggtgtggctt

SEQ ID NO: 43052 - DNA, 80 bp, synthetic construct
  source 1..80: mol_type = other DNA
atgggccaactccgagcgaagagttcgcgggggagagatcagttcccgagagggagtcaatggcaaagaggtgtggaatt

SEQ ID NO: 43053 - DNA, 80 bp, synthetic construct
  source 1..80: mol_type = other DNA
ctcctctagcctttttcttccatttacccactgctcgaggacctcttctcttcccccgcggtccttcttcgactcgggcc

SEQ ID NO: 43054 - DNA, 80 bp, synthetic construct
  source 1..80: mol_type = other DNA
ggtgaaagaggaaggtggaaaagaaggcgcgggccctccgattcgaggggtccgacgcccggatttggagagcactccgg

SEQ ID NO: 43055 - DNA, 80 bp, synthetic construct
  source 1..80: mol_type = other DNA
gcccaagggtcgaggtccccccagagggaggaagccacacggagtagaacagagaaatcacctccagaggaccccttcag

SEQ ID NO: 43056 - DNA, 80 bp, synthetic construct
  source 1..80: mol_type = other DNA
cggggaactcggcgaatcgtccccacatagcagagcccaggacccccttccaaaatgaccgagggaggagctaggagcat

SEQ ID NO: 43057 - DNA, 80 bp, synthetic construct
  source 1..80: mol_type = other DNA
gggggaccagtggatccatgggatgcttttcccgattccgcccttctcctcctcccaagggtcgcccaggaatggcgtga

SEQ ID NO: 43058 - DNA, 80 bp, synthetic construct
  source 1..80: mol_type = other DNA
ctcgaagaggcactcccaagaaggaaaagagaacccaagaatcggatggctctcccgaagacgctggagacatcctggaa

SEQ ID NO: 43059 - DNA, 80 bp, synthetic construct
  source 1..80: mol_type = other DNA
aggggaaagaggtaaggtggaaaaagaaggggtcggcctcccgatccgagtggcccaactaccaagtttggagggcactc

SEQ ID NO: 43060 - DNA, 80 bp, synthetic construct
  source 1..80: mol_type = other DNA
ttccgccttctttcttgttgtgatccacttctcgaggatctcctcccttgttccccttcgactcctcttcgtctcggatt

SEQ ID NO: 43061 - DNA, 80 bp, synthetic construct
  source 1..80: mol_type = other DNA
cctcgagtttcttgatcttcttcttggccttccggaggtctctctcgagttctcccaccttagctctcgcggacacccat

SEQ ID NO: 43062 - DNA, 80 bp, synthetic construct
  source 1..80: mol_type = other DNA
tgctcgaggatgtcctcccgtcctcctcgcttgtccctcttgtcggaccggctcatctcggcaagaggcaagcagtcctc

SEQ ID NO: 43063 - DNA, 80 bp, synthetic construct
  source 1..80: mol_type = other DNA
agtgctcttactcttttctgtaaagaggagactgctggacccgctgccccagtccgaggtgagcctcagttccgaccgag

SEQ ID NO: 43064 - DNA, 80 bp, synthetic construct
  source 1..80: mol_type = other DNA
gggagcgatgggggaggagggcttcccgagggaggtcacccgccagagagagggagattcttcgaggttgattacaccca

SEQ ID NO: 43065 - DNA, 80 bp, synthetic construct
  source 1..80: mol_type = other DNA
tcacccgccagagagagggagattcttcgaggtggattactcccaagaagttccaagagaacttcaagaatgaggagggt

SEQ ID NO: 43066 - DNA, 80 bp, synthetic construct
  source 1..80: mol_type = other DNA
agaagttccaagagaacttcaagaatgaggagggtccccatgacgctggtgaaatctaggaaggggaaagaggagtgcgg

SEQ ID NO: 43067 - DNA, 80 bp, synthetic construct
  source 1..80: mol_type = other DNA
aagagtggagcggccccccgatccgagtggcccgactgccaagtttggagagcactccgggccgtacggtcgggaaccct

SEQ ID NO: 43068 - DNA, 80 bp, synthetic construct
  source 1..80: mol_type = other DNA
ccagagggaagaagccacacggagaagagcagacaaatcacctccagaggaccccttcagcgaacagaaggctctctcac

SEQ ID NO: 43069 - DNA, 80 bp, synthetic construct
  source 1..80: mol_type = other DNA
gcgataggagtaagaccatagcgtaggaggagatgctaggagttgggggagaccgaagcgaggagaaaagtaaagaaagc

SEQ ID NO: 43070 - DNA, 80 bp, synthetic construct
  source 1..80: mol_type = other DNA
ggtcccccctcacgtccagcccctccccgagtctagagaagggagactccggaatactttgcatgctggggacgaagccg

SEQ ID NO: 43071 - DNA, 80 bp, synthetic construct
  source 1..80: mol_type = other DNA
cagccagggatttccttcctcgagtttcttgatcttcttcttggccttccggagatccctctccagctcctctaccttct

SEQ ID NO: 43072 - DNA, 80 bp, synthetic construct
  source 1..80: mol_type = other DNA
agggattctcccaagaagaaccaggagagaattcaagattgaggagatttccccaagacgctgaggagactcctggaagg

SEQ ID NO: 43073 - DNA, 80 bp, synthetic construct
  source 1..80: mol_type = other DNA
gaaaggtcgagtagcacacagagggaggaatccactcggagatgagcagaaaaaccacctccagaggaccccttcagcga

SEQ ID NO: 43074 - DNA, 80 bp, synthetic construct
  source 1..80: mol_type = other DNA
acagaaggcgctctctggcggtaggagtaagaccatagcgacggggaggatgctaggagtaggaggcgaccgaggcgaga

SEQ ID NO: 43075 - DNA, 80 bp, synthetic construct
  source 1..80: mol_type = other DNA
actcggcgaatcgtccccacatagcagttcccgggtccccttccaaaggaccggagagggagcttggaacgcggtgtgga

SEQ ID NO: 43076 - DNA, 80 bp, synthetic construct
  source 1..80: mol_type = other DNA
ccgccgggtccgtgggatgcttttcccgattccgtccatccccccccccgagaggtccccccaggaatggcgggacacca

SEQ ID NO: 43077 - DNA, 80 bp, synthetic construct
  source 1..80: mol_type = other DNA
aaggaaggagggtggaaaacaggggtgggacccccgatccgagaggcccaactgccgagtttggagagcactccgtgccg

SEQ ID NO: 43078 - DNA, 80 bp, synthetic construct
  source 1..80: mol_type = other DNA
ctcggcgaatcgtccccacatagcagaccccggtccgcctccaaaaaggaccgggagtgaggcttggaacgcgggtggtg

SEQ ID NO: 43079 - DNA, 80 bp, synthetic construct
  source 1..80: mol_type = other DNA
aaaggaccgggagtgaggcttggaacgcgggggtggccgttaggagccatgggatgctcctctcgattccgtccaaccct

SEQ ID NO: 43080 - DNA, 80 bp, synthetic construct
  source 1..80: mol_type = other DNA
aaaaggttgtcccaagaaggtccaagagaaaactcaggaaggaggacttttccccataacgctgaggaagctctcggaat

SEQ ID NO: 43081 - DNA, 80 bp, synthetic construct
  source 1..80: mol_type = other DNA
gggaaagaggaaggcgaagaagaaaggggcggccccccgatccgaaaggtccggcggcgagtttctggagagaactccgg

SEQ ID NO: 43082 - DNA, 80 bp, synthetic construct
  source 1..80: mol_type = other DNA
cgaacagaagacgctctcggggtaggagtaagcccgtagcgataggagaggatgctaggagttaggggcgaccaaagcga

SEQ ID NO: 43083 - DNA, 80 bp, synthetic construct
  source 1..80: mol_type = other DNA
gaactcggcgaatcgtccccacatagcagttcctcggacccccttccaaaggaccgagggggggctaggagcgcgtggtg

SEQ ID NO: 43084 - DNA, 80 bp, synthetic construct
  source 1..80: mol_type = other DNA
agccggcggagccgtgggatgctcttcccgattccgtccaaccccaccgccgagaggtccccccaggaatggcgggaccc

SEQ ID NO: 43085 - DNA, 80 bp, synthetic construct
  source 1..80: mol_type = other DNA
ctccgcccttactcttgtggtcacccactgctcgaggatgtcctcccgtcctcctcgctttcccttcctgtcggaccggc

SEQ ID NO: 43086 - DNA, 80 bp, synthetic construct
  source 1..80: mol_type = other DNA
gaggataccccgaggaggggattactcccaagaagttccaagagaatctcaagaatgaggatagtccccatgacgctggt

SEQ ID NO: 43087 - DNA, 80 bp, synthetic construct
  source 1..80: mol_type = other DNA
accccttcagcgaacagaaggctctcacgcgcgtcaggagtaagaccatagcgtaggaagagatgctaggagttggtgga

SEQ ID NO: 43088 - DNA, 80 bp, synthetic construct
  source 1..80: mol_type = other DNA
ctctcggaatgggaaagaagacgacgggagaaaggtgcgggacccccgctccgaggggcccggcgccgaaatttggagag

SEQ ID NO: 43089 - DNA, 80 bp, synthetic construct
  source 1..80: mol_type = other DNA
tctcctattctactccttgtggtcacccactgctcgaggatgtcctcccgtcctcctcgcttgtccctcttgtcggaccg

SEQ ID NO: 43090 - DNA, 80 bp, synthetic construct
  source 1..80: mol_type = other DNA
agtccgaggtgagcctcagttccgaccgaggggagcgatgggagaggagggcctcccgagggaggttacccactaaagag

SEQ ID NO: 43091 - DNA, 80 bp, synthetic construct
  source 1..80: mol_type = other DNA
agggagattcttcgagggagatcactcccaagaagttccaagagaactccaagaaagaggagggtccccatgacgctggt

SEQ ID NO: 43092 - DNA, 80 bp, synthetic construct
  source 1..80: mol_type = other DNA
gaaatctaggaaggggaaagaggagggcggaagagtggagcggccccccgatccgaatggcccgactgccgattttggag

SEQ ID NO: 43093 - DNA, 80 bp, synthetic construct
  source 1..80: mol_type = other DNA
acccacttctcgaggacctcttccctccctccgcgggatttcttcgactcggaccggctcatctcgacaagaggcggcag

SEQ ID NO: 43094 - DNA, 80 bp, synthetic construct
  source 1..80: mol_type = other DNA
gcgaaggaccgcgagggtgagggttcagcgaccgagaggggatgaacgacaaggtgcggcgatcccggagagaagcaccc

SEQ ID NO: 43095 - DNA, 80 bp, synthetic construct
  source 1..80: mol_type = other DNA
ccaagaaggtaagagaggattcaagaattggaagttttcccgaagacgctggaggcgtctcggaatgggaaagagggaag

SEQ ID NO: 43096 - DNA, 80 bp, synthetic construct
  source 1..80: mol_type = other DNA
gtggaaaagaaggggcgggcctcccaatccgaggggcccaactgccaagtttggagagcactccggcccgtatggttgag

SEQ ID NO: 43097 - DNA, 80 bp, synthetic construct
  source 1..80: mol_type = other DNA
taactcccagagggaggaatccacgcggagtagaacggagaaatcacctccagaggaccccttcagcgaacagaagagcc

SEQ ID NO: 43098 - DNA, 80 bp, synthetic construct
  source 1..80: mol_type = other DNA
ttgccgggataggagtaagaccatagcgatggggggagatgcttagagtaggaggagaccgaagcgaggaggaaagtaaa

SEQ ID NO: 43099 - DNA, 80 bp, synthetic construct
  source 1..80: mol_type = other DNA
gaaagcaacggggctagccgtcaggtgttcctccccccgagaggggaagagtgaggcttatcccgtggaactcggcgaat

SEQ ID NO: 43100 - DNA, 80 bp, synthetic construct
  source 1..80: mol_type = other DNA
cgtccccacatagcagagcccggttcccctccaaaaaggaccggaggtggagcttagagcgcggggtggccctctggagc

SEQ ID NO: 43101 - DNA, 80 bp, synthetic construct
  source 1..80: mol_type = other DNA
catgggatgcttttcccgattccgtccatcccccccccaggagggtcgcccaggaatgtcgggaactccactcttcggag

SEQ ID NO: 43102 - DNA, 80 bp, synthetic construct
  source 1..80: mol_type = other DNA
gccggctgggcaacattccgaggggaccgtcccctcggtaatggcgaatgggacccagaaaccctcctctgattccgata

SEQ ID NO: 43103 - DNA, 80 bp, synthetic construct
  source 1..80: mol_type = other DNA
gagaatcaagagggaacctggctctcccttagccatccgagtggacgtgcgtcctccttcggatgcccaggtcggaccgc

SEQ ID NO: 43104 - DNA, 80 bp, synthetic construct
  source 1..80: mol_type = other DNA
ctcttttcttccagagacccactgctcgaggatgccctctctctcccctcggttcttcttcgattcgggccggctcatcg

SEQ ID NO: 43105 - DNA, 80 bp, synthetic construct
  source 1..80: mol_type = other DNA
tgggccacagctccgaacgaagagcccgacggtgaggaggccaccccgagaggggttagctggtaaagaggcgtggaaag

SEQ ID NO: 43106 - DNA, 80 bp, synthetic construct
  source 1..80: mol_type = other DNA
tcgagagaaattgccctaagaaggttcaagagaaaattgtggagagaggacctttccccataacgctgtggaagctctcg

SEQ ID NO: 43107 - DNA, 80 bp, synthetic construct
  source 1..80: mol_type = other DNA
gaatgggaaagaggaggacgaagaagaaaggggcgtggcccccgctccgaggggtccggcgtcgagttttggagagaact

SEQ ID NO: 43108 - DNA, 80 bp, synthetic construct
  source 1..80: mol_type = other DNA
tcagcgaacagaggacgctcctcggtagtaggagtaagaccgtagcgataggagaggatgctaggaggtaggggcgaccg

SEQ ID NO: 43109 - DNA, 80 bp, synthetic construct
  source 1..80: mol_type = other DNA
catgagcctatctccgaacgaagagcacgcgtggggaaggatcagcgcccgagaggggaaaatggcaaagagcggaggaa

SEQ ID NO: 43110 - DNA, 80 bp, synthetic construct
  source 1..80: mol_type = other DNA
ggtctcccctcacatccagcccctccccggtccgagtgaaggtggactccggaacgccttgcatgctggggacgaagccg

SEQ ID NO: 43111 - DNA, 80 bp, synthetic construct
  source 1..80: mol_type = other DNA
ctctatcttctttcttccatttacccactgctcgagaacctcttctcttcccccgctgcgcttcttcgattcggaacggc

SEQ ID NO: 43112 - DNA, 80 bp, synthetic construct
  source 1..80: mol_type = other DNA
ggaaggggaaagaggatggagggaaaagaaggtgcgggccccccgatccgaatggcccgactgccaggattggaaagcac

SEQ ID NO: 43113 - DNA, 80 bp, synthetic construct
  source 1..80: mol_type = other DNA
tctgggccgaatggtcgagtagcacccagagggaggaagccacacggaggtagcagagaaatcacctccagaggacccct

SEQ ID NO: 43114 - DNA, 80 bp, synthetic construct
  source 1..80: mol_type = other DNA
tgttccgcctcccgagaggggacgagtgaggcttatcccggtgaactcgacttatcgtccccacatagcagcctccggag

SEQ ID NO: 43115 - DNA, 80 bp, synthetic construct
  source 1..80: mol_type = other DNA
ttatcccggagaactcgacttatcgtccccacatagcagcctccggagccccttccaaagcggccgggtgtggcgctttg

SEQ ID NO: 43116 - DNA, 80 bp, synthetic construct
  source 1..80: mol_type = other DNA
aatgctgagggtggccggtggagccatgggatgctcctcccgattccgtccatcccttcccccaggagggtcgcccagga

SEQ ID NO: 43117 - DNA, 80 bp, synthetic construct
  source 1..80: mol_type = other DNA
cgttgagaggatgtctcccaagaagaatctgagagaattcaagaggcggaagactctccccataacgctggagacatcct

SEQ ID NO: 43118 - DNA, 80 bp, synthetic construct
  source 1..80: mol_type = other DNA
atgagccaagtcgggacgaagagatcgcgggtgcgggatcagccgacgagaggggatgaatgccaaagagcattggaacg

SEQ ID NO: 43119 - DNA, 80 bp, synthetic construct
  source 1..80: mol_type = other DNA
ctcgtcatcctcggtcaacctcttaagttcctcttcttcctccttgctcaggctcttccctcccgcgttcagttgatttc

SEQ ID NO: 43120 - DNA, 80 bp, synthetic construct
  source 1..80: mol_type = other DNA
gggagccccccacgtccagcccatccccggttctggagaaggtggactccggaattccttgcatgctggggacgaagccg

SEQ ID NO: 43121 - DNA, 80 bp, synthetic construct
  source 1..80: mol_type = other DNA
agtgagacggtaaagagcattggaacgtcggggggaatcctcccaagaagggagaagaggcggcaagaggtggacgaatt

SEQ ID NO: 43122 - DNA, 80 bp, synthetic construct
  source 1..80: mol_type = other DNA
gtcggtgggaatcctcccaagaagggagaagaggcggcaagaggtggacgaattccccaagacgctggagacaccctcgg

SEQ ID NO: 43123 - DNA, 80 bp, synthetic construct
  source 1..80: mol_type = other DNA
ggggaactcgacttatcgtccccatctagcgggaccccggacccccttcgaaagtgaccggaggtgatgctgggaacacc

SEQ ID NO: 43124 - DNA, 80 bp, synthetic construct
  source 1..80: mol_type = other DNA
gggccgaagggttgagagtacccaaagggtggacatccacacggaggtaagcggacaaatcacctccagaggaacccttc

SEQ ID NO: 43125 - DNA, 80 bp, synthetic construct
  source 1..80: mol_type = other DNA
agcgaacaaagaactctgagccgcgaggagtaagaacatagcgataggaggggatgctaggagttaggggagaccgaagc

SEQ ID NO: 43126 - DNA, 80 bp, synthetic construct
  source 1..80: mol_type = other DNA
cgggccgaagggttgagttctccccagagggagggagccacacggagaaagcggacaaaccacctccagaggaccccttc

SEQ ID NO: 43127 - DNA, 80 bp, synthetic construct
  source 1..80: mol_type = other DNA
tttcggagaaactactcccaagaaggaaaaaagagaagacaagagacggaggctttccccatgacgctggagacatcctg

SEQ ID NO: 43128 - DNA, 80 bp, synthetic construct
  source 1..80: mol_type = other DNA
ccgctttattcactggggacgacagctctggggagaaaagggaggatcggacgggaagagtatatcctacgggaacgacc

SEQ ID NO: 43129 - DNA, 80 bp, synthetic construct
  source 1..80: mol_type = other DNA
agtctacctccatctggtctgttcgggccctcttcgccggaggagctccatccccatccttgtctttctttcccaaaatt

SEQ ID NO: 43130 - DNA, 80 bp, synthetic construct
  source 1..80: mol_type = other DNA
atgggagaaagagggatggaaagaaaggagcgagctctccgatccgaggggcccaaccaccgagtttggagagcactctc

SEQ ID NO: 43131 - DNA, 80 bp, synthetic construct
  source 1..80: mol_type = other DNA
ggagcgtggagggaccgtggtgtccgtgggatgctcttcccgattccgtccatcccttcccccaacgcgtccccccagga

SEQ ID NO: 43132 - DNA, 80 bp, synthetic construct
  source 1..80: mol_type = other DNA
ggtctccccttacgtccagcccctccccgtgtctggtgaaggtggactccgggatgccttgcagactggggacgaagccg

SEQ ID NO: 43133 - DNA, 80 bp, synthetic construct
  source 1..80: mol_type = other DNA
cctgagccaattccgaacgaagagagggcgggggggggatcagcgcccgagagggagtcaatggcaaagagagatggaaa

SEQ ID NO: 43134 - DNA, 80 bp, synthetic construct
  source 1..80: mol_type = other DNA
aatgggagaaaaagggatgaaaagaaaggagcggctctccgatccgaggggccccgactgccaggtttggaaagcactct

SEQ ID NO: 43135 - DNA, 80 bp, synthetic construct
  source 1..80: mol_type = other DNA
gttcggaggggtcctcccaagaaggccaagggaaggcaagaaacggaagctttcccccatgaccctggaaaacttcttgg

SEQ ID NO: 43136 - DNA, 80 bp, synthetic construct
  source 1..80: mol_type = other DNA
ctcgtcttcctcggtcaacctctcgagttccccttcttcctccctgctgaggctcttccctccggcggcgagttgcttct

SEQ ID NO: 43137 - DNA, 80 bp, synthetic construct
  source 1..80: mol_type = other DNA
atgagcagacaaatcacctccagaggaccccttcagcgaacagaagagctctcgccgcggcagagtaagaccatagcgat

SEQ ID NO: 43138 - DNA, 80 bp, synthetic construct
  source 1..80: mol_type = other DNA
cgaacagaagagctctcgccgcggcagagtaagaccatagcgatgggaggagatgctgggagtgagcggagaccgaagcg

SEQ ID NO: 43139 - DNA, 80 bp, synthetic construct
  source 1..80: mol_type = other DNA
gttcggagggttctcccaagagggccaagagaaggcgggagacggaagcatttccccataacgctggaaaacttcctgga

SEQ ID NO: 43140 - DNA, 80 bp, synthetic construct
  source 1..80: mol_type = other DNA
gaatggaagaagaagggatgaaaagaaaggagcgggccctccgatccgaggggcccaactaccgagtttggagagaactt

SEQ ID NO: 43141 - DNA, 80 bp, synthetic construct
  source 1..80: mol_type = other DNA
gtcggaggtaccctcccaagaaggaacaaggggaaggcaagagacggaggctctccccagggctctggagacgtcctgga

SEQ ID NO: 43142 - DNA, 80 bp, synthetic construct
  source 1..80: mol_type = other DNA
aggtgaaagaaggcgggaggaaaaaaaggtgcgggcctcccgatccgaggggtccgttcgacagagttggtaagcactcc

SEQ ID NO: 43143 - DNA, 80 bp, synthetic construct
  source 1..80: mol_type = other DNA
gtcggaggaagccccccaagaaggacaaaagagaaggcaagaatcggggactgtccctatgacgctggaaacgtctcgga

SEQ ID NO: 43144 - DNA, 80 bp, synthetic construct
  source 1..80: mol_type = other DNA
gtcggaggtatcctcccaagaaggaacaaagagaaggcaagaatcggaagctctccgtagggctctggagacatcttgga

SEQ ID NO: 43145 - DNA, 80 bp, synthetic construct
  source 1..80: mol_type = other DNA
taaaatcccgctttattcactggggtcgacaactctggggagaaaagggaggatcggctgggaagagtaaatcccatggt

SEQ ID NO: 43146 - DNA, 80 bp, synthetic construct
  source 1..80: mol_type = other DNA
ttcctctacattccttcttccattcacccactgctcgagaacctcttctctgcccctgcgactctccttcgattcgaacc

SEQ ID NO: 43147 - DNA, 80 bp, synthetic construct
  source 1..80: mol_type = other DNA
atgagccaaaattccgaacgaggagccgcccgggcgagagtcgagtcccgacgggggtcatctgtgaagaggcgagcaaa

SEQ ID NO: 43148 - DNA, 80 bp, synthetic construct
  source 1..80: mol_type = other DNA
cccccgggcgctcccctcgatccaccttcgaggaggttcacatccccaactcgcgggccggctgttcttcttttcctctc

SEQ ID NO: 43149 - DNA, 80 bp, synthetic construct
  source 1..80: mol_type = other DNA
ctctaaccgctttcttccagacacccactgttcgaggacttcttccctcccccggttcttcctcgattcggctcggctca

SEQ ID NO: 43150 - DNA, 80 bp, synthetic construct
  source 1..80: mol_type = other DNA
agaggaagaaggcaggtggaaagaaaggaggggtcctcccgaatcagcgaggaggccagacgtccgagtttggagagcac

SEQ ID NO: 43151 - DNA, 80 bp, synthetic construct
  source 1..80: mol_type = other DNA
tccgacccaaaggattgggcaaatcccagagggaggaaatccacacagagaggtgcagagaatcacctccagaggacccc

SEQ ID NO: 43152 - DNA, 80 bp, synthetic construct
  source 1..80: mol_type = other DNA
tagcgagtggatgttccgctttccgagaggggacgagtgaggcttatcccggggaactcggcgaatcgtccccacatagc

SEQ ID NO: 43153 - DNA, 80 bp, synthetic construct
  source 1..80: mol_type = other DNA
ttatcccggggaactcggcgaatcgtccccacatagcagagcccggagccccttcaaaaaaggaccgtggtggtccttgg

SEQ ID NO: 43154 - DNA, 80 bp, synthetic construct
  source 1..80: mol_type = other DNA
agcatagagggctgccgggtccgtgggatgctcttcccgattccgtctctccctcccccccgaggccccccccaggaatg

SEQ ID NO: 43155 - DNA, 80 bp, synthetic construct
  source 1..80: mol_type = other DNA
tctcgaagttaatcccccaagagggtcaagggaagtcaagaatcggaggactctctccacgacgccggagacatcttgga

SEQ ID NO: 43156 - DNA, 80 bp, synthetic construct
  source 1..80: mol_type = other DNA
atgggccaagagccgacgaggaggccgaaggaggagaaggatgggacccccgaagggaattcgaagctaaagagtggaga

SEQ ID NO: 43157 - DNA, 80 bp, synthetic construct
  source 1..80: mol_type = other DNA
tctgatgtccagtccatccccgtgtctggtgaatggagactccggaacaccaagcatcctagggacaaagcctcccccgg

SEQ ID NO: 43158 - DNA, 80 bp, synthetic construct
  source 1..80: mol_type = other DNA
gcgctcccctcggacttcctccgggagggttcacacccccatcctgcgggccggctgctcttctttcccttttctcgtct

SEQ ID NO: 43159 - DNA, 80 bp, synthetic construct
  source 1..80: mol_type = other DNA
ctcgagggccttccttcttcggtgatccctcctctcctcgtcggtgaatcctcccttgcgacttctcttccccggaccgg

SEQ ID NO: 43160 - DNA, 80 bp, synthetic construct
  source 1..80: mol_type = other DNA
agtcaacctccatctgatctgttcggggtctcttcgatgggggagctccctccccttccttcccctttcttattattccg

SEQ ID NO: 43161 - DNA, 80 bp, synthetic construct
  source 1..80: mol_type = other DNA
catccagatctttccttgcttcgacccatttcgtgagggtctcctcccgacctccccttcgggatctcttcgcatcggac

SEQ ID NO: 43162 - DNA, 80 bp, synthetic construct
  source 1..80: mol_type = other DNA
tggctcatctcgacgagggcggcgatcctcaggtctcttactcttttctgagaaagaggagactgctggatgctccgccc

SEQ ID NO: 43163 - DNA, 80 bp, synthetic construct
  source 1..80: mol_type = other DNA
ggaacaaggaaagtggggataggaaggtagaaaagagcgagcctcccaattcgagtttcccctgaacctatcgagtttgg

SEQ ID NO: 43164 - DNA, 80 bp, synthetic construct
  source 1..80: mol_type = other DNA
agtcctccgacttagggtcgagttcagcgcaatgggaggaagccaccaggagccggagacaagacacctccagaggaccc

SEQ ID NO: 43165 - DNA, 80 bp, synthetic construct
  source 1..80: mol_type = other DNA
ttatcccggggaacccggccccgtcccggattactggctccaggactccactccaaaagtccggaggtaggacttggagc

SEQ ID NO: 43166 - DNA, 80 bp, synthetic construct
  source 1..80: mol_type = other DNA
accggggatccacccagctccgtggtggactccgtccctcctctccacactccttccccccgcgggcccccccatgaaga

SEQ ID NO: 43167 - DNA, 80 bp, synthetic construct
  source 1..80: mol_type = other DNA
tgagaaccccaccctgcagggtccgcgccctcccccttttcttaccttttggccggcatggtcccagcctcctcgctggc

SEQ ID NO: 43168 - DNA, 80 bp, synthetic construct
  source 1..80: mol_type = other DNA
cacacgagaaggaaggtgtcccaagaaggcgagggacgctcaagaggtgaggaggtatccccgagacgctggagactccc

SEQ ID NO: 43169 - DNA, 80 bp, synthetic construct
  source 1..80: mol_type = other DNA
ctttattggttggtacactcgaggagtggaaggcggggagggggggacggaatttgtccctacggaaactgttggtttcc

SEQ ID NO: 43170 - DNA, 80 bp, synthetic construct
  source 1..80: mol_type = other DNA
gaatttgtccctacggaaactgttggtttcctctgatgtccagtccatccccgtgtctggtgaatggagactccggaaca

SEQ ID NO: 43171 - DNA, 80 bp, synthetic construct
  source 1..80: mol_type = other DNA
gttttcggagccttcgttttagcgttactcataagcctacagtcagtatatttcaaactttacgaattttacaagaataa

SEQ ID NO: 43172 - DNA, 80 bp, synthetic construct
  source 1..80: mol_type = other DNA
cgaaactgcaagaaatacgactgtcgccgggtttttgaaacgtcacgaagtcgctgtcaacgtgattgttgagttctctt

SEQ ID NO: 43173 - DNA, 80 bp, synthetic construct
  source 1..80: mol_type = other DNA
ttgacattttgttctttctttgtggattgctcggatttgagttaagcccaaccgctcgacgcctgatttttagacgaacg

SEQ ID NO: 43174 - DNA, 80 bp, synthetic construct
  source 1..80: mol_type = other DNA
gctagtgcagaaaaggctgatactgttgaactcgaacatgtgtcgtcacgacgacggaatgaccctagagatgattcggc

SEQ ID NO: 43175 - DNA, 80 bp, synthetic construct
  source 1..80: mol_type = other DNA
agtacgcaatgtctcgaagacatcaccacttgcctcccaacacccccgtgatcaccttaacggagattcacgagagcccg

SEQ ID NO: 43176 - DNA, 80 bp, synthetic construct
  source 1..80: mol_type = other DNA
cccccccagcttattctcccgccgatttccatcctccgccagcctcttctcacgtatatgagaccccgctctcgccgcgt

SEQ ID NO: 43177 - DNA, 80 bp, synthetic construct
  source 1..80: mol_type = other DNA
gtggcgccttctgctcctagcgctagtttgtttactgctggtggtattggtcttccttaaattttatgcgtgacgggcag

SEQ ID NO: 43178 - DNA, 80 bp, synthetic construct
  source 1..80: mol_type = other DNA
tcttcccgttgttgggagcaggacaaattgaaagtatgaaggatctactttcgcgtcattttgaagtctgggtttacttt

SEQ ID NO: 43179 - DNA, 80 bp, synthetic construct
  source 1..80: mol_type = other DNA
ggcttgatggctgtttttcttgaagtggaggcagttggggctcgtctgttgcaagagcttattgcacgcatgaagagtga

SEQ ID NO: 43180 - DNA, 80 bp, synthetic construct
  source 1..80: mol_type = other DNA
gtgtagtgtgaacggggctaaggcctggatacaaatgcagtcgaacattttgtctcagaacgatgccctgtaatcgcgct

SEQ ID NO: 43181 - DNA, 80 bp, synthetic construct
  source 1..80: mol_type = other DNA
tcctcctttcttcttcttccatcgatccacttcccgagtgtctcttctctccccctccggtttttcctctgttcggactg

SEQ ID NO: 43182 - DNA, 80 bp, synthetic construct
  source 1..80: mol_type = other DNA
aagaaaaaaggcaaggaattggtagaaaagagcgagcctcccgatacgagtttgccaggacctatcaagattggagtcat

SEQ ID NO: 43183 - DNA, 80 bp, synthetic construct
  source 1..80: mol_type = other DNA
agcgagcctcccgatacgagtttgccaggacctatcaagattggagtcatccgggccgtagtggagaatagaacaccggg

SEQ ID NO: 43184 - DNA, 80 bp, synthetic construct
  source 1..80: mol_type = other DNA
ccgggccgtaggggagaatagaacaccgggtggtgatccaccaggagaagtagcggagaacccacctccagaggacccct

SEQ ID NO: 43185 - DNA, 80 bp, synthetic construct
  source 1..80: mol_type = other DNA
tcagcgaacagagaggctcctcctctgcgggagtagagccgtagcgatggggggagatgctaggagttggaggagaccga

SEQ ID NO: 43186 - DNA, 80 bp, synthetic construct
  source 1..80: mol_type = other DNA
agttcggagggaaatcccaagaagatcattcgagattcaagcggtgaggagggacccccgagacgctggtccgggaagaa

SEQ ID NO: 43187 - DNA, 80 bp, synthetic construct
  source 1..80: mol_type = other DNA
gaccccttcagcgaacagagaagctcctcccccgctggagtagagccgtaccgatgggagtggatgctaggagttggtgg

SEQ ID NO: 43188 - DNA, 80 bp, synthetic construct
  source 1..80: mol_type = other DNA
tatggcccctataccgacgaggagtccgcaagattgaggatctgccaccggagagggacgcgatggtaagagtggaggaa

SEQ ID NO: 43189 - DNA, 80 bp, synthetic construct
  source 1..80: mol_type = other DNA
cccagggtcaacctacggaaatccctgtgttcctcggatgtccaggccgtcccctcttctagagaagggagactccggaa

SEQ ID NO: 43190 - DNA, 80 bp, synthetic construct
  source 1..80: mol_type = other DNA
ctcggatgtccaggccgtcccctcttctagagaagggagactccggaactccttccatggttgggacgaagccgccgccg

SEQ ID NO: 43191 - DNA, 80 bp, synthetic construct
  source 1..80: mol_type = other DNA
ggcgctcccctcggagttccctcgagggggttcacatccccaacccgcgggccggctactcttctttcccttctctcgtc

SEQ ID NO: 43192 - DNA, 80 bp, synthetic construct
  source 1..80: mol_type = other DNA
tcttcggtcaacctccgaagctcctcttcctcctccctgctgagggtctttcccccggaggagagctgcttcctcttgtt

SEQ ID NO: 43193 - DNA, 80 bp, synthetic construct
  source 1..80: mol_type = other DNA
ctccagggccttccttcttcggtggtcccgcctctcctgttcggtgaaccctcccgggtgtttcctcttcctaggtccgg

SEQ ID NO: 43194 - DNA, 80 bp, synthetic construct
  source 1..80: mol_type = other DNA
agtctacctccatctgatccgggctggctgtcttcgccgggggagctccctccccatccttgacctttcttattattcct

SEQ ID NO: 43195 - DNA, 80 bp, synthetic construct
  source 1..80: mol_type = other DNA
cggatgttccatggccagtgtttatcctcctgtagtctcttgagattcttgttgatcttccggagcttcttttcgagttt

SEQ ID NO: 43196 - DNA, 80 bp, synthetic construct
  source 1..80: mol_type = other DNA
ctcctttcttcttcttccatcgatccattttccgagtgtcttttctctccccttcgggtgtctcctcgtatcggtctggc

SEQ ID NO: 43197 - DNA, 80 bp, synthetic construct
  source 1..80: mol_type = other DNA
tcatcctcaaaaagggcgcactgtcctgatttctcttatcttcctattcaaaagaggtgactcctgcacgcttccgccct

SEQ ID NO: 43198 - DNA, 80 bp, synthetic construct
  source 1..80: mol_type = other DNA
gaaaaagaaaaggaaggcaagggattggtagaaaagagcgagcctcccgatacgagtttgccaggacctatcaagtttgg

SEQ ID NO: 43199 - DNA, 80 bp, synthetic construct
  source 1..80: mol_type = other DNA
aaagagcgagcctcccgatacgagtttgccaggacctatcaagtttggagtcatccggcccacaggggagaatagaccac

SEQ ID NO: 43200 - DNA, 80 bp, synthetic construct
  source 1..80: mol_type = other DNA
accccttcagcgaccagagaagctcctcccccgctggagtagacccgtaccgttggaagggattgttggaagttggggaa

SEQ ID NO: 43201 - DNA, 80 bp, synthetic construct
  source 1..80: mol_type = other DNA
gcccaaaccaagaaggaaaccaaagaaagcaccggggctagcaattggatgttcctccccccaatggtcccgagtgaggc

SEQ ID NO: 43202 - DNA, 80 bp, synthetic construct
  source 1..80: mol_type = other DNA
tagcaattggatgttcctccccccaatggtcccgagtgaggcttatcccggggatcggcctccgctcctccatggtggac

SEQ ID NO: 43203 - DNA, 80 bp, synthetic construct
  source 1..80: mol_type = other DNA
ttatcccgtggatcggcctccgctcctccatggtggactccaggacccccaaaaggagggtggtgggccttggacctccg

SEQ ID NO: 43204 - DNA, 80 bp, synthetic construct
  source 1..80: mol_type = other DNA
ggagccatgggatccgtggagtacccgggccatccgcatctccacactccttcccccctgcggggcccccccataagatg

SEQ ID NO: 43205 - DNA, 80 bp, synthetic construct
  source 1..80: mol_type = other DNA
gcgagaaatccactcatgggtccatcgtccatctctttcttaccttttggccggcatggtcccagcctccccgttggcgc

SEQ ID NO: 43206 - DNA, 80 bp, synthetic construct
  source 1..80: mol_type = other DNA
agttcggagggaaatcccaagaagatccttcgagattcaagaggtgaggagggatccccgagacgctggtggagcatcgg

SEQ ID NO: 43207 - DNA, 80 bp, synthetic construct
  source 1..80: mol_type = other DNA
cctttattgggtggtacactcgaggagtggaaggcggggagaggggcgcccagggtcaacctacggaaatccctgtgttc

SEQ ID NO: 43208 - DNA, 80 bp, synthetic construct
  source 1..80: mol_type = other DNA
gatgggccgcaaccgggcgagggaggcgaagtgaggaaggggatatcccgaggaggatcctcaactaaagagtggaggaa

SEQ ID NO: 43209 - DNA, 80 bp, synthetic construct
  source 1..80: mol_type = other DNA
ggctcatccccaggtcgaggcgaaggtcctcagttctcatatattctttctaagaaagaggagactgttggaccaaacgc

SEQ ID NO: 43210 - DNA, 80 bp, synthetic construct
  source 1..80: mol_type = other DNA
ccaggtcgaggcgaaggtcctcagttctcatatattctttctaagaaagaggagactgttggaccaaacgcccgagccgg

SEQ ID NO: 43211 - DNA, 80 bp, synthetic construct
  source 1..80: mol_type = other DNA
atctcggaaagcttctcccaagaagaactgggacgctctcaagaaggaggagttttcccgaacgttggagactccgggaa

SEQ ID NO: 43212 - DNA, 80 bp, synthetic construct
  source 1..80: mol_type = other DNA
ccttcagcgaacagaagagactcccctcgataggagcaaggccatagcgatggggggagatgctaggagtcggaggagac

SEQ ID NO: 43213 - DNA, 80 bp, synthetic construct
  source 1..80: mol_type = other DNA
tcagccaccggagaggacacgatgccaaagagtgggggaaatctcgcgagggaaatcccaagaaggtcgagaagtctcaa

SEQ ID NO: 43214 - DNA, 80 bp, synthetic construct
  source 1..80: mol_type = other DNA
aatctcgcgagggaaatcccaagaaggtcgagaagtctcaagagacgagggtggacccccgagacgctggagacgcccgg

SEQ ID NO: 43215 - DNA, 80 bp, synthetic construct
  source 1..80: mol_type = other DNA
atgaaccaagttccgaacgaagatccgcgagggtgagggatcaccgaccgagaggggatgaacgacaaggtgcgtggaac

SEQ ID NO: 43216 - DNA, 80 bp, synthetic construct
  source 1..80: mol_type = other DNA
cccctcacgtccagcccatccccgtgtctgtggaaggcggaatccggaactccttgcatgccggggacgaagccgccccc

SEQ ID NO: 43217 - DNA, 80 bp, synthetic construct
  source 1..80: mol_type = other DNA
ctcctcagctttcttccttgagttcacccacttctcgaggatgtcttctctccctccgcgggctttcttcgattcggacc

SEQ ID NO: 43218 - DNA, 80 bp, synthetic construct
  source 1..80: mol_type = other DNA
tgggaaggagggaaggtgaaaaagaaggagcgggcctcccgatccgaggggcccaactgccgagtttggagagcactccg

SEQ ID NO: 43219 - DNA, 80 bp, synthetic construct
  source 1..80: mol_type = other DNA
ggccgtacggtcgagtgttccccagagggaggaagccacacggagtagaacagagaaatcacctccagaggaccccttca

SEQ ID NO: 43220 - DNA, 80 bp, synthetic construct
  source 1..80: mol_type = other DNA
gcttatcccggggaactcggcgaatcgtccccgcatagcagagcccgggccccctccaaaaaggaccgagggtggagctt

SEQ ID NO: 43221 - DNA, 80 bp, synthetic construct
  source 1..80: mol_type = other DNA
atgagccaacttccgaacgaggagagcgcgggggaggaatcggcgcccgagagggagtagaaggtaaagagcattggaac

SEQ ID NO: 43222 - DNA, 80 bp, synthetic construct
  source 1..80: mol_type = other DNA
ttcctctaacttctttcttccttctatccactgctcgagagtgtcttctcttcctccgcgcctcttcctcgattcggagc

SEQ ID NO: 43223 - DNA, 80 bp, synthetic construct
  source 1..80: mol_type = other DNA
gaggtgaaagaggatgggtggaaaagaaggtgcgggcctcccgatccgaggggcccgacctccaagtttggaaagcattc

SEQ ID NO: 43224 - DNA, 80 bp, synthetic construct
  source 1..80: mol_type = other DNA
cgggccgaagggttgagtagcatccagagggagagaaccacacggagaaaagcagacaaatcacctccagaggacccctt

SEQ ID NO: 43225 - DNA, 80 bp, synthetic construct
  source 1..80: mol_type = other DNA
atgagccaattccgagcgaagggaccgccgggggagacgggtcgtcccgagagggaatcaatggcaaagatgcgaggatc

SEQ ID NO: 43226 - DNA, 80 bp, synthetic construct
  source 1..80: mol_type = other DNA
tttccccctacgtccagcccatccccggtccgagagaaggtggactccgggacaccctgcatgctggggacgaagccgcc

SEQ ID NO: 43227 - DNA, 80 bp, synthetic construct
  source 1..80: mol_type = other DNA
cgtcttcctcggtcaacctcctaagttcctcttcctcctccttgctgaggttcttgcctcccgcggagagctgcttcttc

SEQ ID NO: 43228 - DNA, 80 bp, synthetic construct
  source 1..80: mol_type = other DNA
cctttgatgttccctagccagggattgtcttcctcgagtttcttgagcttcttcttggtcctccggagctctctctcgag

SEQ ID NO: 43229 - DNA, 80 bp, synthetic construct
  source 1..80: mol_type = other DNA
ctctgctttctttcttccattgacccactgctcgaggacttcctctctgccccctcggttcttcttcgactcggaccggc

SEQ ID NO: 43230 - DNA, 80 bp, synthetic construct
  source 1..80: mol_type = other DNA
tcatctcgacagaggcggaggttccctcagttctcttatctttctttgaataagaggagactgctgggttccccgcccga

SEQ ID NO: 43231 - DNA, 80 bp, synthetic construct
  source 1..80: mol_type = other DNA
acagaggcggaggttccctcagttctcttatctttctttgaataagaggagactgctgggttccccgcccgagttcgagc

SEQ ID NO: 43232 - DNA, 80 bp, synthetic construct
  source 1..80: mol_type = other DNA
gggaaagagggaaggtggaagagaaaaggaggagatccccgatccgaggggcccaaccaccggatctggagagcactccg

SEQ ID NO: 43233 - DNA, 80 bp, synthetic construct
  source 1..80: mol_type = other DNA
gcccgaagggttgagtagcactcagagggagaaatccacacggagaagaacagagaaatcacctccagaggaccccttca

SEQ ID NO: 43234 - DNA, 80 bp, synthetic construct
  source 1..80: mol_type = other DNA
gcgaacagaagagcctcccgcgcggtgaggagcgagaccatagcgataggagtggatgctaggagtaggggcgaccgaag

SEQ ID NO: 43235 - DNA, 80 bp, synthetic construct
  source 1..80: mol_type = other DNA
ggggaactcggcgaatcgtccccacatagcggacttccggacccccttcgaaagtgaccggaggtggagcttagaacgga

SEQ ID NO: 43236 - DNA, 80 bp, synthetic construct
  source 1..80: mol_type = other DNA
ggggagcagtgcactccgtgggatgctcttcccgattccgtccaaccccctcccccagaaggtccccccaggaatagcag

SEQ ID NO: 43237 - DNA, 80 bp, synthetic construct
  source 1..80: mol_type = other DNA
tgtttattcactggggacgacaactctggggagaaaagggaggatcggatgggaaaagtatatcctacgggaagtgcctg

SEQ ID NO: 43238 - DNA, 80 bp, synthetic construct
  source 1..80: mol_type = other DNA
ccctgatgtccaggccgtcccctctccgagtgaagggagactccggaacgtcgtgcatgctggggacgaacccgcctccg

SEQ ID NO: 43239 - DNA, 80 bp, synthetic construct
  source 1..80: mol_type = other DNA
aagaggaaaggaaggacacggaagcgaaccgtgagtggaaccctcgatcctttattggggggtacactcgaggagtggaa

SEQ ID NO: 43240 - DNA, 80 bp, synthetic construct
  source 1..80: mol_type = other DNA
cctttattgtgtggtacactcgaggagtggaaggcggggaggagggggctgagggctaacctacggaaattcctggactc

SEQ ID NO: 43241 - DNA, 80 bp, synthetic construct
  source 1..80: mol_type = other DNA
agtcgacctccatctgatccgtcctggctctcttcgccgggggagctccctccccgtccctgtcttttcttattattcct

SEQ ID NO: 43242 - DNA, 80 bp, synthetic construct
  source 1..80: mol_type = other DNA
gtcgacgccggccgggcaacattccgaggggaccgtccctcggtaatggcgaatgggacccagaaatctcctttgattcc

SEQ ID NO: 43243 - DNA, 80 bp, synthetic construct
  source 1..80: mol_type = other DNA
cagagagaatcaggagaaaactggctctcccttagccatccgagtggacgtctgtcctccttcggatgcccaggtcggac

SEQ ID NO: 43244 - DNA, 80 bp, synthetic construct
  source 1..80: mol_type = other DNA
gactccagaggagtttgctgccgatgggcattcgaatcggggtctccgctgtttttcttcgctcctcctctcccagtacg

SEQ ID NO: 43245 - DNA, 80 bp, synthetic construct
  source 1..80: mol_type = other DNA
cgacagtttgccagcgtcatgggggctcctccgtcttgttctcttcctctgttggtagcttggaggatccagtcgaggat

SEQ ID NO: 43246 - DNA, 80 bp, synthetic construct
  source 1..80: mol_type = other DNA
tttccgttctctttctgtctcccaactctcgggagttctccactctagtccattcggacctcttcgccggaagcggccca

SEQ ID NO: 43247 - DNA, 80 bp, synthetic construct
  source 1..80: mol_type = other DNA
agaggagtttgctgccgagcgggcattcggaccggggtctccgttccttttcttcgccactcctctcccagcacgtgacg

SEQ ID NO: 43248 - DNA, 80 bp, synthetic construct
  source 1..80: mol_type = other DNA
tgattccggaactgggaggaaacccaaggccaggtggttccccggccaggagaggcgggaccacagaagaagtgaggccc

SEQ ID NO: 43249 - DNA, 80 bp, synthetic construct
  source 1..80: mol_type = other DNA
cagaggagtttgctgccgacgggcattcggatcggggtctccgccgtatcttttcgcctctcctctcccagctcgcgatg

SEQ ID NO: 43250 - DNA, 80 bp, synthetic construct
  source 1..80: mol_type = other DNA
catgagccaattccgaacgagaggaacgcgttcggagggatcagcgccggagaggggtgaattccaaagaagcgtggaat

SEQ ID NO: 43251 - DNA, 80 bp, synthetic construct
  source 1..80: mol_type = other DNA
gcgctcccctcgatccgccttcgagggggttcacacctccaggcggcgggccggctactcttctttcccttctctcgtct

SEQ ID NO: 43252 - DNA, 80 bp, synthetic construct
  source 1..80: mol_type = other DNA
tcaatggtcaacttctcgagttcctcttgttcctccctgctgaggctcttccctcccccggccagctgcttcttcttgtt

SEQ ID NO: 43253 - DNA, 80 bp, synthetic construct
  source 1..80: mol_type = other DNA
ctcgactaactttcttgaattcacccacttctcaagaacctcttcccttccgtcgcgcttccgcctcgattcggaccggc

SEQ ID NO: 43254 - DNA, 80 bp, synthetic construct
  source 1..80: mol_type = other DNA
gggccgaaggggagagtagtctccagagggaggaatccacacggagtagaacagagaaatcacctccagaggaccccttc

SEQ ID NO: 43255 - DNA, 80 bp, synthetic construct
  source 1..80: mol_type = other DNA
agcgaacagaagagccttgcacgggataggagtaagaccatagcgatggggggacatgctaggagtgggaagcgaccaaa

SEQ ID NO: 43256 - DNA, 80 bp, synthetic construct
  source 1..80: mol_type = other DNA
gacgagtgaggcttatcccggggaactcgacgaatcgtccccacatagcagagtcccgagccccttccgaaagtgaccga

SEQ ID NO: 43257 - DNA, 80 bp, synthetic construct
  source 1..80: mol_type = other DNA
cggggaactcgacgaatcgtccccacatagcagagtcccgagccccttccgaaagtgaccgagggtggagcttggagcgc

SEQ ID NO: 43258 - DNA, 80 bp, synthetic construct
  source 1..80: mol_type = other DNA
ttcggagaaaattctcccaagatggggaagagaagacaagaatcggaagactctccccatgacgctggagacatcctgga

SEQ ID NO: 43259 - DNA, 80 bp, synthetic construct
  source 1..80: mol_type = other DNA
aaggggaaagaggaaggtggaagaaaaaggcgcgggcctcccgatccgaggggcccgatcccagatctggagagcactcc

SEQ ID NO: 43260 - DNA, 80 bp, synthetic construct
  source 1..80: mol_type = other DNA
ggcccgaagggttgagtagcactcagagggaggaatccactcggagatgagcagtgatcccacctccagaggaccccttc

SEQ ID NO: 43261 - DNA, 80 bp, synthetic construct
  source 1..80: mol_type = other DNA
agcgaacagaagaccaccagacgcgataggagtaagaccatagcgatgggaggagatgctaggagttagaggaggccgaa

SEQ ID NO: 43262 - DNA, 80 bp, synthetic construct
  source 1..80: mol_type = other DNA
gccggctgggcaacattccgaggggaccgtcccctcggcaatggcgaatgggacccagaaatctctccagattcccaagg

SEQ ID NO: 43263 - DNA, 80 bp, synthetic construct
  source 1..80: mol_type = other DNA
cgtcggagaaactactcccaagaagcaaagagaggtcttaggaagcggacgagatccccacaacgccggagaatctctgg

SEQ ID NO: 43264 - DNA, 80 bp, synthetic construct
  source 1..80: mol_type = other DNA
atgagccaagttccgaacgaaggaccgcgagggggagagttcagcgaccgagaggggatgaacaacaaggtgcgtggatc

SEQ ID NO: 43265 - DNA, 80 bp, synthetic construct
  source 1..80: mol_type = other DNA
gcgggtccccctcgtgtctagcccatctccgagtctggagaaggtggactccgggactccttgcatgttggggacgaagc

SEQ ID NO: 43266 - DNA, 80 bp, synthetic construct
  source 1..80: mol_type = other DNA
gggaactcggcgaatcgtccccacatagcagagcccagaccccctctcaaaaggaccggaggtggagcttagaacgcggg

SEQ ID NO: 43267 - DNA, 80 bp, synthetic construct
  source 1..80: mol_type = other DNA
gggacccgctggagccatgggatgcttctcccgattccgtccaacccttccccaggagggtcgcccaggaatggcgggaa

SEQ ID NO: 43268 - DNA, 80 bp, synthetic construct
  source 1..80: mol_type = other DNA
atgagccaagtcccgaccgaggggtccgccgggggaagttggactcccgagagggaccaactggtaagagacgaggaacc

SEQ ID NO: 43269 - DNA, 80 bp, synthetic construct
  source 1..80: mol_type = other DNA
tcatcttggcagagggcggcagtcctcagagctcttactcttttctaataagaggagtctgctggactcgccgccccggc

SEQ ID NO: 43270 - DNA, 80 bp, synthetic construct
  source 1..80: mol_type = other DNA
aaggggaaagagggaaggcggacagtcggtgtgcgggtctcccgattcgagggtcccgacgccagaacttggaaggcact

SEQ ID NO: 43271 - DNA, 80 bp, synthetic construct
  source 1..80: mol_type = other DNA
tctcccgattcgagggtcccgacgccagaacttggaaggcactccgggccgaagggttgagtagcacacagagggagaaa

SEQ ID NO: 43272 - DNA, 80 bp, synthetic construct
  source 1..80: mol_type = other DNA
ccgggccgaagggttgagtagcacacagagggagaaagccacacggagatgggtagagaaatcacctccagaggacccct

SEQ ID NO: 43273 - DNA, 80 bp, synthetic construct
  source 1..80: mol_type = other DNA
tcggggggattctcccaagaaggtccaagagaaatcctcaagaagaggactgatccccatgacgccaaggaaactcttgg

SEQ ID NO: 43274 - DNA, 80 bp, synthetic construct
  source 1..80: mol_type = other DNA
atgggccacagctccgaacgaagggaccgacggggaggaaggcctcccgagaagggttagctggcaaagaggcgaggaaa

SEQ ID NO: 43275 - DNA, 80 bp, synthetic construct
  source 1..80: mol_type = other DNA
tccttggtcaacctcctaagttcctcttcctcctccttgccgaggaccttccctgctccggagagctgtttcttcttgtt

SEQ ID NO: 43276 - DNA, 80 bp, synthetic construct
  source 1..80: mol_type = other DNA
ctctagctcttttcttccagagacccattgctcgaggacgtcttctcttccccctcggttcttcttcgattcgggccggc

SEQ ID NO: 43277 - DNA, 80 bp, synthetic construct
  source 1..80: mol_type = other DNA
ttggcagagggcggcagtcctcagtgctcttactctttcttgtgaagaggagactgctggactcgccgccccagcccgag

SEQ ID NO: 43278 - DNA, 80 bp, synthetic construct
  source 1..80: mol_type = other DNA
tcagcgaacagaagacgctctcggacgacaggagcgggtccgtggcgataggagaggatgctaggagtaggggcgaccaa

SEQ ID NO: 43279 - DNA, 80 bp, synthetic construct
  source 1..80: mol_type = other DNA
ttccaaaggaccgaggggggagctaggagcgcggtgggaaccgctggagccgtgggatgctcttcccgattccgtccaac

SEQ ID NO: 43280 - DNA, 80 bp, synthetic construct
  source 1..80: mol_type = other DNA
ggtgggaaccgctggagccgtgggatgctcttcccgattccgtccaaccccacccccgagaggtccccccaggaatggcg

SEQ ID NO: 43281 - DNA, 80 bp, synthetic construct
  source 1..80: mol_type = other DNA
gtcgggaaaaactgtcccaagaaggtccaagagaaaattcaaagaaagaggacttttccccaaaacgctgtggaagctct

SEQ ID NO: 43282 - DNA, 80 bp, synthetic construct
  source 1..80: mol_type = other DNA
catgagccctcagttccgaccgaagagaccgccgggggaggggggcgaaccggcgtggagtcagtgataaagaggcgaag

SEQ ID NO: 43283 - DNA, 80 bp, synthetic construct
  source 1..80: mol_type = other DNA
gggccgaagggttgagtagcactcagagggagaaaatcacacagagatgagcagaaaaatcacctccagaggaccccctc

SEQ ID NO: 43284 - DNA, 80 bp, synthetic construct
  source 1..80: mol_type = other DNA
ttatcccggggaactcggcgaatgcccccacatagcagagtcccccagccccctccaaaaaagaccgagggaaggcgctt

SEQ ID NO: 43285 - DNA, 80 bp, synthetic construct
  source 1..80: mol_type = other DNA
ggagcgcaggggagcccagtggatccgtgggatgcccttcccgattccgatatcccttcccccgagaggtcccccaggaa

SEQ ID NO: 43286 - DNA, 80 bp, synthetic construct
  source 1..80: mol_type = other DNA
aatttcggaaaaactctcccaagaagaagcaagagaattcaggaaagaggagatttccccataacgctggaaaactcttg

SEQ ID NO: 43287 - DNA, 80 bp, synthetic construct
  source 1..80: mol_type = other DNA
ggtttccccttatgtccagcccctccccggtccgagaaaagggggactccgggatgccttgcatgctgtggacgaagccg

SEQ ID NO: 43288 - DNA, 80 bp, synthetic construct
  source 1..80: mol_type = other DNA
tcctttgatgttccccagccagggatgttcgtcctctagcttcttgattttcttcttaaccttccggaggtctctctcga

SEQ ID NO: 43289 - DNA, 80 bp, synthetic construct
  source 1..80: mol_type = other DNA
gttcctctaacttctttcttccatttacccactgctcgagaacgtcttctcttcctccgcggttcttcttcgactcggac

SEQ ID NO: 43290 - DNA, 80 bp, synthetic construct
  source 1..80: mol_type = other DNA
cagcgaacagaagagcgcttcgagcgaggagtaagaacgtagcgataggaggagatgctaggagttagaggaggccgaag

SEQ ID NO: 43291 - DNA, 80 bp, synthetic construct
  source 1..80: mol_type = other DNA
cggggaactcgacttatcgtccacacatagcagctcccggaccccctttcaaaacgaccgagggaggtggcttggagcat

SEQ ID NO: 43292 - DNA, 80 bp, synthetic construct
  source 1..80: mol_type = other DNA
aggggagccagtggagccatgggatgcccttcccgattccgtccatacccgctcccagagggtcgcccagcgaatggcgg

SEQ ID NO: 43293 - DNA, 80 bp, synthetic construct
  source 1..80: mol_type = other DNA
atgggccaagtccgacgaagagatcgaggacttggggagtagaagggcccgaagggaggagacgagtctaggaagagaga

SEQ ID NO: 43294 - DNA, 80 bp, synthetic construct
  source 1..80: mol_type = other DNA
atgagccaaattccgagcgaagagacgcggtggggaggatcagctcccgagaggggatgatgcggtaaagagcattggaa

SEQ ID NO: 43295 - DNA, 80 bp, synthetic construct
  source 1..80: mol_type = other DNA
ggtttcccctgatgtccagcccctccccggtccgagagaaggtggactccgggactccctgcagactggggacgaagccg

SEQ ID NO: 43296 - DNA, 80 bp, synthetic construct
  source 1..80: mol_type = other DNA
tagccggtgggtgttccgcctcccgagaggggacgagtgaggcttatcccggggaactcgacttatcgtccccatctagc

SEQ ID NO: 43297 - DNA, 80 bp, synthetic construct
  source 1..80: mol_type = other DNA
ttatcccggggaactcgacttatcgtccccatctagcgggaccccggacccccttcgaaagtgaccggtgtggtcgctag

SEQ ID NO: 43298 - DNA, 80 bp, synthetic construct
  source 1..80: mol_type = other DNA
gaacaccggggaccagtggagccatgggatgcccttcccgatgctcgattccgactcctccccccaagggtcgcccagga

SEQ ID NO: 43299 - DNA, 80 bp, synthetic construct
  source 1..80: mol_type = other DNA
cgtcggagaaattttcccaagaaggaaaagggaggattcaagaagcggacgaaatccccacaacgctggagaatctctgg

SEQ ID NO: 43300 - DNA, 80 bp, synthetic construct
  source 1..80: mol_type = other DNA
atgggccaattccgaacgaggatgacgcgaaaggaaggatcagaggacgagaggggatgagtcggtaaagaggcgtggaa

SEQ ID NO: 43301 - DNA, 80 bp, synthetic construct
  source 1..80: mol_type = other DNA
ctctaacctttttcttccgctcacccactgctcaagaatctcttctcttccatcgcgcctcttcctcgattcggaccggc

SEQ ID NO: 43302 - DNA, 80 bp, synthetic construct
  source 1..80: mol_type = other DNA
aggtgaaagaggaaaaacggaagagaaggggggggcctcccgatccgagaggcccaactaccaagtttggagagcacccc

SEQ ID NO: 43303 - DNA, 80 bp, synthetic construct
  source 1..80: mol_type = other DNA
gggcccaactaccaagtttggagagcaccccgggccgaagggttgagtagcatccagagggaggaagccacacggagtag

SEQ ID NO: 43304 - DNA, 80 bp, synthetic construct
  source 1..80: mol_type = other DNA
agcataggagacgcagtggagccatgggatgcccttcccgattccgtccatccccactcccagagggtcgcccaggaatg

SEQ ID NO: 43305 - DNA, 80 bp, synthetic construct
  source 1..80: mol_type = other DNA
cgccgaggggatgactcccaagaaggcaaggagaaggcaagaatcggatgctctccccatgacgctggagacatcctgga

SEQ ID NO: 43306 - DNA, 80 bp, synthetic construct
  source 1..80: mol_type = other DNA
atgagccaactgccgagcgaagagtccgcgggggaaggatcaagaaccgagagggagtaaatggcaaagagtggtggaac

SEQ ID NO: 43307 - DNA, 80 bp, synthetic construct
  source 1..80: mol_type = other DNA
aaggggaaagaggaaggtggaagaaataggtgcgggccctccaatccgaacggcccgactgccaaatttggagagcactc

SEQ ID NO: 43308 - DNA, 80 bp, synthetic construct
  source 1..80: mol_type = other DNA
cgggcccaagggttgagagttccccagagggaggaatccactcggagatgaacaggaaaatcacctccagaggacccctt

SEQ ID NO: 43309 - DNA, 80 bp, synthetic construct
  source 1..80: mol_type = other DNA
ggagcgcgggagaccagcggagccatgggatgcccttcccgattccgccctttcccctcccccaggaggtcgcccaggaa

SEQ ID NO: 43310 - DNA, 80 bp, synthetic construct
  source 1..80: mol_type = other DNA
gctgagaggaattctcccaagaaggaaagagagcagtcaagattcggatggttctcccgaagacgctggagacatcttgg

SEQ ID NO: 43311 - DNA, 80 bp, synthetic construct
  source 1..80: mol_type = other DNA
gttcggagggctctcccaagaaggtcaagagaagcaaggaaacggaagcatttccccataacgctggaagacttcctgga

SEQ ID NO: 43312 - DNA, 80 bp, synthetic construct
  source 1..80: mol_type = other DNA
catgagccaagttccgagcgaagagtccgcgggggagacggatcagaccccgagagtgagagaaccatcaaggtgcgagg

SEQ ID NO: 43313 - DNA, 80 bp, synthetic construct
  source 1..80: mol_type = other DNA
ctcagctttcttccttgagttcacccactgctcgaggacctcttcccttcccccgcgattcttcttcgactcggaccggc

SEQ ID NO: 43314 - DNA, 80 bp, synthetic construct
  source 1..80: mol_type = other DNA
tggaaggtgaaagtggataggtggaaaagaaggaggcgggctccccgatccgaggggcccgaccaccaagtttggagagc

SEQ ID NO: 43315 - DNA, 80 bp, synthetic construct
  source 1..80: mol_type = other DNA
acttcgggccgaagggttgagaagccttcagagggaggaagccacacagagaaagcagaaaaatcacctccagaggaccc

SEQ ID NO: 43316 - DNA, 80 bp, synthetic construct
  source 1..80: mol_type = other DNA
gagggaggaagccacacagagaaagcagaaaaatcacctccagaggaccccttcagcgaacagaagagccctggccgagc

SEQ ID NO: 43317 - DNA, 80 bp, synthetic construct
  source 1..80: mol_type = other DNA
cttcagcgaacagaagagccctggccgagcgggggtaagaccatagcgatgggaggagatgctaggagtggtaggagacc

SEQ ID NO: 43318 - DNA, 80 bp, synthetic construct
  source 1..80: mol_type = other DNA
tcccgtggaactcggcgaatcgtccccacatagcagagtccggaccccctccaaaaaggaccggaggtggagctcgtgaa

SEQ ID NO: 43319 - DNA, 80 bp, synthetic construct
  source 1..80: mol_type = other DNA
cgcggggtggcccgcggagccatgggatgctcctcccgattccgcccatccccacccccgagaggtcgcccaggaatggc

SEQ ID NO: 43320 - DNA, 80 bp, synthetic construct
  source 1..80: mol_type = other DNA
ccatccccacccccgagaggtcgcccaggaatggcagaccccacttcactggggtccgcgttccattctttcttacctgt

SEQ ID NO: 43321 - DNA, 80 bp, synthetic construct
  source 1..80: mol_type = other DNA
aacctcggagacaatgctcccaagaagcaaagaagaatccaagattcggatgattctcccgaagacgctagaggtcatct

SEQ ID NO: 43322 - DNA, 80 bp, synthetic construct
  source 1..80: mol_type = other DNA
ctttgatgtttcccagccagggatttccttcctcgagtttcttgatcttcttcttggccttccggaggtctctctcgagt

SEQ ID NO: 43323 - DNA, 80 bp, synthetic construct
  source 1..80: mol_type = other DNA
ctcgtcgtccttggtcaacctcctaagttcctcttcttcttccttgctgaggctcttcccccccgaggaaagttgcttct

SEQ ID NO: 43324 - DNA, 80 bp, synthetic construct
  source 1..80: mol_type = other DNA
cctaagttcctcttcttcttccttgctgaggctcttcccccccgaggaaagttgcttcttcttgttctcgagggccttcc

SEQ ID NO: 43325 - DNA, 80 bp, synthetic construct
  source 1..80: mol_type = other DNA
tctcctatctttcctcttgtggtcacccactcctcgaggattttctctcgtcctcctcgatcatccctcttgtcggaccg

SEQ ID NO: 43326 - DNA, 80 bp, synthetic construct
  source 1..80: mol_type = other DNA
agtccgaggtgagccttagttccgaccgaggggatcgatggtggaggagaatctcccgagaggggtcatcccactaaaga

SEQ ID NO: 43327 - DNA, 80 bp, synthetic construct
  source 1..80: mol_type = other DNA
gagggagacacttcgagggggatttctcccaagaaggtccaagagaacttcaaggatgaggagagtccccataacgctgg

SEQ ID NO: 43328 - DNA, 80 bp, synthetic construct
  source 1..80: mol_type = other DNA
agaaatctaggaatgggaaagaggaaggcggaaaaagcgaggcggtcccccgattcgaacggcccgactgccaagtttgg

SEQ ID NO: 43329 - DNA, 80 bp, synthetic construct
  source 1..80: mol_type = other DNA
ggaccccttcagcgaacagaaggctctttcgcacgatgggagcaagaccatagcgtaggagaagatgctaggagttgggg

SEQ ID NO: 43330 - DNA, 80 bp, synthetic construct
  source 1..80: mol_type = other DNA
ccaagttccgagcgaaggaccgcgagggtgagggttcagcgaccgagaggggttgatcaacaaggtgcgtggatctcgga

SEQ ID NO: 43331 - DNA, 80 bp, synthetic construct
  source 1..80: mol_type = other DNA
ctctaactcttttcttccagagacccactgctcgaggatgtcccccctatcccctcggttcttcttcgattcgggccggc

SEQ ID NO: 43332 - DNA, 80 bp, synthetic construct
  source 1..80: mol_type = other DNA
ggaaagtcgagaaaaattgccccaagaaggtccaagagaagacccaagaaagaggacctttccccataacgctgtggaga

SEQ ID NO: 43333 - DNA, 80 bp, synthetic construct
  source 1..80: mol_type = other DNA
accccttcagcgaacagaagacgctctcggacggtggagtaggaccgtagcgataggggaagatgctaggaggtaggtgc

SEQ ID NO: 43334 - DNA, 80 bp, synthetic construct
  source 1..80: mol_type = other DNA
gttctcccctcacgtccagtccatccccatgtctagcgaaggtggactccgggacgccttgcatgctggggacgaagccg

SEQ ID NO: 43335 - DNA, 80 bp, synthetic construct
  source 1..80: mol_type = other DNA
ccgagatgggccacagctccgaacgaagggtccgacggggaggaagccaccccgagaggggttaactggtaaagaggcga

SEQ ID NO: 43336 - DNA, 80 bp, synthetic construct
  source 1..80: mol_type = other DNA
ggaaagtcgggaaaaattgtcccaagaaggttcaagagaaaacccaagaaggaggacctttccccacaacgctgtggaag

SEQ ID NO: 43337 - DNA, 80 bp, synthetic construct
  source 1..80: mol_type = other DNA
ctctcggaatgggaaagaggatggcgaagagaaaaggtgcggggcccccgatccgaggggtccggcgccgaggcttggag

SEQ ID NO: 43338 - DNA, 80 bp, synthetic construct
  source 1..80: mol_type = other DNA
agatctccgggccgaatggtcgagtagcacacagagggagaaagccacacggagatgagcagaaaaaccacctccagagg

SEQ ID NO: 43339 - DNA, 80 bp, synthetic construct
  source 1..80: mol_type = other DNA
accccttcagcgaacagaagacgctcacggacggcaggagtaagaccgtagcgataggagaggacgctaggagttagggg

SEQ ID NO: 43340 - DNA, 80 bp, synthetic construct
  source 1..80: mol_type = other DNA
gcttatctcggtgaactcggcgaatcgtcaccacatagcagctcctcggacccccttcaaaaggaccggggggggctagg

SEQ ID NO: 43341 - DNA, 80 bp, synthetic construct
  source 1..80: mol_type = other DNA
agcgtggtggaggccgctggagccgtgggatgctcctcccgattccgtccaaccccacccccgagaggtccccccaggaa

SEQ ID NO: 43342 - DNA, 80 bp, synthetic construct
  source 1..80: mol_type = other DNA
atgggccacagctccgaacgaagggtccgacggtggatgaagacttcccgagaggggttggctggtaaagaggcgtggaa

SEQ ID NO: 43343 - DNA, 80 bp, synthetic construct
  source 1..80: mol_type = other DNA
ccttcagcgaacagaagacgctctcggcggaggagtaagcccgtagcgataggagaggatgctgggagtgaggggcgacc

SEQ ID NO: 43344 - DNA, 80 bp, synthetic construct
  source 1..80: mol_type = other DNA
agttgagaaaaattgtcccaagaaggtccaagagaaaacttaagaaggaggacttttccccaagacgctgtggagactct

SEQ ID NO: 43345 - DNA, 80 bp, synthetic construct
  source 1..80: mol_type = other DNA
gattaccccttacgtccagtccctccccgtgccgagtaaaggtggactccgggactccttgcaggttggggacgaagccg

SEQ ID NO: 43346 - DNA, 80 bp, synthetic construct
  source 1..80: mol_type = other DNA
cccccgggcgctcccctcgctgctccctcgagggggttcacacccccaactggcgggccggctgttcttcttttcctttc

SEQ ID NO: 43347 - DNA, 80 bp, synthetic construct
  source 1..80: mol_type = other DNA
gagggggatcactcccaagaagttccaagagaatatcaggaatgaggagagtccccatgacgctggagaaatctaggaat

SEQ ID NO: 43348 - DNA, 80 bp, synthetic construct
  source 1..80: mol_type = other DNA
gggaaagaggagggcggaagagtggagcggccccccgatccgaatggcccgactgccgagttttggagagcaccccggac

SEQ ID NO: 43349 - DNA, 80 bp, synthetic construct
  source 1..80: mol_type = other DNA
gaacagaaggctctttcacgcgtcaggagtaagaccatagcgttaggaagagatgctaggagttaggggagaccgaagcg

SEQ ID NO: 43350 - DNA, 80 bp, synthetic construct
  source 1..80: mol_type = other DNA
gaacgcaggggaaccatagggtccgtgggatgctcctcccgattccgtccgaccccacccccgagaggtccccccaggaa

SEQ ID NO: 43351 - DNA, 80 bp, synthetic construct
  source 1..80: mol_type = other DNA
gggtgcctctcgtgtccagcccactcccggtccgactaaaggtggactccgggattccttgcatgctggggacgaagccg

SEQ ID NO: 43352 - DNA, 80 bp, synthetic construct
  source 1..80: mol_type = other DNA
agtggaaaggggataggtggaaaagaaaggtgcgggcctcccgatccgaggggcccaacgccagaactggtaaacattcc

SEQ ID NO: 43353 - DNA, 80 bp, synthetic construct
  source 1..80: mol_type = other DNA
aaaggagacaaatcacctccagaggaccccttcagcgaacagaggagcgcttggccgtcaggagtaagaccatagcgata

SEQ ID NO: 43354 - DNA, 80 bp, synthetic construct
  source 1..80: mol_type = other DNA
gcgaacagaggagcgcttggccgtcaggagtaagaccatagcgataggggggagatgctaggagtttagaggagaccgaa

SEQ ID NO: 43355 - DNA, 80 bp, synthetic construct
  source 1..80: mol_type = other DNA
ccgaggagatatctcccaagaaggaaaaaagaggattcaagaagcggacgagacccccaaaacgctggagacatcctgga

SEQ ID NO: 43356 - DNA, 80 bp, synthetic construct
  source 1..80: mol_type = other DNA
tagaacgcagggaaccagtggagccatgggatgctcatcccgatgctcgattccattccctccccccaagggtcgcccag

SEQ ID NO: 43357 - DNA, 80 bp, synthetic construct
  source 1..80: mol_type = other DNA
tatgagccaaatcggagcgaagagatcgcagggggaaggatcagcgcccgagaggggttgaaaggtaaagagcattggaa

SEQ ID NO: 43358 - DNA, 80 bp, synthetic construct
  source 1..80: mol_type = other DNA
ggctcatctcggcaagagggcggcagtcctggaactcttactcttttctgtaaagaggagtccgtggactcgtcgcccca

SEQ ID NO: 43359 - DNA, 80 bp, synthetic construct
  source 1..80: mol_type = other DNA
ccgggccgaagggtcgaggtacccggagagaggaatcctcgcggagatgagcggaaaaatcacctccggaggaccccttc

SEQ ID NO: 43360 - DNA, 80 bp, synthetic construct
  source 1..80: mol_type = other DNA
agcgaacagaaggcactgaagcgcgaagagtgagaccatagcgataggaggggatgctaggagttagaggagacccgagc

SEQ ID NO: 43361 - DNA, 80 bp, synthetic construct
  source 1..80: mol_type = other DNA
cgtcgtcagaaacactcccaagaaggaaaaaagagaaagcaagaatcggaagaaacccccataacgctggagacatcctg

SEQ ID NO: 43362 - DNA, 80 bp, synthetic construct
  source 1..80: mol_type = other DNA
atgtgccaattccgggcgaagagagcgcgggggggggatcagcgcccgagagtggatcgaaggtaaagagtattggaacg

SEQ ID NO: 43363 - DNA, 80 bp, synthetic construct
  source 1..80: mol_type = other DNA
ctccgaccttttccttccatttacccactgctcgagaacatcttccttccccgtgcggcttttcttcgattcggaccggc

SEQ ID NO: 43364 - DNA, 80 bp, synthetic construct
  source 1..80: mol_type = other DNA
aggtgaaagaggagggatggagaagagaaggggggggcccccgagtccgagaggcccaaccactgagtttggagagcact

SEQ ID NO: 43365 - DNA, 80 bp, synthetic construct
  source 1..80: mol_type = other DNA
aggggcccaaccactgagtttggagagcactccgggccgaatggtcgagtagcacccagagggaggaagccacacagagt

SEQ ID NO: 43366 - DNA, 80 bp, synthetic construct
  source 1..80: mol_type = other DNA
agagtaaagcagagaaatcacctccagaggaccccctcagcgaacagggaggccttcagtgcgataggagtaagaccata

SEQ ID NO: 43367 - DNA, 80 bp, synthetic construct
  source 1..80: mol_type = other DNA
tcagcgaacagggaggccttcagtgcgataggagtaagaccatagcgatggggggagatgctaggagttagaggagaccg

SEQ ID NO: 43368 - DNA, 80 bp, synthetic construct
  source 1..80: mol_type = other DNA
agcatagaggatcatccgggtccgtgggatgctcttcccgattccgcccaacccctcccccagcgggtcgcccaggaatg

SEQ ID NO: 43369 - DNA, 80 bp, synthetic construct
  source 1..80: mol_type = other DNA
ggggagaaactactcccaagaaggaaagagaggactcaagagacggaggactctccccacaacgctggagacatcttgga

SEQ ID NO: 43370 - DNA, 80 bp, synthetic construct
  source 1..80: mol_type = other DNA
gccgagagtgagtctcccaagaagaaaaaaagagaaagcaagaggcggacgatttccccataacgctggagacatcctgg

SEQ ID NO: 43371 - DNA, 80 bp, synthetic construct
  source 1..80: mol_type = other DNA
gtcttcctcggtcaacctcttgagttcctcttcttcctccctgctgagcttctttcctcccgcgtccaactgcttcttct

SEQ ID NO: 43372 - DNA, 80 bp, synthetic construct
  source 1..80: mol_type = other DNA
accggctcatttcgactagaggcggcagtcctcagtactcttactcttttctgtaaagaggagactgctggactcgccgc

SEQ ID NO: 43373 - DNA, 80 bp, synthetic construct
  source 1..80: mol_type = other DNA
aaggggaaagaggcaggaggaaaagaaggagcgggctctccgatccgaggggcccaactgccaagtttggtgaggacact

SEQ ID NO: 43374 - DNA, 80 bp, synthetic construct
  source 1..80: mol_type = other DNA
aggggagccagtggagggatgcccttcccgattccgtccatcccttccccctagtgtcgcccaggaatggcttgggaccc

SEQ ID NO: 43375 - DNA, 80 bp, synthetic construct
  source 1..80: mol_type = other DNA
attcctttgatgtttcccagccagggattatcttcctctagtttcttgattttcttcttgaccttccggagatccctctc

SEQ ID NO: 43376 - DNA, 80 bp, synthetic construct
  source 1..80: mol_type = other DNA
gagttcctcctgcttctttcttccattgatccactgctcgagaacctcttctcttcccccgcggttcttcttcgattcgg

SEQ ID NO: 43377 - DNA, 80 bp, synthetic construct
  source 1..80: mol_type = other DNA
gaatgggagaaggagggatggaaagaaaggagcgacccctccgatccgaggggcccaacgtccgagttttggagagcact

SEQ ID NO: 43378 - DNA, 80 bp, synthetic construct
  source 1..80: mol_type = other DNA
gttcggagggattctcccaagaagaatcaagggaaggcaagaatcggaggcatttccccataacgctggaaaacctcttg

SEQ ID NO: 43379 - DNA, 80 bp, synthetic construct
  source 1..80: mol_type = other DNA
cctgagttcctcttcttcttccttgctgaggttcttgcctcccgcctgcagctgctttctcttgttctcgagggccttcc

SEQ ID NO: 43380 - DNA, 80 bp, synthetic construct
  source 1..80: mol_type = other DNA
cagccagggattttcgtcctcaagcttcttgatcttcttcttggtcttccggaggtctctctcgagttcctctaacttct

SEQ ID NO: 43381 - DNA, 80 bp, synthetic construct
  source 1..80: mol_type = other DNA
ttcttgcgcccacccactgctcgaggatgtcttctcttcccccgcgattcttcttcgactcggaccggctcatctcggca

SEQ ID NO: 43382 - DNA, 80 bp, synthetic construct
  source 1..80: mol_type = other DNA
ccacagttccgagcgaagagaccccggtggagaaaagcaacccgagaggggatgggacgctaaagagcattggaacgccg

SEQ ID NO: 43383 - DNA, 80 bp, synthetic construct
  source 1..80: mol_type = other DNA
agggaatctctcccaagaagaaccaggagatctcaagaagcggacgactttccccacaacgccggtgaaactctaggaag

SEQ ID NO: 43384 - DNA, 80 bp, synthetic construct
  source 1..80: mol_type = other DNA
gtcgaaggaaccactcccaagaaggaaaaagagaagacaagagacggacgatttccccacaacgctggagacatcttgga

SEQ ID NO: 43385 - DNA, 80 bp, synthetic construct
  source 1..80: mol_type = other DNA
cttgggccacttccgaacgaagattgcgcgagagcgggatcggccaccgagaggggatgaatgccaaagagcattggaac

SEQ ID NO: 43386 - DNA, 80 bp, synthetic construct
  source 1..80: mol_type = other DNA
ttcctctaacttctttcttgcattcacccactgctcgagagtcccctccctgcttccgcgatttttcttcgattcggagc

SEQ ID NO: 43387 - DNA, 80 bp, synthetic construct
  source 1..80: mol_type = other DNA
aaggggaaagtggacaggtggaaaagaaggcgcgggccccccgatccgagggccccggcctccaagtttggagagcactt

SEQ ID NO: 43388 - DNA, 80 bp, synthetic construct
  source 1..80: mol_type = other DNA
agcgaacagagagctctgacacgcgaggagtaagatcatagcgatagggggagatgctgggagttagaggagaccgaggc

SEQ ID NO: 43389 - DNA, 80 bp, synthetic construct
  source 1..80: mol_type = other DNA
gaggaggaaagcaaagagagcagcggggctagtcggtgggtgttccgcctcccggtagggaacgagtgaggcttatcccg

SEQ ID NO: 43390 - DNA, 80 bp, synthetic construct
  source 1..80: mol_type = other DNA
gggaactcggcgaatcgtccccacatagcagcttccaggacccccttccaaaatgactgagggaggagcttgggacaccc

SEQ ID NO: 43391 - DNA, 80 bp, synthetic construct
  source 1..80: mol_type = other DNA
gggcccggctggagccatgggatgctcctcccgatgctcgactccctcccttccccccgagggtcgcccaggaatggacg

SEQ ID NO: 43392 - DNA, 80 bp, synthetic construct
  source 1..80: mol_type = other DNA
gccgggggaaactctcccaagaagaacgaagagatagcaagaggcggacgattttccccaagacgctggagacatcttgg

SEQ ID NO: 43393 - DNA, 80 bp, synthetic construct
  source 1..80: mol_type = other DNA
ctcctttcttcttcttccatcgatccacttcccgagtgtctcttctctccccctccggaccttcctcgtatcggacaggc

SEQ ID NO: 43394 - DNA, 80 bp, synthetic construct
  source 1..80: mol_type = other DNA
ctcgaagagggcggacggtcccgagatctcttatcttcctacttagaagaggagtctcctggacgcctccgcccactcgg

SEQ ID NO: 43395 - DNA, 80 bp, synthetic construct
  source 1..80: mol_type = other DNA
gaccccttctgcgaacggagaagctcttcctcctcgggagtggagccgtagcgatgggaagggatgctaggagctgggtg

SEQ ID NO: 43396 - DNA, 80 bp, synthetic construct
  source 1..80: mol_type = other DNA
aaaccgaagcgaggaggaaagcaaagaaagcaacggggctagcgagtggatgttcctccccccgagagtcccgagtgagg

SEQ ID NO: 43397 - DNA, 80 bp, synthetic construct
  source 1..80: mol_type = other DNA
tcagccaccggcgagggacgcgatggtaagagtggaggaaagttcggagggaaatcccaagagggtcacccgagattcaa

SEQ ID NO: 43398 - DNA, 80 bp, synthetic construct
  source 1..80: mol_type = other DNA
aagttcggagggaaatcccaagagggtcacccgagattcaagaggtgagggtggatccccgagacgctggaggagcgccg

SEQ ID NO: 43399 - DNA, 80 bp, synthetic construct
  source 1..80: mol_type = other DNA
tcatcctcgaagagggcggacggtcctgagatctcatatcttcttacttagaagaggagtctcctggacgctcccgccca

SEQ ID NO: 43400 - DNA, 80 bp, synthetic construct
  source 1..80: mol_type = other DNA
ttcctctaacttctttcttccggccacccactgctcgaggatctcttctctccctctgcggttcttcctcgactcggacc

SEQ ID NO: 43401 - DNA, 80 bp, synthetic construct
  source 1..80: mol_type = other DNA
atgggccaattccgagcgaagggaacgcgggaggaaggatcagcgcccgagagggagtaacggtaaagaggcgtggaacg

SEQ ID NO: 43402 - DNA, 80 bp, synthetic construct
  source 1..80: mol_type = other DNA
gcgtccctctcacgtccagcccctccccgtgtcgatggaaggtggactccgggacgccttgcatgctggggacgaagccg

SEQ ID NO: 43403 - DNA, 80 bp, synthetic construct
  source 1..80: mol_type = other DNA
cctttgatgtttcctagccagggattgtcctcctcaagcttcttgagtttcttctttgtcttccggaggtccctttcgag

SEQ ID NO: 43404 - DNA, 80 bp, synthetic construct
  source 1..80: mol_type = other DNA
ctccgctctttttcttccgcttacccactgctcgaggatctcttctcttcccccgcgattcttcttcgactcggaccggc

SEQ ID NO: 43405 - DNA, 80 bp, synthetic construct
  source 1..80: mol_type = other DNA
tcatctcgacaagaggcggcaaacctcagtactcttactctttttctgaaaagaggagactgctggttctgccgcccaag

SEQ ID NO: 43406 - DNA, 80 bp, synthetic construct
  source 1..80: mol_type = other DNA
ggggaaagaggtcaggtggaaaaagaaggcgcgggccccccgatccgaggggcccgactaccaagtttggaaagcactcc

SEQ ID NO: 43407 - DNA, 80 bp, synthetic construct
  source 1..80: mol_type = other DNA
gtggaactcggcaaatcgtccccacatagcagctccgggagccccttcaaaaatgaccggaggtgtggctaggagcgcgg

SEQ ID NO: 43408 - DNA, 80 bp, synthetic construct
  source 1..80: mol_type = other DNA
tcgattggagttcctcctggaggaaaagagaagattcaagaggtgagtgactttcccaagacgctggagacatcctggaa

SEQ ID NO: 43409 - DNA, 80 bp, synthetic construct
  source 1..80: mol_type = other DNA
agtcgagagaaattgtcctaagaaggtccaagagaaaacccaagaaggaggacctttccccaaaacgctgcggaaactct

SEQ ID NO: 43410 - DNA, 80 bp, synthetic construct
  source 1..80: mol_type = other DNA
gggccgaagggttcagagtacccagagcgaggaatacactcggagaaaagcagacaaatcacgtccagcggaccccttca

SEQ ID NO: 43411 - DNA, 80 bp, synthetic construct
  source 1..80: mol_type = other DNA
tcggaggtagtcccccaagaaggacaaagagaatgcaagaaacggaagcctttccccacaacgctggagacatcttggaa

SEQ ID NO: 43412 - DNA, 80 bp, synthetic construct
  source 1..80: mol_type = other DNA
ctcgaggaccttccttcttcggtggtcctgcctctctttgtcggtgaagtctcccctgtgaggcctcttcctaggtccgg

SEQ ID NO: 43413 - DNA, 80 bp, synthetic construct
  source 1..80: mol_type = other DNA
atgagccaagatccgacgaagagccccaaggaggagaaggagggacccccgaagggactcgaagctaaagagtggaaact

SEQ ID NO: 43414 - DNA, 80 bp, synthetic construct
  source 1..80: mol_type = other DNA
tggtttcccctgatgtccagtccatccccgtgtctggtgaatggagactccggaacaccaagcatcctagggacgaagcc

SEQ ID NO: 43415 - DNA, 80 bp, synthetic construct
  source 1..80: mol_type = other DNA
acccccgggcgctccccttggacttcctccgggagggttcacacccccatcctgcgggccggccaaccttcttttccttt

SEQ ID NO: 43416 - DNA, 80 bp, synthetic construct
  source 1..80: mol_type = other DNA
agtcaacctccatccgatctgttcgggctctcttcgccgggggagctccctctcctccactcccctttcttattattccg

SEQ ID NO: 43417 - DNA, 80 bp, synthetic construct
  source 1..80: mol_type = other DNA
aggatgttccccagccagggattgtcatcctcgagtttcttgatggttcttctcgtcttccggatcctcctctcgaggtc

SEQ ID NO: 43418 - DNA, 80 bp, synthetic construct
  source 1..80: mol_type = other DNA
cttccagatctttccttgcttcgacccactttgagaggacatcctcccgtcctccccttcgttctctcttcgcatcggac

SEQ ID NO: 43419 - DNA, 80 bp, synthetic construct
  source 1..80: mol_type = other DNA
cggcgagggcggcgatcctcagtgctcttactctttacagtagaaagaggagactgctggatgccccgcccgggccgagc

SEQ ID NO: 43420 - DNA, 80 bp, synthetic construct
  source 1..80: mol_type = other DNA
gaacaaggaaaatggggatgggataggaaaagaagagcgagcccaccgatccgagtttgccctgaacctatcaggtttgg

SEQ ID NO: 43421 - DNA, 80 bp, synthetic construct
  source 1..80: mol_type = other DNA
agtcctccgagcttagggtcgaaatgggtacaatgggaggaatccaccaggagtcggagacaagccacctccagaggacc

SEQ ID NO: 43422 - DNA, 80 bp, synthetic construct
  source 1..80: mol_type = other DNA
ccttcagcgaacagaagagccttctcccggaggaggggaacatagcgataggaggagatgctaggagtaggtggagaccg

SEQ ID NO: 43423 - DNA, 80 bp, synthetic construct
  source 1..80: mol_type = other DNA
ttatcccggggaactcggctaagtcccggatcgccggctccaggactccactccaaaggaccgagggtaggacttggagc

SEQ ID NO: 43424 - DNA, 80 bp, synthetic construct
  source 1..80: mol_type = other DNA
accggggatcccaggcagttccatggtggacaccgtcccccttctccacactccttccccccgcgggccccgccataaag

SEQ ID NO: 43425 - DNA, 80 bp, synthetic construct
  source 1..80: mol_type = other DNA
gccggctgggcaacattccgaggtggccgtcccctcgtaatggcagatgggacccaggcttcccccggattcccttatgg

SEQ ID NO: 43426 - DNA, 80 bp, synthetic construct
  source 1..80: mol_type = other DNA
cacgagaaggaggggttcccaagaggacgagagaagctcctcaagaagaggatggatccccgagacgctggaaactcccg

SEQ ID NO: 43427 - DNA, 80 bp, synthetic construct
  source 1..80: mol_type = other DNA
gaggaaagaaggagaccggacgcaaacctgtgagtggaaatttcttctctttattgggggtacactcgaggagtggaagg

SEQ ID NO: 43428 - DNA, 80 bp, synthetic construct
  source 1..80: mol_type = other DNA
atttcttctctttattggaggtacactcgaggagtggaaggcggggagggggggatggagcttgtccctatggaaactgc

SEQ ID NO: 43429 - DNA, 80 bp, synthetic construct
  source 1..80: mol_type = other DNA
ctcctgtttctttcttccatttacccactgctcgaggatctcttctcttcccccgcgatccttcttcgactcgtgccggc

SEQ ID NO: 43430 - DNA, 80 bp, synthetic construct
  source 1..80: mol_type = other DNA
tcatctcggcaagagggggcggacctcagtgctcttactcttttctgtaaagaggagactgctggtcccgccccccaagc

SEQ ID NO: 43431 - DNA, 80 bp, synthetic construct
  source 1..80: mol_type = other DNA
ccgagcatgagccaatgtcacgagcgaagagttcgcagggggaaggatcagctcccgagagtggaaaatggtaaagagtg

SEQ ID NO: 43432 - DNA, 80 bp, synthetic construct
  source 1..80: mol_type = other DNA
ggggaatttcgatggattactcccaagaagaaccaaggagaactcaagaatcggaagaatttccccataacgctggagac

SEQ ID NO: 43433 - DNA, 80 bp, synthetic construct
  source 1..80: mol_type = other DNA
gctggagacatcttggaaggggaaagaggaaagtggaaaagaaggcgcgggcctcccgatccgagggctccgactgccgg

SEQ ID NO: 43434 - DNA, 80 bp, synthetic construct
  source 1..80: mol_type = other DNA
gagcttggagcgcgaggggacccagcggagccatgggatgctcttcccgattccgtccatcccccaccccgagagggtcg

SEQ ID NO: 43435 - DNA, 80 bp, synthetic construct
  source 1..80: mol_type = other DNA
gagaaaccacacggagtagaacagagaaatcacctccagaggaccccttcagcgaacagaagagtctttcaggatcagga

SEQ ID NO: 43436 - DNA, 80 bp, synthetic construct
  source 1..80: mol_type = other DNA
ccagaggaccccttcagcgaacagaagagtctttcaggatcaggagtaagaccatagcgatggggggagatgctaggagt

SEQ ID NO: 43437 - DNA, 80 bp, synthetic construct
  source 1..80: mol_type = other DNA
cttcctcggtcaacctcttgagttcctcttcttcctccctgctgaggttcttccctcctccagaaagttgcttcttcttg

SEQ ID NO: 43438 - DNA, 80 bp, synthetic construct
  source 1..80: mol_type = other DNA
gcgaggaacgccgaggggatgtctcccaagaaggcaaagagaaggcaagaatcggacgctctccccacgacgctggagac

SEQ ID NO: 43439 - DNA, 80 bp, synthetic construct
  source 1..80: mol_type = other DNA
gactccagaggagcttgcagccgacgggcattcggatcggggtctccgctatcttccccgccactcctctcccagtgcga

SEQ ID NO: 43440 - DNA, 80 bp, synthetic construct
  source 1..80: mol_type = other DNA
gacgatttgctagcgtcatgggggctcctctgtcttgctgtcttcctctgttggaagcttggtggatcctctcgaggcta

SEQ ID NO: 43441 - DNA, 80 bp, synthetic construct
  source 1..80: mol_type = other DNA
gtgggtgcccctattgggaccggttttgtccgaaaggggatggtgaggaactccatcgggttctgcgggtcccggtcgac

SEQ ID NO: 43442 - DNA, 80 bp, synthetic construct
  source 1..80: mol_type = other DNA
agaggagtttgctgccgatggacattcggaccggggtctccgccactatcttcgcctctcctctcccagctcgcggcggt

SEQ ID NO: 43443 - DNA, 80 bp, synthetic construct
  source 1..80: mol_type = other DNA
gaatgggaaagaggaaggtggaaaaaaagaggaggggcccccccgatccgaaaggcccgacgcccaagtttggagagcac

SEQ ID NO: 43444 - DNA, 80 bp, synthetic construct
  source 1..80: mol_type = other DNA
tccggccgaagggttgagaacaccagagggaggaagccacgcagagaagcggagaaaccacctccagaggaccccttcag

SEQ ID NO: 43445 - DNA, 80 bp, synthetic construct
  source 1..80: mol_type = other DNA
gggaactcgacttatcgtccccatctagcgggacccaggacccccttcagaaaagaccgagggtggagcttcgaacggag

SEQ ID NO: 43446 - DNA, 80 bp, synthetic construct
  source 1..80: mol_type = other DNA
gggaccagtggatccgttggaagcgctccctcccgttccgtccgaacccacctcccccgcagggtcgcccaggaatggcg

SEQ ID NO: 43447 - DNA, 80 bp, synthetic construct
  source 1..80: mol_type = other DNA
catgagccacgttccgaacgaagagacgcgaggggaaggggatagtgctcgagagggagtgacggtaaagagcattggaa

SEQ ID NO: 43448 - DNA, 80 bp, synthetic construct
  source 1..80: mol_type = other DNA
gatcgcgggggaaccggtggatccgtgggatgctcttcccgattctgtccactcccccctccaggtggtcgcccaggaat

SEQ ID NO: 43449 - DNA, 80 bp, synthetic construct
  source 1..80: mol_type = other DNA
cgccgaggggatgtctcccaagaagaaaaagagaggattcaagaagtgggagacttccccataacgctggagacatcctg

SEQ ID NO: 43450 - DNA, 80 bp, synthetic construct
  source 1..80: mol_type = other DNA
tttagcttccaaaagagaagcaagagaaaactggctctcccttagccatccgaggtggacgttgtcctccttcggatgcc

SEQ ID NO: 43451 - DNA, 80 bp, synthetic construct
  source 1..80: mol_type = other DNA
catgggccaattgccgaacggagagagcgcgagaggaaggaagccgaccgagaggggatgaattggtaaagatgaggtga

SEQ ID NO: 43452 - DNA, 80 bp, synthetic construct
  source 1..80: mol_type = other DNA
ctctactttctttcttccattcacccactgctcgagggcgtcttctcttcccccgcgcctcctccccgattcggaccggc

SEQ ID NO: 43453 - DNA, 80 bp, synthetic construct
  source 1..80: mol_type = other DNA
aagaggaaagagacaggcggaagaaaaaggagcgggcctcccggtccgaggggcccgactgccaagtttggagggcactc

SEQ ID NO: 43454 - DNA, 80 bp, synthetic construct
  source 1..80: mol_type = other DNA
cagcgaacagcagagccttgcacgggataggagtaagaccatagcgataggaagacatgctaggagtagcgggagaccga

SEQ ID NO: 43455 - DNA, 80 bp, synthetic construct
  source 1..80: mol_type = other DNA
ccggggaactcgacgaatcgtccccacatagcaggtccgggtcccccttccaaaaggaaccgagggtggagctaggagcg

SEQ ID NO: 43456 - DNA, 80 bp, synthetic construct
  source 1..80: mol_type = other DNA
cggaggacccggtggagccatgggatgcccttcccgattccgtccaacccccacccccgagggtcgcccaggaatggcgg

SEQ ID NO: 43457 - DNA, 80 bp, synthetic construct
  source 1..80: mol_type = other DNA
gacccactcgactggggtccgcgttccatcctttcttacctgatggccggcatggtcccagcctccccgctggcgccggc

SEQ ID NO: 43458 - DNA, 80 bp, synthetic construct
  source 1..80: mol_type = other DNA
agcttggaaaaattgtcctaagaaggtccaagagagaactcaagaagaggagacttccccacgacgctgcggaagctctc

SEQ ID NO: 43459 - DNA, 80 bp, synthetic construct
  source 1..80: mol_type = other DNA
tcagcgaacagaagacgctcccaggcggtaggagtgagtccatagcgataggtggagatgcgtaggagtaggggagaccg

SEQ ID NO: 43460 - DNA, 80 bp, synthetic construct
  source 1..80: mol_type = other DNA
tgggtgcggcagtggagccatgggatgctcctcccgattccgtccatccccttcccccaggaggtccccccaggaatggc

SEQ ID NO: 43461 - DNA, 80 bp, synthetic construct
  source 1..80: mol_type = other DNA
tctctccttgtcggtgaaccctctcccgcggcctcccttcccaggtccggagtctacctccattctgtccgttcgggcct

SEQ ID NO: 43462 - DNA, 80 bp, synthetic construct
  source 1..80: mol_type = other DNA
tcctcgattctcttgagtttcttcttgaccttccggagttctttctccagctccccggctttctctcttccagagatcca

SEQ ID NO: 43463 - DNA, 80 bp, synthetic construct
  source 1..80: mol_type = other DNA
ctgcgcgaggatgccctctctttcccctcggtccttcttcgtcccggtccggctcatcttggcagagggcggcggtcctc

SEQ ID NO: 43464 - DNA, 80 bp, synthetic construct
  source 1..80: mol_type = other DNA
agtactcttactcttttctgtaaagaggagactgctggactcgcgccccggcccgagatgagccacagtcccgagcgaag

SEQ ID NO: 43465 - DNA, 80 bp, synthetic construct
  source 1..80: mol_type = other DNA
aggtcgatggagaaaggggacctcccgcgagggattgcctggtaaagaggcgtggaaatctgggaaagattctcccaaga

SEQ ID NO: 43466 - DNA, 80 bp, synthetic construct
  source 1..80: mol_type = other DNA
aggaacaagagagaactcaagattgaggacttttccccataacgctgaggaagctcttggaaggggaaagaggaagacga

SEQ ID NO: 43467 - DNA, 80 bp, synthetic construct
  source 1..80: mol_type = other DNA
gggaaaaaggtgcgggttccccgatccgaggggcccggcgccagagattggtgaatgctccgggccgtacggtcgggaag

SEQ ID NO: 43468 - DNA, 80 bp, synthetic construct
  source 1..80: mol_type = other DNA
cgcacggagagaggaatccactcggagatgagcagagaagccacctccagaggaccccttcagcgaacagaaggcgctca

SEQ ID NO: 43469 - DNA, 80 bp, synthetic construct
  source 1..80: mol_type = other DNA
tcttcgccgggggagccccctcctcgctcttatccttctttccgattattcctttgatgtttcccagccagggattttcg

SEQ ID NO: 43470 - DNA, 80 bp, synthetic construct
  source 1..80: mol_type = other DNA
cgacttgtgcggctttcccttaggtccggaatcgacctccatttgatccgtccggggcttcttcgttggaggtgctccct

SEQ ID NO: 43471 - DNA, 80 bp, synthetic construct
  source 1..80: mol_type = other DNA
tctctactttcttaagaaaagaggagactgctggtcgcccgcccccgcgttcgagcatgggccacaagccggcgaagaga

SEQ ID NO: 43472 - DNA, 80 bp, synthetic construct
  source 1..80: mol_type = other DNA
gcgttcgagcatgggccacaagccggcgaagagatcgaggatttggagaggtgaggggaaccgagggtggttcgaacttt

SEQ ID NO: 43473 - DNA, 80 bp, synthetic construct
  source 1..80: mol_type = other DNA
cctatgatgttccccagccagggattgccttcctctagcttcttgattttcttcttgaccttccggagttccttctcgag

SEQ ID NO: 43474 - DNA, 80 bp, synthetic construct
  source 1..80: mol_type = other DNA
ctctaacttctttctttcacccacccactgctcgagaacctcttctctccctccgcgatccttcttcttctcggaccggc

SEQ ID NO: 43475 - DNA, 80 bp, synthetic construct
  source 1..80: mol_type = other DNA
gtcgtcgggaatcgcccaagaaggaacaagagaggacaagaagcggaaggctttccccacaacgctggagaacctttgga

SEQ ID NO: 43476 - DNA, 80 bp, synthetic construct
  source 1..80: mol_type = other DNA
ccttttatgtttcccagccagggattttcctcctcaagtttcctgagcttcttcttgaccttccggagatctctctcgag

SEQ ID NO: 43477 - DNA, 80 bp, synthetic construct
  source 1..80: mol_type = other DNA
cgccgaggagaaccctcccaagaaggaaagagaatagtcaggattcggaggcatttcccgaaaacgctggagacatcttg

SEQ ID NO: 43478 - DNA, 80 bp, synthetic construct
  source 1..80: mol_type = other DNA
gaacccccgctttattcactgggtgcgacaactctggggagaaaagggaaggtcggatgggaagagtatatcccattgga

SEQ ID NO: 43479 - DNA, 80 bp, synthetic construct
  source 1..80: mol_type = other DNA
ttccgaagtgacggtggggggtactaggaacccggaggaccggtggatccggaggactgcccctctccacgctcccaacc

SEQ ID NO: 43480 - DNA, 80 bp, synthetic construct
  source 1..80: mol_type = other DNA
cccggtggaccggtggatccgtgggactgcccctctccaccctcccaacccgctccttcccccctgcgaggccaccccat

SEQ ID NO: 43481 - DNA, 80 bp, synthetic construct
  source 1..80: mol_type = other DNA
tcggtgagtctcccctgtgaggcctcttcccaggtccggagtctacctccattctgtccgttcgggccctcttcgccgga

SEQ ID NO: 43482 - DNA, 80 bp, synthetic construct
  source 1..80: mol_type = other DNA
ctctatcttctttcttccagacacccactgctcgaggacgtcctcccttccccctcggttcttcctcgactcgggccggc

SEQ ID NO: 43483 - DNA, 80 bp, synthetic construct
  source 1..80: mol_type = other DNA
ccgagacgggccacagctccgagcgaggggtccgacgggagaggaggacctcccgagaggggtcacctggtaaagaggcg

SEQ ID NO: 43484 - DNA, 80 bp, synthetic construct
  source 1..80: mol_type = other DNA
aggaaatctgggagagattctcccaagaagaaccaggagagatctcaagattgaggacctttccccaaaacgctgaggaa

SEQ ID NO: 43485 - DNA, 80 bp, synthetic construct
  source 1..80: mol_type = other DNA
gagcactccgggccgaagggtcgaatagcacacagagggaggaatccactcggagatggcagagaaaccacctccagagg

SEQ ID NO: 43486 - DNA, 80 bp, synthetic construct
  source 1..80: mol_type = other DNA
ggtgaatctcccctgatgggtctcttcctagggccggagtctacttccatctggtccgttcgggccctcttcgccgggtg

SEQ ID NO: 43487 - DNA, 80 bp, synthetic construct
  source 1..80: mol_type = other DNA
cccctcgtgtctagcccttccccgtgtctgtggaaggtggactccgggactccttgcatgttagggacgaagccgccccc

SEQ ID NO: 43488 - DNA, 80 bp, synthetic construct
  source 1..80: mol_type = other DNA
tgattttcttcttttccttccggagctcgttctcgagattctcgaccttgctttttgcgttcacccacttctcgaggacc

SEQ ID NO: 43489 - DNA, 80 bp, synthetic construct
  source 1..80: mol_type = other DNA
tcttccctccctccgcgggatttcttcgtctcggaccggctcatctcggcaagaggcggcagtcctcagtactcttactc

SEQ ID NO: 43490 - DNA, 80 bp, synthetic construct
  source 1..80: mol_type = other DNA
gagggttcagcgaccgagaggggatgaacaacaagaagcgggaatctcagaaacgatgcactcccaagaaggtaagagag

SEQ ID NO: 43491 - DNA, 80 bp, synthetic construct
  source 1..80: mol_type = other DNA
gattcaggaactgggatctcccccagagacgctggaggcatctcggaatgggaaggagggaaggtggaaaagaaggtgcg

SEQ ID NO: 43492 - DNA, 80 bp, synthetic construct
  source 1..80: mol_type = other DNA
gaccatagcgatgggaggagatgctaggagttagaggagaccgaagcgaggaggaaagcaaagaaagcaacggggctagc

SEQ ID NO: 43493 - DNA, 80 bp, synthetic construct
  source 1..80: mol_type = other DNA
agccccctctccatccttatccttctttccaagaattcctttgatgtttcccagccaggggtgttgatcctctagtttct

SEQ ID NO: 43494 - DNA, 80 bp, synthetic construct
  source 1..80: mol_type = other DNA
cccggttcccctccaaaaaggaccgggagaggagcttagagcgcggtggggcccgctggagccatgggatgctcttcccg

SEQ ID NO: 43495 - DNA, 80 bp, synthetic construct
  source 1..80: mol_type = other DNA
attccgtccatcccttccccaggagggtcgcccaggaatgacgagaactccactcttcggagtccgcgttccattctttc

SEQ ID NO: 43496 - DNA, 80 bp, synthetic construct
  source 1..80: mol_type = other DNA
gatgctcccccgtgggctctcttcccaggtccggagtctacctccattctgtccgttcgggccctcttcgccggtggagc

SEQ ID NO: 43497 - DNA, 80 bp, synthetic construct
  source 1..80: mol_type = other DNA
ttttcttcctggccttccggagttctttctccagctcctctaccctttttcttccagagacccactgctcgaggatgtcc

SEQ ID NO: 43498 - DNA, 80 bp, synthetic construct
  source 1..80: mol_type = other DNA
tctcttccccctcggttcttcttcgattcggaccggctcatcttggcagagggcggcagtcctcagtgctcttactcttt

SEQ ID NO: 43499 - DNA, 80 bp, synthetic construct
  source 1..80: mol_type = other DNA
cctataaagaggagactgctggactcgccgccccagcctgagatgggccacagctccgaacgaagggtccgatgggggat

SEQ ID NO: 43500 - DNA, 80 bp, synthetic construct
  source 1..80: mol_type = other DNA
ggtggcctcccgagaggggttgcctggtaagaggcgaggaaatctgggaaagatacccccaagaaggactaggagagaat

SEQ ID NO: 43501 - DNA, 80 bp, synthetic construct
  source 1..80: mol_type = other DNA
tcaagatagaggacttttccccaagacgctgtggaaactcttggaaggggaaagaggaagacgagagaaaaggtgcgggc

SEQ ID NO: 43502 - DNA, 80 bp, synthetic construct
  source 1..80: mol_type = other DNA
ctcccgatccgaggggcccggcgccagagattggagaagggctccgggccgaacggttgagaggcgcacggagggagaaa

SEQ ID NO: 43503 - DNA, 80 bp, synthetic construct
  source 1..80: mol_type = other DNA
tccactcggagataaacagaaaaaccacctccagaggaccccttcagcgaacagaaggcgctctcgggcggcaggagtaa

SEQ ID NO: 43504 - DNA, 80 bp, synthetic construct
  source 1..80: mol_type = other DNA
cccctcctcgctcttatccttctttccgagaattcctttgatgtttcctagccagggattatcgtcctcaagtttcttga

SEQ ID NO: 43505 - DNA, 80 bp, synthetic construct
  source 1..80: mol_type = other DNA
ccccttcagcgaacagaagacgctctcggatggtgtgagggcaccgtagcgataggaggggatgctaggagataggtgcg

SEQ ID NO: 43506 - DNA, 80 bp, synthetic construct
  source 1..80: mol_type = other DNA
ttattcactggggtcgacaactctggggagaaaagggtggatcggatgggaacagtatatcctatgggaattcgcggttc

SEQ ID NO: 43507 - DNA, 80 bp, synthetic construct
  source 1..80: mol_type = other DNA
cttcttttccttccggaggtctctctcgagctcctcgattttcttccttgcgttcacccacctctcgaggacctcttccc

SEQ ID NO: 43508 - DNA, 80 bp, synthetic construct
  source 1..80: mol_type = other DNA
cagcgaccgagggaggttgaacaacaaggagcggggaacctcgggagattcactcccaagaaggtaagagagaactcaag

SEQ ID NO: 43509 - DNA, 80 bp, synthetic construct
  source 1..80: mol_type = other DNA
tcgggagattcactcccaagaaggtaagagagaactcaagagatggaagttttcccgagaacgctggaggcatctcggaa

SEQ ID NO: 43510 - DNA, 80 bp, synthetic construct
  source 1..80: mol_type = other DNA
agatggaagttttcccgagaacgctggaggcatctcggaataggaaggagggaaggtggaaaagaaggtgcgggcctccc

SEQ ID NO: 43511 - DNA, 80 bp, synthetic construct
  source 1..80: mol_type = other DNA
cccctccaaaaaggaccggaggagggattagagcgcggggtggcccgctgaagccatgggatgcttttcccgattccgtc

SEQ ID NO: 43512 - DNA, 80 bp, synthetic construct
  source 1..80: mol_type = other DNA
tgaagccatgggatgcttttcccgattccgtccaaccccttccccaggagggtcgcccaggaatgacgagaactccactc

SEQ ID NO: 43513 - DNA, 80 bp, synthetic construct
  source 1..80: mol_type = other DNA
ctcctggaatgggaaagaagaaggcgaaagaaagaggtgcgggacccccgctccgaggggtccggcgccgagttttggag

SEQ ID NO: 43514 - DNA, 80 bp, synthetic construct
  source 1..80: mol_type = other DNA
cgggccgaagggttgagcagcacccagaggggggagtccactcggagtagaacagagaaatcacctccagaggacccctt

SEQ ID NO: 43515 - DNA, 80 bp, synthetic construct
  source 1..80: mol_type = other DNA
tagaacagagaaatcacctccagaggaccccttcagcgaacaaaggggcgctcgggtggtaggagaaagaccatagcgat

SEQ ID NO: 43516 - DNA, 80 bp, synthetic construct
  source 1..80: mol_type = other DNA
cagcgaacaaaggggcgctcgggtggtaggagaaagaccatagcgatggtgggagatgctaggagtaagaggagaccgaa

SEQ ID NO: 43517 - DNA, 80 bp, synthetic construct
  source 1..80: mol_type = other DNA
aacgtgagggagccggtggagccatgggatgctccttccgatgctcgatcccctccctccccccaagcgtcgcccaggaa

SEQ ID NO: 43518 - DNA, 80 bp, synthetic construct
  source 1..80: mol_type = other DNA
gatgagacggtaaagagcattggatcgtcggggggaatcctcctaagaagagagaagaggaggcaagaagtggacgaagt

SEQ ID NO: 43519 - DNA, 80 bp, synthetic construct
  source 1..80: mol_type = other DNA
cgtcggggggaatcctcctaagaagagagaagaggaggcaagaagtggacgaagtccccacgacgctggagacacccttg

SEQ ID NO: 43520 - DNA, 80 bp, synthetic construct
  source 1..80: mol_type = other DNA
atgggcctcagttccgagcgaggagcccgctcggggaaggaagcaacccgagaggggatgcaaggtaaagaatggaggaa

SEQ ID NO: 43521 - DNA, 80 bp, synthetic construct
  source 1..80: mol_type = other DNA
cccctcgtgtccagcccctccccggtccgagagaaggcggactccgggatgccttgcatgctggggacgaagccgccccc

SEQ ID NO: 43522 - DNA, 80 bp, synthetic construct
  source 1..80: mol_type = other DNA
gggcgctcccctcggtccaccttcgagggggttcacacccccaacctgcgggccggctactcttctttcccttctctcgt

SEQ ID NO: 43523 - DNA, 80 bp, synthetic construct
  source 1..80: mol_type = other DNA
agtctacttccatctggtctgtccggggcctcttcgccggaggggctccttctccatccttatccttctttccaagaatt

SEQ ID NO: 43524 - DNA, 80 bp, synthetic construct
  source 1..80: mol_type = other DNA
ttcctcctgttttcttcttccttccacccactgctcgaggatgttctctcttcccccgcgggacttcctcgactcggacc

SEQ ID NO: 43525 - DNA, 80 bp, synthetic construct
  source 1..80: mol_type = other DNA
tgggaaagaagaaaggtggaaaaaaaaggagcgagcctctctgagacgggggccccgaccaccaagtttggaaagcactc

SEQ ID NO: 43526 - DNA, 80 bp, synthetic construct
  source 1..80: mol_type = other DNA
cgggccgaaaatggtcgagtagcactcagagggaggaatccactcggagtagaacagagaaatcacctccagaggacccc

SEQ ID NO: 43527 - DNA, 80 bp, synthetic construct
  source 1..80: mol_type = other DNA
gaccacggaggaaccgagggtccgtgggatgcccttcccgattccgtcctaccccttcccccgagggtccccccagtgaa

SEQ ID NO: 43528 - DNA, 80 bp, synthetic construct
  source 1..80: mol_type = other DNA
ggcggaagcccactcagcggagtccgcgctccaccctttcttacctgatggccggcatggtcccagcctcctcgctggcg

SEQ ID NO: 43529 - DNA, 80 bp, synthetic construct
  source 1..80: mol_type = other DNA
ggttcggagggagatcccaagaagtttcaagagaaacaggaagcggaagagttcccaaagacgctggagacgactcggaa

SEQ ID NO: 43530 - DNA, 80 bp, synthetic construct
  source 1..80: mol_type = other DNA
ttattcactggggacgacaactctggggagaaaagggaggatcggatgggaagagtatatcctacgggaagcctcggtct

SEQ ID NO: 43531 - DNA, 80 bp, synthetic construct
  source 1..80: mol_type = other DNA
catgggccaagttccgagcgaagggacgcggcgtgaggatcagctcccgagaggggataaatgggcaaagagcagaggaa

SEQ ID NO: 43532 - DNA, 80 bp, synthetic construct
  source 1..80: mol_type = other DNA
cagcgaacagagaactcgtgagtcgcgaggagtaagatcatagcgatagggggagatgctaggagtaggaggagaccgaa

SEQ ID NO: 43533 - DNA, 80 bp, synthetic construct
  source 1..80: mol_type = other DNA
gaacacagagggcgcgtggagccatgggatgcccttcccgatgtccgattccaaccccttcccccgagggtcgcccagga

SEQ ID NO: 43534 - DNA, 80 bp, synthetic construct
  source 1..80: mol_type = other DNA
ctctaacttcttctttccattcacccactgctcgaggatctcttctctgcccccgcggttcttcttcgattcggaccggc

SEQ ID NO: 43535 - DNA, 80 bp, synthetic construct
  source 1..80: mol_type = other DNA
atcccgcgctaccccttatgtccagcccctccccagttctggtgaaggtggactccggaacaccttgcatgttggggacg

SEQ ID NO: 43536 - DNA, 80 bp, synthetic construct
  source 1..80: mol_type = other DNA
atgggccacgttccgaacgaagagacgcgggaggaagggtcaagcccccgagagggagctggacggtaaagagcattcga

SEQ ID NO: 43537 - DNA, 80 bp, synthetic construct
  source 1..80: mol_type = other DNA
cctttgatgtttcccagccagggattctcatcctcgagcttcttgattttcttctttgtcctccggagatccctctcgag

SEQ ID NO: 43538 - DNA, 80 bp, synthetic construct
  source 1..80: mol_type = other DNA
ttcgtctaacttctttcttccgtccacccactcctggagagccttctccctttccccgcggttcttcttcgattcggacc

SEQ ID NO: 43539 - DNA, 80 bp, synthetic construct
  source 1..80: mol_type = other DNA
acgccgaggggaagcctcccaagaggagaaaagggagcattcaagaggcgggtgagatccccatgacgctggagacatcc

SEQ ID NO: 43540 - DNA, 80 bp, synthetic construct
  source 1..80: mol_type = other DNA
atgagccacagttccgaacgaggagacgcgggtggaagggatcagcgcccgagagggagtggacggtaaagagcattgga

SEQ ID NO: 43541 - DNA, 80 bp, synthetic construct
  source 1..80: mol_type = other DNA
gaaggggaaagaggatgggtggaaaagaaggtgcgggcctcccgatccgaggtgcccaacgccagctttgggaggcactc

SEQ ID NO: 43542 - DNA, 80 bp, synthetic construct
  source 1..80: mol_type = other DNA
cggagcattcgacttatcgtccccacatagcagaatcccggaccccctccaaaaagtgaccgagggaggcgctaggatcg

SEQ ID NO: 43543 - DNA, 80 bp, synthetic construct
  source 1..80: mol_type = other DNA
cgggggaaaccggtggaaccatgggatgctcctcccgattccgtccatccctcctcccaggtggtcgcccaggaatggcg

SEQ ID NO: 43544 - DNA, 80 bp, synthetic construct
  source 1..80: mol_type = other DNA
acgccgaggggatgcctcccaagaaggaaaaaagaggtatcaaaagcggacgtggtccccacgacgctggagacatcctg

SEQ ID NO: 43545 - DNA, 80 bp, synthetic construct
  source 1..80: mol_type = other DNA
ctctaactgctttcttccttcgacccacttctcgagaacctcttctctccccccgcggttcttcttcgactcggaccggc

SEQ ID NO: 43546 - DNA, 80 bp, synthetic construct
  source 1..80: mol_type = other DNA
catgagccaattgccgaacgaggatggcgcgagaggaaggatcagaggacgagaggggatgagatggtaaagaagcgagg

SEQ ID NO: 43547 - DNA, 80 bp, synthetic construct
  source 1..80: mol_type = other DNA
ctaggaccgtggtggaccagtggagccatgggatgctcctcccgattccgtccatccccaccccctgagggtcgcccagg

SEQ ID NO: 43548 - DNA, 80 bp, synthetic construct
  source 1..80: mol_type = other DNA
cgggccaaatggttgagtagcatccagagggaggaaatccacacggagttgacagagaaatcacctccagaggacccctt

SEQ ID NO: 43549 - DNA, 80 bp, synthetic construct
  source 1..80: mol_type = other DNA
gaaatccacacggagttgacagagaaatcacctccagaggaccccttcagcgaacagaagagcgtgagcgcgttgggagt

SEQ ID NO: 43550 - DNA, 80 bp, synthetic construct
  source 1..80: mol_type = other DNA
cagcgaacagaagagcgtgagcgcgttgggagtgggaccatagcgatggggggagatgctaggagttagaggagaccgaa

SEQ ID NO: 43551 - DNA, 80 bp, synthetic construct
  source 1..80: mol_type = other DNA
gagcgcagggtgaccactgggagccatgggatgcctctcccgattccgtccatcccccccccaggagggtcgcccaggaa

SEQ ID NO: 43552 - DNA, 80 bp, synthetic construct
  source 1..80: mol_type = other DNA
gccgaggaggtgactcccaagaagaacaaagagaaaacaagaaacggaagattttccccaaaacgctggaagcatcctgg

SEQ ID NO: 43553 - DNA, 80 bp, synthetic construct
  source 1..80: mol_type = other DNA
catgagccaagtgccgaacgaggagaacgcgaaaggaaggatcagaggacgagaggggtgagatggtaaagaaacgggga

SEQ ID NO: 43554 - DNA, 80 bp, synthetic construct
  source 1..80: mol_type = other DNA
atcctcggctctttttcttccactcacccactgctcaagaatctcttctcttccatcgcgcttcttcctcgattcggacc

SEQ ID NO: 43555 - DNA, 80 bp, synthetic construct
  source 1..80: mol_type = other DNA
ctcggatgtttcccagccaggggttatcctcctcaagtctcttgatagtcttgagggtcttccggaggtccctctcgagc

SEQ ID NO: 43556 - DNA, 80 bp, synthetic construct
  source 1..80: mol_type = other DNA
cttgtctaaagcctctcagcccagcgtcaagagtgcctgcgttaggcttcccatcgtggttcttgagcctaatctggccg

SEQ ID NO: 43557 - DNA, 80 bp, synthetic construct
  source 1..80: mol_type = other DNA
acagcaggatccaggccctcataagctatctcctttgcaaactcgaccaaagctggaacatccagtggctcgttgccaat

SEQ ID NO: 43558 - DNA, 80 bp, synthetic construct
  source 1..80: mol_type = other DNA
catgggccatctccgaacgaagatcccgcggtgggcaggatcagcgcccgagaggggtggacggtaaagagcattggaac

SEQ ID NO: 43559 - DNA, 80 bp, synthetic construct
  source 1..80: mol_type = other DNA
ttcctctaacttctttcttccgttcacccactgctcgaggatctcttccctgccctcgcgctgtttcttcgattcggaac

SEQ ID NO: 43560 - DNA, 80 bp, synthetic construct
  source 1..80: mol_type = other DNA
aggaacgcggggaaccagtggagccatgggatgccccttccaatgttcgattccattccctccccccaagggtcgcccag

SEQ ID NO: 43561 - DNA, 80 bp, synthetic construct
  source 1..80: mol_type = other DNA
gccgagagtgattctcccaagaaggaaaaagagaagacaagagacggacgacttccccaagacgctggagacatcctgga

SEQ ID NO: 43562 - DNA, 80 bp, synthetic construct
  source 1..80: mol_type = other DNA
agtcgacctccattcgatctgtccgggatctcttcgccgggggagccccctccccgtccttcccttttctgattattccg

SEQ ID NO: 43563 - DNA, 80 bp, synthetic construct
  source 1..80: mol_type = other DNA
atgggccaaatccgagcgaaggggccgaacggcgagagggtcgccccgagaggagatcaatggtaaagaggcgaggaaat

SEQ ID NO: 43564 - DNA, 80 bp, synthetic construct
  source 1..80: mol_type = other DNA
agcggaagaaaggaaggcggaagagaaggcgtgggctctccgatccgaggggcccgacgccccgatttggagagaacccc

SEQ ID NO: 43565 - DNA, 80 bp, synthetic construct
  source 1..80: mol_type = other DNA
atgagcagagaaatcacctccagaggaccccttcagcgaacagaagactctcttcccggtgggaggaagcccatagcgat

SEQ ID NO: 43566 - DNA, 80 bp, synthetic construct
  source 1..80: mol_type = other DNA
agcgaacagaagactctcttcccggtgggaggaagcccatagcgatgggaggagatgctaggagttaggggagaccgaag

SEQ ID NO: 43567 - DNA, 80 bp, synthetic construct
  source 1..80: mol_type = other DNA
agcgtggagggacccgggtaggatccgtgggatgcccttcccgattccgtccatcccttccccccgagaggtcccccagg

SEQ ID NO: 43568 - DNA, 80 bp, synthetic construct
  source 1..80: mol_type = other DNA
cggtagaaactactcccaagaaggaccagaaggggagatcaggaagaggaggatccccagaacgctggtggactcttgga

SEQ ID NO: 43569 - DNA, 80 bp, synthetic construct
  source 1..80: mol_type = other DNA
acatctacttgtcactttggagaccctggtgatgtcatgggtccaaaagataaaccatttatttgccctgaattcccagg

SEQ ID NO: 43570 - DNA, 80 bp, synthetic construct
  source 1..80: mol_type = other DNA
agcccagtagccctgagtttctagggtggggagacacagactcccctaagaagaatgaattctcacggagcttcctcaga

SEQ ID NO: 43571 - DNA, 80 bp, synthetic construct
  source 1..80: mol_type = other DNA
ctcatctctggagagagaaattgctcagcggcatggaagacaatggaagcagagccttgaggagcgtgtcctgaaagaga

SEQ ID NO: 43572 - DNA, 80 bp, synthetic construct
  source 1..80: mol_type = other DNA
ctcggatgttccgcagccaggcattgtcctcctcgagtctcttgagattcatgttgatcttccggagctccctctcgagt

SEQ ID NO: 43573 - DNA, 80 bp, synthetic construct
  source 1..80: mol_type = other DNA
gctcatcctcaaggagggcgggcggtcctgagaactcttatcttcctgcttagaagaggagtctcctggacgcccccgcc

SEQ ID NO: 43574 - DNA, 80 bp, synthetic construct
  source 1..80: mol_type = other DNA
accccttcagcgaacagaaaggcccttcctcctcgggagtggagccgtaccgatgggagtggatgctaggagttggtgga

SEQ ID NO: 43575 - DNA, 80 bp, synthetic construct
  source 1..80: mol_type = other DNA
tcagggaaccaggaaatgggaaagaaatggtagaaaagagcgagcctcccgaatccgagttgccccggacctatctaaat

SEQ ID NO: 43576 - DNA, 80 bp, synthetic construct
  source 1..80: mol_type = other DNA
ttatcccgggggaaacggctaagtccctccatgtcccgctccacggctcccttccaaaggtcgtggaggactggaacgta

SEQ ID NO: 43577 - DNA, 80 bp, synthetic construct
  source 1..80: mol_type = other DNA
agatcgtcgaggaaatactcccaagaattcccggaggcatgccaagaagcggaagaatctcccccagggcttcggaagag

SEQ ID NO: 43578 - DNA, 80 bp, synthetic construct
  source 1..80: mol_type = other DNA
atgagccaacttccgagcgaaggaacgcgggggaaggatcagcgcccgagagggagtggaaggtaaagagcattggaacg

SEQ ID NO: 43579 - DNA, 80 bp, synthetic construct
  source 1..80: mol_type = other DNA
ttcctctaactcctttcttcctttcacccactgctcgagaacctcttctcttcctccgcgcctcttcttcgactcggagc

SEQ ID NO: 43580 - DNA, 80 bp, synthetic construct
  source 1..80: mol_type = other DNA
ggggaaagaggatgggtggaaaagaaggtgcgggcctcccgatccgaggagcccggcctccaggatttggatggcactcc

SEQ ID NO: 43581 - DNA, 80 bp, synthetic construct
  source 1..80: mol_type = other DNA
taggaccgtgggggaccaacggagccatgggatgctcttcccgattccgtccaaccctcccccaggagggtcgcccagga

SEQ ID NO: 43582 - DNA, 80 bp, synthetic construct
  source 1..80: mol_type = other DNA
ccgaggggacacctcccaagaagtccaagagaaggcaagaatcggacgctttccccatgacgctggaagtcgtcctggaa

SEQ ID NO: 43583 - DNA, 80 bp, synthetic construct
  source 1..80: mol_type = other DNA
atgggccacagttccgagcgaagagacgcgggtggaggatcagcgcccgagagggagtaatcggcaaagagcattggatc

SEQ ID NO: 43584 - DNA, 80 bp, synthetic construct
  source 1..80: mol_type = other DNA
ctctaacttctttcttccgattatccactgctcgagaacctcttctctccctccgcggtgcttcttcgactcggaccggc

SEQ ID NO: 43585 - DNA, 80 bp, synthetic construct
  source 1..80: mol_type = other DNA
aggggaaagaggccagatggaaaaaagaggtggggcctcccgatccgagaggcccaaccaccaagtttggagagcactcc

SEQ ID NO: 43586 - DNA, 80 bp, synthetic construct
  source 1..80: mol_type = other DNA
gggcccaaccaccaagtttggagagcactccggcccgaagcgttgagtagcactcagagggaggaatccactcggagaag

SEQ ID NO: 43587 - DNA, 80 bp, synthetic construct
  source 1..80: mol_type = other DNA
agcgaacagaagagcgcttcgtgcggtaggagtaagaccatagcgataggaagggatgctaggagttaggggagaccgaa

SEQ ID NO: 43588 - DNA, 80 bp, synthetic construct
  source 1..80: mol_type = other DNA
ggacctggaggaccagtggagccatgggatgctccttccgatgctcgatccctccctcccccccgggtgtcgcccaggaa

SEQ ID NO: 43589 - DNA, 80 bp, synthetic construct
  source 1..80: mol_type = other DNA
gtcgtcgggattctcccaagaaggaacaagagaggacaagaaacggaagaatttccccatgacgccggagaatctttgga

SEQ ID NO: 43590 - DNA, 80 bp, synthetic construct
  source 1..80: mol_type = other DNA
ctgagccacttccgaacgaagattgcgcgggacaggatcagcggacgagaggggatatgtgctaaagaccattggaacgt

SEQ ID NO: 43591 - DNA, 80 bp, synthetic construct
  source 1..80: mol_type = other DNA
atccgtgggttcccctgatgtccagcccctccccagtcctggtgaaggtggactccggaacaccttgcatgctggggacg

SEQ ID NO: 43592 - DNA, 80 bp, synthetic construct
  source 1..80: mol_type = other DNA
agtctacctccatctggtcgattcgggacttcttcgccgggggagccccctctccgtccttgtccttctttccgagaatt

SEQ ID NO: 43593 - DNA, 80 bp, synthetic construct
  source 1..80: mol_type = other DNA
ttcctctaacttctttcttgcacatacccactgctcgagaagctcttccctgtttccgcgatttttcttcgattcggagc

SEQ ID NO: 43594 - DNA, 80 bp, synthetic construct
  source 1..80: mol_type = other DNA
ggccgtatggttgagaactttcccagagggaggagatccactcggagaaagcagacaaatcacctccagaggaccccttc

SEQ ID NO: 43595 - DNA, 80 bp, synthetic construct
  source 1..80: mol_type = other DNA
agcgaacagagagcactgacacgcggggagtgagatcgtagcgataggaggagatgctaggagttaggggagaccgaagc

SEQ ID NO: 43596 - DNA, 80 bp, synthetic construct
  source 1..80: mol_type = other DNA
ttatcccggggaactcggcgaatcgtccccacatagcagtttccaggcgcccccttccaaaatgactgagggtggagctt

SEQ ID NO: 43597 - DNA, 80 bp, synthetic construct
  source 1..80: mol_type = other DNA
atagcagtttccaggcgcccccttccaaaatgactgaggggggagcttaagacggcagggacccactggagccatgggat

SEQ ID NO: 43598 - DNA, 80 bp, synthetic construct
  source 1..80: mol_type = other DNA
aagacggcagggacccactggagccatgggatgcccctcccgatgctcgattccctcccttcccccgagggtcgcccagg

SEQ ID NO: 43599 - DNA, 80 bp, synthetic construct
  source 1..80: mol_type = other DNA
cggaggaaatctcccaagaaggaaagagggggagacaagagacggaagactctccccacaacgctggagacatcctggaa

SEQ ID NO: 43600 - DNA, 80 bp, synthetic construct
  source 1..80: mol_type = other DNA
gttttcccgctttattcactggggtcgacaactctggggagaaaagggaggatcggctgggaagagtatatcctatggaa

SEQ ID NO: 43601 - DNA, 80 bp, synthetic construct
  source 1..80: mol_type = other DNA
taccttggtcaacttcagaagttcctcttcctcctccttgctgaggctcttccctcctccggcgagctgtttcctcttgt

SEQ ID NO: 43602 - DNA, 80 bp, synthetic construct
  source 1..80: mol_type = other DNA
ggaaggggaaagaggaaggcgagaagaaaaaggagtgggcccccgatccgaggggtccggcgtcgaactttggagagagc

SEQ ID NO: 43603 - DNA, 80 bp, synthetic construct
  source 1..80: mol_type = other DNA
cttggcagagggcaacggtcctcagtactcttactctttcctataaagaggagactgctggactcgtgccccagcctgag

SEQ ID NO: 43604 - DNA, 80 bp, synthetic construct
  source 1..80: mol_type = other DNA
ttcaagcgaacagaggacgctctcggacggcaggagtaagaccgtagcgataggagaggatgctaggaggcgggagcgac

SEQ ID NO: 43605 - DNA, 80 bp, synthetic construct
  source 1..80: mol_type = other DNA
atgggccacagctccgaacgaagggttcgacgggtgaggaggccatcccgagaggggtcacctggtaaagaggcgtagga

SEQ ID NO: 43606 - DNA, 80 bp, synthetic construct
  source 1..80: mol_type = other DNA
gatcccccctcacgtccagcccctccccgtgtctggtgaagggggactccgggacaccttgcatgttggtggcgaagccg

SEQ ID NO: 43607 - DNA, 80 bp, synthetic construct
  source 1..80: mol_type = other DNA
aatctacctccatctcgtccgttcgggccctcttcgccgggggagcccccccttcgctcttctccttctttccgattatt

SEQ ID NO: 43608 - DNA, 80 bp, synthetic construct
  source 1..80: mol_type = other DNA
cctttgatgtttcccagccagggattgtcgtcctcgagtttcttgattttcttcttggtcttccgggcttttctctcgag

SEQ ID NO: 43609 - DNA, 80 bp, synthetic construct
  source 1..80: mol_type = other DNA
ctctagctcttttcttccagtcacccacatttcgaggatttcctcccttccccctcgattcttcttcgattcgggccggc

SEQ ID NO: 43610 - DNA, 80 bp, synthetic construct
  source 1..80: mol_type = other DNA
tcatcttggcagaaggcggcggtcctcagtgctcttactctttcctataaagaggagactgctggactcgccgccccagc

SEQ ID NO: 43611 - DNA, 80 bp, synthetic construct
  source 1..80: mol_type = other DNA
tcggaagtggaaagaggaaggcgaaagaaaaggagcggggcccccgatccgaggggtccggcgccgagttttggagagaa

SEQ ID NO: 43612 - DNA, 80 bp, synthetic construct
  source 1..80: mol_type = other DNA
ctccgggccagatggtcgagtagcacacagagggagaaagccacacagagatgagcagagaagccacctccagaggaccc

SEQ ID NO: 43613 - DNA, 80 bp, synthetic construct
  source 1..80: mol_type = other DNA
ttccaaaggaccgaaggtggagctaggagcgcgggggggacccgccggagccgtgggatgcccttcccgattccgtccga

SEQ ID NO: 43614 - DNA, 80 bp, synthetic construct
  source 1..80: mol_type = other DNA
gcgcgggagggacccgccggagccgtgggatgcccttcccgattccgtccgaccccaccgccgagaggtccccccaggaa

SEQ ID NO: 43615 - DNA, 80 bp, synthetic construct
  source 1..80: mol_type = other DNA
aagtcgagagaaatagtcccaagaaggttcaagagaaaatccaagaaggaggacctttccccacgacgctgtggaagctc

SEQ ID NO: 43616 - DNA, 80 bp, synthetic construct
  source 1..80: mol_type = other DNA
ctcggaaagcttctcccaagaagaaccggggacgcctcaagagggaggagatttcccgaaagctggagtctcccggaatc

SEQ ID NO: 43617 - DNA, 80 bp, synthetic construct
  source 1..80: mol_type = other DNA
gccggcgtggcaacattccgaaggggaccgtccctcggtaatggcaaaggggacccaaaaatctctctagattcccatag

SEQ ID NO: 43618 - DNA, 80 bp, synthetic construct
  source 1..80: mol_type = other DNA
catgagccaattccgagcgaggatccctcgggggaaggatcagcgcccgagaggggattggtgctaaagagcattggaac

SEQ ID NO: 43619 - DNA, 80 bp, synthetic construct
  source 1..80: mol_type = other DNA
ctctaacttctttcttgcacccacccactgctcgagaacatcttctcttcccccgcggtgtttcctcgactcggaccggc

SEQ ID NO: 43620 - DNA, 80 bp, synthetic construct
  source 1..80: mol_type = other DNA
gaggggaaagaggagggatggaagagaagaggtggccctccccagatacgaatggcccggctaccaaatctggaggacac

SEQ ID NO: 43621 - DNA, 80 bp, synthetic construct
  source 1..80: mol_type = other DNA
ggacgtgggtgcgccggtggatccgtgggatgcccttcccgattctgacctaacccctcccccagcagggtcgcccagga

SEQ ID NO: 43622 - DNA, 80 bp, synthetic construct
  source 1..80: mol_type = other DNA
gccaaggagagtattcccaagaaggcagagagaagtccaagaatcggatgactctccccatgacgctggaaacgccttgg

SEQ ID NO: 43623 - DNA, 80 bp, synthetic construct
  source 1..80: mol_type = other DNA
ccgctttattcactggggtcgacaactctgcggagagaagggaggatcagctgggaagagcacatcccacgggaatcccc

SEQ ID NO: 43624 - DNA, 80 bp, synthetic construct
  source 1..80: mol_type = other DNA
cctgagccaagttccgagcgaggagacgcgggggaaggatcagctcccgagaggggatgtcacggtaaagagcattggaa

SEQ ID NO: 43625 - DNA, 80 bp, synthetic construct
  source 1..80: mol_type = other DNA
agaacactcgggcccggtcgggtccatgggatgctcttcccgattccgtcaaacccttcccccgaggggtcccccagtgg

SEQ ID NO: 43626 - DNA, 80 bp, synthetic construct
  source 1..80: mol_type = other DNA
atgacgagaacccactctgcagggtttcgcgttccaccctttcttacctgatggccggcatggtcccagcctcctcgctg

SEQ ID NO: 43627 - DNA, 80 bp, synthetic construct
  source 1..80: mol_type = other DNA
gccggctgggcaacattccgaggggaccgtcccctcggtaatggcaaatgggacccaaaactctctttatcttccaaaag

SEQ ID NO: 43628 - DNA, 80 bp, synthetic construct
  source 1..80: mol_type = other DNA
aaaagcaagaaaaaactggctctcccttacccatccgagtggacgtcactcctccttcagatgcccaggtcggaccgcga

SEQ ID NO: 43629 - DNA, 80 bp, synthetic construct
  source 1..80: mol_type = other DNA
catgagccaattgccgaacgaggggaacgcgggaggaaggatcacatgacgagagggagtgtatggtaagaggcgtggaa

SEQ ID NO: 43630 - DNA, 80 bp, synthetic construct
  source 1..80: mol_type = other DNA
ttcctctaacctttttcttccattcacccactgctcgagaatgtcttctcttcccccgcgattcttcctcgattcggatc

SEQ ID NO: 43631 - DNA, 80 bp, synthetic construct
  source 1..80: mol_type = other DNA
gaaggggaaagagataggtggaaaagaaagggtgcgggcctcccgatccgaggggcccgactgccaagtttggaaagcac

SEQ ID NO: 43632 - DNA, 80 bp, synthetic construct
  source 1..80: mol_type = other DNA
gagcgcgggtgcccagtggagccatgggatgctcttcccgattccgtccatcccccacccccgagggtcgcccaggaatg

SEQ ID NO: 43633 - DNA, 80 bp, synthetic construct
  source 1..80: mol_type = other DNA
cgccgagtagggttttctcccaagaaggtgaagagaaggcaagaatcggacgacttccccatgacgctggagacgtcctg

SEQ ID NO: 43634 - DNA, 80 bp, synthetic construct
  source 1..80: mol_type = other DNA
tggaagaggaaagaggaaggcgaagaagaaaggggcgggacccccgctccgaggggtccggcgccgagtttttggagaga

SEQ ID NO: 43635 - DNA, 80 bp, synthetic construct
  source 1..80: mol_type = other DNA
ggtctccccttatgtccagcccctccccggtcctggtgaagggggactccggaattccttgcatgccgggaacgaagccg

SEQ ID NO: 43636 - DNA, 80 bp, synthetic construct
  source 1..80: mol_type = other DNA
cctggcagagggcggcagtcctcagagctcttactcttttctgtaaagaggagtctgctggactcgtcgccccagcccga

SEQ ID NO: 43637 - DNA, 80 bp, synthetic construct
  source 1..80: mol_type = other DNA
acgcccgctttattcactggtgacgacaactctggggagagaagggaggatcggatgggaaaagtatatcctacgggaat

SEQ ID NO: 43638 - DNA, 80 bp, synthetic construct
  source 1..80: mol_type = other DNA
ccgcgttcccccctcacgtccagtccgtccccggtccgagtgaaggtggattccgggacaccttgcatgttggggacgaa

SEQ ID NO: 43639 - DNA, 80 bp, synthetic construct
  source 1..80: mol_type = other DNA
gccgcccccgggcgctcccctcgatccaccttcgagggggttcacacccccaacctgcgggccggctactcttcttttcc

SEQ ID NO: 43640 - DNA, 80 bp, synthetic construct
  source 1..80: mol_type = other DNA
agtctacttccatctgatctgttcgggccctcttcgccgggggagccccccctccgcttccatccttctttccgattatt

SEQ ID NO: 43641 - DNA, 80 bp, synthetic construct
  source 1..80: mol_type = other DNA
cctttgatgtttcccagccagggattgtcgtcctcgagtttcttgagcttcttcctgatcttccggagatccctctcgag

SEQ ID NO: 43642 - DNA, 80 bp, synthetic construct
  source 1..80: mol_type = other DNA
ctcttgtctttttcttccagtgacccactgctcgaggatctcctctcttccccctcggttcttcttcgattcggaccggc

SEQ ID NO: 43643 - DNA, 80 bp, synthetic construct
  source 1..80: mol_type = other DNA
aacctcggggggattcttcctaagaagaaccaggagaaatcctcaagaagaggactgtccccaagacgctgaggaagctc

SEQ ID NO: 43644 - DNA, 80 bp, synthetic construct
  source 1..80: mol_type = other DNA
gggattcttcctaagaagaaccaggagaaatcctcaagaagaggactgtccccaagacgctgaggaagctcttggaaggg

SEQ ID NO: 43645 - DNA, 80 bp, synthetic construct
  source 1..80: mol_type = other DNA
ttggaaggggaaagaggagagcggaagaaaaagggacgggcctcccgatccgaggggcccgacgccagaattcggaaggc

SEQ ID NO: 43646 - DNA, 80 bp, synthetic construct
  source 1..80: mol_type = other DNA
actccgggccgaagggttgagtagcacacagagggagaaaatcacacggagatgaacagaaaaatcacctccagaggacc

SEQ ID NO: 43647 - DNA, 80 bp, synthetic construct
  source 1..80: mol_type = other DNA
aaatcacacggagatgaacagaaaaatcacctccagaggaccccttcagcgaacggaagacgctcccggcggaggagagg

SEQ ID NO: 43648 - DNA, 80 bp, synthetic construct
  source 1..80: mol_type = other DNA
ccttcagcgaacggaagacgctcccggcggaggagaggggtccatagcgatgggaggagatgctaggagtgggagcgacc

SEQ ID NO: 43649 - DNA, 80 bp, synthetic construct
  source 1..80: mol_type = other DNA
aaagcgagggagaaaagtaaagaaagcaacggggctagcaggtgggtgttccgcctcccgagaggggacgagtgaggctt

SEQ ID NO: 43650 - DNA, 80 bp, synthetic construct
  source 1..80: mol_type = other DNA
atcccggggaactcggcgaatcgtccccacatagcagctcccgggcccccttccaatgtggccggtgtggcacttggagc

SEQ ID NO: 43651 - DNA, 80 bp, synthetic construct
  source 1..80: mol_type = other DNA
gcggtgtggaccgccgggtccgtgggatgcttttcccgattccgcctaccccttccccccgagaggtccccccaggaatg

SEQ ID NO: 43652 - DNA, 80 bp, synthetic construct
  source 1..80: mol_type = other DNA
cccttccccccgagaggtccccccaggaatggcgggaccccactctgcagggtccgcgtaccatcctttcttacctgatg

SEQ ID NO: 43653 - DNA, 80 bp, synthetic construct
  source 1..80: mol_type = other DNA
gcgggaccccactctgcagggtccgcgtaccatcctttcttacctgatggccggcatggtcccagcctccccgctggcgc

SEQ ID NO: 43654 - DNA, 80 bp, synthetic construct
  source 1..80: mol_type = other DNA
gatgggccacagttccgatcgaagggtccgccgggtgaggtcggaaagcccgagagggagtctcctggtaagagacgagg

SEQ ID NO: 43655 - DNA, 80 bp, synthetic construct
  source 1..80: mol_type = other DNA
ctagattccgatagagaatcgagagaaaactggctctcccttagccatccgagtggacgttgtcctccttcggatgccca

SEQ ID NO: 43656 - DNA, 80 bp, synthetic construct
  source 1..80: mol_type = other DNA
gtgggccacagctccgaacgaggggtccgacggaggaagaggccaccccgagaggggttacctggtaaagagacgaggaa

SEQ ID NO: 43657 - DNA, 80 bp, synthetic construct
  source 1..80: mol_type = other DNA
ctcctctagttcttttcttccagatacccactgctcgaggatgtcctcccttccccctcggttcttcctcgattcgggcc

SEQ ID NO: 43658 - DNA, 80 bp, synthetic construct
  source 1..80: mol_type = other DNA
ggaaggggaaagaggatggcgaagaaaagaggtgcgggtcccccgatccgaggggcccggcgccgaggctttggagagaa

SEQ ID NO: 43659 - DNA, 80 bp, synthetic construct
  source 1..80: mol_type = other DNA
agttgggaagaactgtcctaagaaggtccaagagagaattcaagaagaggagacttccccataacgctgtggaagctctc

SEQ ID NO: 43660 - DNA, 80 bp, synthetic construct
  source 1..80: mol_type = other DNA
gcgctcccctcggacttcctccggggaggttcacaaccccaacccgcgggccggctactcttcttttcctttcctcgtct

SEQ ID NO: 43661 - DNA, 80 bp, synthetic construct
  source 1..80: mol_type = other DNA
cttccgcctttcttcttgttgtgatccatctctcgagggtttcctcccttgttccccttcgactcctcctcgactcggat

SEQ ID NO: 43662 - DNA, 80 bp, synthetic construct
  source 1..80: mol_type = other DNA
cctttgatgtttcccagccagggatgttcttcctctagcttcttgactttcttcttcatcttccggagttccttctcgag

SEQ ID NO: 43663 - DNA, 80 bp, synthetic construct
  source 1..80: mol_type = other DNA
ttatcccggggaactcgacttatcgtccccacatagcagagcccgggacccccttccaaagtgaccggaggtggtcgctt

SEQ ID NO: 43664 - DNA, 80 bp, synthetic construct
  source 1..80: mol_type = other DNA
cgtcggaaggaatcatcccaagaagagagaagaggtggcaagaagtggacgaaatccccacgacgcaggagacaccttgg

SEQ ID NO: 43665 - DNA, 80 bp, synthetic construct
  source 1..80: mol_type = other DNA
atgggccatgaaccgacgaagagtccgaaggtaggagaaggaggggcccccaaagggattcgaagccaaagagtggagac

SEQ ID NO: 43666 - DNA, 80 bp, synthetic construct
  source 1..80: mol_type = other DNA
ccggtctccccgaatgtccagtccatccccggttctggtgaatggagactccggaatacccagcatcctagggacaaatc

SEQ ID NO: 43667 - DNA, 80 bp, synthetic construct
  source 1..80: mol_type = other DNA
cgcccccgggcgctcccctcggacttcctccaggagggttcacacccccatcccgcgggccggctactcttctttccctt

SEQ ID NO: 43668 - DNA, 80 bp, synthetic construct
  source 1..80: mol_type = other DNA
ctccagatcttttcttgcttcgacccattttgagagggtctcctcccgtcctccccttcggtttctcttcgaatcgggct

SEQ ID NO: 43669 - DNA, 80 bp, synthetic construct
  source 1..80: mol_type = other DNA
ggctcatctcggcgagggcggcgatcctcagtgctcttgctctttacgatagaaagaggagactgctggatgccccgccc

SEQ ID NO: 43670 - DNA, 80 bp, synthetic construct
  source 1..80: mol_type = other DNA
ccttcagcgaacagaagagtctatccccagatgagaagatcatagctgagggggagatgctaggagtaggtagagaccga

SEQ ID NO: 43671 - DNA, 80 bp, synthetic construct
  source 1..80: mol_type = other DNA
ttatcccggggaactcggaccagtcccggactgccgattccaggaatccactccgaaagtccgagggtaggacttggagc

SEQ ID NO: 43672 - DNA, 80 bp, synthetic construct
  source 1..80: mol_type = other DNA
actggggattccgggcaaacccatggtggactccgtcccctttctccacactccttcccccctgcgggccccgccataaa

SEQ ID NO: 43673 - DNA, 80 bp, synthetic construct
  source 1..80: mol_type = other DNA
acacgagaagggtggtgtcccaagagggcgaggagaggtctcgtgagagaggaaggatccccgagacgctggagactccc

SEQ ID NO: 43674 - DNA, 80 bp, synthetic construct
  source 1..80: mol_type = other DNA
tgtcccaagagggcgaggagaggtctcgtgagagaggaaggatccccgagacgctggagactcccggaataaggaaagtg

SEQ ID NO: 43675 - DNA, 80 bp, synthetic construct
  source 1..80: mol_type = other DNA
ttatcccggggatcggcgaatcgtcccgggatggggactccaggaccccttccgaagtaaagggggggcacactgagaac

SEQ ID NO: 43676 - DNA, 80 bp, synthetic construct
  source 1..80: mol_type = other DNA
ttccgaagtgacggggggggtcactgagaacacgggtggacccggtggatccgtgggattgccctctccacgctcctaac

SEQ ID NO: 43677 - DNA, 80 bp, synthetic construct
  source 1..80: mol_type = other DNA
ctcggaaagctccccccaagaagaactgggatactctcaagagggaggagatctcccgaaagctggagactcccggaatt

SEQ ID NO: 43678 - DNA, 80 bp, synthetic construct
  source 1..80: mol_type = other DNA
gtgatcttcccctgagaggtccctttccgggtccggagtctacctccatccggaccgtccgggccctcttcgccggagga

SEQ ID NO: 43679 - DNA, 80 bp, synthetic construct
  source 1..80: mol_type = other DNA
gatcttcttcttggccttccggagttctctctcgagttctcctacttttcctcttgtggtcacccactgctcgaggatgt

SEQ ID NO: 43680 - DNA, 80 bp, synthetic construct
  source 1..80: mol_type = other DNA
cctcccgtcctcctcgcttgtccttcttgtcggaccggctcatctcggcaagaggcaagcagtcctcagtgctcttactc

SEQ ID NO: 43681 - DNA, 80 bp, synthetic construct
  source 1..80: mol_type = other DNA
gaggtggatctcccgagcggggttgcccactaaagagagggagatactctgaggagggatttctcccaagaagttccaag

SEQ ID NO: 43682 - DNA, 80 bp, synthetic construct
  source 1..80: mol_type = other DNA
agaatctcaggaacgaggagagtccccatgacgctgggaagtctaggaatgggaaagaggagggcggaagagtggagcgg

SEQ ID NO: 43683 - DNA, 80 bp, synthetic construct
  source 1..80: mol_type = other DNA
cctcccgatccgaatggcccgactgccgagttttggaagcactccgggccgtacggtcgggaaccctccagagggaagaa

SEQ ID NO: 43684 - DNA, 80 bp, synthetic construct
  source 1..80: mol_type = other DNA
gccactcggagtagaacagagaaatcacctccagaggaccccttcagcgaacagaaggctctctcacgctgtaggagtaa

SEQ ID NO: 43685 - DNA, 80 bp, synthetic construct
  source 1..80: mol_type = other DNA
gaccatagcgcgggaagagatgctaggagttggtggagaccagagcgaggagaaaagtaaagaaagcaacggggctagcc

SEQ ID NO: 43686 - DNA, 80 bp, synthetic construct
  source 1..80: mol_type = other DNA
gccccttccccgtccctatccttctttccgattattcctttgatgtttcccagccagggattttcttcctcgagcttcct

SEQ ID NO: 43687 - DNA, 80 bp, synthetic construct
  source 1..80: mol_type = other DNA
tcagcgaccgagaggggatgaacgacaaggtgcggggatttcggagatatgcactcccaagaaggaaagagaggaatcag

SEQ ID NO: 43688 - DNA, 80 bp, synthetic construct
  source 1..80: mol_type = other DNA
gaaccggaattcctcccgaagacgctggaggcatctcggaatgggaaagagggaaggtggaaaagaaggtgcgggccccc

SEQ ID NO: 43689 - DNA, 80 bp, synthetic construct
  source 1..80: mol_type = other DNA
cgatccgaggggcccaactgccgagtttggagggcactccgggccgcagggttgagcgtctcccagagggaggaagccac

SEQ ID NO: 43690 - DNA, 80 bp, synthetic construct
  source 1..80: mol_type = other DNA
ctctccatccttatccttctttccaaggattcctttgatgtttcccagccagggatgtgaatcctctaatttcctgattt

SEQ ID NO: 43691 - DNA, 80 bp, synthetic construct
  source 1..80: mol_type = other DNA
gatcccccctcgtgtccagaccctccccgagtctagcgaaggtggactccgggatgccttgcatgctggggacgaagccg

SEQ ID NO: 43692 - DNA, 80 bp, synthetic construct
  source 1..80: mol_type = other DNA
tcatcctggcagagggcggcagtcctcagagctcttactctttcttgtgaagaggagtctgctggacctgccgccccagc

SEQ ID NO: 43693 - DNA, 80 bp, synthetic construct
  source 1..80: mol_type = other DNA
ccgggatgggccacagttccgagcgaagagtccgacggtggaggaagtcctccccgggagaggatccctggtaagaggcg

SEQ ID NO: 43694 - DNA, 80 bp, synthetic construct
  source 1..80: mol_type = other DNA
ttccaaaggaccgagggaggagcttggagcgcgggagggaccgtcgggtccgtgggatgctcttcccgattccgttctcc

SEQ ID NO: 43695 - DNA, 80 bp, synthetic construct
  source 1..80: mol_type = other DNA
gagcgcggtggtgaccgtcgggtccgtgggatgctcttcccgattccgtcctccctcccccccgaggggtccccccagga

SEQ ID NO: 43696 - DNA, 80 bp, synthetic construct
  source 1..80: mol_type = other DNA
cttaagttcctcttcctcttccttgctgaggctcttccctcctccggtgagctgtttccttttgttctcgagggccttcc

SEQ ID NO: 43697 - DNA, 80 bp, synthetic construct
  source 1..80: mol_type = other DNA
aggaaagtcgagaaaaattgtcccaagaaggtccaagagaaagtttaagaaagaggacctttccccacaacgctgtggaa

SEQ ID NO: 43698 - DNA, 80 bp, synthetic construct
  source 1..80: mol_type = other DNA
aatgtcgggaactccactcttcggagtccgcgttccattctttcttacctgatggccggcatggtcccagcctcctcgct

SEQ ID NO: 43699 - DNA, 80 bp, synthetic construct
  source 1..80: mol_type = other DNA
cagccagggattgtcctcctctagtttcttgattttcttcttttccttccggagctctttctcgagatcctcggcttttc

SEQ ID NO: 43700 - DNA, 80 bp, synthetic construct
  source 1..80: mol_type = other DNA
tccttgagttcacccacttctcgaggacctcttccctccctccgcggagtttcttcgtctcggaccggctcatctcggca

SEQ ID NO: 43701 - DNA, 80 bp, synthetic construct
  source 1..80: mol_type = other DNA
gagatgtacttccaagaaggtaagagagggttcaagaaccggaggctctcccgaaaacgctggaggcgtctcggaatggg

SEQ ID NO: 43702 - DNA, 80 bp, synthetic construct
  source 1..80: mol_type = other DNA
aaagagggaaggtggaaaagaaggtgcgggcctcccgatccgaggggcccaactgccggatctggagagcacatcgggcc

SEQ ID NO: 43703 - DNA, 80 bp, synthetic construct
  source 1..80: mol_type = other DNA
tagagcacgggaggcgccgctggagccatgggatgcttttcccgattccgtccatcccccccccaggagggtcgcccagg

SEQ ID NO: 43704 - DNA, 80 bp, synthetic construct
  source 1..80: mol_type = other DNA
catctctggtcaactttccaagttcctcttcttcctccgggctgaggctcttccctcctccggagagctgcttcttcttg

SEQ ID NO: 43705 - DNA, 80 bp, synthetic construct
  source 1..80: mol_type = other DNA
ccctgtgaggcctcttcccaggtccggagtctatctccattctgtccgttcgggccctcttcgccggaggagccccctcc

SEQ ID NO: 43706 - DNA, 80 bp, synthetic construct
  source 1..80: mol_type = other DNA
cttggccttccggagatctctctccagctcctctaccctttttcttccagtcacccactgctcgaggatgtcctcccttc

SEQ ID NO: 43707 - DNA, 80 bp, synthetic construct
  source 1..80: mol_type = other DNA
cccctcggatcttcttcgtctcgggccggctcatcttggcagagggcggcagtcctcagtgctcttactctttcctataa

SEQ ID NO: 43708 - DNA, 80 bp, synthetic construct
  source 1..80: mol_type = other DNA
agaggagactgctggactcgccgccccagcccgagatgagccacagctccgagcgaagggtccgacgggagaggaggccc

SEQ ID NO: 43709 - DNA, 80 bp, synthetic construct
  source 1..80: mol_type = other DNA
tcccgagaggggtcacctggtaagaggcgaggaaatctggggaagattctcccaagaagaaccaagagaggattcaagat

SEQ ID NO: 43710 - DNA, 80 bp, synthetic construct
  source 1..80: mol_type = other DNA
tgaggacttttccccaagacgctgaggaaactcttggaaggggaaagaggaaggcgagagaaaaaggtgcgggctctccg

SEQ ID NO: 43711 - DNA, 80 bp, synthetic construct
  source 1..80: mol_type = other DNA
atccgaggggcccggcgccagagtttggagagcactccggaccgaaaggtagagtagcacacagagggagaaatccactc

SEQ ID NO: 43712 - DNA, 80 bp, synthetic construct
  source 1..80: mol_type = other DNA
ggagatgagcagaaaaaccacctccagaggaccccttcagcgaacagaaggcgctcactggcggtaggagtaagaccata

SEQ ID NO: 43713 - DNA, 80 bp, synthetic construct
  source 1..80: mol_type = other DNA
gcgacgggtggagatgctaggagtagggagcgaccgaggcgagaaggaaagtaaagaaagcaacggggctagcaggtgtg

SEQ ID NO: 43714 - DNA, 80 bp, synthetic construct
  source 1..80: mol_type = other DNA
gggagatgctaggagtagggagcgaccgaggcgagaaggaaagtaaagaaagcaacggggctagcaggtgggtgttcctc

SEQ ID NO: 43715 - DNA, 80 bp, synthetic construct
  source 1..80: mol_type = other DNA
tcgctcttttccttctttccgattattcctttgatgtttcccagccagggattatcgtcctcgagtttcttgattttctt

SEQ ID NO: 43716 - DNA, 80 bp, synthetic construct
  source 1..80: mol_type = other DNA
ttccaaaggaccgagggaggagcttggagcgcgggggggaccatcggaaccgtgggatgctcctctcgattccgtccatc

SEQ ID NO: 43717 - DNA, 80 bp, synthetic construct
  source 1..80: mol_type = other DNA
ctcttcctaggtccggagtctacctccatctggtccgttcgggccctcttcgccgggggagccccctctccatccttatc

SEQ ID NO: 43718 - DNA, 80 bp, synthetic construct
  source 1..80: mol_type = other DNA
ggagctctttctcgagatcctcggctttcttccttgagttcacccacttctcgagaacctcttctctccctccgcggttt

SEQ ID NO: 43719 - DNA, 80 bp, synthetic construct
  source 1..80: mol_type = other DNA
ttcttcgtctcggaccggctcatctcgacaagaggcggcagtcctcagtactcttactcttttctgtaaagaggagactg

SEQ ID NO: 43720 - DNA, 80 bp, synthetic construct
  source 1..80: mol_type = other DNA
ctggactcgccgcccaagctcgagcatgagccaagttccgagcgaagatccgcgaggtggagagttcagcgaccgagagg

SEQ ID NO: 43721 - DNA, 80 bp, synthetic construct
  source 1..80: mol_type = other DNA
ggatgaacgacaaggttcggggatcccggaaagatgaactcccaagaaggtaagagagggttcaagaactggaagatctc

SEQ ID NO: 43722 - DNA, 80 bp, synthetic construct
  source 1..80: mol_type = other DNA
ccgaggacgttggagacatctcggaatgggaaggaaggaaggtggaaaagaaggggtgggcctcccgatccgagaggccc

SEQ ID NO: 43723 - DNA, 80 bp, synthetic construct
  source 1..80: mol_type = other DNA
aactgccaagtttggagagcactccggcccgtatggttgagtagctcccagagggaggaagccacacggagagaacagag

SEQ ID NO: 43724 - DNA, 80 bp, synthetic construct
  source 1..80: mol_type = other DNA
gctaggagttagaggagaccgaagcgaggaggaaagcaaagaaagcaacggggctagccgtcaggtgttcctccccccga

SEQ ID NO: 43725 - DNA, 80 bp, synthetic construct
  source 1..80: mol_type = other DNA
cttctttccgagaattcctttgatgttccccagccaggggttttcttcctctaacttcttgattttcttcttttccttcc

SEQ ID NO: 43726 - DNA, 80 bp, synthetic construct
  source 1..80: mol_type = other DNA
gaggggaagagtgaggcttatcccggggaactcggcgaatcgtccccacatagcagagcccggttccccttcaaaaagga

SEQ ID NO: 43727 - DNA, 80 bp, synthetic construct
  source 1..80: mol_type = other DNA
ccgggagtggagcttagagcgcgggagtggccgctggagccatgggatgctcctcccgattccgtccatccgccacccca

SEQ ID NO: 43728 - DNA, 80 bp, synthetic construct
  source 1..80: mol_type = other DNA
ggagggtcgcccaggaatgtcgggaactccactcttcggagtccgcgttccattctttcttacctgatggccggcatggt

SEQ ID NO: 43729 - DNA, 80 bp, synthetic construct
  source 1..80: mol_type = other DNA
tccgggccctcttcgccgggggagcccccccttccattttttccttctttccgattattcctttgatgtttcccagccag

SEQ ID NO: 43730 - DNA, 80 bp, synthetic construct
  source 1..80: mol_type = other DNA
gggaaagtcgggagaaactgccccaagaaggtccaagagaaaatttaagaaggaggacctttccccaaaacgctgtggag

SEQ ID NO: 43731 - DNA, 80 bp, synthetic construct
  source 1..80: mol_type = other DNA
gaccccttcagcgaacagaagacgctcacggacggtagaagtaagaccgtagcgatgggaggagattctaggagtgggtg

SEQ ID NO: 43732 - DNA, 80 bp, synthetic construct
  source 1..80: mol_type = other DNA
gaccaaagcgaggagaaaagtaaagagagcaacagggctagcaggtgggtgttcctccccccgagaggggacgagtgagg

SEQ ID NO: 43733 - DNA, 80 bp, synthetic construct
  source 1..80: mol_type = other DNA
tcttttccttccggagctctctttcgagattctcgaccttacttcttgagttcacccacttctcgaggacctcttctctc

SEQ ID NO: 43734 - DNA, 80 bp, synthetic construct
  source 1..80: mol_type = other DNA
cctccgcggtttttcttcgactcggtccggctcatctcggcaagaggcggcagtcctcagtactcttactcttttctgta

SEQ ID NO: 43735 - DNA, 80 bp, synthetic construct
  source 1..80: mol_type = other DNA
aagaggagactgctggacccgccgcccaagcccgagatgggccaaatccgagcgaagatacgcgaggtggagggatcagc

SEQ ID NO: 43736 - DNA, 80 bp, synthetic construct
  source 1..80: mol_type = other DNA
gaccgagaggggatgaacgacaagatgcgggaattccgaagagatgcactcccaagaaggtaagagaggattcaagagct

SEQ ID NO: 43737 - DNA, 80 bp, synthetic construct
  source 1..80: mol_type = other DNA
cgaggggcccgatggccaagtttggagaacacttcggcccgtatggtcgagctacccccagagggaggaatccactcgga

SEQ ID NO: 43738 - DNA, 80 bp, synthetic construct
  source 1..80: mol_type = other DNA
tccatccttatccttttttccaagaattcctttgatgtttcccagccagggattttcttcctctagcttcttgattttct

SEQ ID NO: 43739 - DNA, 80 bp, synthetic construct
  source 1..80: mol_type = other DNA
gggaactcggcgaatcgttcccacatagcagatcccggaccccctccagaaaggaccgagggtggagcttagagcgcggg

SEQ ID NO: 43740 - DNA, 80 bp, synthetic construct
  source 1..80: mol_type = other DNA
tccagaaaggaccgagggtggagcttagagcgcggggtggcccgctggagccatgggatgcttttcccgattccgtccat

SEQ ID NO: 43741 - DNA, 80 bp, synthetic construct
  source 1..80: mol_type = other DNA
catgggccaattgccgaacgaggagaacgcgagaggaaggatcagaggacgagaggggatgagacggtaaaggagattgg

SEQ ID NO: 43742 - DNA, 80 bp, synthetic construct
  source 1..80: mol_type = other DNA
gagagaaggcaagaatcggaggattctccccataacgctggagacatcctggaaggggaaagaggaaggcggaagagaag

SEQ ID NO: 43743 - DNA, 80 bp, synthetic construct
  source 1..80: mol_type = other DNA
cttcctcggtcaacctccgaagttcctcttcctcctccttgctgaggctcttccctcctccggccagctgcttcttcttg

SEQ ID NO: 43744 - DNA, 80 bp, synthetic construct
  source 1..80: mol_type = other DNA
ggaaggtgaaagaggaaggcggaagagaaggtggggacccccgatccgaggggtccgacgtccaggatctggagagcact

SEQ ID NO: 43745 - DNA, 80 bp, synthetic construct
  source 1..80: mol_type = other DNA
cttggaccgtggtggaccaatggggccatgggatgctgctcctcccgattccgtccatccccctcccagtgggtcgccca

SEQ ID NO: 43746 - DNA, 80 bp, synthetic construct
  source 1..80: mol_type = other DNA
aacgccgaggggatgactcccaagaaggcagagagaaggcaagaatcggaggattctccccataacgctggagacatcct

SEQ ID NO: 43747 - DNA, 80 bp, synthetic construct
  source 1..80: mol_type = other DNA
catgagccatagttccgagcgaggagtcgcgaggggcaggaacagctcccgagaggggataaatggtaaagagcattgga

SEQ ID NO: 43748 - DNA, 80 bp, synthetic construct
  source 1..80: mol_type = other DNA
ccggcccgaaaggatgagaagtccccagagggaggaatccacacggagaaaagcagaaaaatcacctccagaggacccct

SEQ ID NO: 43749 - DNA, 80 bp, synthetic construct
  source 1..80: mol_type = other DNA
acgtcggagaaaaccctcccaagaaggaaaaaagagaaagcaagaagcggacgatttccccataacgctggagacgtcct

SEQ ID NO: 43750 - DNA, 80 bp, synthetic construct
  source 1..80: mol_type = other DNA
aagcaggagttactccggaaacatttcccacagtctcccagtttctctttgagcttggaaagcagccaaggggtaccaag

SEQ ID NO: 43751 - DNA, 80 bp, synthetic construct
  source 1..80: mol_type = other DNA
aggtgctctgcactccacctatccaactccggatcagtgctttcagttgcaaccagtaatcatgcctgcttcaaacgctg

SEQ ID NO: 43752 - DNA, 80 bp, synthetic construct
  source 1..80: mol_type = other DNA
ctttactaaattttttatttttattctttcttcatttttattctttcttcattttacacacaaaggggctgtgcggcaac

SEQ ID NO: 43753 - DNA, 80 bp, synthetic construct
  source 1..80: mol_type = other DNA
tttttatttttattctttcttcatttttattctttcttcattttacacacaaaggggctgtgcggcaacgatatctttga

SEQ ID NO: 43754 - DNA, 80 bp, synthetic construct
  source 1..80: mol_type = other DNA
gagaaaaacacaagcaccatcaagtcctgggatgagagctacactgagctaaaggttgacattcctaaaatagagcaact

SEQ ID NO: 43755 - DNA, 80 bp, synthetic construct
  source 1..80: mol_type = other DNA
catcatggctttcaatccaccttggggcgacatcaacaagtcaggccgctctgggattgcacttgtcgcaaccggccttg

SEQ ID NO: 43756 - DNA, 80 bp, synthetic construct
  source 1..80: mol_type = other DNA
cttgggccacgttccgaacgaagagtcgcgaggcggaagggatcagcgcccgagaggggatgaacggtaaagagtggtgg

SEQ ID NO: 43757 - DNA, 80 bp, synthetic construct
  source 1..80: mol_type = other DNA
ctcgtcttcctcggtcaacctcttgagttcctcttcttcctccctgctgaggctcttccctcccgagctcagctgccgct

SEQ ID NO: 43758 - DNA, 80 bp, synthetic construct
  source 1..80: mol_type = other DNA
ttggaaggggaaagaggaaggtggaaaagaaggtgcgggcctcccgaatcgaggggtccggcgcccagaactgggagaca

SEQ ID NO: 43759 - DNA, 80 bp, synthetic construct
  source 1..80: mol_type = other DNA
ttccggcccgaagggttgagaagcacccagagggaggagtccacacggagtagaacagataaatcacctccagaggaccc

SEQ ID NO: 43760 - DNA, 80 bp, synthetic construct
  source 1..80: mol_type = other DNA
cttcagcgaacagaagagcgctgagccgtcaggagtaagaccatagcgatgggtggagatgctaggagttagaggagacc

SEQ ID NO: 43761 - DNA, 80 bp, synthetic construct
  source 1..80: mol_type = other DNA
aaccgccgaggggacacctcccaagaagaaaaaaagagaattcaagagacggacgggatccccacgacgctggagacgcc

SEQ ID NO: 43762 - DNA, 80 bp, synthetic construct
  source 1..80: mol_type = other DNA
catgagccaccatccgaacgaagattgcgcgaggggcgggatcagcgcccgagaggggtaagtggtaaagagcattggaa

SEQ ID NO: 43763 - DNA, 80 bp, synthetic construct
  source 1..80: mol_type = other DNA
tcagcgaacaaaggagctctgaagcgcgaggagtaagagcatagcgataggtggagatgctaggagttaggggagaccga

SEQ ID NO: 43764 - DNA, 80 bp, synthetic construct
  source 1..80: mol_type = other DNA
cgtcggagaaactactcccaagaaggaaaaaagagaaagcaagaatcggacgagttccccaagacgctgggaacgtctcg

SEQ ID NO: 43765 - DNA, 80 bp, synthetic construct
  source 1..80: mol_type = other DNA
aatgggaaggaatggaaggtggaaaaagaaggcgtgggcctcccgatccgaggggcccaactgccaagtttggagagcac

SEQ ID NO: 43766 - DNA, 80 bp, synthetic construct
  source 1..80: mol_type = other DNA
ttcgggccgtatggtcgagtagcatccagagggagaaaccacacggagaaaagcagataaaccacctccaaaggacccct

SEQ ID NO: 43767 - DNA, 80 bp, synthetic construct
  source 1..80: mol_type = other DNA
ttatcccggggaactcggcaaatcgtccccacatagcagagcccagacccccttccaaaataaccgagggtggagctttg

SEQ ID NO: 43768 - DNA, 80 bp, synthetic construct
  source 1..80: mol_type = other DNA
cccttccaaaataaccgagggaggagctttgaacatggaggaccagtggatccgtgggagtatcctcccgattccgccca

SEQ ID NO: 43769 - DNA, 80 bp, synthetic construct
  source 1..80: mol_type = other DNA
aacatggaggaccagtggatccgtgggagtatcctcccgattccgcccaaacccgttcccccgcagggtcgcccaggaat

SEQ ID NO: 43770 - DNA, 80 bp, synthetic construct
  source 1..80: mol_type = other DNA
tcgagaggacacctcccaagaagaaaaagagaggattcaagaagcgggcgactttccccacaacgctggagacatcctgg

SEQ ID NO: 43771 - DNA, 80 bp, synthetic construct
  source 1..80: mol_type = other DNA
catgggccatgctccgagcgaagggacgcgcggtgaggatcagcgcccgagaggggattaaatggcaaagagcattggaa

SEQ ID NO: 43772 - DNA, 80 bp, synthetic construct
  source 1..80: mol_type = other DNA
aaggggaaagaggaaggtggaaaaagaaggtgcgggcctcccgatccgagggtcccaaccaccgagtttggaaagcactc

SEQ ID NO: 43773 - DNA, 80 bp, synthetic construct
  source 1..80: mol_type = other DNA
cgggccgaagggttgagtagtacccagaaggaggaatcctctcggagataagcagacaaaccacctccagaggacccctt

SEQ ID NO: 43774 - DNA, 80 bp, synthetic construct
  source 1..80: mol_type = other DNA
cagcgaacaaaagagcgctagcacgtgaggagtaagaccatagcgatgggaggagatgctaggagtaaggggagaccgaa

SEQ ID NO: 43775 - DNA, 80 bp, synthetic construct
  source 1..80: mol_type = other DNA
ttatctcggagaactcggcgaatcgtcaccacatagcagtttccaggacccccttccaaagggatggaggggggggttgg

SEQ ID NO: 43776 - DNA, 80 bp, synthetic construct
  source 1..80: mol_type = other DNA
aaccacagggaacccgggaagcctggagtggcccttcccaaggtccgattccaaccccttcccccaagggccgcccagga

SEQ ID NO: 43777 - DNA, 80 bp, synthetic construct
  source 1..80: mol_type = other DNA
aggggtggacccaattcactggggcccccgtcccttcctttcttacctgagggccgccatggtcccagcctcctcgcttg

SEQ ID NO: 43778 - DNA, 80 bp, synthetic construct
  source 1..80: mol_type = other DNA
cccgtcccttcctttcttacctgagggccgccatggtcccagcctcctcgctggcgccggctgggcaacattccgaaggg

SEQ ID NO: 43779 - DNA, 80 bp, synthetic construct
  source 1..80: mol_type = other DNA
cgtcggaggtagccctcccaagaaggaacaagagaaggcaagaatcggaagctctctccagggctttggagacatcctgg

SEQ ID NO: 43780 - DNA, 80 bp, synthetic construct
  source 1..80: mol_type = other DNA
ccgctttattcactggggtcgacaactctggggagaaaagggtggatcggcagggaagagtaaatcctacgggaatccgt

SEQ ID NO: 43781 - DNA, 80 bp, synthetic construct
  source 1..80: mol_type = other DNA
ctcctgtctttttcttccactgatccactgctcgagaacctcttctctccctccgcggttcttcttcgattcggaccggc

SEQ ID NO: 43782 - DNA, 80 bp, synthetic construct
  source 1..80: mol_type = other DNA
tcatctcgacgagggcgtgcggtcctcagagctcttactcttttctgtaaagaggagactgctggactcgccgcccgggt

SEQ ID NO: 43783 - DNA, 80 bp, synthetic construct
  source 1..80: mol_type = other DNA
tggaatgggagaagaggggatggaagaaaggagcgggacctccgatccgagtggcccaactaccggatttggagagcact

SEQ ID NO: 43784 - DNA, 80 bp, synthetic construct
  source 1..80: mol_type = other DNA
cccggccgaatggtcgagtagcactcagagggagaaatccacacggagaaagcagataaatcacctccagaggacccctt

SEQ ID NO: 43785 - DNA, 80 bp, synthetic construct
  source 1..80: mol_type = other DNA
ggagcgtggaggaccccggcgtccgtgggatgctcttcccgattccgtccaacccccccccagcgcgtccccccaggaat

SEQ ID NO: 43786 - DNA, 80 bp, synthetic construct
  source 1..80: mol_type = other DNA
tcgtcttcctcggtcaacctcttaagttcctcttcttcctccctgctgaggcgcttccctcccgaggcgagctgcgcctc

SEQ ID NO: 43787 - DNA, 80 bp, synthetic construct
  source 1..80: mol_type = other DNA
ttccgggccgtatggtcgagtagcactcagagggagagaaccacacggagaaagcggacaaatcacctccagaggacccc

SEQ ID NO: 43788 - DNA, 80 bp, synthetic construct
  source 1..80: mol_type = other DNA
ccgccccattcactggggtcgacaactctggggagagaagggagagtcggatgggaagagcaagtccacgggattccccg

SEQ ID NO: 43789 - DNA, 80 bp, synthetic construct
  source 1..80: mol_type = other DNA
ccggacgaagggttgaaacaacccacagtcgggtgatccaccaggagggcggaggaggactaacttccagaggacccctt

SEQ ID NO: 43790 - DNA, 80 bp, synthetic construct
  source 1..80: mol_type = other DNA
aggtcgaggcgaaggtcctcagttctctctaatctttcctttgaaaagaggagactgctggaccaaacgcccgagccggg

SEQ ID NO: 43791 - DNA, 80 bp, synthetic construct
  source 1..80: mol_type = other DNA
tctcggaaagcttctcccaagaagaaccagaacgttctcaagagggaggaattttcccgaaagctggagactcccggaat

SEQ ID NO: 43792 - DNA, 80 bp, synthetic construct
  source 1..80: mol_type = other DNA
ggaaaaaagaaaaaaaggcaagagattggtagaaaagagcgagcctcccgatacgagtttgccaggacctatcaaagatt

SEQ ID NO: 43793 - DNA, 80 bp, synthetic construct
  source 1..80: mol_type = other DNA
ctccagatctttccttgcttcgacccattttgcaagggtctcctcccgtcctccccttcgttctctcttcggatcggaac

SEQ ID NO: 43794 - DNA, 80 bp, synthetic construct
  source 1..80: mol_type = other DNA
cacgagaaagagagcgtcccaagagggcgagtggagttctcaggagggaggatgattccccgagacgctgggagactccc

SEQ ID NO: 43795 - DNA, 80 bp, synthetic construct
  source 1..80: mol_type = other DNA
tcctcggtcaacctcttaagttcctcttcctcctccttgctgaggttctttccccccgccgatagctgccttctcttgtt

SEQ ID NO: 43796 - DNA, 80 bp, synthetic construct
  source 1..80: mol_type = other DNA
tcgactagaggcgacggtcctcagtactcttactcttttctgtaaagaggagactgctggccctgtcgcccaagttcgag

SEQ ID NO: 43797 - DNA, 80 bp, synthetic construct
  source 1..80: mol_type = other DNA
cgaacattggggaccagtggagccatgggatgcccttcccgattccgcccaaactccttcccctcaagggtcgcccagga

SEQ ID NO: 43798 - DNA, 80 bp, synthetic construct
  source 1..80: mol_type = other DNA
atgagccaacttccgaacgaagggaacgcagggggaaggatcagcgcccgagaggggtaaacggtaaagaggcagagaaa

SEQ ID NO: 43799 - DNA, 80 bp, synthetic construct
  source 1..80: mol_type = other DNA
cttctcggcttcccttcttccgttcacccactgctcgagaacctcttctcttcctccgcgactcttcttcgattcggatc

SEQ ID NO: 43800 - DNA, 80 bp, synthetic construct
  source 1..80: mol_type = other DNA
aaggtgaaaggaagctagatggaaagagaagggggggccccccgatccgaaaggcccaaccaccaagtttggaggacact

SEQ ID NO: 43801 - DNA, 80 bp, synthetic construct
  source 1..80: mol_type = other DNA
aaaggcccaaccaccaagtttggaggacactcctggcccaagggttgagtagcatccagagggagaaaccacacggagta

SEQ ID NO: 43802 - DNA, 80 bp, synthetic construct
  source 1..80: mol_type = other DNA
cagcgaacaaaagagactttccggaataggagtaagaccatagcgatggggggagatgctaggagttagaggagaccgaa

SEQ ID NO: 43803 - DNA, 80 bp, synthetic construct
  source 1..80: mol_type = other DNA
ataggagtaagaccatagcgatggggggagatgctaggagttagaggagaccgaagcgaggaggaaagcaaagaaagcaa

SEQ ID NO: 43804 - DNA, 80 bp, synthetic construct
  source 1..80: mol_type = other DNA
cgtcgatggcacactcccaagaagaaaagagatgattcaagaggtgggcgactctccccataacgctggagacatctcgg

SEQ ID NO: 43805 - DNA, 80 bp, synthetic construct
  source 1..80: mol_type = other DNA
atgagccacagttccgagcgaagagtccgatgggggaaggggagagcccgaaggcggagtcttggtaaagaggcgaggaa

SEQ ID NO: 43806 - DNA, 80 bp, synthetic construct
  source 1..80: mol_type = other DNA
gggttcccgtggtgtccagtccctccccgtgtcgagtgaaggtggactccgggactccctgcatgctggggacgaagccg

SEQ ID NO: 43807 - DNA, 80 bp, synthetic construct
  source 1..80: mol_type = other DNA
cccccgggcgctcccctcgatgcgccttcgaggaggttcacacccccaaccggcgggccggctactcttctttcccttct

SEQ ID NO: 43808 - DNA, 80 bp, synthetic construct
  source 1..80: mol_type = other DNA
agtctacctccattcggtcggttcgggccttcttcgccggaggggctccttctccgtccttatccttctttccgagaatt

SEQ ID NO: 43809 - DNA, 80 bp, synthetic construct
  source 1..80: mol_type = other DNA
ctctaacctttttcttccagagacccactgttcgaggacctcctcccttccctctcggttcttcttcttctcggtccggc

SEQ ID NO: 43810 - DNA, 80 bp, synthetic construct
  source 1..80: mol_type = other DNA
tcatctcgacaaagggcggcagtcctcagtactcttactcttttctgtaaagaggagactgctggactcgtcgcccaagt

SEQ ID NO: 43811 - DNA, 80 bp, synthetic construct
  source 1..80: mol_type = other DNA
aaggggaaagaggaaggcggaagaaaaggagggagccctccgaatctcgaggaggcccaaccaccggatttggagagaac

SEQ ID NO: 43812 - DNA, 80 bp, synthetic construct
  source 1..80: mol_type = other DNA
tccggcccgaagggttgagtagcactcagagggaggaatcctcacggagaaaagcggaaaaatcacctccagaggacccc

SEQ ID NO: 43813 - DNA, 80 bp, synthetic construct
  source 1..80: mol_type = other DNA
ttcagcgaacagaaggatctctcactcggtaggagtaagaccatagcgatagggggagatgctaggagtaggggcgaccg

SEQ ID NO: 43814 - DNA, 80 bp, synthetic construct
  source 1..80: mol_type = other DNA
ttatcccggggaactcggcgaatcgtccccacatagcgaggtcccggacccccttccaagtgaccggaggtggtccttgg

SEQ ID NO: 43815 - DNA, 80 bp, synthetic construct
  source 1..80: mol_type = other DNA
agcgccaggggcctcgtgctctccgtgggatgctcttcccgattccgaccaacccccaccccaatgaggtcaccccagga

SEQ ID NO: 43816 - DNA, 80 bp, synthetic construct
  source 1..80: mol_type = other DNA
agtcgaagagggaatcgcccaagaaggccaagagaactccaagaggaggagacttccccatgacgctggaggcatcttgg

SEQ ID NO: 43817 - DNA, 80 bp, synthetic construct
  source 1..80: mol_type = other DNA
ggtccggagtctacttccatctggtccgctcgggccctcttcgccgggggagccccctctccatccttatccttctttcc

SEQ ID NO: 43818 - DNA, 80 bp, synthetic construct
  source 1..80: mol_type = other DNA
gagaattcctttgatgtttcccagccagggattgtcatcctcaagtttcttgattttcttcttaaccttccggagctctc

SEQ ID NO: 43819 - DNA, 80 bp, synthetic construct
  source 1..80: mol_type = other DNA
ctctaacttctttcttccgctcacccactgctcgaggatctcttctctccccccgcgatttttccttccttcggaccggc

SEQ ID NO: 43820 - DNA, 80 bp, synthetic construct
  source 1..80: mol_type = other DNA
tcatcttcgactagaggcggcggtcctcagttctcttaatctttttcgataaagaggagactgctggccctgccgcccga

SEQ ID NO: 43821 - DNA, 80 bp, synthetic construct
  source 1..80: mol_type = other DNA
tgaacaatggggaccagtggagccatgggatgctattcccgattccgcccactccttccccccagcggtcgcccaggaat

SEQ ID NO: 43822 - DNA, 80 bp, synthetic construct
  source 1..80: mol_type = other DNA
cgtcggagatgaaactcccaagaaggaaaaaagagaaagcaagaatcggatgattttccccaaaaccctggtgaagctct

SEQ ID NO: 43823 - DNA, 80 bp, synthetic construct
  source 1..80: mol_type = other DNA
atgagccaagtagccgagcgaagacccgcgaggtggaggaatcagcaaccgagaggggatgaacaacaaggtgcgaggaa

SEQ ID NO: 43824 - DNA, 80 bp, synthetic construct
  source 1..80: mol_type = other DNA
gaagtatcagaagttggaagtttccccgaggacgctggaaacttctcggaatgggaaagaaggagggagaaaaagaaggg

SEQ ID NO: 43825 - DNA, 80 bp, synthetic construct
  source 1..80: mol_type = other DNA
agtctacctccatctggtccgttcgggccctcttcgccgggggagccccctcatcccccttgtctttctttccgataatt

SEQ ID NO: 43826 - DNA, 80 bp, synthetic construct
  source 1..80: mol_type = other DNA
cctttgatgttccccagccaggggttttcttcctctatcttcctgattttcttcctctccttccggaggtctctctcgag

SEQ ID NO: 43827 - DNA, 80 bp, synthetic construct
  source 1..80: mol_type = other DNA
ctcctcagctcttttccttgcgctcacccacttctcgagaagctcttccctccctccgcgggatttcttcgaatcggacc

SEQ ID NO: 43828 - DNA, 80 bp, synthetic construct
  source 1..80: mol_type = other DNA
aatgggaaagaaggagggagaaaaagaaggtgcgggcctcccgatccgaggggcccgactgccaggattggcgtgcactc

SEQ ID NO: 43829 - DNA, 80 bp, synthetic construct
  source 1..80: mol_type = other DNA
cggcccgtaaggtggaactatccccagagggaggaaaccacacggagaaaagcagagaaatcacctccagaggacccctt

SEQ ID NO: 43830 - DNA, 80 bp, synthetic construct
  source 1..80: mol_type = other DNA
cagcgaacagaagagccttgccgagataggagtaagaccatggcgatagggggagatgctaggagttagaggagaccaaa

SEQ ID NO: 43831 - DNA, 80 bp, synthetic construct
  source 1..80: mol_type = other DNA
cggggaactcgacgaatcgtccccacatagcagaagccggaccccctccaaaaaggaccgggagcggagcttggagcgcg

SEQ ID NO: 43832 - DNA, 80 bp, synthetic construct
  source 1..80: mol_type = other DNA
cctcggagagattactcccaagaaggtaggagaagtatcagaagttggaagtttccccgaggacgctggaaacttctcgg

SEQ ID NO: 43833 - DNA, 80 bp, synthetic construct
  source 1..80: mol_type = other DNA
cttggggcaaagaggcagtggacaacttccacttaggggacgatatggaccctgaattgaggacactagcacaaagcctg

SEQ ID NO: 43834 - DNA, 80 bp, synthetic construct
  source 1..80: mol_type = other DNA
tgttgacaacacgggggcgacaaaccaccaaggataataagggaaccagaattcgctttaaagacgacagctcatttgag

SEQ ID NO: 43835 - DNA, 80 bp, synthetic construct
  source 1..80: mol_type = other DNA
tgggggaaagaagcagtggataacttccacctaggagatgatatggatcctgagctgcgaacactagcacagagcctgat

SEQ ID NO: 43836 - DNA, 80 bp, synthetic construct
  source 1..80: mol_type = other DNA
caaaggggaggcagaccaccaaggacaataaagggactcggattcgattcaaagatgatagctccttcgaggatgtcaat

SEQ ID NO: 43837 - DNA, 80 bp, synthetic construct
  source 1..80: mol_type = other DNA
tttggagagcactccggcccgaagggttgagtagcactcagagggaggaatccacacggagtagaacagagaaatcacct

SEQ ID NO: 43838 - DNA, 80 bp, synthetic construct
  source 1..80: mol_type = other DNA
agtactcttactcttttctgtaaagaggagactgctggacgcgccgcccgagttcgagcatgggccaacttccgaacgaa

SEQ ID NO: 43839 - DNA, 80 bp, synthetic construct
  source 1..80: mol_type = other DNA
ccgagttcgagcatgggccaacttccgaacgaagggtccgcgggtggagggatcaactcccgagagggagtcactggcaa

SEQ ID NO: 43840 - DNA, 80 bp, synthetic construct
  source 1..80: mol_type = other DNA
gaaagggggaacctcgaggagatgcctcccaagaaggcagagagaagacaagaatcggaagactctccccaagacgctgg

SEQ ID NO: 43841 - DNA, 80 bp, synthetic construct
  source 1..80: mol_type = other DNA
tggagtcatcctggaaggggaaagaggacgggtggaaaagaaggtgcgggcctcccgatccgagaggcccaaccaccaag

SEQ ID NO: 43842 - DNA, 80 bp, synthetic construct
  source 1..80: mol_type = other DNA
tgttccgcctcccgagaggggaagagtgaggcttatcccggggaactcggcgaaacgtccccacatagcagatcccagga

SEQ ID NO: 43843 - DNA, 80 bp, synthetic construct
  source 1..80: mol_type = other DNA
ttatcccggggaactcggcgaaacgtccccacatagcagatcccaggaccccctttcgaaaagaccgagggaggtggcta

SEQ ID NO: 43844 - DNA, 80 bp, synthetic construct
  source 1..80: mol_type = other DNA
tttcgaaaagaccgagggtggtggctaggaacacggtggggccagtggagccatgggatgctcttcccgattccgtccat

SEQ ID NO: 43845 - DNA, 80 bp, synthetic construct
  source 1..80: mol_type = other DNA
ggaacacggggtggccagtggagccatgggatgctcttcccgattccgtccatcccctccccccgagcgtcgcccaggaa

SEQ ID NO: 43846 - DNA, 80 bp, synthetic construct
  source 1..80: mol_type = other DNA
tccacacggagtagaacagagaaatcacctccagaggaccccttcagcgaacagaagagcactgcacggaataggagtaa

SEQ ID NO: 43847 - DNA, 80 bp, synthetic construct
  source 1..80: mol_type = other DNA
ccgctttattcactggggtcgacaactctggagtgaaaagggaggatcggatgggaagagtatatcccatgggaatccct

SEQ ID NO: 43848 - DNA, 80 bp, synthetic construct
  source 1..80: mol_type = other DNA
ccagaggaccccttcagcgaacagaagagcactgcacggaataggagtaagagcgtagcgatggggggagatgctaggag

SEQ ID NO: 43849 - DNA, 80 bp, synthetic construct
  source 1..80: mol_type = other DNA
gggttccccttgtgtccagcccctccccggtccgatggaaggtggactccgggactccttgcatgctggggacgaagccg

SEQ ID NO: 43850 - DNA, 80 bp, synthetic construct
  source 1..80: mol_type = other DNA
ctcgtcttcctcggtcaaccttttgagttcctcttcttcctccctgctgagcttcttccctcctccggctagttgcttct

SEQ ID NO: 43851 - DNA, 80 bp, synthetic construct
  source 1..80: mol_type = other DNA
cctttgatgtttcccagccagggatgctcctcctctaatttcttgattttcttcttaatcttccggaggtccttttcgag

SEQ ID NO: 43852 - DNA, 80 bp, synthetic construct
  source 1..80: mol_type = other DNA
ttcctcagctttctttcttccgttcacccactgctcgaggacatcctctcttcccccgcgattcttcttcgactcggacc

SEQ ID NO: 43853 - DNA, 80 bp, synthetic construct
  source 1..80: mol_type = other DNA
agttcgagcatgagccaattccgagcgaagggggcgcgggaggaaggaggattacccgacagggagtgacggtaaagatg

SEQ ID NO: 43854 - DNA, 80 bp, synthetic construct
  source 1..80: mol_type = other DNA
cggggaacgccgatgggaactctcccaagaagaaaagaagggaaaatcgggaagtggagggatccccacaacgctggaga

SEQ ID NO: 43855 - DNA, 80 bp, synthetic construct
  source 1..80: mol_type = other DNA
ggagacatcctggaaggggaaagaagctaggtggaaaagaaggcgtgggcctcccgatccgaggggcccgaccaccaagc

SEQ ID NO: 43856 - DNA, 80 bp, synthetic construct
  source 1..80: mol_type = other DNA
gagtgaggcttatcccggggaactcggcgaatcgtccccacatagcagctccgggagcccccttcaaaaatgaccggagg

SEQ ID NO: 43857 - DNA, 80 bp, synthetic construct
  source 1..80: mol_type = other DNA
gggagctaggagcgcggaggacccagtggagccatgggatgctcctcccgattccgtccaaccccacccccaggagggtc

SEQ ID NO: 43858 - DNA, 80 bp, synthetic construct
  source 1..80: mol_type = other DNA
gcccaggaatggcgggaccccactcaactggggtccgcgttccatcctttcttacctgatggccggcatggtcccagcct

SEQ ID NO: 43859 - DNA, 80 bp, synthetic construct
  source 1..80: mol_type = other DNA
ccagaggaccccttaagcgaacaaaggagtctcctacggaataggagtaagaccatagcgatagggggagatgctaggag

SEQ ID NO: 43860 - DNA, 80 bp, synthetic construct
  source 1..80: mol_type = other DNA
gtcgatctcccctcgttccaattcttgggaggtggcccgggactccgatgctaagggaggaccgaggcgtcacccccggt

SEQ ID NO: 43861 - DNA, 80 bp, synthetic construct
  source 1..80: mol_type = other DNA
gcgacggttcgccggcgtcacgggggctcctctatcttgttctcttcctctgttggcagcttggaggatccatccgagac

SEQ ID NO: 43862 - DNA, 80 bp, synthetic construct
  source 1..80: mol_type = other DNA
cattcgccctctttctgtctcccaactctcgggagttctccaccgctatcacttcgggctccctcgccggaagcggccca

SEQ ID NO: 43863 - DNA, 80 bp, synthetic construct
  source 1..80: mol_type = other DNA
atggaagccaagttccgaccgaagggtccgtcgggtgaggtcggactcccgagagagatcaactggtaagagacggggaa

SEQ ID NO: 43864 - DNA, 80 bp, synthetic construct
  source 1..80: mol_type = other DNA
gttcccccctcacgtccagtccctccccggtccggtggaaggtggactccgggatgccttgcatgctggggacgaagccg

SEQ ID NO: 43865 - DNA, 80 bp, synthetic construct
  source 1..80: mol_type = other DNA
ctcgagggacttccttcttcggtgatcctccctctccttgtcggtgaagtctcccctgtgaggcttcttcccaggtctgg

SEQ ID NO: 43866 - DNA, 80 bp, synthetic construct
  source 1..80: mol_type = other DNA
agtctacttccatctgatccgttcgggccctcttcgccggggggcccccctctccgtccctatccttctttccgattatt

SEQ ID NO: 43867 - DNA, 80 bp, synthetic construct
  source 1..80: mol_type = other DNA
cctctccgtccctatccttctttccgattattcctttgatgtttcccagccagggattttcgtcctcgagtttcttgagc

SEQ ID NO: 43868 - DNA, 80 bp, synthetic construct
  source 1..80: mol_type = other DNA
tcatcctggcagagggcggcagtcctcagtacccttactcttttctataaagagaggactgctggactcgccgccccagc

SEQ ID NO: 43869 - DNA, 80 bp, synthetic construct
  source 1..80: mol_type = other DNA
tggaaggtgaaagaggagagcggacaatcagggggtgggcctcccgattcgagaggcccgacgccagaaatcggaaggca

SEQ ID NO: 43870 - DNA, 80 bp, synthetic construct
  source 1..80: mol_type = other DNA
agcgcggttgggaagcgccgggtccgtgggatgctcctcccgattccgccaaccccatcccccgagaggtcccccaggaa

SEQ ID NO: 43871 - DNA, 80 bp, synthetic construct
  source 1..80: mol_type = other DNA
cctcggggggaaccttcctaagaaggtccaagagaagatttcaagaggaggactagtccccaagacgctgaggaagcctt

SEQ ID NO: 43872 - DNA, 80 bp, synthetic construct
  source 1..80: mol_type = other DNA
atgggccacagttccgaccgaagggtccgccggaggagattgggtctcccgagaggggttgcctggtaagagacgaggaa

SEQ ID NO: 43873 - DNA, 80 bp, synthetic construct
  source 1..80: mol_type = other DNA
cccccgggcgctcccctcggagctccttcgagggggttcacatccccaacccgcgggccggctattcttcttttccttgt

SEQ ID NO: 43874 - DNA, 80 bp, synthetic construct
  source 1..80: mol_type = other DNA
agtctacttccatctggtctgatcgggccttcttcgccgggggagccccctctccgtccttttccttctttccgattatt

SEQ ID NO: 43875 - DNA, 80 bp, synthetic construct
  source 1..80: mol_type = other DNA
ctcctcttgtttctttcttccagagacccactgctcgaggatgtcctctctgccccctcggtttctcttcgagtcggacc

SEQ ID NO: 43876 - DNA, 80 bp, synthetic construct
  source 1..80: mol_type = other DNA
tggaaggtgaaagaggaaggcggaaaagaaggagcgggcctcccgatccgaggggtccgacgccagagaagggaaggcac

SEQ ID NO: 43877 - DNA, 80 bp, synthetic construct
  source 1..80: mol_type = other DNA
tccgggccgaatggtcgagtagcacacagagggagaaaatcacacggagataagcagaaaacccacctccagaggacccc

SEQ ID NO: 43878 - DNA, 80 bp, synthetic construct
  source 1..80: mol_type = other DNA
ttcagcgaacagaaggcaccctcgggcggtaggagtaagcccgtagccggaggaagatgctaggagtaaggggcgaccga

SEQ ID NO: 43879 - DNA, 80 bp, synthetic construct
  source 1..80: mol_type = other DNA
aatgaccggagggtggtgactaggagcgcgggtggagtcgtcggatccgtgggatgctcctcccgattccgcccatccca

SEQ ID NO: 43880 - DNA, 80 bp, synthetic construct
  source 1..80: mol_type = other DNA
aggagcgcgggtggagtcgtcggatccgtgggatgctcctcccgattccgcccatcccaccccccgagaggtcccccagg

SEQ ID NO: 43881 - DNA, 80 bp, synthetic construct
  source 1..80: mol_type = other DNA
cctcggagggaatcttcccaagaagaatcaggagaagaatttcaagaggaggactgtccccaagacgctgaggaagctct

SEQ ID NO: 43882 - DNA, 80 bp, synthetic construct
  source 1..80: mol_type = other DNA
catgggccacagctccgagcgaagagaccccggtggaggaaggggacccgagaggcgatgggacgctaaagagcattgga

SEQ ID NO: 43883 - DNA, 80 bp, synthetic construct
  source 1..80: mol_type = other DNA
ttcctctaacttctttcttgcgcccacccactgctcgaggatttcctcccttcccccgcgattcttcttcgactcggacc

SEQ ID NO: 43884 - DNA, 80 bp, synthetic construct
  source 1..80: mol_type = other DNA
aggaaggagagaaaggagggaggaaaaaaaaggtgcgggccccccgatccgaggggcccagccaccaagtttggagaaca

SEQ ID NO: 43885 - DNA, 80 bp, synthetic construct
  source 1..80: mol_type = other DNA
ctccgggccgaatggtcgagtagcattcagagggagaaagccacacggagatgagcggagaaatcacctccagaggaccc

SEQ ID NO: 43886 - DNA, 80 bp, synthetic construct
  source 1..80: mol_type = other DNA
cttcagcgaacagagagcgcttcgtgcggtaggagtaagaccatagcgatagaaagagatgctaggagtagggagcgacc

SEQ ID NO: 43887 - DNA, 80 bp, synthetic construct
  source 1..80: mol_type = other DNA
ggacgcgggagacccagtggatccatgggatgctcttcccgattccgatacgactccctccccccaggtgccccccagga

SEQ ID NO: 43888 - DNA, 80 bp, synthetic construct
  source 1..80: mol_type = other DNA
acgccgagagaatctctcccaagaagaaccaagagatctcaagaagcggaagattttccccacaacgccggagaagctct

SEQ ID NO: 43889 - DNA, 80 bp, synthetic construct
  source 1..80: mol_type = other DNA
atgagccaattccgggcgaaggaccgcagggtggagggttcagcgaccgagaggggatgaacgacaaggtgcgaggaacc

SEQ ID NO: 43890 - DNA, 80 bp, synthetic construct
  source 1..80: mol_type = other DNA
cgcggtcccccctcgcgtccagcccttccccgtgtctgtggaaggtggactccgggactccttgcatgttggggacgaag

SEQ ID NO: 43891 - DNA, 80 bp, synthetic construct
  source 1..80: mol_type = other DNA
cctttgatgtttcctagccagggattttcatcctctagcttcttgattttcttcttttccttccggagctctctttcgag

SEQ ID NO: 43892 - DNA, 80 bp, synthetic construct
  source 1..80: mol_type = other DNA
ctcctcagctttcttccttgagctcacccacttctcgaggacctcttccctccctccgcgatgtttcttcgtctcggacc

SEQ ID NO: 43893 - DNA, 80 bp, synthetic construct
  source 1..80: mol_type = other DNA
ggcccgtatggttgagtagctcccagagggaggaatccactcggagtagaacagagaaatcacctccagaggaccccttc

SEQ ID NO: 43894 - DNA, 80 bp, synthetic construct
  source 1..80: mol_type = other DNA
gagaccgaagcgaggaggaaagtaaagaaagcaacggggctagccgtcaggtgttcctccccccgagagggaaggagtga

SEQ ID NO: 43895 - DNA, 80 bp, synthetic construct
  source 1..80: mol_type = other DNA
ggcttatcccggggaactcggcgaatcgtccccacatagcggaccccggaccccctcctaaaaggaccggaggaggcgct

SEQ ID NO: 43896 - DNA, 80 bp, synthetic construct
  source 1..80: mol_type = other DNA
tggagcgcggggagttccgctggagccgtgggatgctcctcccgattccgtccatccctcccccaggagggtcgcccagg

SEQ ID NO: 43897 - DNA, 80 bp, synthetic construct
  source 1..80: mol_type = other DNA
tcgaagagaagcactcccaagaaggcaagagagaattcaagagctgggtgatttccccatgacgctagaggcatcttgga

SEQ ID NO: 43898 - DNA, 80 bp, synthetic construct
  source 1..80: mol_type = other DNA
catgggccaagttccgagcgaagaggccgcgtgggaaggatcaccgcccgagaggggtcaacggtaaagatgcgtggaac

SEQ ID NO: 43899 - DNA, 80 bp, synthetic construct
  source 1..80: mol_type = other DNA
aaggggaaagaggaaggtggaagaaaaagggtggcggctccccagtccgagggccccgactgccaagtttggagagcacc

SEQ ID NO: 43900 - DNA, 80 bp, synthetic construct
  source 1..80: mol_type = other DNA
agtccgagggccccgactgccaagtttggagagcacctcgggccgaagggttgagaattccccagagggaggaatccaca

SEQ ID NO: 43901 - DNA, 80 bp, synthetic construct
  source 1..80: mol_type = other DNA
ctcgaaagcttttctcccaagaggggagtagaggggatcgagaggtggacgatttccccaagacgctggagacgtcctgg

SEQ ID NO: 43902 - DNA, 80 bp, synthetic construct
  source 1..80: mol_type = other DNA
tctcccctgtgaggcctcttcctaggcccggagtctacctccattttgtccgttcgggccctcttcgccggaggagcccc

SEQ ID NO: 43903 - DNA, 80 bp, synthetic construct
  source 1..80: mol_type = other DNA
ctctaccctttttcttccagagacccactgctcgaggacgtcctcccttccccctcgattcttcttcgcttcgggccggc

SEQ ID NO: 43904 - DNA, 80 bp, synthetic construct
  source 1..80: mol_type = other DNA
aggaaatctgggaaggattctcccaagaagaaccaagagaaaactcaagaaggaggacttttccccaagacgctgaggag

SEQ ID NO: 43905 - DNA, 80 bp, synthetic construct
  source 1..80: mol_type = other DNA
ctcctctagctcttttcttccagagacccactgctcgaggatgtcttctcttccccatcgactcttcttcgattcgggcc

SEQ ID NO: 43906 - DNA, 80 bp, synthetic construct
  source 1..80: mol_type = other DNA
cagccagggattatcgtcctcaagtttcttgattttcttcttgatcttccggactcttttctcgagctcctctagctctt

SEQ ID NO: 43907 - DNA, 80 bp, synthetic construct
  source 1..80: mol_type = other DNA
cctgagttcctcttcctcctccttgctgaggttctttcctcctccggagagctgtttcttcttgttctcgagggccttcc

SEQ ID NO: 43908 - DNA, 80 bp, synthetic construct
  source 1..80: mol_type = other DNA
ttcttccagaaacccactgctcgaggatgtcctctcttccccctcgaatcttcttcgattcgggccggctcatcttggca

SEQ ID NO: 43909 - DNA, 80 bp, synthetic construct
  source 1..80: mol_type = other DNA
gagggcggcggtcctcagtgctcttactctttcctataaagaggagactgctggactcgccgccccagccccagatgggc

SEQ ID NO: 43910 - DNA, 80 bp, synthetic construct
  source 1..80: mol_type = other DNA
cacagctccgaacgaagggtccgacggggaggaggccaccccgagaggggtcacctggtaaagaggcgtaggaaagtcga

SEQ ID NO: 43911 - DNA, 80 bp, synthetic construct
  source 1..80: mol_type = other DNA
gggaaagaggaaggcgaaagaaaaaggtgcggggcccccgatccgaggggtccggcgccgaattttggagagaactccgg

SEQ ID NO: 43912 - DNA, 80 bp, synthetic construct
  source 1..80: mol_type = other DNA
gccgaatggtcgagtagcacacagagggagaaagccacacggagatgagcagagaaaccacctccagaggaccccttcag

SEQ ID NO: 43913 - DNA, 80 bp, synthetic construct
  source 1..80: mol_type = other DNA
tcgtccgctcgggccttcttcgccgggggagcccccccttcgctcttttccttctttccgattattcctttgatgtttcc

SEQ ID NO: 43914 - DNA, 80 bp, synthetic construct
  source 1..80: mol_type = other DNA
gtcacccactgctcgaggatgctctcccgtcctcctcgcttgtccctcttgtcggaccggctcatctcggcaagaggcag

SEQ ID NO: 43915 - DNA, 80 bp, synthetic construct
  source 1..80: mol_type = other DNA
gcggtcctcagtgctcttactcttttctgtaaagaggagactgctggactcgctgccccagtccgaggtgagccttagta

SEQ ID NO: 43916 - DNA, 80 bp, synthetic construct
  source 1..80: mol_type = other DNA
ccgaccgaggggagcgatgggtgaggagggcctcccgagggaggttacccactaagagaggtagatacttcgagtgtgat

SEQ ID NO: 43917 - DNA, 80 bp, synthetic construct
  source 1..80: mol_type = other DNA
acccactaagagaggtagatacttcgagggtgatcactcccaagaagttccaagagaactctaggaatgaggagggtccc

SEQ ID NO: 43918 - DNA, 80 bp, synthetic construct
  source 1..80: mol_type = other DNA
cactcccaagaagttccaagagaactctaggaatgaggagggtcccccaagacgctggagaaatctaggaatgggaaaga

SEQ ID NO: 43919 - DNA, 80 bp, synthetic construct
  source 1..80: mol_type = other DNA
ggaaggcggaagagtggagcggcctcccgatccgaatggcccggccgccgaatttggaagcacttccgggccgtacggtc

SEQ ID NO: 43920 - DNA, 80 bp, synthetic construct
  source 1..80: mol_type = other DNA
gggaaccctccagagggaggaagccacacggagtagagcagacaaatcgccttccagaggatccccttcagcgaacagaa

SEQ ID NO: 43921 - DNA, 80 bp, synthetic construct
  source 1..80: mol_type = other DNA
ggctctcgcgcgcggttcaggagtaagaccatagcgtaggaagagatgctaggagttaggggagaccgaagcgaggagaa

SEQ ID NO: 43922 - DNA, 80 bp, synthetic construct
  source 1..80: mol_type = other DNA
ggtttccatcctcgagtttcctgagcctcttcttggccttccggaggtcttcctcgagttctactattcttccttttgtg

SEQ ID NO: 43923 - DNA, 80 bp, synthetic construct
  source 1..80: mol_type = other DNA
ttcttcggtggtcctccctctccttgtcggtgaagtctcccctgtgaggcctcttcctaggtccggagtctatctccatt

SEQ ID NO: 43924 - DNA, 80 bp, synthetic construct
  source 1..80: mol_type = other DNA
cagccagggattgtcttcctcgagtttcttgattttcttcttggccttccggaggtctttctccagctcctctacccttt

SEQ ID NO: 43925 - DNA, 80 bp, synthetic construct
  source 1..80: mol_type = other DNA
cacagctccgagcgaagggtccgacgggtgaggaggacctcccgaggtgggttgcctggcaaagaggagaggaatcctgg

SEQ ID NO: 43926 - DNA, 80 bp, synthetic construct
  source 1..80: mol_type = other DNA
ggttgcctggcaaagaggagaggaatcctgggaaagactctcccaagaagaaccaggagagatctcaagattgaggaact

SEQ ID NO: 43927 - DNA, 80 bp, synthetic construct
  source 1..80: mol_type = other DNA
gaaagactctcccaagaaggaccaggagagatctcaagattgaggaactttccccacaacgctgaggaaactcttggaag

SEQ ID NO: 43928 - DNA, 80 bp, synthetic construct
  source 1..80: mol_type = other DNA
gggaaagaggaaggcgagagaagaaaggtgcgggccctccgatccgaggggcccggcgccagagtttgtggagaactccg

SEQ ID NO: 43929 - DNA, 80 bp, synthetic construct
  source 1..80: mol_type = other DNA
gaccgaggcgagaaggaaagtaaagaaagcaacggggctagcgggtggatgttcctccccccgagaggagacgagtgagg

SEQ ID NO: 43930 - DNA, 80 bp, synthetic construct
  source 1..80: mol_type = other DNA
cctttgatgtttcccagccagggatttttgtcctcgagattcttgattttcttcttggccttccggagatctttctccag

SEQ ID NO: 43931 - DNA, 80 bp, synthetic construct
  source 1..80: mol_type = other DNA
ctcctctaccctttttcttccagagacccactgctcgaggatgtcctctctctcccctcggatcttcttcgactcgggcc

SEQ ID NO: 43932 - DNA, 80 bp, synthetic construct
  source 1..80: mol_type = other DNA
cttcagcgaacagaaggcgctctctggcggtaggagtaagaccatagcgatcgggggggatgctaggagtagggagcgac

SEQ ID NO: 43933 - DNA, 80 bp, synthetic construct
  source 1..80: mol_type = other DNA
taggagtaagaccatagcgatcgggggggatgctaggagtagggagcgaccgaggcgagaaggaaagtaaagaaagcaac

SEQ ID NO: 43934 - DNA, 80 bp, synthetic construct
  source 1..80: mol_type = other DNA
atcccggagaactcggcgaatcgtcaccacatagcagcttccggatccccttccaaaggaccggggggggagcttggaac

SEQ ID NO: 43935 - DNA, 80 bp, synthetic construct
  source 1..80: mol_type = other DNA
tctgggaaagattctcctaagaagaaccaagagagaactcaagattgaggagatttccccaaaacgctgaggaaactctt

SEQ ID NO: 43936 - DNA, 80 bp, synthetic construct
  source 1..80: mol_type = other DNA
ccatccgggccctcttcgtcgggggagccccccctccgtccttttccttctttccgattattcccttgatgtttcccagc

SEQ ID NO: 43937 - DNA, 80 bp, synthetic construct
  source 1..80: mol_type = other DNA
tccttggtcaacctctgaagttcctcttcctcctccttgctgaggtacttccctcctccgctgagctgtttcttcttgtt

SEQ ID NO: 43938 - DNA, 80 bp, synthetic construct
  source 1..80: mol_type = other DNA
tccagagacccactgctcgaggatgtcttctcttccccctcggattttcttcgattcgggccggctcatcgtggcagagg

SEQ ID NO: 43939 - DNA, 80 bp, synthetic construct
  source 1..80: mol_type = other DNA
gcggcagtcctcagtactcttactcttttctgtaaagaggagactgctggactcgccgccccagcccgagttgggccaca

SEQ ID NO: 43940 - DNA, 80 bp, synthetic construct
  source 1..80: mol_type = other DNA
gctccgaacgaagggtccgacggggaggaagccatcccgagaggggttaactggcaaagaggcgtggaaggtcgaggaaa

SEQ ID NO: 43941 - DNA, 80 bp, synthetic construct
  source 1..80: mol_type = other DNA
actgtcccaagaaggttcaggagaaaatttgagaaagaggacctttccccataacgctgtggaagctctcggaatgggaa

SEQ ID NO: 43942 - DNA, 80 bp, synthetic construct
  source 1..80: mol_type = other DNA
agaggaggacgggagagaaggtgcgaggcccccgctccgaggggtccggtgccgagtctttggagagagccccgggccga

SEQ ID NO: 43943 - DNA, 80 bp, synthetic construct
  source 1..80: mol_type = other DNA
tgccgagtctttggagagagccccgggccgaatggtcgagtagcacacggagggagaaaatcacacggagataagcagaa

SEQ ID NO: 43944 - DNA, 80 bp, synthetic construct
  source 1..80: mol_type = other DNA
atggtcgagtagcacacggagggagaaaatcacacggagataagcagaaaaaccacctccagaggaccccttcagcgaac

SEQ ID NO: 43945 - DNA, 80 bp, synthetic construct
  source 1..80: mol_type = other DNA
agaaagacgctctcggatggtaggaacaagaccgtagcgataggagaggatgctaaaagttaggggcgaccaaagcgagg

SEQ ID NO: 43946 - DNA, 80 bp, synthetic construct
  source 1..80: mol_type = other DNA
cagggattgtcgtcctcaagtttcttgattttcttcctgatcttccggacccttttctcgagttcctctagctcttttct

SEQ ID NO: 43947 - DNA, 80 bp, synthetic construct
  source 1..80: mol_type = other DNA
ctctccttgtcggtgaatcctcccctggagggcctcttcctaggtccggagtctacctccatctggtctgttcgggccct

SEQ ID NO: 43948 - DNA, 80 bp, synthetic construct
  source 1..80: mol_type = other DNA
cctctagtttcttgattctcttcttttccttccggagctctttctcgagttcctcagctttcttccttgagttcacccac

SEQ ID NO: 43949 - DNA, 80 bp, synthetic construct
  source 1..80: mol_type = other DNA
ttctcgaggacctcttccctccctccgcggagtctcttcgtctcggaccggctcatctcgacaagaggcggcagtcctca

SEQ ID NO: 43950 - DNA, 80 bp, synthetic construct
  source 1..80: mol_type = other DNA
gtgctcttactcttttctgtaaagaggagactgctggactcgccgcccaagttcgagcatgagccaagtgccgagcgaag

SEQ ID NO: 43951 - DNA, 80 bp, synthetic construct
  source 1..80: mol_type = other DNA
gtccgcagggtggagggttcagcgaccgagaggggttgaacgacaaggtgcgtggaacccggaaatatgcactcccaaga

SEQ ID NO: 43952 - DNA, 80 bp, synthetic construct
  source 1..80: mol_type = other DNA
ttgaacgacaaggtgcggggaacccggaaatatgcactcccaagaaggtaagagaggggttcaagaaccggaagctttcc

SEQ ID NO: 43953 - DNA, 80 bp, synthetic construct
  source 1..80: mol_type = other DNA
aggtaagagaggggttcaagaaccggaagctttcccgagaacgctggaggcatctcggaataggagggaaggaaggtgga

SEQ ID NO: 43954 - DNA, 80 bp, synthetic construct
  source 1..80: mol_type = other DNA
agaaaaggagcgggcctcccgatccgaggggcccgaccgccaagtttggagagcacttcggcccgtatggtcgagtagct

SEQ ID NO: 43955 - DNA, 80 bp, synthetic construct
  source 1..80: mol_type = other DNA
cccagagggaggaagccacacggagtagaacagagaaatcacctccagaggaccccttcagcgaacagaggagccttgcc

SEQ ID NO: 43956 - DNA, 80 bp, synthetic construct
  source 1..80: mol_type = other DNA
cttcgccgggggagccccctctccatccttatccttctttccaattattcctttgatgtttcccagccagggattgtctt

SEQ ID NO: 43957 - DNA, 80 bp, synthetic construct
  source 1..80: mol_type = other DNA
cccgagaggggaagagtgaggcttatcccggggaactcggcgaatcgtccccacatagcagaacccggtcccgctccaaa

SEQ ID NO: 43958 - DNA, 80 bp, synthetic construct
  source 1..80: mol_type = other DNA
ccacatagcagaacccggtccccctccaaaaaggaccggaggtggagcttagagcgcgggagtggccgctggagccatgg

SEQ ID NO: 43959 - DNA, 80 bp, synthetic construct
  source 1..80: mol_type = other DNA
ttcgtcggtgatcctgcctctccttgtcggtgaatcctcccctggagggcctcttcctaggtccgaggtctacctccatc

SEQ ID NO: 43960 - DNA, 80 bp, synthetic construct
  source 1..80: mol_type = other DNA
cctgtttattcactggggtcgacaactctggggtgagaagggaggatcggatgggaaaagtatatcctatggaaatccgc

SEQ ID NO: 43961 - DNA, 80 bp, synthetic construct
  source 1..80: mol_type = other DNA
gggatggactcccaagaaggtaagagaggaatcagaagctggacgatctcccgataacgctggaggcgtctcggaatggg

SEQ ID NO: 43962 - DNA, 80 bp, synthetic construct
  source 1..80: mol_type = other DNA
gccgctaggagccatgggatgctcctcccgattccgtccatccccctcccaggagggtcgcccaggaatgtcgggaactc

SEQ ID NO: 43963 - DNA, 80 bp, synthetic construct
  source 1..80: mol_type = other DNA
ggcctcttcctaggtccggagtctacctccatccggtcggtgcgggacctcttcggcggtggagccccctctccatcctt

SEQ ID NO: 43964 - DNA, 80 bp, synthetic construct
  source 1..80: mol_type = other DNA
tccggaggtccttctcgagctcatccgctttctttcttgcgtccacccactgctcgaggacctcttcccttcctccgcga

SEQ ID NO: 43965 - DNA, 80 bp, synthetic construct
  source 1..80: mol_type = other DNA
ctcttcttcgattcggaccggctcatttcgacgaagggcggcaggtcttgagttctcttactcttttctgtaaagaggag

SEQ ID NO: 43966 - DNA, 80 bp, synthetic construct
  source 1..80: mol_type = other DNA
actcctggactctccgcccgagttcgaacatgagccaaagttccgaacgaagagctcgcgggggagggttcagcgaccga

SEQ ID NO: 43967 - DNA, 80 bp, synthetic construct
  source 1..80: mol_type = other DNA
gactctccctatgacgctggagacgtcctggaaggggaaagaggaaggtggaaaagaaggtgcgggcctcccgactcgag

SEQ ID NO: 43968 - DNA, 80 bp, synthetic construct
  source 1..80: mol_type = other DNA
ggtcccggtcgccaagtttggagagcactccgggccgaatggttgagtagcatccagagggaggaagccacacggagtag

SEQ ID NO: 43969 - DNA, 80 bp, synthetic construct
  source 1..80: mol_type = other DNA
ggggagatgctgggagttagaggagaccgaagcgaggaggaaagcaaagaaagcaacggggctagccgtcaggtgttcct

SEQ ID NO: 43970 - DNA, 80 bp, synthetic construct
  source 1..80: mol_type = other DNA
atccttctttccgagaattcctttgacgtttcccagccagggattgtcctcctctagtctcttgattttctttcttacct

SEQ ID NO: 43971 - DNA, 80 bp, synthetic construct
  source 1..80: mol_type = other DNA
ccccccgagaggggaagagtgaggcttatcccggggaactcggcgaatcgtccccacatagcagagcccggaccaccttt

SEQ ID NO: 43972 - DNA, 80 bp, synthetic construct
  source 1..80: mol_type = other DNA
tccccgagagggtcgcccaggaatggcgggaccccactctttcagggtccgcgttccattctttcttacctgatggccgg

SEQ ID NO: 43973 - DNA, 80 bp, synthetic construct
  source 1..80: mol_type = other DNA
atgggccaacttccgaacgaggagccgcgcgtgggagcgtcgactcccgacggtggtcacctggtaaagaggcgaggaaa

SEQ ID NO: 43974 - DNA, 80 bp, synthetic construct
  source 1..80: mol_type = other DNA
gtcctcctcttatgtccagtccctccctggtccgagtgaaggtggactccggaactccttgcatgttggggacgaagccg

SEQ ID NO: 43975 - DNA, 80 bp, synthetic construct
  source 1..80: mol_type = other DNA
ctcaagggccttccttcttcggtgatcccgtctctcttgttcggtgaatcctcccctggaaggcctcttcccaggtccgg

SEQ ID NO: 43976 - DNA, 80 bp, synthetic construct
  source 1..80: mol_type = other DNA
ctcctctaacctttttcttccagacacccactgttcgaggatgtcttccctccccccgcggttcttcctcgattcggagc

SEQ ID NO: 43977 - DNA, 80 bp, synthetic construct
  source 1..80: mol_type = other DNA
ggctcatctcgacaagaggcggcggtcctcagtgctcttactcttttctgtaaagaggagactgctggacccgccgccca

SEQ ID NO: 43978 - DNA, 80 bp, synthetic construct
  source 1..80: mol_type = other DNA
gaagaggaagaagggggatggaaacaaaggaggagccctccgattccgaggtggccagacgtccgagtttggagagcacc

SEQ ID NO: 43979 - DNA, 80 bp, synthetic construct
  source 1..80: mol_type = other DNA
cagcgaacagaagagcctgaactcggcaggagttagaccgtagcgataggaggggatgctaggagtgggaggagaccaaa

SEQ ID NO: 43980 - DNA, 80 bp, synthetic construct
  source 1..80: mol_type = other DNA
agcagggagaggacactggggtccgtgggatgctcctcccgattccgtccaacccccttcccctgaggtccccccaggaa

SEQ ID NO: 43981 - DNA, 80 bp, synthetic construct
  source 1..80: mol_type = other DNA
tctcggtaaggtaatcccccaagagggccaagagatctcaagattcggaggactttccccataacgctggaaacatcctg

SEQ ID NO: 43982 - DNA, 80 bp, synthetic construct
  source 1..80: mol_type = other DNA
cttgcagccaaatccggacgaagagtcgcgtgggggagtgggacctcccgacggaggtcacctggtaagcggcgaggaaa

SEQ ID NO: 43983 - DNA, 80 bp, synthetic construct
  source 1..80: mol_type = other DNA
gtccgcccctgatgtccagcccatccccggtccgagcgaaggtggactccgggactccctgcatgctggggacgaagccg

SEQ ID NO: 43984 - DNA, 80 bp, synthetic construct
  source 1..80: mol_type = other DNA
gaataggaagaaaggaaggtggaacaaaggagtggcctcccgattccgaggggtcccgtcgtccggatttggagggcact

SEQ ID NO: 43985 - DNA, 80 bp, synthetic construct
  source 1..80: mol_type = other DNA
ccgggccgtatgattgggaaacccccagaggtaggagatccacacagagttggacagagaaatcacctccagaggacccc

SEQ ID NO: 43986 - DNA, 80 bp, synthetic construct
  source 1..80: mol_type = other DNA
ggatcaccggggagacatgcggtccgtgggatgcttttcccactccgtccaacccctccccccgagggtcccccagcgaa

SEQ ID NO: 43987 - DNA, 80 bp, synthetic construct
  source 1..80: mol_type = other DNA
tctcggtagggagacccccaagaagccccaagagaattcaagattcggaagactctccccataacgccaaggaaaccttg

SEQ ID NO: 43988 - DNA, 80 bp, synthetic construct
  source 1..80: mol_type = other DNA
aggtgccaaaatgccgaacgaagggaacgcgagggaaggatcatatgacgagaggggatgagctggtaaagaggtgtgga

SEQ ID NO: 43989 - DNA, 80 bp, synthetic construct
  source 1..80: mol_type = other DNA
cttcagcgaacagaggcgctcgcacgggataggagtaagaccatagcgatagggagagatgctaggagttagaggagacc

SEQ ID NO: 43990 - DNA, 80 bp, synthetic construct
  source 1..80: mol_type = other DNA
tcccggggaactcggcgaatcgtccccacatagcagttcccaggacccccttctaaaatgaccgagaggtggtgctagga

SEQ ID NO: 43991 - DNA, 80 bp, synthetic construct
  source 1..80: mol_type = other DNA
acgtcgggtggaagcactcccaagaagagcagagagaaggcaagaatcggacgatttccccatgacgctggagacatcct

SEQ ID NO: 43992 - DNA, 80 bp, synthetic construct
  source 1..80: mol_type = other DNA
gaataggagggaaggaaggtggaagaaaaggagcgggcctcccgatccgaggggcccgaccgccaagtttggagagcact

SEQ ID NO: 43993 - DNA, 80 bp, synthetic construct
  source 1..80: mol_type = other DNA
cccggaaatatgcactcccaagaaggtaagagaggggttcaagaaccggaagctttcccgagaacgctggaggcatctcg

SEQ ID NO: 43994 - DNA, 80 bp, synthetic construct
  source 1..80: mol_type = other DNA
ctcctgtttctttcttccttctacccactgctcgagaacctcttctcttcccctgcggttcttcttcgattcggaccggc

SEQ ID NO: 43995 - DNA, 80 bp, synthetic construct
  source 1..80: mol_type = other DNA
ggaggaccgtggggtccgtgggatgctcttcccgattccgtccatccccccccccagcgcgtccccccaggaatggcgtg

SEQ ID NO: 43996 - DNA, 80 bp, synthetic construct
  source 1..80: mol_type = other DNA
ctctgcctttcttcttgtggttatccacttttcgaggatgtcctcccttcctcccctccggctcttccccctctcggatt

SEQ ID NO: 43997 - DNA, 80 bp, synthetic construct
  source 1..80: mol_type = other DNA
agtcatccggcccaaagggttgagatagcccacagacgggtgccaccaggagggtcgaggagaactcacctccggaggac

SEQ ID NO: 43998 - DNA, 80 bp, synthetic construct
  source 1..80: mol_type = other DNA
attctcgggaagctcctcccaagaagaaccaggaaccctcaagggagaggagaatccccacaacgctgtgggagactcca

SEQ ID NO: 43999 - DNA, 80 bp, synthetic construct
  source 1..80: mol_type = other DNA
atgggccacttccgacgaagaggtcgaaggaggagaggggtgagcccccaaagggattcgaagctaaagagtggagacac

SEQ ID NO: 44000 - DNA, 80 bp, synthetic construct
  source 1..80: mol_type = other DNA
ctggtctccccggatgtccagaccttccccggttctggtgaatggagactccggaacacctagcatcctagggacgaacc

SEQ ID NO: 44001 - DNA, 80 bp, synthetic construct
  source 1..80: mol_type = other DNA
ggagccggagacaagacacctccagaggaccccttcagcgaacagaagagtctattcccagatgagaagatcgtagctaa

SEQ ID NO: 44002 - DNA, 80 bp, synthetic construct
  source 1..80: mol_type = other DNA
tcagcgaacagaagagtctattcccagatgagaagatcgtagctaagggtggagatgctaggagttaggggagaccgaag

SEQ ID NO: 44003 - DNA, 80 bp, synthetic construct
  source 1..80: mol_type = other DNA
ttatcccggggaactcggactagtcccggactgccggctccaggactccactccaaaaggaccgagggttggtcttggag

SEQ ID NO: 44004 - DNA, 80 bp, synthetic construct
  source 1..80: mol_type = other DNA
taccgggaattccagtgcaattccatggtagactccgtcccccttctccacactccttccccccgcgggccccgccctaa

SEQ ID NO: 44005 - DNA, 80 bp, synthetic construct
  source 1..80: mol_type = other DNA
agtggaaaaccccactctacagggtccgcgccctccccctttcttaccttgtggccggcatggtcccagcctcctcgctg

SEQ ID NO: 44006 - DNA, 80 bp, synthetic construct
  source 1..80: mol_type = other DNA
gggatcgaggggaagagttggcactcccttagccatccgagtggacgtctgtcctccttcggatgcccaggtcggaccgc

SEQ ID NO: 44007 - DNA, 80 bp, synthetic construct
  source 1..80: mol_type = other DNA
acgagaaagagagtgtcccaagagggcgaggggagttttcaagaaagaggaggaatccccgagacgccggagactcccgg

SEQ ID NO: 44008 - DNA, 80 bp, synthetic construct
  source 1..80: mol_type = other DNA
tcatcttcgatagggcggacggtcccgagagctcttatcttccttcttagaagaggagtctcctggacgcttccgctcgc

SEQ ID NO: 44009 - DNA, 80 bp, synthetic construct
  source 1..80: mol_type = other DNA
atccaccaggagaaggagcggagaacccacctccagaggaccccttcagcgaacagaaaggctcctcctctgcgggagta

SEQ ID NO: 44010 - DNA, 80 bp, synthetic construct
  source 1..80: mol_type = other DNA
ggaccccttcagcgaacagaaaggctcctcctctgcgggagtagggccgtagcgatgggtggagatgctatgagttggtg

SEQ ID NO: 44011 - DNA, 80 bp, synthetic construct
  source 1..80: mol_type = other DNA
agtggtccatgggatccgtggagtgcccgggacatccccttttccacactccttcccccctgacggggcccccccataag

SEQ ID NO: 44012 - DNA, 80 bp, synthetic construct
  source 1..80: mol_type = other DNA
atggcgagaaatccactctcgggtccatcgtccatctctttcttaccttttggccggtatggtcccagcctcctcgctgg

SEQ ID NO: 44013 - DNA, 80 bp, synthetic construct
  source 1..80: mol_type = other DNA
atgggccgcaaccgggcgaaagaggcgaagtggggagtgggagatcccgaggaggatctccaactaaagagtggaggaaa

SEQ ID NO: 44014 - DNA, 80 bp, synthetic construct
  source 1..80: mol_type = other DNA
tttcccctgatgtccagtccctcccccgtccgagcgaagggggattccggaacaccttccatccgagggacgaagccgcc

SEQ ID NO: 44015 - DNA, 80 bp, synthetic construct
  source 1..80: mol_type = other DNA
accgggcgctcccctcggacctcctccggagaggttcacatccccagtccgcgggccggctactcttcttctcctttcct

SEQ ID NO: 44016 - DNA, 80 bp, synthetic construct
  source 1..80: mol_type = other DNA
ctccgcctttcttcttgttgtgatccatttctcgaggatgtcctccctacccccccttcgattcttcttcgactcggatt

SEQ ID NO: 44017 - DNA, 80 bp, synthetic construct
  source 1..80: mol_type = other DNA
ttcattcaagaagaaggtaacggagaaaggagcgggcctcccgctccgagtggtccgcggcgtatcgagtttggagtcat

SEQ ID NO: 44018 - DNA, 80 bp, synthetic construct
  source 1..80: mol_type = other DNA
ccggacgaagggttgagatgacccacagtcgggtgatccaccaggagtgtggaggagggttcacctccagaggacccctt

SEQ ID NO: 44019 - DNA, 80 bp, synthetic construct
  source 1..80: mol_type = other DNA
ttatcccggggatcggtgaatcgtcccgggatggggtctccgagaaccccttcagaaaagacggggggggatcactagga

SEQ ID NO: 44020 - DNA, 80 bp, synthetic construct
  source 1..80: mol_type = other DNA
cttccgaagcgacgggggggggtcactaggaacacggaggaccagtggatccgtgggattaccctctccacgctcctaac

SEQ ID NO: 44021 - DNA, 80 bp, synthetic construct
  source 1..80: mol_type = other DNA
acacggaggaccagtggatccgtgggattaccctctccaccctcctaacacactccttcccccctgcggggcccccccat

SEQ ID NO: 44022 - DNA, 80 bp, synthetic construct
  source 1..80: mol_type = other DNA
tctcggaaagcttctcccaagaagaaccgggacgctctcaagaaggaggagatttcccagacgctggagactcacggaat

SEQ ID NO: 44023 - DNA, 80 bp, synthetic construct
  source 1..80: mol_type = other DNA
tcgagagaaattgccctaagaaggtccaagagaaagtccaagaaagaggacctttccccataacgctgtggaaactctcg

SEQ ID NO: 44024 - DNA, 80 bp, synthetic construct
  source 1..80: mol_type = other DNA
ttgagccaattgccgaacgaggatgacgcgaaaggaagagttcagaggacaagggggatgagatggtaaagaggcgagaa

SEQ ID NO: 44025 - DNA, 80 bp, synthetic construct
  source 1..80: mol_type = other DNA
agtctatctccatccggtctgttcgggccttcttcgccgggggagccccctctccgctcttttccttctttccgagaatt

SEQ ID NO: 44026 - DNA, 80 bp, synthetic construct
  source 1..80: mol_type = other DNA
tcatctcgacaagaggcggcgttcctcagtactctcaatcttcttcagaaagaggagactgctggattcgccgccccagt

SEQ ID NO: 44027 - DNA, 80 bp, synthetic construct
  source 1..80: mol_type = other DNA
aaggtgaaagaggaaaggcggaagagaaggtggggcctcccgatccgaggggcccaaccaccgaggtttggaggcacttc

SEQ ID NO: 44028 - DNA, 80 bp, synthetic construct
  source 1..80: mol_type = other DNA
gggcccaaccaccgaggtttggaggcacttctggccgaagggttgagtagcactcagagggaggaatccactcggagttg

SEQ ID NO: 44029 - DNA, 80 bp, synthetic construct
  source 1..80: mol_type = other DNA
tggccgaagggttgagtagcactcagagggaggaatccactcggagttgaggagaaaaatcacctccagaggaccccttc

SEQ ID NO: 44030 - DNA, 80 bp, synthetic construct
  source 1..80: mol_type = other DNA
gatcgtggggagaccagcggagccatgggatgctcttcccgattcccgtccatccctaccccccgagggtcgcccaggaa

SEQ ID NO: 44031 - DNA, 80 bp, synthetic construct
  source 1..80: mol_type = other DNA
acgccgaggggatgcctcccaagagggcaaagagaaggcaagaatcggacgacttccccatgacgccggagtcatcatgg

SEQ ID NO: 44032 - DNA, 80 bp, synthetic construct
  source 1..80: mol_type = other DNA
atgagccctagttccgggcgaggagaccgcgcggggaagagggaagacccgagagggagtaaatggtaaagagcattgga

SEQ ID NO: 44033 - DNA, 80 bp, synthetic construct
  source 1..80: mol_type = other DNA
ctcgagggccttccttcgtcggtggtccttcctctccttgtcggtgaactctcccctggagcgcgtcttcccaggtccgg

SEQ ID NO: 44034 - DNA, 80 bp, synthetic construct
  source 1..80: mol_type = other DNA
cccttgatgtttcccagccaggggtttgtgtcctcaagtttcttgatcttcttcttaaccttctggaggtctctctcgag

SEQ ID NO: 44035 - DNA, 80 bp, synthetic construct
  source 1..80: mol_type = other DNA
tggaaggtgaaagaggatggatggaagaaggaggcgggccccctgaaccgaggggcccgaccaccaagtttggagagcac

SEQ ID NO: 44036 - DNA, 80 bp, synthetic construct
  source 1..80: mol_type = other DNA
tccgggccgaagggttgacaggcgtccagagcgagaaatccacacggagaaagaagacaaaccacctccagaggacccct

SEQ ID NO: 44037 - DNA, 80 bp, synthetic construct
  source 1..80: mol_type = other DNA
acgtcggagaaaattctcccgcgaaggaaaaaagagtaaggcaagaaacggacagaacccccacgacgctggagacacct

SEQ ID NO: 44038 - DNA, 80 bp, synthetic construct
  source 1..80: mol_type = other DNA
atgggccaactgccgaacgaggagaacgcgtttggaaggatcagaggacgagaggggatgaggtggtaaagagcattgga

SEQ ID NO: 44039 - DNA, 80 bp, synthetic construct
  source 1..80: mol_type = other DNA
tcagcgaacagaagagcctagcacgggataggagtaagaccatagcgataggaagagatgctaggagtcgaagcagaccg

SEQ ID NO: 44040 - DNA, 80 bp, synthetic construct
  source 1..80: mol_type = other DNA
atgagccaagttccgaacaagggtccgcgggtggagtgatcagttcccgagaggggtaagtcggtaaagagcattggaac

SEQ ID NO: 44041 - DNA, 80 bp, synthetic construct
  source 1..80: mol_type = other DNA
ggaaggtgaaagaggtatggtggaaaaagaggaggcgggcctcccgatccgaggggcccgatggccaagtttggagtgca

SEQ ID NO: 44042 - DNA, 80 bp, synthetic construct
  source 1..80: mol_type = other DNA
gtcggagatacaactcccaagaagaaaaaaagagaaagcaagaatcggacgactttccccataacgccagtgaaactcta

SEQ ID NO: 44043 - DNA, 80 bp, synthetic construct
  source 1..80: mol_type = other DNA
cgtcggagatacaactcccaagaaggaaaaaagagaaagcaagagacggaggaatttccccacgacgccggtgaaactct

SEQ ID NO: 44044 - DNA, 80 bp, synthetic construct
  source 1..80: mol_type = other DNA
aaggggaaagaggaaggtggaaaagaaggtgcgggcctcccgatccgaggggtccgtcggctcatgccgacccgaagagg

SEQ ID NO: 44045 - DNA, 80 bp, synthetic construct
  source 1..80: mol_type = other DNA
aaagaaggacgcgaaacgcaaacctgtgagtggaaatccactcggagagaacagacaaatcacctccagaggaccccttc

SEQ ID NO: 44046 - DNA, 80 bp, synthetic construct
  source 1..80: mol_type = other DNA
agcgaacagaagggcgtgtcgagcagtaggagtaagaccatagcgataggaggagatgctaggagtgggaggagaccgaa

SEQ ID NO: 44047 - DNA, 80 bp, synthetic construct
  source 1..80: mol_type = other DNA
ggggaactcgacttatcgtccccacatagcagagccccggacccccttccaaagtgacctgggtggtcgcttggaacatg

SEQ ID NO: 44048 - DNA, 80 bp, synthetic construct
  source 1..80: mol_type = other DNA
ttccaaagtgacctggagggtcgcttggaacatgggggaccagtggagccatgggatgcccttcccgatgctcgatccga

SEQ ID NO: 44049 - DNA, 80 bp, synthetic construct
  source 1..80: mol_type = other DNA
ggggaccagtggagccatgggatgcccttcccgatgctcgatccgactccctcccccccaagcgtcgcccaggaatggcg

SEQ ID NO: 44050 - DNA, 80 bp, synthetic construct
  source 1..80: mol_type = other DNA
cgtcggagagatagctcccaagaaggaaaaagggaattcaagaagtggacgggatccccgagacgctggagaatctctgg

SEQ ID NO: 44051 - DNA, 80 bp, synthetic construct
  source 1..80: mol_type = other DNA
ggctcatcttcgactagaggcgacggacctcagtactcttactcttttctgtaaagaggagactgctggccctgtcgccc

SEQ ID NO: 44052 - DNA, 80 bp, synthetic construct
  source 1..80: mol_type = other DNA
cacgggggcgacaaactaccaaagataataagggaaccagaattcgcttcaaagacgacagctcatttgaggatgtgaat

SEQ ID NO: 44053 - DNA, 80 bp, synthetic construct
  source 1..80: mol_type = other DNA
ggaatccggaaaccaaagcatctagatgtgtccctaccaaatgcacagtcgagcatgaaagcagaagagattacacctgg

SEQ ID NO: 44054 - DNA, 80 bp, synthetic construct
  source 1..80: mol_type = other DNA
cctggagagcactcctggccgaaaggtcgagtagcatccagagggaggaaaccactcggagaagaacagaaaaatcacct

SEQ ID NO: 44055 - DNA, 80 bp, synthetic construct
  source 1..80: mol_type = other DNA
ccggagaacgccgaagaaacactcccaagaagagaggagaatcttcaggaagtggaagattttccccataacgctggaga

SEQ ID NO: 44056 - DNA, 80 bp, synthetic construct
  source 1..80: mol_type = other DNA
ttagaggaggccgaagcgaggaggaaagtaaagaaagcaacggggctagccgtcaggtgttcctccccccgagaggagac

SEQ ID NO: 44057 - DNA, 80 bp, synthetic construct
  source 1..80: mol_type = other DNA
gagacatcctggaaggggaaagaggtaaggtggaaaaagaaggcgcgggccccccgatccgaggggcccgacatccagaa

SEQ ID NO: 44058 - DNA, 80 bp, synthetic construct
  source 1..80: mol_type = other DNA
ttcctctaacttctttcttccgctcacccactgctcgagaacctcttctctctccccgcgctttttccttctttcggacc

SEQ ID NO: 44059 - DNA, 80 bp, synthetic construct
  source 1..80: mol_type = other DNA
cgtcagagatacaactcccaagaaggaaaaaagagaaggcaagaagcggatgcatttccccacaacgccgtgaaactcta

SEQ ID NO: 44060 - DNA, 80 bp, synthetic construct
  source 1..80: mol_type = other DNA
catgaggccaacttccgggcgaagagaacgcgaggggaagggatcagcgcccgaaaggggaaaatggtaaagatgcggtg

SEQ ID NO: 44061 - DNA, 80 bp, synthetic construct
  source 1..80: mol_type = other DNA
cctttgacgtttcccagccaggggttgttctcctcaagcttcttgatcttcttcttctccttccggagatccctctcgag

SEQ ID NO: 44062 - DNA, 80 bp, synthetic construct
  source 1..80: mol_type = other DNA
ctcctcgactttctttcttccatttacccactgttcgagaacctcttctcttcctccgcgattcttcttcgactcggatc

SEQ ID NO: 44063 - DNA, 80 bp, synthetic construct
  source 1..80: mol_type = other DNA
ggctcatctcgacaagaggcggcagtcctaagttctcttactcttttcttttgaaagaggagacttctggactcgccgcc

SEQ ID NO: 44064 - DNA, 80 bp, synthetic construct
  source 1..80: mol_type = other DNA
ggaaggggaaagagggaaggtggaaaagaaggtgagggctctccaatccgagaggcccaactgccaagtttggagagcac

SEQ ID NO: 44065 - DNA, 80 bp, synthetic construct
  source 1..80: mol_type = other DNA
gacaagaggcggcagtcctaagttctcttactcttttcttttgaaagaggagacttctggactcgccgcccgagttcgag

SEQ ID NO: 44066 - DNA, 80 bp, synthetic construct
  source 1..80: mol_type = other DNA
tcccggccaaagggttgagtagcacccagagggaggaatccacccggagagaacggagaaatcacctccagaggacccct

SEQ ID NO: 44067 - DNA, 80 bp, synthetic construct
  source 1..80: mol_type = other DNA
ttatcccggggaactcggcgaatccgttcccacatagcggacccccggacccccttccaaaaggaccggaggtggagcta

SEQ ID NO: 44068 - DNA, 80 bp, synthetic construct
  source 1..80: mol_type = other DNA
atggcgggaccccactcatcgaggtccgcgaaccattctttcttacctgtggccggcatggtcccagcctcctcgctggc

SEQ ID NO: 44069 - DNA, 80 bp, synthetic construct
  source 1..80: mol_type = other DNA
aacctcggaggtgagtcccccaagaagggaagaggggatcggaagtggaaggatttccccgaagacgctggagacgtctc

SEQ ID NO: 44070 - DNA, 80 bp, synthetic construct
  source 1..80: mol_type = other DNA
cagccagggatggtcttcctctaacttcttgattctcttcttttccttccggagctctctctcgagatcctcagctttct

SEQ ID NO: 44071 - DNA, 80 bp, synthetic construct
  source 1..80: mol_type = other DNA
ccaagtgccgagcgaagatccgcgtggtggagggatcagcgcccgagaggggatgaacgacaagttgcggcgatcccgga

SEQ ID NO: 44072 - DNA, 80 bp, synthetic construct
  source 1..80: mol_type = other DNA
aatatgcactcccaagaaggtaagagagggttcaagaactggaagctctcccgagaacgctggaggcatctcggaatggg

SEQ ID NO: 44073 - DNA, 80 bp, synthetic construct
  source 1..80: mol_type = other DNA
cagccagggattttcgtcctcaagtttccttattttcttcttggccttccgggctttcttctcgagctcctctagctctt

SEQ ID NO: 44074 - DNA, 80 bp, synthetic construct
  source 1..80: mol_type = other DNA
gaaaaactgccccaagaaggtccaagagaaaatctaggaaagaggacatttccccacaacgctgtggaagctcttggaat

SEQ ID NO: 44075 - DNA, 80 bp, synthetic construct
  source 1..80: mol_type = other DNA
gggaaagaggaaggcgaagaaaaaaggtgcggggcccccgatccgaggggcccggcgccgagatctggagagcacacccg

SEQ ID NO: 44076 - DNA, 80 bp, synthetic construct
  source 1..80: mol_type = other DNA
ttcgtcggtgatcctccctctctttgtcggtgaatcctcccctgctgggtctcttcctaggtccggagtctacttccatc

SEQ ID NO: 44077 - DNA, 80 bp, synthetic construct
  source 1..80: mol_type = other DNA
tctctcgtcttcttcggtcaacctcttgagttcctcttcttcctccctgctgaggctcttccctcccccggccagctgct

SEQ ID NO: 44078 - DNA, 80 bp, synthetic construct
  source 1..80: mol_type = other DNA
cagccagggattttcttcctctagcttcttgatcttcttcttttccttccggaggtccttttcgagctcctcagcttttt

SEQ ID NO: 44079 - DNA, 80 bp, synthetic construct
  source 1..80: mol_type = other DNA
cttgagttcctcttcttcctccctgctgaggctcttccctcccccggccagctgcttcttcttgttctcgagggccttcc

SEQ ID NO: 44080 - DNA, 80 bp, synthetic construct
  source 1..80: mol_type = other DNA
tccttgagttcacccacttctcgagaacctcttctcttcccccgcgcggcttcttcccctcggaccggctcatttcggca

SEQ ID NO: 44081 - DNA, 80 bp, synthetic construct
  source 1..80: mol_type = other DNA
aggggcggcagtcctcagtgctcttaatcttttctgataaagaggagactgctggactcgccgcccgagcccgaaaatga

SEQ ID NO: 44082 - DNA, 80 bp, synthetic construct
  source 1..80: mol_type = other DNA
gccaagttccgagcgaagagagcgcggtgggaaggatcagcgcccgagaggggtaaacgacaaggggcgaggaacctcgt

SEQ ID NO: 44083 - DNA, 80 bp, synthetic construct
  source 1..80: mol_type = other DNA
agagggttgagccgcacacagagggaggaagccacacagagaggaacggagaaatcacctccagaggaccccttcagcga

SEQ ID NO: 44084 - DNA, 80 bp, synthetic construct
  source 1..80: mol_type = other DNA
agagaggaacggagaaatcacctccagaggaccccttcagcgaacagaagagccttgcacgggataggagtaagaccata

SEQ ID NO: 44085 - DNA, 80 bp, synthetic construct
  source 1..80: mol_type = other DNA
acagaagagccttgcacgggataggagtaagaccatagcgatggggggagatgctaggagttagaggagaccaaagcgag

SEQ ID NO: 44086 - DNA, 80 bp, synthetic construct
  source 1..80: mol_type = other DNA
tggtccgtccgggccctcttcgctgggggagccccctctccatccttatccttctttccgagtattcctttgatgtttcc

SEQ ID NO: 44087 - DNA, 80 bp, synthetic construct
  source 1..80: mol_type = other DNA
aactcggcgaatcgttcccacatagcagagaccgggtcccccttcgaaaaaggaccggaggtggagctaggagcgcgtgg

SEQ ID NO: 44088 - DNA, 80 bp, synthetic construct
  source 1..80: mol_type = other DNA
gaggcagcggagccatgggatgctcctcccgattccgtccaacccccaccccgagagggtcgcccaggaatggcgggaac

SEQ ID NO: 44089 - DNA, 80 bp, synthetic construct
  source 1..80: mol_type = other DNA
ttcttcggtggtcctgcctctccttgtcggtgaaatcccccgcgtgggctctcttcctaggtccggagtctacttccatt

SEQ ID NO: 44090 - DNA, 80 bp, synthetic construct
  source 1..80: mol_type = other DNA
ttcttccagagacccactcctcgaggatttcttcccttccccctcgcttcttcttcgactcgggccggctcatcttggca

SEQ ID NO: 44091 - DNA, 80 bp, synthetic construct
  source 1..80: mol_type = other DNA
cacagctccgagcgaagggatcgatgggtgaggaaggcctccccgggaggggttgcctggtaaagaggcgaggaaatctg

SEQ ID NO: 44092 - DNA, 80 bp, synthetic construct
  source 1..80: mol_type = other DNA
gggccgaagggttgagaagcgcacgaagggaggaatccactcggagataagcagagaaaccacctccagaggaccccttc

SEQ ID NO: 44093 - DNA, 80 bp, synthetic construct
  source 1..80: mol_type = other DNA
agcgaacagaaggcgctctctgcggcagaagtaagaccatagcgacgggaggagatgctaggagtgggaggcgaccgagg

SEQ ID NO: 44094 - DNA, 80 bp, synthetic construct
  source 1..80: mol_type = other DNA
cgagaaggaaagtaaagaaagcaacggggctagcaggtgggtgttcctccccccgagaggggacgagtgaggcttatccc

SEQ ID NO: 44095 - DNA, 80 bp, synthetic construct
  source 1..80: mol_type = other DNA
cagccagggatagtcttcctctagtttcttgaccttcctcttttccttccggagctctttctcgagatcctcgactttct

SEQ ID NO: 44096 - DNA, 80 bp, synthetic construct
  source 1..80: mol_type = other DNA
gtatggttgagtagcccccagagggagaaaaccacacggagtagaacagaaaaatcacctccagaggaccccttcagcga

SEQ ID NO: 44097 - DNA, 80 bp, synthetic construct
  source 1..80: mol_type = other DNA
ggcttatcccggggaacccggcgaatcgtccccgcatagcaggcccggttcccctcccaaaaaggaccggaggaggagct

SEQ ID NO: 44098 - DNA, 80 bp, synthetic construct
  source 1..80: mol_type = other DNA
caagctcgagcatgagccaagttccgagcgaaggaccgcgaggtggagagatcagaaaccgagaggggatgaacgacaag

SEQ ID NO: 44099 - DNA, 80 bp, synthetic construct
  source 1..80: mol_type = other DNA
gtgcggggatcccggagaaatgcactcccaagaaggtaagagagggttcaagagctggaagtcgtcccgaaaacgctgga

SEQ ID NO: 44100 - DNA, 80 bp, synthetic construct
  source 1..80: mol_type = other DNA
ggcgtctcggaatgggaaaggaggaaggtggaaaagaaggtgcgggcctcccgatccgaggggcccaactgccaagtttg

SEQ ID NO: 44101 - DNA, 80 bp, synthetic construct
  source 1..80: mol_type = other DNA
gaaagcactccggcccgtatggttgagtagctcccagagggaggaaaccacacggagtagaacagagaaatcacctccag

SEQ ID NO: 44102 - DNA, 80 bp, synthetic construct
  source 1..80: mol_type = other DNA
aggaccccttcagcgaacaaaagagccctgccgggataggagtaagaccatagcgatggggggagatgctaggagttaga

SEQ ID NO: 44103 - DNA, 80 bp, synthetic construct
  source 1..80: mol_type = other DNA
cttggagcgcgagggaggccgctaggagccatgggatgctcctcccgattccgtccattcccccccccaagagggtcgcc

SEQ ID NO: 44104 - DNA, 80 bp, synthetic construct
  source 1..80: mol_type = other DNA
attccgtccattcccccccccaagagggtcgcccaggaatgtcgggaactccactcttcggagtccgcgtctcattcttt

SEQ ID NO: 44105 - DNA, 80 bp, synthetic construct
  source 1..80: mol_type = other DNA
ttcttcggtggtcctgcctctccctgtcggtgaattctcccctgtgaggcctcttcccagacccggagtctacctccatc

SEQ ID NO: 44106 - DNA, 80 bp, synthetic construct
  source 1..80: mol_type = other DNA
cccgagttcctcttcatcctcccggctgaggttcttccctctcccggagagctgcttcttcttgttctcgagggccttcc

SEQ ID NO: 44107 - DNA, 80 bp, synthetic construct
  source 1..80: mol_type = other DNA
ccgagataggccacagctccgagcgaagggtccgacgggggatgaagacctcccgagagggattgcctggtaaagaggcc

SEQ ID NO: 44108 - DNA, 80 bp, synthetic construct
  source 1..80: mol_type = other DNA
ggggaaatctgggaagaattctcccaagaagaaccaggagagatctcaagattgaggacttttccctaggacgctgtgga

SEQ ID NO: 44109 - DNA, 80 bp, synthetic construct
  source 1..80: mol_type = other DNA
gactcttggaaggggaaggaggaaggcgagagaaaaaggtgcgggccctccgatccgaggggcccggcgccagaacttgg

SEQ ID NO: 44110 - DNA, 80 bp, synthetic construct
  source 1..80: mol_type = other DNA
agagcacttcgggccgaaaggtcgagtagcacacagagggagaaaatcactcggagataagcagaaaaaccacctccaga

SEQ ID NO: 44111 - DNA, 80 bp, synthetic construct
  source 1..80: mol_type = other DNA
ggaccccttcagcgaacagaaggcgctctctggcggtaggagtaagaccatagcgacggggggagatgctaggagtggtg

SEQ ID NO: 44112 - DNA, 80 bp, synthetic construct
  source 1..80: mol_type = other DNA
ctgtccgttcgggccctcttcgccggaggagccccctcctcgctcttatccttccttccgattattcctttgatgtttcc

SEQ ID NO: 44113 - DNA, 80 bp, synthetic construct
  source 1..80: mol_type = other DNA
ccctgaggggtctcttcctaggtccggagtctatctccattgggtccgttcgggccctcttcgccggtggagccccctct

SEQ ID NO: 44114 - DNA, 80 bp, synthetic construct
  source 1..80: mol_type = other DNA
cgaccgagaggggatgaacaacaaggtgcggggaacccggagggatgcactcctaagaaggtaagagaggtatcaagagt

SEQ ID NO: 44115 - DNA, 80 bp, synthetic construct
  source 1..80: mol_type = other DNA
tggaggtaatcccgagaacgctggaggcgtctcggaatgggaaggaagaaaggtggaaaagaaggcgtgggcctcccgat

SEQ ID NO: 44116 - DNA, 80 bp, synthetic construct
  source 1..80: mol_type = other DNA
ccatccttgtccttctttccgattattcctttgacgtttcccagccagggattgtcctcctctaatctcttgattttctt

SEQ ID NO: 44117 - DNA, 80 bp, synthetic construct
  source 1..80: mol_type = other DNA
ttcctctaacttctttcttccgctcacccactgctcgaggacgtcctctctccctccgcggtacttcttcgactcggacc

SEQ ID NO: 44118 - DNA, 80 bp, synthetic construct
  source 1..80: mol_type = other DNA
acgtcggagggattctcccaagaaggaaaaaagagaaaacaagaggcggacgagatccctataacgctggagaatctttg

SEQ ID NO: 44119 - DNA, 80 bp, synthetic construct
  source 1..80: mol_type = other DNA
atgagccatgtgccgagtgaagagacgcgacggggaggaaggcaacccgagggtggtcatctggtaaagaggcgaggaaa

SEQ ID NO: 44120 - DNA, 80 bp, synthetic construct
  source 1..80: mol_type = other DNA
gggccaagagaattcaagaatcggaggcatttcccgttaagagctggaagtgcatcttggaatgggaaccaaggaggatg

SEQ ID NO: 44121 - DNA, 80 bp, synthetic construct
  source 1..80: mol_type = other DNA
agtctacctccatccggtccgaccgggccctcttcgccgggggaggtccttctccatccttatccttttttccgataatt

SEQ ID NO: 44122 - DNA, 80 bp, synthetic construct
  source 1..80: mol_type = other DNA
ctcctctatcctttttcttccagacacccactgctcgaggatgtcctctctccccccgcgctccttcttcttctcggacc

SEQ ID NO: 44123 - DNA, 80 bp, synthetic construct
  source 1..80: mol_type = other DNA
ggaatgggaaccaaggaggatggaaagaaaggaggaatcccccgatccgaatggcccgacgtccgaatttggagaacctc

SEQ ID NO: 44124 - DNA, 80 bp, synthetic construct
  source 1..80: mol_type = other DNA
cgggccgcacggtcggatcacccccagagggagagcatcactcggagatgaacggagaaatcacctccagaggacccctt

SEQ ID NO: 44125 - DNA, 80 bp, synthetic construct
  source 1..80: mol_type = other DNA
cagcgaacagaagagactcagcgcgtcaggagtaagaccgtagcgataggaggggatgctaggagttagaggagaccgga

SEQ ID NO: 44126 - DNA, 80 bp, synthetic construct
  source 1..80: mol_type = other DNA
agcacaggaggacaatcgggtccgtgggatgctcttcccgattccgtccgaaccccccccccgaggggtctcccagcgga

SEQ ID NO: 44127 - DNA, 80 bp, synthetic construct
  source 1..80: mol_type = other DNA
gtcgaggggggtccccccaagagggccaagagaattcaagaatcggaggcatttcccgttaagagctggaagtgcatctt

SEQ ID NO: 44128 - DNA, 80 bp, synthetic construct
  source 1..80: mol_type = other DNA
ttcctctatcctttttcttccgcctacccactgctcgaggatctcttctctccccccgcggtttttccttccttcggacc

SEQ ID NO: 44129 - DNA, 80 bp, synthetic construct
  source 1..80: mol_type = other DNA
atgggccatctccgggcgaggagtcgcggaggaagcgatcaccgcccgataggggattcaaggtaaagagcattggaacg

SEQ ID NO: 44130 - DNA, 80 bp, synthetic construct
  source 1..80: mol_type = other DNA
cccccgggcgctcccctcgatgaaccttcgaggtggttcacacctccagtcggcgggccggctactcttcttttcctctt

SEQ ID NO: 44131 - DNA, 80 bp, synthetic construct
  source 1..80: mol_type = other DNA
aataggaaaggaaggaaggtggaaaagaaaggggtgggtctcccgatccgaggggcccaaccaccaagtttggagagcac

SEQ ID NO: 44132 - DNA, 80 bp, synthetic construct
  source 1..80: mol_type = other DNA
ttcggcccgtatggtcgagtagcactcagagggaggaaatccacacggagaaaggagaaaaatcacctccagaggacccc

SEQ ID NO: 44133 - DNA, 80 bp, synthetic construct
  source 1..80: mol_type = other DNA
atgggccaattccgaacgagaggtgcgggaggaggagagagacgagtcccgagaggggaacagtggtaaagagcattgga

SEQ ID NO: 44134 - DNA, 80 bp, synthetic construct
  source 1..80: mol_type = other DNA
ctctaacttctttcttccactcacccactgctcgaggattccctctctcccctcccgcttcctcgattcggaccggctca

SEQ ID NO: 44135 - DNA, 80 bp, synthetic construct
  source 1..80: mol_type = other DNA
ggacgagtgaggcttatcccggggaactcgacttatcgtccccacatagcgagtctccggcccccttccaaaataaccga

SEQ ID NO: 44136 - DNA, 80 bp, synthetic construct
  source 1..80: mol_type = other DNA
ttatcccggagaactcgacttatcgtccccacatagcgagtctccggcccccttccaaaataaccgagggtgtggcttgg

SEQ ID NO: 44137 - DNA, 80 bp, synthetic construct
  source 1..80: mol_type = other DNA
agcatagagggccagtggatccgtggaaattggctctctcccgattccgcccaaacccaacccccccaggagtcgcccag

SEQ ID NO: 44138 - DNA, 80 bp, synthetic construct
  source 1..80: mol_type = other DNA
acgccgagaggatgtcccccaagaagagaggggaaaattcaggaaacggacgattttccccacgacgctggagacatcct

SEQ ID NO: 44139 - DNA, 80 bp, synthetic construct
  source 1..80: mol_type = other DNA
cctttgatgtttcccagctagggattttcgtccccaagtttcttgattttcttcctcgtcttccggagctccttctcgag

SEQ ID NO: 44140 - DNA, 80 bp, synthetic construct
  source 1..80: mol_type = other DNA
tcccggggaactcggcgaatcgtccccacatagcgagtccccggcccccttccaaaataaccgagggtggagcttagaac

SEQ ID NO: 44141 - DNA, 80 bp, synthetic construct
  source 1..80: mol_type = other DNA
ttccaaaataaccgagggtggagcttagaacataggggaccagtggatccgtggaaattggctctctcccgattccgccc

SEQ ID NO: 44142 - DNA, 80 bp, synthetic construct
  source 1..80: mol_type = other DNA
atgggccaaatgacgagcgaaggacgaaggtaggagcgaggggagcccctcccaaaggagttcgaagccaaggagcggag

SEQ ID NO: 44143 - DNA, 80 bp, synthetic construct
  source 1..80: mol_type = other DNA
ccgaatgtccagtccatccccgtgtctggcgaatggggactccggaacccctagcatcctagggacaaagccgcccccgg

SEQ ID NO: 44144 - DNA, 80 bp, synthetic construct
  source 1..80: mol_type = other DNA
gcgctcccctcgaacttccctcgggagggttcacatccccaggccgcgggccggctactcttctttccctctcctcgtct

SEQ ID NO: 44145 - DNA, 80 bp, synthetic construct
  source 1..80: mol_type = other DNA
ctcgagggccttccttcttcggtgatccctcctctccttgtcggtgaagcctcccgcgcgtgccttcttccccggaccgg

SEQ ID NO: 44146 - DNA, 80 bp, synthetic construct
  source 1..80: mol_type = other DNA
cttccgcatccttccttgcttcgacccattttgtcagggtctcctcccggcctccccttcggctgcgcttcgactcgctc

SEQ ID NO: 44147 - DNA, 80 bp, synthetic construct
  source 1..80: mol_type = other DNA
tggctcatctcggcgagggcggcagtcctaggtctctctactctttttgagacaagaggagacctctggaccctccgccc

SEQ ID NO: 44148 - DNA, 80 bp, synthetic construct
  source 1..80: mol_type = other DNA
tcggaacaaggaaataggagataggaaggtagaaaagagcgagtccccgaatcgagtttgccctgaacctatcaggctct

SEQ ID NO: 44149 - DNA, 80 bp, synthetic construct
  source 1..80: mol_type = other DNA
cggcgagggcggcagtcctaggtctctctactctttttgagacaagaggagacctctggaccctccgcccgagtccgaag

SEQ ID NO: 44150 - DNA, 80 bp, synthetic construct
  source 1..80: mol_type = other DNA
ggagtcctccggcttagggtcgaataggtcgcagcgggaggcagccaccaggagccggagaaaagacacctccagaggac

SEQ ID NO: 44151 - DNA, 80 bp, synthetic construct
  source 1..80: mol_type = other DNA
cccttcagcgaacagaagagtctgccccggagaaggggttccatagcgatagaaagagatgctaggagtagggagagacc

SEQ ID NO: 44152 - DNA, 80 bp, synthetic construct
  source 1..80: mol_type = other DNA
ttatcccggggaacccggccacgtcccggattaccgggtccaggcgcccattccaaaaggaccgagggaggacttggaac

SEQ ID NO: 44153 - DNA, 80 bp, synthetic construct
  source 1..80: mol_type = other DNA
atcggaggccagcagctccatggaggagtccgcctcctttctccacactccttcccccctggcggggcccccctctagga

SEQ ID NO: 44154 - DNA, 80 bp, synthetic construct
  source 1..80: mol_type = other DNA
cagagaaacccactctacagggtccacgctccaacccctttcttaccttgtggccggcatggtcccagcctcctcgctgg

SEQ ID NO: 44155 - DNA, 80 bp, synthetic construct
  source 1..80: mol_type = other DNA
gccggctgggcaacattccgaggggaccgtccctcggtaatggcagatgggacccagatctccccctcgattcccagaga

SEQ ID NO: 44156 - DNA, 80 bp, synthetic construct
  source 1..80: mol_type = other DNA
gaatcggggagtgggctggatctcccttagccatccgagtggacgtccgtcctccttcggatgcccaggtcggaccacgg

SEQ ID NO: 44157 - DNA, 80 bp, synthetic construct
  source 1..80: mol_type = other DNA
gcacacgaagaggaaggacctccaagagggcgaggggacgctcaagaggcgaggggagatccccgagacgatagagactc

SEQ ID NO: 44158 - DNA, 80 bp, synthetic construct
  source 1..80: mol_type = other DNA
aatctcaaactggccttcttgaggtcaagttggaagatagatcaggtttaattataattactccagaattagtgtgcatc

SEQ ID NO: 44159 - DNA, 80 bp, synthetic construct
  source 1..80: mol_type = other DNA
ttataataaattcaacacagatttaatgactgacaataacaatcatgcaatatatccatattaaatgaattctctatgct

SEQ ID NO: 44160 - DNA, 80 bp, synthetic construct
  source 1..80: mol_type = other DNA
ttatcccggggttcggcttccgcctcccccactggaggattccaggacccccgaaagggaaggtggtgtgccttggactc

SEQ ID NO: 44161 - DNA, 80 bp, synthetic construct
  source 1..80: mol_type = other DNA
gctcatcttcgacgagaggcggggcggtcccgagaactcttatcttcctacttagaagaggagtctcctggacgcccccc

SEQ ID NO: 44162 - DNA, 80 bp, synthetic construct
  source 1..80: mol_type = other DNA
gacgagaggcggggcggtcccgagaactcttatcttcctacttagaagaggagtctcctggacgccccccgcccgctcga

SEQ ID NO: 44163 - DNA, 80 bp, synthetic construct
  source 1..80: mol_type = other DNA
tggagcggagaacccacctccagaggaccccttcagcgaacagaagagctcctcctctgcgggagaggatccgtagcgat

SEQ ID NO: 44164 - DNA, 80 bp, synthetic construct
  source 1..80: mol_type = other DNA
accccttcagcgaacagaagagctcctcctctgcgggagaggatccgtagcgatgggtggagatgctaggagttaggtga

SEQ ID NO: 44165 - DNA, 80 bp, synthetic construct
  source 1..80: mol_type = other DNA
tagcgagtggatgttcctccccccgaaggtcccgagtgaggcttatcccggggatcggcctccgtttcccccatggaggc

SEQ ID NO: 44166 - DNA, 80 bp, synthetic construct
  source 1..80: mol_type = other DNA
ttatcccggggatcggcctccgtttcccccatggaggcctccaggacccccgaaaagaggtgtgtgggccttggaccacc

SEQ ID NO: 44167 - DNA, 80 bp, synthetic construct
  source 1..80: mol_type = other DNA
agttcggagggagatcccaagaatgtcactcgagattcaagcggtgaggtgggatccccgagacgctggcggaaccccgg

SEQ ID NO: 44168 - DNA, 80 bp, synthetic construct
  source 1..80: mol_type = other DNA
aagttcggagggaaatcccaagaagatcactcgagattcaagcggtgaggtgggacccccgagacgctggtgaacccccg

SEQ ID NO: 44169 - DNA, 80 bp, synthetic construct
  source 1..80: mol_type = other DNA
atgagccaactgccgggcgaagggagcgcgggtggaggatcagcaaccgagagggagtaaatggcaaagaggcgtggaac

SEQ ID NO: 44170 - DNA, 80 bp, synthetic construct
  source 1..80: mol_type = other DNA
ttcctcagctttctttcttccatttatccactgctcgagtgcctcttctctccctccgcggttcttcttcgactcggatc

SEQ ID NO: 44171 - DNA, 80 bp, synthetic construct
  source 1..80: mol_type = other DNA
aaggggaaagaggctggatggaagagatggagcgggcctcccgatccgaggtggcccgaccaccaagtttggaggcaccc

SEQ ID NO: 44172 - DNA, 80 bp, synthetic construct
  source 1..80: mol_type = other DNA
cgggccgaagggttgagaaaacatttcagagggagagaccacacggagtagagcagagaaatcacctccagaggacccct

SEQ ID NO: 44173 - DNA, 80 bp, synthetic construct
  source 1..80: mol_type = other DNA
tcagcgaacagaagagtctctccggggtaggagtaagaccatagcgatgggaggagatgctaggagttagggcagaccaa

SEQ ID NO: 44174 - DNA, 80 bp, synthetic construct
  source 1..80: mol_type = other DNA
aaacgaccggaggcggagctaggagcgcggtgggacccagtggagccatgggatgctgctcccgattccgcccaaaccca

SEQ ID NO: 44175 - DNA, 80 bp, synthetic construct
  source 1..80: mol_type = other DNA
gcggagggacccagtggagccatgggatgctgctcccgattccgcccaaacccacccccaggagggtcgcccaggaatgg

SEQ ID NO: 44176 - DNA, 80 bp, synthetic construct
  source 1..80: mol_type = other DNA
gccgacaggaatcctcccaagaggagggaagagtatctaagagacggaggagcatccccaaaacgctggagacgtcttgg

SEQ ID NO: 44177 - DNA, 80 bp, synthetic construct
  source 1..80: mol_type = other DNA
gacaaagggcggcggtcctcagtactcttaatctttttcgataaagaggagactgctggacctgccgcccgagttcgagc

SEQ ID NO: 44178 - DNA, 80 bp, synthetic construct
  source 1..80: mol_type = other DNA
ggacccggaggaccggtggagccatgggatgctccttccgatgctcgatccgattccctccccccaaagggtcgcccagg

SEQ ID NO: 44179 - DNA, 80 bp, synthetic construct
  source 1..80: mol_type = other DNA
gtcggcgggaacactcccaagaaggaacaagagaagacaagaaccggaaggttttccccataacgctggagaatctttgg

SEQ ID NO: 44180 - DNA, 80 bp, synthetic construct
  source 1..80: mol_type = other DNA
cttggtcccccctcgtgtccagcccctccccgcgtctagagaaggcggactccggaactccttgcatgctggggacgaag

SEQ ID NO: 44181 - DNA, 80 bp, synthetic construct
  source 1..80: mol_type = other DNA
atgggaaagagggaaggtggaagagaaggtggaggctcccgatccgaggggcccagccaccgggtttggaggacactccg

SEQ ID NO: 44182 - DNA, 80 bp, synthetic construct
  source 1..80: mol_type = other DNA
gaagagtgaggcttatcccggggaactcggcgaatcgtccccacatagcagagcccggacccccttccaaaaggaccgga

SEQ ID NO: 44183 - DNA, 80 bp, synthetic construct
  source 1..80: mol_type = other DNA
gtggaactcggcgaatcgtccccacatagcagagcccggacccccttccaaaaggaccggaggagtggcttgaagcacgg

SEQ ID NO: 44184 - DNA, 80 bp, synthetic construct
  source 1..80: mol_type = other DNA
ggtggcccaatcggagccatgggatgctcttcccgattccgtccatccctcccccaggagggtcgcccaggaatggcgtg

SEQ ID NO: 44185 - DNA, 80 bp, synthetic construct
  source 1..80: mol_type = other DNA
aactgcactcttcggagtccgcgttccattctttcttacctgatggccggcatggtcccagcctcctcgctggcgccggc

SEQ ID NO: 44186 - DNA, 80 bp, synthetic construct
  source 1..80: mol_type = other DNA
ctcgaagaggtgactcccaagaaggtaagagaggattcaggaattggaagctttcccagtgacgctggaggcatctcgga

SEQ ID NO: 44187 - DNA, 80 bp, synthetic construct
  source 1..80: mol_type = other DNA
atgggccaagttccgaacaaggattcgcggtgaggacagatcagctcccgagaggggtaggtcggtaaagagcattggaa

SEQ ID NO: 44188 - DNA, 80 bp, synthetic construct
  source 1..80: mol_type = other DNA
atggagggtgtgtcccacccagagggccccagggccaattccaatgaaagtgtgcctcttgcatcaccacaagacacaat

SEQ ID NO: 44189 - DNA, 80 bp, synthetic construct
  source 1..80: mol_type = other DNA
gcctcacatgattttgtcaatctgtccagtaactttgatgcggctggcatgtgggtttggcttccttggacaaccaccaa

SEQ ID NO: 44190 - DNA, 80 bp, synthetic construct
  source 1..80: mol_type = other DNA
caacgggagccatcagtaacaacgtccccatgtgcgtgagggagtgctttgctagtgtgaccacgcttccctggacaacg

SEQ ID NO: 44191 - DNA, 80 bp, synthetic construct
  source 1..80: mol_type = other DNA
ggtttgttggacttttcccccaaagcactagtcttcaagggcccaatgggaacgctggacgggccgtcaggttccttgaa

SEQ ID NO: 44192 - DNA, 80 bp, synthetic construct
  source 1..80: mol_type = other DNA
cgccaagcgtccaacaccttccttggcgccatccatcttggtccacgcatcaacccctatactgcacatctaagtgccat

SEQ ID NO: 44193 - DNA, 80 bp, synthetic construct
  source 1..80: mol_type = other DNA
ggagtttccagatacgggtcaccctctctggttccggcctgtacgcgggccgggcggtggttgctgtgctacccccgggt

SEQ ID NO: 44194 - DNA, 80 bp, synthetic construct
  source 1..80: mol_type = other DNA
gtcaacccagccaatgtccaaaatcctggagttttcccacatgcatttattgatgcccgtaccgtggatcccatcctcat

SEQ ID NO: 44195 - DNA, 80 bp, synthetic construct
  source 1..80: mol_type = other DNA
caacctccctgacattcgtgcggtggattaccatcgtgtggatggcgatgagcaaactgcaaccgttgggctctgggtcg

SEQ ID NO: 44196 - DNA, 80 bp, synthetic construct
  source 1..80: mol_type = other DNA
ctcaaccgctcatcaacccatttcagactggatccatctccacgtgttggctaacatttgagactagacctgggcctgat

SEQ ID NO: 44197 - DNA, 80 bp, synthetic construct
  source 1..80: mol_type = other DNA
tttgacttttgcctcctcaaggccccggagcaggaaatggacaacggcatatcacctgccaatttgctccctcgccgcct

SEQ ID NO: 44198 - DNA, 80 bp, synthetic construct
  source 1..80: mol_type = other DNA
tgggccaagcgcggcacttcttctgcctacacagattgagacacccaatggtgctgcacaaagagtggagatggccgcgg

SEQ ID NO: 44199 - DNA, 80 bp, synthetic construct
  source 1..80: mol_type = other DNA
ttgccgccaactccactacgctcggctggtccacactcccaattgagcccattgctggtgctatttcctggtaccaaaac

SEQ ID NO: 44200 - DNA, 80 bp, synthetic construct
  source 1..80: mol_type = other DNA
accacggcaggcatcagcacgcgcggtctgctcagtgctgaaggcaaaggtatcattttcccaaatattgtcaaccattg

SEQ ID NO: 44201 - DNA, 80 bp, synthetic construct
  source 1..80: mol_type = other DNA
tttggaaagcactccggcccgaagggttgagtagcttccagagggagacatccacacggagaagaacagcgacaacaccc

SEQ ID NO: 44202 - DNA, 80 bp, synthetic construct
  source 1..80: mol_type = other DNA
tcttgttctcgagggccttccttcgtcggtggtcctccctctccttgtcggtgaagtctcccctggaacgcctcttccta

SEQ ID NO: 44203 - DNA, 80 bp, synthetic construct
  source 1..80: mol_type = other DNA
tctcgagttcctctaacttctttcttccattcacccactgctcgaggatttcttctcttcccccgcggttcttcttcgac

SEQ ID NO: 44204 - DNA, 80 bp, synthetic construct
  source 1..80: mol_type = other DNA
ccgcccaagttcgagcatgggcccagttccgagcgaagggatcgcgggtggaggaaggaaaacccgagagggagtggatg

SEQ ID NO: 44205 - DNA, 80 bp, synthetic construct
  source 1..80: mol_type = other DNA
gcaaagaagcattggaacgtcggagggaattctcccaagaaggaaaaaagagaagacaagagacggacgaaacccccacg

SEQ ID NO: 44206 - DNA, 80 bp, synthetic construct
  source 1..80: mol_type = other DNA
acgctggagacaccttggaaggggaaagaggatggatggaagaaaggaggcgggcctcccgatccgaggtgcccgaccac

SEQ ID NO: 44207 - DNA, 80 bp, synthetic construct
  source 1..80: mol_type = other DNA
gagtgaggcttttcccggtgggagctccctatcgtccccacatagcagagcccgggagccccttctaaagtgaccgggtg

SEQ ID NO: 44208 - DNA, 80 bp, synthetic construct
  source 1..80: mol_type = other DNA
atagcagagcccgggagccccttctaaagtgaccggggggggtagcttggaacataggagacgcagtggagccattggat

SEQ ID NO: 44209 - DNA, 80 bp, synthetic construct
  source 1..80: mol_type = other DNA
gggtagcttggaacataggagacgcagtggagccatgggatgcccttcccgattccgtccatccccactcccagagggtc

SEQ ID NO: 44210 - DNA, 80 bp, synthetic construct
  source 1..80: mol_type = other DNA
ccccagaaccccttcagcgaacagaggagcctcccacgcgataggagtaagcccataacgatagggggagatgctaggag

SEQ ID NO: 44211 - DNA, 80 bp, synthetic construct
  source 1..80: mol_type = other DNA
catgagccaggtccgaacgagggagcgccctgtggaggaatcagaggacgagaggggatgagctggtaaagaggcgtgga

SEQ ID NO: 44212 - DNA, 80 bp, synthetic construct
  source 1..80: mol_type = other DNA
ccccatcctttttcttccactcacccactgctcgaaaatcccttccctcccctggcgtttcttcctcgattcggcccggc

SEQ ID NO: 44213 - DNA, 80 bp, synthetic construct
  source 1..80: mol_type = other DNA
cggaaagggaaaaaggtaagaggaaaaaaaaaggggaggccccccagatccgaaagggcccaccgccaaatttgaaaagc

SEQ ID NO: 44214 - DNA, 80 bp, synthetic construct
  source 1..80: mol_type = other DNA
gatccgaaagggcccaccgccaaatttgaaaagcaccccgggccgaagggttgagaacaccccagagggaggaacacaca

SEQ ID NO: 44215 - DNA, 80 bp, synthetic construct
  source 1..80: mol_type = other DNA
accccgggccgaagggttgagaacaccccagagggaggaacacacacggagtagaacagagaaatcacctccagaaggac

SEQ ID NO: 44216 - DNA, 80 bp, synthetic construct
  source 1..80: mol_type = other DNA
cccttcagcgaacagaagagctctgagcggagaggagtaagtccatagcgataggaggggatgctaggagtaagaggaga

SEQ ID NO: 44217 - DNA, 80 bp, synthetic construct
  source 1..80: mol_type = other DNA
acggcaagggaatttttcccaaaaaggtcaaaagagaagggcaaaattcgaaggtttttccccaaaacgttggaaacatc

SEQ ID NO: 44218 - DNA, 80 bp, synthetic construct
  source 1..80: mol_type = other DNA
catgggccaattccgaacgaagagtcgcgcggcggaaggatcagcaaccgagagggagtagatggcaaaggggattggaa

SEQ ID NO: 44219 - DNA, 80 bp, synthetic construct
  source 1..80: mol_type = other DNA
gaatgagaaagaggaaggtggaaaaagaggaggcgggccccccgatccgaggggcccggccaccaggatttggagagcac

SEQ ID NO: 44220 - DNA, 80 bp, synthetic construct
  source 1..80: mol_type = other DNA
tccggcccgtatggtcgagtagcacccagagggaggagaccacgcagagaaagcggagaaatcacctccagaggacccct

SEQ ID NO: 44221 - DNA, 80 bp, synthetic construct
  source 1..80: mol_type = other DNA
gaagagtgaggcttatcccggggaactcgacgtagcgtccccatctagcaggatcccggacccccttcagaaaagaccga

SEQ ID NO: 44222 - DNA, 80 bp, synthetic construct
  source 1..80: mol_type = other DNA
cccggggaactcgacgtagcgtccccatctagcaggatcccggacccccttcagaaaagaccgagggtggagcttcgaac

SEQ ID NO: 44223 - DNA, 80 bp, synthetic construct
  source 1..80: mol_type = other DNA
ggagtggaccggtggatccgttggaagcgctcccccccgttccgcccaaacccacctcccccaagggtcgcccaggaatg

SEQ ID NO: 44224 - DNA, 80 bp, synthetic construct
  source 1..80: mol_type = other DNA
cgccgggaggacgactcccaagaagaaaagagaagagacaagagacggacgaatccccccaagacgctagagacatcctg

SEQ ID NO: 44225 - DNA, 80 bp, synthetic construct
  source 1..80: mol_type = other DNA
agtcgagaataaaccatcctaagaaggctcaggagaaaaacccaagagggaggacctttccccataacgctgcggaaact

SEQ ID NO: 44226 - DNA, 80 bp, synthetic construct
  source 1..80: mol_type = other DNA
atgggccaagtgccgaacaaggattcgcggtgaggacagatcggcgcccgagaggggaaaaacggtaaagaacagtggaa

SEQ ID NO: 44227 - DNA, 80 bp, synthetic construct
  source 1..80: mol_type = other DNA
ggtttcccctcgtgtccagtccctccccggtccgagtaaaggggtgctccgggaatccttgcatgctggggacgaagccg

SEQ ID NO: 44228 - DNA, 80 bp, synthetic construct
  source 1..80: mol_type = other DNA
tcctcggtcaaccccctgagttcctcttcctcctccttgctgaggctctttccccccgttgatgatcgctttctcttgtt

SEQ ID NO: 44229 - DNA, 80 bp, synthetic construct
  source 1..80: mol_type = other DNA
ttcctctgactttcttcttccgtttatccactgctcgaggcgctcttctctccccccgcggtctttccttccttcggacc

SEQ ID NO: 44230 - DNA, 80 bp, synthetic construct
  source 1..80: mol_type = other DNA
ggcccatcttcgactagaggcggagcggtcctcaatgctcttatccttttccggaaagaggagactgcaggtcccgccgc

SEQ ID NO: 44231 - DNA, 80 bp, synthetic construct
  source 1..80: mol_type = other DNA
ggaaggtgaaagaaggaaggtggaagagaaggaggcgggcctcccgatccgaggggcccggcggccaagtttggagagca

SEQ ID NO: 44232 - DNA, 80 bp, synthetic construct
  source 1..80: mol_type = other DNA
gactagaggcggagcggtcctcaatgctcttatccttttccggaaagaggagactgcaggtcccgccgcccaagttcgag

SEQ ID NO: 44233 - DNA, 80 bp, synthetic construct
  source 1..80: mol_type = other DNA
cttcagcgaacagagagcgcatcgcgagagggagtagaccatagcgataggaggggatgctaggagtaggtggagaccga

SEQ ID NO: 44234 - DNA, 80 bp, synthetic construct
  source 1..80: mol_type = other DNA
ttatcccggggaactcgacttatcgtccccacatagcagattcccggaccccctttcaaagtgaccgagggtggtgactt

SEQ ID NO: 44235 - DNA, 80 bp, synthetic construct
  source 1..80: mol_type = other DNA
tgaacactggggaccggtggagccatgggatgctcctcccgattccgcccgtccccttccccccaagggtcgcccaggaa

SEQ ID NO: 44236 - DNA, 80 bp, synthetic construct
  source 1..80: mol_type = other DNA
cgtcggagatacactcccaagaaggaaaaaagagaattcaagaagcggatgaatttccccatgacgccggcgaaactcta

SEQ ID NO: 44237 - DNA, 80 bp, synthetic construct
  source 1..80: mol_type = other DNA
atgggccaaagttccgaacgaggagtccgcggtaggagggatcagcgcccgagagtgagagaacgacaaggtgccaggaa

SEQ ID NO: 44238 - DNA, 80 bp, synthetic construct
  source 1..80: mol_type = other DNA
ggttccccctcgtgtccagcccgtccccgtgtctatggaaggcggactccggaactccttgcatgctggggacgaagccg

SEQ ID NO: 44239 - DNA, 80 bp, synthetic construct
  source 1..80: mol_type = other DNA
cctttgatgtttcccagccagggattgtcgtcctctagtttcttgaccttcttctttatcttccggaggtctctttcaag

SEQ ID NO: 44240 - DNA, 80 bp, synthetic construct
  source 1..80: mol_type = other DNA
ctcctcggctctcttccttgagttcacccactgctcgagaacctcttcccttcctccgcgattcttcttcgattcggacc

SEQ ID NO: 44241 - DNA, 80 bp, synthetic construct
  source 1..80: mol_type = other DNA
aggggaaagaggaaggtggaaaagaaggcgtgggctttccgatccgaggggcccgactgccaagtttggagagcactccg

SEQ ID NO: 44242 - DNA, 80 bp, synthetic construct
  source 1..80: mol_type = other DNA
gcccgaagggttgagtagtctccagagggagaaatccacacggataaagaagacaaaccacctccagaggaccccttcag

SEQ ID NO: 44243 - DNA, 80 bp, synthetic construct
  source 1..80: mol_type = other DNA
cgaacagaagagctctgagcgggataggagtaagaccatagcgatagggggagatgctaggagttggaggagaccgaagc

SEQ ID NO: 44244 - DNA, 80 bp, synthetic construct
  source 1..80: mol_type = other DNA
gggaactcggcgaatcgtccccgcatggcagagcccggttccccttcaaaaaaaggaccggagggcggagctcggagcgc

SEQ ID NO: 44245 - DNA, 80 bp, synthetic construct
  source 1..80: mol_type = other DNA
gaggggacccagtggagccatgggatgctcctcccgattccgtccatcccccaccccaagagggtcgcccaggaatggcg

SEQ ID NO: 44246 - DNA, 80 bp, synthetic construct
  source 1..80: mol_type = other DNA
ccttgaagaaatccctcccaagaagtaaagagaactcaagattcggacgactttcccgaagacgctggagacatcctgga

SEQ ID NO: 44247 - DNA, 80 bp, synthetic construct
  source 1..80: mol_type = other DNA
gcgtctatctccatctggtccatccggagcttcttcgccgggggtgccccctctccatccttatccttctttccgattat

SEQ ID NO: 44248 - DNA, 80 bp, synthetic construct
  source 1..80: mol_type = other DNA
gttcctctaacttctttcttccgctcacccactgctcgaggatgtcttccctccccccgcggtctttccttctttcggac

SEQ ID NO: 44249 - DNA, 80 bp, synthetic construct
  source 1..80: mol_type = other DNA
ggaagggaaaagaggtgcgatggaaaaagaggaggtgggcctcccgatccgagggtcccggtggccaagtttggaggaca

SEQ ID NO: 44250 - DNA, 80 bp, synthetic construct
  source 1..80: mol_type = other DNA
tcggtgaatcctcccctggagactctcttcctaggtccggagtctacctccatctggtccgttcgggctctcttcgccgg

SEQ ID NO: 44251 - DNA, 80 bp, synthetic construct
  source 1..80: mol_type = other DNA
tctctcgtcttcctcggtcaacttcctaagttcctcttcttcggcctcgctgagtttcttccctcccccggccagctgct

SEQ ID NO: 44252 - DNA, 80 bp, synthetic construct
  source 1..80: mol_type = other DNA
tcttgattttcttcttttccttccggagctctttctcgagttcctcagctttcttccttgcgttcacccacttctcgagg

SEQ ID NO: 44253 - DNA, 80 bp, synthetic construct
  source 1..80: mol_type = other DNA
atctcttctctccctccgtgatgattcttcgactcggcccggctcatctcgacaagaggcggcagtcctcagtactctta

SEQ ID NO: 44254 - DNA, 80 bp, synthetic construct
  source 1..80: mol_type = other DNA
ctcttttctgtaaagaggagactgctggactcgccgcccaagctcgagcatgagccaagttccgagcgaaggcccacgag

SEQ ID NO: 44255 - DNA, 80 bp, synthetic construct
  source 1..80: mol_type = other DNA
ggtgagggatcagcgaccgagaggggatgaacaacaaggtgcggggaattcggaaatatgtactcccaagaaggtaagag

SEQ ID NO: 44256 - DNA, 80 bp, synthetic construct
  source 1..80: mol_type = other DNA
aggattcaagaactggaggctctcccgagaacgctggaggcatctcggaatgggaaaggaggaaggtggaaaagaaggtg

SEQ ID NO: 44257 - DNA, 80 bp, synthetic construct
  source 1..80: mol_type = other DNA
cgggcctcccgatccgaggggcccaactgccggatctggagagcactccgggccgtatggttgagtagttctcagaggga

SEQ ID NO: 44258 - DNA, 80 bp, synthetic construct
  source 1..80: mol_type = other DNA
ggaatccacacggagtagaacagagaaatcacctccagaggaccccttcagcgaacggaagagccttgccgggataggag

SEQ ID NO: 44259 - DNA, 80 bp, synthetic construct
  source 1..80: mol_type = other DNA
taagaacatagcgaaggaggaagatgctaggagttggaggagaccgaagcgaggaggaaagcaaagaaagcaacggggct

SEQ ID NO: 44260 - DNA, 80 bp, synthetic construct
  source 1..80: mol_type = other DNA
aggggccccctctccatccttatccttctttccgattattcctttgatgtttcccagccagggatggtcctcctctagct

SEQ ID NO: 44261 - DNA, 80 bp, synthetic construct
  source 1..80: mol_type = other DNA
agccgtcaggtgttcctccccccgagaggggaagagtgaggcttatcccggggaactcggcgaatcgtccccacatagcg

SEQ ID NO: 44262 - DNA, 80 bp, synthetic construct
  source 1..80: mol_type = other DNA
gatccgggttcccctccaaaaaggaccggaggtggagcttagaacgcggtggggaccgctaggatccatgggatgctcct

SEQ ID NO: 44263 - DNA, 80 bp, synthetic construct
  source 1..80: mol_type = other DNA
aaaggaccgggagtggagcttagaacgcggtggggaccgctaggatccatgggatgctccttcccgattccgcccatcgc

SEQ ID NO: 44264 - DNA, 80 bp, synthetic construct
  source 1..80: mol_type = other DNA
tcccgattccgcccatcccccccccaggagggtcgcccaggaatgtcgggaactccactcttcggagtccgcgttccatt

SEQ ID NO: 44265 - DNA, 80 bp, synthetic construct
  source 1..80: mol_type = other DNA
cgtccttggtcaacctcttaagttcctcttcctcctccctgctgaggctcttccctcctccggagagctgtttcttcttg

SEQ ID NO: 44266 - DNA, 80 bp, synthetic construct
  source 1..80: mol_type = other DNA
ttcctttgatgtttcccagccagggattttcgtcctcgagtctcctaattttcttcttggccttccggaccttcctctcg

SEQ ID NO: 44267 - DNA, 80 bp, synthetic construct
  source 1..80: mol_type = other DNA
agctcctccagctcttttcttccagaaacccactgctcgaggatgtcctctcttccccctcgcttccccttcaattcggg

SEQ ID NO: 44268 - DNA, 80 bp, synthetic construct
  source 1..80: mol_type = other DNA
ccggctcatcttggcagagggcggcggtcctcagtgctcttactctttcttgataagaggagactgctggactcgccgcc

SEQ ID NO: 44269 - DNA, 80 bp, synthetic construct
  source 1..80: mol_type = other DNA
agtcgagggaaattgtcctaagaagatccaagagagaacttaggagggaggacatttccccataacgctgtggaagctct

SEQ ID NO: 44270 - DNA, 80 bp, synthetic construct
  source 1..80: mol_type = other DNA
cctccctccgcgggatttcttctgctcggaccggctcatctcgacaaagggcggcggtcctcagtgctcttactcttttc

SEQ ID NO: 44271 - DNA, 80 bp, synthetic construct
  source 1..80: mol_type = other DNA
ttcagcgaccgagagggagttgaacgacaaggtgcggggatcccgaaaagatgcactcctaagaaggtaagggagtgttc

SEQ ID NO: 44272 - DNA, 80 bp, synthetic construct
  source 1..80: mol_type = other DNA
aagaactggaagttctcccgaggacgttggagacatctcggaatgggaatgaaggaaggtggaaaagaaggtgcgggcct

SEQ ID NO: 44273 - DNA, 80 bp, synthetic construct
  source 1..80: mol_type = other DNA
gtccccctccaaaaaaggaccggaggtggagcttagagcgcgggggtggccgctaggagccatgggatgctcttcccgat

SEQ ID NO: 44274 - DNA, 80 bp, synthetic construct
  source 1..80: mol_type = other DNA
cgtcggagatataactcccaagaaggaaaaaagagaaaacaagaagcggacgaatttccccataacgctggtggagctct

SEQ ID NO: 44275 - DNA, 80 bp, synthetic construct
  source 1..80: mol_type = other DNA
cctctcgtgtccagcccctccccgcgtctatggaaggtggactccgggacgtcttgcatgttggggacgaagccgccccc

SEQ ID NO: 44276 - DNA, 80 bp, synthetic construct
  source 1..80: mol_type = other DNA
ttcatcagctctttttcttccgtttacccactgctcgagaacctcttctcttcctccgcgattcttcttcgactcggacc

SEQ ID NO: 44277 - DNA, 80 bp, synthetic construct
  source 1..80: mol_type = other DNA
cgacaagaggcggcgaacctcagtactcttactcttttctgataaagaggagactgctggttccgccgcccaagttcgag

SEQ ID NO: 44278 - DNA, 80 bp, synthetic construct
  source 1..80: mol_type = other DNA
ccgatgggagctctcctaagagggaaaagagagcattcaaggagtgggcgactctccccatgacgctggagacatcctgg

SEQ ID NO: 44279 - DNA, 80 bp, synthetic construct
  source 1..80: mol_type = other DNA
ttattcactggggtcgacaactctggggagaaaagggaggatcggctgggaagagtatatcctatgggaatccctgcgtc

SEQ ID NO: 44280 - DNA, 80 bp, synthetic construct
  source 1..80: mol_type = other DNA
cgtcggagggatgtctcccaagaaggaaaaaagagcagtcaagaggtggaagagataccagtgacgctggagaatctctg

SEQ ID NO: 44281 - DNA, 80 bp, synthetic construct
  source 1..80: mol_type = other DNA
gacccgaagaggaaagaaggacgtgagacgcaaacctgtgagtggaaacccgctttattcactggggtcgacagctctgg

SEQ ID NO: 44282 - DNA, 80 bp, synthetic construct
  source 1..80: mol_type = other DNA
ccgctttattcactggggtcgacagctctggcgtgagaaggtgggatcggctggaaaaagtatatcctatgggaatcccc

SEQ ID NO: 44283 - DNA, 80 bp, synthetic construct
  source 1..80: mol_type = other DNA
atgggccaattccgaacgaagagacgcgagacgggagagatcagcgcccgagaggggtaaatggtaaagagcattggaac

SEQ ID NO: 44284 - DNA, 80 bp, synthetic construct
  source 1..80: mol_type = other DNA
tccgggccgcatggtcgagtagcccccagagggagatagccacactgggagaaaagcagacaaatcacctccagaggacc

SEQ ID NO: 44285 - DNA, 80 bp, synthetic construct
  source 1..80: mol_type = other DNA
aaagcagacaaatcacctccagaggaccccttcagcgaacagaggaccctctcactcgaaggagtaagaccatagcgatg

SEQ ID NO: 44286 - DNA, 80 bp, synthetic construct
  source 1..80: mol_type = other DNA
ccttcagcgaacagaggaccctctcactcgaaggagtaagaccatagcgatggggggagatgctaggagttagaggagac

SEQ ID NO: 44287 - DNA, 80 bp, synthetic construct
  source 1..80: mol_type = other DNA
gaacgcagaggaccagcggagccgtgggatgctccctcccgattccgcccaaacccgttcccccgcagggtcgcccagga

SEQ ID NO: 44288 - DNA, 80 bp, synthetic construct
  source 1..80: mol_type = other DNA
atgggcccagttccgagcgaagggatcgcgggtggaggaaggaaaacccgagagggagtggatggcaaagaagcattgga

SEQ ID NO: 44289 - DNA, 80 bp, synthetic construct
  source 1..80: mol_type = other DNA
tccggcccgaagggttgagtagcttccagagggagacatccacacggagaagaacagcgacaacacccccccagaacccc

SEQ ID NO: 44290 - DNA, 80 bp, synthetic construct
  source 1..80: mol_type = other DNA
aagccgaggaggaaagcaaagaaagcaacggggctagccagtgggtgttccgcctcccgagaggggacgagtgaggcttt

SEQ ID NO: 44291 - DNA, 80 bp, synthetic construct
  source 1..80: mol_type = other DNA
tcccggggggagctccctatcgtcaccacatagcaaagaccgggggccccttctaaagtgacgggggggggtagcttgga

SEQ ID NO: 44292 - DNA, 80 bp, synthetic construct
  source 1..80: mol_type = other DNA
cttctaaagtgaccggggggggtagcttggaacataggagacgcagtggagccatgggatgcccttcccgattccgtcca

SEQ ID NO: 44293 - DNA, 80 bp, synthetic construct
  source 1..80: mol_type = other DNA
acgtcggagggaattctcccaagaaggaaaaaagagaagacaagagacggacgaaacccccacgacgctggagacacctt

SEQ ID NO: 44294 - DNA, 80 bp, synthetic construct
  source 1..80: mol_type = other DNA
ccgcgaggaggtggaggtggagatgccatgccgacccgaagaggaaagaaggacgcgagacgggaactcgtgagtgaaaa

SEQ ID NO: 44295 - DNA, 80 bp, synthetic construct
  source 1..80: mol_type = other DNA
atgagccacagttccgagcgaagggacgcgcggggcaggatcatccccgagaggggatgagacggtaaagagcattggaa

SEQ ID NO: 44296 - DNA, 80 bp, synthetic construct
  source 1..80: mol_type = other DNA
ttcctctaacttctttcttccgctcacccactgctccaggatctcttctctgcccccgcgatgcttcttcgactcggacc

SEQ ID NO: 44297 - DNA, 80 bp, synthetic construct
  source 1..80: mol_type = other DNA
ggaaggggaaagaaggaaggtggaaaagaaggtgcgggcctcccgatccgaggggcccaaccaccaggatctggagagaa

SEQ ID NO: 44298 - DNA, 80 bp, synthetic construct
  source 1..80: mol_type = other DNA
ttcccggccgaagggttgagtagcactcagagggagagcatcacacagaggtaagcagagaaatcacctccagaggaccc

SEQ ID NO: 44299 - DNA, 80 bp, synthetic construct
  source 1..80: mol_type = other DNA
tcacacagaggtaagcagagaaatcacctccagaggaccccttcagcgaacagaagagcgcaacgcgcgaaggagtaaga

SEQ ID NO: 44300 - DNA, 80 bp, synthetic construct
  source 1..80: mol_type = other DNA
cttcagcgaacagaagagcgcaacgcgcgaaggagtaagaccatagcgatggggggagatgctaggagttagaggagacc

SEQ ID NO: 44301 - DNA, 80 bp, synthetic construct
  source 1..80: mol_type = other DNA
gaccgtggaggaccagtggagccatgggatgctcttcccgattctgacctaactccttccccccaagggtcgcccaggaa

SEQ ID NO: 44302 - DNA, 80 bp, synthetic construct
  source 1..80: mol_type = other DNA
gccggctgggcaacattccgaaggggaccgtccctcggtaatggcgaatgggacccacacctctcccttgcttcccaaag

SEQ ID NO: 44303 - DNA, 80 bp, synthetic construct
  source 1..80: mol_type = other DNA
cgtcggagaaactactcccaagaaggaaaaagggaattcaagaagcggaagactttctccaagacgctagtgaaactcta

SEQ ID NO: 44304 - DNA, 80 bp, synthetic construct
  source 1..80: mol_type = other DNA
ggttcggaggattctcccaagaaggtccaggagaaggcaagaaacggaagcatttccccatgacgctggaaaacctcttg

SEQ ID NO: 44305 - DNA, 80 bp, synthetic construct
  source 1..80: mol_type = other DNA
caggtcggaccgcgaggaggtggagatgccatgccgacccgaagaggaaagaaggacgcgagacgcaaacccgtgagtgg

SEQ ID NO: 44306 - DNA, 80 bp, synthetic construct
  source 1..80: mol_type = other DNA
atgggccacacgccgaacgaggagaccggtaaggggagagagggaatcccgaggggatcacccactaaagagtagaggaa

SEQ ID NO: 44307 - DNA, 80 bp, synthetic construct
  source 1..80: mol_type = other DNA
ctggttgcctctgatgtccagtccctctcccgtccgagtgaagggagactccggaactccagtcatctgagggacgaagc

SEQ ID NO: 44308 - DNA, 80 bp, synthetic construct
  source 1..80: mol_type = other DNA
tcctctgcctttcttcttgtggagatccacttctcgaggatttcctcccttcctcccctccggcttttcctcgattcggg

SEQ ID NO: 44309 - DNA, 80 bp, synthetic construct
  source 1..80: mol_type = other DNA
gtcatccgggccgaagggttgaaacaacccacagacgggtgccaccaggagggatcgaggagaattcacctccagaagac

SEQ ID NO: 44310 - DNA, 80 bp, synthetic construct
  source 1..80: mol_type = other DNA
gaccaaagcgaggaggaaagcaaagaaagcaacggggctagcgaatggatgtttcgctccggaaggagccgagtgaggct

SEQ ID NO: 44311 - DNA, 80 bp, synthetic construct
  source 1..80: mol_type = other DNA
atgggcctcgtgccgagcgaaggataccggtaaggggagaggaggaaccccgaagggattacccactaaagagtggagga

SEQ ID NO: 44312 - DNA, 80 bp, synthetic construct
  source 1..80: mol_type = other DNA
tcatccaccttttttcttgtggagatccacttttcgagggtttcctcccttcctcccctccggctcttcctcgactcgga

SEQ ID NO: 44313 - DNA, 80 bp, synthetic construct
  source 1..80: mol_type = other DNA
gttcccctgatgtccagtccctcccccgtccgagtgaagggagattccgggactccaatcatttgagggacaaatccgcc

SEQ ID NO: 44314 - DNA, 80 bp, synthetic construct
  source 1..80: mol_type = other DNA
cccgggcgctcccctcggacttcccgttggagggttcacatccccaacccgcgggccggctactcttctttcccttctct

SEQ ID NO: 44315 - DNA, 80 bp, synthetic construct
  source 1..80: mol_type = other DNA
catctgggccgaagggttgagatgacccacagacgggagccaccaggagggtttgaggagaattcacctccggatggcct

SEQ ID NO: 44316 - DNA, 80 bp, synthetic construct
  source 1..80: mol_type = other DNA
ctttagcgaacagaagagtctccttctcggtggagaaagaccatagcgatagggggagatgctaggagtaggcggcgacc

SEQ ID NO: 44317 - DNA, 80 bp, synthetic construct
  source 1..80: mol_type = other DNA
tggatgttccgccccaaggggagccgagtgaggcttatcccggggaactcggcatctcgtcccgaaatgaggactccgat

SEQ ID NO: 44318 - DNA, 80 bp, synthetic construct
  source 1..80: mol_type = other DNA
ttatcccggggaactcggcatctcgtcccgaaatgaggactccgatccccccttcaaaaagacggagggtggtactagga

SEQ ID NO: 44319 - DNA, 80 bp, synthetic construct
  source 1..80: mol_type = other DNA
agatcgtcgaggaaatactcccaagagtcccggagtgatccaagaggcggatgatccttccccattggttggagatagtc

SEQ ID NO: 44320 - DNA, 80 bp, synthetic construct
  source 1..80: mol_type = other DNA
ctctgacgtccaggccgtctcccctcatagagtaggtggactccggaactccttccatggaggggacgaagccgccgccg

SEQ ID NO: 44321 - DNA, 80 bp, synthetic construct
  source 1..80: mol_type = other DNA
ttatcccggggatcggcctccgctccccccactggaggactccaggacccccgaaaagagaaggaggtgggcctcggacc

SEQ ID NO: 44322 - DNA, 80 bp, synthetic construct
  source 1..80: mol_type = other DNA
atacgttggaattctccctttgtccgcagctttatctgggcccagtgggaacatgggaagggccagacgggtgttccaat

SEQ ID NO: 44323 - DNA, 80 bp, synthetic construct
  source 1..80: mol_type = other DNA
tttggagagcactccggcccgaaaggatgagaagtccccagagggaggaatccacacggagaaaagcagaaaaatcacct

SEQ ID NO: 44324 - DNA, 80 bp, synthetic construct
  source 1..80: mol_type = other DNA
ttcctctaacttctttcttccatctacccactgctcgaggatctgctctctgcccccgcggttcttcctcgactcggacc

SEQ ID NO: 44325 - DNA, 80 bp, synthetic construct
  source 1..80: mol_type = other DNA
agttcgagcatgagccaagttccgagcgaggagatcgcgaggggcaggaacagctcccgagaggggataaatggtaaaga

SEQ ID NO: 44326 - DNA, 80 bp, synthetic construct
  source 1..80: mol_type = other DNA
agcattggaacgtcggagaaaaccctcccaagaaggaaaaaagagaaagcaagaagcggacgattttccccataacgctg

SEQ ID NO: 44327 - DNA, 80 bp, synthetic construct
  source 1..80: mol_type = other DNA
ttagaggagaccaaagcgaggagaaaagcaaagaaagcaacggggctagcgagtggatgttccgccccccgagaggggac

SEQ ID NO: 44328 - DNA, 80 bp, synthetic construct
  source 1..80: mol_type = other DNA
gacgagtgaggcttatcccggagcattcggcgaatcgtccccacatagcaggttccaggacccccttccaaaataaccga

SEQ ID NO: 44329 - DNA, 80 bp, synthetic construct
  source 1..80: mol_type = other DNA
ttatcccggagcattcggcgaatcgtccccacatagcaggttccaggacccccttccaaaataaccgagggaggtggctt

SEQ ID NO: 44330 - DNA, 80 bp, synthetic construct
  source 1..80: mol_type = other DNA
ccagaggaccccttcagcgaacagagagcaccgagacgcgataggagtaagaccatagcgatagggggagatgctaggag

SEQ ID NO: 44331 - DNA, 80 bp, synthetic construct
  source 1..80: mol_type = other DNA
taggagccacgtgccgagagaagagatgcggtagggagaaggacctcccgaggggggttacctggttaagaagcgaggaa

SEQ ID NO: 44332 - DNA, 80 bp, synthetic construct
  source 1..80: mol_type = other DNA
ctgttcccctgatgtccagtccctccccagtccgagcgaaggtggactccgggacaccttgcagactggggacgaagccg

SEQ ID NO: 44333 - DNA, 80 bp, synthetic construct
  source 1..80: mol_type = other DNA
ctcctctgctctctttcttccagacacccactgctcgaggacctcttctctccctccgcgttccttcttcttctcggacc

SEQ ID NO: 44334 - DNA, 80 bp, synthetic construct
  source 1..80: mol_type = other DNA
gaatgggaaccaaggaaggtggaaaaaggagggagcctcccgatccgaatggtccggcgtccagaatttggaaaacctcc

SEQ ID NO: 44335 - DNA, 80 bp, synthetic construct
  source 1..80: mol_type = other DNA
cgacaaagggcgacggtcctcagtgctcttactcttttctgataaagaggagactggtggactcgtcgcccgagttcgaa

SEQ ID NO: 44336 - DNA, 80 bp, synthetic construct
  source 1..80: mol_type = other DNA
ggaccgtaaggtagagttttccccagagggagagcatcacacggagttggacagagaaatcacctccagaggaaacccct

SEQ ID NO: 44337 - DNA, 80 bp, synthetic construct
  source 1..80: mol_type = other DNA
tcagcgaacagaggcgcttcgagcggtaggagtaaggccatagcgataggaggagatgctaggagtagggggagaccgaa

SEQ ID NO: 44338 - DNA, 80 bp, synthetic construct
  source 1..80: mol_type = other DNA
ttatcccggggaactcggcgaatcgtccccatctagcagagccccggacccccttccaaagagaccggaggtggtgacta

SEQ ID NO: 44339 - DNA, 80 bp, synthetic construct
  source 1..80: mol_type = other DNA
ggaacaccggggacaggtcgggtccgtgggatgcttttcccgattccgtcccaacccttcccccgagaggtcaccccagc

SEQ ID NO: 44340 - DNA, 80 bp, synthetic construct
  source 1..80: mol_type = other DNA
agtcgggagggttcccccaagagggccaggagaactcaagaatcggatgagtctccctttgacgctggaagcgcatcttg

SEQ ID NO: 44341 - DNA, 80 bp, synthetic construct
  source 1..80: mol_type = other DNA
atgggccacagctccgaacgaggggaccgacgggtgaggaggtaagtcccgacaggtgttgcctggcaaagaggcgtagg

SEQ ID NO: 44342 - DNA, 80 bp, synthetic construct
  source 1..80: mol_type = other DNA
cttgagccatagttccgagcgaggagggcggcgagggaaggaaagcgacccgagaggagctcaatggtaaagaggcgagg

SEQ ID NO: 44343 - DNA, 80 bp, synthetic construct
  source 1..80: mol_type = other DNA
tcctcgcccaacctcttaagttcctcttcttcctccttgctgaggctctttccccctgcggagagttgcttcttcttgtt

SEQ ID NO: 44344 - DNA, 80 bp, synthetic construct
  source 1..80: mol_type = other DNA
ctctatcctttttcttccattgacccactgctcgaggacgtcttctcttccctctcgcctcttcctcgactcggaccggc

SEQ ID NO: 44345 - DNA, 80 bp, synthetic construct
  source 1..80: mol_type = other DNA
ttggaagcggaaagagtggaaggcgaaagaaagggagcgggctctccgatccgaggggcccgacgccccgatctggagag

SEQ ID NO: 44346 - DNA, 80 bp, synthetic construct
  source 1..80: mol_type = other DNA
atttccgggccgaagggttgagtagcactcagagggaggaatccactcggaggtaagcagacaaatcacctccagaggac

SEQ ID NO: 44347 - DNA, 80 bp, synthetic construct
  source 1..80: mol_type = other DNA
cccttcagcgaacagaaggctttctcacgcggggagggaagaccatagcgataggtggagatgctaggagtagaggaggc

SEQ ID NO: 44348 - DNA, 80 bp, synthetic construct
  source 1..80: mol_type = other DNA
ttaccccggggaactcggcgaatggtccccacaaaccaaagcccggttccccttcaaaaagtgactggagagggcgctta

SEQ ID NO: 44349 - DNA, 80 bp, synthetic construct
  source 1..80: mol_type = other DNA
gagcgtgggtgatccatgtggatccgtgggatgctcctcccgattccgtcccatcccttcccccgagaggtcccccagga

SEQ ID NO: 44350 - DNA, 80 bp, synthetic construct
  source 1..80: mol_type = other DNA
aaatcgattgaaactactcccaagaagaaccagaagggaagatctagaagaggacgagtccccaaaacgctggtggacac

SEQ ID NO: 44351 - DNA, 80 bp, synthetic construct
  source 1..80: mol_type = other DNA
atgagccaaagctcagaacgaagattgcgcggaggagggatcaagccccgagaagggatgtgaacaacaaggtgcgagga

SEQ ID NO: 44352 - DNA, 80 bp, synthetic construct
  source 1..80: mol_type = other DNA
acttcccgtcgtgtccagcccgctcccgtgtctatggaaggtggactccgggactccttgcatgttggggacgaagccgc

SEQ ID NO: 44353 - DNA, 80 bp, synthetic construct
  source 1..80: mol_type = other DNA
ccccgggcgctcccctctgtccgccttcgaggaggttcacacctccaggcggcgggccggctactcttcttttccttctc

SEQ ID NO: 44354 - DNA, 80 bp, synthetic construct
  source 1..80: mol_type = other DNA
aggatatttcaagagctggacgctctcccgaagacgctggaaacgccttggaatgggaaggaagacggatggaagagaaa

SEQ ID NO: 44355 - DNA, 80 bp, synthetic construct
  source 1..80: mol_type = other DNA
tcgtcttcctcggtcaacctcttaagttcctcttcttcctcccggctgaggttcttccctcccccggccagctgcttctt

SEQ ID NO: 44356 - DNA, 80 bp, synthetic construct
  source 1..80: mol_type = other DNA
ctcgagggccttccttcgtcggtgatcctgcctctccttgtcggtgaatcctcccgcggaaggtctcttcctaggtccgg

SEQ ID NO: 44357 - DNA, 80 bp, synthetic construct
  source 1..80: mol_type = other DNA
agtctacctccatctggtccgtccgggccctcttcgccgggggtcccccctctccatccttgtcttttcttccaattatt

SEQ ID NO: 44358 - DNA, 80 bp, synthetic construct
  source 1..80: mol_type = other DNA
cctttgatgtttcccagccagggattgccgtcctctagtctcttgatcttcttcctcaccttccggaggtctctctcgag

SEQ ID NO: 44359 - DNA, 80 bp, synthetic construct
  source 1..80: mol_type = other DNA
ctcctcagctaacttccttgcgttcacccactgctcgaggacttcttctctccctccgcgatttttcttcgattctgacc

SEQ ID NO: 44360 - DNA, 80 bp, synthetic construct
  source 1..80: mol_type = other DNA
ggctcatctcgacgaagggcggcaggtccttggactcttactcttttctgtaaagaggagaccactggactctccgccca

SEQ ID NO: 44361 - DNA, 80 bp, synthetic construct
  source 1..80: mol_type = other DNA
gaatgggaaggaagacggatggaagagaaagggggggggtccccgatccgagaggcccgacgcccgagtttggagagcac

SEQ ID NO: 44362 - DNA, 80 bp, synthetic construct
  source 1..80: mol_type = other DNA
cgacgaagggcggcaggtccttggactcttactcttttctgtaaagaggagaccactggactctccgcccaagttcgagc

SEQ ID NO: 44363 - DNA, 80 bp, synthetic construct
  source 1..80: mol_type = other DNA
tccggcccgaagggttgaggaacccccggagggaggaagccacacggagtagaacagaaaatcacctccagaggacccct

SEQ ID NO: 44364 - DNA, 80 bp, synthetic construct
  source 1..80: mol_type = other DNA
tagaacagaaaatcacctccagaggaccccttcagcgaacagaagagccttgcacgggataggagtaagaccatagcgac

SEQ ID NO: 44365 - DNA, 80 bp, synthetic construct
  source 1..80: mol_type = other DNA
tcagcgaacagaagagccttgcacgggataggagtaagaccatagcgacgggtggagatgctaggagttaggggagaccg

SEQ ID NO: 44366 - DNA, 80 bp, synthetic construct
  source 1..80: mol_type = other DNA
aagcgaggagaaaagtaaagaaagcaacggggctagccgtcaggtgttcctccccccgagaggggaagagtgaggcttat

SEQ ID NO: 44367 - DNA, 80 bp, synthetic construct
  source 1..80: mol_type = other DNA
cccggggaactcggcgaatcgtccccacatagcagagcccgggcccccttcaaaaaggaccggagagcggagctaggagc

SEQ ID NO: 44368 - DNA, 80 bp, synthetic construct
  source 1..80: mol_type = other DNA
gcggtggaggccagtggagccatgggatgctcttcccgattccgtccatcccccctcccaggaaggtcgcccaggaatgg

SEQ ID NO: 44369 - DNA, 80 bp, synthetic construct
  source 1..80: mol_type = other DNA
caggaccccactcttcggggtctttcgttccattccttcttacctgtggccggcatggtcccagcctcctcgctggcgcc

SEQ ID NO: 44370 - DNA, 80 bp, synthetic construct
  source 1..80: mol_type = other DNA
acctcggagggatgtctccaagaagggtgaaggatatttcaagagctggacgctctcccgaagacgctggaaacgccttg

SEQ ID NO: 44371 - DNA, 80 bp, synthetic construct
  source 1..80: mol_type = other DNA
aggatcctcggggaaattctcccaagaagatcccggtgagattcaagagacggaggattctccccccttggttgggagaa

SEQ ID NO: 44372 - DNA, 80 bp, synthetic construct
  source 1..80: mol_type = other DNA
ctgccctggagggtctcttcctaggtccggagtctacctccatctggtccgttcgggccctcttcgccggtggagccccc

SEQ ID NO: 44373 - DNA, 80 bp, synthetic construct
  source 1..80: mol_type = other DNA
cttcttttccttccggagctccctctcgagatcctcagctttcttccttgagttcacccacttctcgaggacctcttccc

SEQ ID NO: 44374 - DNA, 80 bp, synthetic construct
  source 1..80: mol_type = other DNA
tccctccgcgagatttcttcgactcggaccggctcatctcgacaagaggcggcagtcctcagtgctcttactcttttctg

SEQ ID NO: 44375 - DNA, 80 bp, synthetic construct
  source 1..80: mol_type = other DNA
taaagaggagactgctggactcgccgcccaagctcgagcatgagccaagttccgagcgaaggtccgcgagggtgagggtt

SEQ ID NO: 44376 - DNA, 80 bp, synthetic construct
  source 1..80: mol_type = other DNA
cagcgaccgagaggggataaacgacaaggtgcggggatcccggaggaatgcactcccaagaaggtaagagagggttcaag

SEQ ID NO: 44377 - DNA, 80 bp, synthetic construct
  source 1..80: mol_type = other DNA
aatcggaagctctcccgaaaacgctggaggcgtctcggaatgggaaagtgggaaggtggaaaagaaggtgcgggcctccc

SEQ ID NO: 44378 - DNA, 80 bp, synthetic construct
  source 1..80: mol_type = other DNA
gatccgaggggcccaactgccaagtttggagagcactccggcccgtatggttgagtagctcccagagggaggagtccaca

SEQ ID NO: 44379 - DNA, 80 bp, synthetic construct
  source 1..80: mol_type = other DNA
gcgacgggtggagatgctaggagttaggggagaccgaagcgaggaggaaagtaaagaaagcaacggagctagccgtcagg

SEQ ID NO: 44380 - DNA, 80 bp, synthetic construct
  source 1..80: mol_type = other DNA
tctccatccttatccttctttccaagaattcctttgacgtttcctagccagggattgtcttcctctaatttcttgattct

SEQ ID NO: 44381 - DNA, 80 bp, synthetic construct
  source 1..80: mol_type = other DNA
cccctccaaaaaggaccgggggtggagcttagagcacgggtggagccactaggagccatgggatgctgttcccgattccg

SEQ ID NO: 44382 - DNA, 80 bp, synthetic construct
  source 1..80: mol_type = other DNA
taggagccatgggatgctgttcccgattccgtccatccctcccccaggagggtcgcccaggaatgtcgggaactccactc

SEQ ID NO: 44383 - DNA, 80 bp, synthetic construct
  source 1..80: mol_type = other DNA
ggcgtcccgtcacgtccagcccgtccccggtccgagagaaggtggactccgggataccctgcatgctggggacgaagccg

SEQ ID NO: 44384 - DNA, 80 bp, synthetic construct
  source 1..80: mol_type = other DNA
ttcctccctgctgaggcgcttccctcctccggcgagctgtttcttcttgttctcgagggccttccttcttcggtgatcct

SEQ ID NO: 44385 - DNA, 80 bp, synthetic construct
  source 1..80: mol_type = other DNA
aggaaatcggggaggactctcccaagaaggtccaagagaaatctcaagaagaggaaatctccccatgacgctgtggaaac

SEQ ID NO: 44386 - DNA, 80 bp, synthetic construct
  source 1..80: mol_type = other DNA
ttcagcgaacagaagacgctcgcggcggcaggagtaagcccgtagcgatggggggagatgctaggagtgaggagcgaccg

SEQ ID NO: 44387 - DNA, 80 bp, synthetic construct
  source 1..80: mol_type = other DNA
gggacgagtgaggcttatcccggggaactcggcgaatcgtccccacatagcggaccccggacccccttccgatacgaccg

SEQ ID NO: 44388 - DNA, 80 bp, synthetic construct
  source 1..80: mol_type = other DNA
cccggggaactcggcgaatcgtccccacatagcggaccccggacccccttccgatacgaccgggtggcgcttggaacgtg

SEQ ID NO: 44389 - DNA, 80 bp, synthetic construct
  source 1..80: mol_type = other DNA
ggggagccggtggaccgtgggatgctccttccgattccgcccaaaccccgcccccgagaggtcccccaggaatggcagga

SEQ ID NO: 44390 - DNA, 80 bp, synthetic construct
  source 1..80: mol_type = other DNA
ttcttccagagacccactgctcgaggatttcttctctatcccctcggttcttcttcttcgtttcgggccggctcatcttg

SEQ ID NO: 44391 - DNA, 80 bp, synthetic construct
  source 1..80: mol_type = other DNA
ggccacagctccgaacgaagagaccgacgggggaagaggacatcccgagaggggttacctggtaaagaggcgtggaaagt

SEQ ID NO: 44392 - DNA, 80 bp, synthetic construct
  source 1..80: mol_type = other DNA
cgggggaagttgccctaagaaggttcaagagaaaacttgggaaagaggacctttccccataacgctgcggaaactctcgg

SEQ ID NO: 44393 - DNA, 80 bp, synthetic construct
  source 1..80: mol_type = other DNA
aaggggaaagaggaaggcgagaaagaaaggtgcgggacctccaatccgaggggtccggcgccgagttttggagagaactc

SEQ ID NO: 44394 - DNA, 80 bp, synthetic construct
  source 1..80: mol_type = other DNA
tcgtccaaccggaccttcttcgctggaggagcccccccctcgctcttatccttctttccgattattcctttgacgtttcc

SEQ ID NO: 44395 - DNA, 80 bp, synthetic construct
  source 1..80: mol_type = other DNA
cgatccgaggggcccaactgccaggtttggaaggcactccggcccgtacggttgggaagctcccagagggaggaagccac

SEQ ID NO: 44396 - DNA, 80 bp, synthetic construct
  source 1..80: mol_type = other DNA
actggaagctctcccgagaacgctggaggcgtctcggaatgggaaagagagaaggtggaaaagaaggtgcgggcctcttc

SEQ ID NO: 44397 - DNA, 80 bp, synthetic construct
  source 1..80: mol_type = other DNA
ggcttatcccggggaactcggcgaatcgtccccacatagcagagcccggctctcccttcgaaaaaggaccgggtgtggag

SEQ ID NO: 44398 - DNA, 80 bp, synthetic construct
  source 1..80: mol_type = other DNA
tcgccgaggggatgcctcccaagaaggaaaaaagaggtatcaagaagtgggcgaaatccccgtgacgctagagacatcct

SEQ ID NO: 44399 - DNA, 80 bp, synthetic construct
  source 1..80: mol_type = other DNA
ccctgcgaacagaaggctcccagaagcgtcaggagtaagaccatagcgataggtggagatgctaggagttaggggagacc

SEQ ID NO: 44400 - DNA, 80 bp, synthetic construct
  source 1..80: mol_type = other DNA
tcccggggaactcgacttatcgtccccacatagcagagcccggacccccttccaaaataaccgaggagggtccttggagc

SEQ ID NO: 44401 - DNA, 80 bp, synthetic construct
  source 1..80: mol_type = other DNA
atagaggaccactggatccatggaaattctctttcccgattccgtccgaaccccatcccccacagggtcgcccaggaatg

SEQ ID NO: 44402 - DNA, 80 bp, synthetic construct
  source 1..80: mol_type = other DNA
atgggccgcacgccgagggaagagaacggtaaggggagaggagggatcccgaagggattacccactaaagagtagatgaa

SEQ ID NO: 44403 - DNA, 80 bp, synthetic construct
  source 1..80: mol_type = other DNA
ctcgagagctttccttctgcggtgttcctccctctccttgtcggtgaacccgctcttgtgaggcttcttcctaggtccag

SEQ ID NO: 44404 - DNA, 80 bp, synthetic construct
  source 1..80: mol_type = other DNA
ccaagatgttccccagccagggattgtcttcctcgagtcttttgatggtttttctggccttccggaggtctctctcgagc

SEQ ID NO: 44405 - DNA, 80 bp, synthetic construct
  source 1..80: mol_type = other DNA
tcatctgcctttcttcttgtggttatccacttttcgaggatctcctctcttcctcccctccggcttctcttcgactcgga

SEQ ID NO: 44406 - DNA, 80 bp, synthetic construct
  source 1..80: mol_type = other DNA
ttggctcatcctcgacgagggcgacggtcctcagttctctctattctttccttttgaaagaggagactgctggaccaaac

SEQ ID NO: 44407 - DNA, 80 bp, synthetic construct
  source 1..80: mol_type = other DNA
gaaccaggataagaagaaggaacggtagaaaagagcgagcctctcgatacggaggggccgcgaacctatcaagtttggag

SEQ ID NO: 44408 - DNA, 80 bp, synthetic construct
  source 1..80: mol_type = other DNA
cgacgagggcgacggtcctcagttctctctattctttccttttgaaagaggagactgctggaccaaacgcccgagtcggg

SEQ ID NO: 44409 - DNA, 80 bp, synthetic construct
  source 1..80: mol_type = other DNA
tcatttgggccgaaaggttgaaaagacccccagacgggaaccccccggagggttcgaggagaactcccctccggaaggcc

SEQ ID NO: 44410 - DNA, 80 bp, synthetic construct
  source 1..80: mol_type = other DNA
ccctcagcgaacagaagagtctctatctcggtggagaatgaccatagcaacggggggagatgctaggagtagggtgcgac

SEQ ID NO: 44411 - DNA, 80 bp, synthetic construct
  source 1..80: mol_type = other DNA
gggagaatgaccatagcaacgggaggagatgctaggagtagggggcgaccgaagcgaggaggaaaggaaagaaagcaacg

SEQ ID NO: 44412 - DNA, 80 bp, synthetic construct
  source 1..80: mol_type = other DNA
ttatcccggggaactcggtaattcgtccccaaatgaggatcccgggtccccttccaaaaagacggagggtggtgactagg

SEQ ID NO: 44413 - DNA, 80 bp, synthetic construct
  source 1..80: mol_type = other DNA
aatcgggatccagtggatccgtgggaattatccgctccacccccgcggcacactccttcccccctgcgggcccccccata

SEQ ID NO: 44414 - DNA, 80 bp, synthetic construct
  source 1..80: mol_type = other DNA
agatggcaggaacccactcattggggtccgctgttccattctttcttaccttgtggccggcatggtcccagcctcctcgc

SEQ ID NO: 44415 - DNA, 80 bp, synthetic construct
  source 1..80: mol_type = other DNA
ttctcggggagctctcccaagaagttccagaatccctcaaaagagaggagaatccccatgacgctggaagagactctagg

SEQ ID NO: 44416 - DNA, 80 bp, synthetic construct
  source 1..80: mol_type = other DNA
tgatcctttattgggtggtacactcgaggagtggaaggcgctgcccgggtggagccggatttacccacgggaatccctgg

SEQ ID NO: 44417 - DNA, 80 bp, synthetic construct
  source 1..80: mol_type = other DNA
atgggcctcatgccgaaagaggaaaaccggtaaggggagaggagggatcccgaagggattacccactaaagagtagagga

SEQ ID NO: 44418 - DNA, 80 bp, synthetic construct
  source 1..80: mol_type = other DNA
atgggcctcatgccgaacgaggataccggaaggggagagggaagaatcccgaagggataactcactaaagagtaggagaa

SEQ ID NO: 44419 - DNA, 80 bp, synthetic construct
  source 1..80: mol_type = other DNA
tttcctctgatgtccagtccctcccccgtccgggtgaagggagactccggaactcctatcatttgagggacgaagccgcc

SEQ ID NO: 44420 - DNA, 80 bp, synthetic construct
  source 1..80: mol_type = other DNA
tcctctgcctttcttcttgtagttatccatttttcgaggatttcttcccttcctcccctccggctcttcctcgattcgga

SEQ ID NO: 44421 - DNA, 80 bp, synthetic construct
  source 1..80: mol_type = other DNA
gtaaccaagtcaaggagaaggaacggtagaaaagagcgagcctcccgatacggaagggccgcgaacctatcaagtttgga

SEQ ID NO: 44422 - DNA, 80 bp, synthetic construct
  source 1..80: mol_type = other DNA
gtcatccgggccgtatggttgagagaactcacaggcgggagccaccaggagggaccgaggagatctcacctccagaggac

SEQ ID NO: 44423 - DNA, 80 bp, synthetic construct
  source 1..80: mol_type = other DNA
ccccttagcgaacagaagagtctccatcccgagtggagagagaagaccatagcgataggagagatgctaggagtaggcgg

SEQ ID NO: 44424 - DNA, 80 bp, synthetic construct
  source 1..80: mol_type = other DNA
ggaccgaagcgaggaggaaaggaaagaaagcaacggggctagcgaggggatggtccgcccccagtggagccgaatggagg

SEQ ID NO: 44425 - DNA, 80 bp, synthetic construct
  source 1..80: mol_type = other DNA
attttggaaaacttcccccaagaagaaccagaatccccaaaaagagaggagaatccccataacgctggaagagactccag

SEQ ID NO: 44426 - DNA, 80 bp, synthetic construct
  source 1..80: mol_type = other DNA
atgggccgcatgccgaacgaagagaaacggtaaggggagaggaagaatcccgaagggattacccactaaagagtggaaga

SEQ ID NO: 44427 - DNA, 80 bp, synthetic construct
  source 1..80: mol_type = other DNA
tcttccgcctttcttcttgtggttatccacttctcgaggatatcttcccttcctcccctccgtcctctcttcgattcgga

SEQ ID NO: 44428 - DNA, 80 bp, synthetic construct
  source 1..80: mol_type = other DNA
gtcactcgggccgaatggttgaaagcacccacagacgggagccaccaggagggatcgaggagaactcacctccagagacc

SEQ ID NO: 44429 - DNA, 80 bp, synthetic construct
  source 1..80: mol_type = other DNA
agatcctcgaggaaatactcccaagaggtctccagggaggttcaagagacggaagaatttcccccattggttggtcaaag

SEQ ID NO: 44430 - DNA, 80 bp, synthetic construct
  source 1..80: mol_type = other DNA
atgggccgcataccgagcgaaggataccggtaaggggagaggaggaatcccgagtggatcgcccactaaagagtagagga

SEQ ID NO: 44431 - DNA, 80 bp, synthetic construct
  source 1..80: mol_type = other DNA
agtcatccgggccgaagggttgagacgcacccacagacgggagcctccaggagggtttgaggagaactcacctccagagg

SEQ ID NO: 44432 - DNA, 80 bp, synthetic construct
  source 1..80: mol_type = other DNA
ttatcccggggaactcggtaattcgccccgaaatgaggactccggggtccccttccgaaggaacggagggtggtgactag

SEQ ID NO: 44433 - DNA, 80 bp, synthetic construct
  source 1..80: mol_type = other DNA
gggtccccttccgaaggaacggagggtggtgactaggaatcaggatccagtggatccgtgggaattatcccgttccaccc

SEQ ID NO: 44434 - DNA, 80 bp, synthetic construct
  source 1..80: mol_type = other DNA
tcgggagagaccgaagcgaggaggaaagtaaagagagcaacggggctagccgtcaggtgttccgcctcccgagaggagac

SEQ ID NO: 44435 - DNA, 80 bp, synthetic construct
  source 1..80: mol_type = other DNA
ggagacatcctggaagaggaaagaggtaagacggaagagaaggggggggcctcccgatccgagtggcccaaccaccaagg

SEQ ID NO: 44436 - DNA, 80 bp, synthetic construct
  source 1..80: mol_type = other DNA
atgagccaagagccgagcgaagagaccgcgggggagggatcagcgcccgagagggagtaaacggtaaagatgcggagaac

SEQ ID NO: 44437 - DNA, 80 bp, synthetic construct
  source 1..80: mol_type = other DNA
ggcgtcccgtcacgtccagcccatccccgcgtctagagaaggtggactccggaactccttgcatgttggggacgaagccg

SEQ ID NO: 44438 - DNA, 80 bp, synthetic construct
  source 1..80: mol_type = other DNA
agtctacctccatctggtccgttcgggctcgtttcttcggtgggggtcccccctctccatccttctccttctttccaaga

SEQ ID NO: 44439 - DNA, 80 bp, synthetic construct
  source 1..80: mol_type = other DNA
attcctttgacgtttcccagccagggattttcgtcctccaacctcttgatcttcttcctcaccttccggagatctctctc

SEQ ID NO: 44440 - DNA, 80 bp, synthetic construct
  source 1..80: mol_type = other DNA
gagctcttcggctttctttcttccgttcacccactgctcgagaacctcttcccttcctccgcgattcttcttcgactcgg

SEQ ID NO: 44441 - DNA, 80 bp, synthetic construct
  source 1..80: mol_type = other DNA
aaggtgaaagaggacggtggaaagaaaagggggtggggtccccaatccgaggagcccaactgccaagtttggagagcact

SEQ ID NO: 44442 - DNA, 80 bp, synthetic construct
  source 1..80: mol_type = other DNA
tcgggccaaagggttgagtcgcccccagagggagaaaaccacacggagtagaacagagaaatcacctccagaggacccct

SEQ ID NO: 44443 - DNA, 80 bp, synthetic construct
  source 1..80: mol_type = other DNA
ggagggatcagcgcccgagagggagtaaacggtaaagatgcggagaacctcggagagttttctcccaagaagggagtaga

SEQ ID NO: 44444 - DNA, 80 bp, synthetic construct
  source 1..80: mol_type = other DNA
ggcttatcccggggaacccggcatctcgtccccacatagcagagtccgggcccccttcaaaaaaggaccggaggtggagc

SEQ ID NO: 44445 - DNA, 80 bp, synthetic construct
  source 1..80: mol_type = other DNA
ctcggagagttttctcccaagaagggagtagaggggatcgggtggtggacgatctccccatgacgctggagacgtcctgg

SEQ ID NO: 44446 - DNA, 80 bp, synthetic construct
  source 1..80: mol_type = other DNA
tcccagccagggattgtcctcctctaacctcttgattttcttcttttccttccggagctctctctcgagctcctcagctt

SEQ ID NO: 44447 - DNA, 80 bp, synthetic construct
  source 1..80: mol_type = other DNA
tcttccttgagttcacccacttctcgagaacctcttccctccctccgcgagatttcttcgactcggaccggctcatctcg

SEQ ID NO: 44448 - DNA, 80 bp, synthetic construct
  source 1..80: mol_type = other DNA
gagccaagctccgagcgaaggcccgcgagggtgagggttcagcgaccgagaggggatgaacgacaaggtgcgtggaactc

SEQ ID NO: 44449 - DNA, 80 bp, synthetic construct
  source 1..80: mol_type = other DNA
ggagttatgcactcccaagaaggtaagagaggattcaagagctggaggctctcccgagaacgctggaggcatctcggaat

SEQ ID NO: 44450 - DNA, 80 bp, synthetic construct
  source 1..80: mol_type = other DNA
gggaaggagggaaggtggaaaagaaggtgcgggctccccaatccgagtggcccggctgccggatttggatggcactccgg

SEQ ID NO: 44451 - DNA, 80 bp, synthetic construct
  source 1..80: mol_type = other DNA
tggtccatccgggccttcttcttcggaggaggggccccctctccatccttatccttctttccaataattcctttgatgtt

SEQ ID NO: 44452 - DNA, 80 bp, synthetic construct
  source 1..80: mol_type = other DNA
ctctcggaatgggaaagaggaggacgaagaagaaaggtgcggggcccccgatccgaggggtccggcgccgagttttttgg

SEQ ID NO: 44453 - DNA, 80 bp, synthetic construct
  source 1..80: mol_type = other DNA
gaggaccccttcagcgaacagaagacgctctcggacggcaggagtaagaccgtagcgataggggaggatgctaggaggta

SEQ ID NO: 44454 - DNA, 80 bp, synthetic construct
  source 1..80: mol_type = other DNA
tcctcagtgctcttactcttttctgtaaagaggagactgctggactcgccgcccgagttcgagcatgagccaagttccga

SEQ ID NO: 44455 - DNA, 80 bp, synthetic construct
  source 1..80: mol_type = other DNA
tgtaaagaggagactgctggactcgccgcccgagttcgagcatgagccaagttccgagcgaaggaccgcaggggggagag

SEQ ID NO: 44456 - DNA, 80 bp, synthetic construct
  source 1..80: mol_type = other DNA
gatcagcaaccgagaggggatgaacgacaaggtgcgagcaattcggagagacgcactcccaagaaggcaagagagggatt

SEQ ID NO: 44457 - DNA, 80 bp, synthetic construct
  source 1..80: mol_type = other DNA
caagaaccggaggttctcccgagaacgctggaggcgtctcggaataggaaggagggaaggtggaaaagaaggtgcgggcc

SEQ ID NO: 44458 - DNA, 80 bp, synthetic construct
  source 1..80: mol_type = other DNA
tcccgatccgaggggcccaactgccggatctggagagcactccggcccgtatggttgagcaactcccagagggaggaatc

SEQ ID NO: 44459 - DNA, 80 bp, synthetic construct
  source 1..80: mol_type = other DNA
cctctccatccttatccttctttccaattattcctttgacgtttcccagccagggattatcctcctcaagtttcttgatt

SEQ ID NO: 44460 - DNA, 80 bp, synthetic construct
  source 1..80: mol_type = other DNA
ctcgagggccttccttcttcggtggtcctgctcctgcctctccttgtcggtgaaatctcccctgtgaggcctcttcctag

SEQ ID NO: 44461 - DNA, 80 bp, synthetic construct
  source 1..80: mol_type = other DNA
aatctcacttaagaagaaggcaacggagaaaggagcgggcctcccgattcgagtggtccacggcgcatcaagtttggagt

SEQ ID NO: 44462 - DNA, 80 bp, synthetic construct
  source 1..80: mol_type = other DNA
atgggccagcttccgaacgaggataacgcgagaggaaggatcagaggacgagaagggatgatcggtaaagaagccgagaa

SEQ ID NO: 44463 - DNA, 80 bp, synthetic construct
  source 1..80: mol_type = other DNA
ggaaggtgaaagaggtaagacggaagagaaggggggggcctcccgatccgagaggcccaaccaccaaggtttggaaagca

SEQ ID NO: 44464 - DNA, 80 bp, synthetic construct
  source 1..80: mol_type = other DNA
atccgaggggcccaaccaccaaggtttggaaagcattccgggccgaagggttgagtagcacccagagggaggaatccact

SEQ ID NO: 44465 - DNA, 80 bp, synthetic construct
  source 1..80: mol_type = other DNA
ttatcccggggaactcggcgaatcgtccccacatagcaggacccggggcccccttccgaagtgaccgaagggtggtgcta

SEQ ID NO: 44466 - DNA, 80 bp, synthetic construct
  source 1..80: mol_type = other DNA
acgccgaggggaccacctcccaagaaggcgaagagaaggcaagaatcggacgactttccccataacgctggagacatcct

SEQ ID NO: 44467 - DNA, 80 bp, synthetic construct
  source 1..80: mol_type = other DNA
ttcagcgaacagaagagcgcttcgtgcggtaggagaaagaccatagcgatagggggagatgctaggagttagaggagatc

SEQ ID NO: 44468 - DNA, 80 bp, synthetic construct
  source 1..80: mol_type = other DNA
tcccggggaactcgacttatcgtccccacatagcaggaccccggacccccttccaaagcgaccgagggaggtagcttgga

SEQ ID NO: 44469 - DNA, 80 bp, synthetic construct
  source 1..80: mol_type = other DNA
atgagccacagttccgagcgaagggacgcgggagagagggacagacccgagaggggatgaaacggcaaagagcattggaa

SEQ ID NO: 44470 - DNA, 80 bp, synthetic construct
  source 1..80: mol_type = other DNA
ctcgtcttcctcgatcaacctcttaagttcctcttcttcctccttgctgaggctcttgcctcccgccgacagctgcttcc

SEQ ID NO: 44471 - DNA, 80 bp, synthetic construct
  source 1..80: mol_type = other DNA
atcggccgaatggtcgagtagccctcagagggaggaaatccactcggagatgagcagagaaatcacctccagaggacccc

SEQ ID NO: 44472 - DNA, 80 bp, synthetic construct
  source 1..80: mol_type = other DNA
gaacgtaggggaccggtggagccatgggatgctccttcctatgctcgatccaacttcccttccccccaggagtcgcccag

SEQ ID NO: 44473 - DNA, 80 bp, synthetic construct
  source 1..80: mol_type = other DNA
catcggaggaatacctcccaagaaggaaaaagagaactcaagaagcggaaggatttccccaagacgctgggggaacctag

SEQ ID NO: 44474 - DNA, 80 bp, synthetic construct
  source 1..80: mol_type = other DNA
atgggccgcatgccgggcgagagtggcgaagtcggagaaggggagatcccgaaggggttccccaactaaagagtggaaga

SEQ ID NO: 44475 - DNA, 80 bp, synthetic construct
  source 1..80: mol_type = other DNA
tcgcctctgatgtccagtccctcccccgtccgagcaaagggagactccggaactccctccatctgagggacgaagccgcc

SEQ ID NO: 44476 - DNA, 80 bp, synthetic construct
  source 1..80: mol_type = other DNA
accgggcgctcccctcggagaggccccaggtgggttcacatccccaacccgcgggccggctgttcttcttttcctttcct

SEQ ID NO: 44477 - DNA, 80 bp, synthetic construct
  source 1..80: mol_type = other DNA
aatctcactcaaggagaaggcaacggagaaaagagcgagcctctcgatacgaaagggccgcgacctatcaagtttggagt

SEQ ID NO: 44478 - DNA, 80 bp, synthetic construct
  source 1..80: mol_type = other DNA
catccggccgaagggttgagatgacccacggtcgggtgatccaccaggagggtctaggagaatccacctccagaggaccc

SEQ ID NO: 44479 - DNA, 80 bp, synthetic construct
  source 1..80: mol_type = other DNA
ttatcccgtggatcggcgaatcgtcccgggatggggactccgtcggctccattccaaaaggaggagcgggtgtgcttgga

SEQ ID NO: 44480 - DNA, 80 bp, synthetic construct
  source 1..80: mol_type = other DNA
gcacaggggaccagtcagtccgtgggactaccctctccaccctcccaacacactccttcccccctgcggggctcccccat

SEQ ID NO: 44481 - DNA, 80 bp, synthetic construct
  source 1..80: mol_type = other DNA
attctcgggaagcttctcccaagaagaaccagaacgctctcaagagggaggagatctcccgaacgctggagactccccgg

SEQ ID NO: 44482 - DNA, 80 bp, synthetic construct
  source 1..80: mol_type = other DNA
gctcaggtcacaccaaatcaattctgaacctccgaacaagtagtgaaactaacaatccttgtgctaaaacgattgtcaaa

SEQ ID NO: 44483 - DNA, 80 bp, synthetic construct
  source 1..80: mol_type = other DNA
ctcttcgaagttcaaaaaacaggattcaacatacaggacatggatattgttgcctctgagcacctgctgcaccagtctct

SEQ ID NO: 44484 - DNA, 80 bp, synthetic construct
  source 1..80: mol_type = other DNA
ccagagtttttttctatttgttccagtttgtgcttctgcttctgaccataaccattaatcgcatttgctttttacagtta

SEQ ID NO: 44485 - DNA, 80 bp, synthetic construct
  source 1..80: mol_type = other DNA
ccaagacctattttattttgctttattttattttgcttcatactattatattcttcttttacatgttgaagggctgtgcg

SEQ ID NO: 44486 - DNA, 80 bp, synthetic construct
  source 1..80: mol_type = other DNA
tgctttattttattttgcttcatactattatattcttcttttacatgttgaagggctgtgcggcaacgatatctttgaga

SEQ ID NO: 44487 - DNA, 80 bp, synthetic construct
  source 1..80: mol_type = other DNA
aacatgccgaaccttgacaggtttgtattccagatggctggtgcaaccgatgatgcacagaaagattccatctatgcatc

SEQ ID NO: 44488 - DNA, 80 bp, synthetic construct
  source 1..80: mol_type = other DNA
ttgccaactaccagcaggccgctctcaagtggaggaaggacataggcttccgcgttaatgcaaacacagcggccctaagc

SEQ ID NO: 44489 - DNA, 80 bp, synthetic construct
  source 1..80: mol_type = other DNA
agaagacagtggaggccctcaaggagtaccttgacaaacacaaagatgaggtggacaaggctagtgctgacagcatggta

SEQ ID NO: 44490 - DNA, 80 bp, synthetic construct
  source 1..80: mol_type = other DNA
agggtgcacagattgacacccctttcagctccttctactggctctataaagcgggcgtgactccagaaaccttccccacc

SEQ ID NO: 44491 - DNA, 80 bp, synthetic construct
  source 1..80: mol_type = other DNA
gggttcgagcatgggccacaagacgacaaagagatcgaggatttgggaagagggagaggccgaggagggttcgaacttta

SEQ ID NO: 44492 - DNA, 80 bp, synthetic construct
  source 1..80: mol_type = other DNA
acaaagagatcgaggatttgggaagagggagaggccgaggggggttcgaactttaagaagagaggatcgtcgaggaaata

SEQ ID NO: 44493 - DNA, 80 bp, synthetic construct
  source 1..80: mol_type = other DNA
ttaagatcccggaaccaggaaatgggaaagagacggtagaaaagagcgagcctcccaattttcgagtagtcccggaccta

SEQ ID NO: 44494 - DNA, 80 bp, synthetic construct
  source 1..80: mol_type = other DNA
atagccaagtagccgaggaagaaccggaagaggagaggagagagatcccgaacggggatgcaagtcaaagagtgtctgat

SEQ ID NO: 44495 - DNA, 80 bp, synthetic construct
  source 1..80: mol_type = other DNA
cgacgcatcctttcttgcttgtacccacttttcgaggatttcctccctgactcccctccgggatttcttctgatcggact

SEQ ID NO: 44496 - DNA, 80 bp, synthetic construct
  source 1..80: mol_type = other DNA
ctccgggatttcttctgatcggactggctcatcttcggcaaggggggcggcggcttccgatctctattcttttctttaaa

SEQ ID NO: 44497 - DNA, 80 bp, synthetic construct
  source 1..80: mol_type = other DNA
ggctcatcttcggcaaggggggcggcggcttccgatctctattcttttctttaaaaagaggagtcgggtttccgcccgcc

SEQ ID NO: 44498 - DNA, 80 bp, synthetic construct
  source 1..80: mol_type = other DNA
gcaaggggtgcggcggcttccgatctctattcttttctttaaaaagaggagtcgggtttccgcccgccccccagtccgag

SEQ ID NO: 44499 - DNA, 80 bp, synthetic construct
  source 1..80: mol_type = other DNA
tcaaccgtcctgtgaggttgagaactcccgcgcagggagacagccaccagaagagaacagaaaaatcacctccagaggac

SEQ ID NO: 44500 - DNA, 80 bp, synthetic construct
  source 1..80: mol_type = other DNA
accgaagcgaggaaagcaaagaaagcaacggggctagcgagtggatgttccgcctccccagggccccgagtgaggcttat

SEQ ID NO: 44501 - DNA, 80 bp, synthetic construct
  source 1..80: mol_type = other DNA
cccggagaactcggcctagtcccgagatagccacccccacgttctccacttcaaaaagggatcggtggggacttggaaca

SEQ ID NO: 44502 - DNA, 80 bp, synthetic construct
  source 1..80: mol_type = other DNA
aggaggccagtcagtccgtgggattgccccggacctccggttctccacactccttccccccgcgggctcctccaataaag

SEQ ID NO: 44503 - DNA, 80 bp, synthetic construct
  source 1..80: mol_type = other DNA
cctcggagaatgattcccaagaagagtcgggaacaatctcaagaagaggagctctcccaaaggtcggcggaacaccgtgg

SEQ ID NO: 44504 - DNA, 80 bp, synthetic construct
  source 1..80: mol_type = other DNA
agtgggccacaagccggcggagagatcgaggatttggagaggagaggggaaccgaggagggttcgaactcaagaagagaa

SEQ ID NO: 44505 - DNA, 80 bp, synthetic construct
  source 1..80: mol_type = other DNA
ctgacgtccagaccctcccccgtccgggagaatggagattcgggaacgtgaagcatggtgtggacgaagccccctccggg

SEQ ID NO: 44506 - DNA, 80 bp, synthetic construct
  source 1..80: mol_type = other DNA
cgctcccctcggatctccgccgggtgggttcacatccccaacccgcgggccggctgttcttcttttcctttgctcgtctt

SEQ ID NO: 44507 - DNA, 80 bp, synthetic construct
  source 1..80: mol_type = other DNA
ccccggtcagcctcccgagttcctcttcttcttccctgctgaggttcttccctccggcggccagttgcttcttcttgttc

SEQ ID NO: 44508 - DNA, 80 bp, synthetic construct
  source 1..80: mol_type = other DNA
tcgagggccttccttcgtcggtgatcccgcctctcctcgtcggtgaaacccgacttgtgcggctttcccctaggtccgga

SEQ ID NO: 44509 - DNA, 80 bp, synthetic construct
  source 1..80: mol_type = other DNA
atcgacctccatttgatccgtccgggccttcttcgttgggggtgctccctccccgtcctttccctttcttatgattccga

SEQ ID NO: 44510 - DNA, 80 bp, synthetic construct
  source 1..80: mol_type = other DNA
tgatattccccaaccagggattgtcatcctcgagtttcttgaggcccttctgggtcttccggagcttcctttcgagatcc

SEQ ID NO: 44511 - DNA, 80 bp, synthetic construct
  source 1..80: mol_type = other DNA
tctcgattttttcttagttccacccacttctcgaggatctcttccctcccacctcgttttctcttctgctcggcggggcc

SEQ ID NO: 44512 - DNA, 80 bp, synthetic construct
  source 1..80: mol_type = other DNA
cccggaaccaggaaatgggaaagagacggtagaaaagagcgagcctcccagttttcgagtagtcccggacctatctaaat

SEQ ID NO: 44513 - DNA, 80 bp, synthetic construct
  source 1..80: mol_type = other DNA
catctcgactggggggcggcgtcctcagtactctcttactttctcaagaaaagaggagactgctggtcgcccgcccccgt

SEQ ID NO: 44514 - DNA, 80 bp, synthetic construct
  source 1..80: mol_type = other DNA
tggagtcatccgaccgtatggagaaaatttccgacaagaggtgatccactgagggtttgcggaaaaatcacctccagagg

SEQ ID NO: 44515 - DNA, 80 bp, synthetic construct
  source 1..80: mol_type = other DNA
gacaagaggtgatccactgagggtttgcggaaaaatcacctccagaggaccccttcagcgaacggaagagactggaagcc

SEQ ID NO: 44516 - DNA, 80 bp, synthetic construct
  source 1..80: mol_type = other DNA
accccttcagcgaacggaagagactggaagccccagaggaagaccatagccatggggagagatgctaggagtgggtggcg

SEQ ID NO: 44517 - DNA, 80 bp, synthetic construct
  source 1..80: mol_type = other DNA
accggaacgaggagaaaagtaaagagagcaacggggctagcgagtggatgttccgcctccccggggagccgagtgaggct

SEQ ID NO: 44518 - DNA, 80 bp, synthetic construct
  source 1..80: mol_type = other DNA
tatcccggagtgccgggcaagtccccccatgcccgttccacggctcccttccagaagggcgcgggtggcctggagcgtcg

SEQ ID NO: 44519 - DNA, 80 bp, synthetic construct
  source 1..80: mol_type = other DNA
ggccccagcagtccgtggaattcaccctcttaccgcttctccacactccttcccccctgcgggctccccccataagatga

SEQ ID NO: 44520 - DNA, 80 bp, synthetic construct
  source 1..80: mol_type = other DNA
cgaggaccccactcatcggggtccgcagtctcatcctttcttacctgatggccggcatggtcccagcctcctcgctggcg

SEQ ID NO: 44521 - DNA, 80 bp, synthetic construct
  source 1..80: mol_type = other DNA
ccggctgggcaacattccgaggggaccgtccctcggtaatggcgaatgggacccagaactctctcagaatctagggagat

SEQ ID NO: 44522 - DNA, 80 bp, synthetic construct
  source 1..80: mol_type = other DNA
gattttcgaggaaatactcccaagaagttcccggagggatccaagagacggacgactttcccctattggttgggaaaagt

SEQ ID NO: 44523 - DNA, 80 bp, synthetic construct
  source 1..80: mol_type = other DNA
ctcccagattcgagagaaaactggctctcccttagccatccgagtggacgtctgtcctcctacggatgcccaggtcggac

SEQ ID NO: 44524 - DNA, 80 bp, synthetic construct
  source 1..80: mol_type = other DNA
cgcggggaggtggagatgccatgccgacccgaagaggaaagaaggactcggacgcgaacccgtgagtggaaacctcgttc

SEQ ID NO: 44525 - DNA, 80 bp, synthetic construct
  source 1..80: mol_type = other DNA
tttattgtggagtacactcgaggagtggaaggcggggagggcgtggaggagtgttaccctacgggaactgctgagtgccc

SEQ ID NO: 44526 - DNA, 80 bp, synthetic construct
  source 1..80: mol_type = other DNA
atggccgagttgccgaagaagagccggaggaggagaggagtggggtcccgaggtggatgcaagccaaagagtggagaatt

SEQ ID NO: 44527 - DNA, 80 bp, synthetic construct
  source 1..80: mol_type = other DNA
tcatcggtcaaccttcggagttcctcttcctcctccttgctgagtgactttcctcccgcgctcagttgtttcttcttgtt

SEQ ID NO: 44528 - DNA, 80 bp, synthetic construct
  source 1..80: mol_type = other DNA
tttcttctgatcggactggctcatcttcggcaaggggggcggcggattccgttctctattcttttcttgaaagaggaaac

SEQ ID NO: 44529 - DNA, 80 bp, synthetic construct
  source 1..80: mol_type = other DNA
cggcaaggggtgcggcggattccgttctctattcttttcttgaaagaggaaacgggtttccgcccgcccccgagtccgag

SEQ ID NO: 44530 - DNA, 80 bp, synthetic construct
  source 1..80: mol_type = other DNA
ctccgacctgtgaggtcgagaactcccgcggagggaggcagccaccaggagaagacagagaaaccacctccagaggaccc

SEQ ID NO: 44531 - DNA, 80 bp, synthetic construct
  source 1..80: mol_type = other DNA
ttcggagaatgacccccaagaagagtcaggagtttcctcaagaagaggagttttcccaaaggtaggtggaacaccaggga

SEQ ID NO: 44532 - DNA, 80 bp, synthetic construct
  source 1..80: mol_type = other DNA
aggaaataggagaaagatcggtagaaaagagcgagccctccgatccgatagggccctggacccctcagctctggagtcat

SEQ ID NO: 44533 - DNA, 80 bp, synthetic construct
  source 1..80: mol_type = other DNA
tcggggaatggcccccaagaagaaccaggaacacctcaagaagaggagttttcccaaacgctggtagagctccgggaaca

SEQ ID NO: 44534 - DNA, 80 bp, synthetic construct
  source 1..80: mol_type = other DNA
gcgttcgagcatgggccacaagccgacgaggagaccgaggatttggagaggaggagaaaccgaggtgggttcgaacttaa

SEQ ID NO: 44535 - DNA, 80 bp, synthetic construct
  source 1..80: mol_type = other DNA
ggaggaggagaaaccgaggggggttcgaacttaagaagagaagattttcgaggagatactcccaagaagctccagagaga

SEQ ID NO: 44536 - DNA, 80 bp, synthetic construct
  source 1..80: mol_type = other DNA
ccgtgttcgagcatgggccacaagtcggcgaagagatcgaggatttagggagaagagaggaaccgagggaggttcgaact

SEQ ID NO: 44537 - DNA, 80 bp, synthetic construct
  source 1..80: mol_type = other DNA
gccacaagtcggcgaagagatcgaggatttagggagaagagaggaaccgaggggggttcgaacttaaagaagagagaatt

SEQ ID NO: 44538 - DNA, 80 bp, synthetic construct
  source 1..80: mol_type = other DNA
agaattttcgaggaaatactcccaagaaacccggagaggtccaagagatggaggactttccctcattggttgggggagtc

SEQ ID NO: 44539 - DNA, 80 bp, synthetic construct
  source 1..80: mol_type = other DNA
ggaactcggcgaatcgtccccacataccaaagtccccggggccccttccaaattgaccgagggaggaagctaggagcatt

SEQ ID NO: 44540 - DNA, 80 bp, synthetic construct
  source 1..80: mol_type = other DNA
aaattgaccgaggggggaagctaggagcattgggaggaccagtggagccgtggagatgcccttccccgtcttcgatcaat

SEQ ID NO: 44541 - DNA, 80 bp, synthetic construct
  source 1..80: mol_type = other DNA
gggaggaccagtggagccgtggagatgcccttccccgtcttcgatcaatcccactcccccctgcagggtcgcccaggaat

SEQ ID NO: 44542 - DNA, 80 bp, synthetic construct
  source 1..80: mol_type = other DNA
atgggccgcaggccgaacgaggacgacggtaaggggagaggaaggatcccgaagggatcacccactaaagagtagaggaa

SEQ ID NO: 44543 - DNA, 80 bp, synthetic construct
  source 1..80: mol_type = other DNA
acgcccgtgatgtccagtccctcccccgtccgagcgaagggagactccggaactcctgtcatctgagggacgaatccgcc

SEQ ID NO: 44544 - DNA, 80 bp, synthetic construct
  source 1..80: mol_type = other DNA
ctctgccttttttcttgtggagatccacttttcgaggatttcttcccttcctcccctccggcccttcctcgattcggatt

SEQ ID NO: 44545 - DNA, 80 bp, synthetic construct
  source 1..80: mol_type = other DNA
gccatccgggccaaagggttgagatgacccacaaacgggagccaccaggagggttcgaggagaattcacctccagaggac

SEQ ID NO: 44546 - DNA, 80 bp, synthetic construct
  source 1..80: mol_type = other DNA
cctcttagcgaacggaggagtctctacctcggtgggaaagagaagaccatagcgatggaagagatgctaggagtaggcgg

SEQ ID NO: 44547 - DNA, 80 bp, synthetic construct
  source 1..80: mol_type = other DNA
gggaaagagaagaccatagcgatggaagagatgctaggagtaggcggcgaccgaagcgaggaggaaagcaaagaaagcaa

SEQ ID NO: 44548 - DNA, 80 bp, synthetic construct
  source 1..80: mol_type = other DNA
cgaccgaagcgaggaggaaagcaaagaaagcaacggggctagcgagtggatgttccgccccaaggggagccgagtgaggc

SEQ ID NO: 44549 - DNA, 80 bp, synthetic construct
  source 1..80: mol_type = other DNA
ttatcccggggaactcggtaattcgccccgagatgaggactccggatccccttccaaaaagacggagtgtggtggccagg

SEQ ID NO: 44550 - DNA, 80 bp, synthetic construct
  source 1..80: mol_type = other DNA
agatgaggactccggatccccttccaaaaagacggagggtggtggccaggaatccggatccagtggatccgtgggattca

SEQ ID NO: 44551 - DNA, 80 bp, synthetic construct
  source 1..80: mol_type = other DNA
ttatcccgtggaactcggttccttgccccgaaatgaggactccggactcccttccaaaagggcggagtgtggtgactagg

SEQ ID NO: 44552 - DNA, 80 bp, synthetic construct
  source 1..80: mol_type = other DNA
aaatgaggactccggactcccttccaaaagggcggagggtggtgactaggaatcgggttccagtggatccgtggagttaa

SEQ ID NO: 44553 - DNA, 80 bp, synthetic construct
  source 1..80: mol_type = other DNA
aatcgggttccagtggatccgtggagttaacccgctccaccccttcggcacactccttcccccctgcgggcccccccata

SEQ ID NO: 44554 - DNA, 80 bp, synthetic construct
  source 1..80: mol_type = other DNA
atgggcctcagctccgactaaggaccggaggaggagaggagagaagacccgaggtggaatgcaagctaagagtggagcat

SEQ ID NO: 44555 - DNA, 80 bp, synthetic construct
  source 1..80: mol_type = other DNA
ctccgcctcttttcttgcttgcaaccacttttcgaggacttcctccctgcctcccctccgggatttccttcgatcggaca

SEQ ID NO: 44556 - DNA, 80 bp, synthetic construct
  source 1..80: mol_type = other DNA
ggctcatcttcgatagaggggcggcggcgtccgttctctattcttttcactagaaagaggagacgggtctccgcccgccc

SEQ ID NO: 44557 - DNA, 80 bp, synthetic construct
  source 1..80: mol_type = other DNA
accagggaaccaggggaaggaacggaagaaaagagcgagccctccgatccgagaggccctggacccctcagctctggagt

SEQ ID NO: 44558 - DNA, 80 bp, synthetic construct
  source 1..80: mol_type = other DNA
cgatagaggggcggcggcgtccgttctctattcttttcactagaaagaggagacgggtctccgcccgccctcggatcgag

SEQ ID NO: 44559 - DNA, 80 bp, synthetic construct
  source 1..80: mol_type = other DNA
catccgacctgtgaggtcgaggttctccgtggagggagacggccaccaggagaaggcagaaaaatcacctccagaggacc

SEQ ID NO: 44560 - DNA, 80 bp, synthetic construct
  source 1..80: mol_type = other DNA
ccttcaacgaacaatgaagcgcactggagcgctggagagagcgtagcgataggaggggatgctaggagtcggcggcgacc

SEQ ID NO: 44561 - DNA, 80 bp, synthetic construct
  source 1..80: mol_type = other DNA
ttatcccggggaactcggcaagtccccgaaatagccggtcccacggcttccacttccaaaaggaggaagaggtggacttg

SEQ ID NO: 44562 - DNA, 80 bp, synthetic construct
  source 1..80: mol_type = other DNA
cgtcggggaaggtactcccaagaggaccagagggaattccaagaagaggaaatctccccaacgcgggtggagcaccggag

SEQ ID NO: 44563 - DNA, 80 bp, synthetic construct
  source 1..80: mol_type = other DNA
caacgaacaaagaagcgctctgaggcgtcagggtgagaccatagcgataggagaggatgctgggagtcagcggcgaccaa

SEQ ID NO: 44564 - DNA, 80 bp, synthetic construct
  source 1..80: mol_type = other DNA
ttgagccacgttcggagcgaagagacgcggagggaaggatcatctcccgagaggggtcacctggttaagaaatgaggaaa

SEQ ID NO: 44565 - DNA, 80 bp, synthetic construct
  source 1..80: mol_type = other DNA
cctctgatgtccagtccctccccggttctactgaaggtggactccgggacgccttgcaagctggggacgaagccgccccc

SEQ ID NO: 44566 - DNA, 80 bp, synthetic construct
  source 1..80: mol_type = other DNA
ctcttgtttctttcttccagacacccactgctcgaggatgtcttctcttcccccgcggtacttcttcgactccgaccggc

SEQ ID NO: 44567 - DNA, 80 bp, synthetic construct
  source 1..80: mol_type = other DNA
tggaatgggaaaagaaggaaggtggaagaaaaggaggagtcccccgatccgaggggcccgacccccagaactggagagca

SEQ ID NO: 44568 - DNA, 80 bp, synthetic construct
  source 1..80: mol_type = other DNA
ctcctcggaccgatgatggagaaagaatcccagagggaggaaatccactcggagtgaggagaaaaatcacctccagagga

SEQ ID NO: 44569 - DNA, 80 bp, synthetic construct
  source 1..80: mol_type = other DNA
agtgaggagaaaaatcacctccagaggaccccttcagcgaacagaggagtctcgctccgcaggagtaagaccatagcgat

SEQ ID NO: 44570 - DNA, 80 bp, synthetic construct
  source 1..80: mol_type = other DNA
ccccttcagcgaacagaggagtctcgctccgcaggagtaagaccatagcgatggggggagatgctaggagttagtggaga

SEQ ID NO: 44571 - DNA, 80 bp, synthetic construct
  source 1..80: mol_type = other DNA
ttatcccggggaattcgacttatcgtccccacttagcagctcccggactcccttcaaaaagggaaccggtgggatcactt

SEQ ID NO: 44572 - DNA, 80 bp, synthetic construct
  source 1..80: mol_type = other DNA
gactcccttcaaaaagggaaccggggggatcacttggagcacagggcccagttgggtccgtgggatgctcttcccgatta

SEQ ID NO: 44573 - DNA, 80 bp, synthetic construct
  source 1..80: mol_type = other DNA
ggagcacagggcccagttgggtccgtgggatgctcttcccgattaccgatgccaaaccccccccagggagtccccccagg

SEQ ID NO: 44574 - DNA, 80 bp, synthetic construct
  source 1..80: mol_type = other DNA
gtcgaggagggtttcccccaagagggccaagagaactcaagattcggaagagtttccccataacgctggcaaaagcatct

SEQ ID NO: 44575 - DNA, 80 bp, synthetic construct
  source 1..80: mol_type = other DNA
ccgggcgaagggttgattaccactcagggaggaacacacggagttagaacagagaaatcacctccagaggaccccttcag

SEQ ID NO: 44576 - DNA, 80 bp, synthetic construct
  source 1..80: mol_type = other DNA
ttatcccggggaactcggcgaatcgtccccacataccaggttccccagggccccttccaaattgaccgagggaggaagct

SEQ ID NO: 44577 - DNA, 80 bp, synthetic construct
  source 1..80: mol_type = other DNA
gccccttccaaattgaccgaggggggaagctaggaacaatgggaggaccagtggagccttggagatgctctctcccgatt

SEQ ID NO: 44578 - DNA, 80 bp, synthetic construct
  source 1..80: mol_type = other DNA
aggaacaatgggaggaccagtggagccttggagatgctctctcccgattccgcccaaacccactccccccggcagggtcg

SEQ ID NO: 44579 - DNA, 80 bp, synthetic construct
  source 1..80: mol_type = other DNA
ccgctttattcactggggtcgacagctctggggagaaaagggagagtcggaagggaagagcaagtcctaagggaatccat

SEQ ID NO: 44580 - DNA, 80 bp, synthetic construct
  source 1..80: mol_type = other DNA
atgggccgcaagccgaacgaaggattccggtaaggggagaggaagaatcccgaaggggttccccactaaagagtggaaga

SEQ ID NO: 44581 - DNA, 80 bp, synthetic construct
  source 1..80: mol_type = other DNA
tcgcctctgatgtccagtccctcccccgtccgagagaagggagattcgggaacgttcagcatttgagggacgaagccacc

SEQ ID NO: 44582 - DNA, 80 bp, synthetic construct
  source 1..80: mol_type = other DNA
tctctggtcaacctctggagttccccttcctcttccttgctgagtgtctttcctcccgcgctcagctgtttcttcttgtt

SEQ ID NO: 44583 - DNA, 80 bp, synthetic construct
  source 1..80: mol_type = other DNA
cttccgccttttttcttgtggatacccacttttcgaggatatcttcccttcctcccctccggcttttcctcgattcggat

SEQ ID NO: 44584 - DNA, 80 bp, synthetic construct
  source 1..80: mol_type = other DNA
agtcatccgggccaaagggttgaaaaatcccacagacgggagccaccaggagggatctaggagaatccacctccagagga

SEQ ID NO: 44585 - DNA, 80 bp, synthetic construct
  source 1..80: mol_type = other DNA
cccccctcaatgaacagaagactctctacctcggaggaccatagcgataggagaggatgctgggagtcagcggcgaccaa

SEQ ID NO: 44586 - DNA, 80 bp, synthetic construct
  source 1..80: mol_type = other DNA
ccggggagattcggcctagtcccgaaatgtctggttccgtcggctccacttccaaaaggaggagcgggtgtgcttggagc

SEQ ID NO: 44587 - DNA, 80 bp, synthetic construct
  source 1..80: mol_type = other DNA
acaggggaccagtcagtccgttggactaccccggacctcccgttctccacactccttcccccctgcgggccccccaataa

SEQ ID NO: 44588 - DNA, 80 bp, synthetic construct
  source 1..80: mol_type = other DNA
gatggaaagaacccacccactggggtccgacgtccccaccctttcttacctgtggccggcatggtcccagcctccctcgc

SEQ ID NO: 44589 - DNA, 80 bp, synthetic construct
  source 1..80: mol_type = other DNA
attctcgggaagcttctcccaagaagaaccagaatcccccaagagagagaatggatccccatgacgctggaagagactcc

SEQ ID NO: 44590 - DNA, 80 bp, synthetic construct
  source 1..80: mol_type = other DNA
atgggcctcgtgccgacgagaggccggagacggaggaatcggggatcccgaggagggaaccaaccaaagaaggtgaattt

SEQ ID NO: 44591 - DNA, 80 bp, synthetic construct
  source 1..80: mol_type = other DNA
cctgatgtccagcccatctcccgtcctagagaagggagattccggaactccagtcatttgagggacgaagccgcccccgg

SEQ ID NO: 44592 - DNA, 80 bp, synthetic construct
  source 1..80: mol_type = other DNA
cttccgcgtcttttcttgcttggacccatttctcgaggatttcctctcttcctcccctccgagatctcttctgttcggac

SEQ ID NO: 44593 - DNA, 80 bp, synthetic construct
  source 1..80: mol_type = other DNA
tggctcatcttcggaaaagggggcggcggcgcctgttctcttattttcctcttagaaaaggagacagttggccgctcgcc

SEQ ID NO: 44594 - DNA, 80 bp, synthetic construct
  source 1..80: mol_type = other DNA
aaggaaacaggagaaggaacggtagaaaagagcgagcctcccagttcgagagtcccggacccctcggctctggagtccac

SEQ ID NO: 44595 - DNA, 80 bp, synthetic construct
  source 1..80: mol_type = other DNA
ggaaaagggtgcggcggcgcctgttctcttattttcctcttagaaaaggagacagttggccgctcgcccccaaccccgag

SEQ ID NO: 44596 - DNA, 80 bp, synthetic construct
  source 1..80: mol_type = other DNA
cgacctgtgaggtcgaggctctccgtgcagggagacagccaccaggagaaggcagagaaatcacctccagaggacccctt

SEQ ID NO: 44597 - DNA, 80 bp, synthetic construct
  source 1..80: mol_type = other DNA
caacgaacaaagaagcgctctgaggcgtcagggtgagaaaaagaccatagcgataggaagagatgctaggagtaggcggc

SEQ ID NO: 44598 - DNA, 80 bp, synthetic construct
  source 1..80: mol_type = other DNA
ttatcccggggaactcggcgtatcgtcccgaaatgaggagcccggatccccttccaaaaagacggagaggtggtgactag

SEQ ID NO: 44599 - DNA, 80 bp, synthetic construct
  source 1..80: mol_type = other DNA
agacggagagggggtgactaggaatcgggctccggtggatccgtgggaccagcccgctccacctccgcggcacactcctt

SEQ ID NO: 44600 - DNA, 80 bp, synthetic construct
  source 1..80: mol_type = other DNA
gaatcgggctccggtggatccgtgggaccagcccgctccacctccgcggcacactccttcccccctgcgggcccccccat

SEQ ID NO: 44601 - DNA, 80 bp, synthetic construct
  source 1..80: mol_type = other DNA
cccggtagaagtatctcctagaagaaccgagagcatctcagatgaaggagatctcccaaacgccggtggactccgggaac

SEQ ID NO: 44602 - DNA, 80 bp, synthetic construct
  source 1..80: mol_type = other DNA
tctctggtcaacctctggagttccccttcctcttccttgctgaggctctttcctcccgcggagagctgctttctcttgtt

SEQ ID NO: 44603 - DNA, 80 bp, synthetic construct
  source 1..80: mol_type = other DNA
gggtaaccaagttaagaagaaggaacggtagaaaggagcgggcctcccgattcgagtggtccacggcgcatcaagtttgg

SEQ ID NO: 44604 - DNA, 80 bp, synthetic construct
  source 1..80: mol_type = other DNA
cccccctcagcgaacagaggagcatcctcctcggaggaccatagcgataggagaggatgctgggagtcagcggcgaccaa

SEQ ID NO: 44605 - DNA, 80 bp, synthetic construct
  source 1..80: mol_type = other DNA
agcgagaagcgaaagtaaagaaagcaacggggctagcagacggatgttccgccccccggcggtcccgagtgaggcttatc

SEQ ID NO: 44606 - DNA, 80 bp, synthetic construct
  source 1..80: mol_type = other DNA
tcccgagtgaggcttatcccggggagattcggcctagtcccgaaatgtctggttccgagagcccctcttcgaagtgacgg

SEQ ID NO: 44607 - DNA, 80 bp, synthetic construct
  source 1..80: mol_type = other DNA
ccggtgagattcggcctagtcccgaaatgtctggttccgagagcccctcttcgaagtgacgggggggggtcactaggaac

SEQ ID NO: 44608 - DNA, 80 bp, synthetic construct
  source 1..80: mol_type = other DNA
tgatcctttattgggtggtacactcgaggagtggaaggcgctgctggggtggagatgggcttacctacgggaatccctga

SEQ ID NO: 44609 - DNA, 80 bp, synthetic construct
  source 1..80: mol_type = other DNA
tcatccgccttttttcttgtggttatccacttctcgaggatgtcttcccttcctcccctccggctcttcctcgcttcgga

SEQ ID NO: 44610 - DNA, 80 bp, synthetic construct
  source 1..80: mol_type = other DNA
ttatcccggggaacccggcatctcgtcccgaaatgaggactccgggtccccttccaaaaagacggagaggtggtggctcg

SEQ ID NO: 44611 - DNA, 80 bp, synthetic construct
  source 1..80: mol_type = other DNA
ttacccctgatgtccagcccctcccccgtccgagagaagggggattccggaacgccagtcatttgagggacgaagccgcc

SEQ ID NO: 44612 - DNA, 80 bp, synthetic construct
  source 1..80: mol_type = other DNA
ctccgcctttcttcttgtggttatccacttttcgaggatatcttcccttcctcccctccgactcttccttgtttcggatt

SEQ ID NO: 44613 - DNA, 80 bp, synthetic construct
  source 1..80: mol_type = other DNA
cccccttcagcgaacagaagagtctctacctcggaggagaaagaccatagcgatggaaagagatgctaggagtgggcggc

SEQ ID NO: 44614 - DNA, 80 bp, synthetic construct
  source 1..80: mol_type = other DNA
attctcggagagcttctcccaagaagaaccaggagccctcaagagagaggaagaatccccatgacgctggaagagactcc

SEQ ID NO: 44615 - DNA, 80 bp, synthetic construct
  source 1..80: mol_type = other DNA
atgggccgcattccgaacgaaggattccgacagagggagaggtggaatcccgaggggattacccactaaagagtggatga

SEQ ID NO: 44616 - DNA, 80 bp, synthetic construct
  source 1..80: mol_type = other DNA
gaaccagggtccagtggatccgtgggattattccgttccacccccgcggcacactccttcccccctgcgggccccgccat

SEQ ID NO: 44617 - DNA, 80 bp, synthetic construct
  source 1..80: mol_type = other DNA
cacagacgggagccaccaggagggatcgaggagatctcacctccagaggacccccttcagcgaacagaagagtctctacc

SEQ ID NO: 44618 - DNA, 80 bp, synthetic construct
  source 1..80: mol_type = other DNA
cccccttcagcgaacagaagagtctctaccccggagtggagagaccgtagcgatggtgggagatgctaggagtgtgcggc

SEQ ID NO: 44619 - DNA, 80 bp, synthetic construct
  source 1..80: mol_type = other DNA
tagcgagtggatgttccgccccaaggggagccgagtgaggcttatcccggggaactcggccaatcgtcccgaaatgacga

SEQ ID NO: 44620 - DNA, 80 bp, synthetic construct
  source 1..80: mol_type = other DNA
ttatcccggagaactcggccaatcgtcccgaaatgacgagtccgggtccccttccaaaaagacggaggtggtggaactga

SEQ ID NO: 44621 - DNA, 80 bp, synthetic construct
  source 1..80: mol_type = other DNA
aacctcggggagcttctcccaagaaggtccaagatccctcaaaagagaggatgaatccccatgacgctggaagagactcc

SEQ ID NO: 44622 - DNA, 80 bp, synthetic construct
  source 1..80: mol_type = other DNA
atgggccgcagaccgaacgaaggataccggtcaggggagaggaagaatcccgaagggattccccactaaagagcagagga

SEQ ID NO: 44623 - DNA, 80 bp, synthetic construct
  source 1..80: mol_type = other DNA
cgtctgcctttcttcttgtggatatccacttatcgaggatttcttcccttcctcccctccggtgcttcctcgattcgggt

SEQ ID NO: 44624 - DNA, 80 bp, synthetic construct
  source 1..80: mol_type = other DNA
gaatcgggctccagtggatccgtgggaccaatccattccacccccgcggcacactccttcccccctatgggccccgccat

SEQ ID NO: 44625 - DNA, 80 bp, synthetic construct
  source 1..80: mol_type = other DNA
accttgatcctttattgggtggtacactcaaggagtggaaggcgctgcccggtgggaattggatttacctacgggaatcc

SEQ ID NO: 44626 - DNA, 80 bp, synthetic construct
  source 1..80: mol_type = other DNA
atgggccaccagccgaacgaaggacgccgggaaggggagaggaggaatcccgaagggattacccactaaagagtagagga

SEQ ID NO: 44627 - DNA, 80 bp, synthetic construct
  source 1..80: mol_type = other DNA
aggtaaccaagttaaggagaaggaacggtagaaaagagcgagcctctcgatacggaggggccacgacctatcgagattgg

SEQ ID NO: 44628 - DNA, 80 bp, synthetic construct
  source 1..80: mol_type = other DNA
ttatcccggggaactcggtgatttgccccgaaatgaggactccggatccacttccgaaaagacggagaggtggtgactag

SEQ ID NO: 44629 - DNA, 80 bp, synthetic construct
  source 1..80: mol_type = other DNA
attctcggaaagcttctcccaagaagaaccaaaacgtctcaaaagagaggatgaatccccatgacgctggaagagactcc

SEQ ID NO: 44630 - DNA, 80 bp, synthetic construct
  source 1..80: mol_type = other DNA
cccccctcaatgaacagaagactctctacctcggaggaaaaagaccatagcgatgggaggagatgctaggagtaggcggc

SEQ ID NO: 44631 - DNA, 80 bp, synthetic construct
  source 1..80: mol_type = other DNA
gacgatagcgatagcaagttgtcctaagttaacaatcaatccggaccttaaataaagtagcttattaataaatcatcatg

SEQ ID NO: 44632 - DNA, 80 bp, synthetic construct
  source 1..80: mol_type = other DNA
ttaataattgacaataacaatcatgcaatatatccatattaagtgaattctctatgctattattataatcagaaaaaaat

SEQ ID NO: 44633 - DNA, 80 bp, synthetic construct
  source 1..80: mol_type = other DNA
aaacagcaataaggggggacccatcatccaaccgaccataaccatggctcctacccaatccaaagtcagaatccacaatc

SEQ ID NO: 44634 - DNA, 80 bp, synthetic construct
  source 1..80: mol_type = other DNA
cccatcatccaaccgaccataaccatggctcctacccaatccaaagtcagaatccacaatctagccgaagctcacgagaa

SEQ ID NO: 44635 - DNA, 80 bp, synthetic construct
  source 1..80: mol_type = other DNA
gtaatatcctacatccttctccactgtaccgctagcatcatttagatccatagaaccatattacactatgcaacatccga

SEQ ID NO: 44636 - DNA, 80 bp, synthetic construct
  source 1..80: mol_type = other DNA
tccacaatcctcctccaacaatcaccagcaaaacaaaccaacactcaatcaaacaatctccacatttcaattttaagaaa

SEQ ID NO: 44637 - DNA, 80 bp, synthetic construct
  source 1..80: mol_type = other DNA
tcataaatcgacctcagagcaaaaacaacatcgatctataatagtcaacataaccaacaatattccatgaggcctcacct

SEQ ID NO: 44638 - DNA, 80 bp, synthetic construct
  source 1..80: mol_type = other DNA
atcaacagcaaaaagcacagtccatcaaacagagcccaactcgcttcatcctcaaccatccactgaaagaaaaaatacat

SEQ ID NO: 44639 - DNA, 80 bp, synthetic construct
  source 1..80: mol_type = other DNA
atagccaagtgccgaggaggagccggagaaggagaggaaagaatcccgaggggggttgcaagccaaagagaggaggaatc

SEQ ID NO: 44640 - DNA, 80 bp, synthetic construct
  source 1..80: mol_type = other DNA
tactgctggtctcccctgatgtccagtccttccccggttctggagaagggagactcggggacacctagcaaccgagggac

SEQ ID NO: 44641 - DNA, 80 bp, synthetic construct
  source 1..80: mol_type = other DNA
aaagccgcccccgggcgctcccctcggagatccttcgagtgggttcacatccccaacccgcgggccggctactcttcttt

SEQ ID NO: 44642 - DNA, 80 bp, synthetic construct
  source 1..80: mol_type = other DNA
ctccgattcctttcttgcttgcacccacttctcgaggatctcttccctgcctcccctccgggacttcttctgatcggact

SEQ ID NO: 44643 - DNA, 80 bp, synthetic construct
  source 1..80: mol_type = other DNA
ccctccgggacttcttctgatcggactggctcatcctcggagagggggggcggcgatgtccgttctctattcttttcttt

SEQ ID NO: 44644 - DNA, 80 bp, synthetic construct
  source 1..80: mol_type = other DNA
ggctcatcctcggagagggggggcggcgatgtccgttctctattcttttcttttgaaagaggagacgtgactctgctcgc

SEQ ID NO: 44645 - DNA, 80 bp, synthetic construct
  source 1..80: mol_type = other DNA
agagggggggcggcgatgtccgttctctattcttttcttttgaaagaggagacgtgactctgctcgccccccggtccgtg

SEQ ID NO: 44646 - DNA, 80 bp, synthetic construct
  source 1..80: mol_type = other DNA
cttcagcgaacaatgaagcgcactgagccgtcagggtaagtccatagcgatacgaggggatgctgggagtcggcggcgac

SEQ ID NO: 44647 - DNA, 80 bp, synthetic construct
  source 1..80: mol_type = other DNA
atgttccgcctccccgaggtcccgagtgaggcttatcccggggaacccggccaagtcccgggttgactgttcccagatct

SEQ ID NO: 44648 - DNA, 80 bp, synthetic construct
  source 1..80: mol_type = other DNA
ttatcccggggaacccggccaagtcccgggttgactgttcccagatctccccttcaaaaaggaaccgtggtggtccttgg

SEQ ID NO: 44649 - DNA, 80 bp, synthetic construct
  source 1..80: mol_type = other DNA
aacacggaggagcagtccagtccgtgggattgccccggacctccggttctccacactccttccccccgcgggctcctcca

SEQ ID NO: 44650 - DNA, 80 bp, synthetic construct
  source 1..80: mol_type = other DNA
gacggagaatgtcccccaagaagagtcgagagcgatctcaagaagaggatctctcccaagggtcggtggaacgcccggga

SEQ ID NO: 44651 - DNA, 80 bp, synthetic construct
  source 1..80: mol_type = other DNA
ggtgaagctttcacatttattggggagtacactcgaggagtggaaggcggtgaggccggggtcccgggtctacctacgcg

SEQ ID NO: 44652 - DNA, 80 bp, synthetic construct
  source 1..80: mol_type = other DNA
ctctcacgtccagtccctcccctgtcctagagaagggagactcggggacgctcagcatctgagggacaaagccgcccccg

SEQ ID NO: 44653 - DNA, 80 bp, synthetic construct
  source 1..80: mol_type = other DNA
tcagcgaacaatgaagcgctctgagccgtcagggtaagaccatagcgatagaaggggatgctaggagtcggcggaggccg

SEQ ID NO: 44654 - DNA, 80 bp, synthetic construct
  source 1..80: mol_type = other DNA
atgggccgaagttccgacaaaggaccggaggaggagaggagagatgcccagaaggtggatgcaagccaaagagtggagga

SEQ ID NO: 44655 - DNA, 80 bp, synthetic construct
  source 1..80: mol_type = other DNA
ggtctccccttatgtccagtccctcccctcttctggagaagggagactcgggaacgccaagcaaccgagggacaaagcca

SEQ ID NO: 44656 - DNA, 80 bp, synthetic construct
  source 1..80: mol_type = other DNA
ctccgcatcctttcttgcttgtacccacttttcgagggcatcctccctacctcccctccgggatttcctttgatcgggct

SEQ ID NO: 44657 - DNA, 80 bp, synthetic construct
  source 1..80: mol_type = other DNA
ggctcatcttcggagagggggcggcggcttctgttctctattcttttctcttgaaagaggagacaggttgccgctcgccc

SEQ ID NO: 44658 - DNA, 80 bp, synthetic construct
  source 1..80: mol_type = other DNA
ggagagggggcggcggcttctgttctctattcttttctcttgaaagaggagacaggttgccgctcgcccccgcacccgag

SEQ ID NO: 44659 - DNA, 80 bp, synthetic construct
  source 1..80: mol_type = other DNA
ctccgccctgtgaggtcgagatctctcgcgcagggagacagccaccaggagagagcagagaaatcacctccagaggaccc

SEQ ID NO: 44660 - DNA, 80 bp, synthetic construct
  source 1..80: mol_type = other DNA
gagtgaggcttatcccgggagattcggccaagtcccgggattgctggctccgctggctcctcttccaaatggagaaaggg

SEQ ID NO: 44661 - DNA, 80 bp, synthetic construct
  source 1..80: mol_type = other DNA
ttatcccgggagattcggccaagtcccgggattgctggctccgctggctcctcttccaaatggagaaaggtgtggacttg

SEQ ID NO: 44662 - DNA, 80 bp, synthetic construct
  source 1..80: mol_type = other DNA
ttttcggaaaaatgcccccaagaagaactgggacgatctcaagaagaggaatattcccaaacgctggtgaacctccggga

SEQ ID NO: 44663 - DNA, 80 bp, synthetic construct
  source 1..80: mol_type = other DNA
atgggcctcagtgccgccgaaggtccggagatggaggagaaagggccccgaaagggtctgcaagcaaagagtagaagatc

SEQ ID NO: 44664 - DNA, 80 bp, synthetic construct
  source 1..80: mol_type = other DNA
aggatgtttcccagccagggattttcatcctcgagtctcttgacggtcttcctgctcttccggagccttctctcgagatc

SEQ ID NO: 44665 - DNA, 80 bp, synthetic construct
  source 1..80: mol_type = other DNA
ttctatatcctttcttgcttgcaaccacttctcgaggacatcctctcttcctcccctccgagatttcttctggtcggact

SEQ ID NO: 44666 - DNA, 80 bp, synthetic construct
  source 1..80: mol_type = other DNA
ggctcatcttcggatagggggcgacggcgtctgttctcttattcttccttttgaagaggagacagctagccgcctgcccc

SEQ ID NO: 44667 - DNA, 80 bp, synthetic construct
  source 1..80: mol_type = other DNA
cggatagggggcgacggcgtctgttctcttattcttccttttgaagaggagacagctagccgcctgcccccagccccgag

SEQ ID NO: 44668 - DNA, 80 bp, synthetic construct
  source 1..80: mol_type = other DNA
ccttcaacgaacaaggaggcgcactgaggcgctaggatgagaccatagcgataggaggggatgctaggagtcggcggcga

SEQ ID NO: 44669 - DNA, 80 bp, synthetic construct
  source 1..80: mol_type = other DNA
gagtgaggcttatcccggggaactcggcccagtcccgaaatgtctggttccaccgtctcctcttccaaaaaggaggatcg

SEQ ID NO: 44670 - DNA, 80 bp, synthetic construct
  source 1..80: mol_type = other DNA
ttatcccggggaactcggcccagtcccgaaatgtctggttccaccgtctcctcttccaaaaaggaggatcgggtggactt

SEQ ID NO: 44671 - DNA, 80 bp, synthetic construct
  source 1..80: mol_type = other DNA
cccggtggaagaactcccaagaagaagcggagacgatcccaagaggaggatggatcccccaacgctggcgaggcacccgg

SEQ ID NO: 44672 - DNA, 80 bp, synthetic construct
  source 1..80: mol_type = other DNA
atggccgagtgccgaggaagaaccggaggaggagaggagaggatccggagaggggatgcaagccaaagagtggaagatcc

SEQ ID NO: 44673 - DNA, 80 bp, synthetic construct
  source 1..80: mol_type = other DNA
ggttacctcttatgtccagtccttccccggttctggagaagggagactcggggacgttgagcatctgagggacgaagccg

SEQ ID NO: 44674 - DNA, 80 bp, synthetic construct
  source 1..80: mol_type = other DNA
cttccgcatcctttcttgcttgtacccacttctcgaggatctcctccctgcctcccctccggggtttcttctgatcggac

SEQ ID NO: 44675 - DNA, 80 bp, synthetic construct
  source 1..80: mol_type = other DNA
tttcttctgatcggactggctcatcttcggcaaggggggaggcggtatccgttctctagtcttttcattcgaaagaggag

SEQ ID NO: 44676 - DNA, 80 bp, synthetic construct
  source 1..80: mol_type = other DNA
tggctcatcttcggcaaggggggaggcggtatccgttctctagtcttttcattcgaaagaggagacgggtttccgcccgc

SEQ ID NO: 44677 - DNA, 80 bp, synthetic construct
  source 1..80: mol_type = other DNA
gcaaggggagaggcggtatccgttctctagtcttttcattcgaaagaggagacgggtttccgcccgccccccggaccgag

SEQ ID NO: 44678 - DNA, 80 bp, synthetic construct
  source 1..80: mol_type = other DNA
atccgtcccgtgaggtcgagaattcccgcgcagggagacagccaccaggagaaagcagaaaaatcacctccagaggaccc

SEQ ID NO: 44679 - DNA, 80 bp, synthetic construct
  source 1..80: mol_type = other DNA
cttcagcgaacaatgaagcgcgctgagccgtcaggatgagctcatagcgataggagaggatgctgggagtcagcggcgac

SEQ ID NO: 44680 - DNA, 80 bp, synthetic construct
  source 1..80: mol_type = other DNA
cgagtgaggcttatcccggggaactcggcccagtcccgagatagctactcccacggtctcctcttcaaaaagggaccggg

SEQ ID NO: 44681 - DNA, 80 bp, synthetic construct
  source 1..80: mol_type = other DNA
ttatcccggggaactcggcccagtcccgagatagctactcccacggtctcctcttcaaaaagggaccgggtggaggactt

SEQ ID NO: 44682 - DNA, 80 bp, synthetic construct
  source 1..80: mol_type = other DNA
tcgaagaatgacccccaagaagagtcgagggcgatctcaagaagaggagttttcccaaaggtcggtggaacgccagggaa

SEQ ID NO: 44683 - DNA, 80 bp, synthetic construct
  source 1..80: mol_type = other DNA
aagcacattacagagcagacgggcagctgtgtctgcattggagaccaaactcggagaactcaaacgggagctggctgatc

SEQ ID NO: 44684 - DNA, 80 bp, synthetic construct
  source 1..80: mol_type = other DNA
atagccgagttgccgaagagggaccggaggaggagaggaaggagatcccgagggggatacaagccaaagagtggagaaac

SEQ ID NO: 44685 - DNA, 80 bp, synthetic construct
  source 1..80: mol_type = other DNA
ggtttcctctgatgtccagtccctctcccgtcctggagaagggagactcggggacgcctagcatctgagggacaaagccg

SEQ ID NO: 44686 - DNA, 80 bp, synthetic construct
  source 1..80: mol_type = other DNA
tttcctctgatcggactggctcatcttcggcagggggggcggcggcgtccgttctctatcttttcctttgaaagaggaaa

SEQ ID NO: 44687 - DNA, 80 bp, synthetic construct
  source 1..80: mol_type = other DNA
ggcagggggtgcggcggcgtccgttctctatcttttcctttgaaagaggaaacgggtctccgcccgcccgccagtccgag

SEQ ID NO: 44688 - DNA, 80 bp, synthetic construct
  source 1..80: mol_type = other DNA
gtcggaaaagtgtcccccaagaagagcggggagcaatctcaagaagaggagacttcccaaaggtcggtggagcacccggg

SEQ ID NO: 44689 - DNA, 80 bp, synthetic construct
  source 1..80: mol_type = other DNA
atagccaagttgccgaggaagagccggaggaggagaaggaggaaccccgagggggatgcaagctaagagtggaggatttt

SEQ ID NO: 44690 - DNA, 80 bp, synthetic construct
  source 1..80: mol_type = other DNA
gaaaagggtgcggcggcgtccgttctctattcttttctctagaaagaggagacgggtctccgcccgcccccagctccgag

SEQ ID NO: 44691 - DNA, 80 bp, synthetic construct
  source 1..80: mol_type = other DNA
tcggagaagggcccccaagaaggtccaggaacacctcaagaagaggagatttcccaaacgccggtggaaccccgggaaca

SEQ ID NO: 44692 - DNA, 80 bp, synthetic construct
  source 1..80: mol_type = other DNA
atgggccgcagttccgacgaaggtccggagaaggaggggaagaggatcccgaggtggatgcaagccaaagagtggaggat

SEQ ID NO: 44693 - DNA, 80 bp, synthetic construct
  source 1..80: mol_type = other DNA
ggttcccccttatgtccagcccatccccagtcctggagaagggagactcgggaacacttagcatctgagggacaaagccg

SEQ ID NO: 44694 - DNA, 80 bp, synthetic construct
  source 1..80: mol_type = other DNA
catccgcatcctttcttgcttgcacccacttttcgaggatttcttctctacctcccctccgagatttcctttgatcggac

SEQ ID NO: 44695 - DNA, 80 bp, synthetic construct
  source 1..80: mol_type = other DNA
ctccgtcccgtgaggtcgaggatccccgtgcagggagtcaaccaccaggagaggatcagaaaaatcacctccagaggacc

SEQ ID NO: 44696 - DNA, 80 bp, synthetic construct
  source 1..80: mol_type = other DNA
aaagcgaggtggaaagtaaagaaagcaacggggctagcgagtggatgttccgcctccccgagagtcccgagtgaggctta

SEQ ID NO: 44697 - DNA, 80 bp, synthetic construct
  source 1..80: mol_type = other DNA
ttatcccggggaactcggccaagtcccgagatggctggttccaccggctccacttccgaaaggaggaaggtgtggacttg

SEQ ID NO: 44698 - DNA, 80 bp, synthetic construct
  source 1..80: mol_type = other DNA
gagcataggggccagtccagtccgtgggaattaccccggatctccggctctccacactccttccccccccgggctcctcc

SEQ ID NO: 44699 - DNA, 80 bp, synthetic construct
  source 1..80: mol_type = other DNA
aataaaagtagagagacccaccccgccagggtccgacgtcccaccctttcttaccttgtggccggcatggtcccagcctc

SEQ ID NO: 44700 - DNA, 80 bp, synthetic construct
  source 1..80: mol_type = other DNA
cgtcggaagtgagcccccaagaagaacctgaggcttcctcaagaagaggagacttcccccacgccggtggagcaccaggg

SEQ ID NO: 44701 - DNA, 80 bp, synthetic construct
  source 1..80: mol_type = other DNA
atgggcctcagtgccggcgaaggtccggcgaaggtggaggaggactccggagcagggctccaagcaaagagaggaggtat

SEQ ID NO: 44702 - DNA, 80 bp, synthetic construct
  source 1..80: mol_type = other DNA
ctccgattcctttcttgcttggacccatctctcgaggatttcctctcttcctcccctccgagatttcttcgattcggact

SEQ ID NO: 44703 - DNA, 80 bp, synthetic construct
  source 1..80: mol_type = other DNA
ggctcatcttcggattgggggagacggcgtctgttctcgtgattcttcttctagaagaggagacagcttgccgcctgccc

SEQ ID NO: 44704 - DNA, 80 bp, synthetic construct
  source 1..80: mol_type = other DNA
cggattgggggagacggcgtctgttctcgtgattcttcttctagaagaggagacagcttgccgcctgcccccgccccgag

SEQ ID NO: 44705 - DNA, 80 bp, synthetic construct
  source 1..80: mol_type = other DNA
ccctccgacccgtgaggtcgaagttctccgcgcagggagacatccgccgggagaaaacagagaaaccacctccagaaggg

SEQ ID NO: 44706 - DNA, 80 bp, synthetic construct
  source 1..80: mol_type = other DNA
ccccttcaacgaacaaagaagcgctctgagacatcaggatgagtccatagcgataggtggagatgctaggagtcggcggc

SEQ ID NO: 44707 - DNA, 80 bp, synthetic construct
  source 1..80: mol_type = other DNA
aactcgaggggccagtccagtccgtgggataccccggacctcccgttctccacactccttcccccctgcgggccccccaa

SEQ ID NO: 44708 - DNA, 80 bp, synthetic construct
  source 1..80: mol_type = other DNA
taaaatggtaagaacccacccactggggtccgacgtcccacccctttcttacctttggccggcatggtcccagcctcctc

SEQ ID NO: 44709 - DNA, 80 bp, synthetic construct
  source 1..80: mol_type = other DNA
cccgggaggaatgtctcccaagaagaaccgggaacgcctcaagaagaggaggtttcccctcaaggctgttgaaactccgg

SEQ ID NO: 44710 - DNA, 80 bp, synthetic construct
  source 1..80: mol_type = other DNA
gggactaccatggacggcctatctccagcatacccgaggcatatgatgcaccccagctttgctggcatggtggacccatc

SEQ ID NO: 44711 - DNA, 80 bp, synthetic construct
  source 1..80: mol_type = other DNA
atgggccaagttgccgaggaagactcgaatgaggagtggagagatggcccgaaggggaatgcaggctaaagagaggaaga

SEQ ID NO: 44712 - DNA, 80 bp, synthetic construct
  source 1..80: mol_type = other DNA
ggtctcccctcacgtccagtccctccccggtcctggcgaagggagactcggggacgcctagcatccgagggacaaagccg

SEQ ID NO: 44713 - DNA, 80 bp, synthetic construct
  source 1..80: mol_type = other DNA
ctcgagggctttccttcttcggtgatccggcctctccttgtcggtgaagtctcccgcacggatcctcttcttaggtccgg

SEQ ID NO: 44714 - DNA, 80 bp, synthetic construct
  source 1..80: mol_type = other DNA
aggatgttccccagccagggattttcgtcctcgagtctcttgatggttctcttgttcttccggagccttctttcgagatc

SEQ ID NO: 44715 - DNA, 80 bp, synthetic construct
  source 1..80: mol_type = other DNA
ttccgcatcctttcttgcctgcaaccacttttcgaggacatcctccctgactccccttcgcttgctcttctgttcggact

SEQ ID NO: 44716 - DNA, 80 bp, synthetic construct
  source 1..80: mol_type = other DNA
ggctcatcttcggaagagggggcgacggcgtccgaactctattcttttcactagaaagaggagtcgggtagccgcttgcc

SEQ ID NO: 44717 - DNA, 80 bp, synthetic construct
  source 1..80: mol_type = other DNA
gaacaaggaaataggagaaggaacggtagaaaagagcggaccctccgatccgaaggggcctcggacccctcagctctgga

SEQ ID NO: 44718 - DNA, 80 bp, synthetic construct
  source 1..80: mol_type = other DNA
ggaagagggggcgacggcgtccgaactctattcttttcactagaaagaggagtcgggtagccgcttgccccccgtccgag

SEQ ID NO: 44719 - DNA, 80 bp, synthetic construct
  source 1..80: mol_type = other DNA
gtcatccgacctgtgaagtcgaggatccccgtgaagggagacagccaccaggagaaagcagaaaaatcacctccagaaga

SEQ ID NO: 44720 - DNA, 80 bp, synthetic construct
  source 1..80: mol_type = other DNA
ccccttcagcgaacaatgaagcgcactgagccgccaggatgagctcgtagcgataggaggggatgctaggagtcggcggc

SEQ ID NO: 44721 - DNA, 80 bp, synthetic construct
  source 1..80: mol_type = other DNA
ttatcccggggaactcggtccagtcccgggatggctgctcccacggtctcctcttcaaaaagggacccgggtggcccttg

SEQ ID NO: 44722 - DNA, 80 bp, synthetic construct
  source 1..80: mol_type = other DNA
gagcgtaggggccagtccagtccgtgggatgtcccggacctccggttctccacactccttccccccgcgggctcctccaa

SEQ ID NO: 44723 - DNA, 80 bp, synthetic construct
  source 1..80: mol_type = other DNA
taaaaaggaaagacccacccaccggggtccgacgttcctaccctttcttacctgtggccggcatggtcccagcctccccg

SEQ ID NO: 44724 - DNA, 80 bp, synthetic construct
  source 1..80: mol_type = other DNA
ctggcgccggctgggcaacattccgaggggaccgtccctcggtaatggcgaatgggacccagaactctctctagattccc

SEQ ID NO: 44725 - DNA, 80 bp, synthetic construct
  source 1..80: mol_type = other DNA
ttttcgaggaatgaactccaaagaagagtcgagagcatctcaagaggaggactcttcccaaaggccggaggagcgtccgg

SEQ ID NO: 44726 - DNA, 80 bp, synthetic construct
  source 1..80: mol_type = other DNA
atgggcctcgtgccgaggaaggtccggagaaggaggagtcaggaccccgaaggtggctccaagcaaagagtgggagatcc

SEQ ID NO: 44727 - DNA, 80 bp, synthetic construct
  source 1..80: mol_type = other DNA
aatcgacctccatctgatctgtccggggtctcttcgagggaggcgctccctccccgtccttcccttttcttattattccg

SEQ ID NO: 44728 - DNA, 80 bp, synthetic construct
  source 1..80: mol_type = other DNA
ggaaaagggggcggcggcgtctgttctcttatcttcctgttgaaagaggagacagcttgccgcctgcccccagctccgag

SEQ ID NO: 44729 - DNA, 80 bp, synthetic construct
  source 1..80: mol_type = other DNA
cctccgccctgtgaagtcgaggttctccgcgcagggaggcagccacccggaaagaacggaaaaatcacctccagaggacc

SEQ ID NO: 44730 - DNA, 80 bp, synthetic construct
  source 1..80: mol_type = other DNA
ccttcaacgaacaaagaagcgagctgggacgccaggatgaggccatagcgataggaggagatgctaggagtgggcggcga

SEQ ID NO: 44731 - DNA, 80 bp, synthetic construct
  source 1..80: mol_type = other DNA
gaacatgaggggccagtccagtccgtgggaattgccccggacctcccgatctccacactccttcccccctgcgggccacc

SEQ ID NO: 44732 - DNA, 80 bp, synthetic construct
  source 1..80: mol_type = other DNA
tcggggaatgtctcccaagaagaaccaggggacgacctcaagaagaggagttttcccaaacgccggtggagcatcgtgga

SEQ ID NO: 44733 - DNA, 80 bp, synthetic construct
  source 1..80: mol_type = other DNA
catgggccccagttccgaacgaagagaccgccggggaaggtgggcgaaccgacgggagttcaatggtaaagaggcgaaga

SEQ ID NO: 44734 - DNA, 80 bp, synthetic construct
  source 1..80: mol_type = other DNA
tcccccggtccctctcacgtccagcccctccccgtgtctagtgaagggagactccgggactccttgcatgctggggacga

SEQ ID NO: 44735 - DNA, 80 bp, synthetic construct
  source 1..80: mol_type = other DNA
cttccgctttctttcttccattgacccactgctcgaggacgtcctccctgtctcctcggttcttcttcgatccggaccgg

SEQ ID NO: 44736 - DNA, 80 bp, synthetic construct
  source 1..80: mol_type = other DNA
ggaagcggaagaaggaaggcggagaaaaggagcgggccctccgatccgaggggcccgacgcccctgatctggagagcact

SEQ ID NO: 44737 - DNA, 80 bp, synthetic construct
  source 1..80: mol_type = other DNA
ccggcccgaagggttgagtagcacccagagggaggaaatcacacggagagaaacagacaaatcacctccagaggacccct

SEQ ID NO: 44738 - DNA, 80 bp, synthetic construct
  source 1..80: mol_type = other DNA
tcagcgaacagaagagtctctcacgcggtaggagcaagcccatagcgatagggggagatgctgggagttagaggagacct

SEQ ID NO: 44739 - DNA, 80 bp, synthetic construct
  source 1..80: mol_type = other DNA
taggggagaccgaagcgaggaggaaagcaaagaaagcaacggggctagccggtgggtgttcctccccccgagaggagaag

SEQ ID NO: 44740 - DNA, 80 bp, synthetic construct
  source 1..80: mol_type = other DNA
ttatcccggggaacccggcgaatgcccccacatagcagagtccgggaccccctcctaaaagaccgagaggtggtgcttgg

SEQ ID NO: 44741 - DNA, 80 bp, synthetic construct
  source 1..80: mol_type = other DNA
ccctcctaaaagaccgagggggggtgcttggagcacgggagtcccagtggatccgtgggatgctcctcccgattccgata

SEQ ID NO: 44742 - DNA, 80 bp, synthetic construct
  source 1..80: mol_type = other DNA
agcacggaggtcccagtggatccgtgggatgctcctcccgattccgatatcccttcccccgagaggtcccccaggaatgg

SEQ ID NO: 44743 - DNA, 80 bp, synthetic construct
  source 1..80: mol_type = other DNA
acctcggaggttccctcccaagaaggttcaagagaatacaagaaatggaggaatttccccataacgccggtgaaactctt

SEQ ID NO: 44744 - DNA, 80 bp, synthetic construct
  source 1..80: mol_type = other DNA
catatctaatggaggtccggaaaggttgtaaatcgaggacgatagcgatagcaagttgttctaagttaacaatcaatccg

SEQ ID NO: 44745 - DNA, 80 bp, synthetic construct
  source 1..80: mol_type = other DNA
agtgcagtcttcacgacccaaaactgaatcaaagatccagaaacagcccattgcccagccatcatcacagaatccaacaa

SEQ ID NO: 44746 - DNA, 80 bp, synthetic construct
  source 1..80: mol_type = other DNA
gtaagtcaaggaagactcttcatatattcagccagtctgtcaatccgacacatcatcgtatttttaaagaaaaaagagag

SEQ ID NO: 44747 - DNA, 80 bp, synthetic construct
  source 1..80: mol_type = other DNA
atgagcaatcgatacattctattttccatacacatagtaaacattaaatcatggattcaccatagaccaagaccaaaaat

SEQ ID NO: 44748 - DNA, 80 bp, synthetic construct
  source 1..80: mol_type = other DNA
atgggccgcagttccgaccgaagaccggaggaggagaggagagaggccccgaaggtggatgcaagccaaagagtagagaa

SEQ ID NO: 44749 - DNA, 80 bp, synthetic construct
  source 1..80: mol_type = other DNA
ctctacatcctttcttgcttgtacccacttttcgagggtctcctccctacctcccctccgggatctcttctgttcggact

SEQ ID NO: 44750 - DNA, 80 bp, synthetic construct
  source 1..80: mol_type = other DNA
agcgtggtggaccggtcagtccgtgggaactaccccggatctcccgttctccacactccttccccccgcgggctcctcca

SEQ ID NO: 44751 - DNA, 80 bp, synthetic construct
  source 1..80: mol_type = other DNA
tcatcggggaagtgcccccaagaagagccaggggcgatctcaagaagaggactcttcccaaacgccggaggaacgcccgg

SEQ ID NO: 44752 - DNA, 80 bp, synthetic construct
  source 1..80: mol_type = other DNA
atgggccgcagttccgacaaaaggccgaaggaggagaggaaggggtcccgaggtgggatgcaagccaaagagtagaggaa

SEQ ID NO: 44753 - DNA, 80 bp, synthetic construct
  source 1..80: mol_type = other DNA
ggtttccccttatgtccaggccctcccccgacctggagaagggagactcggggacatttagcatccgagggacaaagccg

SEQ ID NO: 44754 - DNA, 80 bp, synthetic construct
  source 1..80: mol_type = other DNA
cccccgggcgctcccctcggaggttcctcgggtgggttcacatccccaacccgcgggccggctactcttctttcccttct

SEQ ID NO: 44755 - DNA, 80 bp, synthetic construct
  source 1..80: mol_type = other DNA
ctcgagggccttccttcttcggtggtcctgtctctccttgtcggtgaagtctcccgcacgagtcctcttcctagggccgg

SEQ ID NO: 44756 - DNA, 80 bp, synthetic construct
  source 1..80: mol_type = other DNA
aatcgatctccatctgatccgtccgggccctcttcgccgggggagctccctccccgtccttcccttttcttattattccg

SEQ ID NO: 44757 - DNA, 80 bp, synthetic construct
  source 1..80: mol_type = other DNA
ctcggcatcttttcttgcttgtacccacttctcgaggacgtcttctctacctccccttcgggacttcttttgttcggact

SEQ ID NO: 44758 - DNA, 80 bp, synthetic construct
  source 1..80: mol_type = other DNA
acaaggaaacaggagaaggaacggtagaaaagagcgagccctccgatccgaggggccctggacacctcagctctggagtc

SEQ ID NO: 44759 - DNA, 80 bp, synthetic construct
  source 1..80: mol_type = other DNA
ggctcatcttcggagagggggcggcggcgtctgttctctaatcttttcctttgaaagaggagacagctctccgcccgccc

SEQ ID NO: 44760 - DNA, 80 bp, synthetic construct
  source 1..80: mol_type = other DNA
ggagagggtgcggcggcgtctgttctctaatcttttcctttgaaagaggagacagctctccgcccgcccccgcacccgag

SEQ ID NO: 44761 - DNA, 80 bp, synthetic construct
  source 1..80: mol_type = other DNA
atccgccctgtgaggtcgagaattctcgtgcagggagacagccaccaggagaggatcagaaaagccacctccagaggacc

SEQ ID NO: 44762 - DNA, 80 bp, synthetic construct
  source 1..80: mol_type = other DNA
ccttcagcgaacaatgaagcgctctgggacgtgagtgaggccatagcgataggaggggatgctaggagtcggcggcgacc

SEQ ID NO: 44763 - DNA, 80 bp, synthetic construct
  source 1..80: mol_type = other DNA
gagtgaggcttatcccggggaactcggcctagtcccgggatgtctagtcccaccggctccacttcgaaaaggagtgaggg

SEQ ID NO: 44764 - DNA, 80 bp, synthetic construct
  source 1..80: mol_type = other DNA
ttatcccggggaactcggcctagtcccgggatgtctagtcccaccggctccacttcgaaaaggagtgaggtgggaccttg

SEQ ID NO: 44765 - DNA, 80 bp, synthetic construct
  source 1..80: mol_type = other DNA
gaacacgaggggaccagttcagtccgtgggaactaccccggatctcccgttctccacactccttcccccccgcgggctcc

SEQ ID NO: 44766 - DNA, 80 bp, synthetic construct
  source 1..80: mol_type = other DNA
tccaataaaagagaaggacccacccactggggtccgacgtcccaccctttcttaccttgtggccggcatggtcccagcct

SEQ ID NO: 44767 - DNA, 80 bp, synthetic construct
  source 1..80: mol_type = other DNA
cttcggggaaatgtcccccaagaagaactgaggagatctcaagaagaggagcttcccaaacgccggaggaacacccggga

SEQ ID NO: 44768 - DNA, 80 bp, synthetic construct
  source 1..80: mol_type = other DNA
atgagccgtggtgccgacagaggaccggaggaggagaggagagatagcccgagggggatgcaagccaaagagtagaggat

SEQ ID NO: 44769 - DNA, 80 bp, synthetic construct
  source 1..80: mol_type = other DNA
ccttatgtccagaccctcccccgtcctggagaagggagactcgggaacgctctgcatctgagggacaaagccgcccccgg

SEQ ID NO: 44770 - DNA, 80 bp, synthetic construct
  source 1..80: mol_type = other DNA
gcgctcccctcggaggtcccctgggtgggttcacatccccaacccgcgggccggctactcttctttccctttcctcgtct

SEQ ID NO: 44771 - DNA, 80 bp, synthetic construct
  source 1..80: mol_type = other DNA
tcacccgccctgtgaggtcgagatctctcgcgcagggaggcaaccaccaggagaggatcagagaaatcacctccagagga

SEQ ID NO: 44772 - DNA, 80 bp, synthetic construct
  source 1..80: mol_type = other DNA
ccccttctacgaacaatgaagcgctctgagacgagagtgagaccatggcgataggaggggatgctaggagtcggcggcga

SEQ ID NO: 44773 - DNA, 80 bp, synthetic construct
  source 1..80: mol_type = other DNA
ttttcggggaagggcccccaagaagagtcgagggtgatctcaagaagaggactcttcccagacgccggtggaacctccgg

SEQ ID NO: 44774 - DNA, 80 bp, synthetic construct
  source 1..80: mol_type = other DNA
gaattcggaagccgaaacatctctatgtgtctttacctaatgcacagtctagtatgaaggcagaagagataacacctgga

SEQ ID NO: 44775 - DNA, 80 bp, synthetic construct
  source 1..80: mol_type = other DNA
attatctccggcaaaggcaggcagctttaggaaacatggagactaaggagtcaaaagcaatccgccaacatgcagaagca

SEQ ID NO: 44776 - DNA, 80 bp, synthetic construct
  source 1..80: mol_type = other DNA
aatttgtggattataccctgctcaaatcaaagctagacagatggttagtccagtcatgagtgtgatagggtttcttgcct

SEQ ID NO: 44777 - DNA, 80 bp, synthetic construct
  source 1..80: mol_type = other DNA
tggcaaaggattggagtgatagaattgagcaatggctaattgaaccctgcaagctccttcctgatacctcggcagtaagt

SEQ ID NO: 44778 - DNA, 80 bp, synthetic construct
  source 1..80: mol_type = other DNA
ctccatggtgggcctgcaacgaatagagactatctccggcaaagacaggtagctttaggtaatatggaaaccaaagagtc

SEQ ID NO: 44779 - DNA, 80 bp, synthetic construct
  source 1..80: mol_type = other DNA
aagcaattcgccaacatgctgaaacagcaggctgcagcatgatagaagacattgagtcaccatcatcaatctgggttttt

SEQ ID NO: 44780 - DNA, 80 bp, synthetic construct
  source 1..80: mol_type = other DNA
aggattggggtgacagaattgagcagtggctaagtgaaccctgtaaactccttcctgacacagcagcagtcagcctccat

SEQ ID NO: 44781 - DNA, 80 bp, synthetic construct
  source 1..80: mol_type = other DNA
cttgggggaaggaagctgtggacaacttccacttaggagatgacatggatcctgagctaagaacactggcacagagcttg

SEQ ID NO: 44782 - DNA, 80 bp, synthetic construct
  source 1..80: mol_type = other DNA
ccctaaaactataatcatcgaatgtacaacccatattatgtgattttatatgctactgaatcattatcaatcatatttgc

SEQ ID NO: 44783 - DNA, 80 bp, synthetic construct
  source 1..80: mol_type = other DNA
actattattatcaggagaatcaacatatcagggtagggttacatttatgggtgggaattattacttagagggtgtgtcag

SEQ ID NO: 44784 - DNA, 80 bp, synthetic construct
  source 1..80: mol_type = other DNA
agcattaacagacagggaaggagtcgcagcatccattcaggcaaaaattgatgaattgaagcgacaattggcagacagaa

SEQ ID NO: 44785 - DNA, 80 bp, synthetic construct
  source 1..80: mol_type = other DNA
ttgcaactggaaaaaaccttggaaaagagcaagacccaacaggtgttgaaccaggagaccatctgaaagggagatcaatg

SEQ ID NO: 44786 - DNA, 80 bp, synthetic construct
  source 1..80: mol_type = other DNA
caaggggaagacagacaactaaggataataaggggacaaggatccgattcaaagatgacagctcttttgaggatgtaaac

SEQ ID NO: 44787 - DNA, 80 bp, synthetic construct
  source 1..80: mol_type = other DNA
attatcttcggcagaggcaggcagctttaggaaacatggaaactaaagaatcaaaagcaatccgtcagcatgcagaaaca

SEQ ID NO: 44788 - DNA, 80 bp, synthetic construct
  source 1..80: mol_type = other DNA
tggggtaaagaggctgtggataatccccacgcaggagatgatgtagatccatcgctaggaatgctggcacaaagcctgat

SEQ ID NO: 44789 - DNA, 80 bp, synthetic construct
  source 1..80: mol_type = other DNA
tggggtaaagaggctgtggataatcgccacttgatgaatatcgtggatcctgagccaagggcgctggcacaaagcctgat

SEQ ID NO: 44790 - DNA, 80 bp, synthetic construct
  source 1..80: mol_type = other DNA
tggggtaaagaggctgtggatgaactccactcgggagatggtgagcatcatgcatcaaggacattggcacaaagcctgat

SEQ ID NO: 44791 - DNA, 80 bp, synthetic construct
  source 1..80: mol_type = other DNA
tgatgtaaaagtgaaggaaatctctaaccaagagcctttaaaactataattagtgaatgtataacccttattatgtgatc

SEQ ID NO: 44792 - DNA, 80 bp, synthetic construct
  source 1..80: mol_type = other DNA
tggggtaaagaggctgtggataatttccacgcgtgggatggtatggatcctgagctaaggacattggcacaaagcctgat

SEQ ID NO: 44793 - DNA, 80 bp, synthetic construct
  source 1..80: mol_type = other DNA
tggggtaaagaggctgtggataatccccacaccggagatgatgcagaccctgagctaagaacgctggcacaaagcctgat

SEQ ID NO: 44794 - DNA, 80 bp, synthetic construct
  source 1..80: mol_type = other DNA
tggggtaaagaggctgtggataatcaccacttgataaatgctggggatcatgagctaaggacgctggcacaaagcctgat

SEQ ID NO: 44795 - DNA, 80 bp, synthetic construct
  source 1..80: mol_type = other DNA
tttgaactctatcctgcacagatcaaagccagaaaaatgattagccctgtcatgagtgtaatcggatttttggcgctggc

SEQ ID NO: 44796 - DNA, 80 bp, synthetic construct
  source 1..80: mol_type = other DNA
tggggtaaagaggctgtggataatcaccactgggcaaatgctattggatctgagttaaggacgctggcacaaagccttat

SEQ ID NO: 44797 - DNA, 80 bp, synthetic construct
  source 1..80: mol_type = other DNA
gaatacaactggaccaaagaattatagtgctctttatggttgcttggggtaaagaggctgtggataattttcaccttgga

SEQ ID NO: 44798 - DNA, 80 bp, synthetic construct
  source 1..80: mol_type = other DNA
tcaggggaatcagtatatcagggcatgggaacatttatgggttggaatcattactcaggcgtgggtcagttaatccgttg

SEQ ID NO: 44799 - DNA, 80 bp, synthetic construct
  source 1..80: mol_type = other DNA
ctacctcaacacaaaactacctcaacttaactacctcatttgattgctccttgattgtctttttagggagcatactacta

SEQ ID NO: 44800 - DNA, 80 bp, synthetic construct
  source 1..80: mol_type = other DNA
gcaactgggaaaaaccttgggaaggaacaagatccaacaggggtggagcctggagaccatctgaaagagaggtcaatgct

SEQ ID NO: 44801 - DNA, 80 bp, synthetic construct
  source 1..80: mol_type = other DNA
tggtggtcctgcaacaaacagggactacttacggcagcggcaagtggcattaggcaatatggagacaaaggagtcaaagg

SEQ ID NO: 44802 - DNA, 80 bp, synthetic construct
  source 1..80: mol_type = other DNA
accgttgtccaccaacatgtttgtttatagcaggtattgctgagcttggggcatttttttccatcctgcaggacatgcga

SEQ ID NO: 44803 - DNA, 80 bp, synthetic construct
  source 1..80: mol_type = other DNA
cccaacaaacaatccgccaacatgtccaccactcccacactgacacacaaccatcccattcttcaccagcaactcaatcc

SEQ ID NO: 44804 - DNA, 80 bp, synthetic construct
  source 1..80: mol_type = other DNA
atgggccacgtagccgacaaggagccggaggaggaggggttggaggtcccgaggaggactctaagcaaagaaggtgagga

SEQ ID NO: 44805 - DNA, 80 bp, synthetic construct
  source 1..80: mol_type = other DNA
ggttccccctcacgtccagtccctcccccgtcctggagaagggagactcaggaacacctagcatttgagggacaaagccg

SEQ ID NO: 44806 - DNA, 80 bp, synthetic construct
  source 1..80: mol_type = other DNA
aggatgttccccagccagggattctcatcctcgagtttcttggcggttctcttggccttccggagccttttctcgaggtc

SEQ ID NO: 44807 - DNA, 80 bp, synthetic construct
  source 1..80: mol_type = other DNA
ctccgcgtcttttcttgcttggatccatttctcgaggacatcctcccttcctcccctccggggtttcctctgttcggact

SEQ ID NO: 44808 - DNA, 80 bp, synthetic construct
  source 1..80: mol_type = other DNA
ggctcatcctcggagagggggcgacggcgtctgttctctattcttttttctctaaaagaggagacagcttgccgcccgcc

SEQ ID NO: 44809 - DNA, 80 bp, synthetic construct
  source 1..80: mol_type = other DNA
gagaggtggcgacggcgtctgttctctattcttttttctctaaaagaggagacagcttgccgcccgcccccagccccggg

SEQ ID NO: 44810 - DNA, 80 bp, synthetic construct
  source 1..80: mol_type = other DNA
tcctccgacccgtgaggttgaggttctccgcgcagggtaggcagccaccgggagaaaacggagaaaccacctccagagga

SEQ ID NO: 44811 - DNA, 80 bp, synthetic construct
  source 1..80: mol_type = other DNA
ccccttcagcgaacagagaagcgcactgggacgtcaggatgagtccatagcgataggaggggatgctaggagtcggcagc

SEQ ID NO: 44812 - DNA, 80 bp, synthetic construct
  source 1..80: mol_type = other DNA
gaccgaagcgaggaaagaaagtaaagaaagcaacggggctagcgagtggatgttccgcctccccggagtcccgagtgagg

SEQ ID NO: 44813 - DNA, 80 bp, synthetic construct
  source 1..80: mol_type = other DNA
ttatcccggggaacccggccaagcccccaaaatgtctggttcccacgggctccacttccaaaaggaggagcggtggtact

SEQ ID NO: 44814 - DNA, 80 bp, synthetic construct
  source 1..80: mol_type = other DNA
tggaacgtgaggggaccagttcagtccgtgggaattaccccggacctccggttctccacactccttcccccctgcgggct

SEQ ID NO: 44815 - DNA, 80 bp, synthetic construct
  source 1..80: mol_type = other DNA
tcccagtaaacggtaagaacccaccctcggggtccgacgtcccaccctttcttaccttgtggccggcatggtcccagcct

SEQ ID NO: 44816 - DNA, 80 bp, synthetic construct
  source 1..80: mol_type = other DNA
atctcgaaaaagaactcccaagaagaaccgagaacaacctcaagaagaggaggtttcccaaacgctggtggagcacccgg

SEQ ID NO: 44817 - DNA, 80 bp, synthetic construct
  source 1..80: mol_type = other DNA
cttattcctttactggggagtacactcgaggagtggaaggcgaggaggccggggtcccgggtttacccacgggtactgct

SEQ ID NO: 44818 - DNA, 80 bp, synthetic construct
  source 1..80: mol_type = other DNA
atgggcctcgagccgacgaagagccggagagggaggggtcggggatcccgaggaggaaaccaagcaaagaaggtgagact

SEQ ID NO: 44819 - DNA, 80 bp, synthetic construct
  source 1..80: mol_type = other DNA
ctggttcccccttatgtccagtccctctcccgtcctggtgaaggaagactcgggaacgttcagcatttgagggacaaagc

SEQ ID NO: 44820 - DNA, 80 bp, synthetic construct
  source 1..80: mol_type = other DNA
gggaacaaggaaataggagaaggaacggtagaaaagagcgagcctcccgatccgaggggcccggacacctcggctctgga

SEQ ID NO: 44821 - DNA, 80 bp, synthetic construct
  source 1..80: mol_type = other DNA
ggctcatcctcggatagggggcgacggcgtctgttctctattttcttcgttctaagaagaggagatagcgtgccgcccgc

SEQ ID NO: 44822 - DNA, 80 bp, synthetic construct
  source 1..80: mol_type = other DNA
ataggtggcgacggcgtctgttctctattttcttcgttctaagaagaggagatagcgtgccgcccgcccccagccccggg

SEQ ID NO: 44823 - DNA, 80 bp, synthetic construct
  source 1..80: mol_type = other DNA
gtcctccgacctgtgaggtcgagaacctccgcgcagggagacagccaccaggagaaggcagaaaaaccacctccagagga

SEQ ID NO: 44824 - DNA, 80 bp, synthetic construct
  source 1..80: mol_type = other DNA
cgaccaaagcgaggatcgaaagtaaagaaagcaacggggctagcaggtggatgttccgcctccccagggtcccgagtgag

SEQ ID NO: 44825 - DNA, 80 bp, synthetic construct
  source 1..80: mol_type = other DNA
accttattcctttattggggagtacactcgaggagtggaaggcgaggagacggggctcccgggcttacctacgggaactg

SEQ ID NO: 44826 - DNA, 80 bp, synthetic construct
  source 1..80: mol_type = other DNA
tcccatgctttgtgcaatcccatatatgctgcattaagtgctttgtgtaatctcacatatgctgcattaaatgcttgaac

SEQ ID NO: 44827 - DNA, 80 bp, synthetic construct
  source 1..80: mol_type = other DNA
taaatccatgtatcccatgctttgtgcaattccacatatgctgcattaagtgctttgtgtaatcccacatatgctgcatt

SEQ ID NO: 44828 - DNA, 80 bp, synthetic construct
  source 1..80: mol_type = other DNA
gaatacagctggatcagagaataatcgtgctctttatggttgcatgggggaaagaagcagttgacaatttccatcttggg

SEQ ID NO: 44829 - DNA, 80 bp, synthetic construct
  source 1..80: mol_type = other DNA
tatttatctctacccaatgcacagtcaagcacgaaggcagaagagattacacctggtaggtatcggacagcaatctgtgg

SEQ ID NO: 44830 - DNA, 80 bp, synthetic construct
  source 1..80: mol_type = other DNA
ttcaattgatccttagactaatcatgcttttttctgctttctctcttacttccttgcctactaacaacaacaccctacct

SEQ ID NO: 44831 - DNA, 80 bp, synthetic construct
  source 1..80: mol_type = other DNA
tgctaacaacacgaggaagacagactactaaagacaacaaagggaccagaatcagatttaaggacgatagttcatttgag

SEQ ID NO: 44832 - DNA, 80 bp, synthetic construct
  source 1..80: mol_type = other DNA
ttcgcaagcccaaacatctttatgtctcactgcctaatgcacaatccagtatgaaagcagaggagattacacctggcaga

SEQ ID NO: 44833 - DNA, 80 bp, synthetic construct
  source 1..80: mol_type = other DNA
gcaggctgaggcttcaggctgcagcatgattgaagatattgaatcaccatcatcaatttgggtgtttgctggggcaccag

SEQ ID NO: 44834 - DNA, 80 bp, synthetic construct
  source 1..80: mol_type = other DNA
agcattaacagacagggaagggcttgcagcatcaatccaggccaagattgatgaactgaaaaggcagctagcggataggg

SEQ ID NO: 44835 - DNA, 80 bp, synthetic construct
  source 1..80: mol_type = other DNA
tcatatttacactattattatcaggggaatcattgtatcagggtatgggtacatttatgggtgggaattattactcagag

SEQ ID NO: 44836 - DNA, 80 bp, synthetic construct
  source 1..80: mol_type = other DNA
actatctctcttactttctacctcagtgtacttatatatatgcaagtagcatatatataagtacacaacatactacctca

SEQ ID NO: 44837 - DNA, 80 bp, synthetic construct
  source 1..80: mol_type = other DNA
tgttgacaacaagagggaggcagacaaccaaagataataaagggactaggattcgattcaaggatgacagctcctttgag

SEQ ID NO: 44838 - DNA, 80 bp, synthetic construct
  source 1..80: mol_type = other DNA
ttgttatatatttaacatcctttgttgtcccaatacttctaaaggccctatacatgcttacaacaagagggaggcagaca

SEQ ID NO: 44839 - DNA, 80 bp, synthetic construct
  source 1..80: mol_type = other DNA
gatgagcctactggacagactgcagattggctcagtattgttatatatttaacatcctttgttgtcccaatacttctaaa

SEQ ID NO: 44840 - DNA, 80 bp, synthetic construct
  source 1..80: mol_type = other DNA
aaagaaaatacattaatgataaaaactgtttttatcgttcggtatcgatttctcttaaaagtgtttaataaaaaaattaa

SEQ ID NO: 44841 - DNA, 80 bp, synthetic construct
  source 1..80: mol_type = other DNA
aggcagcaataagggttgtgcttgttggataccgaccacaaccatggctcctacccaatccaaagtcagaatccacaatc

SEQ ID NO: 44842 - DNA, 80 bp, synthetic construct
  source 1..80: mol_type = other DNA
ttgcatggggtaaagaggctgtagacaatttccatcttggggatgatatggatccagaactaagaaatcttgctcagagc

SEQ ID NO: 44843 - DNA, 80 bp, synthetic construct
  source 1..80: mol_type = other DNA
ctaatcaggagccattaaagctgtaaatatgcactatgaatgtaattatgcactatgattgtaactggaatcacccatta

SEQ ID NO: 44844 - DNA, 80 bp, synthetic construct
  source 1..80: mol_type = other DNA
tgtgaactataagtttatactactgattattatcaatcactgccatatatttgcactatctagggttattatgggccatt

SEQ ID NO: 44845 - DNA, 80 bp, synthetic construct
  source 1..80: mol_type = other DNA
tatctactgggtgggaataatcgtatagcgggtgggtcagttattccgttgtgggttggtataggaactctgctacctta

SEQ ID NO: 44846 - DNA, 80 bp, synthetic construct
  source 1..80: mol_type = other DNA
tatcaattgatcgacactaacaacttctgcctttctttccttcttctctgcttactaacaacaacaacctacctcaaaaa

SEQ ID NO: 44847 - DNA, 80 bp, synthetic construct
  source 1..80: mol_type = other DNA
gcgctgactgacagggaaggagttgcagcatccatccaggctaagatcgatgagctcaaaaggcagctagcagataggat

SEQ ID NO: 44848 - DNA, 80 bp, synthetic construct
  source 1..80: mol_type = other DNA
tgctacaggaaaaaatctgggtcaggatcgggatccaacaggtgtggagccaggggatcacctaaaagagagatcaatgc

SEQ ID NO: 44849 - DNA, 80 bp, synthetic construct
  source 1..80: mol_type = other DNA
tcagctatgggaacattcttgacttgaaccatcttgatattgatgagccaacagggcagactgcagactggctaagtatc

SEQ ID NO: 44850 - DNA, 80 bp, synthetic construct
  source 1..80: mol_type = other DNA
tatcggacagctgtgtgcggactttaccctgcacaaattaaggcaaggcaaatggtaagccctgtaatgagtgtgattgg

SEQ ID NO: 44851 - DNA, 80 bp, synthetic construct
  source 1..80: mol_type = other DNA
cgttagctaaggactggactgaccggattgagaactggctgggtgaaccatgcaaattattgccagatacatcatctgtt

SEQ ID NO: 44852 - DNA, 80 bp, synthetic construct
  source 1..80: mol_type = other DNA
atcctgctcgggggacctgcaacaaatcgagactacatcaggcaaaggcaggtagctctggggaacatggaaacaaaaga

SEQ ID NO: 44853 - DNA, 80 bp, synthetic construct
  source 1..80: mol_type = other DNA
gccaactcataattgcaaagcagaaggtgaaagatgcagaaaagcaatatgagaaggacccagatgagttaaataagagg

SEQ ID NO: 44854 - DNA, 80 bp, synthetic construct
  source 1..80: mol_type = other DNA
ggctaaagctgttagacagcatgccgagtcagctggttgcagtatgattgacaatattgactcaccatcatctatttggg

SEQ ID NO: 44855 - DNA, 80 bp, synthetic construct
  source 1..80: mol_type = other DNA
accggtgtccaccgacatgtctgttcgttgctggccttgcagaacttggggcattcttctccattctgcaagatatgaga

SEQ ID NO: 44856 - DNA, 80 bp, synthetic construct
  source 1..80: mol_type = other DNA
ttttatcgttcggtatcgatttctcttaaaagtgtttaataaaaaaattaaaacacatttaattttaaagaaaacttttc

SEQ ID NO: 44857 - DNA, 80 bp, synthetic construct
  source 1..80: mol_type = other DNA
aggtccggattgactgttaatttaggacgatagcgatagcaagttgtcctaagttaacagtcaatccggaccttaaataa

SEQ ID NO: 44858 - DNA, 80 bp, synthetic construct
  source 1..80: mol_type = other DNA
aattgttatgcattatgagaatgtggggtcatcccacactcacagctgcaggcgcagcagggaaggttcgtgaatctatg

SEQ ID NO: 44859 - DNA, 80 bp, synthetic construct
  source 1..80: mol_type = other DNA
catgagattgactgaaaacggacttgaaaaagatgtggcaataagactaaatatattcatggctattagacaattaactt

SEQ ID NO: 44860 - DNA, 80 bp, synthetic construct
  source 1..80: mol_type = other DNA
aagcgggagatgatatatctcaacccgcaggtgcttttacaatgtctctgaacagatcagctttcatcaacaacaatagt

SEQ ID NO: 44861 - DNA, 80 bp, synthetic construct
  source 1..80: mol_type = other DNA
taggggtttagaaggtttggaaactcctgatcccatagaattactagatggagtcttgttaacaaataagtctctgtgtc

SEQ ID NO: 44862 - DNA, 80 bp, synthetic construct
  source 1..80: mol_type = other DNA
cctatcaggggcaagactctcgaactatgagcaaggatggtcaggtatagatcaggatggaacaagagacacctttccgg

SEQ ID NO: 44863 - DNA, 80 bp, synthetic construct
  source 1..80: mol_type = other DNA
aactaatggggaaaattgttgttgattcaataataggattagatgagtcgacctcaatcattaatgatgcaatcatagag

SEQ ID NO: 44864 - DNA, 80 bp, synthetic construct
  source 1..80: mol_type = other DNA
gggtgtcaaaactgcattaacaaatctttataatcatatatcattcaaaatattaattcactcagaagatgcgatagatt

SEQ ID NO: 44865 - DNA, 80 bp, synthetic construct
  source 1..80: mol_type = other DNA
tacgttaatttctatatgctggactttttcatctcaaattatacttttaagaagtgcatatagtgatccatccaatcatg

SEQ ID NO: 44866 - DNA, 80 bp, synthetic construct
  source 1..80: mol_type = other DNA
agtccatattaaggaaattatagagatcttaaagagtgagggagacgaatatctaggtttgatatggtctccatataata

SEQ ID NO: 44867 - DNA, 80 bp, synthetic construct
  source 1..80: mol_type = other DNA
aaagaaaacttttcttatctatccaccaaggggaggatagataagaaaagttttctttaaaaagttactatctatttttt

SEQ ID NO: 44868 - DNA, 80 bp, synthetic construct
  source 1..80: mol_type = other DNA
aacaggcaaaatcaactccacaccacaatacaaatcaaaactcccaccaaacacgccatcacaaatgatcaatacagcat

SEQ ID NO: 44869 - DNA, 80 bp, synthetic construct
  source 1..80: mol_type = other DNA
ctgaccgcatctccacagcacaacggcaacacaatgaagagaatgaatcaggaaaacaaaatctggacaacctctccatg

SEQ ID NO: 44870 - DNA, 80 bp, synthetic construct
  source 1..80: mol_type = other DNA
acaaatgataccaggatatttaagaggggggaatatagataccaggaaagaagcctgggttacacagagtcagagatcaa

SEQ ID NO: 44871 - DNA, 80 bp, synthetic construct
  source 1..80: mol_type = other DNA
ccaggaaagaagcctgggttacacagagtcagagatcaagaacacaaccttcaccccaagacatcgaagagagtactcga

SEQ ID NO: 44872 - DNA, 80 bp, synthetic construct
  source 1..80: mol_type = other DNA
gattgaggggaaagttgacaaaattatgctcactcaaaatacaattcagcaaacaaagaatgacacccaacaaatcaaag

SEQ ID NO: 44873 - DNA, 80 bp, synthetic construct
  source 1..80: mol_type = other DNA
taagcaaggggcattattatctctgctttccttgcaggccacatcaatgcagaatcatcttatgattgctgccagagccc

SEQ ID NO: 44874 - DNA, 80 bp, synthetic construct
  source 1..80: mol_type = other DNA
cacagatcaccatgattgcacatacacttaatatccaacaagcacaacccaccaactcataggttatttctgtgataata

SEQ ID NO: 44875 - DNA, 80 bp, synthetic construct
  source 1..80: mol_type = other DNA
aagcacaacccaccaactcataggttatttctgtgataatataaatgatttaagaaaaaaaacagcaataaggggggacc

SEQ ID NO: 44876 - DNA, 80 bp, synthetic construct
  source 1..80: mol_type = other DNA
tgtattctctctagacaggacacctcaggttttcaggggatttcaattccctcgagatcgatatgcatgtgtcccatccg

SEQ ID NO: 44877 - DNA, 80 bp, synthetic construct
  source 1..80: mol_type = other DNA
aacagatgcttttaagtgtaggtattagtgatttgtgggggcccacaatcgcagtacatgcaaatgggaaaatcccaaag

SEQ ID NO: 44878 - DNA, 80 bp, synthetic construct
  source 1..80: mol_type = other DNA
gcatcccacatccttccccactgtactgctagcatcattcagatccatagaaccacaccacaccatgcaacaactgacat

SEQ ID NO: 44879 - DNA, 80 bp, synthetic construct
  source 1..80: mol_type = other DNA
tcagccaatcactaaaacacaaccacaacacaccaattcaaccaaggacatcctcataaacacaaaatgatcaaaacatg

SEQ ID NO: 44880 - DNA, 80 bp, synthetic construct
  source 1..80: mol_type = other DNA
attgcagtagatacaacatcaccccatcaaatcaaaaccccatcgtatactcaattcacccgacgcaactacaaatctcc

SEQ ID NO: 44881 - DNA, 80 bp, synthetic construct
  source 1..80: mol_type = other DNA
gaatccgcccccagaaccacatcctcgaacagaccgcctcaaaccaccaaacaatcaatttcgcaattgcaacaatcatt

SEQ ID NO: 44882 - DNA, 80 bp, synthetic construct
  source 1..80: mol_type = other DNA
acgcagggggggaaaaacacatccaccgtcaagcacataactctaaactctgaggtgaccaatacccgtcgaaatccgct

SEQ ID NO: 44883 - DNA, 80 bp, synthetic construct
  source 1..80: mol_type = other DNA
tctaaactctgaggtgaccaatacccgtcgaaatccgctccaccaccagagaatccaacatgggcgtcaaaggttcatct

SEQ ID NO: 44884 - DNA, 80 bp, synthetic construct
  source 1..80: mol_type = other DNA
tttaattatgattgggttattaatctcaccaattaccaatctagatataactcatttaatgaatctaggaacggtaccaa

SEQ ID NO: 44885 - DNA, 80 bp, synthetic construct
  source 1..80: mol_type = other DNA
tctttggggcagtcataggaacaattgctcttggtgtagccaccgctgcacaagttacagcagcaattggtttagcaaaa

SEQ ID NO: 44886 - DNA, 80 bp, synthetic construct
  source 1..80: mol_type = other DNA
gagtatatcccctttaaggcaagcaaagataatagatctaacttctataacaattcacacaaatagtcaagaagtacaag

SEQ ID NO: 44887 - DNA, 80 bp, synthetic construct
  source 1..80: mol_type = other DNA
aaggttcatactttatgaaattcatctagatgctccaggaaaagccatccacagtgatgcaccgaccctcatctcattga

SEQ ID NO: 44888 - DNA, 80 bp, synthetic construct
  source 1..80: mol_type = other DNA
aagaaactcaaaatcaacaggatcacaaccatcccacgacaacaccacgcccacaacaacgccctccaaaaaatgaaaga

SEQ ID NO: 44889 - DNA, 80 bp, synthetic construct
  source 1..80: mol_type = other DNA
caagaaaagggaaaaatggaaaagaacacaacaacagacagagaaaaagaagaagaagggcaacattgccctggcaacat

SEQ ID NO: 44890 - DNA, 80 bp, synthetic construct
  source 1..80: mol_type = other DNA
cactcacaaacatctcccaaccaagaccgaaccgactgcacaggcacagaaactcaacatcacaaaaccagaaatggccc

SEQ ID NO: 44891 - DNA, 80 bp, synthetic construct
  source 1..80: mol_type = other DNA
caatcctcccccaacaatcaccaacaaaacaaaacgacacccaatcaaacaatctccacatttcaattttaagaaaaaaa

SEQ ID NO: 44892 - DNA, 80 bp, synthetic construct
  source 1..80: mol_type = other DNA
ctattataggtgggaacacacttctcagccctaactgtacaaggccttgccctgtgcaactgagacacccccacgagcac

SEQ ID NO: 44893 - DNA, 80 bp, synthetic construct
  source 1..80: mol_type = other DNA
ttctcagccctaactgtacaaggccttgccctgtgcaactgagacacccccacgagcaccggaacaagacccgacaacaa

SEQ ID NO: 44894 - DNA, 80 bp, synthetic construct
  source 1..80: mol_type = other DNA
cccatcgcccagccatcatcatagaatctaacaatccagaaagacgctacatcaacccagccacgaatctccaaagggaa

SEQ ID NO: 44895 - DNA, 80 bp, synthetic construct
  source 1..80: mol_type = other DNA
catctcagacaaaaacacagcccactctccaattacgaataaactaaaataaatcataagaatgcaagactcacatagta

SEQ ID NO: 44896 - DNA, 80 bp, synthetic construct
  source 1..80: mol_type = other DNA
caacaccagggaatttgcaaaacgatattaatataattagaagggagctcaatgaacttatggagaattttgaaactacg

SEQ ID NO: 44897 - DNA, 80 bp, synthetic construct
  source 1..80: mol_type = other DNA
aggggtaggctcaggcattttgtatgcaaattacattatctttcctttgtatgggggtctcacagaaaaatcagtgatac

SEQ ID NO: 44898 - DNA, 80 bp, synthetic construct
  source 1..80: mol_type = other DNA
cattggggactttcagatcaacccgtttttacgcttaatagatcagactgttaattaatcaacaaagttattctgtaata

SEQ ID NO: 44899 - DNA, 80 bp, synthetic construct
  source 1..80: mol_type = other DNA
ccacacaaggtggtcgatagacaaacagcaagagcagcaactgcaacaaaacttcaagggaaaaataattcgagaaatat

SEQ ID NO: 44900 - DNA, 80 bp, synthetic construct
  source 1..80: mol_type = other DNA
aataaattgacctcagagcaaacacaacatcgatccacaatagtcaacacaatcaacaatactccatgaggcttcaccca

SEQ ID NO: 44901 - DNA, 80 bp, synthetic construct
  source 1..80: mol_type = other DNA
cacaaagcatccaacaacaggggggaagagagcacccccaagatggccgaccacactgatgttctactaccagaagttca

SEQ ID NO: 44902 - DNA, 80 bp, synthetic construct
  source 1..80: mol_type = other DNA
cccaagatggccgaccacactgatgttctactaccagaagttcatctgagctctcccattgtacggcataaactcattta

SEQ ID NO: 44903 - DNA, 80 bp, synthetic construct
  source 1..80: mol_type = other DNA
tggaggaccaaaatggtcctgaatagtgacggataagcaatgaggaacaaaaaagatagattatctccaacaacgaatag

SEQ ID NO: 44904 - DNA, 80 bp, synthetic construct
  source 1..80: mol_type = other DNA
acccaaatacccgatggatctcatttatatttagctgaaggtagtggtgcttctcccgggataaaagttttctattatcc

SEQ ID NO: 44905 - DNA, 80 bp, synthetic construct
  source 1..80: mol_type = other DNA
cgggagaaagatatactataacagctattactcaagcgaattaaaccctcctcagaggaactttgaacctctacccacac

SEQ ID NO: 44906 - DNA, 80 bp, synthetic construct
  source 1..80: mol_type = other DNA
attcatttccgatctcttacttctcagggagacttatacagagtgcgtttttggtttgtgatctaagaagatttctttct

SEQ ID NO: 44907 - DNA, 80 bp, synthetic construct
  source 1..80: mol_type = other DNA
gaagattgtgaaattttaattcctagtaatgattacatgatggtcggtgcagagggtcgactatataatattgagaacaa

SEQ ID NO: 44908 - DNA, 80 bp, synthetic construct
  source 1..80: mol_type = other DNA
acaaagtttaaaaaagggggaaatggaaaagaatacaacaacagacagaggaaaagaagaataagggcaacatcgccccg

SEQ ID NO: 44909 - DNA, 80 bp, synthetic construct
  source 1..80: mol_type = other DNA
aaagacctttggccactagatccaaacagtccagcacaaacacccaaacaaccgcaaaaccccattcggctttaataaac

SEQ ID NO: 44910 - DNA, 80 bp, synthetic construct
  source 1..80: mol_type = other DNA
aatctgccaatctgtccaccattcccacaccgacacacaaccatcccgtccctcaccaacaactcaatccgtaagtcaag

SEQ ID NO: 44911 - DNA, 80 bp, synthetic construct
  source 1..80: mol_type = other DNA
aaatcgaatgacaacaatatcaatcgtcatcaaataaaacacagagtaccatgacagcacatacatccaatatccattaa

SEQ ID NO: 44912 - DNA, 80 bp, synthetic construct
  source 1..80: mol_type = other DNA
tggaggaccagaatgatcttgaatagtgacggacaagcaatgaggaacaaaaaagatagattattctcaacaacgaatgg

SEQ ID NO: 44913 - DNA, 80 bp, synthetic construct
  source 1..80: mol_type = other DNA
atttctcttagaagtgtttaataaaaaaattaaaacacatttaattttaaagaaaactgttcatctcgaattcacccttg

SEQ ID NO: 44914 - DNA, 80 bp, synthetic construct
  source 1..80: mol_type = other DNA
gttttgagtgggttgtattctctctagacaggacacctcaggttttcaggggatttcaattccctcgagatcgatacgca

SEQ ID NO: 44915 - DNA, 80 bp, synthetic construct
  source 1..80: mol_type = other DNA
agtgcagcttccacgactcaaaaccgaatcaaagatccagaaacagcccatcgcccagccatcatcatagaatctaacaa

SEQ ID NO: 44916 - DNA, 80 bp, synthetic construct
  source 1..80: mol_type = other DNA
gagtgatcatgtcagagtggtccaggattgcagtggagtttggtgagcagcagctcaatttgactgagcttgaggatttc

SEQ ID NO: 44917 - DNA, 80 bp, synthetic construct
  source 1..80: mol_type = other DNA
cttcaataaacaatctgccaatctgtccaccattcccacaccgatacacaaccatcccgttcctcaccaacaactcaatc

SEQ ID NO: 44918 - DNA, 80 bp, synthetic construct
  source 1..80: mol_type = other DNA
cactaacaagaaagatggcaactatggaagaaatccagagagaaatcagtgctcacgaggggcagcttgtgatagcacgc

SEQ ID NO: 44919 - DNA, 80 bp, synthetic construct
  source 1..80: mol_type = other DNA
tggggaaaggaggcagtggacaactttcatcttggtgatgacatggatccagagcttcgtagcctggctcagatcctgat

SEQ ID NO: 44920 - DNA, 80 bp, synthetic construct
  source 1..80: mol_type = other DNA
tagttaataagaatacagatttattgaataatcatattaaataattaggtaagttaactattagttagttaagttagtta

SEQ ID NO: 44921 - DNA, 80 bp, synthetic construct
  source 1..80: mol_type = other DNA
ggaacagggtgggcttagggccaggtcaccttaagtgacctttttttgtatatatggatgtagatttcaattgatcgagt

SEQ ID NO: 44922 - DNA, 80 bp, synthetic construct
  source 1..80: mol_type = other DNA
ctacaggggtagagccgggtgatcatctcaaggaaagatcagcactaagctacgggaatacactggacctgaatagcctt

SEQ ID NO: 44923 - DNA, 80 bp, synthetic construct
  source 1..80: mol_type = other DNA
aagcaaggaacatggtaagccctgtcatgagtgtagttgggttcttggcactggcaaaagactggacatctagaattgaa

SEQ ID NO: 44924 - DNA, 80 bp, synthetic construct
  source 1..80: mol_type = other DNA
gcgcaccctgcaagttcatagcagagtcccccattgccgggagtttatctgggaatcctgtgaatcgtgattatatcaga

SEQ ID NO: 44925 - DNA, 80 bp, synthetic construct
  source 1..80: mol_type = other DNA
gtgcacttgcagggatggagccaaaggaatttcaagctctcaggcaacattcaaaggatgctggatgtacactggttgaa

SEQ ID NO: 44926 - DNA, 80 bp, synthetic construct
  source 1..80: mol_type = other DNA
tctggataagaggattaaggccaacaccagatatacaatccagaggatgcagtcaaataaataagaatgggaacaaaaat

SEQ ID NO: 44927 - DNA, 80 bp, synthetic construct
  source 1..80: mol_type = other DNA
acgatcttacggggatgtgaagatacagcatctagcaaacagtatgtatctctaggaaccttacagaccttagaaaatgg

SEQ ID NO: 44928 - DNA, 80 bp, synthetic construct
  source 1..80: mol_type = other DNA
tgatccttatttcaaggtcgagtacagtcattatttaaatgatagaaagaatcgaaaaagttgctcagtggttgctgtcc

SEQ ID NO: 44929 - DNA, 80 bp, synthetic construct
  source 1..80: mol_type = other DNA
tgcggcaacgatatcttaagccgtcatcgcaagttcactacagcctccgtcccgcctgcagcaagcttcgctaccgccgc

SEQ ID NO: 44930 - DNA, 80 bp, synthetic construct
  source 1..80: mol_type = other DNA
ccaccgatttctacactttcctcttcgtcggcaccgtcccttgtgtctaatcgccaaggggagaagagatatagatatta

SEQ ID NO: 44931 - DNA, 80 bp, synthetic construct
  source 1..80: mol_type = other DNA
ataaaaaaatttaaacatatttaattttaaagaaaacttttcttatctatcactgtctattatacaaatctccgagccaa

SEQ ID NO: 44932 - DNA, 80 bp, synthetic construct
  source 1..80: mol_type = other DNA
atctaaaaaattaaaaatatctaatataggtccggaaaggttgcaaatcgaggacgatagcgatagcaagttgtcctaag

SEQ ID NO: 44933 - DNA, 80 bp, synthetic construct
  source 1..80: mol_type = other DNA
tccggacctttaataaagtagcttatcaatatatcaccatgtcttcggttttagctgcttacgaacaatttcttcaaaca

SEQ ID NO: 44934 - DNA, 80 bp, synthetic construct
  source 1..80: mol_type = other DNA
gttgaaaaatcagctctacttacacccaacagccccctacgaaaccctcgatctcactcgatatcggtttctcaaagaaa

SEQ ID NO: 44935 - DNA, 80 bp, synthetic construct
  source 1..80: mol_type = other DNA
cggggatgtgaagctactgcatctagcaaacagtatgtatctctaggaaccttacagaccttagaaaatggtgatcctta

SEQ ID NO: 44936 - DNA, 80 bp, synthetic construct
  source 1..80: mol_type = other DNA
ccctcataagctatctcctttgcaaactcgaccaaagctggaacatccagtggctcgttgccaatctcaacagctattgc

SEQ ID NO: 44937 - DNA, 80 bp, synthetic construct
  source 1..80: mol_type = other DNA
ctactggtaataatcatttatttataataaatggaactgacaaatattataaactagatcagtatgcaaatcacatgggc

SEQ ID NO: 44938 - DNA, 80 bp, synthetic construct
  source 1..80: mol_type = other DNA
gtcaaacagcagactggctacaaattggcagctatattataagctttgcactacccattatcctcaaggcattgtatatg

SEQ ID NO: 44939 - DNA, 80 bp, synthetic construct
  source 1..80: mol_type = other DNA
caggttaaatctttggctcctcttgatttatcgaccgatttaagtcaatataatcaatttgtcaagagtgctgaggacca

SEQ ID NO: 44940 - DNA, 80 bp, synthetic construct
  source 1..80: mol_type = other DNA
catccaacggtcaaatgattacttaaactcaatcaatcctagtatagtaaataatagcgcaataataatattgattatac

SEQ ID NO: 44941 - DNA, 80 bp, synthetic construct
  source 1..80: mol_type = other DNA
cgatgggaatacaattggaccaaaggattattttactctacatgattgaatgggggactgatattgttaatcactttcac

SEQ ID NO: 44942 - DNA, 80 bp, synthetic construct
  source 1..80: mol_type = other DNA
aaagagatttctaatcaggaaccactgaagatttgaggtttgtcagttaaacatatataatcactacactttatacgtta

SEQ ID NO: 44943 - DNA, 80 bp, synthetic construct
  source 1..80: mol_type = other DNA
tattcaatcgacactatataatcaacactattagtcactggtataagtttatagattacacatttatatgtaaccaatca

SEQ ID NO: 44944 - DNA, 80 bp, synthetic construct
  source 1..80: mol_type = other DNA
tattagtttataaccttactaactactaactcgggtattattacaagtatatgactaatgtaggactaatcatgtatctc

SEQ ID NO: 44945 - DNA, 80 bp, synthetic construct
  source 1..80: mol_type = other DNA
ctataagcggaacattactgtgaaactgagctgcagctttcttttccatttcatctcttttacacacctacctcagtata

SEQ ID NO: 44946 - DNA, 80 bp, synthetic construct
  source 1..80: mol_type = other DNA
cctatatatatgcacgtagcatatatataggtatacactcatactacctcaaacagttgctttcttgattgcttttcaag

SEQ ID NO: 44947 - DNA, 80 bp, synthetic construct
  source 1..80: mol_type = other DNA
aactggcagatgctatatcgcgccagaagatggatgataagcctgctgaccctactgggctggaaccagatgaccacctc

SEQ ID NO: 44948 - DNA, 80 bp, synthetic construct
  source 1..80: mol_type = other DNA
gctacaaatcggcagctatattataagctttgcactacccatcatcctcaaggcattgtatatgctatctacaagagggc

SEQ ID NO: 44949 - DNA, 80 bp, synthetic construct
  source 1..80: mol_type = other DNA
acttatatgtcccaatgccaactgcacagtccacaatgaaggcagatgaactcactcctggtaggttccggaccattgtc

SEQ ID NO: 44950 - DNA, 80 bp, synthetic construct
  source 1..80: mol_type = other DNA
tgcggtctatttccggcacagataatgaataggaatataattagtccagtcatgggagtgattggttttgctttttttgt

SEQ ID NO: 44951 - DNA, 80 bp, synthetic construct
  source 1..80: mol_type = other DNA
gaaagactgggaggataaaattcaagaattcctcaggaagcaatgtccattcttgaaatccgaagcacgtccaggccagt

SEQ ID NO: 44952 - DNA, 80 bp, synthetic construct
  source 1..80: mol_type = other DNA
cagctgaggaggctgctatcttgagtagtaatagagcataccttctcaacaggcagtctgtcctggatgagtcacatcta

SEQ ID NO: 44953 - DNA, 80 bp, synthetic construct
  source 1..80: mol_type = other DNA
cctgacattgatgcacttcttgagtatgctgcttcaggtgacccaactctgccagactctttagagaccccacatgctgc

SEQ ID NO: 44954 - DNA, 80 bp, synthetic construct
  source 1..80: mol_type = other DNA
ttgggtttttgcatgtgcccctgatcggtgccctccaacatgcatttatgtcgcaggaatggcagagttaggtgcctttt

SEQ ID NO: 44955 - DNA, 80 bp, synthetic construct
  source 1..80: mol_type = other DNA
ggtccggaaaggttgtaaatcgaggacgatagcgatagcaagttgtcctaaattgacaattaatccggacctctaataaa

SEQ ID NO: 44956 - DNA, 80 bp, synthetic construct
  source 1..80: mol_type = other DNA
aattgttatgtattatgagaatgtggggtcatcccactttaacagctgcaggtgcagcggggaaagtacgtgaatctatg

SEQ ID NO: 44957 - DNA, 80 bp, synthetic construct
  source 1..80: mol_type = other DNA
aagctggagatgacatatcacagcctgcaggtgcatttgcaatgtctctaaacagatcagctttcatcaacaacaacact

SEQ ID NO: 44958 - DNA, 80 bp, synthetic construct
  source 1..80: mol_type = other DNA
tcccaagacttctcaggggcaagactctccaactacgagcaaggatggtctggcacaaatcaagatgaaacgagagatac

SEQ ID NO: 44959 - DNA, 80 bp, synthetic construct
  source 1..80: mol_type = other DNA
tacattaatttctatatgttggactttttcatctcaaattatactcataagaagtgcatatagtgacccctctagtcatg

SEQ ID NO: 44960 - DNA, 80 bp, synthetic construct
  source 1..80: mol_type = other DNA
agtcagagcaccactcattccagaaatctcgcaccagaattcaaataccagaatgagcagagatatcaacacaagggaca

SEQ ID NO: 44961 - DNA, 80 bp, synthetic construct
  source 1..80: mol_type = other DNA
tccatattaaagaaattattgaaatactgaaaagtgagggagatgaatatctaagcttagtatggtctccatacaatatt

SEQ ID NO: 44962 - DNA, 80 bp, synthetic construct
  source 1..80: mol_type = other DNA
atctttagaaatgaatgagcaaatagtcgatagtaatctaaatgaatatgtccagtttaatgattcaaacgaagagaggg

SEQ ID NO: 44963 - DNA, 80 bp, synthetic construct
  source 1..80: mol_type = other DNA
acaccagagctgaccgtcaaaataccaatgaggatcgaggcagcaatattccagatgacattcttggagatctagacaat

SEQ ID NO: 44964 - DNA, 80 bp, synthetic construct
  source 1..80: mol_type = other DNA
atgtttttggtgatatattatagtaaatttaatgcagatctaacaattaatgatgaataccatacaagatatttacatca

SEQ ID NO: 44965 - DNA, 80 bp, synthetic construct
  source 1..80: mol_type = other DNA
atgaactcctcactaaattattataacaggaaaaaaattcttaaaaatcattattcaacttgcatcgatgatagcatctc

SEQ ID NO: 44966 - DNA, 80 bp, synthetic construct
  source 1..80: mol_type = other DNA
tccaacttatcattgatttcctgataaaagacaataaaatatatcatcaagaggcaacgatctcaataaacaacatttct

SEQ ID NO: 44967 - DNA, 80 bp, synthetic construct
  source 1..80: mol_type = other DNA
agtagaactataggaaaatacatagacgaggcaatattctcactggacaaatctggataagaggactaaggccagcacca

SEQ ID NO: 44968 - DNA, 80 bp, synthetic construct
  source 1..80: mol_type = other DNA
gatatacaatccagaagatgcagtcaaataaataagaatgggaacaaaaatgttgaaaaatcagctctacttacacccaa

SEQ ID NO: 44969 - DNA, 80 bp, synthetic construct
  source 1..80: mol_type = other DNA
aataagaatgggaacaaaaatgttgaaaaatcagctctacttacacccaacagccccctacgaaaccctcgatctcactc

SEQ ID NO: 44970 - DNA, 80 bp, synthetic construct
  source 1..80: mol_type = other DNA
tgacacatcaacaacccagccacagctacacaacaatcacaaaccggaaaaatcccaaagatacacaatcgcacacatac

SEQ ID NO: 44971 - DNA, 80 bp, synthetic construct
  source 1..80: mol_type = other DNA
aatgaaagcaatcactcccgttctatatcacaacccagaaatcctaccaagcacaacatcacgaccaatcaactgataat

SEQ ID NO: 44972 - DNA, 80 bp, synthetic construct
  source 1..80: mol_type = other DNA
acatagtagaatacaagaacacaactgcattgatttaagaaaaaactaagataggcctgaacggttgcattcaggattct

SEQ ID NO: 44973 - DNA, 80 bp, synthetic construct
  source 1..80: mol_type = other DNA
caatcgttcaggccaatacaattctcagcttcaaacgaaaacaacaagatgagctttgaaataagcatggaggagattga

SEQ ID NO: 44974 - DNA, 80 bp, synthetic construct
  source 1..80: mol_type = other DNA
tgagctcattgaaactggcaatctcaacatagattatgcacttaaagaattaggtgcaaccagtcaatccccgccaaaca

SEQ ID NO: 44975 - DNA, 80 bp, synthetic construct
  source 1..80: mol_type = other DNA
atctccgtctcagaccagcaaaacagaagaaaccaacgatgagacaagaacctcaagaaactcggcatcaggagaggcac

SEQ ID NO: 44976 - DNA, 80 bp, synthetic construct
  source 1..80: mol_type = other DNA
cagcccacacctctccaccactgcggtcatacaatgaagagagtgaatcagagaaacagagctcagacggcttctccatg

SEQ ID NO: 44977 - DNA, 80 bp, synthetic construct
  source 1..80: mol_type = other DNA
atatccaacagaccccaaacaggtacactgctcatgggatcagacacacaatctccaagtccatcaaagacctatcaagg

SEQ ID NO: 44978 - DNA, 80 bp, synthetic construct
  source 1..80: mol_type = other DNA
gaaatacaaatgacaccaggatatttaagaggggggaatatagccaccaagaaagaggcttgggttacacaggatcagag

SEQ ID NO: 44979 - DNA, 80 bp, synthetic construct
  source 1..80: mol_type = other DNA
gccaccaagaaagaggcttgggttacacaggatcagagatcaaaaatacaatcttcattccaagacatcgaagggaatac

SEQ ID NO: 44980 - DNA, 80 bp, synthetic construct
  source 1..80: mol_type = other DNA
atcaaaaatacaatcttcattccaagacatcgaagggaatactcgatctcatgggtcaacggaagaactacaatatcaga

SEQ ID NO: 44981 - DNA, 80 bp, synthetic construct
  source 1..80: mol_type = other DNA
tcaaacagggagcattattatctctgctttctttacaggccacatcaatgcagaatcaccttatgattgctgccagagcc

SEQ ID NO: 44982 - DNA, 80 bp, synthetic construct
  source 1..80: mol_type = other DNA
gaaatcaacctgatcaaaactaatgctcttagaagcatcacctaaaccatgagatctatgaaccacggaggtcacagtga

SEQ ID NO: 44983 - DNA, 80 bp, synthetic construct
  source 1..80: mol_type = other DNA
cccagattcactcaatacgccaagcactcaaccccacactcagaagggacaaccgcaccgcatccccaagaatcgacacc

SEQ ID NO: 44984 - DNA, 80 bp, synthetic construct
  source 1..80: mol_type = other DNA
aactcaatcgacggcgacatcaatcatcacaaaacaaaatatagaacatcagcactgcatacaaaattaccccccggcat

SEQ ID NO: 44985 - DNA, 80 bp, synthetic construct
  source 1..80: mol_type = other DNA
cccggcatacataattcatcgaccgacagattccatccatgacattacaaagtatttaagaaaaaaaccagaagtaaggg

SEQ ID NO: 44986 - DNA, 80 bp, synthetic construct
  source 1..80: mol_type = other DNA
acataattcatcgaccgacagattccatccatgacattacaaagtatttaagaaaaaaaccagaagtaaggggggaccca

SEQ ID NO: 44987 - DNA, 80 bp, synthetic construct
  source 1..80: mol_type = other DNA
tcatccaatcaactgtggccatggctcctacccaatccaaagtcaaaattcacaatctggctgaagctcacgagaaggta

SEQ ID NO: 44988 - DNA, 80 bp, synthetic construct
  source 1..80: mol_type = other DNA
ctaagagccttcccaatagaagttgaacagaactcagaagggaaaaaactattagtgaaacagatcagaataagaacgct

SEQ ID NO: 44989 - DNA, 80 bp, synthetic construct
  source 1..80: mol_type = other DNA
tgtgttttctctagataggacacctcaagtgttcaggggatttcaatttccccgggatagatatgcatgtgttccatctg

SEQ ID NO: 44990 - DNA, 80 bp, synthetic construct
  source 1..80: mol_type = other DNA
aacaaatgctgttaagcgtaggtatcagtgatctatgggggcccacaattgcagtacatgcaaatgggaaaatccccaaa

SEQ ID NO: 44991 - DNA, 80 bp, synthetic construct
  source 1..80: mol_type = other DNA
caagaaggcaatatccatgcctgatcttgctggcataaatatctaatcatacaaattaatcactgatatagagttaagga

SEQ ID NO: 44992 - DNA, 80 bp, synthetic construct
  source 1..80: mol_type = other DNA
acattttatatccttcccaattggatcaccaccaccatcctgatatataaaatcacactacactatgcaccgtccaatat

SEQ ID NO: 44993 - DNA, 80 bp, synthetic construct
  source 1..80: mol_type = other DNA
ctagccaaccataagatcacaaccacattacaccaattcaatcaaggacatccctgcaaacatcaaacaatcaaaccacg

SEQ ID NO: 44994 - DNA, 80 bp, synthetic construct
  source 1..80: mol_type = other DNA
actgcaacagacacagcactacctgatcaagccagaccctcaccatgcacccaagtcacccgacacaactgcaaactctc

SEQ ID NO: 44995 - DNA, 80 bp, synthetic construct
  source 1..80: mol_type = other DNA
gactctattattcgaaacacatcctcgaacagaccactcaaaaacaccgaacaatcaatctcctggccacaacgatcatt

SEQ ID NO: 44996 - DNA, 80 bp, synthetic construct
  source 1..80: mol_type = other DNA
gtaaattttaagaaaaaatctaacacacaactagagccaaaaacagggggggaataacgcatccgccgccacacgcacag

SEQ ID NO: 44997 - DNA, 80 bp, synthetic construct
  source 1..80: mol_type = other DNA
gggaataacgcatccgccgccacacgcacagatccagaacccaaggtaaccaagacccgtcggactccactccatcttca

SEQ ID NO: 44998 - DNA, 80 bp, synthetic construct
  source 1..80: mol_type = other DNA
atccagaacccaaggtaaccaagacccgtcggactccactccatcttcaaagaaatcaacatgggtgtcaaaagtctatc

SEQ ID NO: 44999 - DNA, 80 bp, synthetic construct
  source 1..80: mol_type = other DNA
tctttggggcagttataggtacagttgctctcggtgtagctactgctgcacaagttacagcagcaatcggtcttgcaaaa

SEQ ID NO: 45000 - DNA, 80 bp, synthetic construct
  source 1..80: mol_type = other DNA
ctgcagaggaaacaaatgatgcagtccgagatctcatagaatccaacaaaattgtggcaaggatgatatcagcaattcag

SEQ ID NO: 45001 - DNA, 80 bp, synthetic construct
  source 1..80: mol_type = other DNA
aatcagataaacactgtcattcaacctgccataaaccggattgattgtcaaatcaaagacttacaagctgctaatatttt

SEQ ID NO: 45002 - DNA, 80 bp, synthetic construct
  source 1..80: mol_type = other DNA
caagtatctctcctctaagacaagcaaaaataatagatctaacctctataacaattcatacaaataatcaggaagtgcaa

SEQ ID NO: 45003 - DNA, 80 bp, synthetic construct
  source 1..80: mol_type = other DNA
aagaggcacatcttgcaaatcttacccagatgcacctagataaatcgcctacaaagaaaaataaactcccaatttatcaa

SEQ ID NO: 45004 - DNA, 80 bp, synthetic construct
  source 1..80: mol_type = other DNA
aagaaatccaaaatcaaaggagctacagctatcctgcaacaacactgcgaccacaatgacgctcttcaagaaatgaagga

SEQ ID NO: 45005 - DNA, 80 bp, synthetic construct
  source 1..80: mol_type = other DNA
caaattcaggaacagaaaaaaatagcccaaaacaaactaacagacagagaaagggagaggcaagcccgtctcagcaaaat

SEQ ID NO: 45006 - DNA, 80 bp, synthetic construct
  source 1..80: mol_type = other DNA
ctcccatcaacatcactcgaccaagaccgaatcaacagcacaaacgcagaaacccactactgcaaaaccacagaaattct

SEQ ID NO: 45007 - DNA, 80 bp, synthetic construct
  source 1..80: mol_type = other DNA
cccataatcccccaccaacattcaccaacaaaccagaaaatcattcaaccaagcaacctccacaattcaagtttaagaaa

SEQ ID NO: 45008 - DNA, 80 bp, synthetic construct
  source 1..80: mol_type = other DNA
aaaactattataggggggaacgcacttctcagctccaaccacacgaggccttgtcttgtaaaacaagatcaatctcacaa

SEQ ID NO: 45009 - DNA, 80 bp, synthetic construct
  source 1..80: mol_type = other DNA
gggaacgcacttctcagctccaaccacacgaggccttgtcttgtaaaacaagatcaatctcacaaagttcaaaccaaaat

SEQ ID NO: 45010 - DNA, 80 bp, synthetic construct
  source 1..80: mol_type = other DNA
agttcaaaccaaaatctgactacaagtagaacctccacaattcaaaattagaccaacgatctaacaacaactcatcaact

SEQ ID NO: 45011 - DNA, 80 bp, synthetic construct
  source 1..80: mol_type = other DNA
agcaactatcattgaactaaacaatccagaaggacatcacatcaactcattcgtgaatctccaaaagaaataatccaagt

SEQ ID NO: 45012 - DNA, 80 bp, synthetic construct
  source 1..80: mol_type = other DNA
aaatttacaatctactctttaattataaataaactgaagtaggtcacaaggatgcaagagtcacgtggcaatactcaaat

SEQ ID NO: 45013 - DNA, 80 bp, synthetic construct
  source 1..80: mol_type = other DNA
caactccaggaaatttgcaaagtgatgtcgatataatcagaaaagagctcgatgaacttatggagaactttgaaaccacc

SEQ ID NO: 45014 - DNA, 80 bp, synthetic construct
  source 1..80: mol_type = other DNA
agggtagttaaaggagagaacacctgcacactgggtcacaagcctctacatgatgcttcctttctgaatggatttaacaa

SEQ ID NO: 45015 - DNA, 80 bp, synthetic construct
  source 1..80: mol_type = other DNA
attctatttcacatatagggacaatgtacaaatcagacttaatccattattggattatcccaattttattccaactgcta

SEQ ID NO: 45016 - DNA, 80 bp, synthetic construct
  source 1..80: mol_type = other DNA
aggggtaggttctggtattttatattcaaattacatcatatttcccttatatggaggtcttatggaaaattcaatgatat

SEQ ID NO: 45017 - DNA, 80 bp, synthetic construct
  source 1..80: mol_type = other DNA
taattggtgatttccagatttttccctttttacgctcaatagatcaggctatcacttaatcaataggattgctctgtaac

SEQ ID NO: 45018 - DNA, 80 bp, synthetic construct
  source 1..80: mol_type = other DNA
acaaactgattttataaggtgaaatatgctcatataaaatggttaatagacaaataataataataatcattataacaaaa

SEQ ID NO: 45019 - DNA, 80 bp, synthetic construct
  source 1..80: mol_type = other DNA
ttaaaaggataaaataattataagaacactatgaactaatcagaaaacaaacataacattaactaacaacagctaacatg

SEQ ID NO: 45020 - DNA, 80 bp, synthetic construct
  source 1..80: mol_type = other DNA
accaatgatactccgtgaagcatcatccattaataacaaaaagtataatctatcaattagaaccaaacttgatctattct

SEQ ID NO: 45021 - DNA, 80 bp, synthetic construct
  source 1..80: mol_type = other DNA
aagtaatctaccaagcgaaaacacacaccaagaatcaccagccatcgaatctgattaatctgacacaaaaatccgaacaa

SEQ ID NO: 45022 - DNA, 80 bp, synthetic construct
  source 1..80: mol_type = other DNA
ccgccggaacaggcctggtcctgataaacaacccgcccggccaccagcccactcaaaatcaagacacaatcaatctcacc

SEQ ID NO: 45023 - DNA, 80 bp, synthetic construct
  source 1..80: mol_type = other DNA
ccaatcaccagtccaatccgcgagtcagacaagtccttccacatgcccagagattcaatcgatctgatacattgctatat

SEQ ID NO: 45024 - DNA, 80 bp, synthetic construct
  source 1..80: mol_type = other DNA
tttttaagaaaaaagaaaattgagtgggtgagacattctagttctcatacacagaataaacttcgaacattggatgcagt

SEQ ID NO: 45025 - DNA, 80 bp, synthetic construct
  source 1..80: mol_type = other DNA
acggatcaaaattgaagattgaagaactagtatgattccgcacactagcagacaagcaatgaggaataaaaagaatagac

SEQ ID NO: 45026 - DNA, 80 bp, synthetic construct
  source 1..80: mol_type = other DNA
aattgcccaggaggaatgacacaaagcatccaacactaggggggaagagaccacctctaagatggctgatcatactgatg

SEQ ID NO: 45027 - DNA, 80 bp, synthetic construct
  source 1..80: mol_type = other DNA
gagaccacctctaagatggctgatcatactgatgtcctattgccagaggtgcatctgagttcccccattgtacggcacaa

SEQ ID NO: 45028 - DNA, 80 bp, synthetic construct
  source 1..80: mol_type = other DNA
aacaaaaatgttgaaaaatcagctctacttacacccaacagccccctacgaaaccctcgatctcactcgatatcggtttc

SEQ ID NO: 45029 - DNA, 80 bp, synthetic construct
  source 1..80: mol_type = other DNA
atggagttgctgatccatagatcaagtgcaatcttcctaactcttgctattaatgcattgtaccttacctcaagtcagaa

SEQ ID NO: 45030 - DNA, 80 bp, synthetic construct
  source 1..80: mol_type = other DNA
attccaggtatgactgcaaaattatgacatcaaaaacagacataagcagctcagtaattacttctctaggagctatagtg

SEQ ID NO: 45031 - DNA, 80 bp, synthetic construct
  source 1..80: mol_type = other DNA
tcatgctatggtaagactaaatgtactgcatccaacaaaaatcgtggaattataaagacattttctaatggctgtgatta

SEQ ID NO: 45032 - DNA, 80 bp, synthetic construct
  source 1..80: mol_type = other DNA
aattgactgactcagatcacaatgaactactgatgccggagcttgaaagcgacagcaaccccttcaatcgtccaagattc

SEQ ID NO: 45033 - DNA, 80 bp, synthetic construct
  source 1..80: mol_type = other DNA
catcatatacttaggccattaggcttgacatccacctcatggtataaatcattgagtataattaaattcttgggaatgat

SEQ ID NO: 45034 - DNA, 80 bp, synthetic construct
  source 1..80: mol_type = other DNA
acagtcagagcaccactcatcccagaaatctcacaccagaatccaaacaccagaacaagcagaaacatcaacacaaggga

SEQ ID NO: 45035 - DNA, 80 bp, synthetic construct
  source 1..80: mol_type = other DNA
tagctgtcagcaatggtataatatcacaaacttcaattctcttgtaaatttgtacaaacacttagcttctatttatacaa

SEQ ID NO: 45036 - DNA, 80 bp, synthetic construct
  source 1..80: mol_type = other DNA
aaaatcagctctacttacacccaacaacccctaataaaacccccgatctcattcgatatcggtttctcagaaaattgttt

SEQ ID NO: 45037 - DNA, 80 bp, synthetic construct
  source 1..80: mol_type = other DNA
ccatctcacgtccccctaccaccgcggtcacacaatgaagagagtgaaccagagaaacagagcccagacggcttctccat

SEQ ID NO: 45038 - DNA, 80 bp, synthetic construct
  source 1..80: mol_type = other DNA
actcattcttgatgcaaagaagagagcgctaaatgaaccaagaaggaatcagaaaacaacaaatgaatatggaaatacaa

SEQ ID NO: 45039 - DNA, 80 bp, synthetic construct
  source 1..80: mol_type = other DNA
caactcgaatgacggcaataccaatcatcacaaaacaacacacagaatatcagcactgcatacaaaatcattccttagca

SEQ ID NO: 45040 - DNA, 80 bp, synthetic construct
  source 1..80: mol_type = other DNA
aatacgactgcaatagacacaacatcatccgatcaatccagacccccactatgcacacaagtcattcgacataaccgtaa

SEQ ID NO: 45041 - DNA, 80 bp, synthetic construct
  source 1..80: mol_type = other DNA
attttcgactccactatccgaaacacatcctcaaacagatcactcaaaaacatcgaataatcaatctcccagttgcaatg

SEQ ID NO: 45042 - DNA, 80 bp, synthetic construct
  source 1..80: mol_type = other DNA
aaaagaagtctcccataatcccccaccaacattcgccaaaaaaacaaaaaatcattcaatcaaacaacttccacatttca

SEQ ID NO: 45043 - DNA, 80 bp, synthetic construct
  source 1..80: mol_type = other DNA
ttaattcgcaactcactcttcaattataaataaattaaagcaaattacaaggatgcaagattcacgtggcaatactcaaa

SEQ ID NO: 45044 - DNA, 80 bp, synthetic construct
  source 1..80: mol_type = other DNA
tataataatcaatcagggaaatatttttatcctaattcaaccaagttaccatgtagtaataaaactagtgaaaaaataaa

SEQ ID NO: 45045 - DNA, 80 bp, synthetic construct
  source 1..80: mol_type = other DNA
gaccaatgatactctgtgaaacatcacccatcattaatataaaaaataatctattaattaaaaccaaatctgatccatta

SEQ ID NO: 45046 - DNA, 80 bp, synthetic construct
  source 1..80: mol_type = other DNA
taggcaacccaccaagagaaaacacacatcaagaattaccaaccatcaagtccgatcaatccgacgggaaaatctaaaca

SEQ ID NO: 45047 - DNA, 80 bp, synthetic construct
  source 1..80: mol_type = other DNA
actgccagaataggtccagtcctgacaaacaacctgcccggccacaagcccactcaacatcaagacacaatcaacttcac

SEQ ID NO: 45048 - DNA, 80 bp, synthetic construct
  source 1..80: mol_type = other DNA
tgactatgcagaaattgaatctgcaacattgtttactgacattgcaacaccacattctgtatgggtatttgcatgtgcac

SEQ ID NO: 45049 - DNA, 80 bp, synthetic construct
  source 1..80: mol_type = other DNA
gatcagaagattataattatgtatatgttattctggggcaaagaggcagtcaatcacttccatctgggagatgatatgga

SEQ ID NO: 45050 - DNA, 80 bp, synthetic construct
  source 1..80: mol_type = other DNA
tcgatctcactcgatatcggtttctcaaagaaatgtttaataaaaaatatcaaatacatttaaatttaaagaaaactttc

SEQ ID NO: 45051 - DNA, 80 bp, synthetic construct
  source 1..80: mol_type = other DNA
cacatgatgaacagccagtacatgtttgactacccggcaattaacattgatgtaaggtgtcatagactcctctccagtgt

SEQ ID NO: 45052 - DNA, 80 bp, synthetic construct
  source 1..80: mol_type = other DNA
cctcctctgggtgttgtcaataaatgagctattgatagcagcaagcattggttgagagaatgattcctcaatatctctct

SEQ ID NO: 45053 - DNA, 80 bp, synthetic construct
  source 1..80: mol_type = other DNA
tctgcgcaccacgaaggctgacattgattgttttggaaaacatgagcaagaaaagcttgtgagcatccaacactgcattg

SEQ ID NO: 45054 - DNA, 80 bp, synthetic construct
  source 1..80: mol_type = other DNA
aagtcctcctggtcaaggcttgggtcaatgagaccggcaaagcttggatgcatcatctgcctggggtatgtttgtccaca

SEQ ID NO: 45055 - DNA, 80 bp, synthetic construct
  source 1..80: mol_type = other DNA
catgcgatccattgtgctccctgggactggcaagaagttctcgaccacttccacggcttgaactgtccacccagccaggg

SEQ ID NO: 45056 - DNA, 80 bp, synthetic construct
  source 1..80: mol_type = other DNA
ctgcagccacccgtgataaggtgatgccattcctgcctggtctgccctctactattttgtactttgcaaccaggctctta

SEQ ID NO: 45057 - DNA, 80 bp, synthetic construct
  source 1..80: mol_type = other DNA
acttcccttgccccctctggagacattctctcaaccatctttttgggcttattgccacgagttagggacaggatgatcat

SEQ ID NO: 45058 - DNA, 80 bp, synthetic construct
  source 1..80: mol_type = other DNA
cttttttgcatcctcctcccagcttttccctccaagctgtacaaggttttgaatgattgttctggcatcaaacccttgat

SEQ ID NO: 45059 - DNA, 80 bp, synthetic construct
  source 1..80: mol_type = other DNA
gacttgggtttggacgcagaaactcactgtctgacttttactctcttggagagctgccagcttcttggggcccagcatgc

SEQ ID NO: 45060 - DNA, 80 bp, synthetic construct
  source 1..80: mol_type = other DNA
atgcaaatgcttgtagccattcctggattacagcctcatcaatagcctgctctccaaattcaacagcaattttctggtac

SEQ ID NO: 45061 - DNA, 80 bp, synthetic construct
  source 1..80: mol_type = other DNA
ctctccaaattcaacagcaattttctggtactcgtccatttcaaactcagctcactcagattaactagggaactttgtgt

SEQ ID NO: 45062 - DNA, 80 bp, synthetic construct
  source 1..80: mol_type = other DNA
tacatcagttctgtaaagcctatggtgtacaccttccaaggcatggcaagtgacctctctaggtttgatcttacaagctt

SEQ ID NO: 45063 - DNA, 80 bp, synthetic construct
  source 1..80: mol_type = other DNA
ctctaggagagggttgccaaatgtcctgaaagctcttagctggccactaggtgtccccgactgtgagatcttcagcatat

SEQ ID NO: 45064 - DNA, 80 bp, synthetic construct
  source 1..80: mol_type = other DNA
gcagtgatgggtttgtaagagggctacaaacaagagatcagctaatgtcttacattctgagaatgggagattcacacagc

SEQ ID NO: 45065 - DNA, 80 bp, synthetic construct
  source 1..80: mol_type = other DNA
ctggatgagtgcatagttcaggcacataaaaagatactgcaagaagctaggaggttgggtctcagtgatgagcattacaa

SEQ ID NO: 45066 - DNA, 80 bp, synthetic construct
  source 1..80: mol_type = other DNA
tggatacgatctgttcagagagataggatctctggtttgtctcaggctcattaatgcagagccttttgacactgccctct

SEQ ID NO: 45067 - DNA, 80 bp, synthetic construct
  source 1..80: mol_type = other DNA
ctggggaggcacttgatgtcagaacagtgattagatcttatagagcaagagacccttctgctggtcttactgagtatggc

SEQ ID NO: 45068 - DNA, 80 bp, synthetic construct
  source 1..80: mol_type = other DNA
aattctctttggaccccaatacacagtcatgtggatgaaaatgatgagagctcgtctgactctgacttttgatttccgct

SEQ ID NO: 45069 - DNA, 80 bp, synthetic construct
  source 1..80: mol_type = other DNA
gtcttatgttgctcacaataagttccacactcatgacgtttcaacgtatgagcattgtgaaataccactagagaagttga

SEQ ID NO: 45070 - DNA, 80 bp, synthetic construct
  source 1..80: mol_type = other DNA
gcccagccccaaacccacccctccccacaaccccatcccagatccaatcccagaccctacccacccttgctaccctcgcc

SEQ ID NO: 45071 - DNA, 80 bp, synthetic construct
  source 1..80: mol_type = other DNA
acccagctatcccccaccccagaactctctacctagaatccccatcccaccccacattagcagcagcttactctagtttc

SEQ ID NO: 45072 - DNA, 80 bp, synthetic construct
  source 1..80: mol_type = other DNA
ctataaacttctgcaatcttcttcacaactgctgtggctcttgctccagaagttaagatcccaaactttgtcaaaaatgc

SEQ ID NO: 45073 - DNA, 80 bp, synthetic construct
  source 1..80: mol_type = other DNA
atcacaggaaagtaatccatgatatacttgataagcactagggggtctttgtgttgtgtcagtggagtacattaaaggtg

SEQ ID NO: 45074 - DNA, 80 bp, synthetic construct
  source 1..80: mol_type = other DNA
gggcagccttaacctctaatcaacctcagcaaatccatcatcatcactctcttcccctgattccatctcaacatctggga

SEQ ID NO: 45075 - DNA, 80 bp, synthetic construct
  source 1..80: mol_type = other DNA
accaaggggagaagagatatagatattgatctgaagaattgagaatatctaatgtaggtccggaaagacctttaataaag

SEQ ID NO: 45076 - DNA, 80 bp, synthetic construct
  source 1..80: mol_type = other DNA
atgaactcctcatctaactactacaatcagaaaaaaactttcaaaaaccatctctcaacttgcattgacagcatctctcc

SEQ ID NO: 45077 - DNA, 80 bp, synthetic construct
  source 1..80: mol_type = other DNA
cgattccaccatctgaaacacatcctcgaacagaccattcaaaaacaccgaacaatcaatctcccagttgcaatgatcat

SEQ ID NO: 45078 - DNA, 80 bp, synthetic construct
  source 1..80: mol_type = other DNA
tgtaaattttaagaaaaaatctgacacacagctagagccaaatatagggggggaaaaacgcatccaccgccacgcgcaca

SEQ ID NO: 45079 - DNA, 80 bp, synthetic construct
  source 1..80: mol_type = other DNA
ggggaaaaacgcatccaccgccacgcgcacagatccagaacccaaggcaaccaacacccatcggactccattccatcctc

SEQ ID NO: 45080 - DNA, 80 bp, synthetic construct
  source 1..80: mol_type = other DNA
agaaatcaaagactcaacagagatgccgatcttatttataagattcccagtcagataccattgcccagataacagcaact

SEQ ID NO: 45081 - DNA, 80 bp, synthetic construct
  source 1..80: mol_type = other DNA
ctttccttcttttccttttcttttctttactaaccctcattaagttgtttccttttgtctttttagggagcatactacta

SEQ ID NO: 45082 - DNA, 80 bp, synthetic construct
  source 1..80: mol_type = other DNA
ctagcaaaatggagaataaaatcgaggtgaacaacaaagatgagatgaacaagtggtttgaagagttcaagaaacacgtg

SEQ ID NO: 45083 - DNA, 80 bp, synthetic construct
  source 1..80: mol_type = other DNA
aaggggagaagagatatagatattaatctaaaaaattaaaaatatctaatgtaggtccggaaaggttgtaaatcgaggac

SEQ ID NO: 45084 - DNA, 80 bp, synthetic construct
  source 1..80: mol_type = other DNA
tgcctatccagaatccacaatgcatagactcccaaacattgaatcaactgactcagatcacaatgaactactgatgccgg

SEQ ID NO: 45085 - DNA, 80 bp, synthetic construct
  source 1..80: mol_type = other DNA
cagatagagttcttgagattggttcagagatattaggttttgacggttcagtgtgccaaatcacgaaagatacagtcttt

SEQ ID NO: 45086 - DNA, 80 bp, synthetic construct
  source 1..80: mol_type = other DNA
tgtccctacaatgatgcatatatattacccatccagcagaaaagatgcctacaaggtcaaacaagagattgcgtgttcac

SEQ ID NO: 45087 - DNA, 80 bp, synthetic construct
  source 1..80: mol_type = other DNA
caactcctcatggatgcattcgaattccatcattttccttaagtcaaactcattggtgttatactcacaacacaatttta

SEQ ID NO: 45088 - DNA, 80 bp, synthetic construct
  source 1..80: mol_type = other DNA
cagggatgtgcagatacagtatctagcaatcagtatgtatctcttggaaccttacagaccttagaaaatggtaatcctta

SEQ ID NO: 45089 - DNA, 80 bp, synthetic construct
  source 1..80: mol_type = other DNA
tttcaaggtcgagtatagtcattatttaaatgatgggaagaatcgaaagagttgctcagtggttgctgtccttgacggat

SEQ ID NO: 45090 - DNA, 80 bp, synthetic construct
  source 1..80: mol_type = other DNA
taggcagtccaccaagagaaaatacatatcaagaattaccaaccatcaagtctgatcaatccgacacaaaaatccaaaca

SEQ ID NO: 45091 - DNA, 80 bp, synthetic construct
  source 1..80: mol_type = other DNA
accgccagaataggcccggtcctgataaacaacctgcccggccaccagcctactcaacatcaagacacaatcattttcac

SEQ ID NO: 45092 - DNA, 80 bp, synthetic construct
  source 1..80: mol_type = other DNA
agcttgaaagcgacagtaacccctttaatcgttcaagattcacagtcagagcaccactcatcccagaaatctcgcaccag

SEQ ID NO: 45093 - DNA, 80 bp, synthetic construct
  source 1..80: mol_type = other DNA
taaagagacactacaccaacaagaaaaatggcaactatggaagaaatccagagagaaatcagtgctcacgaggggcagct

SEQ ID NO: 45094 - DNA, 80 bp, synthetic construct
  source 1..80: mol_type = other DNA
gtatacgggtggttttcatatggggaacagggtgggcttagggccaggtcaccttaagtgacctttttttgtatatatgg

SEQ ID NO: 45095 - DNA, 80 bp, synthetic construct
  source 1..80: mol_type = other DNA
ttatcaaacacatttaaatttaaagaaaacttttcttgtctattctcccgggaacaaaaatgttgaaaaatcagctctac

SEQ ID NO: 45096 - DNA, 80 bp, synthetic construct
  source 1..80: mol_type = other DNA
gaaatatagatattaatctaaaaaattaaaaatgtctaatgtaggtccggaaaggttgtaaatcgaggacgatagcgata

SEQ ID NO: 45097 - DNA, 80 bp, synthetic construct
  source 1..80: mol_type = other DNA
cacatttaaatttaaagaaaacttttcttgtctattctccccttggtgtaagtagagctgatttttcaacatttttgttc

SEQ ID NO: 45098 - DNA, 80 bp, synthetic construct
  source 1..80: mol_type = other DNA
tcttgcgcagaccagacttcgctcgtactcgtgcgcctcgcttcgcttttcctccgcaaccatgtctgacaaacccgata

SEQ ID NO: 45099 - DNA, 80 bp, synthetic construct
  source 1..80: mol_type = other DNA
tccttagcaaactcgaccaaagctggaacatccagtggctcgttgccaatctcaacagctattgcagaccagtcagtcat

SEQ ID NO: 45100 - DNA, 80 bp, synthetic construct
  source 1..80: mol_type = other DNA
acacaaagacccccaaaaaaggaaagacgcaaaggagtgatcatgtcggagtggtccaggattgcagtggagtttggtga

SEQ ID NO: 45101 - DNA, 80 bp, synthetic construct
  source 1..80: mol_type = other DNA
ttttgcggacaggaataaagaagtcccaacagtccaatagaggcttacgcaatgagggagaagtgaataagtggtggttc

SEQ ID NO: 45102 - DNA, 80 bp, synthetic construct
  source 1..80: mol_type = other DNA
aagctcatgcctcttagccttgcaagtgactctatctggaggagggccacatccagaattggggatagtccagttattag

SEQ ID NO: 45103 - DNA, 80 bp, synthetic construct
  source 1..80: mol_type = other DNA
gatctcaggtaacccaagtctaagccttcgcttctcaatggcttcaagagaatccaatatcatgtccccttcaaaaaggt

SEQ ID NO: 45104 - DNA, 80 bp, synthetic construct
  source 1..80: mol_type = other DNA
acttctggccttttgtaatcctgtggaagaggccccgccagttctctcttccggtttccattgcccagctgttcttgatg

SEQ ID NO: 45105 - DNA, 80 bp, synthetic construct
  source 1..80: mol_type = other DNA
gagaagaacatgtgagctgcctgtaggaaccatacagatggttttccactaggccacctgagagcactcagctctctctg

SEQ ID NO: 45106 - DNA, 80 bp, synthetic construct
  source 1..80: mol_type = other DNA
ggagtagcacctcatgtccttgtagtacatgtccaacaactgctcaagtccgggctcaagctggtgaagaggattttttg

SEQ ID NO: 45107 - DNA, 80 bp, synthetic construct
  source 1..80: mol_type = other DNA
ggttgccaaataaccaaacagtgttggtcatcttacccatcctcttgaccattgacagagtcaacacactacaagagcac

SEQ ID NO: 45108 - DNA, 80 bp, synthetic construct
  source 1..80: mol_type = other DNA
agaagctgaaggagacaggtggagatgattgggtgaaggatacaaagttcatcattgtctttgccctgactcgaggcaat

SEQ ID NO: 45109 - DNA, 80 bp, synthetic construct
  source 1..80: mol_type = other DNA
tcaacgaggtctctcctgagagtggggtactctcctagagatggctcaagcctgacagtgttggcattcattgctacaga

SEQ ID NO: 45110 - DNA, 80 bp, synthetic construct
  source 1..80: mol_type = other DNA
cattcattgctacagatttgaggtcaacgttggagcatttgctcagcgacatggtttccaaatgaagggggtctttgtgt

SEQ ID NO: 45111 - DNA, 80 bp, synthetic construct
  source 1..80: mol_type = other DNA
aagatcgtcaaggcatcagggaaaatgtcaaactcagggtccaagaggttgatggcactccaagagaaatatggactggt

SEQ ID NO: 45112 - DNA, 80 bp, synthetic construct
  source 1..80: mol_type = other DNA
tgagagggcagagaccaggctctcaatcactccagtgagggttgcgcagagccttcccacttggacatgtgctgctgcag

SEQ ID NO: 45113 - DNA, 80 bp, synthetic construct
  source 1..80: mol_type = other DNA
cagctctaaaggagtatctcccagtagggccagccgtcatgaacctgaaggttgagaattatccccctgagatgatgtgc

SEQ ID NO: 45114 - DNA, 80 bp, synthetic construct
  source 1..80: mol_type = other DNA
atggcctttggatccctgattccaactgcgggggtatctgaagccacaaccaagaccctgatggaggcctactctctgtg

SEQ ID NO: 45115 - DNA, 80 bp, synthetic construct
  source 1..80: mol_type = other DNA
gcaagatgccttcaccaagactatcaatgtgaagatgcgcggagccagcaagacagaagtttacaactccttcagggacc

SEQ ID NO: 45116 - DNA, 80 bp, synthetic construct
  source 1..80: mol_type = other DNA
ctcttcatgctgctgtgaactctgtcttctttcccaatgatgttcgggtaaagtggctgaaggccaaggggatccttggc

SEQ ID NO: 45117 - DNA, 80 bp, synthetic construct
  source 1..80: mol_type = other DNA
ccagatggggtccccagcagagctgctgaggttgctgctgctgcttacagaaacctgtaagcagcaatttgacatatcca

SEQ ID NO: 45118 - DNA, 80 bp, synthetic construct
  source 1..80: mol_type = other DNA
gcagcagctcaatttgactgagcttgaggacttcgcgagagagctggcctatgaaggccttgaccctgctttgatcatca

SEQ ID NO: 45119 - DNA, 80 bp, synthetic construct
  source 1..80: mol_type = other DNA
attaggctaaatttcatgatccaattcgacaaaattagacctccttcgggaggtcaccaatggctggccaatctcttccc

SEQ ID NO: 45120 - DNA, 80 bp, synthetic construct
  source 1..80: mol_type = other DNA
cagatggtgttcagggctgcagttctcagctcttcatcaaacctgatgaggttgtggaaagggcacctatttaaatagtg

SEQ ID NO: 45121 - DNA, 80 bp, synthetic construct
  source 1..80: mol_type = other DNA
tgccatcagatgtgggtaaccatgaaggactccaggctcatcatcctcatccaagacactgtaagagccatctgtcttct

SEQ ID NO: 45122 - DNA, 80 bp, synthetic construct
  source 1..80: mol_type = other DNA
agattattattacctgcttttgattattccaatatccatttgcactaacttgtagaatgtgaattattgctactaattag

SEQ ID NO: 45123 - DNA, 80 bp, synthetic construct
  source 1..80: mol_type = other DNA
atttgattaggggattactattcaattgcactaatttgtagaatgtgaattattactactaatcaggtgcataatcagtg

SEQ ID NO: 45124 - DNA, 80 bp, synthetic construct
  source 1..80: mol_type = other DNA
ataagagggcactcagtgatagagaaggaattgctcattccatccagagcaaaatagatgagttgcggaggcaacttgct

SEQ ID NO: 45125 - DNA, 80 bp, synthetic construct
  source 1..80: mol_type = other DNA
ctcacatacatataactacctcaacacacactacctcattgcgttatttcctgaatttctctttagggagcatactacta

SEQ ID NO: 45126 - DNA, 80 bp, synthetic construct
  source 1..80: mol_type = other DNA
cagcaggacggaacctggggcaagaaagagatccaaccggtgttgaaccaggagatcatctcagagaaaaatccatgctc

SEQ ID NO: 45127 - DNA, 80 bp, synthetic construct
  source 1..80: mol_type = other DNA
attttagttctgtcaagcctatgatgtataccttccaaggtatggcaagtgacctctccaggtttgacctcacaggtttc

SEQ ID NO: 45128 - DNA, 80 bp, synthetic construct
  source 1..80: mol_type = other DNA
caatgttaattgccgggtagtcaaacatgtactggctgttcatcatgttgttgttgatcattactagggggtctttgtgt

SEQ ID NO: 45129 - DNA, 80 bp, synthetic construct
  source 1..80: mol_type = other DNA
tgggggggtggcaagggtggattcggtttgaatttgagtcatggggtggagtgggtctgggggctgggcagcggagatca

SEQ ID NO: 45130 - DNA, 80 bp, synthetic construct
  source 1..80: mol_type = other DNA
acacagtcatgtggatgaaaatgatgagagctcgtctgactctgacttttgatctccgctgcccagcccccagacccacc

SEQ ID NO: 45131 - DNA, 80 bp, synthetic construct
  source 1..80: mol_type = other DNA
gagctgcagctacccttgatagagttattccgtttctgccaggtcttccttcaactatcttatacttcgaaaccaggctt

SEQ ID NO: 45132 - DNA, 80 bp, synthetic construct
  source 1..80: mol_type = other DNA
ttaacctctctggctccctctggagacattctctcaaccatcttcttgggcttgttaccacgagtcagagataagataat

SEQ ID NO: 45133 - DNA, 80 bp, synthetic construct
  source 1..80: mol_type = other DNA
agacttggggttggacgcagaagctcgctgtctgacttttattcccttggagagttaccagcttcatggggcccagcatg

SEQ ID NO: 45134 - DNA, 80 bp, synthetic construct
  source 1..80: mol_type = other DNA
ataatctagatgaatgtatagtccaagcacacaagaagataacacaagaggccaggagattgggccttagtaatgagcat

SEQ ID NO: 45135 - DNA, 80 bp, synthetic construct
  source 1..80: mol_type = other DNA
tataacgggtatgacctgtttagagagataggatctctagtctgcctcagactcatcaatgcagagccatatgatactgc

SEQ ID NO: 45136 - DNA, 80 bp, synthetic construct
  source 1..80: mol_type = other DNA
ttcttctggggaggcacttgagatcaggacagtgattaggtcctatagagcaagtgatccctctgctggtttaaatgaat

SEQ ID NO: 45137 - DNA, 80 bp, synthetic construct
  source 1..80: mol_type = other DNA
tgcccaaccccaaatgcccacccccctccccaagccccacccagaccaccccaccctgtcccgcacccctagtctgacct

SEQ ID NO: 45138 - DNA, 80 bp, synthetic construct
  source 1..80: mol_type = other DNA
tttcttacattgcctacaataaatttcacacccacgatgtctcaacttatgagcactgtgagataccattggaaaagttg

SEQ ID NO: 45139 - DNA, 80 bp, synthetic construct
  source 1..80: mol_type = other DNA
aacccaccccccacatctgtcccacccaactaccccaagcccaaaagtccctcacccatctcaagttggcagcagcttac

SEQ ID NO: 45140 - DNA, 80 bp, synthetic construct
  source 1..80: mol_type = other DNA
tccagcttcctgtagacttctgcaatctttttcacgactgcagtagctcttgctccagaggttaagatcccaaactttgt

SEQ ID NO: 45141 - DNA, 80 bp, synthetic construct
  source 1..80: mol_type = other DNA
atggagccctcgaaactcttcacaatattggacaatgccacctttgcacctgggccggttatcaatgcggctgacaagaa

SEQ ID NO: 45142 - DNA, 80 bp, synthetic construct
  source 1..80: mol_type = other DNA
tttatattatggaactagcatcgaatatcgttggagaattccaaattctacctgtgctaaccagattgactatcacatga

SEQ ID NO: 45143 - DNA, 80 bp, synthetic construct
  source 1..80: mol_type = other DNA
ttcttttcctttctccttctttactaacaaccttctacctcaatatatactacctcattaagttgtttccttttgtcttt

SEQ ID NO: 45144 - DNA, 80 bp, synthetic construct
  source 1..80: mol_type = other DNA
aatagataaaaatatatagatttaatgaataatcatattaagtaattaggtaagttaactatctagttagttaaattaac

SEQ ID NO: 45145 - DNA, 80 bp, synthetic construct
  source 1..80: mol_type = other DNA
taacaacaacaagctacctcaaaatatactacctcattaagttgtttccttttgtctttttagggagcatactactacta

SEQ ID NO: 45146 - DNA, 80 bp, synthetic construct
  source 1..80: mol_type = other DNA
ctacgggagtagagccaggtgaccacctcaaagagagatcagcactaagctatgggaatacactggatctgaacagcctt

SEQ ID NO: 45147 - DNA, 80 bp, synthetic construct
  source 1..80: mol_type = other DNA
gggccccatgcaagtttatggctgagtctcccattgccgggagcttatccgggaatcctgtaaaccgtgattacatccga

SEQ ID NO: 45148 - DNA, 80 bp, synthetic construct
  source 1..80: mol_type = other DNA
gtgcactggcagggatggagcctaaagagtttcaagccctcaggcagcattcaaaagatgccggttgtacactggtggaa

SEQ ID NO: 45149 - DNA, 80 bp, synthetic construct
  source 1..80: mol_type = other DNA
tttgccggggcccctgatcggtgcccaccaacatgtttgtttgttgggggaatggctgagctaggtgccttcttcttcat

SEQ ID NO: 45150 - DNA, 80 bp, synthetic construct
  source 1..80: mol_type = other DNA
ttcttttcctttctccttctttactaacaacaacaaactacctcacacctcaatatatactacctcattaagttgtttcc

SEQ ID NO: 45151 - DNA, 80 bp, synthetic construct
  source 1..80: mol_type = other DNA
actacctcacaccttaatatatactactttattaagttgttaagttgtgtctttttggggagtaagggagtctactacta

SEQ ID NO: 45152 - DNA, 80 bp, synthetic construct
  source 1..80: mol_type = other DNA
actacctcacaaccttctacctcaatatatactacctcattaagttgtttccttttgtctttttagggagcatactacta

SEQ ID NO: 45153 - DNA, 80 bp, synthetic construct
  source 1..80: mol_type = other DNA
aagcttgggccccgtctcctcaaggaagagtgggacaaacttagggcctcatttgcatggttgagcacagacccatctga

SEQ ID NO: 45154 - DNA, 80 bp, synthetic construct
  source 1..80: mol_type = other DNA
tcttgcgccggtgttcccacgtgcggcctgaacctgagcgcataatgttatgaggagatgggagcactagtgattcgcgg

SEQ ID NO: 45155 - DNA, 80 bp, synthetic construct
  source 1..80: mol_type = other DNA
gagcgcataatgttatgaggagatgggagcactagtgattcgcggtatcaggaatttcaacctagagaaccgagcggaac

SEQ ID NO: 45156 - DNA, 80 bp, synthetic construct
  source 1..80: mol_type = other DNA
ttcttttcctttctccttctttactaacaacaacaaactacctcacaacctcctacctcaatatatactacctcattaag

SEQ ID NO: 45157 - DNA, 80 bp, synthetic construct
  source 1..80: mol_type = other DNA
acacaaagaaccccttgaattatcaaaacatgtccttgtctaaagcctctcagcccagcgtcaagagtgcctgcgttagg

SEQ ID NO: 45158 - DNA, 80 bp, synthetic construct
  source 1..80: mol_type = other DNA
ctgagccggatgcttccttggttgctgtgagcaagcccttggcctgcagccagctgatcctggtggcatttgggaagaag

SEQ ID NO: 45159 - DNA, 80 bp, synthetic construct
  source 1..80: mol_type = other DNA
agggaattgacagctgcatgcagagggtctctgaatttggcatacacctctgcctttgtcatcttcctttggtccacatt

SEQ ID NO: 45160 - DNA, 80 bp, synthetic construct
  source 1..80: mol_type = other DNA
gattgttcgagcaaatgtgtcttgccaaagggagtaggcatccatgaagtcctttatgacttcaattgagacatctgcct

SEQ ID NO: 45161 - DNA, 80 bp, synthetic construct
  source 1..80: mol_type = other DNA
gtgggatcaatgagccaaaggccatgcacatcatttccagtggataaccttggatcttgttgtgcatgattgctggccca

SEQ ID NO: 45162 - DNA, 80 bp, synthetic construct
  source 1..80: mol_type = other DNA
acagggaggtactccttgattgctgctgcagcagcacaggtccaggttggcaggcactgggcaactctcactggtgtcac

SEQ ID NO: 45163 - DNA, 80 bp, synthetic construct
  source 1..80: mol_type = other DNA
agccattctgtcaacagcattctccttcagctcatagactctagccaggtttgtcatcctctcagcgcctttcttagaca

SEQ ID NO: 45164 - DNA, 80 bp, synthetic construct
  source 1..80: mol_type = other DNA
tcttgccacatgctttcactatcttgttccctctagtgagagcaaatacaatgatgtacttcacatcattcctccagttc

SEQ ID NO: 45165 - DNA, 80 bp, synthetic construct
  source 1..80: mol_type = other DNA
tcttacatgctccatgatgaggaaaatgaaggccttcaccaatactgtctggctgtttggcaatcccaacaatcctctac

SEQ ID NO: 45166 - DNA, 80 bp, synthetic construct
  source 1..80: mol_type = other DNA
tcaccccccctctcacgaagcagcccaaagatcacagcaggatccaggccctcataagctatctcctttgcaaactcgac

SEQ ID NO: 45167 - DNA, 80 bp, synthetic construct
  source 1..80: mol_type = other DNA
caaagctggaacatccagtggctcgttgccaatctcaacagctattgcagaccagtcagtcatgcttgatgattcaaagg

SEQ ID NO: 45168 - DNA, 80 bp, synthetic construct
  source 1..80: mol_type = other DNA
atccagtggctcgttgccaatctcaacagctattgcagaccagtcagtcatgcttgatgattcaaaggggttctctgtgt

SEQ ID NO: 45169 - DNA, 80 bp, synthetic construct
  source 1..80: mol_type = other DNA
atgctctagagccagctgttgagcaacttcttgatgagtactctggggacttaggctcttatagccagcaggagaagagt

SEQ ID NO: 45170 - DNA, 80 bp, synthetic construct
  source 1..80: mol_type = other DNA
gcattgaggtggccgagtgggaaaccgtcagtccatttcttgcaggctgctcatttattcttctccctcaagaacacctg

SEQ ID NO: 45171 - DNA, 80 bp, synthetic construct
  source 1..80: mol_type = other DNA
ggcagtcgagacaggtcaggaaaattggagaggtttcttccacaggataacatctgggaaaaaatacaaattcgagggtg

SEQ ID NO: 45172 - DNA, 80 bp, synthetic construct
  source 1..80: mol_type = other DNA
acatggtcattgactcttgctacaaaattgatgagagacgtaggcgaatgggtctgcctgatactttcataacaggactg

SEQ ID NO: 45173 - DNA, 80 bp, synthetic construct
  source 1..80: mol_type = other DNA
aacccaataatggatgtggctctcctccaaattgagtcacttttgcgtgttaggggtctcacactcaactatcacctttt

SEQ ID NO: 45174 - DNA, 80 bp, synthetic construct
  source 1..80: mol_type = other DNA
cacatcatccttccttgacaagcctctccttgattccttatattttgccatctggagagacaaaaagaaagatgatgggt

SEQ ID NO: 45175 - DNA, 80 bp, synthetic construct
  source 1..80: mol_type = other DNA
catattcccaagatgagggggcccgccaggatgaccctctcaaccccttggatgagctcttgtacctgtctgacttgccc

SEQ ID NO: 45176 - DNA, 80 bp, synthetic construct
  source 1..80: mol_type = other DNA
cttcccatcgtggttcttgagcctaatctggccgagctcagcacctcatatgttggcctggtctcatgtaagtgctcagt

SEQ ID NO: 45177 - DNA, 80 bp, synthetic construct
  source 1..80: mol_type = other DNA
aaaccactagcacattatctaaataaatgccctctccataatataatcatgcatgatgaggaggtcagagaggcctatct

SEQ ID NO: 45178 - DNA, 80 bp, synthetic construct
  source 1..80: mol_type = other DNA
aaatcccatctggggaaaggactggccagcactttccagctccccttaggtggagctaatttagatcgaattcatttgat

SEQ ID NO: 45179 - DNA, 80 bp, synthetic construct
  source 1..80: mol_type = other DNA
ttgaccaattggaatttagcgccaaattcaaaatttatcagctgcttacatgtttctgtaagcagcagctgcagccttca

SEQ ID NO: 45180 - DNA, 80 bp, synthetic construct
  source 1..80: mol_type = other DNA
ctctgacatgatcactcctttgcgtctttccttttttgggggtctttgtgttttgcgtctttccttttttgggagttttc

SEQ ID NO: 45181 - DNA, 80 bp, synthetic construct
  source 1..80: mol_type = other DNA
atgttatcctgtggaagaaccccttgaattttcaaaacatgtccttgtctaaagcctctcagcccagcgtcaagagtgcc

SEQ ID NO: 45182 - DNA, 80 bp, synthetic construct
  source 1..80: mol_type = other DNA
acaaccttctacctcgatatatactacctcattaagttgtttccttttgtctttttggggagtcagggagtctactacta

SEQ ID NO: 45183 - DNA, 80 bp, synthetic construct
  source 1..80: mol_type = other DNA
ccttgaagatatgagcagccaataattgcacttataattgtaggtccaataagtactaacatgtaaatttattattcagg

SEQ ID NO: 45184 - DNA, 80 bp, synthetic construct
  source 1..80: mol_type = other DNA
gattgccttaattaattgtttactaatttaagtatttacgggttcatcaatatgttatcagggtttattaattgttagat

SEQ ID NO: 45185 - DNA, 80 bp, synthetic construct
  source 1..80: mol_type = other DNA
taatcagggtttaactggaaataagatacatattatagatttataagaatcactaatgacagttatgaatgtactagttt

SEQ ID NO: 45186 - DNA, 80 bp, synthetic construct
  source 1..80: mol_type = other DNA
aattagttgctgcttaatcattattaccagcattaagttgatagatttaaaccttagtatgcattatatttttagtatta

SEQ ID NO: 45187 - DNA, 80 bp, synthetic construct
  source 1..80: mol_type = other DNA
tatatacttgtatttcattattattgggcccaataatgtgaaactgagctatccttttccttttcaccactgtctctctc

SEQ ID NO: 45188 - DNA, 80 bp, synthetic construct
  source 1..80: mol_type = other DNA
tcacattctacctcagtgtacttatatatatgcaattagcatatatataagtacacaatttactacctcaacatactgat

SEQ ID NO: 45189 - DNA, 80 bp, synthetic construct
  source 1..80: mol_type = other DNA
tgccctgaagaattcttactaaataaaagccatgtcttacgaggagattgcgattcagtttgctagtgagtcaatcgatg

SEQ ID NO: 45190 - DNA, 80 bp, synthetic construct
  source 1..80: mol_type = other DNA
tacatatctccattttctgtttccaagtaagtgagaggaagtaacctccctctgaagtgataatatgttaaagagtggag

SEQ ID NO: 45191 - DNA, 80 bp, synthetic construct
  source 1..80: mol_type = other DNA
attgacaacagtcgtccgcttcgtcatatgtcatagctatcagcatccttatcatctgcacataagctatttcttttgac

SEQ ID NO: 45192 - DNA, 80 bp, synthetic construct
  source 1..80: mol_type = other DNA
aaattctcaccagtcaaaacatcataacttatttctctcaaagccaattccccaatcattttgctatgtgtgaacaaaat

SEQ ID NO: 45193 - DNA, 80 bp, synthetic construct
  source 1..80: mol_type = other DNA
ggagtcatctaaccctagccctccacctattctgactatttgggttgcaaagtcacatttgtcaacccatctgtgattgt

SEQ ID NO: 45194 - DNA, 80 bp, synthetic construct
  source 1..80: mol_type = other DNA
aggactctatgaatgagtgatagaaaaacttcaagctgggatatcctagaggccaactaagagccttctttatattaggc

SEQ ID NO: 45195 - DNA, 80 bp, synthetic construct
  source 1..80: mol_type = other DNA
tcacaccatctgaggcagtcttccatccgcaacttagatatcctttctatgcttgtatcaaagaaactaggggacttcat

SEQ ID NO: 45196 - DNA, 80 bp, synthetic construct
  source 1..80: mol_type = other DNA
agttaccatagaacccacatgaccccactgacgaggaatctcagaatccttaagaaaataagacaattttctcttttcaa

SEQ ID NO: 45197 - DNA, 80 bp, synthetic construct
  source 1..80: mol_type = other DNA
ctagagattgcctcaggttatgacaaggtatctccaagcctctataagatgagactgatgtgttgtaatttttattaaaa

SEQ ID NO: 45198 - DNA, 80 bp, synthetic construct
  source 1..80: mol_type = other DNA
agaggaggagagaactggaaagaggatgtcaaaaagatgatagtgctctctttaactagaggcaacaagccttccaagat

SEQ ID NO: 45199 - DNA, 80 bp, synthetic construct
  source 1..80: mol_type = other DNA
tggatgtaatttacagaaggtctatgtaagggtcctatggacatagagatgcatggcaactccagagcatatttattata

SEQ ID NO: 45200 - DNA, 80 bp, synthetic construct
  source 1..80: mol_type = other DNA
gtaagggtcctatggacatagagatgcatggcaactccagagcatatttattataactcagcattatgaaaacaatcagg

SEQ ID NO: 45201 - DNA, 80 bp, synthetic construct
  source 1..80: mol_type = other DNA
ggtgaacaagatgtcagatgaaggtaagaaggtggttaatgaattgataagtaagtacaagctgaaaactggcaatcctg

SEQ ID NO: 45202 - DNA, 80 bp, synthetic construct
  source 1..80: mol_type = other DNA
ggattatctgcctgtaaccggtagagctatggatgctctatctgataagtatccaagagctctgatgcatcctagctttg

SEQ ID NO: 45203 - DNA, 80 bp, synthetic construct
  source 1..80: mol_type = other DNA
ctggcttgattgaccctactcttccagatgatgcagtaaaagatattgtccatgctcattgtttgttcatgattcaattc

SEQ ID NO: 45204 - DNA, 80 bp, synthetic construct
  source 1..80: mol_type = other DNA
tccaagacaatcaacccatctctaaggtcttctacaaagacagagattgtcaatagctttgataggccaatgcaggctgc

SEQ ID NO: 45205 - DNA, 80 bp, synthetic construct
  source 1..80: mol_type = other DNA
cataaatagcccctttctgactgctgagaacagacgtgctatgttgaccactctaggggtgatcaattccaatcttaagc

SEQ ID NO: 45206 - DNA, 80 bp, synthetic construct
  source 1..80: mol_type = other DNA
catccgctgctgttgttgctgcagccaaagcctaccgtaaattgtaaaaggctgcccatcccctcccaatccatccccaa

SEQ ID NO: 45207 - DNA, 80 bp, synthetic construct
  source 1..80: mol_type = other DNA
tttgaaataaaataaaaaaagaaaaacaaaaaaataacaaaaaccaaaaaaatgataaaacaaaacaaaaataaaataaa

SEQ ID NO: 45208 - DNA, 80 bp, synthetic construct
  source 1..80: mol_type = other DNA
agagcaccatcgctgcttgggtctctgactttgcttatcaaggttttgatgcaaaacaagttataatcctgatcaaaaag

SEQ ID NO: 45209 - DNA, 80 bp, synthetic construct
  source 1..80: mol_type = other DNA
acaaccccatcacccatcaacctatcctaaaatcccattcctccaccctcaggcagctgatgaatttgatcatctctact

SEQ ID NO: 45210 - DNA, 80 bp, synthetic construct
  source 1..80: mol_type = other DNA
cccaaacgatgaatagccagtacatgttcgattatccgtcgatcaagatcgatgtgaggtgtcacagactcctgtccagt

SEQ ID NO: 45211 - DNA, 80 bp, synthetic construct
  source 1..80: mol_type = other DNA
cccttgctccagaagtaattattccaaacttggtcaggaaagccctcctctgtgtgttgtcaatgaaggagctgttgatt

SEQ ID NO: 45212 - DNA, 80 bp, synthetic construct
  source 1..80: mol_type = other DNA
ttggaggcccctcggaggttcacgttaatcgttttcgagaacatgtacaaaaacaatttgtgggcatccagaattgcatt

SEQ ID NO: 45213 - DNA, 80 bp, synthetic construct
  source 1..80: mol_type = other DNA
aaagtcttcctgatcaagagtggggtcaatcaggcctgcaaagcttgggtgcatcatctgtctggggtaggcttgcccgc

SEQ ID NO: 45214 - DNA, 80 bp, synthetic construct
  source 1..80: mol_type = other DNA
acatcctgtccattgcactcccagggactggcaggaagttctccacgacctcgacagcttggacagtccatcccgcaagg

SEQ ID NO: 45215 - DNA, 80 bp, synthetic construct
  source 1..80: mol_type = other DNA
gcagcagccaccctggatagagtgatgccatttctcccgggtctgccttccacgatcttgtacttcgctacgagactctt

SEQ ID NO: 45216 - DNA, 80 bp, synthetic construct
  source 1..80: mol_type = other DNA
gacatcgcgggctccctcgggagacatcctctcaaccatcttctttggcttgtttccacgagtcaaggagagaattatca

SEQ ID NO: 45217 - DNA, 80 bp, synthetic construct
  source 1..80: mol_type = other DNA
tcttcttagcatcttcctcccagcctttgcctcccagttgaaccaggttctggattattgtcctggcatcaaacccctga

SEQ ID NO: 45218 - DNA, 80 bp, synthetic construct
  source 1..80: mol_type = other DNA
caggattgggcacggtagaaggagttccctgtctgaattctactccctgggtgaattgccgtcagcatggggtccagctt

SEQ ID NO: 45219 - DNA, 80 bp, synthetic construct
  source 1..80: mol_type = other DNA
gctacatcagctctgtcaagcctatggtctacactttccaagggatggctagtgacttgtctcggtttgatatggctagt

SEQ ID NO: 45220 - DNA, 80 bp, synthetic construct
  source 1..80: mol_type = other DNA
ttctctaagagaggactgcctaacattcttaaggcactcagctggcctttggagtgccctgattgtgagatttttgagat

SEQ ID NO: 45221 - DNA, 80 bp, synthetic construct
  source 1..80: mol_type = other DNA
ctgcaattcagagtacaggcgtggcttgcaaacaagagatcagctcatgtcttacttgcttagagttggggattccccaa

SEQ ID NO: 45222 - DNA, 80 bp, synthetic construct
  source 1..80: mol_type = other DNA
atctggatgagtgtgttgtgcaggctcacaagaaggtcctactggaggctagaagactgggcctcagtgatgaacactat

SEQ ID NO: 45223 - DNA, 80 bp, synthetic construct
  source 1..80: mol_type = other DNA
aatggctatgatctttttaaagagattgggtctttagtatgtcttagactcatcaatgctgagccctatgacactgctac

SEQ ID NO: 45224 - DNA, 80 bp, synthetic construct
  source 1..80: mol_type = other DNA
atcaggagaacctcttgagataagaactattatcagatcctatcggatggatgacccttcactgagccttgatgcatatg

SEQ ID NO: 45225 - DNA, 80 bp, synthetic construct
  source 1..80: mol_type = other DNA
gaaactcccgatgggtgccaatagatagtcatattgatgagaatgatgacagttcttctgactcagacttctgattgccg

SEQ ID NO: 45226 - DNA, 80 bp, synthetic construct
  source 1..80: mol_type = other DNA
gtaacatacatggcctataacaaatttcactccacagatgtgatcacttatgagcactgtgagatcccactagagaggta

SEQ ID NO: 45227 - DNA, 80 bp, synthetic construct
  source 1..80: mol_type = other DNA
ctgccaaagaggcccccttatcattatccccccacccttctccccccaattaaccccttaaccccttaccattaacacca

SEQ ID NO: 45228 - DNA, 80 bp, synthetic construct
  source 1..80: mol_type = other DNA
accccacgcccccaattaaccccaattacccccttaccattacccccctcgcctcacccaccaatcactcatcaccacca

SEQ ID NO: 45229 - DNA, 80 bp, synthetic construct
  source 1..80: mol_type = other DNA
tcaccaagcctaccccaatgtggcagctactcactccagcttcctgtacacttctgcaatcttcttgaccactgcagtgg

SEQ ID NO: 45230 - DNA, 80 bp, synthetic construct
  source 1..80: mol_type = other DNA
cctttccttttcaccactatctctcttactttctacacaacatactacctcaacatgctgtttcttgattgcttttcaag

SEQ ID NO: 45231 - DNA, 80 bp, synthetic construct
  source 1..80: mol_type = other DNA
ccactatctctcttactttctacacaacatactacctcaacatgctgtttcttgattgcttttcaaggagtctactacta

SEQ ID NO: 45232 - DNA, 80 bp, synthetic construct
  source 1..80: mol_type = other DNA
aaaaactggaatgagtgacttaacagatatccaagaggatataacccgccatgaacaacaacttgttgttgcaagacaaa

SEQ ID NO: 45233 - DNA, 80 bp, synthetic construct
  source 1..80: mol_type = other DNA
agcccctaaaaatatgaataattatagattgcactgatagtataggtataataaatactaatatatagatgcatgttaat

SEQ ID NO: 45234 - DNA, 80 bp, synthetic construct
  source 1..80: mol_type = other DNA
cagggattattatagttaattgtttactaatctggatattcacgggttcaatattatcatatcagggtttactaatcatt

SEQ ID NO: 45235 - DNA, 80 bp, synthetic construct
  source 1..80: mol_type = other DNA
aggttgatcagggtttaactggaagtaagatattatataaatagtccaattatgctaaatatagttattagtggcagtta

SEQ ID NO: 45236 - DNA, 80 bp, synthetic construct
  source 1..80: mol_type = other DNA
tgaatgtattagtccattaagtgctattgataagtgttaccagcattagtcaaaatatattagttatcatcatgtattaa

SEQ ID NO: 45237 - DNA, 80 bp, synthetic construct
  source 1..80: mol_type = other DNA
gttgtaaaatcatagatttatgcttgtgaattatttaatgggcccaataatgtgaaactgagctatcctctttcttttcc

SEQ ID NO: 45238 - DNA, 80 bp, synthetic construct
  source 1..80: mol_type = other DNA
ttactctctacctcagtgtacttatgtatatgcaagtagcatatatataagtacacaattcactacctcaacatgccgat

SEQ ID NO: 45239 - DNA, 80 bp, synthetic construct
  source 1..80: mol_type = other DNA
aagtgcgcaatataatgagtcctgtcatgggggtcataggcttttccttttttgttaaagattgggcagatcggattaag

SEQ ID NO: 45240 - DNA, 80 bp, synthetic construct
  source 1..80: mol_type = other DNA
gagttcatggaaaaagaatgtcctttcattaaaccagaagtcaaaccagggacaccagtcaaagaagctgagttcttaaa

SEQ ID NO: 45241 - DNA, 80 bp, synthetic construct
  source 1..80: mol_type = other DNA
aaagaacagggtgtacttcatgcaacgccaagatgtgcttgataaaaatcatgtagctgacattgataagttaatcgatt

SEQ ID NO: 45242 - DNA, 80 bp, synthetic construct
  source 1..80: mol_type = other DNA
gataatatcgagtcacccaatgcaccttgggtattcgcctgtgcccctgatcgatgccctccaacatgtatctatgttgc

SEQ ID NO: 45243 - DNA, 80 bp, synthetic construct
  source 1..80: mol_type = other DNA
aagctattatgatgtttgtgactgaaaggatgatagagggctcctggggctgtgccatattaatcatctcaatctatctc

SEQ ID NO: 45244 - DNA, 80 bp, synthetic construct
  source 1..80: mol_type = other DNA
ttacgggtcatatattacgggtatggggtggtttcttacttattgcactagacatatataactgtgattattatttgcac

SEQ ID NO: 45245 - DNA, 80 bp, synthetic construct
  source 1..80: mol_type = other DNA
tagtactgatgaatgtaagggtggttttaatatatcttaatagtaatcataagtttgttatagtcaatcatttatgttag

SEQ ID NO: 45246 - DNA, 80 bp, synthetic construct
  source 1..80: mol_type = other DNA
ttatgtatatgaatcattgatatatacttgttagctacatagtataatgtttattatagttaagtaagaaattttaacct

SEQ ID NO: 45247 - DNA, 80 bp, synthetic construct
  source 1..80: mol_type = other DNA
ttagatgtaaattttgttctcctgcttagcttgccttgcatttactaacacaacattctacctcaaccccgaatcttcac

SEQ ID NO: 45248 - DNA, 80 bp, synthetic construct
  source 1..80: mol_type = other DNA
ttgatgcggcagaagcagagggggcaacagtctttcgagatatagcagtaccacattctgcatggatttttgcatgcgca

SEQ ID NO: 45249 - DNA, 80 bp, synthetic construct
  source 1..80: mol_type = other DNA
cagcaaggttaaggagatttctaatcaagatcccttaaaactgtgagctattatgatgtctgtgactgaaaggatgatag

SEQ ID NO: 45250 - DNA, 80 bp, synthetic construct
  source 1..80: mol_type = other DNA
agggctcctggggctgtgccatattaatcatctcaatctatctctgacgggtcatgtattacgggtatgtggtggtttct

SEQ ID NO: 45251 - DNA, 80 bp, synthetic construct
  source 1..80: mol_type = other DNA
tacttattgcactagatatatataactgtgattattatttgcactagtactgatgaatgtaagggtggtttcgatatatc

SEQ ID NO: 45252 - DNA, 80 bp, synthetic construct
  source 1..80: mol_type = other DNA
ttagtagtaatcataagtttgttatagtcaatcatttatgttagttatgtatatgaatcactgatatataattattagtt

SEQ ID NO: 45253 - DNA, 80 bp, synthetic construct
  source 1..80: mol_type = other DNA
acatagtataatgtttattatagttaagtaagaaattttaacctttagatgtaaatttcgttctcctgcttagcttgctt

SEQ ID NO: 45254 - DNA, 80 bp, synthetic construct
  source 1..80: mol_type = other DNA
tgcatctactaacacaacattctacctcaaccccaaaccttcaccctttaaaactacctcatttattctacctcaatagt

SEQ ID NO: 45255 - DNA, 80 bp, synthetic construct
  source 1..80: mol_type = other DNA
agcagtttctgctcttgagacaaaattaggggagctgaaaagacaactggctgatctggtagcatctcaaaaattagcct

SEQ ID NO: 45256 - DNA, 80 bp, synthetic construct
  source 1..80: mol_type = other DNA
gaatcaggcagatgcattcatggggacaaacagagcttattttattaacaggcaaaaccaagttgaggagtcgaagatcc

SEQ ID NO: 45257 - DNA, 80 bp, synthetic construct
  source 1..80: mol_type = other DNA
ctgacattgttgacttaatcgatgcggcagaagcagagggggcaacattgtctcgagacatagcagtaccacattctgca

SEQ ID NO: 45258 - DNA, 80 bp, synthetic construct
  source 1..80: mol_type = other DNA
agagctactacgagaaaaactggaatgagtgatctgacagatatccaagaggatataacccgccatgaacaacagcttgt

SEQ ID NO: 45259 - DNA, 80 bp, synthetic construct
  source 1..80: mol_type = other DNA
gggctagtgcggcaactgccactttgacaaccaagataaggatatttgtaccggctactaatagtccagagctcagatgg

SEQ ID NO: 45260 - DNA, 80 bp, synthetic construct
  source 1..80: mol_type = other DNA
agttaagataccagagcaatgtacataaaagtgaatctcataatttaatagattgatctgatgcaataatagcaaccgtg

SEQ ID NO: 45261 - DNA, 80 bp, synthetic construct
  source 1..80: mol_type = other DNA
tgatagcatcaggtgtcggtaaatatttcaaggagaacgggatggttaaggatgagcacgaacttttgaagacactcttc

SEQ ID NO: 45262 - DNA, 80 bp, synthetic construct
  source 1..80: mol_type = other DNA
ttcgaagaaaatccattatgatggtgctgtgttgtcccaggcactcaaatcaatgtcaagatgctgcttttggtcagaga

SEQ ID NO: 45263 - DNA, 80 bp, synthetic construct
  source 1..80: mol_type = other DNA
aaaatctggtggaagataatcggatacatatccattatctgatttaaccttccaagtccaagaccgactgataatttatg

SEQ ID NO: 45264 - DNA, 80 bp, synthetic construct
  source 1..80: mol_type = other DNA
acttgagggccaatcaactcgagacagcctccaaattaagggcaacaagccagcagatgcaccaggagcaggacagaaag

SEQ ID NO: 45265 - DNA, 80 bp, synthetic construct
  source 1..80: mol_type = other DNA
attcagcagtgaaggaaaaatcaccccagaagaggctgcctatgttagcagaagagtttgaatgctctggatctgaagac

SEQ ID NO: 45266 - DNA, 80 bp, synthetic construct
  source 1..80: mol_type = other DNA
cccatctggtctcaatacatcacgcaggactatttacaaaaaaaagcaaaagaatagaataatcatatagtagtaattga

SEQ ID NO: 45267 - DNA, 80 bp, synthetic construct
  source 1..80: mol_type = other DNA
aaacattattagaatagtgtagctaaaatgtagtttttatgagtattcggttgaaaattagacaattattatgaaaaact

SEQ ID NO: 45268 - DNA, 80 bp, synthetic construct
  source 1..80: mol_type = other DNA
agttggtagacgcatcaatcatattccgtaaaactcgacaatggcagttatacttaacaagagatattattttaatctct

SEQ ID NO: 45269 - DNA, 80 bp, synthetic construct
  source 1..80: mol_type = other DNA
cgaaagctggaatgagcaccctccaagaattacaagaaaacatcacagcacacgaacaacagctcgtgactgctcggcaa

SEQ ID NO: 45270 - DNA, 80 bp, synthetic construct
  source 1..80: mol_type = other DNA
aggggtcagttactaactacgggtaagggttcattactattttttgcactagggttagagggccactacatcgtatttgc

SEQ ID NO: 45271 - DNA, 80 bp, synthetic construct
  source 1..80: mol_type = other DNA
atctactaacaattatattatgtcattggatgtaaatttcgttcttggcttgcttctgctttcgcattgctaacctacaa

SEQ ID NO: 45272 - DNA, 80 bp, synthetic construct
  source 1..80: mol_type = other DNA
tgctttcgcattgctaacctacaacataactacctcatccacaaaccctcccctattctacctcaacacatactacctca

SEQ ID NO: 45273 - DNA, 80 bp, synthetic construct
  source 1..80: mol_type = other DNA
aagatcaacatctttatggcgtttttagattaatactttcaatgagataaatatgggtggcggagtaagtgttgagctcc

SEQ ID NO: 45274 - DNA, 80 bp, synthetic construct
  source 1..80: mol_type = other DNA
tcttcttctcctcagctaggcggaacctgctctgctgggcccaacggctgcagaagaactttctcccgcccgaaccgtag

SEQ ID NO: 45275 - DNA, 80 bp, synthetic construct
  source 1..80: mol_type = other DNA
agccgcgacccgcagtctcgcccgctcagcggcctgaggcgcgtcgctttctcgtgtcccctcgtcgggcctaatcgccg

SEQ ID NO: 45276 - DNA, 80 bp, synthetic construct
  source 1..80: mol_type = other DNA
ctactacgaaaaaaactggaatgagtgacttgacagacattcaggaggatataactcgccatgaacaacaacttgttgtt

SEQ ID NO: 45277 - DNA, 80 bp, synthetic construct
  source 1..80: mol_type = other DNA
aagatatgagatagttttaattgcactgataatgtaggcatattaagtactaacatacagatatatattattcagggact

SEQ ID NO: 45278 - DNA, 80 bp, synthetic construct
  source 1..80: mol_type = other DNA
tataatcaattgtttactaatttggggattacgggttcagttattatcatatcagggtttactaatcattaggttaatca

SEQ ID NO: 45279 - DNA, 80 bp, synthetic construct
  source 1..80: mol_type = other DNA
gggtttaactggaattaaggcattatatattttaatatattagttgtgaaaagttactaatgacagttatgaatgtatta

SEQ ID NO: 45280 - DNA, 80 bp, synthetic construct
  source 1..80: mol_type = other DNA
tataattgattgctgctttatcgttgtatccagcattaaataaatatagtttagactttattatagaatgatcctttaga

SEQ ID NO: 45281 - DNA, 80 bp, synthetic construct
  source 1..80: mol_type = other DNA
tttatagagttatattttatcatatatttaatgggcccagaaatgtgaaactgagctatccttttcttgtttcaccactg

SEQ ID NO: 45282 - DNA, 80 bp, synthetic construct
  source 1..80: mol_type = other DNA
cctcagtgtacttatatatatgcaagtagcatatatataagtacacaacttcctacctcaacatgctgatttcttgattg

SEQ ID NO: 45283 - DNA, 80 bp, synthetic construct
  source 1..80: mol_type = other DNA
aaaataaggggactcgtattcgatttaaggatgatacttcatttgaggatatcaatggcattagaagaccaaagcacttg

SEQ ID NO: 45284 - DNA, 80 bp, synthetic construct
  source 1..80: mol_type = other DNA
aagtacgtaacataatgagtcctgtaatgggggttattggattttcattctttgtaaaggattgggcagaacgaatcagg

SEQ ID NO: 45285 - DNA, 80 bp, synthetic construct
  source 1..80: mol_type = other DNA
caaggggtaccaagaaaatgaagaaggcactcctgagcaccccaatgaagtgggggaagaagctttatgagctctttgct

SEQ ID NO: 45286 - DNA, 80 bp, synthetic construct
  source 1..80: mol_type = other DNA
aggatctacatgcaccctgccgtgttgaccgccggcagaatcagtgagatgggtgtctgctttggaacaatccctgtggc

SEQ ID NO: 45287 - DNA, 80 bp, synthetic construct
  source 1..80: mol_type = other DNA
gtgatatttttgaagaggcggctagttttaggagttatcaatctaagttaggaagagatgggagggctagtgcggcaact

SEQ ID NO: 45288 - DNA, 80 bp, synthetic construct
  source 1..80: mol_type = other DNA
gggctgtgcggcaacgatatctttcaaagaaacacgtgccgcttacgcccacagtgttctcttgagtgttggcaaaatgg

SEQ ID NO: 45289 - DNA, 80 bp, synthetic construct
  source 1..80: mol_type = other DNA
gttggcaaaatggaaaacaaaatcgaggtgaacaataaagatgagatgaacaggtggtttgaggagttcaagaaaggaaa

SEQ ID NO: 45290 - DNA, 80 bp, synthetic construct
  source 1..80: mol_type = other DNA
cgtgcaaaggcatgtgatgtgaacaaaattgtcataattacataagtcttcagctgaatatttttttaggggtaataata

SEQ ID NO: 45291 - DNA, 80 bp, synthetic construct
  source 1..80: mol_type = other DNA
caataaaaatttattttccattacatcccaaggcatgactagcaaacttgataacatcatgaaaaagtcattcaaagcat

SEQ ID NO: 45292 - DNA, 80 bp, synthetic construct
  source 1..80: mol_type = other DNA
tactcaaaatcttgagctattagtgcaattcctaccaccataggtttatcaagattttattatataagttggtgcaggtt

SEQ ID NO: 45293 - DNA, 80 bp, synthetic construct
  source 1..80: mol_type = other DNA
gacttctaattttcagaaatcgattgtatgtaattaattagataatcttggatacttgagataggaatgttgctacttta

SEQ ID NO: 45294 - DNA, 80 bp, synthetic construct
  source 1..80: mol_type = other DNA
tcaagtgatactcttttatgggcaaaacgaacaaccaatgtctacatgtaaattaagctttggtattgcaatctaatatt

SEQ ID NO: 45295 - DNA, 80 bp, synthetic construct
  source 1..80: mol_type = other DNA
agtcaaaatctggtggaagataatcggatacatatccattatctgatttgacattccaagtccagaaccgaccgacaatt

SEQ ID NO: 45296 - DNA, 80 bp, synthetic construct
  source 1..80: mol_type = other DNA
aattgcaatcttaacctagatgaaacataatcatgcaaagtcattatttaacactactaactcattaagaaaaacttagg

SEQ ID NO: 45297 - DNA, 80 bp, synthetic construct
  source 1..80: mol_type = other DNA
taaagcagttggtagacgcatcaatcatattctgtaaaactcgacaatggcagttatacttaacaagagatataattcta

SEQ ID NO: 45298 - DNA, 80 bp, synthetic construct
  source 1..80: mol_type = other DNA
atttcttattactgattttgatgatctcggagtgcagtgtcgggattttgcattatgagaaattgagtaagattgggctt

SEQ ID NO: 45299 - DNA, 80 bp, synthetic construct
  source 1..80: mol_type = other DNA
gcgccaaggttagtttccagattgtctcaccatgattacaatcaatttttaatattaaataaacttctatcaaacagaaa

SEQ ID NO: 45300 - DNA, 80 bp, synthetic construct
  source 1..80: mol_type = other DNA
tgaattgcctatcccagagtatactgaagtggataacaatcatcttatatatgatccagatcctgtttcagaaatagatt

SEQ ID NO: 45301 - DNA, 80 bp, synthetic construct
  source 1..80: mol_type = other DNA
tttttggacatgaattacacactacactttaataaagataaaatctacattacatatttaaggactatatcctatccttt

SEQ ID NO: 45302 - DNA, 80 bp, synthetic construct
  source 1..80: mol_type = other DNA
ggaggacgcaagcaatggagccagacatcaagagcatttcaagtgagtctatggaaggagtatctgattttagccctagt

SEQ ID NO: 45303 - DNA, 80 bp, synthetic construct
  source 1..80: mol_type = other DNA
atagtgatgaatataatgatcatccagaactacacaagatcaacagataatcaggccatgatcaaagatgcattgcagag

SEQ ID NO: 45304 - DNA, 80 bp, synthetic construct
  source 1..80: mol_type = other DNA
gcagttaagatagcagagcaatgtacataaaacttaatctaaaaatttaatgcattgataagatgcaataatagcaaccg

SEQ ID NO: 45305 - DNA, 80 bp, synthetic construct
  source 1..80: mol_type = other DNA
gtttcttcaattataggattactgataatgtaattcagaaaccggatcgataaaaaatcttgataattgatctttgaaaa

SEQ ID NO: 45306 - DNA, 80 bp, synthetic construct
  source 1..80: mol_type = other DNA
taatgataacatgtcgttcatcaattgataaacaactatttatatttacacctaggagcaagtcttgggatttagtatat

SEQ ID NO: 45307 - DNA, 80 bp, synthetic construct
  source 1..80: mol_type = other DNA
gctataactccagtctccacttcaaacaatttatctcatagattgagagacaaatccacacaatttaagttcgcagggag

SEQ ID NO: 45308 - DNA, 80 bp, synthetic construct
  source 1..80: mol_type = other DNA
agtcaggtcgcgggaatacaaacaaagacaaaaacaaaaaattgattctgtcagaagatacataccaaaaagtgaacaaa

SEQ ID NO: 45309 - DNA, 80 bp, synthetic construct
  source 1..80: mol_type = other DNA
gagaggtacaatcaacaccaatttgccttccggattattgacaaagggatgaatgaaacaggtatgccatatggaccctc

SEQ ID NO: 45310 - DNA, 80 bp, synthetic construct
  source 1..80: mol_type = other DNA
aagataatgaagtactttacagagcacaactagcctccgaggacaccaatgcacaaaaaacaataactaattgcttcctt

SEQ ID NO: 45311 - DNA, 80 bp, synthetic construct
  source 1..80: mol_type = other DNA
caatttttaatactaaataaacttctatcaaacagaaaacagaatgatttgatatcatcaaatacttgctcagttgactt

SEQ ID NO: 45312 - DNA, 80 bp, synthetic construct
  source 1..80: mol_type = other DNA
ctcaaatccactcaaaatgatcttgactttgtcagagctgatgtgtgacgcctattttcaatattctacaatatccaaaa

SEQ ID NO: 45313 - DNA, 80 bp, synthetic construct
  source 1..80: mol_type = other DNA
tagtctcaaatcattattaccacctgacaacactaatcattaggtagataattataggtaagtaactaatcaatactaac

SEQ ID NO: 45314 - DNA, 80 bp, synthetic construct
  source 1..80: mol_type = other DNA
accaggatttatcagggtatgttaggtaagcacaattatcccacagtaagttaggttaaataagttaactaattaagtta

SEQ ID NO: 45315 - DNA, 80 bp, synthetic construct
  source 1..80: mol_type = other DNA
tactaacaacaacacactacctcaaaatttaaaaacaacacactacctctttattactacctcatgattttgttgccttt

SEQ ID NO: 45316 - DNA, 80 bp, synthetic construct
  source 1..80: mol_type = other DNA
aattgggcaggacagggatccaacaggggttgagccaggagaccaccttaaggaaaggtccatgttgagttacggcaatg

SEQ ID NO: 45317 - DNA, 80 bp, synthetic construct
  source 1..80: mol_type = other DNA
ccagtccacctacaaatgctgactatatcgcccaacgacaaggtctattagcaagcatggagacaaaagagtcaaagggt

SEQ ID NO: 45318 - DNA, 80 bp, synthetic construct
  source 1..80: mol_type = other DNA
gctagggatgccgggtgtagtctagtagaccatcttgattcaccttcatcaatctgggtttttgctggtgcacctgatcg

SEQ ID NO: 45319 - DNA, 80 bp, synthetic construct
  source 1..80: mol_type = other DNA
attggatcctcaagaactatatcatcatgagtgatatttttgaagaggcagctagttttaggagttatcaatctaagtta

SEQ ID NO: 45320 - DNA, 80 bp, synthetic construct
  source 1..80: mol_type = other DNA
ggattcaactggatcaacgtatcattgttatgttcatggttgcttgggggaaagaggcagttgacaatttccatcttggg

SEQ ID NO: 45321 - DNA, 80 bp, synthetic construct
  source 1..80: mol_type = other DNA
ttattattactacttgacaacactaatcattaggtagataattataagtaaataactaattgatactaacttgggttcag

SEQ ID NO: 45322 - DNA, 80 bp, synthetic construct
  source 1..80: mol_type = other DNA
ttggcaagagactggaccaacagaattcaggattggctgggtgctccatgtaagcttctcccagacctatcaacacagag

SEQ ID NO: 45323 - DNA, 80 bp, synthetic construct
  source 1..80: mol_type = other DNA
agtccacccacaaatgctgattacatagcccaacgacagggcctgttagcaagcatggagacaaaagagtcaaagggcat

SEQ ID NO: 45324 - DNA, 80 bp, synthetic construct
  source 1..80: mol_type = other DNA
accagacaaaggaagtctagtctccggattaaatcatattcgtatgattaatcttaggatcccggtatctagaatctgga

SEQ ID NO: 45325 - DNA, 80 bp, synthetic construct
  source 1..80: mol_type = other DNA
cacaagaagtactacaacgagctgttttcttttcctagatgaaccttggtgtatatcagtattagaaacaaacagattta

SEQ ID NO: 45326 - DNA, 80 bp, synthetic construct
  source 1..80: mol_type = other DNA
acggcaaatctattaggcccgagatttattcatacaaaattcctaagtattgttaatttgatgagcttattcctcatact

SEQ ID NO: 45327 - DNA, 80 bp, synthetic construct
  source 1..80: mol_type = other DNA
tcaatcaaatttaatataactaatatcaaattgttgcactcagctattattaaaactggatcatcagacaataaagatgt

SEQ ID NO: 45328 - DNA, 80 bp, synthetic construct
  source 1..80: mol_type = other DNA
atacaaagatatatcgaagagggtattaaagaaaacttaggatcccagatccttcaataaggcagagccttgattgtatc

SEQ ID NO: 45329 - DNA, 80 bp, synthetic construct
  source 1..80: mol_type = other DNA
agcgtcatttacaattgaatctcaattaacaacactgattaataacttaagcagaatactcctattacagtgtttaatta

SEQ ID NO: 45330 - DNA, 80 bp, synthetic construct
  source 1..80: mol_type = other DNA
ctgtacagaagcataggaccaaaggccccctttatggtgttgttggaagattcaattcagaccaaatttgctccaggaag

SEQ ID NO: 45331 - DNA, 80 bp, synthetic construct
  source 1..80: mol_type = other DNA
acttaattttaattgaggattttataatcctataattggagcagatctaaactctcaccgattcagttctaatcctttat

SEQ ID NO: 45332 - DNA, 80 bp, synthetic construct
  source 1..80: mol_type = other DNA
taactaaagaacaaattctaaataattggatgacgtcacaggagacaagctggaaacaatttagttagaaggaagaaacc

SEQ ID NO: 45333 - DNA, 80 bp, synthetic construct
  source 1..80: mol_type = other DNA
ttttaccagatatggaaagtgactttgatatatctgttagcgacgtactgtacccagaatgtcatttggacagtcctata

SEQ ID NO: 45334 - DNA, 80 bp, synthetic construct
  source 1..80: mol_type = other DNA
gtcggcggtaagctcattacttctcttgagtatgcgaatttgactcataaccaacctcatgaagatcagacattgctgac

SEQ ID NO: 45335 - DNA, 80 bp, synthetic construct
  source 1..80: mol_type = other DNA
taatataaatgtcaataaaaagaagaagataaaaagtcctctaatatcccaacaatctttatttggaaatgaggttaata

SEQ ID NO: 45336 - DNA, 80 bp, synthetic construct
  source 1..80: mol_type = other DNA
aggagattttcgatcttaaaaattattaccatgtcccctatccagaatgtaacagagatttattcttaatctctgatgac

SEQ ID NO: 45337 - DNA, 80 bp, synthetic construct
  source 1..80: mol_type = other DNA
aaaatagcattcaaactcagtaaaatcatggataattctaataaactgtttgatggtttagagaggaagctgagtcgctt

SEQ ID NO: 45338 - DNA, 80 bp, synthetic construct
  source 1..80: mol_type = other DNA
aatttcgaatgtagataatcaattattaaatgcaacctctcttcataataattctgagatggatcggaagggaaaagaac

SEQ ID NO: 45339 - DNA, 80 bp, synthetic construct
  source 1..80: mol_type = other DNA
atccttgcttcccagaaaagagcacaattgatgatgtaagacagcagagacagacacgagattttccaaagaattcaact

SEQ ID NO: 45340 - DNA, 80 bp, synthetic construct
  source 1..80: mol_type = other DNA
agagagggaagatctccaaaacaccctgatgccggtcctacacctgaaaacagtgccaaaaacgatttgcatagagacaa

SEQ ID NO: 45341 - DNA, 80 bp, synthetic construct
  source 1..80: mol_type = other DNA
ctatccacttctttggagttttgcgatgggtgtaggcacaactattgacagagctatgggtgccttgaacattaacagaa

SEQ ID NO: 45342 - DNA, 80 bp, synthetic construct
  source 1..80: mol_type = other DNA
cacagacaatatgccaacaggccatagttcgacatctatgaaaaaacctaaaatatctggagaagaatatcttagtatgt

SEQ ID NO: 45343 - DNA, 80 bp, synthetic construct
  source 1..80: mol_type = other DNA
ggctagactcagaggatttgggttctaaacgaatttctgcacaattagggaaggatgtatcatgtaaaggccatctgcac

SEQ ID NO: 45344 - DNA, 80 bp, synthetic construct
  source 1..80: mol_type = other DNA
acgacagaagacaaaccgataatagttcctgacactcgatatatccaaaatcatgaatctaataacgatattttccccaa

SEQ ID NO: 45345 - DNA, 80 bp, synthetic construct
  source 1..80: mol_type = other DNA
aaaagagaaaaaattctgcaaacttccaccgtcatcggataatttaaccaaaatcatggtgaattcaaaatggtacaatc

SEQ ID NO: 45346 - DNA, 80 bp, synthetic construct
  source 1..80: mol_type = other DNA
ctttccttttttggtttactgtcaagactgaacttagagcctgccagaaggagaactacaaaaggaaaaacagaaaattg

SEQ ID NO: 45347 - DNA, 80 bp, synthetic construct
  source 1..80: mol_type = other DNA
ggaattatcacatcgattaaaggttcatgctataagttgatactcaaccagaatctagtagcaatattcgaggaagacag

SEQ ID NO: 45348 - DNA, 80 bp, synthetic construct
  source 1..80: mol_type = other DNA
cagtggatactcagatcataaaaaaagaaaaaaacgatgctactatctaactcccgaaatggtccttatgttctccgatg

SEQ ID NO: 45349 - DNA, 80 bp, synthetic construct
  source 1..80: mol_type = other DNA
taactgaaggaagattgatgattgatgttgcaatgagatttgacaaaaagtacaaaactctagagaaaaaggctttgaaa

SEQ ID NO: 45350 - DNA, 80 bp, synthetic construct
  source 1..80: mol_type = other DNA
ttatggtttcttatagacgagttatttccttctatgggaaatagagtgtataatattatatccatgcttgagcctttgac

SEQ ID NO: 45351 - DNA, 80 bp, synthetic construct
  source 1..80: mol_type = other DNA
tctcgcgatattacaggttaaggatgagtcaaggttgttgagaggtgcattcatgcatcattgtttaggtgacctcttcg

SEQ ID NO: 45352 - DNA, 80 bp, synthetic construct
  source 1..80: mol_type = other DNA
gttatcttgaacctgtctattttaggctagggcaacaatcagctaaacatcaagcaggaaatgttgacaaagaaatggca

SEQ ID NO: 45353 - DNA, 80 bp, synthetic construct
  source 1..80: mol_type = other DNA
aagaacttcgagagtccaagaactacccggaagatgagatcaagagatttgccaacgacctaataaatgtcatgacctgt

SEQ ID NO: 45354 - DNA, 80 bp, synthetic construct
  source 1..80: mol_type = other DNA
cgggacattcatttagtagcagaattcttctcattctttaggactttcggacatccaatattgaacgctcaaactgcagc

SEQ ID NO: 45355 - DNA, 80 bp, synthetic construct
  source 1..80: mol_type = other DNA
caggaaagttagagagtacatgttagcagataaaatccttgagtacgaacctatcatgaaaggtcatgcgattttctgtg

SEQ ID NO: 45356 - DNA, 80 bp, synthetic construct
  source 1..80: mol_type = other DNA
ctataatcataaatggatttagagatagacatggaggagtttggcctcctcttgatcttccaaaacattgttcaaagaac

SEQ ID NO: 45357 - DNA, 80 bp, synthetic construct
  source 1..80: mol_type = other DNA
ataatatctctcaaaaatacaggtgagggggtaacttatgaagtagcaataaacaattggagatcatttgtcgggttaaa

SEQ ID NO: 45358 - DNA, 80 bp, synthetic construct
  source 1..80: mol_type = other DNA
gttcaaatgttttatgggtctcaatttagacaatgatctcagcatgtacatgaaagataaagcattatcacctttaaggg

SEQ ID NO: 45359 - DNA, 80 bp, synthetic construct
  source 1..80: mol_type = other DNA
atctttgggattcaatctattcacgtgaagtaatgtcctaccaaccacctagaaacaaaaaatcaagaagattggttgag

SEQ ID NO: 45360 - DNA, 80 bp, synthetic construct
  source 1..80: mol_type = other DNA
gttttcgttgatgatcaggactttgatcccgttgatatgataaattatgttctgaccggagaatatctcagagatgatga

SEQ ID NO: 45361 - DNA, 80 bp, synthetic construct
  source 1..80: mol_type = other DNA
tttcaatgcttcttatagtttaaaagagaaagagaccaaacaagttggcaggttgtttgctaagatgacttataaaatga

SEQ ID NO: 45362 - DNA, 80 bp, synthetic construct
  source 1..80: mol_type = other DNA
gggcctgtcaagttattgctgagaatttaattgcacatgggattgggagatatttccatgaaaacgggatggttaaggat

SEQ ID NO: 45363 - DNA, 80 bp, synthetic construct
  source 1..80: mol_type = other DNA
gaaaagttaggattgacagaagaccagatcatgcacctatcagctaatgtgaaggatgcaagtcaaggtagagatgacaa

SEQ ID NO: 45364 - DNA, 80 bp, synthetic construct
  source 1..80: mol_type = other DNA
gagcatgagctcagcaaatcattgtttcaattgtctatatcaggaataccaagagggaacaaaaacaacaaatcgacgaa

SEQ ID NO: 45365 - DNA, 80 bp, synthetic construct
  source 1..80: mol_type = other DNA
cgacacaatccacgaaagcaagatcgagaataaccattcctttaaaaacatccagaatcgatcatttcgaaagacggata

SEQ ID NO: 45366 - DNA, 80 bp, synthetic construct
  source 1..80: mol_type = other DNA
acccatacaatagatttaacattgataacccaactttcttatccccaaactgtaaccccaagtataaccgtaagaattca

SEQ ID NO: 45367 - DNA, 80 bp, synthetic construct
  source 1..80: mol_type = other DNA
gagacaataggtatattctctcgtgcagaaaccaaaagcatgattagagaacagaaaagtcacagagaagtcaaaataaa

SEQ ID NO: 45368 - DNA, 80 bp, synthetic construct
  source 1..80: mol_type = other DNA
taagctagatatcggcagtgataatgaagagcaaggaaaagagatagatgccgccaagtacaaaatcacggacaacccaa

SEQ ID NO: 45369 - DNA, 80 bp, synthetic construct
  source 1..80: mol_type = other DNA
atccacacataaatcctcaagatcaacccggaatctgtcaagaagacaaaggcaaagaaggagcaaagtcagatctcaca

SEQ ID NO: 45370 - DNA, 80 bp, synthetic construct
  source 1..80: mol_type = other DNA
gaaggcatgagttttctggagatgcacacactctttaacccgagtaagagcgatatcagaacaaatctcgaattggaaaa

SEQ ID NO: 45371 - DNA, 80 bp, synthetic construct
  source 1..80: mol_type = other DNA
gagttcactttcaaaccctggatttatatcacaaaaagagaaaagaggcaaaacttataatgaatcccattcactgggaa

SEQ ID NO: 45372 - DNA, 80 bp, synthetic construct
  source 1..80: mol_type = other DNA
agttctctaaagaggatgaagaaagatacgatgtcatcagtgcattcctgacaacagatttacgaaaattctgcttaaat

SEQ ID NO: 45373 - DNA, 80 bp, synthetic construct
  source 1..80: mol_type = other DNA
tggagacatgaatcaatcggcatttttgcaagaaggatggacgaaatctatggtttgcctggtttctttaattggatgca

SEQ ID NO: 45374 - DNA, 80 bp, synthetic construct
  source 1..80: mol_type = other DNA
tcaaatcaacatccgagaagggaagttcacaaatgttgttgatgacatccaggatcatgcccagagttcctctgaggatt

SEQ ID NO: 45375 - DNA, 80 bp, synthetic construct
  source 1..80: mol_type = other DNA
cagaagactagagcgatctgtgttatatgttgcggaccctcattgcccgccgtctatcaatgaacatatcgatctaaacg

SEQ ID NO: 45376 - DNA, 80 bp, synthetic construct
  source 1..80: mol_type = other DNA
attcacccgaaagagacatatttatacatcatccgaaagggggtatagaaggatacagccaaaaactgtggacaatagcg

SEQ ID NO: 45377 - DNA, 80 bp, synthetic construct
  source 1..80: mol_type = other DNA
actatcccttttctattcctcagtgctcatgagacaaacacccggatagcggcagttgtacaaggtgacaatcaatcaat

SEQ ID NO: 45378 - DNA, 80 bp, synthetic construct
  source 1..80: mol_type = other DNA
ttacacataaggtccaccctcatttgccttacaaaatgaagaaagaactctctgcaatgcaggcaaaaaaatatttttca

SEQ ID NO: 45379 - DNA, 80 bp, synthetic construct
  source 1..80: mol_type = other DNA
aggttacggcacaacatgaaggcattagggcatgaattgaaggcgaccgagactatcattagtactcatttcttcattta

SEQ ID NO: 45380 - DNA, 80 bp, synthetic construct
  source 1..80: mol_type = other DNA
ttccaagaaaatccactatgacggggctgttttatcacaatctctgaaatcaatggcaaggtgtgtattttggtcagaaa

SEQ ID NO: 45381 - DNA, 80 bp, synthetic construct
  source 1..80: mol_type = other DNA
cccttgttgatgaaactagagcagcatgcagtaatatcagcacaacaattgcaaaggctattgagaatggttatagcagg

SEQ ID NO: 45382 - DNA, 80 bp, synthetic construct
  source 1..80: mol_type = other DNA
agatctggctatctgataaatgttcttaaaaccatccaacaaattaatatatcattgagttttaatataaatgaatgcat

SEQ ID NO: 45383 - DNA, 80 bp, synthetic construct
  source 1..80: mol_type = other DNA
gacagatgacataatcagaccgtttagagataatccaaactggatcaaacatgccgcattaatccccgccagcttgggag

SEQ ID NO: 45384 - DNA, 80 bp, synthetic construct
  source 1..80: mol_type = other DNA
gactcaactatatgaacatgtctcgattgtatgtgaggaatataggggatccagtcacagcatcgatagcagatgttaag

SEQ ID NO: 45385 - DNA, 80 bp, synthetic construct
  source 1..80: mol_type = other DNA
acaatcctagtaaaaagagtttctcaagattgacgagcatcacatccaccgtagatagtgctgacagtaggtctgcaatg

SEQ ID NO: 45386 - DNA, 80 bp, synthetic construct
  source 1..80: mol_type = other DNA
agaatgattctcggtggtgtactacccattggaatactccacaatatcatgttgcaagaacccggtgatgccacttattt

SEQ ID NO: 45387 - DNA, 80 bp, synthetic construct
  source 1..80: mol_type = other DNA
ggactggtgtagtgatccatactccatcaacctaaagcagactcaaagtatcacaaaagttataaagaccataacggcaa

SEQ ID NO: 45388 - DNA, 80 bp, synthetic construct
  source 1..80: mol_type = other DNA
gagtgatactaaggaattcggtcaatccactgctcaaaggtctatttcatgaaggtgcttatgaggaggacactgaatta

SEQ ID NO: 45389 - DNA, 80 bp, synthetic construct
  source 1..80: mol_type = other DNA
gcaacattcattttggacaggagagtcatcttaccacgagtcggtcacgagatcttaaacaactccatcacaggagcaag

SEQ ID NO: 45390 - DNA, 80 bp, synthetic construct
  source 1..80: mol_type = other DNA
agaagagatctcgggcttactggataccacaaaaggattgataagaattggcatagcaaagggaggattaactcagagaa

SEQ ID NO: 45391 - DNA, 80 bp, synthetic construct
  source 1..80: mol_type = other DNA
cattatctcgaatttccaattatgattatgaacaatttttgaacctaatgaatatgttgaagaacaaagaacaaaacagt

SEQ ID NO: 45392 - DNA, 80 bp, synthetic construct
  source 1..80: mol_type = other DNA
gtcatttccctgtcagcttgctctgttgactttgctatagctttaagaagcaggatgtggaggaaattggcaaaaggaag

SEQ ID NO: 45393 - DNA, 80 bp, synthetic construct
  source 1..80: mol_type = other DNA
attaatatatggtttagaagtccctgatccaatagaagcaatgattggctttctcattcttgggagtgaaaattgtccac

SEQ ID NO: 45394 - DNA, 80 bp, synthetic construct
  source 1..80: mol_type = other DNA
tctgtgattcaggaagcaaaaactatacctggtttttcataccaaaggatgtacagttggataagattgataaagatcac

SEQ ID NO: 45395 - DNA, 80 bp, synthetic construct
  source 1..80: mol_type = other DNA
gcatcaataagggtaccctatgtcggatcaactaccgaagaaagatcagagataaagttaggatccgtgaaaaatccaag

SEQ ID NO: 45396 - DNA, 80 bp, synthetic construct
  source 1..80: mol_type = other DNA
aatgagtcaatgacaacaacatccttgctgaaattgagacagaggctggcagagaagaaaggagactccaagaacagtca

SEQ ID NO: 45397 - DNA, 80 bp, synthetic construct
  source 1..80: mol_type = other DNA
caaatccctgaaatctgctataagactcgcaactgtgtacacttgggcatttggcacaagtgatgctgaatggtgggagg

SEQ ID NO: 45398 - DNA, 80 bp, synthetic construct
  source 1..80: mol_type = other DNA
cttggtacttgtctaatcaacgagcaaatatacccttagatgttctcaaaacgataacacctatatctacttcaacgaat

SEQ ID NO: 45399 - DNA, 80 bp, synthetic construct
  source 1..80: mol_type = other DNA
attgctcatagattacgagaccgatcaacacaggttaaatacgccagtacatctcttaacagagtatcgcggcatgtaac

SEQ ID NO: 45400 - DNA, 80 bp, synthetic construct
  source 1..80: mol_type = other DNA
aattagtaacgataacatgaattttgaatttgacggggttaaaatggataccaacttgatttatcaacaagtcatgctgt

SEQ ID NO: 45401 - DNA, 80 bp, synthetic construct
  source 1..80: mol_type = other DNA
tagggctttcatgcttggagagtttattccgaaataggaaaatgacaaatagttacaatatcgtgtaccatttacacgtt

SEQ ID NO: 45402 - DNA, 80 bp, synthetic construct
  source 1..80: mol_type = other DNA
caggaacattgttgtgtaaaggctctgaatgatttaccttatacaccgtcaacacatccagtgccaaattatacagaagt

SEQ ID NO: 45403 - DNA, 80 bp, synthetic construct
  source 1..80: mol_type = other DNA
tagagataataggttaatttacgatcctcaacctatattagaatttgatgagctaagattagcaattcagcaaacaaaga

SEQ ID NO: 45404 - DNA, 80 bp, synthetic construct
  source 1..80: mol_type = other DNA
aagtagatttggaattttcattgtgggatacaaaagaacttcatgagaatttagctcaaagtttagcgattacagtaacg

SEQ ID NO: 45405 - DNA, 80 bp, synthetic construct
  source 1..80: mol_type = other DNA
gatattatgacaaaatctgataaagatcatattaaagaccaaagaagtatagatgttgatgataatattaagacactaat

SEQ ID NO: 45406 - DNA, 80 bp, synthetic construct
  source 1..80: mol_type = other DNA
aactgagtttttattagtagaccctgaaatgtttgccgtaaatttaggattgcatatatcaataaaatggtcatttgata

SEQ ID NO: 45407 - DNA, 80 bp, synthetic construct
  source 1..80: mol_type = other DNA
tgagactcaatcatttagaaactatcagtccaacttaggcagagatggcagggccagtgcagcaacgactactttgacaa

SEQ ID NO: 45408 - DNA, 80 bp, synthetic construct
  source 1..80: mol_type = other DNA
agacacacctccaaaaccacccagagcaaaagatcaacccactgatgaggtctccttcatggattccaatatatgatcag

SEQ ID NO: 45409 - DNA, 80 bp, synthetic construct
  source 1..80: mol_type = other DNA
ttcactttaaaagaccaagaggacgctatagcatgatagaatacctgactgatcttttggataatacttcttctcatgtt

SEQ ID NO: 45410 - DNA, 80 bp, synthetic construct
  source 1..80: mol_type = other DNA
tatcgaatccttactaatgtattatctcatcccagagttatgagaaaattcactaatgccgggctactagtaccgaaata

SEQ ID NO: 45411 - DNA, 80 bp, synthetic construct
  source 1..80: mol_type = other DNA
cggtccctaccttacaagtcaagatttcaaaaagatggcggtagatttcataataacagcgtataccacatttttgacca

SEQ ID NO: 45412 - DNA, 80 bp, synthetic construct
  source 1..80: mol_type = other DNA
attggtgtaataataacaagttttcaattctaatacctgaacaagaccctgatatacttgaattaagaaaagacatcact

SEQ ID NO: 45413 - DNA, 80 bp, synthetic construct
  source 1..80: mol_type = other DNA
catgcaaggcatttatgtatgatctcggatctttactgctactctttcaaacaaccttggataaaggagcttacaccaca

SEQ ID NO: 45414 - DNA, 80 bp, synthetic construct
  source 1..80: mol_type = other DNA
agagaagatctgcgtcatggaggacttcatagccaattgtgttgctaatgatcaaacaagtgcgggctggaacataacgc

SEQ ID NO: 45415 - DNA, 80 bp, synthetic construct
  source 1..80: mol_type = other DNA
ccttaagagtttacaatctccctgcatcgaccacatacatcaggagagggataataaaacaattaagaatccgtcaaagc

SEQ ID NO: 45416 - DNA, 80 bp, synthetic construct
  source 1..80: mol_type = other DNA
aatgagcctattgatctggaagatattaggattgatcagaaccccgattttgtgaataaacctattgagttttgtagcag

SEQ ID NO: 45417 - DNA, 80 bp, synthetic construct
  source 1..80: mol_type = other DNA
tgaattcggtatcacaatttataaccttgaagaaattcttcaatcaaatgtgcatctcagtgtaaatatgaacattgact

SEQ ID NO: 45418 - DNA, 80 bp, synthetic construct
  source 1..80: mol_type = other DNA
cctcaacaagtaacaatactgaaaatcatttatttagaagggtaggcttgaactctacttcatcttataaagcactatct

SEQ ID NO: 45419 - DNA, 80 bp, synthetic construct
  source 1..80: mol_type = other DNA
aatgatggttaaaatcaaccaactaagggcgcgtagagtaccttcagatagaacactacattaatcgggtgaaacaatag

SEQ ID NO: 45420 - DNA, 80 bp, synthetic construct
  source 1..80: mol_type = other DNA
ttaacacctgttattaaaagatatcatcaacagaacactaataggctgtttataggagaaggatcagggtctatgatgta

SEQ ID NO: 45421 - DNA, 80 bp, synthetic construct
  source 1..80: mol_type = other DNA
tctttaccagaaaaccttggtggagacaatatgcttctttaattcgggagttcagtacaatgaggatctgggtcaaaggg

SEQ ID NO: 45422 - DNA, 80 bp, synthetic construct
  source 1..80: mol_type = other DNA
aacaatcattatacccgagtgaatacagtatctgtgaacaaggagttaaaaaagaaaaccctctcaccgggcatgttata

SEQ ID NO: 45423 - DNA, 80 bp, synthetic construct
  source 1..80: mol_type = other DNA
ccactattcaatggaagaccagaaaccacatgggtaggcaatgatgattctttcaagtatatattggaacatactataaa

SEQ ID NO: 45424 - DNA, 80 bp, synthetic construct
  source 1..80: mol_type = other DNA
tagagacatcgggcttgttcactccgatatggaaacaggaatagggaaggataattatactatcttaaatgaacatgcac

SEQ ID NO: 45425 - DNA, 80 bp, synthetic construct
  source 1..80: mol_type = other DNA
atcttatagcactgagccttacagtaatgattgatgatggaatcttggtgtctaaggtagcttatgcccctgggttttgc

SEQ ID NO: 45426 - DNA, 80 bp, synthetic construct
  source 1..80: mol_type = other DNA
atctcttcattattgaatatgtaccggacatttttttcattagttctatgtgcgtttccaccgtatagcaattttgaatc

SEQ ID NO: 45427 - DNA, 80 bp, synthetic construct
  source 1..80: mol_type = other DNA
aactgaattttacctgatttgcttgcaaaaaagtatacccggacctatcacaccagctagagccatccaacaaacgacga

SEQ ID NO: 45428 - DNA, 80 bp, synthetic construct
  source 1..80: mol_type = other DNA
agcaatctagagaagaggataatagtataactaataatatcctcaaaatcaaaaatcttgttcagaaagaatttatcaaa

SEQ ID NO: 45429 - DNA, 80 bp, synthetic construct
  source 1..80: mol_type = other DNA
acagtaaagaaaaaatacgaaatccatccttcgtttaactgtcctatcaacttcacaaaggatgataaatatttaatgag

SEQ ID NO: 45430 - DNA, 80 bp, synthetic construct
  source 1..80: mol_type = other DNA
atttatgggtttggtgcttaatttttatttaatcttacttgcaaaacaggcagctgctacactcgtaaccactcctcaca

SEQ ID NO: 45431 - DNA, 80 bp, synthetic construct
  source 1..80: mol_type = other DNA
tgttgggtttcaagccaatggtcctgatatgatacgtaaagagacgggctatgacataggtagcaatgtagagaatctcc

SEQ ID NO: 45432 - DNA, 80 bp, synthetic construct
  source 1..80: mol_type = other DNA
gagatgtcttaatcaagttgtttgcagatgcagtcaccttctatgatgatgtcacaaataaaaagaactttttaaatcct

SEQ ID NO: 45433 - DNA, 80 bp, synthetic construct
  source 1..80: mol_type = other DNA
tatccagtctacacaagaactcagtataaaattctgatggataaaatatgcaagaaagtcaccttatacaccttaatcat

SEQ ID NO: 45434 - DNA, 80 bp, synthetic construct
  source 1..80: mol_type = other DNA
atcatgtaaaggatccaatcaatattgctgggaaattaaatcccaaataagaaagcattgtctcatacttgatttgaaaa

SEQ ID NO: 45435 - DNA, 80 bp, synthetic construct
  source 1..80: mol_type = other DNA
gtaaggtttttacaaaacttattccaaagggattaagagaaaggggtgactcaaaagggatgaagagcatatggttcact

SEQ ID NO: 45436 - DNA, 80 bp, synthetic construct
  source 1..80: mol_type = other DNA
aaactaaccagtcaagaggtgaaaagatggtggaagatgatatcttacatcgtgataataagcaatccataaccacatcc

SEQ ID NO: 45437 - DNA, 80 bp, synthetic construct
  source 1..80: mol_type = other DNA
tccaacttgtcagttaaacacttaaatcacaataaacttgtcatcagattaaagaaaacttataattcccttttttaggt

SEQ ID NO: 45438 - DNA, 80 bp, synthetic construct
  source 1..80: mol_type = other DNA
gtaagggcaacacgggtcatagaacttatgcctatagattacctctatctgtatatctagctatgattaaaatgtatatt

SEQ ID NO: 45439 - DNA, 80 bp, synthetic construct
  source 1..80: mol_type = other DNA
tctgctgaccggttttctagcaacagtccacattattactttatgggtattttttaatcaaccttttataatcaaatata

SEQ ID NO: 45440 - DNA, 80 bp, synthetic construct
  source 1..80: mol_type = other DNA
ttacaaaaaacttaggatccaagtggtccaaactttttttgatcaagagtcatattggctactttaggaggacactttaa

SEQ ID NO: 45441 - DNA, 80 bp, synthetic construct
  source 1..80: mol_type = other DNA
acacaaattgttacaagaggatattcatcagatggacaaactacaattgattgaagatggcctctctactatcaatttta

SEQ ID NO: 45442 - DNA, 80 bp, synthetic construct
  source 1..80: mol_type = other DNA
tacaggaaaataaggaaaaattacagcattcttacggaagatcctccatcagagagccacccacaagtgtcagggttgaa

SEQ ID NO: 45443 - DNA, 80 bp, synthetic construct
  source 1..80: mol_type = other DNA
gagtgggagaaatttattcgaaagatcgcttctggacctgaacaagttcaagggggaggatctgagactgagatcacagg

SEQ ID NO: 45444 - DNA, 80 bp, synthetic construct
  source 1..80: mol_type = other DNA
cgataatggagatagaggcaattttaccaatcctgatcagggaggcggagtcacaggacaattcgaagaaaggtatcaaa

SEQ ID NO: 45445 - DNA, 80 bp, synthetic construct
  source 1..80: mol_type = other DNA
ctaaagtgaggatctttgttccagcgaataataatccaaacctcagatggcgtttaacactattcttgatggatgtcgtg

SEQ ID NO: 45446 - DNA, 80 bp, synthetic construct
  source 1..80: mol_type = other DNA
aatgggggtcacaagattcagaattacaactggacccaatggttgtacacgatttcttctatgacgagagaagggagaat

SEQ ID NO: 45447 - DNA, 80 bp, synthetic construct
  source 1..80: mol_type = other DNA
cccgacaatggaaaatatgaccgcagctctaaaaaacgggataatatcagagaaggaacacgacaggataagtacaataa

SEQ ID NO: 45448 - DNA, 80 bp, synthetic construct
  source 1..80: mol_type = other DNA
tcagtctactgatgaattactgtcctgcctacaaccatcttctaagaacgatgtcatcaagaatgaaagtacatcagtgt

SEQ ID NO: 45449 - DNA, 80 bp, synthetic construct
  source 1..80: mol_type = other DNA
caaatttgcatgttacaggaaataaactgaatcctgacgcaaaaccctttgaacccacctcccagtcgaaagagcaccca

SEQ ID NO: 45450 - DNA, 80 bp, synthetic construct
  source 1..80: mol_type = other DNA
accaccacacagcacaacaaaaatgaccatcagaccgatgatgattataagaatagaagatccagtgaaaacaatgtgat

SEQ ID NO: 45451 - DNA, 80 bp, synthetic construct
  source 1..80: mol_type = other DNA
ctctgatcatgccaccacaatggaagacaacaacaattttatcccggcgaccaaaagaaagaatgcattgagcgaaccca

SEQ ID NO: 45452 - DNA, 80 bp, synthetic construct
  source 1..80: mol_type = other DNA
tatacgtccaggtattgccctcaaacacagagggtttctcgggaaaagattatccactcctcaaggacaactctgtcaag

SEQ ID NO: 45453 - DNA, 80 bp, synthetic construct
  source 1..80: mol_type = other DNA
aagcgtgcagagccagtcatcctagaaactgccaaccaccctgcaggctctgccgaccaagacacaaatcagattgaaga

SEQ ID NO: 45454 - DNA, 80 bp, synthetic construct
  source 1..80: mol_type = other DNA
aaacatgcagttcaaccttccaaaactgctcacagaagatacagacgatgaaccagaagataacaatgattccatgcctc

SEQ ID NO: 45455 - DNA, 80 bp, synthetic construct
  source 1..80: mol_type = other DNA
ttgaggaagacattagagagatcggttccatgctaaaagatggaaccaaagatatcaagacaaggatgaatgagatagat

SEQ ID NO: 45456 - DNA, 80 bp, synthetic construct
  source 1..80: mol_type = other DNA
aggtcacctgcctccgcagagtctatgaaagtgggtgctgggatatccttggtatctatgtatgctgaaaaacccggggc

SEQ ID NO: 45457 - DNA, 80 bp, synthetic construct
  source 1..80: mol_type = other DNA
gacgcaatcaagaagataaataagaaatcaaaaaatagaagtctggatctagaatcagacggtaaagatcaggggagaag

SEQ ID NO: 45458 - DNA, 80 bp, synthetic construct
  source 1..80: mol_type = other DNA
agatccatcagtagacctcgggattaaaaaaagaaaggaagggctaaaggccgcaatgcaaaagacaaaagagcaattgt

SEQ ID NO: 45459 - DNA, 80 bp, synthetic construct
  source 1..80: mol_type = other DNA
ctataaaagtggagagagagattggattgaacgacaggatatgtcaaaattcgaagatgagtacagaaaagaaattgata

SEQ ID NO: 45460 - DNA, 80 bp, synthetic construct
  source 1..80: mol_type = other DNA
tatgctgggatggaaatggagtatggacaaacgagtactgggtcaggaggtccacaaggatcaaaggatgggacttctga

SEQ ID NO: 45461 - DNA, 80 bp, synthetic construct
  source 1..80: mol_type = other DNA
tgatgtccaggtagacgaagactacgatgaaggggaagactatgaggctatgccgtcagataggttttatacaacattat

SEQ ID NO: 45462 - DNA, 80 bp, synthetic construct
  source 1..80: mol_type = other DNA
caggtgaacaaaaggatagatttgatctagatgctaaccaaatgtctcagtatgacctcgaggcccaggtggatgaatta

SEQ ID NO: 45463 - DNA, 80 bp, synthetic construct
  source 1..80: mol_type = other DNA
accagaatgaatctcatactctattctagattagaaactactaataagttgcttattgacatattagatctagctaaaga

SEQ ID NO: 45464 - DNA, 80 bp, synthetic construct
  source 1..80: mol_type = other DNA
aatgccaaagttagttagaaaagtggataatcttgagagacagatgggtaacttgaatatgttaacctctacccttgagg

SEQ ID NO: 45465 - DNA, 80 bp, synthetic construct
  source 1..80: mol_type = other DNA
gtcacctatcttctgtaatgattatgatacccggtaaggataagagcgaaaaggaaatccctaaaaatccggacctgaga

SEQ ID NO: 45466 - DNA, 80 bp, synthetic construct
  source 1..80: mol_type = other DNA
ccaatactggggagaagcaacacgtcgttaactgatgttatcgacctagaccattaccctgataaaggctccaaaggtat

SEQ ID NO: 45467 - DNA, 80 bp, synthetic construct
  source 1..80: mol_type = other DNA
tcttgtgagagcattattgaatgacccagatgttgaagcgataatcatagatgtttatggctttgatgaaggtattccta

SEQ ID NO: 45468 - DNA, 80 bp, synthetic construct
  source 1..80: mol_type = other DNA
caaaccaagtggatctggagacagacagtacatcggctctctagagagcaaattttctataaatgatgagtacaattttg

SEQ ID NO: 45469 - DNA, 80 bp, synthetic construct
  source 1..80: mol_type = other DNA
ctccataccctatcagggacgaactcctattgccaggtttaagagatgacaaaaccaatgcttcatcgttcatcccagat

SEQ ID NO: 45470 - DNA, 80 bp, synthetic construct
  source 1..80: mol_type = other DNA
gacacggacaggtctccaatggtgctcaaaataataattcgacagaacatccatgatgaagaagtgaaggatgagctact

SEQ ID NO: 45471 - DNA, 80 bp, synthetic construct
  source 1..80: mol_type = other DNA
gtccatactagaacaacataacactgtggaggaattgaatgaaatatggaatactgtgaatgattacctcgatggcaaca

SEQ ID NO: 45472 - DNA, 80 bp, synthetic construct
  source 1..80: mol_type = other DNA
tctgattaacagatattgagattgatcctattctaaacaagtaatctctgataatgatagtatggaataagaatactaat

SEQ ID NO: 45473 - DNA, 80 bp, synthetic construct
  source 1..80: mol_type = other DNA
cacactattgtactcttgtagaatcttaacgagtgtctaatgtcagattttagcaacacatactaataacttgtaatcca

SEQ ID NO: 45474 - DNA, 80 bp, synthetic construct
  source 1..80: mol_type = other DNA
tttctccttattccatttaatctcacattagaaaaaacttaggatcccagatttgcaaagtcaaaacgggatctactatc

SEQ ID NO: 45475 - DNA, 80 bp, synthetic construct
  source 1..80: mol_type = other DNA
aggtgttggagctaacaatagcggagtctgcataacaaatagcgttcaaagaagtttgaaaaccatcatagaatatggat

SEQ ID NO: 45476 - DNA, 80 bp, synthetic construct
  source 1..80: mol_type = other DNA
ccgtcagatttgaggaggattataatggaggatgataagagtctggtcaacaatgatgatagtacagaaactgattttct

SEQ ID NO: 45477 - DNA, 80 bp, synthetic construct
  source 1..80: mol_type = other DNA
cgagaaaacttggagagaagggagtaagattgacaagatcacaccagaggttgatgaaaacgggaatatggtccccaagt

SEQ ID NO: 45478 - DNA, 80 bp, synthetic construct
  source 1..80: mol_type = other DNA
taatggaacgaagaggtgataaagctacagatgacatggattccctaagaaagattgttaaagctgcacatgatttcagc

SEQ ID NO: 45479 - DNA, 80 bp, synthetic construct
  source 1..80: mol_type = other DNA
acgttgtcttcaacccggggaaaaatgagaggaaaacatccggatatcaatatatgatttgttatggtttcattgaggat

SEQ ID NO: 45480 - DNA, 80 bp, synthetic construct
  source 1..80: mol_type = other DNA
ggacctatcaatggctcaccaagagtcaaaggtaatatcagaaccaccgcttcttttcctttgggtgttggaaaaactta

SEQ ID NO: 45481 - DNA, 80 bp, synthetic construct
  source 1..80: mol_type = other DNA
ctcgtctccagaagagatcttacaagagctgacaacactcaagatcactgtcagaaggacagccggatcaaatgagaagt

SEQ ID NO: 45482 - DNA, 80 bp, synthetic construct
  source 1..80: mol_type = other DNA
tggtgtatggaacaacagggcctttaaatcacctttacccgtggtataaagttttgacaggtggctccatttttagtgcg

SEQ ID NO: 45483 - DNA, 80 bp, synthetic construct
  source 1..80: mol_type = other DNA
gtgaaggtctgtaggaatgtggatcaaatactattagacagaccccaaatacttagaatattctttctaagtataactaa

SEQ ID NO: 45484 - DNA, 80 bp, synthetic construct
  source 1..80: mol_type = other DNA
attaacagataaaggtgtgtatatgatacccaaaagtgttctcgacttcagatcggataattcgatggccttcaatctgc

SEQ ID NO: 45485 - DNA, 80 bp, synthetic construct
  source 1..80: mol_type = other DNA
ttgtgtatctcaagatagacactgacatcaccaaagcaggcatcagagggattgtcaacaaagaaggggagaggataacg

SEQ ID NO: 45486 - DNA, 80 bp, synthetic construct
  source 1..80: mol_type = other DNA
tcattcatgttacacatcggtaactttacaagaagaggaggaaaacattactcagtggagtattgcaaaaggaaaattga

SEQ ID NO: 45487 - DNA, 80 bp, synthetic construct
  source 1..80: mol_type = other DNA
caaaatgaagctcacattcgccttaggcactataggcggtctaagcttacatatcaggatcgatggaaggataagtaaaa

SEQ ID NO: 45488 - DNA, 80 bp, synthetic construct
  source 1..80: mol_type = other DNA
ggctccaagcacaagttggctttcagagaaacatttgctactcactaatggacataaacccatggttgaataaattaacg

SEQ ID NO: 45489 - DNA, 80 bp, synthetic construct
  source 1..80: mol_type = other DNA
agaggaaggagtttatttgttgatcaaagggtccaggatattgttatgtcagatatggggtcatttgtgaatgctattac

SEQ ID NO: 45490 - DNA, 80 bp, synthetic construct
  source 1..80: mol_type = other DNA
tggaacaatagttgtgaaatacacaaagtcaccgctgtcattcagccatctgtgccaaaggacttcatgttgtatgagga

SEQ ID NO: 45491 - DNA, 80 bp, synthetic construct
  source 1..80: mol_type = other DNA
catcttaatagataatacaggcaagatcttaaaataaagtaggagagtcagtcattacccagtatattgaatactaatga

SEQ ID NO: 45492 - DNA, 80 bp, synthetic construct
  source 1..80: mol_type = other DNA
caactttattaatccaattctatctccagttactagaatttctaaaacaattctactgctcagcaacgcatctcaaacat

SEQ ID NO: 45493 - DNA, 80 bp, synthetic construct
  source 1..80: mol_type = other DNA
tgtgatcttcaattatgatcgacgcattgtaatctatatagattttagttcatgaaatactaaaaagggcttaatcttgt

SEQ ID NO: 45494 - DNA, 80 bp, synthetic construct
  source 1..80: mol_type = other DNA
aagttctcagcaaatactccaatgcaaaagagcgcctcaacatctcaagcagcaccaaaataaaccacaatcaatgtgca

SEQ ID NO: 45495 - DNA, 80 bp, synthetic construct
  source 1..80: mol_type = other DNA
acaagagcaatcgtctaaagtgtgaaaaccaaaatcacagatcagaaagggcacatatttcagtcctgtaaaaataccaa

SEQ ID NO: 45496 - DNA, 80 bp, synthetic construct
  source 1..80: mol_type = other DNA
gtgggattaataaaagaggatcaatccttatcattttaagaaaaacttaggatcccagagatcctaaagagccaattcct

SEQ ID NO: 45497 - DNA, 80 bp, synthetic construct
  source 1..80: mol_type = other DNA
ttatattttgatcttgaagggctagaagtcaggctgaaacacagaggtggaggaacacaggaagtaaaattgatgaaatc

SEQ ID NO: 45498 - DNA, 80 bp, synthetic construct
  source 1..80: mol_type = other DNA
aaccttagctcaacatctaatcaatcaagcttaagtcatcctaatactgtatacaaccagcagcgtagagagtggatttg

SEQ ID NO: 45499 - DNA, 80 bp, synthetic construct
  source 1..80: mol_type = other DNA
atttcggcacccttgcgaagtgaaggctattactgcctgtcctttcaatcagaaaattacatttacccataaagtaatct

SEQ ID NO: 45500 - DNA, 80 bp, synthetic construct
  source 1..80: mol_type = other DNA
ctccatagagacgcagatatggattttgatcgcaaaggctgtaactgccccagatacagcagaagagagcgaaggaagaa

SEQ ID NO: 45501 - DNA, 80 bp, synthetic construct
  source 1..80: mol_type = other DNA
caacatgtctaacaagaggacaacagtattgatcataataagctatacgttattttatttgaataatgcagcaattgtag

SEQ ID NO: 45502 - DNA, 80 bp, synthetic construct
  source 1..80: mol_type = other DNA
ggtttgattttgataaattgaataaaataggtgtggtgcaagggagagtcctaaattataaaattaaaggagatccaatg

SEQ ID NO: 45503 - DNA, 80 bp, synthetic construct
  source 1..80: mol_type = other DNA
acaaaagaccttgtcttgaaatttatccctaacatagtgaatatcactgaatgtgtgagagagcccttgagtaggtacaa

SEQ ID NO: 45504 - DNA, 80 bp, synthetic construct
  source 1..80: mol_type = other DNA
tgagaccgtgaggagattgcttttacctatacacaacatgcttgggttatacttgaataacacaaatgctaaaatgactg

SEQ ID NO: 45505 - DNA, 80 bp, synthetic construct
  source 1..80: mol_type = other DNA
ggttgatgatcgcgggtgtgatcatgggtgggatagcaataggtatagccacagcagctcagatcacagcaggttttgct

SEQ ID NO: 45506 - DNA, 80 bp, synthetic construct
  source 1..80: mol_type = other DNA
ctttatgaggcaaaaaagaacacagaaaatattcagaaattaacagacagcatcatgaaaacacaggactcgattgataa

SEQ ID NO: 45507 - DNA, 80 bp, synthetic construct
  source 1..80: mol_type = other DNA
acttactgacagtgtggggacaagcatacttatattgaataagctacagacatacatcaacaatcaactggtaccaaatc

SEQ ID NO: 45508 - DNA, 80 bp, synthetic construct
  source 1..80: mol_type = other DNA
tagagcttctatcctgccgacaaaacaaaattgagtttgatctaatgttaaccaagtatttggtggatcttatgactgtt

SEQ ID NO: 45509 - DNA, 80 bp, synthetic construct
  source 1..80: mol_type = other DNA
attggtcctaatatcaataatcctgttaataaagatatgactattcaatctttgtcacttctttttgatggcaattatga

SEQ ID NO: 45510 - DNA, 80 bp, synthetic construct
  source 1..80: mol_type = other DNA
tataatgatgtcagaacttggttatacacctcaggatttcttagatttgatagagagtaagagtataacagggcaaataa

SEQ ID NO: 45511 - DNA, 80 bp, synthetic construct
  source 1..80: mol_type = other DNA
gatgggcaaaatatgttcagcaaaagagggttaatcctttgttcttgatttctccacaatggatcaatgacatgagatcc

SEQ ID NO: 45512 - DNA, 80 bp, synthetic construct
  source 1..80: mol_type = other DNA
tttatgttgatatggaaaacttgtacgttgtgatcaggacatatctacctaccctaattgaagtacctgatgcccaaata

SEQ ID NO: 45513 - DNA, 80 bp, synthetic construct
  source 1..80: mol_type = other DNA
tatgagttcaacaaaataactatgagtagcaatggaggagaatacttgtcaaccatacctaatttcatattaataagagg

SEQ ID NO: 45514 - DNA, 80 bp, synthetic construct
  source 1..80: mol_type = other DNA
taattatatgtctaatatagatgttgcaacatgttatatgaccaaagcaagcgtaatttgtaatcaagattattcactcc

SEQ ID NO: 45515 - DNA, 80 bp, synthetic construct
  source 1..80: mol_type = other DNA
cgatgagccaaaacttaagaagctgttatcaaggtgagacagaatactgtcctgttgaggcagtcatcgcgtcacactct

SEQ ID NO: 45516 - DNA, 80 bp, synthetic construct
  source 1..80: mol_type = other DNA
ccaagatttgctcttacaaatggagttattttcgccaattgtataaatacaatttgtaggtgtcaagacaatggtaagac

SEQ ID NO: 45517 - DNA, 80 bp, synthetic construct
  source 1..80: mol_type = other DNA
tatcactcaaaacataaaccaattcgtaagcatgatcgacaacagtacttgtaatgatgtcatggtagataagtttacta

SEQ ID NO: 45518 - DNA, 80 bp, synthetic construct
  source 1..80: mol_type = other DNA
tcaaggtaggaaaatatatggggagaaaagatatcaataatattaatatccagataggaccgcagatcataattgataag

SEQ ID NO: 45519 - DNA, 80 bp, synthetic construct
  source 1..80: mol_type = other DNA
gttgacttgtctaatgaaataaacaagatgaatcaatctttaaaagatagtattttctacctgagagaagccaagagaat

SEQ ID NO: 45520 - DNA, 80 bp, synthetic construct
  source 1..80: mol_type = other DNA
tttagactcagtaaatatcagtcttatatctccaagcgttcaattgtttctaataataatatcagtcctctcatttatta

SEQ ID NO: 45521 - DNA, 80 bp, synthetic construct
  source 1..80: mol_type = other DNA
tattattgattatcatagtatacttgtactgtaaatcaaaacattcatataaatataacaaatttacagatgatcctgat

SEQ ID NO: 45522 - DNA, 80 bp, synthetic construct
  source 1..80: mol_type = other DNA
tctggattcggtttaattgaattgcgatcgtttataaattagaaaggagatttactactcaaaatgtctgacattttcaa

SEQ ID NO: 45523 - DNA, 80 bp, synthetic construct
  source 1..80: mol_type = other DNA
ctgattgcggcaagtctttcgcttcgtaaattcatggttgaactactgatggaagctaagaaaggacgggggacaaaagg

SEQ ID NO: 45524 - DNA, 80 bp, synthetic construct
  source 1..80: mol_type = other DNA
tattacaatgattacaaaagagaacgtattaatggcaaagccagtaagagtaacaatatatattatgtaggtgattaaca

SEQ ID NO: 45525 - DNA, 80 bp, synthetic construct
  source 1..80: mol_type = other DNA
atcgataatctaaaggattacctcactatcactaccaaggtaacttccatgtaagatcggaccttccccgaagacattaa

SEQ ID NO: 45526 - DNA, 80 bp, synthetic construct
  source 1..80: mol_type = other DNA
ataaaacttaggatcccagagtatccctctaagtgatccttctagattggttactgatatatatacatatttatcctctt

SEQ ID NO: 45527 - DNA, 80 bp, synthetic construct
  source 1..80: mol_type = other DNA
tccgtcgttgtttattgatcattaataatgctttctcagctccaaaaaaattacttagacaactcaaaccaacaaggtga

SEQ ID NO: 45528 - DNA, 80 bp, synthetic construct
  source 1..80: mol_type = other DNA
taaaatgaacaacccagataagaaattaagtgtcaacttcaaccctttagaattagataaaggtcaaaaagatctcaata

SEQ ID NO: 45529 - DNA, 80 bp, synthetic construct
  source 1..80: mol_type = other DNA
agtcttattatgttaaaaacaagaattataacatttcaaatctattaaatgaaagtctgcacgatatcaagttttgtatt

SEQ ID NO: 45530 - DNA, 80 bp, synthetic construct
  source 1..80: mol_type = other DNA
tattgtatattctcactgctaattatcattacaataatcaatataatcacaatatcaattgttataactcgtctgaaagt

SEQ ID NO: 45531 - DNA, 80 bp, synthetic construct
  source 1..80: mol_type = other DNA
acatgaagagaataatggcatggaatctcctaatttacaatctattcaagatagtctctcatctcttactaacatgatca

SEQ ID NO: 45532 - DNA, 80 bp, synthetic construct
  source 1..80: mol_type = other DNA
atacagagataactcctagaatagggattttagttacagccacttctgttactctcccttcatctatcaattatgtcggg

SEQ ID NO: 45533 - DNA, 80 bp, synthetic construct
  source 1..80: mol_type = other DNA
actaagacaaatcaactggtcaatgaattaaaagattatataaccaaaagttgtggctttaaggtccctgaattaaagtt

SEQ ID NO: 45534 - DNA, 80 bp, synthetic construct
  source 1..80: mol_type = other DNA
aagaataatggagattgtatccgatatcggaaattacgttgaagagacaggaatggcagggttcttcgctacaataaagt

SEQ ID NO: 45535 - DNA, 80 bp, synthetic construct
  source 1..80: mol_type = other DNA
acatgaatgcaacataagttgtgctgatccaaaaattagcaaatctgcaatgtacagcaccaatgcctatgccgagcttg

SEQ ID NO: 45536 - DNA, 80 bp, synthetic construct
  source 1..80: mol_type = other DNA
ctggtccacctaagatattttgtaaaagtgtatccaaagaccccgactttagactgaagcagatagattatgtaatacca

SEQ ID NO: 45537 - DNA, 80 bp, synthetic construct
  source 1..80: mol_type = other DNA
gtgcagcaagatcggtctatttgtatgaacaaccctttattggatatttctgatgggttttttacctacatacattatga

SEQ ID NO: 45538 - DNA, 80 bp, synthetic construct
  source 1..80: mol_type = other DNA
aggaataaatagctgtaaaaaatcagattcatttaaagtgctgctgtcacatggtgaaatagttgacaggggtgattatc

SEQ ID NO: 45539 - DNA, 80 bp, synthetic construct
  source 1..80: mol_type = other DNA
gaccatcattatatctattatcaagtcattaccatccttattcaatgcaggtaataaactgtgtacctgtgacttgtaac

SEQ ID NO: 45540 - DNA, 80 bp, synthetic construct
  source 1..80: mol_type = other DNA
cagtcatcctttgtattttgtcatatctccaacaacactaaaacattggacaattcagattactcgtcagacgagtacta

SEQ ID NO: 45541 - DNA, 80 bp, synthetic construct
  source 1..80: mol_type = other DNA
cataacatatttcaatggcatagatcgtcccaaaaccaagaagattcccattaacaatatgacagcagacaatcgttata

SEQ ID NO: 45542 - DNA, 80 bp, synthetic construct
  source 1..80: mol_type = other DNA
tccattttacattctcaggtgggggaggtgtatgtttaggtgaagaatttattattcctgttaccacagtcatcaatact

SEQ ID NO: 45543 - DNA, 80 bp, synthetic construct
  source 1..80: mol_type = other DNA
gatgtattcacgcatgattattgtgagagtttcaactgttcagtccaaaccggtaaaagtctaaaggagatatgctctga

SEQ ID NO: 45544 - DNA, 80 bp, synthetic construct
  source 1..80: mol_type = other DNA
gtcattaagatctccaacgaactcatcgcgatacaatttaaacggaatcatgattataagtcaaaacaacatgacagatt

SEQ ID NO: 45545 - DNA, 80 bp, synthetic construct
  source 1..80: mol_type = other DNA
tcagtcttgagaccaaattccctgctttggcacttaatgagctccagagtgacttgaacacaatgaaaagtctcatgata

SEQ ID NO: 45546 - DNA, 80 bp, synthetic construct
  source 1..80: mol_type = other DNA
ttaagattcagttgaatggtataacttataacaaactgtcattcggaagtcctggaagactgagcaagacactgggccag

SEQ ID NO: 45547 - DNA, 80 bp, synthetic construct
  source 1..80: mol_type = other DNA
gtcctttattaccaatcttcaatgagttgggatacttatctaaaggcaggatttgtcgagaaatggaaaccctttacccc

SEQ ID NO: 45548 - DNA, 80 bp, synthetic construct
  source 1..80: mol_type = other DNA
gaattggatgaacaatactgtgatatccagacctaaccaaggtaattgtccaaggtatcataaatgccccgagatatgtt

SEQ ID NO: 45549 - DNA, 80 bp, synthetic construct
  source 1..80: mol_type = other DNA
atggagggacatacaatgatattgctcctttagatctaggaaaagacatgtatgttagcgttattctagattcagatcag

SEQ ID NO: 45550 - DNA, 80 bp, synthetic construct
  source 1..80: mol_type = other DNA
cttgcagagaatccagagattacagtatttaactctactactatactttataaggagagagtatccaaagatgaactaaa

SEQ ID NO: 45551 - DNA, 80 bp, synthetic construct
  source 1..80: mol_type = other DNA
aacttaggaaccaagacaaacacttttggtcttgctattggatcctcaagaaatatatcatcatgagtgatatttttgaa

SEQ ID NO: 45552 - DNA, 80 bp, synthetic construct
  source 1..80: mol_type = other DNA
ccgcttcgtctaatgcaacagatgatccagcaatcagcaataaagatcaaagggaatcagaaaagaagaataaccaagat

SEQ ID NO: 45553 - DNA, 80 bp, synthetic construct
  source 1..80: mol_type = other DNA
ggtcgcgggaatacaaacaaagacaaaaacaaaattgattctgtcagaagatacattccaaaaagtgaccaaattaaagc

SEQ ID NO: 45554 - DNA, 80 bp, synthetic construct
  source 1..80: mol_type = other DNA
acccatgcattgatggtcccagaatctgcagactcatcaagaaaagcaagagcaatatcgcgataattctcgtctgacat

SEQ ID NO: 45555 - DNA, 80 bp, synthetic construct
  source 1..80: mol_type = other DNA
cgtatttctaaaacttaggaaccaagacaaacacttttggtcttggtattggatcctcaagaaatatatcatcatgagtg

SEQ ID NO: 45556 - DNA, 80 bp, synthetic construct
  source 1..80: mol_type = other DNA
aaaattgtcataattacataagtcatcaactgaatatctttttaggggtaataataacatgtttcttcaattataggatt

SEQ ID NO: 45557 - DNA, 80 bp, synthetic construct
  source 1..80: mol_type = other DNA
actgataatgtaattcggagaccgagtcaataaataatcttgatcaatgatctttgaaaataatgataacatgtcgttca

SEQ ID NO: 45558 - DNA, 80 bp, synthetic construct
  source 1..80: mol_type = other DNA
atagctaagattatcattaattatagatgtagtaggtcactaacataattaaacctatatattcagggaatattataatc

SEQ ID NO: 45559 - DNA, 80 bp, synthetic construct
  source 1..80: mol_type = other DNA
aattgtttactaatgagttatacgggtttataattagtatcagggtaatttactaatgagttaatcagggtctaactgga

SEQ ID NO: 45560 - DNA, 80 bp, synthetic construct
  source 1..80: mol_type = other DNA
tcattatatcatatatttgaattattacccaatatatcactagatatgcatagatttatgttttagtactttatttagtg

SEQ ID NO: 45561 - DNA, 80 bp, synthetic construct
  source 1..80: mol_type = other DNA
tggggattcaacttgatcagaggataatcctactgtacatgttggagtggggaaaagaaatggtggatcatttccatctt

SEQ ID NO: 45562 - DNA, 80 bp, synthetic construct
  source 1..80: mol_type = other DNA
ggtgatgatatggatcctgagctcaggggccttgctcagtcactcatagatcagaaagtaaaagaaatatcaaatcagga

SEQ ID NO: 45563 - DNA, 80 bp, synthetic construct
  source 1..80: mol_type = other DNA
gcccttaaagatatgattaaatcaagtttattactaatcataggtatagtatattgctaatcttagattatcccatatat

SEQ ID NO: 45564 - DNA, 80 bp, synthetic construct
  source 1..80: mol_type = other DNA
tcagggatttattaattgtttactaattcaaatatacgggtttgacaattattagtatcagggttttgaattaatgcact

SEQ ID NO: 45565 - DNA, 80 bp, synthetic construct
  source 1..80: mol_type = other DNA
aatcagggtttaactggaattacacaattacaattacatatcaaattatagatttactacaggagttactaatgacagtt

SEQ ID NO: 45566 - DNA, 80 bp, synthetic construct
  source 1..80: mol_type = other DNA
atgaatgtaatatcatagtatatttttgtaatcaatatccaattagcattatatatgtatagatttatagtttactattc

SEQ ID NO: 45567 - DNA, 80 bp, synthetic construct
  source 1..80: mol_type = other DNA
cccttctttttcaccactatctctcttactttctacctcagtgtacttatatatatgcaagtagcatatatataagtaca

SEQ ID NO: 45568 - DNA, 80 bp, synthetic construct
  source 1..80: mol_type = other DNA
acaagcgaggcaacaaacagtgtcagcattggaggacaaactcgcagactacaagagaagaatggcagatgctgtgtccc

SEQ ID NO: 45569 - DNA, 80 bp, synthetic construct
  source 1..80: mol_type = other DNA
aattcccatcattttaaaggctctatacatgttgtcaacacgtggaagacagaccgtgaaagaaaacaagggaacacgga

SEQ ID NO: 45570 - DNA, 80 bp, synthetic construct
  source 1..80: mol_type = other DNA
aagtgcgtaatatcatgagtccagtgatgggagtgattggtttttctttttttgtcaaagactggccagagaggattagg

SEQ ID NO: 45571 - DNA, 80 bp, synthetic construct
  source 1..80: mol_type = other DNA
aaaccagaagttaagcccgggacaccagcacaggagatagaatttttgaaaaggaatagggtttatttcatgacccgcca

SEQ ID NO: 45572 - DNA, 80 bp, synthetic construct
  source 1..80: mol_type = other DNA
agatgttcttgacaaaaatcatgtggctgacattgataagttaattgactatgctgcctctggtgaccctacatcacctg

SEQ ID NO: 45573 - DNA, 80 bp, synthetic construct
  source 1..80: mol_type = other DNA
tatggatacgttaaaatatataacgtatttttaaaacttaggaaccaagacaaacacttttggtcttggtattggatcct

SEQ ID NO: 45574 - DNA, 80 bp, synthetic construct
  source 1..80: mol_type = other DNA
tctatggggattagaccaaacagccattatatccttcgatctggactattaaaatacaatctatcagatggggagaaccc

SEQ ID NO: 45575 - DNA, 80 bp, synthetic construct
  source 1..80: mol_type = other DNA
ataattaatatacatgagtgtaggcgattaggggatttagggaagaatatgagtcaatctaaatggtatgagtgtttttt

SEQ ID NO: 45576 - DNA, 80 bp, synthetic construct
  source 1..80: mol_type = other DNA
tctgggggctaattgatcccttgttccctgtcatgggaaacagaatttacaatatagtgtctatgatagagcctttagtt

SEQ ID NO: 45577 - DNA, 80 bp, synthetic construct
  source 1..80: mol_type = other DNA
aggatcctgaggggtgcatttctgcatcactgcataaaggaaatgcatcaagaattgagtgagtgtggttttacagatca

SEQ ID NO: 45578 - DNA, 80 bp, synthetic construct
  source 1..80: mol_type = other DNA
ggggaatctttgaccattgatgactgtgtcaagaattgggaatcattctgtgggattcaatttgattgtttcatggagct

SEQ ID NO: 45579 - DNA, 80 bp, synthetic construct
  source 1..80: mol_type = other DNA
tactttaaaggggtcactaccaatgtgaaagacaaaaagaataactcttttaataaggttaaatctgctctcaataatcc

SEQ ID NO: 45580 - DNA, 80 bp, synthetic construct
  source 1..80: mol_type = other DNA
aaggggaagaacctatagaacagagtggcagacagtcagttaccttcaaaagggagatgagtatttcatcccttgctaac

SEQ ID NO: 45581 - DNA, 80 bp, synthetic construct
  source 1..80: mol_type = other DNA
atggggacaatgaagagtgttggtatgaagcttggtacctagcgtctcagagggtaaacatagacttagatgtattgaaa

SEQ ID NO: 45582 - DNA, 80 bp, synthetic construct
  source 1..80: mol_type = other DNA
ggggaatcagagaagaagaataatcaagacctcaaacctgctcaaaatgaccttgatttcgtcagagctgatgtgtgacg

SEQ ID NO: 45583 - DNA, 80 bp, synthetic construct
  source 1..80: mol_type = other DNA
ggcaatcaatttctttttacaattcaggtatagatggagattatataccaggtcaaagagaactgaaactatttccctct

SEQ ID NO: 45584 - DNA, 80 bp, synthetic construct
  source 1..80: mol_type = other DNA
ctgacggggaaattgaaaggactagtggtgcccctattcaatggaagaccagaaacaacatggatcgggaatttagactc

SEQ ID NO: 45585 - DNA, 80 bp, synthetic construct
  source 1..80: mol_type = other DNA
atcataaataggacagcggggcgaagtataggtcttgtccattctgacatggagtctgggattgacaaaaatgtagagga

SEQ ID NO: 45586 - DNA, 80 bp, synthetic construct
  source 1..80: mol_type = other DNA
accttccaaatccaagaccaactgataacttatgttgatctaaggttcagttattaagaaaaacttaataacgattcttc

SEQ ID NO: 45587 - DNA, 80 bp, synthetic construct
  source 1..80: mol_type = other DNA
cggggctctcattagaagtctcctcaatgacccagacattgaagctgtaataatagatgttggatcaatggtcaacggaa

SEQ ID NO: 45588 - DNA, 80 bp, synthetic construct
  source 1..80: mol_type = other DNA
atgataccagggaaagggaaaggagaaagaaaggggaaaaataatcctgagcttaaaccagtgataggaagagacattct

SEQ ID NO: 45589 - DNA, 80 bp, synthetic construct
  source 1..80: mol_type = other DNA
tatggggcagctgtacagttgagagaagatcttattcttcctgaacttaattttgaggagacaaatgcatctcaatttgt

SEQ ID NO: 45590 - DNA, 80 bp, synthetic construct
  source 1..80: mol_type = other DNA
ggggatccagggaagcctcgataaagatggcttcaaggttgcctccttcatgctacacttggggaactttgtccgtcgtg

SEQ ID NO: 45591 - DNA, 80 bp, synthetic construct
  source 1..80: mol_type = other DNA
taatattgattttgatgatctcggagtgtagtgttgggattctacattatgagaaattgagtaaaattggacttgtcaaa

SEQ ID NO: 45592 - DNA, 80 bp, synthetic construct
  source 1..80: mol_type = other DNA
atttcatattggtaaggaatacattaatatcaaatatagagattggattttgcctaattacaaagaggagcgtgatctgc

SEQ ID NO: 45593 - DNA, 80 bp, synthetic construct
  source 1..80: mol_type = other DNA
ccagatttgcactatctaacggggttctgtttgccaattgcataagtgttacatgtcagtgtcaaacaacaggcagggca

SEQ ID NO: 45594 - DNA, 80 bp, synthetic construct
  source 1..80: mol_type = other DNA
cagcttagggaaatatctggggtcagtaaattataattctgaaggcattgctatcggtcctccagtctttacagataaag

SEQ ID NO: 45595 - DNA, 80 bp, synthetic construct
  source 1..80: mol_type = other DNA
gacctacaagcagtggggatctctactacattgggacatagtgtattcagattgatgaaattatgttagagaaatcagaa

SEQ ID NO: 45596 - DNA, 80 bp, synthetic construct
  source 1..80: mol_type = other DNA
tgggtaggggaaggaaagtattgttgacgtactgattgatctgcttgagtcaaataatcagtcataacaattcaagaaaa

SEQ ID NO: 45597 - DNA, 80 bp, synthetic construct
  source 1..80: mol_type = other DNA
ataggccacagacagaaggggtgagcaatctagtaggattacctaataatatttgcctgcaaaagacatctaatcagata

SEQ ID NO: 45598 - DNA, 80 bp, synthetic construct
  source 1..80: mol_type = other DNA
caagaggggtctccaaacaaagaataataggagttggagaggtactagacagaggtgatgaagttccttctttatttatg

SEQ ID NO: 45599 - DNA, 80 bp, synthetic construct
  source 1..80: mol_type = other DNA
gggggttacaatcaacatcaacttgccctacgaagtatcgagaaagggaggtatgataaagttatgccgtatggaccttc

SEQ ID NO: 45600 - DNA, 80 bp, synthetic construct
  source 1..80: mol_type = other DNA
cgactgctatgagtagcttctttttgtcctccctagtgaagaaccgtccactcatggcagccatgttgggcttttcaaac

SEQ ID NO: 45601 - DNA, 80 bp, synthetic construct
  source 1..80: mol_type = other DNA
tgcagttctgggaccaggcatgatcagtgctgttcgaactagactttatgagccaacaatgagggagctttaccaggagt

SEQ ID NO: 45602 - DNA, 80 bp, synthetic construct
  source 1..80: mol_type = other DNA
ggtcaaagcctctggactctacagctcaaccattgaagaacaaatagtggaaattcataggagagttctcctagaaggca

SEQ ID NO: 45603 - DNA, 80 bp, synthetic construct
  source 1..80: mol_type = other DNA
ccagtcctccatgaaagctgaggaacttacacccggacggtttcgtacaattgtatgtggcttattccctacacagatac

SEQ ID NO: 45604 - DNA, 80 bp, synthetic construct
  source 1..80: mol_type = other DNA
aactccgatgccaaaatcccgaggcatccctattaaaaagggcacagacgagaaatatccatctgctgggacggaaaacg

SEQ ID NO: 45605 - DNA, 80 bp, synthetic construct
  source 1..80: mol_type = other DNA
atactctgcagtcagctttacctctcttactctgccattcacaactgtaaccatcaatcatgtttattcaactgcttata

SEQ ID NO: 45606 - DNA, 80 bp, synthetic construct
  source 1..80: mol_type = other DNA
tcttcctccactcggcctcagttaggacgccctccccactgttaccaacatgaagctgctcgcagcaactgtgctactca

SEQ ID NO: 45607 - DNA, 80 bp, synthetic construct
  source 1..80: mol_type = other DNA
tcaccatctgcagccttgaaggagctttggttcggagacagtcaaaggagccatgtgtggagagcctggtttctcagtac

SEQ ID NO: 45608 - DNA, 80 bp, synthetic construct
  source 1..80: mol_type = other DNA
cttgaaggagctttggttcggagacagtcaaaggagccatgtgtggagagcctggtttctcagtacttccagaccgttac

SEQ ID NO: 45609 - DNA, 80 bp, synthetic construct
  source 1..80: mol_type = other DNA
tttccaactaccaacaggctgctctcaagtggaggaaagacataggcttccgtgttaatgcaaacacagcggctttgagt

SEQ ID NO: 45610 - DNA, 80 bp, synthetic construct
  source 1..80: mol_type = other DNA
gaatagaaaggacagttatctatgtagcggacactaatagccaccctaatattgacaaaaacattgagttggaagaaact

SEQ ID NO: 45611 - DNA, 80 bp, synthetic construct
  source 1..80: mol_type = other DNA
ttgctatcactcaaaaagttcaccctaatcttccctacaaggttaaaaaagagatctgtgcaaaacaagctcagctttac

SEQ ID NO: 45612 - DNA, 80 bp, synthetic construct
  source 1..80: mol_type = other DNA
attcatatgaaagataataacatggaaattgtaatgaacccaaatcttgtctgcatttacaaaaatgataaggatggaaa

SEQ ID NO: 45613 - DNA, 80 bp, synthetic construct
  source 1..80: mol_type = other DNA
aggggcaacacctagaagtaatgtaagtctgttattttagataacagtatatgaatggcatgggtctagacaacttgatc

SEQ ID NO: 45614 - DNA, 80 bp, synthetic construct
  source 1..80: mol_type = other DNA
tggggacccgtccgatcagggtttagagcatcctttccctttggggaaattcccggagaaagaagaaactcctgatgtac

SEQ ID NO: 45615 - DNA, 80 bp, synthetic construct
  source 1..80: mol_type = other DNA
gaggggtggcccgaataagagatgatttgattctgcctgaactcaacttcagtgagacaaatgcatcacaatttgttcct

SEQ ID NO: 45616 - DNA, 80 bp, synthetic construct
  source 1..80: mol_type = other DNA
gaatgcaggggtagaccccagaatccattaagaaaaacttaggagacaggtataatattctcatacctgcccattcatct

SEQ ID NO: 45617 - DNA, 80 bp, synthetic construct
  source 1..80: mol_type = other DNA
aaggggtgaaataaaacattcacttggttattgtagattgataaattaaccagataaccactttaatcttcattctaaag

SEQ ID NO: 45618 - DNA, 80 bp, synthetic construct
  source 1..80: mol_type = other DNA
ggggcaattacgaaaccttactgagaacgcttggttacgcgaccgaggacttcgacgaccttttagaaagtgatagcata

SEQ ID NO: 45619 - DNA, 80 bp, synthetic construct
  source 1..80: mol_type = other DNA
ttgggtcaacctgttttctaccaagcgtctttttcatgggacactatgattaaatttggagatgtccaaacagttaaccc

SEQ ID NO: 45620 - DNA, 80 bp, synthetic construct
  source 1..80: mol_type = other DNA
ccctggtggatgaaactagatcggcttgtagtaacatcggcactacaatagctaaagctatagaaaatgggttatcaaga

SEQ ID NO: 45621 - DNA, 80 bp, synthetic construct
  source 1..80: mol_type = other DNA
ccgcagctcaaattactgcaggtgtagcattatatgaagcaatgaaaaatgctgacaacatcaacaaactcaaaagcagc

SEQ ID NO: 45622 - DNA, 80 bp, synthetic construct
  source 1..80: mol_type = other DNA
agcagcagatcaaggggcttgccgacaaaattggcacagagatagggccgaaagtatcactgattgatacatccagtact

SEQ ID NO: 45623 - DNA, 80 bp, synthetic construct
  source 1..80: mol_type = other DNA
atagccgcctggaaaaaatcggatcatgttcaagaggggtctccaaacaaagaataataggagttggagaggtactagac

SEQ ID NO: 45624 - DNA, 80 bp, synthetic construct
  source 1..80: mol_type = other DNA
tattttcgtcgatgatcttctgtcaataatgaatattgacaacatacatctactagctgagttcttttcattcttccgga

SEQ ID NO: 45625 - DNA, 80 bp, synthetic construct
  source 1..80: mol_type = other DNA
catttggtcaccctattcttgaagccaaaactgcagcggacaaggttagagaacatatgctagcagacaaagtacttgag

SEQ ID NO: 45626 - DNA, 80 bp, synthetic construct
  source 1..80: mol_type = other DNA
ttaggggtgctattgagctgtacaataacaacacacatgacttaattggtgatgttaagcttgctggtgtagtgatggca

SEQ ID NO: 45627 - DNA, 80 bp, synthetic construct
  source 1..80: mol_type = other DNA
accgaacaaggggaaatatggatacgtgttaaaaaactgcttatgtctaaaacttaggaaccaagacagtgataattggt

SEQ ID NO: 45628 - DNA, 80 bp, synthetic construct
  source 1..80: mol_type = other DNA
atcaagtccaattagctgatgaggacacaaatgcgcaaaggacgattacagattgttttttgttagataatgttatatgg

SEQ ID NO: 45629 - DNA, 80 bp, synthetic construct
  source 1..80: mol_type = other DNA
tgcatatcactggtggaaatatatgatacaggggatagtgtgataagaccgaaattatttgcagttaagatacctgctca

SEQ ID NO: 45630 - DNA, 80 bp, synthetic construct
  source 1..80: mol_type = other DNA
gttcagggaattgattaattaagaagataataagtattatgttataactatatcggtcaaattatgattatctttttaat

SEQ ID NO: 45631 - DNA, 80 bp, synthetic construct
  source 1..80: mol_type = other DNA
gtaatatacaataagtcgggaattcctttagaagagtactaaatgtaatgagacttagttagcctgtgaataatgacagt

SEQ ID NO: 45632 - DNA, 80 bp, synthetic construct
  source 1..80: mol_type = other DNA
gtatagagattgtgtagatttttgtataattccttgcataattcctaaacacttgaaagcaataaatctgttattctgta

SEQ ID NO: 45633 - DNA, 80 bp, synthetic construct
  source 1..80: mol_type = other DNA
cacttcaaatgaatgctatgattgatctaacaaatttatcagataatcctattaatgacaagccaaaagatattctcaca

SEQ ID NO: 45634 - DNA, 80 bp, synthetic construct
  source 1..80: mol_type = other DNA
caatttcctcaaggagaagacaacaggcaatacaccaatctagtctagtgaacgtgacctgtcaattgcaattgttctct

SEQ ID NO: 45635 - DNA, 80 bp, synthetic construct
  source 1..80: mol_type = other DNA
ctcaaggagtttaaaacatcaatatccattatatactcattgctttatttttaaattatcctattgctcttagataatct

SEQ ID NO: 45636 - DNA, 80 bp, synthetic construct
  source 1..80: mol_type = other DNA
ctgttctctggtcttattacatcttgatttttttagtcagttaagaaaaacttaggacccaagtcctttaaacgtgcacg

SEQ ID NO: 45637 - DNA, 80 bp, synthetic construct
  source 1..80: mol_type = other DNA
actgaaatattctaaggttgaaactaatcaaaacactagtgagttaatctaaaatagtagtattagatcatctagtatcc

SEQ ID NO: 45638 - DNA, 80 bp, synthetic construct
  source 1..80: mol_type = other DNA
tattcctcttatactgtattggaatttgtatgcaagataagaaaacatggctcatgaactatctatctctgatatcatct

SEQ ID NO: 45639 - DNA, 80 bp, synthetic construct
  source 1..80: mol_type = other DNA
atcaaccgagtggagacaaaagattaactgaaaatattaagattaacttacaaagcaaaagaagaagtgtatacatatcc

SEQ ID NO: 45640 - DNA, 80 bp, synthetic construct
  source 1..80: mol_type = other DNA
attcatatgaaggacaagaacatggaaattgtgatgaatccaaatttaatctgcatttacaagaatgataaagacaacaa

SEQ ID NO: 45641 - DNA, 80 bp, synthetic construct
  source 1..80: mol_type = other DNA
tggaggggcctggcctccacttcatttaccaccacatacgtcaaaacacataataagacttaaaaactccggtgagtcct

SEQ ID NO: 45642 - DNA, 80 bp, synthetic construct
  source 1..80: mol_type = other DNA
taacagttgatgattgtgttaagaattgggagtcattttgtggaattcaatttgattgctttatggagttgaaattagat

SEQ ID NO: 45643 - DNA, 80 bp, synthetic construct
  source 1..80: mol_type = other DNA
actcaaaaaaacaacaaataagctcctagataatgaatctccatgtcgaatcaatatcatgtcagctttaatcgatagga

SEQ ID NO: 45644 - DNA, 80 bp, synthetic construct
  source 1..80: mol_type = other DNA
accagtcagaccaaaaaagacatcacattcacccaaatacgcgaaatcgccacaaatgcaataacacaagtaagacattc

SEQ ID NO: 45645 - DNA, 80 bp, synthetic construct
  source 1..80: mol_type = other DNA
ggaggagtacttgttggaggtggtgagcaagacattgatgaggatgaggaaccaatcgaacacagtggaaggcaatctgt

SEQ ID NO: 45646 - DNA, 80 bp, synthetic construct
  source 1..80: mol_type = other DNA
aggggttaataagatcaggactgagaaagagtgggatacaacctaaattggtatctagactgtccaaccatgattataat

SEQ ID NO: 45647 - DNA, 80 bp, synthetic construct
  source 1..80: mol_type = other DNA
ataatatcaatagtctcataacagagttcttgatagtagatcctgagcttttcgctctttatttaggtcaatcaatttca

SEQ ID NO: 45648 - DNA, 80 bp, synthetic construct
  source 1..80: mol_type = other DNA
ccgccctcaagcagattcaagagggaaagaagaccaggaatctaaacctgctcagaacgatctagattttgtcagagcag

SEQ ID NO: 45649 - DNA, 80 bp, synthetic construct
  source 1..80: mol_type = other DNA
gtgttcaatctaagctcgaaattgtcagttgagaatcataagtatagaagggtagggttaaactcatcctcttgttacaa

SEQ ID NO: 45650 - DNA, 80 bp, synthetic construct
  source 1..80: mol_type = other DNA
agcattaaacctgtcaccattgatccaacgctacctgcctgcgggctcacaaagattgttcataggtgaaggatcaggaa

SEQ ID NO: 45651 - DNA, 80 bp, synthetic construct
  source 1..80: mol_type = other DNA
acgtgtgacgtctaatcagaatctcacacaagttccaaatcatcctctatgacacactctcacgagcagactctagagag

SEQ ID NO: 45652 - DNA, 80 bp, synthetic construct
  source 1..80: mol_type = other DNA
gatttcctgtgtccaggttactgaatatgtaccgttcctactttggattagttttagtgtgttttccagtatacagtaat

SEQ ID NO: 45653 - DNA, 80 bp, synthetic construct
  source 1..80: mol_type = other DNA
ccggagtctacagaagtgtatctcatctgtttacagaaaacaataaaaaccataattccgccacaaaaagtccttgaaca

SEQ ID NO: 45654 - DNA, 80 bp, synthetic construct
  source 1..80: mol_type = other DNA
ttcatgaggatctagtaaaacattaccaagtcgaacaacctttctttgtccctggtcgcatcacaagtgatgaaaaactg

SEQ ID NO: 45655 - DNA, 80 bp, synthetic construct
  source 1..80: mol_type = other DNA
cttatacaggctggcttgaaaatgaacgggccagagatcttgaagaatgaggtaggatatgacgtgggatcagacatcag

SEQ ID NO: 45656 - DNA, 80 bp, synthetic construct
  source 1..80: mol_type = other DNA
tagatcgagtttggattgtgaacttgcatcacaatacacattaatctcttaacaaatcacttacactatccgtacatgat

SEQ ID NO: 45657 - DNA, 80 bp, synthetic construct
  source 1..80: mol_type = other DNA
tatcatgggaagagtcacgagaaaagtgatagtttattctcttgtaaaattgaaggaaaccaaaagtcctgaactatata

SEQ ID NO: 45658 - DNA, 80 bp, synthetic construct
  source 1..80: mol_type = other DNA
ggatatttgacctgtctaatagagaagtcaaaatctggtggaagattataggctacctttccttagcttgaaccaatcct

SEQ ID NO: 45659 - DNA, 80 bp, synthetic construct
  source 1..80: mol_type = other DNA
ccacacccatcaccagcagagtcagaagagattatccttgatctatcattaagaaaaacttaacaacgatctctctttac

SEQ ID NO: 45660 - DNA, 80 bp, synthetic construct
  source 1..80: mol_type = other DNA
accagcagagtcagaagagattatccttgatctatcattaagaaaaacttaacaacgatctctctttacccttgttcggt

SEQ ID NO: 45661 - DNA, 80 bp, synthetic construct
  source 1..80: mol_type = other DNA
aaatacgaattaccaataatttatcctttgataaagatcacttaaaagctatgcttaatcttcaactttgagtagtcata

SEQ ID NO: 45662 - DNA, 80 bp, synthetic construct
  source 1..80: mol_type = other DNA
tcgcaacagatatacttagatcttctcagaatatttaatgcgacagatcccagtagtattaaatctctctggtgacggaa

SEQ ID NO: 45663 - DNA, 80 bp, synthetic construct
  source 1..80: mol_type = other DNA
cacaaatgcaaatttctcttcaaatggtgctccaatttaaggatccttttgccgaataagctgccaactatgcactgaaa

SEQ ID NO: 45664 - DNA, 80 bp, synthetic construct
  source 1..80: mol_type = other DNA
aacataatgaactttacctcatgtacaacagggagatgcaagcctgtgttgacaacatctatccttacccgcaacaagtc

SEQ ID NO: 45665 - DNA, 80 bp, synthetic construct
  source 1..80: mol_type = other DNA
tggaataacacctaggagtaatacaaatctatcatactaggtaacaatatataattagtataggcctgtgtgacttgatc

SEQ ID NO: 45666 - DNA, 80 bp, synthetic construct
  source 1..80: mol_type = other DNA
ggtatattaagaaaaacttaggatccaagactataaatctaggatctcttgcaatcttgacccttggcaaaagaccatat

SEQ ID NO: 45667 - DNA, 80 bp, synthetic construct
  source 1..80: mol_type = other DNA
acaaagttcaattctcttaatcaaacggtatttctgactaataaatggacaagctggatttagttaatgatggcctcaat

SEQ ID NO: 45668 - DNA, 80 bp, synthetic construct
  source 1..80: mol_type = other DNA
gcagagcaccggtggagaacatgaacaggctgaggggagagtgtctaagaatgatggaagtactgaaggaagaggtgtgg

SEQ ID NO: 45669 - DNA, 80 bp, synthetic construct
  source 1..80: mol_type = other DNA
tcagcagaactaaatcctaccgcagtcccctttgtgcctaagaatcaatccacccctgtcgaagagcctctggtagtccc

SEQ ID NO: 45670 - DNA, 80 bp, synthetic construct
  source 1..80: mol_type = other DNA
agaatattactacgggactggaaggaagggagatctatcaacatcttctcctaaaggtaatgtcaatttgggcagcatca

SEQ ID NO: 45671 - DNA, 80 bp, synthetic construct
  source 1..80: mol_type = other DNA
aacaaaaggacattcatctaatcaagatctagagcatcctttcctcttcgaaaaatcctccagggagaaagaaacctctg

SEQ ID NO: 45672 - DNA, 80 bp, synthetic construct
  source 1..80: mol_type = other DNA
gcatacatggagaaagatcctcaatacaagacagtcgcaaaaaagaaggaatgctgaaaagactgcccatgctgtccgaa

SEQ ID NO: 45673 - DNA, 80 bp, synthetic construct
  source 1..80: mol_type = other DNA
ggggtcaacttgatcgccagctgaacacaaacgattcaacaccttttggaggtgtccaaagaccaggcacaccaatgccc

SEQ ID NO: 45674 - DNA, 80 bp, synthetic construct
  source 1..80: mol_type = other DNA
aagtccaagcccatgcccattaaaaggggcacaggcgcgaaatctcagtatgttgggatggaagacgtgcctgggtcgaa

SEQ ID NO: 45675 - DNA, 80 bp, synthetic construct
  source 1..80: mol_type = other DNA
tgctctcagtgctgccaagacgagtgaagggcaagatctagatgccacagataatgatgatagcctagatgacaagtata

SEQ ID NO: 45676 - DNA, 80 bp, synthetic construct
  source 1..80: mol_type = other DNA
ttgataacctcaaaaacttcagagacggttcattgaccgacgaaccttatggaggggcagcccgaatgagagatgatctg

SEQ ID NO: 45677 - DNA, 80 bp, synthetic construct
  source 1..80: mol_type = other DNA
attttgcccgaacttaatttcagtgagacaaatgcatcacagttcattcctttggcagatgatgcatccaaggatgtcgt

SEQ ID NO: 45678 - DNA, 80 bp, synthetic construct
  source 1..80: mol_type = other DNA
caagaagtagctaatacagtcaatgatattattgatggaaacatctaagtttgtccatgtaccattgaagaggtaatcag

SEQ ID NO: 45679 - DNA, 80 bp, synthetic construct
  source 1..80: mol_type = other DNA
actaaaattatatatcagaggcatacatcataacggccggtgtctcaatttaaacgattcacgaacaatcagtgttgctc

SEQ ID NO: 45680 - DNA, 80 bp, synthetic construct
  source 1..80: mol_type = other DNA
tagtaagccttcttatatagttcatcaatacctacaacctctgttcattaaatagttaatctatattaggctattatatg

SEQ ID NO: 45681 - DNA, 80 bp, synthetic construct
  source 1..80: mol_type = other DNA
ggggacaaggcacaagaagaaatggaaggtctgatgaggattttgaaaactgcacgtgagagcagcaaggggaaaacccc

SEQ ID NO: 45682 - DNA, 80 bp, synthetic construct
  source 1..80: mol_type = other DNA
attaatatgatcgatataattcttactttattgactaattttcaccatttaacagcaattcagatcaatttctaagatcc

SEQ ID NO: 45683 - DNA, 80 bp, synthetic construct
  source 1..80: mol_type = other DNA
gagttgcattaagtaatctcacttatcatatcactcacttaatgtatagtctagtgttgaactacatctagttagaatca

SEQ ID NO: 45684 - DNA, 80 bp, synthetic construct
  source 1..80: mol_type = other DNA
gatgttcaagcaatcaaatattatattgattataaggatagcaaatcatttctgcacagataggtctacactaatcattc

SEQ ID NO: 45685 - DNA, 80 bp, synthetic construct
  source 1..80: mol_type = other DNA
gaatgcaaaatttgattctagaatccattaagaaaaacttaggagacaggtacaatatccctatacctgttttcttatct

SEQ ID NO: 45686 - DNA, 80 bp, synthetic construct
  source 1..80: mol_type = other DNA
tggactcgaagagggattactatctgactgtctccaaaacgtatccagaggatcgaggtaatggatttaagtatgaatga

SEQ ID NO: 45687 - DNA, 80 bp, synthetic construct
  source 1..80: mol_type = other DNA
tgactttgatgactcagtagagggtgtttcagattttagtcctacttcctgggagaatggagggtatttagataaagtgg

SEQ ID NO: 45688 - DNA, 80 bp, synthetic construct
  source 1..80: mol_type = other DNA
gactattgctgcataccctcttggtgttggtaagagtacttctcacccccaagaccttttagaagaactatgctctttga

SEQ ID NO: 45689 - DNA, 80 bp, synthetic construct
  source 1..80: mol_type = other DNA
gctggtgctacagagaaagttgtgtttggatcctcaggcccccttcaccatctcttaccatggaaaaaagttttgactgg

SEQ ID NO: 45690 - DNA, 80 bp, synthetic construct
  source 1..80: mol_type = other DNA
attggcggtttaagtctacacatcaaaatcaatggggtgattagcaagagattatttgcccagatgggtttccagaagaa

SEQ ID NO: 45691 - DNA, 80 bp, synthetic construct
  source 1..80: mol_type = other DNA
cttgaaaagttgagatgaaaaattcatctggttgttacacaataacaggccagccagatagatgcatcaacattcatccc

SEQ ID NO: 45692 - DNA, 80 bp, synthetic construct
  source 1..80: mol_type = other DNA
aagcaacatcataatacaagcaaaacacatagacactacacataatcaaaactcatgtcttgcaccctgcaaagcagcca

SEQ ID NO: 45693 - DNA, 80 bp, synthetic construct
  source 1..80: mol_type = other DNA
agactcttaaaatagcagaggatagtatcaaatatatcccatattaagaaaaacttaggagccaagtcttggtctcttaa

SEQ ID NO: 45694 - DNA, 80 bp, synthetic construct
  source 1..80: mol_type = other DNA
aggcaaccagggcatccgtcaatccatctctaaaagtccatcaaaacactctacatctatcctctgtagatccacacaag

SEQ ID NO: 45695 - DNA, 80 bp, synthetic construct
  source 1..80: mol_type = other DNA
ctgtggatatactcagctgatcgatttgacagaccacatctaggacagttagggttaaaaattacttgtcctgacggcag

SEQ ID NO: 45696 - DNA, 80 bp, synthetic construct
  source 1..80: mol_type = other DNA
taatatttgaatagatactacattgatttcatctgtattgtttaaaaataatcagaatcgactcacagttgttgttcatc

SEQ ID NO: 45697 - DNA, 80 bp, synthetic construct
  source 1..80: mol_type = other DNA
cttgaataatggccacacaaagagtcaaggtaagctatttgatctgtgggatagtaatttcggccttatcactagaagga

SEQ ID NO: 45698 - DNA, 80 bp, synthetic construct
  source 1..80: mol_type = other DNA
caatcaggggaacagacattactgatgattgacaacaccacctgcaccacagttgttctgggaaacataatcatcagtct

SEQ ID NO: 45699 - DNA, 80 bp, synthetic construct
  source 1..80: mol_type = other DNA
tatattggaacataaagtacactataaccaagtcgattgttttacttttgttgataatacgggtaatatttagtgattaa

SEQ ID NO: 45700 - DNA, 80 bp, synthetic construct
  source 1..80: mol_type = other DNA
ctgtttaatcattcacacgacttttatatatattctcttattaccattaataacatacctgccaaatatttcaatcttat

SEQ ID NO: 45701 - DNA, 80 bp, synthetic construct
  source 1..80: mol_type = other DNA
aggacaaaagtgactaattcttggattgtataaattttataggctgtatatgcataaaacgacttctattttccaaagag

SEQ ID NO: 45702 - DNA, 80 bp, synthetic construct
  source 1..80: mol_type = other DNA
attacataattgtgttattttgtcataattcatataatgattgtttaatcatatcggtcagcacatttattcagatcaat

SEQ ID NO: 45703 - DNA, 80 bp, synthetic construct
  source 1..80: mol_type = other DNA
tgaaaatggtttccccaatcttgtgtaatattaaacagataaagaccaatcatgtcctaaatcataagccgtgtcatcaa

SEQ ID NO: 45704 - DNA, 80 bp, synthetic construct
  source 1..80: mol_type = other DNA
ttattttggtagataaagagattttacaaaaaacttaggatccaggtccttaattacatctcaatgttaagaaaaattat

SEQ ID NO: 45705 - DNA, 80 bp, synthetic construct
  source 1..80: mol_type = other DNA
acagacattctaattgttgatctattgtgataagtacttggttaagttcaaatatcagtcatcaggaatctgctgttaaa

SEQ ID NO: 45706 - DNA, 80 bp, synthetic construct
  source 1..80: mol_type = other DNA
ttggttcattaattggaattaagggaagctgagatctaacagttacgaatttcttgcttttttgaaagattatctcaagt

SEQ ID NO: 45707 - DNA, 80 bp, synthetic construct
  source 1..80: mol_type = other DNA
gcaaaaaaattatagggtctaagattggtgtaatggccgaatccaaagtagtgagaccaagtagtagtttatctagcaag

SEQ ID NO: 45708 - DNA, 80 bp, synthetic construct
  source 1..80: mol_type = other DNA
gactattagatagcaagatacttggagcatttaacacagtgatagctctattaggatctattatcatcattgtgatgaat

SEQ ID NO: 45709 - DNA, 80 bp, synthetic construct
  source 1..80: mol_type = other DNA
tttcacaaggagtaagtgatcttgtaggattgccgaaccaaatctgtttacaaaggacaacatcaacaatcttgaagccc

SEQ ID NO: 45710 - DNA, 80 bp, synthetic construct
  source 1..80: mol_type = other DNA
ggtttgcatcactgatccgctcttgactattgataatggtttctttgcctatagtcatctcgagaagattggatcatgta

SEQ ID NO: 45711 - DNA, 80 bp, synthetic construct
  source 1..80: mol_type = other DNA
gggtaggtgaagtattggataggggtgataaagtaccatcaatgtttatgactaatgtctggactccacctaatccaagc

SEQ ID NO: 45712 - DNA, 80 bp, synthetic construct
  source 1..80: mol_type = other DNA
gatgatttttattatacattatgtgcagtatcccatgtgggagaccccatactcaatggcacctcatggatagagtcact

SEQ ID NO: 45713 - DNA, 80 bp, synthetic construct
  source 1..80: mol_type = other DNA
gttcgtgattcgacttgctgtgaggccgaaaaccgatggagggggttacaatcaaaaatacatcactatgactaagatag

SEQ ID NO: 45714 - DNA, 80 bp, synthetic construct
  source 1..80: mol_type = other DNA
caaggagatacattgtatttcccggctgttggtttcttgcctagaaccgagtttcaatataatgattctaattgccccat

SEQ ID NO: 45715 - DNA, 80 bp, synthetic construct
  source 1..80: mol_type = other DNA
gtttcttcaattataggattactgataatgtaattcggagaccgagtcaataaataatcttgatcaatgatctttgaaaa

SEQ ID NO: 45716 - DNA, 80 bp, synthetic construct
  source 1..80: mol_type = other DNA
attttcttgagaaatcatttaatttcttacagactgaagacgttattacctatttttttaggggaaatcttattagaatt

SEQ ID NO: 45717 - DNA, 80 bp, synthetic construct
  source 1..80: mol_type = other DNA
gatctacattatctaattctcctaaaaattgactaccaaaaaacaaagatggccgatgaattatccatatctgacatcat

SEQ ID NO: 45718 - DNA, 80 bp, synthetic construct
  source 1..80: mol_type = other DNA
aaattaaaccatgtaaataattgtgacaaattataagtttctttcattttcttaaagtaataatttgatgaatatacaat

SEQ ID NO: 45719 - DNA, 80 bp, synthetic construct
  source 1..80: mol_type = other DNA
atattctctcgcaagagctctaatctatacactccctcttaatattttatactcataattaatgatatgatgataaataa

SEQ ID NO: 45720 - DNA, 80 bp, synthetic construct
  source 1..80: mol_type = other DNA
tttatcatgataatttgaaagtccaacagtgatgtcaactttcatacataagtataatactataaaatggtcgattcata

SEQ ID NO: 45721 - DNA, 80 bp, synthetic construct
  source 1..80: mol_type = other DNA
ttgtagttcattcacgcattttagtgttataaattagtgtttcaaatcagttgcatatcaattaagaaaaacttaggaga

SEQ ID NO: 45722 - DNA, 80 bp, synthetic construct
  source 1..80: mol_type = other DNA
gtacataaaagttaatctcataatttgatggaatgatctggtgcaataatagcaactgtgcaaaggaatgtgatgtgaat

SEQ ID NO: 45723 - DNA, 80 bp, synthetic construct
  source 1..80: mol_type = other DNA
ataatgataacatgtcgttcatcaattgataaccaactctttctatgtacaccttggagcaagtcttgggacttgatata

SEQ ID NO: 45724 - DNA, 80 bp, synthetic construct
  source 1..80: mol_type = other DNA
tccgatttggatatcagaggtaacagtctatacataatcttaacttacgcttcaagcatagtgatgacaattaatgtgaa

SEQ ID NO: 45725 - DNA, 80 bp, synthetic construct
  source 1..80: mol_type = other DNA
cttgtctcaatgtaaagagaatttgatcttgactgaaactccatttgatatagtagagctaaatcttgtaaataaattat

SEQ ID NO: 45726 - DNA, 80 bp, synthetic construct
  source 1..80: mol_type = other DNA
caattatccaagagttgctgaaagagaattcattcataaatagtcaacaagggaaagatgcccagcctctatattacagg

SEQ ID NO: 45727 - DNA, 80 bp, synthetic construct
  source 1..80: mol_type = other DNA
ggcattgagggatcgagaagcccagacaagactgagatcaccagcgatgctgtacaaactgctcacaagcaaaggccagg

SEQ ID NO: 45728 - DNA, 80 bp, synthetic construct
  source 1..80: mol_type = other DNA
tcatttaaatagtgtagctaaaatgtagtttttgtgaatattcggttaataattagacaactattatgaaaaacttagga

SEQ ID NO: 45729 - DNA, 80 bp, synthetic construct
  source 1..80: mol_type = other DNA
gccaagctctcgcctttttcaaaagattaaacaagcattattactatcggatcaacaaaaggattggtttaatcatctaa

SEQ ID NO: 45730 - DNA, 80 bp, synthetic construct
  source 1..80: mol_type = other DNA
gaaatctctcgaaagacaaagagattctaggttttatgttgaaggaagtgtgttaaacctaggagacccttcaacagtca

SEQ ID NO: 45731 - DNA, 80 bp, synthetic construct
  source 1..80: mol_type = other DNA
ggtcgcgggaatacaaacaaagacaaaaacaaaaataaaattgattctgtcagaagattcattccaaaaagtgatcaaat

SEQ ID NO: 45732 - DNA, 80 bp, synthetic construct
  source 1..80: mol_type = other DNA
caaagcagttggtagacctatcaatcatatcccgtaagactcgacaatggcagtcatacttaacaagagatattattcta

SEQ ID NO: 45733 - DNA, 80 bp, synthetic construct
  source 1..80: mol_type = other DNA
ggattgtatgtaattgattagatcatcttggatacttgagataggaatgttgcaactccaaaactaaaccgtgtaaataa

SEQ ID NO: 45734 - DNA, 80 bp, synthetic construct
  source 1..80: mol_type = other DNA
ttgtgacaaattataagtttctttcattttcttaaagtaataatttgatgaatatacaatatattctctcgctagagctc

SEQ ID NO: 45735 - DNA, 80 bp, synthetic construct
  source 1..80: mol_type = other DNA
actcaaccatgaatgaacagttgatattctttttttgaaaaaattataaaaaacttaggacccaggtccataactcattg

SEQ ID NO: 45736 - DNA, 80 bp, synthetic construct
  source 1..80: mol_type = other DNA
gatattaaactgtgtcctttgaagttatcatatatcaggggagaaataaaaggttttttaaggtttttagatcatcataa

SEQ ID NO: 45737 - DNA, 80 bp, synthetic construct
  source 1..80: mol_type = other DNA
tatgtatcttctttaatcacattataggagtgagccacaatatacatctttgagtaaagagaagaaagcattgctggcac

SEQ ID NO: 45738 - DNA, 80 bp, synthetic construct
  source 1..80: mol_type = other DNA
acaagctgacctgccttaattaaataatcacccaaaaaaatcaaagagaatgccgacagaaagcaagaaagttagattcg

SEQ ID NO: 45739 - DNA, 80 bp, synthetic construct
  source 1..80: mol_type = other DNA
aaaatactgcttcagacaaggggaaaaatcctagtaaagttatcaagagctactacggaaccatggacattaagaaaata

SEQ ID NO: 45740 - DNA, 80 bp, synthetic construct
  source 1..80: mol_type = other DNA
cacgtaaatgaattgcaatcttaacttagattaaacataatcatgcaaagtcattattttacactactaactcattaaga

SEQ ID NO: 45741 - DNA, 80 bp, synthetic construct
  source 1..80: mol_type = other DNA
aaccgaccgacaatttatgctggtccaaagttcagttattaagaaaaacttaataacgattcttctttacccttgttcgg

SEQ ID NO: 45742 - DNA, 80 bp, synthetic construct
  source 1..80: mol_type = other DNA
cttgtctggccttaatacatcacgcaggactatttacaaaaaccagcaaaaaaatagaataatcatgtagtagtaattga

SEQ ID NO: 45743 - DNA, 80 bp, synthetic construct
  source 1..80: mol_type = other DNA
accaaacaagggagaatatggatacgttaaaatatataacgtatttttaaaacttaggaaccaagacaaacacttttggt

SEQ ID NO: 45744 - DNA, 80 bp, synthetic construct
  source 1..80: mol_type = other DNA
tatgggggcattaaatattaatcgtggctatcttgagcctatgtatttcagactaggccaaaaatcagcacgtcaccatg

SEQ ID NO: 45745 - DNA, 80 bp, synthetic construct
  source 1..80: mol_type = other DNA
accaactgataacttatgttgatctaatgtttagttattaagaaaaacttaataacgattcctctttacccttgttcggt

SEQ ID NO: 45746 - DNA, 80 bp, synthetic construct
  source 1..80: mol_type = other DNA
ccttaaagatatgaatacccaagtaataacaactaacagtagatagtaataggtagataagttactaacatgcagacata

SEQ ID NO: 45747 - DNA, 80 bp, synthetic construct
  source 1..80: mol_type = other DNA
aataaacatgtagaaaagtgggtagagattagtataaacaaatgtagccaatatattatcagggatttaatcaataagct

SEQ ID NO: 45748 - DNA, 80 bp, synthetic construct
  source 1..80: mol_type = other DNA
aacatgggaattaactggaccgtatagcattaccactaatcggacaatactactaatgacagttatgaatgtagaaattt

SEQ ID NO: 45749 - DNA, 80 bp, synthetic construct
  source 1..80: mol_type = other DNA
attattactgttgcagctattattgaaccagcatttaatctgtgtacctttatgtatgttatgttatttttttgttattc

SEQ ID NO: 45750 - DNA, 80 bp, synthetic construct
  source 1..80: mol_type = other DNA
tcattagtgggcccgtaaaatgtgaaactgagctgtccttttctttattcaccactttatctctacatttctacctcagt

SEQ ID NO: 45751 - DNA, 80 bp, synthetic construct
  source 1..80: mol_type = other DNA
tgagcaacaacttgttgttgccagacaaaagctcagggatgcagaaaaggcagtggagatggacccagatgacgttaaca

SEQ ID NO: 45752 - DNA, 80 bp, synthetic construct
  source 1..80: mol_type = other DNA
caacatactacctcaaatttttaaaaacaacacactacctcttattactacctcatgattttgttgccttttgtcttttt

SEQ ID NO: 45753 - DNA, 80 bp, synthetic construct
  source 1..80: mol_type = other DNA
acatgtctctttattgctgggatggcagagcttggagcattcttttcaatcttacaagacatgagaaataccatcatggc

SEQ ID NO: 45754 - DNA, 80 bp, synthetic construct
  source 1..80: mol_type = other DNA
aactatgaggaagattaataattttcctctcattgaaatttatatcagaatttaaattgaaattgttactgtaatcatac

SEQ ID NO: 45755 - DNA, 80 bp, synthetic construct
  source 1..80: mol_type = other DNA
tacattgtattaggggcaataatatctaattgaacttagccatttaaaatttagtgcataaatctgggctaactccacca

SEQ ID NO: 45756 - DNA, 80 bp, synthetic construct
  source 1..80: mol_type = other DNA
tttcaagaaaaaatcttatcttcaattcagggcaatgaatttttacatcaaatgtttttctggtatgacctggctatttt

SEQ ID NO: 45757 - DNA, 80 bp, synthetic construct
  source 1..80: mol_type = other DNA
ctgattatcccaattttaagattgtgtctatgctttaccagagcggagattacttactctccatattagggtctgatggg

SEQ ID NO: 45758 - DNA, 80 bp, synthetic construct
  source 1..80: mol_type = other DNA
cgttgccaatgattaaagaactgctatgggaattttaccaccttgaccatcctccacttttctcaaccaaaattattagt

SEQ ID NO: 45759 - DNA, 80 bp, synthetic construct
  source 1..80: mol_type = other DNA
gtaccgcaggtgcttggagggttatccttcttgaatcctgagaaatgtttctaccggaatctaggagatccagttacctc

SEQ ID NO: 45760 - DNA, 80 bp, synthetic construct
  source 1..80: mol_type = other DNA
tgtgataatatcctggcggaggctttaacccaaataacttgcacagttgatttagcacagatcctgagggaatattcatg

SEQ ID NO: 45761 - DNA, 80 bp, synthetic construct
  source 1..80: mol_type = other DNA
aataaaaagaacgacaattccacaagagaacacgcaccagggtccgtcgttccagtcatttctaagtgactctgcttgcg

SEQ ID NO: 45762 - DNA, 80 bp, synthetic construct
  source 1..80: mol_type = other DNA
agctactgagtccagtatagagtcagaaatagtatcaggaatgactactcctaggatgcttctacctgttatgtcaaaat

SEQ ID NO: 45763 - DNA, 80 bp, synthetic construct
  source 1..80: mol_type = other DNA
ccatctcagttgtaagcaggtaatacttacggcattgcaactgcaaattcaacggagcccatactggctaagtcatttaa

SEQ ID NO: 45764 - DNA, 80 bp, synthetic construct
  source 1..80: mol_type = other DNA
taaccgtgcatagtattttgatacttgtaaaggttggttatcaacatacagattataaaaaactcataaattgctctcat

SEQ ID NO: 45765 - DNA, 80 bp, synthetic construct
  source 1..80: mol_type = other DNA
tatcttagccagcgatttatctaaattaaattacattatgcttttataacttacctactagcctgcccaacatttacacg

SEQ ID NO: 45766 - DNA, 80 bp, synthetic construct
  source 1..80: mol_type = other DNA
atttgtaaattgggaaaagatagcaattcattggacattattcatgctgagttccaggccagcctggctgaaggagactc

SEQ ID NO: 45767 - DNA, 80 bp, synthetic construct
  source 1..80: mol_type = other DNA
atgcttgcttcatatactatcacccatttcggcaaggcaaccaatccgcttgtcagagtcaatcggctgggtcctggaat

SEQ ID NO: 45768 - DNA, 80 bp, synthetic construct
  source 1..80: mol_type = other DNA
ggctaatgcacaaccaagatggtttaatctgtgggttgaggcagctggccaacgaaacgactcaacctctccaactgttc

SEQ ID NO: 45769 - DNA, 80 bp, synthetic construct
  source 1..80: mol_type = other DNA
aaggagcgcctcacaagtgcgcgttcctactgtatttcataagaagagagttgaaccattaacagttcctccagcaccta

SEQ ID NO: 45770 - DNA, 80 bp, synthetic construct
  source 1..80: mol_type = other DNA
gtcaaaggcaaattcaagtacatgcagagcaaggactgatacaatatccaacagcttggcaatcagtaggacacatgatg

SEQ ID NO: 45771 - DNA, 80 bp, synthetic construct
  source 1..80: mol_type = other DNA
cgcactataacctgccaagcatacctcttgcacaaagtgattcttgtacacaaataatgtttgactctacaggaggtagc

SEQ ID NO: 45772 - DNA, 80 bp, synthetic construct
  source 1..80: mol_type = other DNA
aacccttaaaaatataatcatttaaaggtatattactaaccataggtatagggaattactaataatcagattattaatgt

SEQ ID NO: 45773 - DNA, 80 bp, synthetic construct
  source 1..80: mol_type = other DNA
attcagggattatattgattaattgtttattaatttgagttatacgggttcaaattattatcatcagggttattaattaa

SEQ ID NO: 45774 - DNA, 80 bp, synthetic construct
  source 1..80: mol_type = other DNA
tgcactaatcagggtataactggagccatataatcataaatacatatcacttgtagcattaagtacagtgaaagactaat

SEQ ID NO: 45775 - DNA, 80 bp, synthetic construct
  source 1..80: mol_type = other DNA
aacagttatgaatgtattaatctagtatattgttcaaatcaatatccaattagcattatatatgtatgaatttatatttt

SEQ ID NO: 45776 - DNA, 80 bp, synthetic construct
  source 1..80: mol_type = other DNA
tgagcagcaacttgttgttgcaagacagaagcttaaggatgcagagagagcagtggaagtggacccagatgacgttaaca

SEQ ID NO: 45777 - DNA, 80 bp, synthetic construct
  source 1..80: mol_type = other DNA
attacttaattatatgcactgattatatagatagtaagtactaacatgcagacaatattatatattcagggatcatatgt

SEQ ID NO: 45778 - DNA, 80 bp, synthetic construct
  source 1..80: mol_type = other DNA
tattttgtaatcattgtataagtagcactatataggataaggttgtattttattatttaatgggcccgaacatgtgaaac

SEQ ID NO: 45779 - DNA, 80 bp, synthetic construct
  source 1..80: mol_type = other DNA
ctaacaacagacttctagacagccatgcaatccagagctgtcatcttgaagcatagatctggttcaggccataagaggtc

SEQ ID NO: 45780 - DNA, 80 bp, synthetic construct
  source 1..80: mol_type = other DNA
cttgccaaccttagcacgatacttctcagcactcctcaccactgcagacgccagaacaagatcctcgtcaatgatcccca

SEQ ID NO: 45781 - DNA, 80 bp, synthetic construct
  source 1..80: mol_type = other DNA
ctgctatgagcagctttttcttgtcctccctggtgaagaatcgtccactcatggcggccatattgggcttttcaaatgtg

SEQ ID NO: 45782 - DNA, 80 bp, synthetic construct
  source 1..80: mol_type = other DNA
gcagccacttcattagcctgttttgttctcagagatggatttatggtctttgagaactcaatcatgaatagcccatgagc

SEQ ID NO: 45783 - DNA, 80 bp, synthetic construct
  source 1..80: mol_type = other DNA
atcagcaatagtggccccagccccatttggaaggtccagatcaataattccagcaaagctaggatgcatcatggctcttg

SEQ ID NO: 45784 - DNA, 80 bp, synthetic construct
  source 1..80: mol_type = other DNA
ggtaggtcacaccagcaatggcatccatggtggtcccagatacaggcagggattctgacaggacacgtagtgcctgaaca

SEQ ID NO: 45785 - DNA, 80 bp, synthetic construct
  source 1..80: mol_type = other DNA
gtccacggaacaaatgcagctgacacccttgacagagtgatagtgtccctgccaggattcccttctttcagctgatagac

SEQ ID NO: 45786 - DNA, 80 bp, synthetic construct
  source 1..80: mol_type = other DNA
tgaaatcaggttggccacaatagaagcacccttctctgacattttcttcatcatggcctctggcttgttccccctgacaa

SEQ ID NO: 45787 - DNA, 80 bp, synthetic construct
  source 1..80: mol_type = other DNA
ctatctacataaataattatgaggtggtctataagtcaaagccaactctctcgcatttcctcatggagaaggagtttcct

SEQ ID NO: 45788 - DNA, 80 bp, synthetic construct
  source 1..80: mol_type = other DNA
ggttcagcacaatcatcatcttcacatctttcttccaatccctgccctttgctgttcctctctccttgaccaactgaaca

SEQ ID NO: 45789 - DNA, 80 bp, synthetic construct
  source 1..80: mol_type = other DNA
atgcgctttgggtcaaacccttggtaagcaaactcattcacccatgcattgatggtcccagaatctgcagactcatcaag

SEQ ID NO: 45790 - DNA, 80 bp, synthetic construct
  source 1..80: mol_type = other DNA
gcagactcatcaagaaaagcaagagcaatgtcgcgataattctcgtctgacatgttgatagcttttgtttaatacacggg

SEQ ID NO: 45791 - DNA, 80 bp, synthetic construct
  source 1..80: mol_type = other DNA
gctgtactggggcctggcatgatcagtgcagttagaaccagactttacgagccaaccatgagagaactctaccaggaatc

SEQ ID NO: 45792 - DNA, 80 bp, synthetic construct
  source 1..80: mol_type = other DNA
gattcaccaactaaagaggaacaacaagaaataccttttgtctgctctcaggtggcccacagggattcctactctagagt

SEQ ID NO: 45793 - DNA, 80 bp, synthetic construct
  source 1..80: mol_type = other DNA
ttatagactattactttgaggagctcctgttcctgtcagagtttgacccgggatctatccagagatacctgaaattactg

SEQ ID NO: 45794 - DNA, 80 bp, synthetic construct
  source 1..80: mol_type = other DNA
gttaaggcctctgggctttacaactccactattgaggagcagatagtggagattcacagacgagtgctcatagaaggtaa

SEQ ID NO: 45795 - DNA, 80 bp, synthetic construct
  source 1..80: mol_type = other DNA
aaagcacggattgactgcttttgatctcccaggaaacgacatcctcggagacatctgtgtggttcaagcagcgcgggtga

SEQ ID NO: 45796 - DNA, 80 bp, synthetic construct
  source 1..80: mol_type = other DNA
caagactagttgctaagacattctccaagatgaccagagacacccatctgatgatatatttctcaataagcccagttgag

SEQ ID NO: 45797 - DNA, 80 bp, synthetic construct
  source 1..80: mol_type = other DNA
ttggttttgagcaaacttgataagaaggaggacaagagggctaaagcaaaagggttgatgtctatgtgtgctgctaggtc

SEQ ID NO: 45798 - DNA, 80 bp, synthetic construct
  source 1..80: mol_type = other DNA
tctgcccaggttctacatagactgtgatttggacacctttgattttgagaagggttgctctctgattgagaatgagttcc

SEQ ID NO: 45799 - DNA, 80 bp, synthetic construct
  source 1..80: mol_type = other DNA
ttatgactatttcatgagaacagacttgggatttagagagactgctctttccaccttttgggctaaggactggcctaccc

SEQ ID NO: 45800 - DNA, 80 bp, synthetic construct
  source 1..80: mol_type = other DNA
cacaagagatcattctatctgacaaacgatgccctaaagaagacatgagggtaacaaagtggctgcctagtcccccccac

SEQ ID NO: 45801 - DNA, 80 bp, synthetic construct
  source 1..80: mol_type = other DNA
tacccacccttatgatcccacccctcagattcccccaatccgcatcccaatcccaattcccctaaccccttggcagctca

SEQ ID NO: 45802 - DNA, 80 bp, synthetic construct
  source 1..80: mol_type = other DNA
aaaagtcctttttttaccaatattacttacgccggactcactcaatggggatccaacttgaccagagaatcatcctatta

SEQ ID NO: 45803 - DNA, 80 bp, synthetic construct
  source 1..80: mol_type = other DNA
tattttataatcattgtgtagttagcattatgtagaataaggttgtattttattatttaatgggcccgaacatgtgaagg

SEQ ID NO: 45804 - DNA, 80 bp, synthetic construct
  source 1..80: mol_type = other DNA
ataccttaatcacatatgcactaattatagatagtaagttattaacatgcagacaatattatatattcagggattatatg

SEQ ID NO: 45805 - DNA, 80 bp, synthetic construct
  source 1..80: mol_type = other DNA
tttagggatttattgattaattgtttactaatttaaaatatacggatttgacaattattattatcagggttttgaattaa

SEQ ID NO: 45806 - DNA, 80 bp, synthetic construct
  source 1..80: mol_type = other DNA
ttgaccaaaaggtcaaggagatttcaaatcaggaaccattaaagatatgagccaacaagttcctgcacacacacacacac

SEQ ID NO: 45807 - DNA, 80 bp, synthetic construct
  source 1..80: mol_type = other DNA
gcggcctcaggggatcctacaccacctgactcaataaaatcgccacagggaccatgggtgtttgcttgtgcacctgatag

SEQ ID NO: 45808 - DNA, 80 bp, synthetic construct
  source 1..80: mol_type = other DNA
tgacagttatgaatgtattagtgtattatattgcttgaatcaatgtccaattagcattatatatatctaaatttttattt

SEQ ID NO: 45809 - DNA, 80 bp, synthetic construct
  source 1..80: mol_type = other DNA
tgcccacagcccaatccacaatgaaggcagaagaactcacacctgggcggttccgtacagtagtatgtggcctattccct

SEQ ID NO: 45810 - DNA, 80 bp, synthetic construct
  source 1..80: mol_type = other DNA
aaaatatgaataagtattgattgcactgatagttatatattatgcactaacataaaatacatgttcaagaattcataatc

SEQ ID NO: 45811 - DNA, 80 bp, synthetic construct
  source 1..80: mol_type = other DNA
ataaactgctgcttgttattgttaccagccttaaatagatatagtaagcatttaaaattgtgaacttatatatcattatt

SEQ ID NO: 45812 - DNA, 80 bp, synthetic construct
  source 1..80: mol_type = other DNA
tatttagtgggcccaacaatgtgaaactgagctatcctctttctttttcaccactatctctcttactttctacctcagtg

SEQ ID NO: 45813 - DNA, 80 bp, synthetic construct
  source 1..80: mol_type = other DNA
gagagtttatggaaaaagaatgcccctttattaaaccagaggtcaagccaggaacaccagcacaggaggctgaattttta

SEQ ID NO: 45814 - DNA, 80 bp, synthetic construct
  source 1..80: mol_type = other DNA
tgttagtttgttaagttttagttttaagtcattgtttggtgtaagattttatttttgtattatgttgttcatttaaacat

SEQ ID NO: 45815 - DNA, 80 bp, synthetic construct
  source 1..80: mol_type = other DNA
aggagagatcaagtctccgatatggaaatgtccttgatgtgaacgcaatcgatattgatgaaccaagtgggcaaacagct

SEQ ID NO: 45816 - DNA, 80 bp, synthetic construct
  source 1..80: mol_type = other DNA
gagtttttaataaaaccatgtccctttctaaagaaaggtggccctagtaaagaggaggattttttggtgagtaatgatgc

SEQ ID NO: 45817 - DNA, 80 bp, synthetic construct
  source 1..80: mol_type = other DNA
gcagaatcgggagacccaacaccaccagattccataaaatcaccacaggcaccatgggtttttgcatgtgcacctgatag

SEQ ID NO: 45818 - DNA, 80 bp, synthetic construct
  source 1..80: mol_type = other DNA
tgggaatccagcttgatcagaggattattctcttatatatgcttgaatggggaaaagagatggttgaccactttcatctg

SEQ ID NO: 45819 - DNA, 80 bp, synthetic construct
  source 1..80: mol_type = other DNA
ggtgatgacatggatcctgagctcagaggtcttgcccaggcactgattgatcagaaggtaaaagaaatatctaatcagga

SEQ ID NO: 45820 - DNA, 80 bp, synthetic construct
  source 1..80: mol_type = other DNA
agaataggtataggtaagtttacagattaggttaatatagaactaacatgcagacatatagagtgtatttagagatcaac

SEQ ID NO: 45821 - DNA, 80 bp, synthetic construct
  source 1..80: mol_type = other DNA
catgcactaatttgatttatacgggtattggtagcattatatcagggttaatgacattatcagggtttattaattaataa

SEQ ID NO: 45822 - DNA, 80 bp, synthetic construct
  source 1..80: mol_type = other DNA
actaatcatgttaactggaattaaggcattatatccatattactcaggttaattataatgagaatactaatgataattat

SEQ ID NO: 45823 - DNA, 80 bp, synthetic construct
  source 1..80: mol_type = other DNA
gcatgtatcacttattatagtaccaaattaggtttagattaattacataggtataagtctatagtttatctttatttatt

SEQ ID NO: 45824 - DNA, 80 bp, synthetic construct
  source 1..80: mol_type = other DNA
gggcccatcaatgtgaaactgagctatcccctttctgttttcaccactatcatctttccttctacctcagtgtacttata

SEQ ID NO: 45825 - DNA, 80 bp, synthetic construct
  source 1..80: mol_type = other DNA
gcaagcaaggcaacagacagtgtcagcactggaggataaactcgcagacttcaagcgaagaatggcagatgctgtgtcca

SEQ ID NO: 45826 - DNA, 80 bp, synthetic construct
  source 1..80: mol_type = other DNA
gcttattccctacacaaattcaagttcgaaatataatgagtccagtaatgggagtaattggcttctctttctttgttaag

SEQ ID NO: 45827 - DNA, 80 bp, synthetic construct
  source 1..80: mol_type = other DNA
gactgggcagacaggatacgagagttcatggaaaaggaatgtccatttataaagccagaggttaaaccagggacaccaac

SEQ ID NO: 45828 - DNA, 80 bp, synthetic construct
  source 1..80: mol_type = other DNA
acaagagattgaattcttaaagaaaaataaagtttactttatggaccgccaaaatgttctagataaaaatcatgtggctg

SEQ ID NO: 45829 - DNA, 80 bp, synthetic construct
  source 1..80: mol_type = other DNA
caggggatccaacatcaccagataatattgaatcccctaatgcaccatgggtctttgcatgtgcacctgaccgatgtcca

SEQ ID NO: 45830 - DNA, 80 bp, synthetic construct
  source 1..80: mol_type = other DNA
agaacaagtataggtaagtttataatctagattaacatagaactaacatgcagacatatagaatgtatttagtattcaat

SEQ ID NO: 45831 - DNA, 80 bp, synthetic construct
  source 1..80: mol_type = other DNA
taaatgtagcattattgtagtattaattttaattcagattacttaggataagtgtaagtttatagtttatccttatttat

SEQ ID NO: 45832 - DNA, 80 bp, synthetic construct
  source 1..80: mol_type = other DNA
attaagatatgtgataattactaacaagtactaatttaggttaaggtaaattaatattactaacattaattactttataa

SEQ ID NO: 45833 - DNA, 80 bp, synthetic construct
  source 1..80: mol_type = other DNA
taaacagaagtagttatcatacgggttaagggtcatattagggttattatcagtttattaatctataagctagaatgggg

SEQ ID NO: 45834 - DNA, 80 bp, synthetic construct
  source 1..80: mol_type = other DNA
tataactggaatttaagtacactatgaatatataaaattactactaatgacagttatgaatgtattacaatatttgcact

SEQ ID NO: 45835 - DNA, 80 bp, synthetic construct
  source 1..80: mol_type = other DNA
gctacagcctgttatttgaaccagcattaacagttataagcttatgaagttatccctttattcatgttattgggcccaaa

SEQ ID NO: 45836 - DNA, 80 bp, synthetic construct
  source 1..80: mol_type = other DNA
catgtgaaactgagctatcccctcatcttcttaactttcctactgcttcctttacaattatctacctcagtgtatttata

SEQ ID NO: 45837 - DNA, 80 bp, synthetic construct
  source 1..80: mol_type = other DNA
ttccaattattctgaaggccctttatatgctttcaactcgtggcaggcaaacagtcaaagaaaacaaagggacacgaata

SEQ ID NO: 45838 - DNA, 80 bp, synthetic construct
  source 1..80: mol_type = other DNA
acctttatgtctctatgccaactgctcagtcgaccatgaaagcagaagagctgacaccaggtaggtttcgcactatagtc

SEQ ID NO: 45839 - DNA, 80 bp, synthetic construct
  source 1..80: mol_type = other DNA
ggcagtgtatttattcagtgactagtttattttcaataatgcctggggtagcacattcaattgcaatcgaattatgtgta

SEQ ID NO: 45840 - DNA, 80 bp, synthetic construct
  source 1..80: mol_type = other DNA
tgctgcccttcttaccacattttgctttggctggatactgatcccttccattacattggctgtattggttgtcttaaagt

SEQ ID NO: 45841 - DNA, 80 bp, synthetic construct
  source 1..80: mol_type = other DNA
gaggcaacaacctctgcccttcaggcccattttaaagtctgtaagctcacatcacgattccaggagaatttgagaaagtc

SEQ ID NO: 45842 - DNA, 80 bp, synthetic construct
  source 1..80: mol_type = other DNA
attcttttatcttttatcatatatattattctgtattgaatcactatatagaaaaaaaactagcactttactaatgaaat

SEQ ID NO: 45843 - DNA, 80 bp, synthetic construct
  source 1..80: mol_type = other DNA
attaactgtatatgagcctatgcagggttgttatcgtaccttatccctcttcaggtatcggagtcggttttttgttggtt

SEQ ID NO: 45844 - DNA, 80 bp, synthetic construct
  source 1..80: mol_type = other DNA
tgtagtttgttaagttttaaaagttaagtctttgtttagtgtaagaatttatttttatattatgttgtcaatgtaagaac

SEQ ID NO: 45845 - DNA, 80 bp, synthetic construct
  source 1..80: mol_type = other DNA
tatagtgggccctgtaatgtgaaactgagctatcacctccatttctttctttcatctccaatcaaacatttctacctccg

SEQ ID NO: 45846 - DNA, 80 bp, synthetic construct
  source 1..80: mol_type = other DNA
attccttaattacatatgcactgattatagatgtagtgagttgttaacatgcagacatattatatattcagggatcatat

SEQ ID NO: 45847 - DNA, 80 bp, synthetic construct
  source 1..80: mol_type = other DNA
aggttcgtaacatcatgagtccagttatgggggtcattggtttttcattctttgtgaaggattggtctgagagaatcaga

SEQ ID NO: 45848 - DNA, 80 bp, synthetic construct
  source 1..80: mol_type = other DNA
aggataattttgttgttcatgatagagtgggggtctgatattgttaaccatttccatctaggtgatgatatggaccctga

SEQ ID NO: 45849 - DNA, 80 bp, synthetic construct
  source 1..80: mol_type = other DNA
tattgttagtttgttaagttttaagagttaagtccttgtttagtgtaagaatttatttttgtattatgttgtttgtctag

SEQ ID NO: 45850 - DNA, 80 bp, synthetic construct
  source 1..80: mol_type = other DNA
agtcataatgggccctacaatgtgaaactgagctatcatctcttctttccttcttcatctccaatcaatacacctctacc

SEQ ID NO: 45851 - DNA, 80 bp, synthetic construct
  source 1..80: mol_type = other DNA
aaaataaggggacgaggatccggttcaaagatgacagttcatttgaagagattaatggaataagacgaccaaaacatctg

SEQ ID NO: 45852 - DNA, 80 bp, synthetic construct
  source 1..80: mol_type = other DNA
gagtttctcataaagccatgcccttttctaaaaaaacaaggggtttcaggtagagaagaagagtttcttgtgagcaacga

SEQ ID NO: 45853 - DNA, 80 bp, synthetic construct
  source 1..80: mol_type = other DNA
tgcatatttactgggaagggaaaaagcactcagggaatcacatctggctgagattgatgatttaattgatcttgctgact

SEQ ID NO: 45854 - DNA, 80 bp, synthetic construct
  source 1..80: mol_type = other DNA
caggggaccccacaccacctgactccatcaagtccccacaggcaccatgggtatttgcctgtgcaccagatagatgccct

SEQ ID NO: 45855 - DNA, 80 bp, synthetic construct
  source 1..80: mol_type = other DNA
gaccatcaaggaaaataaggggacgaggatccggttcaaagatgacagttcatttgaagagattaatggaataagacgac

SEQ ID NO: 45856 - DNA, 80 bp, synthetic construct
  source 1..80: mol_type = other DNA
ttaactggaataaggtattacatatatcgtttagtttaactattaggaattactaatggcaattatgaatgtattagtat

SEQ ID NO: 45857 - DNA, 80 bp, synthetic construct
  source 1..80: mol_type = other DNA
ccatcggccagtatgtcatgggatttgcccttgcaataattttgaaggcattatacatgttatccactagaggaagacag

SEQ ID NO: 45858 - DNA, 80 bp, synthetic construct
  source 1..80: mol_type = other DNA
gcagaatcaggggaccctacaccgccagattccataaagtcaccacaggcaccatgggtattcgcttgtgcacctgatag

SEQ ID NO: 45859 - DNA, 80 bp, synthetic construct
  source 1..80: mol_type = other DNA
aggagagatcaagccttcgatatggaaatgtccttgatgtaaatgctattgacatcgatgagccaagtggacagacagca

SEQ ID NO: 45860 - DNA, 80 bp, synthetic construct
  source 1..80: mol_type = other DNA
attctgacacaggaatatttaatatcagttcaccaacctgccttgtctatatagtacaccggtgtaggggggcacaacaa

SEQ ID NO: 45861 - DNA, 80 bp, synthetic construct
  source 1..80: mol_type = other DNA
cgggagatacattgttgtttttaggaccattagaagaaggtggaatgatatttaaacaatggtgcactacaacatgtcag

SEQ ID NO: 45862 - DNA, 80 bp, synthetic construct
  source 1..80: mol_type = other DNA
accacttggtatgaaatgtcctgaacatgctggctccttcagaaaaaaatgctcctttgccacattgccagcttgccagt

SEQ ID NO: 45863 - DNA, 80 bp, synthetic construct
  source 1..80: mol_type = other DNA
atattaaccaaaacacttgtgattggacagtgtatatacacttttactagtattttttcactaatgccaggggtcgcaca

SEQ ID NO: 45864 - DNA, 80 bp, synthetic construct
  source 1..80: mol_type = other DNA
atgatggcaatacagtttctggctatcaacgaatgattgcaacaaaagattcctttcagtcattcaatatcacagagccc

SEQ ID NO: 45865 - DNA, 80 bp, synthetic construct
  source 1..80: mol_type = other DNA
tttatcatttcaagatcttgctgagaatccctgtcaagttgacttaagtgtgtcttcaattgatggtgcttggggctctg

SEQ ID NO: 45866 - DNA, 80 bp, synthetic construct
  source 1..80: mol_type = other DNA
cttcaattgatggtgcttggggctctggtgtagggtttaatcttgtatgttcggttagtctcacggaatgtgcaacattt

SEQ ID NO: 45867 - DNA, 80 bp, synthetic construct
  source 1..80: mol_type = other DNA
ctctttggcagtcgaactatgtgtccctggacttcatgggtgggcaactatctctttactcatcactttctgctttggct

SEQ ID NO: 45868 - DNA, 80 bp, synthetic construct
  source 1..80: mol_type = other DNA
tgagcacctatgaacctaagcgtgggttatatcgaacactttcaatgttccggtataaaagtaagtgctatgttgggtta

SEQ ID NO: 45869 - DNA, 80 bp, synthetic construct
  source 1..80: mol_type = other DNA
gtgtggtgtatattgttgactacagagctgataatctgggcagcaagtgctgaaactgtcaatttagaaccaggttggac

SEQ ID NO: 45870 - DNA, 80 bp, synthetic construct
  source 1..80: mol_type = other DNA
agatactgcgcatggttctggaatcatcccacttaaaactgacttggaattggacttctcattaccttcttctgcaacat

SEQ ID NO: 45871 - DNA, 80 bp, synthetic construct
  source 1..80: mol_type = other DNA
aatggggatctgatattgtcaatcattttcaccttggtgatgatatggatcctgaactcaggacacttgcacaaagtctc

SEQ ID NO: 45872 - DNA, 80 bp, synthetic construct
  source 1..80: mol_type = other DNA
ggtaggtaagtttactaatcgtaaggtagctactaagttgattattgcactacagcttggtcattgaccactcaggtaat

SEQ ID NO: 45873 - DNA, 80 bp, synthetic construct
  source 1..80: mol_type = other DNA
gtacacttatatatatgcacgtagcatatatataagtgtacgattctactacctcaaatagctgctttcttgattgcttt

SEQ ID NO: 45874 - DNA, 80 bp, synthetic construct
  source 1..80: mol_type = other DNA
ttgcaatcatcttgaaagcattgtatatgttgtcaactaggggaaggcaaacaattaaagagaataaaggaacaagaatc

SEQ ID NO: 45875 - DNA, 80 bp, synthetic construct
  source 1..80: mol_type = other DNA
tggggttctgatattgtcaaccacttccatctgggtgatgatatgagccctgagctcagaacacttgcacaaagtctcat

SEQ ID NO: 45876 - DNA, 80 bp, synthetic construct
  source 1..80: mol_type = other DNA
ctatcggccagtacattacaggctttgcacttgcaataatcttgaaggcattgtatatgctgtcaactagagggaggcaa

SEQ ID NO: 45877 - DNA, 80 bp, synthetic construct
  source 1..80: mol_type = other DNA
tgccaacagcccagtctactatgaaagccgatgaattgacaccaggtaggtttagaacaattgtttgtggactctttcct

SEQ ID NO: 45878 - DNA, 80 bp, synthetic construct
  source 1..80: mol_type = other DNA
gtgccctcccacatgcatctatatagcagggatggcagagttgggagcatttttttccattctgcaggacatgaggaaca

SEQ ID NO: 45879 - DNA, 80 bp, synthetic construct
  source 1..80: mol_type = other DNA
gggtttccttcactaataaaaaaattatttgaacgccctttcaaaagttcacttgaagtttttatctactataacataaa

SEQ ID NO: 45880 - DNA, 80 bp, synthetic construct
  source 1..80: mol_type = other DNA
aaattaaaaaactgtgttattgatgctttaaagaatgtttataaaacagatttttttatgtcacgcaaactgcgttctta

SEQ ID NO: 45881 - DNA, 80 bp, synthetic construct
  source 1..80: mol_type = other DNA
tatcgatgcaatggatggtttagaacctcatgtcaaggaattttttgagtttttccctgatggacatcatggagaagtcc

SEQ ID NO: 45882 - DNA, 80 bp, synthetic construct
  source 1..80: mol_type = other DNA
gtggtaactggttacagggtaacttgaataagtgttcatcactttttggtgttggtatgtccttactctttaaggaaata

SEQ ID NO: 45883 - DNA, 80 bp, synthetic construct
  source 1..80: mol_type = other DNA
agattgcacagttggctgtagccttaagtacaagtaaggtggaaagattatatgggacagctataggaatggttaactat

SEQ ID NO: 45884 - DNA, 80 bp, synthetic construct
  source 1..80: mol_type = other DNA
aagcttattagttgcacttgcacaaaataataaggcgagattttattctaaggtcaaattactaggccttacagtagacc

SEQ ID NO: 45885 - DNA, 80 bp, synthetic construct
  source 1..80: mol_type = other DNA
attacttaattacatatgcactgattatagatacagtaagttactaacatgcagagacatattatatattcagggatcat

SEQ ID NO: 45886 - DNA, 80 bp, synthetic construct
  source 1..80: mol_type = other DNA
taaactggaaatatagcattataagtacatatcaattaataacaatcaatacagagattactaatggcagttatgaatgt

SEQ ID NO: 45887 - DNA, 80 bp, synthetic construct
  source 1..80: mol_type = other DNA
tattttataatcattatcaaattagcactacgtaggataaggttgtattctattatttaatgggcccgaacatgtgaaac

SEQ ID NO: 45888 - DNA, 80 bp, synthetic construct
  source 1..80: mol_type = other DNA
tccgatctctcgagagtatatgttgttgaacgttattgtttaagaaatagttgatgcatcagaatggtttgcatttattg

SEQ ID NO: 45889 - DNA, 80 bp, synthetic construct
  source 1..80: mol_type = other DNA
cgtcgacatctatatactatatagtaataccaatgctcaagactacgaaactgatacaatctcttatcgtgtgggtaatg

SEQ ID NO: 45890 - DNA, 80 bp, synthetic construct
  source 1..80: mol_type = other DNA
tagtgtataattttgtcatactgctccagaattaataatatctctaatagatttgattagtagatatatggctatcgcaa

SEQ ID NO: 45891 - DNA, 80 bp, synthetic construct
  source 1..80: mol_type = other DNA
gtattgctaaaccagagctaataatagacttctagacagccatgcaatccagagctgtcatcctgaagcatagatctggt

SEQ ID NO: 45892 - DNA, 80 bp, synthetic construct
  source 1..80: mol_type = other DNA
gatacagatactagaaatatcagtataaaaacgtaatccttaagaatcaaagatttaagaattggttctggatctggaca

SEQ ID NO: 45893 - DNA, 80 bp, synthetic construct
  source 1..80: mol_type = other DNA
gtggttacggattaatgatatccaataagggttggtttgcaagaataaggtacggacagacagaaaggacaagtcctcaa

SEQ ID NO: 45894 - DNA, 80 bp, synthetic construct
  source 1..80: mol_type = other DNA
cggtatgattggacagattatatgagttttgagaccccatattacctatattgcagtggaggtcgtatatgtccttcgag

SEQ ID NO: 45895 - DNA, 80 bp, synthetic construct
  source 1..80: mol_type = other DNA
ctgtagaacttggaattttactgttcctaccattttaaacccaagtggggagattataatcggggttaaagctaagtcaa

SEQ ID NO: 45896 - DNA, 80 bp, synthetic construct
  source 1..80: mol_type = other DNA
gaacagggaattctatgtctatgatctctattaatacaccgaatgaggtcatagaccagtatgaagttttcacagattac

SEQ ID NO: 45897 - DNA, 80 bp, synthetic construct
  source 1..80: mol_type = other DNA
ctgtcaatcgggtcaactataactaagtgcttcctatataagagacaaccatggtgtttagtcctgcttgagggtgtccc

SEQ ID NO: 45898 - DNA, 80 bp, synthetic construct
  source 1..80: mol_type = other DNA
aaaatccacgggcctaacagagacctctattcaaactttcaggatatataaatcttgtgtcaagtcaaggacatacttag

SEQ ID NO: 45899 - DNA, 80 bp, synthetic construct
  source 1..80: mol_type = other DNA
actcactaggatctagatattattatgtgtctgaccaaggagggaataggactagacaagcatacaaattaacatcagac

SEQ ID NO: 45900 - DNA, 80 bp, synthetic construct
  source 1..80: mol_type = other DNA
acatgagttacatcaagtaagaattattaagattattcaaatcttaataataaaatctagatttatgatcctgtggttca

SEQ ID NO: 45901 - DNA, 80 bp, synthetic construct
  source 1..80: mol_type = other DNA
ttaattagtcctatttgatggactctattgtaaaatgatcattggttgttaatcgatttgattgaatcatgattaagtta

SEQ ID NO: 45902 - DNA, 80 bp, synthetic construct
  source 1..80: mol_type = other DNA
gacttaaattgatattcaatccaatgagttgtcaataattgttgattgatgaaaagggggtatttgttccaatgaagagg

SEQ ID NO: 45903 - DNA, 80 bp, synthetic construct
  source 1..80: mol_type = other DNA
ttgccatgggagtaggtgttactttagacagatcaatgggggctctaaatataaacagatcttatctagagcctttatac

SEQ ID NO: 45904 - DNA, 80 bp, synthetic construct
  source 1..80: mol_type = other DNA
tttaaatttaaatggttccatgaactctgtatagaagtaccttagaagttgtaaatctatatgattactaaattattttt

SEQ ID NO: 45905 - DNA, 80 bp, synthetic construct
  source 1..80: mol_type = other DNA
ataaaattgatttttagtgccttatgatctgttgttctaatgatgatatatagcttgctgattgctatttgagttattat

SEQ ID NO: 45906 - DNA, 80 bp, synthetic construct
  source 1..80: mol_type = other DNA
gtaacttagtttcatcaccatattaaatgtaatcaattaagaaaaacttaagaatcaaagatttctattttcttagattc

SEQ ID NO: 45907 - DNA, 80 bp, synthetic construct
  source 1..80: mol_type = other DNA
ttgtaccccttgagaagaacttatacatcaacagtaacatatcaggtacaagctagggtattaaagagtgttaagtttat

SEQ ID NO: 45908 - DNA, 80 bp, synthetic construct
  source 1..80: mol_type = other DNA
aagcaatgatcaagaatactgtatagatctcctagattttcatagcctctatattttctaaaaaaacaactcttgaactt

SEQ ID NO: 45909 - DNA, 80 bp, synthetic construct
  source 1..80: mol_type = other DNA
taagctttgactagtcagactgaactaactattgatatatatattttatgatgattgttctgaaaggtattttaaaattg

SEQ ID NO: 45910 - DNA, 80 bp, synthetic construct
  source 1..80: mol_type = other DNA
agattacattatttccaattaatttagtgaatactgtgaaattaatttgcactacaaagacaaaatatggatttcactga

SEQ ID NO: 45911 - DNA, 80 bp, synthetic construct
  source 1..80: mol_type = other DNA
tacatcattgtcagatgtgctttatcctgaatgccatttggatagtcctatagttgcaggaaaactagttcaatcgatat

SEQ ID NO: 45912 - DNA, 80 bp, synthetic construct
  source 1..80: mol_type = other DNA
tgtattctgaaataccatgtaatcagttattgattgatgaaacattgaaaaataccatagagtggagaatacaaaatggg

SEQ ID NO: 45913 - DNA, 80 bp, synthetic construct
  source 1..80: mol_type = other DNA
aaattgggtcatattgggaagatacaaaaaatgtacggtgaaactttaaaagaacatataccagatttaaataaattcaa

SEQ ID NO: 45914 - DNA, 80 bp, synthetic construct
  source 1..80: mol_type = other DNA
tacagactcggtcaaatgatggcaaggaggaatgcaggctcagtagataagaaaatggcaaaagaattaggccttgagaa

SEQ ID NO: 45915 - DNA, 80 bp, synthetic construct
  source 1..80: mol_type = other DNA
ccatgtaccgtaccccgagtgtaacaaatcactgttcacaatttatgataaagagatatccaaatgcctaaggaccataa

SEQ ID NO: 45916 - DNA, 80 bp, synthetic construct
  source 1..80: mol_type = other DNA
tggatagatccaataacttgtatagaaaaattgcacccaagatcactgaattgttagatactgtggagagggatataact

SEQ ID NO: 45917 - DNA, 80 bp, synthetic construct
  source 1..80: mol_type = other DNA
ggtttggattcaagaactgatcctcaaactaggtacatctatagatcacttaatagcctgtccaatataatggaaagttg

SEQ ID NO: 45918 - DNA, 80 bp, synthetic construct
  source 1..80: mol_type = other DNA
taagtggtatcaaccctttttattttggtttacactcaaaacagaaatgagaaatataataaaggataataaaaagaaat

SEQ ID NO: 45919 - DNA, 80 bp, synthetic construct
  source 1..80: mol_type = other DNA
ccaatgttaattccaacaatgtagttaaattagaaagcaaaagggtttatatccagataaaccagaatctttgttctata

SEQ ID NO: 45920 - DNA, 80 bp, synthetic construct
  source 1..80: mol_type = other DNA
gtggatagaactaaaaaagagatatatcaccttactcctgaaatagtgttaatgtattgtgatgttgttgaaggtaggtt

SEQ ID NO: 45921 - DNA, 80 bp, synthetic construct
  source 1..80: mol_type = other DNA
aatgattcagacaacaatccgagctgatgctaaattctcaccattactagatagatcagatagattatgggaattgattg

SEQ ID NO: 45922 - DNA, 80 bp, synthetic construct
  source 1..80: mol_type = other DNA
acaacctctttgaggagctaggcaatagtacatataatatagtatcattacttgaaccattgacactaggtattttacaa

SEQ ID NO: 45923 - DNA, 80 bp, synthetic construct
  source 1..80: mol_type = other DNA
ctccaggacaaggcactaatgttagctgggtcatttatgcactactgtactactgaaattgaggaggaattaaagaacaa

SEQ ID NO: 45924 - DNA, 80 bp, synthetic construct
  source 1..80: mol_type = other DNA
tggatttactaatcccgaagatataacagcatttacaagagcactcatagacataatgtctatagatgatattcattgtg

SEQ ID NO: 45925 - DNA, 80 bp, synthetic construct
  source 1..80: mol_type = other DNA
gaaagagcttgaggagataaaggaaatgatgacagacctgactgcacaaagacacgagacagctgtccaagcacgtgaag

SEQ ID NO: 45926 - DNA, 80 bp, synthetic construct
  source 1..80: mol_type = other DNA
tgtcagaatttttttcgtttttcagaacatttggacatccaattctggaagcagtaacagcagctgataaagtacgatca

SEQ ID NO: 45927 - DNA, 80 bp, synthetic construct
  source 1..80: mol_type = other DNA
catatgcaaaagccaaaaatgttaacttatctgcctataatgaaagcacatgccatcttttgcggtattataataaatgg

SEQ ID NO: 45928 - DNA, 80 bp, synthetic construct
  source 1..80: mol_type = other DNA
ttacagagacagacatggtggatcttggccacctctggagcttcctcctcatgcagtgtccgtcatcaagagagcacatt

SEQ ID NO: 45929 - DNA, 80 bp, synthetic construct
  source 1..80: mol_type = other DNA
ctaatggtgaagcgttgactcatgaaatgtgtgcaactaattggagatccttttgtggaatgagattcaaatgttttatg

SEQ ID NO: 45930 - DNA, 80 bp, synthetic construct
  source 1..80: mol_type = other DNA
ccattggaattggattctgatttgagtatgtatatgaaagataaagcattatcacctatttgttcagaatgggacactgt

SEQ ID NO: 45931 - DNA, 80 bp, synthetic construct
  source 1..80: mol_type = other DNA
ttatcctcgagagaacctcaaatattcaccaccaagacttacaacatcaaggaggttagtagatgtcttcattgacgatg

SEQ ID NO: 45932 - DNA, 80 bp, synthetic construct
  source 1..80: mol_type = other DNA
ataaatttgacccttacacattaattcagtatgtactatcaggtgattataagaatgatccagagttcaatatatcttat

SEQ ID NO: 45933 - DNA, 80 bp, synthetic construct
  source 1..80: mol_type = other DNA
acggtatggtaaaagatgaacatgaattaatcaagaatctcttacagttatcaatatcttcagtaccaaaagcagaagtc

SEQ ID NO: 45934 - DNA, 80 bp, synthetic construct
  source 1..80: mol_type = other DNA
ggaagttcaatgtggcagaaggggttgttcagggtctggagcaagaagaagacgatgatgatgattatcaagacatgaac

SEQ ID NO: 45935 - DNA, 80 bp, synthetic construct
  source 1..80: mol_type = other DNA
tataacaatgatcattgggagttaagaaagcaatcaattcagaaattaagaaccaaaacatcgaagaacaagaataagga

SEQ ID NO: 45936 - DNA, 80 bp, synthetic construct
  source 1..80: mol_type = other DNA
gaaaattgacatactgaagctaaaacaaagtccctcattccgcctgcagcattatgggttctcatttattaagaataaga

SEQ ID NO: 45937 - DNA, 80 bp, synthetic construct
  source 1..80: mol_type = other DNA
acctgaaccagcaaataataacaaattatgcaacagataattgtgaagacaacttgtacactgattacaaggatcgaaca

SEQ ID NO: 45938 - DNA, 80 bp, synthetic construct
  source 1..80: mol_type = other DNA
gttaatgatatctataacaatcctgagacaaaaactgaagataaatatgatacaattagttcattcttgaccacagattt

SEQ ID NO: 45939 - DNA, 80 bp, synthetic construct
  source 1..80: mol_type = other DNA
acagaagttctgtcttaattggagatatgaatccacagcactgtttgctcaaaggatggatgaaatttatggattacctg

SEQ ID NO: 45940 - DNA, 80 bp, synthetic construct
  source 1..80: mol_type = other DNA
gatttttcaattggttacataatagattagaaagatgtgtcctgtatgtggctgatccttattgtcctcctaatttagat

SEQ ID NO: 45941 - DNA, 80 bp, synthetic construct
  source 1..80: mol_type = other DNA
aaacatattgatttgatagaaactgaggataaaggaatatttattcataaaccaatgggcggaatagaaggttatagtca

SEQ ID NO: 45942 - DNA, 80 bp, synthetic construct
  source 1..80: mol_type = other DNA
aaaattatggaccatcataactataccatttctatttttaagtggtttagaaactaatactagaattgctgctgtagtac

SEQ ID NO: 45943 - DNA, 80 bp, synthetic construct
  source 1..80: mol_type = other DNA
aaggtgataatcagtcaattgctataacttataaggtgcatcctaacattagctacttgggaaagaagagaattagtgct

SEQ ID NO: 45944 - DNA, 80 bp, synthetic construct
  source 1..80: mol_type = other DNA
cagggtcagaattacaggtttggtgattactataaggataattacagtaatgatagatataattccagttccggatctgc

SEQ ID NO: 45945 - DNA, 80 bp, synthetic construct
  source 1..80: mol_type = other DNA
aaccattatcagtacacacttctttgtttactcaaaacgaatatattatgatgggatggttctgtcacaggctctcaaaa

SEQ ID NO: 45946 - DNA, 80 bp, synthetic construct
  source 1..80: mol_type = other DNA
caatatcaaggtgtgtgttctggtcggagaccttggttgatgagactcgttcagcttgtagtaatatcagtactgcaatt

SEQ ID NO: 45947 - DNA, 80 bp, synthetic construct
  source 1..80: mol_type = other DNA
gcaaaatcagttgaaacaggactctctaaagatgtaggttatggaataaatatacttaaaacaattcagcaattgcacat

SEQ ID NO: 45948 - DNA, 80 bp, synthetic construct
  source 1..80: mol_type = other DNA
tgcattacaattctctataaatgagacaatgaccaaagatgtagttatgcccttaatacagaatcaatcatggttgttgt

SEQ ID NO: 45949 - DNA, 80 bp, synthetic construct
  source 1..80: mol_type = other DNA
ccgcatgtctcttacctgcacctttgggcggattcaactatctaaatctttcaaggatttacgttaggaacattggtgac

SEQ ID NO: 45950 - DNA, 80 bp, synthetic construct
  source 1..80: mol_type = other DNA
ccagtaaccgcttcttttgcagacgtcaagcgaatgatcagagttgggctattcaaagatagcatacttcaaaaaatcgt

SEQ ID NO: 45951 - DNA, 80 bp, synthetic construct
  source 1..80: mol_type = other DNA
gaatcaagagtgtggtgatgctacttacttggattgggcaagtgacccttattctgccaacttaccttcctcacaaagta

SEQ ID NO: 45952 - DNA, 80 bp, synthetic construct
  source 1..80: mol_type = other DNA
taacaaagacaataaagaacgttacagctagggtaattttatctaactcaagaaatcctctcttaagaggtttgtttcac

SEQ ID NO: 45953 - DNA, 80 bp, synthetic construct
  source 1..80: mol_type = other DNA
catgattttcataatgaagatgtagaacttgctgcattcttaatggacaggtcgattataattcctagggctgcacatga

SEQ ID NO: 45954 - DNA, 80 bp, synthetic construct
  source 1..80: mol_type = other DNA
gattatagaaaattcaattacaggtgcacgagaagaaatagctgggatgctagacactactaaagggttaataagaacta

SEQ ID NO: 45955 - DNA, 80 bp, synthetic construct
  source 1..80: mol_type = other DNA
tttgaaaagcaagatcttgtttgaattaggcaagacgggcctttcagcacaaaatcagtcacctgcaaaagcaaatccga

SEQ ID NO: 45956 - DNA, 80 bp, synthetic construct
  source 1..80: mol_type = other DNA
gtctcaaaaaaggtggaattcaacctcgactgatatcaaaactatcacattatgattatgagcaatttagattctttaat

SEQ ID NO: 45957 - DNA, 80 bp, synthetic construct
  source 1..80: mol_type = other DNA
aaattaatgagtatcaagaagacagatctgaatgttagacctgaaatctgctctgttgagttgtctagacatcttagatc

SEQ ID NO: 45958 - DNA, 80 bp, synthetic construct
  source 1..80: mol_type = other DNA
aaaaatgtggtttaaattgacttatggaagaatgatttacggattagaagtcccggatccgcttgagtctatgagaggat

SEQ ID NO: 45959 - DNA, 80 bp, synthetic construct
  source 1..80: mol_type = other DNA
tcacaatattaggcagtgaaatgtgcaatttatgtaccacgctgcacacaggttattgttggtttttcatacccaaaaat

SEQ ID NO: 45960 - DNA, 80 bp, synthetic construct
  source 1..80: mol_type = other DNA
gtcaacttggacaaagttacaaaacctacaggtagtataagagtgccttatatcgggtcaacaactgatgagaggtcgga

SEQ ID NO: 45961 - DNA, 80 bp, synthetic construct
  source 1..80: mol_type = other DNA
catcaaactagggtcaacaaaagtagcaagtaaagcattaaaatccgctatccggattgctacggtttatacttgggcct

SEQ ID NO: 45962 - DNA, 80 bp, synthetic construct
  source 1..80: mol_type = other DNA
atggcgatgacgacgagtcatggatagaagcatggtacctagcatctcagagagcaaacattgatatcaacatgctaaaa

SEQ ID NO: 45963 - DNA, 80 bp, synthetic construct
  source 1..80: mol_type = other DNA
tctattacccctatttccacatctaataatctagcacatagattaaaggataggtcaacccaggtcaaatttactgggtc

SEQ ID NO: 45964 - DNA, 80 bp, synthetic construct
  source 1..80: mol_type = other DNA
atctttgaaccgtgtatctcgctacataacaataagtaacgataaattagaggtagctagagatgatattaaactagaca

SEQ ID NO: 45965 - DNA, 80 bp, synthetic construct
  source 1..80: mol_type = other DNA
caaacataatatttcagcaagttatgctcttaggattatctagtattgaacaaaggtttagatatcaatctgtgacaccc

SEQ ID NO: 45966 - DNA, 80 bp, synthetic construct
  source 1..80: mol_type = other DNA
gctcttcagaccagacagacgggaaaagtgtgcccggtgtcatatcgttcacaggcagcaaggcagccggtgacaatcaa

SEQ ID NO: 45967 - DNA, 80 bp, synthetic construct
  source 1..80: mol_type = other DNA
aaggagaatatcataatgcacttacatgttgtacctaattgttgtgtgatagaaatgcctaatgttcctcaggttcccgc

SEQ ID NO: 45968 - DNA, 80 bp, synthetic construct
  source 1..80: mol_type = other DNA
atatttggatatacctacatataaagaattagttgagaaccctattgtatacgatagcaatccattgatagaaagtgacc

SEQ ID NO: 45969 - DNA, 80 bp, synthetic construct
  source 1..80: mol_type = other DNA
aaaataaattagaattacagtattggaaaagaggagaagtcaatttcccagaatggactatatcggatcttcaccaatgc

SEQ ID NO: 45970 - DNA, 80 bp, synthetic construct
  source 1..80: mol_type = other DNA
ctatcacaaacacttgccttaacaattgtggatataataactaaaagtgataaggatgttctgaagcaatttatatctgt

SEQ ID NO: 45971 - DNA, 80 bp, synthetic construct
  source 1..80: mol_type = other DNA
ggggagtaatgatgatatcaatagtctcattacagaattcctattagttgatattgagacatttgtggtttatttaggac

SEQ ID NO: 45972 - DNA, 80 bp, synthetic construct
  source 1..80: mol_type = other DNA
ggcctattgctgcaacagcaactctgaccaccaaagtcgttgtcttcaacccaacatcaaaacgcattggattaagatgg

SEQ ID NO: 45973 - DNA, 80 bp, synthetic construct
  source 1..80: mol_type = other DNA
aagcatgtgcccttaaatgggcattcgatatacattataaaagacctctaggtaaatggcaaatgattgagttacttgaa

SEQ ID NO: 45974 - DNA, 80 bp, synthetic construct
  source 1..80: mol_type = other DNA
gatcaattaagcatgacatctaggcatagttttgcagtattaaataatgctttatcacatccaaaagtgttcaaaagatt

SEQ ID NO: 45975 - DNA, 80 bp, synthetic construct
  source 1..80: mol_type = other DNA
ttgggatgcaggaattctatcacctatatatgggccgtacttatataaccaagattacagtaggttatcaatagatctaa

SEQ ID NO: 45976 - DNA, 80 bp, synthetic construct
  source 1..80: mol_type = other DNA
ttatctgtagttatactacatacctaacactttggctagacgggcagtctatagaatacctgttggcggaacaagatgag

SEQ ID NO: 45977 - DNA, 80 bp, synthetic construct
  source 1..80: mol_type = other DNA
gaagcttcaatcagcagatacacgttattacaggctaagcatctatgctttatatgtgacttgtactgtaatgacatgaa

SEQ ID NO: 45978 - DNA, 80 bp, synthetic construct
  source 1..80: mol_type = other DNA
gctagctcgtcaactgctcaagatgacatagctatactaaattcacagatctaggtatagccggtcatcataacatggga

SEQ ID NO: 45979 - DNA, 80 bp, synthetic construct
  source 1..80: mol_type = other DNA
accaccacatattagagatcttatcccatcatacaagattgaattattacaagactttataaacaactgtaggagaaata

SEQ ID NO: 45980 - DNA, 80 bp, synthetic construct
  source 1..80: mol_type = other DNA
acaatggtgttgattcatggaacacaaaaaatttaagtgtcaatatattagctgcttctacgacttatctcaggcgtgga

SEQ ID NO: 45981 - DNA, 80 bp, synthetic construct
  source 1..80: mol_type = other DNA
gtgatcaaacaaataaggattagacaagaaatacacactgagtttgatagaatggaagtcgatttcagatatgcaaagta

SEQ ID NO: 45982 - DNA, 80 bp, synthetic construct
  source 1..80: mol_type = other DNA
tactattgagactcaattaaattatcagcctcgtaatgcatgtgtgtgtctaaggttggaagagatcgacagaccccaca

SEQ ID NO: 45983 - DNA, 80 bp, synthetic construct
  source 1..80: mol_type = other DNA
actcaattatgtccatcaaattagatgattcaaagcctgttaacggttgggaaagtcacaaatatagaagggtaggtatt

SEQ ID NO: 45984 - DNA, 80 bp, synthetic construct
  source 1..80: mol_type = other DNA
aactcaacttctgcttataaaacgttggatttactaccatatatattacgttattataaatccggcactaacagattata

SEQ ID NO: 45985 - DNA, 80 bp, synthetic construct
  source 1..80: mol_type = other DNA
tgttggtgagggttcaggttcaatacttgcattcctggatcggatactgggcccaagtatcaattattacaattctggca

SEQ ID NO: 45986 - DNA, 80 bp, synthetic construct
  source 1..80: mol_type = other DNA
taagtgaactcgaagtaatcggtcaaagagaattaaaattgtatccttctgaatgttgtatagtagataaaaatctatat

SEQ ID NO: 45987 - DNA, 80 bp, synthetic construct
  source 1..80: mol_type = other DNA
gacaactcagaattgctgcaacgaatagtccctttattcaatggcagaccagaaacaacctggataggtaacttagactg

SEQ ID NO: 45988 - DNA, 80 bp, synthetic construct
  source 1..80: mol_type = other DNA
ttatattcacataatgaaaactattccttctcatagcttagggcttatgcataatgacatggaaagtggaattgataagg

SEQ ID NO: 45989 - DNA, 80 bp, synthetic construct
  source 1..80: mol_type = other DNA
caagatcatacagtaactgatttattacatctttaataagctacatagacaatgatattaattttcctgctgatatattt

SEQ ID NO: 45990 - DNA, 80 bp, synthetic construct
  source 1..80: mol_type = other DNA
aaccaatggaaattctagttgagcatagccacttattatctttatcggttaatttactggataaggaagggttgctagta

SEQ ID NO: 45991 - DNA, 80 bp, synthetic construct
  source 1..80: mol_type = other DNA
tccaagattaatgtcagtaatgatttcccaattacactgttgctcagtatttacaaacattgttataataatattatggt

SEQ ID NO: 45992 - DNA, 80 bp, synthetic construct
  source 1..80: mol_type = other DNA
tgcattcccaaaatatagtaacccatatagtacagaggtttatcttatgtgtactaaccctaagattcagacattgtgca

SEQ ID NO: 45993 - DNA, 80 bp, synthetic construct
  source 1..80: mol_type = other DNA
cccctgaattattgttagataagagagatgggaaatcatgttggaacgatagagctgttatgaattacatctatactatc

SEQ ID NO: 45994 - DNA, 80 bp, synthetic construct
  source 1..80: mol_type = other DNA
aagaatcgagtttatacagcatttgaaaatagattgtggaggaaacataaaagttataagcataaaaacgatttgaagaa

SEQ ID NO: 45995 - DNA, 80 bp, synthetic construct
  source 1..80: mol_type = other DNA
acagatattattagaggggagtttaaataaagatactgataagtgtgtagactcaaattctcatgatgatattactatcc

SEQ ID NO: 45996 - DNA, 80 bp, synthetic construct
  source 1..80: mol_type = other DNA
ctaatagtgtgaaatatataggtgaagttccaatagataaggctcaagatataaacacgaggctgaatatcagaggtata

SEQ ID NO: 45997 - DNA, 80 bp, synthetic construct
  source 1..80: mol_type = other DNA
tctaacagactcacatctgatgacaggctgttgttgagtagtggtctggaattaaatggttcttatgtggtgaggaaatt

SEQ ID NO: 45998 - DNA, 80 bp, synthetic construct
  source 1..80: mol_type = other DNA
gaccggtcacgagccaggcgatggagggaaatcacttctggattcctgtatattattatttacagaggttattaatatac

SEQ ID NO: 45999 - DNA, 80 bp, synthetic construct
  source 1..80: mol_type = other DNA
tagaccaaagtagactcccatctactttttttgaaccttatcctatcctagaagaaacacgaattagaaagtatatggaa

SEQ ID NO: 46000 - DNA, 80 bp, synthetic construct
  source 1..80: mol_type = other DNA
acctcaatcttagttcacttactgatataagtttgatgaatgagagatcctcgtcataaatggaaggtgctatgagtcat

SEQ ID NO: 46001 - DNA, 80 bp, synthetic construct
  source 1..80: mol_type = other DNA
aaattctctaggaaaatgatctgttatatcttacttgacaaacaagtggatagaactgaatatgtaaagaaaatcatatc

SEQ ID NO: 46002 - DNA, 80 bp, synthetic construct
  source 1..80: mol_type = other DNA
aaatttaagaagaggttatttggtgtgggacttacaagattatgtttgtactaatttaataccgaaatatttgagaaaga

SEQ ID NO: 46003 - DNA, 80 bp, synthetic construct
  source 1..80: mol_type = other DNA
aatcaagagaggtcggtgttaaaacggcctgggtaataaagttagaaaccaaggaaataaaacaatggtggaaattaatc

SEQ ID NO: 46004 - DNA, 80 bp, synthetic construct
  source 1..80: mol_type = other DNA
agttattcagtcatcttatagatgattaagaaaaactaattgccagtcccaaaaccaagtattatcttgaataagacaag

SEQ ID NO: 46005 - DNA, 80 bp, synthetic construct
  source 1..80: mol_type = other DNA
agtcccaaaaccaagtattatcttgaataagacaagaccagatctagtcagacaagtgagttagttttcatatgtcttcc

SEQ ID NO: 46006 - DNA, 80 bp, synthetic construct
  source 1..80: mol_type = other DNA
ggtgtataaagataaaatgtatgtatataagtaatgtgtttgagttcaacatgtttgatcctgaatgtattcatgtagta

SEQ ID NO: 46007 - DNA, 80 bp, synthetic construct
  source 1..80: mol_type = other DNA
taatttcttgtcatttatatatagtagggaataaattttttgatagttcattaagaaaaacttaagaatcaaagaattaa

SEQ ID NO: 46008 - DNA, 80 bp, synthetic construct
  source 1..80: mol_type = other DNA
actaaacccagtctatcaaactattcaagtatcaccattgcaaacactatcaacagaccaaaaaaaatacagaggcgata

SEQ ID NO: 46009 - DNA, 80 bp, synthetic construct
  source 1..80: mol_type = other DNA
agtgaaaggcattgccttaattgtacagaatcaaaatgagccatgacgacaagctcaaacaaattgatcaagggcttgca

SEQ ID NO: 46010 - DNA, 80 bp, synthetic construct
  source 1..80: mol_type = other DNA
gcgattgactacatcaatcagcttagaaaagcagaaactgaaaagaaaacctacggaagaagtgccattgggttgcctaa

SEQ ID NO: 46011 - DNA, 80 bp, synthetic construct
  source 1..80: mol_type = other DNA
aaagcactgatgttagagttggagaaggagatcgatctggctatggacatgatgaaaatgatactaattcagaagttgga

SEQ ID NO: 46012 - DNA, 80 bp, synthetic construct
  source 1..80: mol_type = other DNA
gagttgacaaaatttgttatgaggttgttatggtcaccggcgtcttcattaacagtaagaataggagctatgttgtcgct

SEQ ID NO: 46013 - DNA, 80 bp, synthetic construct
  source 1..80: mol_type = other DNA
tgataaaggaaggaaagctcccgacggcaaatcagatcacgaggcttctgatgtcgaaagtaatctgccagtcagagaca

SEQ ID NO: 46014 - DNA, 80 bp, synthetic construct
  source 1..80: mol_type = other DNA
gagaaagcaatggaagtactctgcctattaaggagagtatgcccatcatactcgagaattctccagatcaagcaggaatt

SEQ ID NO: 46015 - DNA, 80 bp, synthetic construct
  source 1..80: mol_type = other DNA
gctgatgatgaagatacggaggagcgactcaatgaactagctcgttggttagaagaatcagatgtggactcgaattataa

SEQ ID NO: 46016 - DNA, 80 bp, synthetic construct
  source 1..80: mol_type = other DNA
catacataagacagccggacatgatctaagtgacaatgatcataatcaaagcatgcccgcttccgcagaacaaggagaga

SEQ ID NO: 46017 - DNA, 80 bp, synthetic construct
  source 1..80: mol_type = other DNA
tgagtggcaagacagatcatgactacccgaaaacaagaccaagcacgcccgtacctaagaccaggcactcactgaaacat

SEQ ID NO: 46018 - DNA, 80 bp, synthetic construct
  source 1..80: mol_type = other DNA
gaatcgaaaagcaacaatgaccctcaagaacaaagcccagctgatcataatgcaccgaagcgacttaaagctataacatc

SEQ ID NO: 46019 - DNA, 80 bp, synthetic construct
  source 1..80: mol_type = other DNA
atacatgaagaaaatagaggaagatgcagaaaagccaacaacaagtgcatcagctaccacaggctccagtgagagtggta

SEQ ID NO: 46020 - DNA, 80 bp, synthetic construct
  source 1..80: mol_type = other DNA
ataagattaaaaaaggcacagaaaagaatatcaactctgttgggatggggaaagaattgacgtcaacgagtggtgcaacc

SEQ ID NO: 46021 - DNA, 80 bp, synthetic construct
  source 1..80: mol_type = other DNA
caagctgcacaccaatcaaaccagacgaaggacaacaggagtgtacttgtgggttatgtccaacctactgcgatgaccca

SEQ ID NO: 46022 - DNA, 80 bp, synthetic construct
  source 1..80: mol_type = other DNA
gctatccttgtatgctgagaaccccggaacaatgattcggaacctcataaatgatccagatattgagatagtagtaattg

SEQ ID NO: 46023 - DNA, 80 bp, synthetic construct
  source 1..80: mol_type = other DNA
gaatgtagtggaatcatcacaaaatgatcaatccacaagcacatatcctacggaaacatttgatgaatatatagatagta

SEQ ID NO: 46024 - DNA, 80 bp, synthetic construct
  source 1..80: mol_type = other DNA
tagtaactaacacttcagagatagatagatttaaaattatatataaaacacaattagatatattagttaagcttgagtca

SEQ ID NO: 46025 - DNA, 80 bp, synthetic construct
  source 1..80: mol_type = other DNA
cttgaggcattatatagcaaaatggtagatatagacacaacactacaagatacaaggaacagagtagatgctttagatcg

SEQ ID NO: 46026 - DNA, 80 bp, synthetic construct
  source 1..80: mol_type = other DNA
tagtgtagggaaattaggtctaagcaattcactaatagagcaaatgattagctcaatgaggatcatgatacctggtactc

SEQ ID NO: 46027 - DNA, 80 bp, synthetic construct
  source 1..80: mol_type = other DNA
catctgtagaaaccaagactgatgtgaaccccacattagtacctgtcgtaggaagaaagaatcagaaagtgagtgatgtg

SEQ ID NO: 46028 - DNA, 80 bp, synthetic construct
  source 1..80: mol_type = other DNA
ataaacatagatatgtcatcagaaatgagaggaccttttgttgctaagagcaatcttgttttggagccacttgacatgac

SEQ ID NO: 46029 - DNA, 80 bp, synthetic construct
  source 1..80: mol_type = other DNA
taaaactaatgcatcacagtttataacagtctgtgataaatccaccaaaaatgcattatatggcctaattataaataggg

SEQ ID NO: 46030 - DNA, 80 bp, synthetic construct
  source 1..80: mol_type = other DNA
tcaaagatgttgatatcaggggtgctcttctcgaaaaattggaagataccaagactgatgcagatatcagaaatctgcac

SEQ ID NO: 46031 - DNA, 80 bp, synthetic construct
  source 1..80: mol_type = other DNA
aaaataattaaggaggtcatagatggtaatctgtgaacacacttattacttataaaagtgttattgccttaattatatag

SEQ ID NO: 46032 - DNA, 80 bp, synthetic construct
  source 1..80: mol_type = other DNA
tattatattataaaagtattttataaggtattatatatccgtatttgtattgtttaactccgtttcacctatactgatta

SEQ ID NO: 46033 - DNA, 80 bp, synthetic construct
  source 1..80: mol_type = other DNA
atgttggggacttcgaaaatggaatcccgaaactagaaaggagaggagatagaggagtcaaccagatggcaagtttcgaa

SEQ ID NO: 46034 - DNA, 80 bp, synthetic construct
  source 1..80: mol_type = other DNA
tcaatgttaactatataatccttaattgatgaaataggtcaaacagggtattttaaaattgatctacatggttattaata

SEQ ID NO: 46035 - DNA, 80 bp, synthetic construct
  source 1..80: mol_type = other DNA
tatgaggatgtcttagtcagaatgaattaacctatcaatcaatggaaactatctaatagattttttgattatcttgaaat

SEQ ID NO: 46036 - DNA, 80 bp, synthetic construct
  source 1..80: mol_type = other DNA
gattgaagtactgtaactcactattaagaaaaacttaagagtcaaagaaatacaattccacaaacaacaaagatccaccg

SEQ ID NO: 46037 - DNA, 80 bp, synthetic construct
  source 1..80: mol_type = other DNA
cacaagatggagagcaccattgacttcaacaaggcgacatgggaagaggggaaacacttgaaatcaatagaggcagaagt

SEQ ID NO: 46038 - DNA, 80 bp, synthetic construct
  source 1..80: mol_type = other DNA
cgataaggacggattcatgatacccaaatacagggtgataaacccaggggggaacgaccggaagaccaacggttatatgt

SEQ ID NO: 46039 - DNA, 80 bp, synthetic construct
  source 1..80: mol_type = other DNA
gggaacgaccggaagaccaacggttatatgtacttgattgcttatggatttgttgaggatgtgcctgaatacaactcaga

SEQ ID NO: 46040 - DNA, 80 bp, synthetic construct
  source 1..80: mol_type = other DNA
atttgttgaggatgtgcctgaatacaactcagatgtcaagaaaccaacaatcagaaccattgctgcgtttccttttggtg

SEQ ID NO: 46041 - DNA, 80 bp, synthetic construct
  source 1..80: mol_type = other DNA
taggagcatcaagttcttcaccagaagatttgctaaaaagtgcatgttcacttgacatctctgttagaaggactgcaggt

SEQ ID NO: 46042 - DNA, 80 bp, synthetic construct
  source 1..80: mol_type = other DNA
tcaacagaaaaaattgtactaggagcacgtgggacactaggcgaacttgcaccatggagctctgtgttatccaatggggc

SEQ ID NO: 46043 - DNA, 80 bp, synthetic construct
  source 1..80: mol_type = other DNA
aattttcaatgctgtcaaaatttgtaataacgtggaattgatccaactcgaaagacctcagagattaagaatctttttcc

SEQ ID NO: 46044 - DNA, 80 bp, synthetic construct
  source 1..80: mol_type = other DNA
tgtctataactttactcactgataaaggtatatacaaagtaccaagaactatcttagatttcagagaacacaatgcagtc

SEQ ID NO: 46045 - DNA, 80 bp, synthetic construct
  source 1..80: mol_type = other DNA
agaatcctcaacaggtctccagctgaacctctctttaatgatccccagaaagataccagtgaactaaatgacccaggaag

SEQ ID NO: 46046 - DNA, 80 bp, synthetic construct
  source 1..80: mol_type = other DNA
tctttcaatctgcttgtctctttgctgttaaatgctgacctaacaagagcaggtatgaagggtatagtggataaggatgg

SEQ ID NO: 46047 - DNA, 80 bp, synthetic construct
  source 1..80: mol_type = other DNA
gaagaggcatgccacatttatgcttcatataggtaattttgtcaggaaagggaaaaaaccttactcaatagagtattgca

SEQ ID NO: 46048 - DNA, 80 bp, synthetic construct
  source 1..80: mol_type = other DNA
aaaagaaagttgacttgatgaatatggtcttctccttaggagcagtaggagggctcagtttccatgtcaagtttaagggg

SEQ ID NO: 46049 - DNA, 80 bp, synthetic construct
  source 1..80: mol_type = other DNA
aaactcagtaagagactaattgcatccatgggatttcataggaatttatgttattccttgatggatataaatcctgggtt

SEQ ID NO: 46050 - DNA, 80 bp, synthetic construct
  source 1..80: mol_type = other DNA
aaataaattgacatggaatcacgaatgtgagataagcaaagtcacagctgtattccaaccatccatcccgaaagatttca

SEQ ID NO: 46051 - DNA, 80 bp, synthetic construct
  source 1..80: mol_type = other DNA
aaatctatgaagatgtcctgattgatgccacaggcaaagtactcaaaaattaagcacctggaaactcttgcatctgatta

SEQ ID NO: 46052 - DNA, 80 bp, synthetic construct
  source 1..80: mol_type = other DNA
taatgtttaccattatctcatctgatttaaaatgtagtagtaggagatattatatttctgagccttcagatcaagagtaa

SEQ ID NO: 46053 - DNA, 80 bp, synthetic construct
  source 1..80: mol_type = other DNA
tctatacctcaagtgtgtacataagttattgtgatcaatgaacttggctattcttataatagtaaatgtcaataaatttt

SEQ ID NO: 46054 - DNA, 80 bp, synthetic construct
  source 1..80: mol_type = other DNA
taatgtctaattattctcatttagcaagtattggaaatttacttgagatatatatgtaattattagtaagccaatgctaa

SEQ ID NO: 46055 - DNA, 80 bp, synthetic construct
  source 1..80: mol_type = other DNA
tcatgctagagtaacaaaaagaaaaaaggtataggattatgcatacatgcttttgattctcaaagaacagatgtaatcta

SEQ ID NO: 46056 - DNA, 80 bp, synthetic construct
  source 1..80: mol_type = other DNA
tgccaagcaatagaatagaaaaaacttaagaatcaaagacatgaatcctcctgtctatgagattccttatgattggagat

SEQ ID NO: 46057 - DNA, 80 bp, synthetic construct
  source 1..80: mol_type = other DNA
acacaagacctactgaagcaccttcaagagacagaagcacaattcaaactcctaataagagatttccgatatattacttt

SEQ ID NO: 46058 - DNA, 80 bp, synthetic construct
  source 1..80: mol_type = other DNA
ctcttgttccttatagcttgtttcttaatctttatagtaggttacactgtgatttacttgctttactgttacggaaaaga

SEQ ID NO: 46059 - DNA, 80 bp, synthetic construct
  source 1..80: mol_type = other DNA
taatcctggatattctcttgaagatcgaagatcatttaaggcgattagttcaagagaggaacagacttttgatcaacccg

SEQ ID NO: 46060 - DNA, 80 bp, synthetic construct
  source 1..80: mol_type = other DNA
gaacaaatacctacccctctcaggggggaggaagtgatcatcgaagaagcaattgtcaagataagcacctaccttgatct

SEQ ID NO: 46061 - DNA, 80 bp, synthetic construct
  source 1..80: mol_type = other DNA
ccctctcaggggggaggaagtgatcatcgaagaagcaattgtcaagataagcacctaccttgatctcagaagaatccatt

SEQ ID NO: 46062 - DNA, 80 bp, synthetic construct
  source 1..80: mol_type = other DNA
cagaagaatccattttaatacttctaatcctgaccgacagttggcattcaatcttctagatataatactggtatcattac

SEQ ID NO: 46063 - DNA, 80 bp, synthetic construct
  source 1..80: mol_type = other DNA
tggattatttttgggttaaatatcaggagattaggccaggagataattgatttctcttatataattaaagtacacaaaga

SEQ ID NO: 46064 - DNA, 80 bp, synthetic construct
  source 1..80: mol_type = other DNA
aagggtgagttgattggttgtcagtcacataattgaactctaaattatttctaattccaaattataatccagatgcagaa

SEQ ID NO: 46065 - DNA, 80 bp, synthetic construct
  source 1..80: mol_type = other DNA
tagttgcatcctgtttattgctataactttatttggattttgtgtttatctactatatctatatataagattgattagag

SEQ ID NO: 46066 - DNA, 80 bp, synthetic construct
  source 1..80: mol_type = other DNA
acacagctgaagagagtgaaggcaaaagatgggccaaatatgttcaacagaaacgagtagacccagaatattcaaccaat

SEQ ID NO: 46067 - DNA, 80 bp, synthetic construct
  source 1..80: mol_type = other DNA
gattgatgatctattttgatgtaatttaattactaaagtgtttcattaattagcaattgtggaaatctaatatttattat

SEQ ID NO: 46068 - DNA, 80 bp, synthetic construct
  source 1..80: mol_type = other DNA
cattgaataaataatttaattgtcaaatttgagaacagatcttaaagattgaaaagatcaatacacaaaataatacaatg

SEQ ID NO: 46069 - DNA, 80 bp, synthetic construct
  source 1..80: mol_type = other DNA
gagttaatcaagaattactgccttatttatttaattttctactcctcgacattaattagacctttgcaagctggtctaga

SEQ ID NO: 46070 - DNA, 80 bp, synthetic construct
  source 1..80: mol_type = other DNA
ctatgaagctcttgctagtattggggtgataaaaggaccatcttataattacaaaattcgcggcacaccgtcaaccaaac

SEQ ID NO: 46071 - DNA, 80 bp, synthetic construct
  source 1..80: mol_type = other DNA
tcttagtgattaaactgattcctaatgtaggatcccttgacaattgtactcaaaaacagatgtctgattatagagcacta

SEQ ID NO: 46072 - DNA, 80 bp, synthetic construct
  source 1..80: mol_type = other DNA
gtgaaaaatgtattaaccccagtctctgagtcgctcaaaacaatgctaaattacatagaacagcagagtaatggagtaag

SEQ ID NO: 46073 - DNA, 80 bp, synthetic construct
  source 1..80: mol_type = other DNA
actgataggagctgtattagcaggagcagctctaggagtagcaacaggggcggcgataacagcagggattgcactacaca

SEQ ID NO: 46074 - DNA, 80 bp, synthetic construct
  source 1..80: mol_type = other DNA
aatcaaatcaaaatgcgcaagcaattgctcaacttaaggattctatcaagaatactaacatggcagtgcaaaccttaaaa

SEQ ID NO: 46075 - DNA, 80 bp, synthetic construct
  source 1..80: mol_type = other DNA
cttgcaaatcaagagatcctaggggttgtcgactcactaagaggacagataaatacacaaataatacctgtcctgaatca

SEQ ID NO: 46076 - DNA, 80 bp, synthetic construct
  source 1..80: mol_type = other DNA
attgagttgtgatacagtgggtttaacattaggtataaaattaactcaatattattcggaaatactgacagcatttggac

SEQ ID NO: 46077 - DNA, 80 bp, synthetic construct
  source 1..80: mol_type = other DNA
ccaagatggattagcagggttcgagaattaatttcatctgatctttcagtgagaaagttcatggtcgagatcttaattga

SEQ ID NO: 46078 - DNA, 80 bp, synthetic construct
  source 1..80: mol_type = other DNA
ctgcaatccaggaccctgttaattccaaattgactattcaggcaatatcaggtgcatttagtggcaattttgatgaaatg

SEQ ID NO: 46079 - DNA, 80 bp, synthetic construct
  source 1..80: mol_type = other DNA
atgaaagtgatgggctatacagggtcagacctacatgatattcttcaaggagatcttatcactggcaatataataggtgt

SEQ ID NO: 46080 - DNA, 80 bp, synthetic construct
  source 1..80: mol_type = other DNA
ggatcctgatgtaggttatatagccctggagatacattttcctacactgacagagatacctaatgctgtgatacaagagt

SEQ ID NO: 46081 - DNA, 80 bp, synthetic construct
  source 1..80: mol_type = other DNA
taatgccaataagtttcaatgataaaggtgatgaatggatggcattagtccctaggtatgtgcttctgagaacaacatat

SEQ ID NO: 46082 - DNA, 80 bp, synthetic construct
  source 1..80: mol_type = other DNA
gtatctaatatagacatatcgaaatgcctactgacagaaagaagtgtgatctgctacaacgactatgctacaccaatgtc

SEQ ID NO: 46083 - DNA, 80 bp, synthetic construct
  source 1..80: mol_type = other DNA
atttgatgtgcttagatgcttgaccgggaacttgacattctgtcctagagaacaaataattgcaagtcatgtacccaaat

SEQ ID NO: 46084 - DNA, 80 bp, synthetic construct
  source 1..80: mol_type = other DNA
ttgcattatctggaggtgtaatttatgctaactgcctgagtgcagtttgtcgctgtgcagtggatggtgtacctatagtt

SEQ ID NO: 46085 - DNA, 80 bp, synthetic construct
  source 1..80: mol_type = other DNA
cagtcacttaagacaaccataatgatgttggataataagaactgtagagtataccaaattggtgaactactgatatccac

SEQ ID NO: 46086 - DNA, 80 bp, synthetic construct
  source 1..80: mol_type = other DNA
aggtgcttacttagggagtgtcgagtttaagaatgaaaatattgaattaggtcctcctattgtagtagacaagatagatc

SEQ ID NO: 46087 - DNA, 80 bp, synthetic construct
  source 1..80: mol_type = other DNA
tgggaggccaaattgcagggatcaatcaaacacttcaaggagttgaagactatatagataaatcaaacgagattcttgat

SEQ ID NO: 46088 - DNA, 80 bp, synthetic construct
  source 1..80: mol_type = other DNA
caagtgaaccccagtgttacatcattgggtgccatgattatagtttatatctttatagctttagcaatattgataggatt

SEQ ID NO: 46089 - DNA, 80 bp, synthetic construct
  source 1..80: mol_type = other DNA
aaacacaaaaatggaaaattctctcaagaaggagacagagttgttcagggagtatcaagcaaacctgggaagacatggta

SEQ ID NO: 46090 - DNA, 80 bp, synthetic construct
  source 1..80: mol_type = other DNA
gattgcattaatgattgatgtaaaactcaactcacaaattaagatactaattaatcaatctataatcaatcagatgaggg

SEQ ID NO: 46091 - DNA, 80 bp, synthetic construct
  source 1..80: mol_type = other DNA
ccggacttgagaatccaggatatagtaaaagtttaccatcgtttagttctacagtttctaagggaagttctcaagaactt

SEQ ID NO: 46092 - DNA, 80 bp, synthetic construct
  source 1..80: mol_type = other DNA
ataaacacacattgattagtaatatataattactaagtgatgatgagaagaagatattgttattttaattatatcaatca

SEQ ID NO: 46093 - DNA, 80 bp, synthetic construct
  source 1..80: mol_type = other DNA
tatgatattataccatttatttatttctctattcacaaaggttagtctaggtcactaatataattatgaagttattatga

SEQ ID NO: 46094 - DNA, 80 bp, synthetic construct
  source 1..80: mol_type = other DNA
gactagatataaataaaataattataactgattatgaggacttcatcaatttacatctcatacatatataattctacctc

SEQ ID NO: 46095 - DNA, 80 bp, synthetic construct
  source 1..80: mol_type = other DNA
cagacattggtaattacatagaagagacagggatggcagggttcttcttaacaatcaagtacggattagagactaggtat

SEQ ID NO: 46096 - DNA, 80 bp, synthetic construct
  source 1..80: mol_type = other DNA
actaaatctgaacagctttgctatgcaataaaatgcactaataaggaatcatctctattgactatacattaagattatta

SEQ ID NO: 46097 - DNA, 80 bp, synthetic construct
  source 1..80: mol_type = other DNA
atgaatagtaggttatagttattaattaagaaaaacttaagaatcaaagatctaatctttgaactcacctcactaatctc

SEQ ID NO: 46098 - DNA, 80 bp, synthetic construct
  source 1..80: mol_type = other DNA
aactgataacctatctgagaaaattggtgtgacagtcaatagaaacaattactaactcttgcataattaactcaaattag

SEQ ID NO: 46099 - DNA, 80 bp, synthetic construct
  source 1..80: mol_type = other DNA
ttactatctttgataaggaaaatgtctaaagttgatacaagcaaaacaacttcgaccactaactcgaggaaatattatgg

SEQ ID NO: 46100 - DNA, 80 bp, synthetic construct
  source 1..80: mol_type = other DNA
agtcgaaagtgttgaaaaatttgctgatggggttactaataataagatattcattctggctaacatgctcctaataatca

SEQ ID NO: 46101 - DNA, 80 bp, synthetic construct
  source 1..80: mol_type = other DNA
tgagttctattgtgatgataagtctgaatattaccaacctcgaaaatctgaataatcaaaagacttcattaaaaatatta

SEQ ID NO: 46102 - DNA, 80 bp, synthetic construct
  source 1..80: mol_type = other DNA
aatgacgatgtgaataacaagttggagcagattgatacattagaccaaattgtcaaaggcgaaataaagcctaagttaac

SEQ ID NO: 46103 - DNA, 80 bp, synthetic construct
  source 1..80: mol_type = other DNA
attagtcaattctgcagttagtgtaaccataccaagccagttgtccaatcttgcaaccaagttaaacaaccaaattaaga

SEQ ID NO: 46104 - DNA, 80 bp, synthetic construct
  source 1..80: mol_type = other DNA
ctctggaagtggcagtaaacaaacaatgctcaggtaacattctaggagggcttctaacacctaaaccaccagaagggggt

SEQ ID NO: 46105 - DNA, 80 bp, synthetic construct
  source 1..80: mol_type = other DNA
gatgtaataaatcctgatgataatagcactggtgataacacagatgacttagagggcgacatgagacctttgaatttagc

SEQ ID NO: 46106 - DNA, 80 bp, synthetic construct
  source 1..80: mol_type = other DNA
gatgtgcttgccattaacgaattccaggctgatattaacacactgcaaacattaatgagaacatataggggtctaggaat

SEQ ID NO: 46107 - DNA, 80 bp, synthetic construct
  source 1..80: mol_type = other DNA
tcagttgaatgattgctcaaactacccgcaagcaccacaaccaactttcgcaattgaccctgaccttcaccctatgccag

SEQ ID NO: 46108 - DNA, 80 bp, synthetic construct
  source 1..80: mol_type = other DNA
aattgacagagccaattcagctcaagaatcattgtgctgtgtttccaacagtggccttaggtgagtcaatttatgtgtat

SEQ ID NO: 46109 - DNA, 80 bp, synthetic construct
  source 1..80: mol_type = other DNA
tcacatcagattagaaaaaccccatgcaagtcggaagacaccatccaccaaagggtaagcataggaaggatcgtcgacag

SEQ ID NO: 46110 - DNA, 80 bp, synthetic construct
  source 1..80: mol_type = other DNA
agggttctcagggcctcgagcttcaccgttatcaacctgggatcttcaagaaacaggttatttaagttcatgttctgtcg

SEQ ID NO: 46111 - DNA, 80 bp, synthetic construct
  source 1..80: mol_type = other DNA
ccgcatccggagaaacaggctgggtgttgtgtgtgaccacggataaattcactggggccacagtatatttaggcccttat

SEQ ID NO: 46112 - DNA, 80 bp, synthetic construct
  source 1..80: mol_type = other DNA
acaggtcttaaactatataagcttagcgtaagaggccaaaaagaagagtatgctataacagctaacgatataacatcaga

SEQ ID NO: 46113 - DNA, 80 bp, synthetic construct
  source 1..80: mol_type = other DNA
tgctacgttaattgctttgacgctaacaagaggctcaggtgtttcaaagaacaacaagctaatattcttaggaatagcag

SEQ ID NO: 46114 - DNA, 80 bp, synthetic construct
  source 1..80: mol_type = other DNA
ctgtaagagatgcagacagaacaggtgtgttgtgccctgattggaaatgtgataacatcaataataacatcaattcatgt

SEQ ID NO: 46115 - DNA, 80 bp, synthetic construct
  source 1..80: mol_type = other DNA
gttcattcttataggttgacatcagacaataacaattactttatgaatgttgttgttacagttgatgtgtctcctgctgg

SEQ ID NO: 46116 - DNA, 80 bp, synthetic construct
  source 1..80: mol_type = other DNA
gaaaatgatagccagtgtaagtctattacctatgagtgaatcatacattggatctgagggaagtgttatagataagccag

SEQ ID NO: 46117 - DNA, 80 bp, synthetic construct
  source 1..80: mol_type = other DNA
caaggctccctacatggtcctgttagaagagtccatacagaccaagtttgctccaggaaattatcccttactatggagct

SEQ ID NO: 46118 - DNA, 80 bp, synthetic construct
  source 1..80: mol_type = other DNA
gaccagtcagtcatgcttgatgattcaaaggggttctctgtgtgagagggggtgagaactggaggaatgatgtgaagtac

SEQ ID NO: 46119 - DNA, 80 bp, synthetic construct
  source 1..80: mol_type = other DNA
aaaatatgaacaagtattgattgcactgatggttatctattatgcactaatataaaatatattcaggggttcataatcat

SEQ ID NO: 46120 - DNA, 80 bp, synthetic construct
  source 1..80: mol_type = other DNA
tgtttactaattggggatttacgggtttaaataacatgatcatatcagggtttactaatcatcaggttaatcagggttta

SEQ ID NO: 46121 - DNA, 80 bp, synthetic construct
  source 1..80: mol_type = other DNA
actggaatagggtatcacatatatagtttagtttaattattagggatcactaatggcacttatgaatgtattagtataat

SEQ ID NO: 46122 - DNA, 80 bp, synthetic construct
  source 1..80: mol_type = other DNA
caactgctgcttgttattatcaccggcattaaataaatatagttagagtttggtatatatagtaagcatttaaaattgtg

SEQ ID NO: 46123 - DNA, 80 bp, synthetic construct
  source 1..80: mol_type = other DNA
gatttatatatttatttagtgggcccaacaatgtgaaactgagctatcctttttctttttcaccactatttctcttactt

SEQ ID NO: 46124 - DNA, 80 bp, synthetic construct
  source 1..80: mol_type = other DNA
ggattgggcagatcggattagagagtttatggaaaaagaatgcccctttattaaaccagaggtcaagccaggaacaccag

SEQ ID NO: 46125 - DNA, 80 bp, synthetic construct
  source 1..80: mol_type = other DNA
cacaggaggctgaattcttaaagaggaataaagtctattttatgcagcgacaagatgtgcttgataaaaaccatgtggct

SEQ ID NO: 46126 - DNA, 80 bp, synthetic construct
  source 1..80: mol_type = other DNA
ggatgattatggatacgagcagtataaaagcaaaaattataaacttaggattcaggacatcctatattggatccggtcct

SEQ ID NO: 46127 - DNA, 80 bp, synthetic construct
  source 1..80: mol_type = other DNA
tctgtgtgatagagccgtaatgtcttttgggagtgaggaatctctaatttcaaatgcatatctcaaggttaatgatgttg

SEQ ID NO: 46128 - DNA, 80 bp, synthetic construct
  source 1..80: mol_type = other DNA
ctagtggaaagccgaccatcataagtcagacttttccgccatctgattcctacaaaggttccaatgggaggatatataca

SEQ ID NO: 46129 - DNA, 80 bp, synthetic construct
  source 1..80: mol_type = other DNA
ataggagaacgatatggaatatatctggctccttcgtcatggaacagatacctcagatttggtctaacacctgatatatc

SEQ ID NO: 46130 - DNA, 80 bp, synthetic construct
  source 1..80: mol_type = other DNA
tgtaagatctacaacatggctgaaggaaaaggaccctataatgaaggtcttaaccacatgtactaatacagacaaagata

SEQ ID NO: 46131 - DNA, 80 bp, synthetic construct
  source 1..80: mol_type = other DNA
tgtgccctgagatttgtaacacacgaggttatcaggatatattccctctgtctgaagactccagtttttacacttacata

SEQ ID NO: 46132 - DNA, 80 bp, synthetic construct
  source 1..80: mol_type = other DNA
cgtgctccatatatggtgttacttgaggattcaatccagaccaagtttgcaccagggaattatccgctactgtggagttt

SEQ ID NO: 46133 - DNA, 80 bp, synthetic construct
  source 1..80: mol_type = other DNA
gggattacacctagtaatgaaggtacaaagagttttgttgcagttaaggatgatgcaggacatgttgcatccataacaat

SEQ ID NO: 46134 - DNA, 80 bp, synthetic construct
  source 1..80: mol_type = other DNA
actcccaaattactatagtataacatctgccacgattagttgtttcatgtacaaagaggagatatggtgtatagcagtta

SEQ ID NO: 46135 - DNA, 80 bp, synthetic construct
  source 1..80: mol_type = other DNA
ccgagggacgaaaacagaaagaaaatcctcaaagaatatatgcccactcataccgagttcaaaaaatgtgttttaacata

SEQ ID NO: 46136 - DNA, 80 bp, synthetic construct
  source 1..80: mol_type = other DNA
aaaccggcatcagtcgtgacaagtctaccaagtaatgtgaccatccgttcttaatcaaatataatttggattgatatatg

SEQ ID NO: 46137 - DNA, 80 bp, synthetic construct
  source 1..80: mol_type = other DNA
gatcaactacctcacagataattcttacatacgatgatgctgtgaatcttaatttttagctgattaaatcaaatgacatc

SEQ ID NO: 46138 - DNA, 80 bp, synthetic construct
  source 1..80: mol_type = other DNA
tcataatttattgatttctacaatattttccaacatgtgtgatcattaaatgaaatgattctatcaatacttgtttgtct

SEQ ID NO: 46139 - DNA, 80 bp, synthetic construct
  source 1..80: mol_type = other DNA
tccttggatgtatttgtgatatagtgcaatattaaaggattttgatccttttgtaagctgaatcagtgaggactattcac

SEQ ID NO: 46140 - DNA, 80 bp, synthetic construct
  source 1..80: mol_type = other DNA
aacactggtgcaatcaacaatagaactcagggcattaatcaatggtaaaactgtgattttgtgattatatggtactgtta

SEQ ID NO: 46141 - DNA, 80 bp, synthetic construct
  source 1..80: mol_type = other DNA
agaatcttgtgggtatcctttttgtttactttcgtgtgacaaactttttgggagtagtattctgtctcttgtattcatag

SEQ ID NO: 46142 - DNA, 80 bp, synthetic construct
  source 1..80: mol_type = other DNA
gtgtaatttactgttaaggtcataaataaaataagataacccccgcttgctatggtgcttgaactgctctccagttaata

SEQ ID NO: 46143 - DNA, 80 bp, synthetic construct
  source 1..80: mol_type = other DNA
cgcaatgggggtgggaaccacactggacagatctatgggagccttgaatattaatagatcctatcttgagcctatatatt

SEQ ID NO: 46144 - DNA, 80 bp, synthetic construct
  source 1..80: mol_type = other DNA
attggtttaaatactccatttattgtctctatcattgatcaattatgaaaaacttagggttcatgaagtttaaaaaaccc

SEQ ID NO: 46145 - DNA, 80 bp, synthetic construct
  source 1..80: mol_type = other DNA
actcggaaacaacaacccacaagacaagccaatccgacccaaaccaaccaaccacacacaaaaggtcacgaatctgacct

SEQ ID NO: 46146 - DNA, 80 bp, synthetic construct
  source 1..80: mol_type = other DNA
tgacaactattagtacactcttacaaccaaacaatttctcttaaatataagatcaacaacaagagattttaaagcctccc

SEQ ID NO: 46147 - DNA, 80 bp, synthetic construct
  source 1..80: mol_type = other DNA
atatatttctaaatgttgtagaaatccatattcaacaatgaatttcagtgatgtttcaatctctgacatcttgtaccctg

SEQ ID NO: 46148 - DNA, 80 bp, synthetic construct
  source 1..80: mol_type = other DNA
agtgtcatttaaacagtcctatagtaacaggaaaaattgtccaggctgtacggttcagtgagattccatgcaatcagata

SEQ ID NO: 46149 - DNA, 80 bp, synthetic construct
  source 1..80: mol_type = other DNA
cttatagatccgactctgaatgatgtcattgatataaaattaaggtccaataaacaaggcttgataagacgaaggcaaaa

SEQ ID NO: 46150 - DNA, 80 bp, synthetic construct
  source 1..80: mol_type = other DNA
agagtatgggttattactcaaacaagttgcaggtgatattacatcttaccagcatataccttatcctgaatgtaatacca

SEQ ID NO: 46151 - DNA, 80 bp, synthetic construct
  source 1..80: mol_type = other DNA
gattattttatattcatgaccctagcttggtggactgcttgactgaaattatgacccatgccaatcaatgttatttgaaa

SEQ ID NO: 46152 - DNA, 80 bp, synthetic construct
  source 1..80: mol_type = other DNA
atttcgtctagaatattggatctgctagacaagacagagtgtagtttgactgggataggctctagggatgatgacgaaac

SEQ ID NO: 46153 - DNA, 80 bp, synthetic construct
  source 1..80: mol_type = other DNA
ccgcataatatacaacaatatagagacattgccaaaaattatggctcagagtaggtggtataaatcattcttattttggt

SEQ ID NO: 46154 - DNA, 80 bp, synthetic construct
  source 1..80: mol_type = other DNA
tcaaactaggacaaaatgcagccagaaagaatgcgggctctatagataggaaactagcagaagagttaggactgacccag

SEQ ID NO: 46155 - DNA, 80 bp, synthetic construct
  source 1..80: mol_type = other DNA
ttacagttaagacagagatgaggaacaacatcaaagagaataaaaaatactcgaaacacaatcgaccgcatatcactcag

SEQ ID NO: 46156 - DNA, 80 bp, synthetic construct
  source 1..80: mol_type = other DNA
ctcagtggaaaacaactatatgtccagattaatatgaatctgatttccattatagaatgggacaaaaaatgtatctacca

SEQ ID NO: 46157 - DNA, 80 bp, synthetic construct
  source 1..80: mol_type = other DNA
cttgactccagaacttgtcttgatgtattgcgatgttcttgaaggaagattgatgatagatacggtaatgcaagcagaca

SEQ ID NO: 46158 - DNA, 80 bp, synthetic construct
  source 1..80: mol_type = other DNA
cgaggtaccacccactatgtgaacgtgcacatcagctgtgggaattattagatctgatgtttgaagaattgggaaataac

SEQ ID NO: 46159 - DNA, 80 bp, synthetic construct
  source 1..80: mol_type = other DNA
atgtataatctaatatctatgattgaaccattgaccttaggtatattacaactccaggataaagctgtcgccttggttgg

SEQ ID NO: 46160 - DNA, 80 bp, synthetic construct
  source 1..80: mol_type = other DNA
gagcttcctctctttctgtataaacgagataaaggaggagctgattaaaaatgggtttaatgatgaacaggatataaatg

SEQ ID NO: 46161 - DNA, 80 bp, synthetic construct
  source 1..80: mol_type = other DNA
agtttacttcacggataattaatatcatgtctattcctgatattcatcttgtcgcagagtttttctcatttttcagaacc

SEQ ID NO: 46162 - DNA, 80 bp, synthetic construct
  source 1..80: mol_type = other DNA
tttggtcatcctactctagaggctctcactgcagcagaaaaagtaaggactcatatgcaaaagccaaaaatcttagagtt

SEQ ID NO: 46163 - DNA, 80 bp, synthetic construct
  source 1..80: mol_type = other DNA
tttgcctatcatgaaagcccacgctatattctgtgggatcatcatcaatgggtatagggataggcatggtggtgcttggc

SEQ ID NO: 46164 - DNA, 80 bp, synthetic construct
  source 1..80: mol_type = other DNA
cacctgttgtgttccctgagcatgcatctgtactgataaagagattacataacagtagtgaagcactaacccatgaaatt

SEQ ID NO: 46165 - DNA, 80 bp, synthetic construct
  source 1..80: mol_type = other DNA
gagcaagccaacgagatcaaggagatgatgcaggaagtaacaacccagagacacgagacaaatgtgcaagcacgagaagg

SEQ ID NO: 46166 - DNA, 80 bp, synthetic construct
  source 1..80: mol_type = other DNA
tgctgtcaagaatggaaatctttctgtgggtttaaatttaagtgtttccttccattagaattagatagtgatcttagtat

SEQ ID NO: 46167 - DNA, 80 bp, synthetic construct
  source 1..80: mol_type = other DNA
gtacatgaaggataaggctctttcaccaatcaaagatgaatgggattcagtgtacccttctgaatctatgtgttacagtc

SEQ ID NO: 46168 - DNA, 80 bp, synthetic construct
  source 1..80: mol_type = other DNA
cccctaattcaactacatctagaagacttgttgatgtatttgtcaacgatgcagattttgacccatacgagataatagat

SEQ ID NO: 46169 - DNA, 80 bp, synthetic construct
  source 1..80: mol_type = other DNA
tatgtcttatctggtaaatacaaaacagatcctgagttcaacatctcatacagtttgaaggaaaaggagacaaaacaagc

SEQ ID NO: 46170 - DNA, 80 bp, synthetic construct
  source 1..80: mol_type = other DNA
caaatggtattggaaagtactttaaagaaaatgggatggtaaaagatgagcatgaactgctaaagagccttcatcaacta

SEQ ID NO: 46171 - DNA, 80 bp, synthetic construct
  source 1..80: mol_type = other DNA
tcggcctcatcagttccaaagaatgaaggattcaatgaggacaattggaaaattgacaagaaaccgtttcgtaagattga

SEQ ID NO: 46172 - DNA, 80 bp, synthetic construct
  source 1..80: mol_type = other DNA
gggtagagattgtctgagtaaagaaaataaaacattacttaattcaaaagtgattactaatacaataggacaaaaccatt

SEQ ID NO: 46173 - DNA, 80 bp, synthetic construct
  source 1..80: mol_type = other DNA
tcaatacttccttgcaaaacaaacaacccagaacacctaagagcaggtcagccagaaacaaaaataagtacagtcttcag

SEQ ID NO: 46174 - DNA, 80 bp, synthetic construct
  source 1..80: mol_type = other DNA
aatgcaatttccgattatataacccgtgattatacattacaagatcacaccaatacagctgtcgacaaatcagaggaaaa

SEQ ID NO: 46175 - DNA, 80 bp, synthetic construct
  source 1..80: mol_type = other DNA
gtatgacacaataagctcatttttaaccacagatttgcaaaagttttgtttgaattggagatacgaatctacagcattat

SEQ ID NO: 46176 - DNA, 80 bp, synthetic construct
  source 1..80: mol_type = other DNA
taaattcaatgttgccgctgggggtattgagtcactattgaccaatgacgatgacgagattactagttcaagatacttct

SEQ ID NO: 46177 - DNA, 80 bp, synthetic construct
  source 1..80: mol_type = other DNA
tcgcagagagggtagatgaaatttatggtcttccaggattctttaattggttgcataatagattagagaattgcacatta

SEQ ID NO: 46178 - DNA, 80 bp, synthetic construct
  source 1..80: mol_type = other DNA
tatgttgctgatccttactgtccaccgccttttacagctcatattgatttagatgatgtgccagacgaaggaatgttcat

SEQ ID NO: 46179 - DNA, 80 bp, synthetic construct
  source 1..80: mol_type = other DNA
ccgacatcccatgggaggtatagaaggttacagccaaaaattatggaccataataactatcccttttttatttttaagtg

SEQ ID NO: 46180 - DNA, 80 bp, synthetic construct
  source 1..80: mol_type = other DNA
gtgtggaaacaaatacaagggttgctgctgtcgttcaaggtgacaatcaatcaattgcgataactcatagagtgcaccca

SEQ ID NO: 46181 - DNA, 80 bp, synthetic construct
  source 1..80: mol_type = other DNA
aacatgtcttatatagcaaaaaagaatgttagtgcagagaaagcaaagatctactttgaacgactcagatctaacctcga

SEQ ID NO: 46182 - DNA, 80 bp, synthetic construct
  source 1..80: mol_type = other DNA
tgcccttggtcataatctgaaattaaccgagacaataattagtacccatttctttgtttattctaagaggatttattatg

SEQ ID NO: 46183 - DNA, 80 bp, synthetic construct
  source 1..80: mol_type = other DNA
acgggatggttctctctcaaggtttaaaatctgtgtccagatgtgtattctggtcagaaacattagtcgatgagacaaga
